United States Patent Application Publication US 2006/0134663 A1 - sequence listing, part 88

SEQ ID NO: 249858 - DNA, 842 bp, Homo Sapiens
  misc_feature (672)..(700): n is a, c, g, or t
  misc_feature (782)..(782): n is a, c, g, or t
  misc_feature (806)..(806): n is a, c, g, or t
ggggggctgccgctggctcttcgcacgcggccatggccgactccgagctgcagctggttgagcagcggatccgcagcttccccgacttccccaccccaggcgtggtattcagggacatctcgcccgtcctgaaggaccccgcctccttccgcgccgccatcggcctcctggcgcgacacctgaaggcgacccacgggggccgcatcgactacatcgcaggcctagactcccgaggcttcctctttggcccctccctggcccaggagcttggactgggctgcgtgctcatccgaaagcgggggaagctgccaggccccactctgtgggcctcctattccctggagtacgggaaggctgagctggagattcagaaagacgccctggagccaggacagagggtggtcgtcgtggatgatctgctggccactggtgtatgagtgaccacagggcctcccagcccaacatctccagctggatcccagggaaatatcagccttgggcaactgcagtgaccaggggcaccggctgcccacagggaacacattcctttgctggggttcagcgcctctcctggggctggaagtgccaaagcctggggcaaagctgtgtttcagccacactgaacccaattacacacagcggggagaacgcaggtaaacagcctttcccccnnnnnnnnnnnnnnnnnnnnnnnnnnnnnaaaacatgtcgggccggcctcgggccccctcgagaagcttttcttagaccatttcggtttgggcggcggccgggcccccagnaaggggtaaggtggaacattgggncccaataaccttgggttttccctagagggaagattc

SEQ ID NO: 249859 - DNA, 856 bp, Homo Sapiens
  misc_feature (315)..(315): n is a, c, g, or t
gggcttcgcacgcggccatggccgactccgagctgcagctggttgagcagcggatccgcagcttccccgacttccccaccccaggcgtggtattcagggacatctcgcccgtcctgaaggaccccgcctccttccgcgccgccatcggctcctggcgcgacacctgaaggcgacccacgggggccgcatcgactacatcgcaggcctagactcccgaggcttcctctttggcccctccctggcccaggagcttggactgggctgcgtgctcatccgaaagcgggggaagctgccaggccccactctgtgggcctncctattccctggagtacgggaaggctgagctggagattcagaaagacgccctggagccaggacagagggtggtcgtcgtgggatgatctgctgggccactggttggaaccatggaacgctggcctgtgagctgctggggccgcctgcaggctgaggtcctggagggcgtgagccctggtggagctgacctccccttaaggcagggagaagctggcacctgtacccttcttctctctcctggaggatgagtgaccaaggggcctcccagccccaaatctccagctgggatcccagggaaatatcggccttgggcaactgcaggggaccaggggccccggctgccccacgggaacacacttcctttggctgggggtccaacgccctctcctgggggctggaaatggccaaagcctggggccaaacttgtgtttccgcccccccggaaccccattaccacaccggggggaagacgcacgtaaaccccttttcccccccgcaggggagagtcgccatacgtagcggctccttgtcgggccgccct

SEQ ID NO: 249860 - DNA, 794 bp, Homo Sapiens
gagcgccgcccagcagccagtgggttcccgcgcgtgccgagactctgaggccttgcacccccacgatcccgtacgatggccgtcaagaagatcgcgatcttcggcgccactggccagaccgggctcaccaccctggcgcaggcggtgcaagcaggttacgaagtgacagtgctggtgcgggactcctccaggctgccatcagaggggccccggccggcccacgtggtagtgggagatgttctgcaggcagccgatgtggacaagaccgtggctgggcaggacgctgtcatcgtgctgctgggcacccgcaatgacctcagtcccacgacagtgatgtccgagggcgcccggaacattgtggcagccatgaaggctcatggtgtggacaaggtcgtggcctgcacctcggctttcctgctctgggaccctaccaaggtgcccccacgactgcaggctgtgactgatgaccacatccggatgcacaaggtgctgcgggaatcaggcctgaagtacgtggctgtgatgccgccacacataggagaccagccactaactggggcgtacacagtgaccctggatggacgagggccctcaagggtcatctccaaacatgacctgggccatttcatgtgcgctgcctcaccaccgatgagtacgacggacacagcacctacccctcccaccagtaccagtagcactctgtccccatctgggagggtggcattctgggacatgaggagcaaaggaagggggcaataaatgttgagccaagagcttcaaattactctagaaaa

SEQ ID NO: 249861 - DNA, 1397 bp, Homo Sapiens
  misc_feature (21)..(21): n is a, c, g, or t
  misc_feature (135)..(135): n is a, c, g, or t
  misc_feature (356)..(501): n is a, c, g, or t
acattcgattgccccttcctnttgctcctcatgtcccagaatgccaccctcccagatggggacagagtgctactggtactggtgggaggggtaggtgctgtgtccgtcgtactcatcggtggtgaggcagcgcanatgaaatggcccaggtcatgtttggagatgacccttgagggccctcgtccatccagggtcactgtgtacgccccagttagtggctggtctcctatgtgtggcggcatcacagccacgtacttcaggcctgattcccgcagcaccttgtgcatccggatgtggtcatcagtcacagcctgcagtcgtgggggcaccttggtagggtcccagagcaggaaagnnnnnnnnnnnnnnnnnnnnnnnnnnnnnnnnnnnnnnnnnnnnnnnnnnnnnnnnnnnnnnnnnnnnnnnnnnnnnnnnnnnnnnnnnnnnnnnnnnnnnnnnnnnnnnnnnnnnnnnnnnnnnnnnnnnnnnnnnnnnnnnnnncctcaaaataaccataaataaataaataaatgattatacagggcaactatttgcttaatgtctgtgtccccataatcgggagctctgtgagggcagagacctagtgtctatccacagctctatcacttcctctgggaggcctaccctgacctctctcagcctaagtcggacgcctcctctgggctcccatagtcctgtagtttctcccattgtggccctatcccctctgcctgcctcccccatcccagctccgatgatctggatgtcagtttgatcatggatctgtttaccacctctctctgtgagccttgtgtgagcagggcccagggctgtacaggtcaccactgtgtccccagcatcacccagtaagggtcaggcacacagctggtgttcagtaaatgcacagtaacatggaatggcttcagcgtcacctttcagaggcccctgggctgcctccccagtaccccccagttcagccccacctccatgatcccaccacccacccgaggtgcaggccacgaccttgtccacaccatgaaccttcatggctgccacaatgttccgggcgccctcggacatcactgtcgtgggactgaggtcattgcgggtgcccagcagcacgatgacagcgtcctgcccagccacggtcttgtccacatcggctgcctgcagaacatctcccactaccacgtgggccgccggggcccctctgatggcagcctggaggagtcccgcaccagcactgtcacttcgtaacctgcttgcaccgcctgcgccagggtggtgagcccggtctggccagtggcgccgaagatcgcgatcttcttgacggccatcgtacgggatcgtgggggtgcaaggcctcagagtctcggcacgcgcgggaacccactccc

SEQ ID NO: 249862 - DNA, 657 bp, Homo Sapiens
  misc_feature (64)..(64): n is a, c, g, or t
  misc_feature (76)..(76): n is a, c, g, or t
  misc_feature (169)..(170): n is a, c, g, or t
  misc_feature (205)..(205): n is a, c, g, or t
actagctgtgctcactggcatatcccactctgcccttgtgtgcactcacagctgccctctgggntctccagacaanctggcccaccaggacactcagctcgggtgaaaggtgaaattagtcaaactctgaaatgccagaaccgtaatcctcactatcatttattcaganncagaaaaagtggccaggtggctgagatcacctacngcagaaggtgatggagaaggagactgagaagaagatttcagaaattgaagatgctgcatttctggcccgggagaaggcaaaggcagatgctgagtgctacactgcttatgaaaatagccgaagccaataagctgaagctaacccctgaatatctgcagctgatgaagtacaaggccattgcttccaacagcaagatttactttggcaaagacattcctaacatgttcatggactctgcgggcagtgtgagcaagcagtttgaggggctagctgacaagctaagctttggcttagaagatgaacccttggagacggccactaaggagaattgaaaaaaacttgatatgactgcaaatgatacttaagcagatctttattttttaagatgaatcagaatgttcctccctccccgactaccttctctgactgtcttccagttactgtggtgaaaa

SEQ ID NO: 249863 - DNA, 540 bp, Homo Sapiens
  misc_feature (79)..(88): n is a, c, g, or t
atgatatttcgctgttatcaatcatttctagattataccctgcctaaacttacatcagggaaaaattggtatttatgcnnnnnnnnnntgtttttgtccttgtgagtccatctaacatcataattaatcatgtggctgtgaaattccacagtaatatggttccccgatgaacaagtttaccccagccctgctttgcctttacctgccatgaatgaaactgatggttcaatttcagaagtaatgattaacagttatgtggtcacatgatgtgccatagagatagctacagtgtaataatttacactattttgtgctccaaacaaaacaaaaatctgtgtaactgtaaaacattgaatgaaactattttacctgaactagattttatctgaaagtaggtagaatttttgctatgctgtaatttgttgtatattctggtatttgaggtgagatggctgctcttttattaatgagacatgaattgtgtctcaacagaaactaaatgaacatttcagaataaattattgctgtatgtaaactgtt

SEQ ID NO: 249864 - DNA, 624 bp, Homo Sapiens
  misc_feature (88)..(88): n is a, c, g, or t
gctggtgagaagccagcggggaatgaacgttcccgaggttgtgaaaggtgctattctcgttgtccttcgaagttgcctgctgactgtntccaggcgcatcatccatcattccatcaccagagcctccaatgcactcatcttcatcatcaccgcagtctccaccaaacccttcctcatccaggtatccagaactctacctttgggcatagacatggttctcagaagctggttaatgtgctccagtttgtcaataatttgactgaccactggctcagggcccttcattttcagctcatggagattgaactggtttttcattccattccttgctgccttttggctgtatctctccacgagttcttgtccattccagcaaagggtgtcgttttccgccacagggctatggctgcagatgtagccaggcaaagcactatagaagctgatgaaagacttcaacttctgaattagttcccttcttcggctgaataaggtttcttcatgttctacatgagcaacttttaatactttcttgtcaataaagagatcttcaggataataagcagatctatattggcgttgttgagaatgggcacataacttgccaatagtggtggtcagctttcc

SEQ ID NO: 249865 - DNA, 2540 bp, Homo Sapiens
  misc_feature (1928)..(1932): n is a, c, g, or t
  misc_feature (1935)..(1970): n is a, c, g, or t
  misc_feature (1995)..(2029): n is a, c, g, or t
  misc_feature (2075)..(2090): n is a, c, g, or t
  misc_feature (2131)..(2146): n is a, c, g, or t
  misc_feature (2166)..(2175): n is a, c, g, or t
  misc_feature (2205)..(2262): n is a, c, g, or t
  misc_feature (2268)..(2330): n is a, c, g, or t
  misc_feature (2346)..(2359): n is a, c, g, or t
cccggactcaagtgggtgccagaaactcccgtgccaggatcagatttgcaagtatgtctccctaagggcccaacatgctgctcaagaaagatggaagatatggagctcaagttcttaattattcagaatgctgcggttttccaagaggcctttgaaattgttgttcgccatgccaagaactacaccaatgccatgttcaagaacaactacccaagcctgactccacaagcttttgagtttgtgggtgaatttttcacagatgtgtctctctacatcttgggttctgacatcaatgtagatgacatggtcaatgaattgtttgacagcctgtttccagtcatctatacccagctaatgaacccaggcctgcctgattcagccttggacatcaatgagtgcctccgaggagcaagacgtgacctgaaagtatttgggaatttccccaagcttattatgacccaggtttccaagtcactgcaagtcactaggatcttccttcaggctctgaatcttggaattgaagtgatcaacacaactgatcacctgaagttcagtaaggactgtggccgaatgctcaccagaatgtggtactgctcttactgccagggactgatgatggttaaaccctgtggcggttactgcaatgtggtcatgcaaggctgtatggcaggtgtggtggagattgacaagtactggagagaatacattctgtcccttgaagaacttgtgaatggcatgtacagaatctatgacatggagaacgtactgcttggtctcttttcaacaatccatgattctatccagtatgtccagaagaatgcaggaaagctgaccaccactattggcaagttatgtgcccattctcaacaacgccaatatagatctgcttattatcctgaagatctctttattgacaagaaagtattaaaagttgctcatgtagaacatgaagaaaccttatccagccgaagaagggaactaattcagaagttgaagtctttcatcagcttctatagtgctttgcctggctacatctgcagccatagccctgtggcggaaaacgacaccctttgctggaatggacaagaactcgtggagagatacagccaaaaggcagcaaggaatggaatgaaaaaccagttcaatctccatgagctgaaaatgaagggccctgagccagtggtcagtcaaattattgacaaactgaagcacattaaccagctcctgagaaccatgtctatgcccaaaggtagagttctggataaaaacctggatgaggaagggtttgaaagtggagactgcggtgatgatgaagatgagtgcattggaggctctggtgatggaatgataaaagtgaagaatcagctccgcttccttgcagaactggcctatgatctggatgtggatgatgcgcctggaaacagtcagcaggcaactccgaaggacaacgagataagcacctttcacaacctcgggaacgttcattccccgctgaagcttctcaccagcatggccatctcggtggtgtgcttcttcttcctggtgcactgactgcctggtgcccagcacatgtgctgccctacagcaccctgtggtcttcctcgataaagggaaccactttcttatattcttctacagcttggtcattgttatcctgtatacctcctccagccatgaagtagaggactaaccatgtgttatgttttcgaaaatcaaatggtatcttttggaggaagatacattttagtggtagcatatagattgtccttttgcaaagaaagaaaaaaaaccatcaagttgtgccaaattattctcctatgtttggctgctagaacatggttaccatgtctttctctctcactccctccctttctatcgttctctctttgcatggatttctttgaaaaaaaataaattgctcaaataannnnncannnnnnnnnnnnnnnnnnnnnnnnnnnnnnnnnnnncccccaacacaaaccacacaaaccnnnnnnnnnnnnnnnnnnnnnnnnnnnnnnnnnnncacccctcctcaacaacacataaaaaacaatatccccttttttcgnnnnnnnnnnnnnnnnaaaaaattttttaaacaattttgttgggggggggggccccnnnnnnnnnnnnnnnnggggacaaccgtttcttccnnnnnnnnnnccggggaccagacaaggggtgtgggtttcnnnnnnnnnnnnnnnnnnnnnnnnnnnnnnnnnnnnnnnnnnnnnnnnnnnnnnnnnngggggnnnnnnnnnnnnnnnnnnnnnnnnnnnnnnnnnnnnnnnnnnnnnnnnnnnnnnnnnnnnnnnaaaaatacaaaatatnnnnnnnnnnnnnntgtggtccccttttttcgaaaaaaagggcgggaaatttttttataagaaatttttccccccgcgccaggtgggcgaccctctctacaaaacgcgggcagagaagaaaaacactaaaatccccccgagggggacgatctaaaaaacctctgtgccgcgcctttagagaaaaaataaatctct

SEQ ID NO: 249866 - DNA, 955 bp, Homo Sapiens
  misc_feature (902)..(902): n is a, c, g, or t
ggcctgggtggcgaattcggcacgaggaacttttgcagcggctgggtagcagcacgtctcttgctcctcagggccactgccaggcttgccgagtcctgggactgctctcgctccggctgccactctcccgcgctctcctagctccctgcgaagcaggatggccgggaccgtgcgcaccgcgtgcttggtggtggcgatgctgctcagcttggacttcccgggacaggcgcagcccccgccgccgccgccggacgccacctgtcaccaagtccgctccttcttccagagactgcagcccggactcaagtgggtgccagaaactcccgtgccaggatcagatttgcaagtatgtctccctaagggcccaacatgctgctcaagaaagatggaagaaaaataccaactaacagcacgattgaacatggaacagctgcttcagtctgcaagtatggagctcaagttcttaattattcagaatgctgcggttttccaagaggcctttgaaattgttgttcgccatgccaagaactacaccaatgccatgttcaagaacaactacccaagcctgactccacaagcttttgagtttgtgggtgaatttttcacagatgtgtctctctacatcttgggttctgacatcaatgtagatgacatggtcaatgaattgtttgacagcctgtttccagtcatctatacccagctaatgaacccaggcctgcctgattcagccttggacatcaatgagtgcctccgaggagcaagacgtgacctgaaagtatttgggaatttccccaagcttattatgacccaggtttccaagtcactgcaagtcactaagatcttccttcaggctctgaatcttgggaattgaagtgatccacacaactggatcacctgaagtntcagtaaggactggggcccaatgcctccccaaaatgggggaatggctcttacg

SEQ ID NO: 249867 - DNA, 599 bp, Homo Sapiens
  misc_feature (425)..(425): n is a, c, g, or t
  misc_feature (526)..(526): n is a, c, g, or t
  misc_feature (547)..(547): n is a, c, g, or t
  misc_feature (557)..(557): n is a, c, g, or t
  misc_feature (576)..(576): n is a, c, g, or t
gatctgcttattatcctgaagatctctttattgacaagaaagtattaaaagttgctcatgtagaacatgaagaaaccttatccagccgaagaagggaactaattcagaagttgaagtctttcatcagcttctatagtgctttgcctggctacatctgcagccatagccctgtggcggaaaacgacaccctttgctggaatggacaagaactcgtggagagatacagccaaaaggcagcaaggaatgggaatgaaaaaccagttcaatctccatgagctgaaaatgaagggccctgagccagtggtcagtcaaattatttgacaaactgaagcacattaaccagctcctgaggaaccatgtctattgccccaaaggtaggagttcttgggataaaaacctgggatgagggaagggttttgaaagtnggagacttgcggtgatggatggaagatggagttgcattgggaggcttctggttgatgggattgattaaaagttgaaggattcagcttccgtttgcctttgncaggaactgggcctattgttnctgggatgtnggattgatggcgcctgggnaaccagttcagccagggccaatt

SEQ ID NO: 249868 - DNA, 3681 bp, Homo Sapiens
  misc_feature (789)..(789): n is a, c, g, or t
  misc_feature (795)..(795): n is a, c, g, or t
  misc_feature (1334)..(1343): n is a, c, g, or t
  misc_feature (1988)..(1988): n is a, c, g, or t
  misc_feature (1996)..(1996): n is a, c, g, or t
  misc_feature (2017)..(2017): n is a, c, g, or t
  misc_feature (2331)..(2388): n is a, c, g, or t
  misc_feature (2506)..(2515): n is a, c, g, or t
tcagtatgctcgatccacgcgcttcggatctttgcataaggaagcgagaacgcgcctaggacatgaacttactagagaatgcgactatgcaggataatgagcgatatggagaaagagtctgggccctggtgcaataaaagaccaaacaatgcaagaagaatcagagagtcctgttgaaagacccttgaacgagaacccaactaataaaatgacccaagaaagaacttcgacagagtcaagtaccattggccaggatcaaacgcttatggaacgtgatacagagggtggtgcagcagaaattaattgcaatggagtgattgaagtcattaattatactcagaacagtaataatgaaacattgagacataaagaggatctacataatgctcaatgactgtgatgtccacaaattctgaatcaggaatctagtttcctaagctcccaaaatggagacagccagcacatctcaagaaacagactcttgtacacctataacatctgaggtgtcagacaccatggctgtgccagtcttcctcaactgtagggcagtcattcagtgaacaacacattagccaacttcaagaaagcattcgggcagagataccctgtgaagatgaacaagagcaagaacataacggaccactggacaacaaaggaaaatccacggctggaaattttcttgttaatccccttgagccaaaaaatgcagaaaagctcaagggtgaagattgctgaccctgtggaaatgctgtgttgggtgcacaaacatttcactgaagatattcaaancaagcnaatatcgttccttggaagttctaatcggatctggctataatacccctgctgacatttggagcacggcatgcatggcctttgaactggccacaggtgactatttgtttgaacctcattcaggggaagagtacactcgagatgaagatcacattgcattgatcatagaacttctggggaaggtgcctcgcaagctcattgtggcaggaaaatattccaaggaatttttcaccaaaaaaggtgacctgaaacatatcacgaagctgaaaccttggggcctttttgaggttctagtggagaagtatgagtggtctcaggaagaggcagctggcttcacagatttcttactgcccatgttggagctgatccctgagaagagagccactgccgccgagtgtctccggcacccttggcttaactcctaagcccctgcccagcaccacagcagagatcacacactgaccctccgcccttccccttcaagcattttcctcttcccttttcagggtgaagctcttccttcaagagtttctagatcttgnnnnnnnnnnaatccaacatgttcatttgggtttgcttacttgaccctgtggagatccccacagccattgggcatcctaggtgaatttggccttggttgggctctgccaaagactaatggactaaaatgtgaaacagcctcttgccctgtacctttccttcccattaggacatcctttaaattataagcatcctttttgaaaagagctatgaaggtgtatgagcccatccttttattcattgactctaagagtcaaattttctagtgcatatcctattgccagcataaggatgaggagggggaaagggtcttaattctatgtacagcagagacattaaacttgctgtgtccgggctgcatcatcttcctggactgtttctgttgttctctgtgttcacattttttcctgcaacttttaagctactgtcttttttaaatagctatatgaacaccaaatttgggtaccattttatcactgttcaaagcactgtcaaattcctttcatcctttaatagttaagatctttgaatcttcagtctgatttttaatgtaagcaaaaacagaaccattgaatagtaatttcttgagaacctcaggtgttctataaacagtcctttcctgtatgtcttctattaccctaagaccagagttattntggttggntgtgttgtattatttcgtgtntttgtatccatggctggcactttactcattgcacttgacgtttattgccccataactaaaggatcaggatgactggtagaacggagaatctgggtttcagaagctttcccagtttaacgaaaaatagatcttggagattctgattcttttccaaacagtcccctgctttcatgtacagctttttctttaccttacccaaaattctggccttgaagcagttttcctctatggctttgcctttctgattttctcagaggctcgagtctttaatataaccccaaatgaaagaaccaaggggaggggtgggatggcannnnnnnnnnnnnnnnnnnnnnnnnnnnnnnnnnnnnnnnnnnnnnnnnnnnnnnnnnaagattagccattctctgctgctatttccctacataatgtcaatttttaaccataattttgacatgattgagatgtacttgaggcttttttgttttaattgagaaaagactttgcaannnnnnnnnnaggatgagcctctcctagacttgacctagaatattacatattcctccagtaagtaatactgaagagcaaaagagaggcaggattggggtcacagccgcttcttcagcatggaccaagtgggccttggggattgcagcgttctcgaagtggctgtaggactcgaatttacagaaagccacagaggtgcaacttgaggctctgctagcaagccaccagtgaggctattgggtaaccacctttctatacaggagattggaatctactttgtcatttatccaccacagtgacaaaggaaaagtggtgccgttatgcaatccatttaactcataaacatattactctgagtaactggccagccattcatcggatccttcattgggtactcctgaaatcagacatgttcctgtagaaagaattttaagttaggctttctatgcacctatcaagaatcaagagaatagattgtatcaaacaacggcagggaaatccttcagcaattctaatccactttgggttttcagctgtttttacatctaaagcaatagactagaactgaattatcttctacatagtaaaatcacaattgtggaattacaggaattctggtgatattaaggtgaaataacaaaacacaaaaggccctattttaacagttgatgtgacagtaagttttaatagaacctgtaacttcattttggaaatgcttctccaccaaataagggctttttcccctatttaaggagccagatggattgaaagatgtggaaataggcagctgtagatcttgatcttccaggtaccccatgtacctttattgagcttaattataatactgtcaaattgccacgatctcactaaaggatttctatttgctgtcagttaaaaataaagccctaaatacatttttattctttctactgagggcattgtctgttttctttgtaaatgccgtacaataaacaaattatttaataaccccgacaaccccccccgtcaaataataaaaacacctgtccggccgccttcggcccctccaagaagctttctaacaaccattctgtttgggcgccgcgggccccggtagggtaaagtgaaaccatggttccctaggtgtgtttccccaaggaaaaatccctggttcaatgaacctagatggcttgggaatt

SEQ ID NO: 249869 - DNA, 1432 bp, Homo Sapiens
  misc_feature (154)..(155): n is a, c, g, or t
  misc_feature (380)..(380): n is a, c, g, or t
  misc_feature (487)..(487): n is a, c, g, or t
  misc_feature (489)..(489): n is a, c, g, or t
gcggtcccacagctctcctcccagggcagcctgaggaggaggaggccgggtgctgtttggtggcagcttcagcctagggatacctgaagctgttgagcaacacctttatgaaatgttgccagagcagcaacacttccctgtgggcacagcccgnngaaatccggtaccaagtgagcaaggtggcaggacccacccaagcctgatacgcatctgggcccgccgcgttcagcaggggaggctgctacggctgcccacttcccagcaccgtctgtcaggcttgaacccctctgtgctgttcccttcctgggctaatagggagaccctttcgcagggcacccactgtttcaacttgaccctcccaccccctgctaatctcctcncacacaaccctccgttccgctagcctaccctgtcagcctttcaataaaagttatggcacaaatgtgaacacctgagatggagctgaacatttcttcactttgttctntntctgaagtcaaactcttatcaaatgccctaaaattattaccacccaagagaaacacggaaaaaggttacatgtttttgtttacttgagagtaaaatcacctgcatctggaagacgggctggtaaattggtttggctacagaacagaaagaaaacaaaaacaaacctcgtaagggaagtatcgcactcagacaccaccacttcctagagccaaatgagcaatcccaaactgcaagtgccgtaagtgggcctgtgacgtcacaccgcccggcccgaggtatcgcatgtgcgggggaggtccacactacagctgtcctctcgtctagaaggcaccacctcgctttcatgtcccgtgtgttttggaaaagcagtatggtgtgtcatgtctagcggcgaacacttccctccctctgtccttgaggttgtaatataaaaactgtgtttctgtacgtgtgggtgggaattctctgacggtgctcgttcatagcacaagcttaacgctgagttctgaactgtcgttcacagctgcgtgtctgcatggtgtcgcatctgttgtacctttggggaaaatttgtatgtaaatgtacagaaataaaaacgttgccccattaacagatttcctctggaaggtcttccctacctaacctgatggtatccaccgaagggcatttaactaccattaatggggagtaataaaatcctccgggttaattcagacctaactgcgtaactactttgaacgcctctgtaagctgggtcttaactcgccccaaggtggttgaagggaggcctttaactctgcttcaagtcctggccttaaaggtagtcagaggcaaaggctggattaaacacacactgtttaccaagtgccactttaagaccacctgaaagacggggggccatcagtctgaaggttcctagagacgtcaagaattgaatatcttc

SEQ ID NO: 249870 - DNA, 483 bp, Homo Sapiens
tggaatgtcttccctacctcacctgatggtatcccaccgaagggcatttcactaccattaatggtgagtaataaaatcctccgtgttcattcagacctccactgcgtcactactttgaacgccctctgtaagctgtgtcttccactcgccccgaggtgggtggagggaggcctctcactctgcttcgagtcctggtcttaaaggtagtcagaggcagaggctggattaaacacacactgtttaccaagtgccactctcagaccacctgagagacggggggccatcagtaaaattaagaggaatttttttcccttgttcgtgtatgttctgctgatccgtggcctgaaggttcctagagacgtcaagaaatgaatatcttacactgtgattctgtgaggaaagactggtaacccaaaactctcttctctaatgtattttttaacgaaaatgacaatatttctttaataaagtatttataccaaa

SEQ ID NO: 249871 - DNA, 982 bp, Homo Sapiens
  misc_feature (789)..(792): n is a, c, g, or t
  misc_feature (794)..(794): n is a, c, g, or t
  misc_feature (796)..(797): n is a, c, g, or t
  misc_feature (801)..(801): n is a, c, g, or t
  misc_feature (803)..(803): n is a, c, g, or t
  misc_feature (809)..(810): n is a, c, g, or t
  misc_feature (813)..(813): n is a, c, g, or t
  misc_feature (816)..(816): n is a, c, g, or t
  misc_feature (818)..(819): n is a, c, g, or t
  misc_feature (828)..(828): n is a, c, g, or t
  misc_feature (831)..(831): n is a, c, g, or t
  misc_feature (835)..(835): n is a, c, g, or t
  misc_feature (842)..(842): n is a, c, g, or t
  misc_feature (857)..(857): n is a, c, g, or t
  misc_feature (870)..(870): n is a, c, g, or t
  misc_feature (873)..(873): n is a, c, g, or t
  misc_feature (875)..(875): n is a, c, g, or t
  misc_feature (884)..(885): n is a, c, g, or t
  misc_feature (888)..(890): n is a, c, g, or t
  misc_feature (897)..(903): n is a, c, g, or t
  misc_feature (906)..(906): n is a, c, g, or t
  misc_feature (908)..(908): n is a, c, g, or t
  misc_feature (912)..(912): n is a, c, g, or t
  misc_feature (931)..(931): n is a, c, g, or t
  misc_feature (937)..(938): n is a, c, g, or t
  misc_feature (961)..(961): n is a, c, g, or t
taggtagcgaggcctgggtggcgaattcggcacgaggcactgcagcaatggcggctcctgtaccatgaacagcaaaatgatgcctgagtgccagtgcccaccccacatgacagggccccggtgtgaggagcacgtcttcagccagcagcagccaggacatatagcctccatcctaatccctctgctgttgctgctgctgctggttctggtggccggagtggtattctggtataagcggcgagtccaaggggctaagggcttccagcaccaacggatgaccaacggggccatgaacgtggagattggaaaccccacctacaagatgtacgaaggcggagagcctgatgatgtgggaggcctactggacgctgactttgccctggaccctgacaagcccaccaacttcaccaaccccgtgtatgccacactcctacatggggggccatggcagtcgccactccctggccagcacggacgagaagcgagaactcctgggccggggccctgaggacgagataggggaccccttggcatagggccctgccccgtcggactgcccccagaaagcctcctgccccctggccggtgaagtccttcagtgagcccctccccagccagcccttccctggccccgccggatgtataaatgtaaaaatgaaagaattacattttatatgtgagcgagcaagccggcaagcgagcacagtattatttctccatcccctccctgcctgctccttggcacccccatgctgccttccaggaaacagggagggaaggggcttgggnnnnancnncccnangcgggnnggnccngnnggcccgagnggncggngcggcgngccggggcccgggancgcaggccgcccnagngngcgccccanncgnnnaaacggnnnnnnngancngganccagccccccgagcgcacngcgggnngagcccgccggcgggatgagtcngaacgccagcaagacagatgc

SEQ ID NO: 249872 - DNA, 1298 bp, Homo Sapiens
  misc_feature (1209)..(1209): n is a, c, g, or t
  misc_feature (1285)..(1285): n is a, c, g, or t
ggtattcccggcatcttccgctgcaatgggcaggacaactgcggagatggggaggatgagagggactgccccacgggcttcacgggccccaaatgcacccagcaggtgtgtgcgggctactgtgccaacaacagcacctgcactgtcaaccagggcaaccagccccagtgccgatgcctacccggcttcctgggcgaccgctgccagtaccggcagtgctctggctactgtgagaactttggcacatgccagatggctgctgatggctcccgacaatgccgctgcactgcctactttgagggatcgaggtgtgaggtgaacaagtgcagccgctgtctcgaaggggcctgtgtggtcaacaagcagagtggggatgtcacctgcaactgcacggatggccgggtggcccccagctgtctgacctgcgtcggccactgcagcaatggcggctcctgtaccatgaacagcaaaatgatgcctgagtgccagtgcccaccccacatgacagggccccggtgtgaggagcacgtcttcagccagcagcagccaggacatatagcctccatcctaatccctctgctgttgctgctgctgctggttctggtggccggagtggtattctggtataagcggcgagtccaaggggctaagggcttccagcaccaacggatgaccaacggggccatgaacgtggagattggaaaccccacctacaagatgtacgaaggcggagagcctgatgatgtgggaggcctactggacgctgactttgccctggaccctgacaagcccaccaacttcaccaaccccgtgtatgccacactctacatggggggccatggcagtcgccactccctggccagcacggacgagaagcgagaactcctgggccggggccctgaggacgagataggggaccccttggcatagggccctgccccgtcggactgcccccagaaagcctcctgccccctgccggtgaagtccttcagtgagcccctccccagccagcccttccctggccccgccggatgtataaatgtaaaaatgaaggaattacattttatatgtgagcgagcaagccggcaagcgagcacagtattatttctccatcccctccctgcctgctccttggcacccccatgctgccttcagggagacaggcagggagggcttggggctgcacctcctaccctcccaccagaacgnaccccactgggagcagctggtggtgcagcctttcccctccctgtataagacaatttgccaaggctctccccttttngccccatccctgg

SEQ ID NO: 249873 - DNA, 458 bp, Homo Sapiens
  misc_feature (24)..(24): n is a, c, g, or t
  misc_feature (101)..(101): n is a, c, g, or t
  misc_feature (115)..(115): n is a, c, g, or t
  misc_feature (241)..(241): n is a, c, g, or t
  misc_feature (408)..(408): n is a, c, g, or t
  misc_feature (415)..(415): n is a, c, g, or t
tgccccctgctaaaacaaatgggngcagtagcttctcatcagcctccacatttcattactcataattgtggccttccctaatgtctcatgcccctaagccntttattacaaatgnctcaaaaaggcttctctcagcctctcaaaatattagtcatccattaaaataaatgtctgatgttaaagcatcagggtcaattgtactgtgacacctaaaatttcatgctgcatcccaccaggtccntcagcctaatggctttcatgcccccaacagactgctaaactctttgaattagtcaagcatatccctcaagggaccaaggggttaccccaccctctgatttctaccaagcctgccttcgcgaccctgtgctccagagtgaacccccgggtagacctgcacagatgcangtgtcantcccctgttgggctgaagtatgcgagatgaataaattaccggt

SEQ ID NO: 249874 - DNA, 477 bp, Homo Sapiens
tgaagttcctggcactctcaatatgggtgttcctcaaatttttaaatatggagaaacctgtttccccaagggcaggtttgaaagaaagagaaatccctctcgaaagaaacaacatatatgtgatgaatgtggaaaacacttcagtcagggctcagcccttattcttcatcaaagaattcacagtggggagaaaccttatggatgtgttgagtgtgggaaagcattcagccgaagttccattcttgtgcaacaccagagagtccacactggagaaaaaccttacaaatgtcttgaatgtgggaaagcctttagccagaattcggggcttattaatcatcagagaatccatactggggagaaaccttatgaatgcgttcagtgtgggaaatcgtatagtcaaagctcaaatctttttagacatcagagaagacacaatgcagaaaaacttctgaatgttgtgaaagtttaagaaattga

SEQ ID NO: 249875 - DNA, 1497 bp, Homo Sapiens
  misc_feature (87)..(87): n is a, c, g, or t
accaggtggagcaggtgctgctggcgtattccaggtgcatccaggtgcgggcgtcatgctgagcttgggcctgtggccaggagagangccccgtgacaggggccctgctcctctctgtggttggaggaaagatgagtgaagggatcaacttctctgacaacctaggccggtgtgtggtgatggtgggcatgcccttccccaacatcaggtctgcagagctgcaggagaagatggcctacttggatcaaaccctccccagagcccccggccaggcacccccagggaaggctctggtggagaacctgtgcatgaaggccgtcaaccagtccataggcagggccatcaggcaccagaaggattttgccagcatagtgctcctggaccagcgatacgcccggccccctgtcctggccaagctgccggcctggatccgagcccgcgtggaggtcaaagctacctttggccccgccattgctgctgtgcaggaaatttcaccgggagaagtcggcctcttcctgatgggcaaccacaccaccgcccggcgccgtgcccttcctttgtcctgccctctggagacagtgtttgtcgtgggcgtggtctgcagggatcctgttacaaaggtgaaacccaggaggagagtgtggagtccagagcgctgccaggacccaggcacaggcgttagctcccgtaggagaaaatgcgggaatcctgaatgaacagtgggtcctggctgtccttggggcgttccagggcagctcccctcctggaatagaatctttctttccatcctgcatggctgagagccaggcctcctgcttggtctccacaggaggctgtggcagctgtggcatccactgtggcatctccgtcctgcccaccttcttaagaggcgagatggagcaggcccatctgcctctgccctttctagccaaggttatagctgccctggactgctcactctctggtctcaatttaaaatgatcccacggccacagggctcctgcccaggggcttgtcaccttcccctcctccttcctgagtcactccttcagtagaaggccctgctctctatcctgccccacagccctgcctggatttgtatccttggcttcgtgccagttcctccaagtctatggcacctccctccctctcaaccacttgagcaaactccaagacaccttctaccccgacaccagcaattatgccaagggccattaggctctcaacatgactatagagaccccgtatcatcatggagacctttgttcctgtgggaaaatatccctcccacctgcaacagctgcccctgctgactgcgcctgtcttctccctctgaccccagagaaaggggccgtggtcagctgggatcttctgccaccatcagggacaaaccgggggcaggaggaaagtcactgatgcccagatgtttgcatcctgcacagctacaggtccttaaataaaagtgtactggttggtttctgctgagtttttttattg

SEQ ID NO: 249876 - DNA, 867 bp, Homo Sapiens
  misc_feature (571)..(617): n is a, c, g, or t
  misc_feature (619)..(640): n is a, c, g, or t
  misc_feature (642)..(642): n is a, c, g, or t
  misc_feature (644)..(649): n is a, c, g, or t
  misc_feature (651)..(699): n is a, c, g, or t
  misc_feature (701)..(716): n is a, c, g, or t
  misc_feature (718)..(719): n is a, c, g, or t
aaactaccatctcccaacttttaaagccagatacttgacaaggattttagatcttaatgggttcgatggtagggaatacggaaaggatacactgctaatattgtgtctaacaataaagcaaacaactcgatgctgtaagaagacaagctgtttgagctttcaaacacacatgcacacagcacaattcagaaatacccaggaggattcctgcaggcttaacagttggcatcgtactgaaatgaaacgtgtattaacaagaaaatgtcaaacttttggggaaacaaattttctgttacttcccacccaactaaaagggaagataaaaccatcatcaccagaacaaaacagattttctccaaacaagtacaatgatagtgccgggttggcagttaactctttcaccctactaaattcaagagctcatctccaccctgtcctgtatattttctacatttctattaagaggctacttggtagtgtcagcgggcatcttttacaccttctagtagctcaagctagtaaaaccttgtacttctctattgcgccgccattaaaagcagcattagtgccnnnnnnnnnnnnnnnnnnnnnnnnnnnnnnnnnnnnnnnnnnnnnnncnnnnnnnnnnnnnnnnnnnnnncncnnnnnncnnnnnnnnnnnnnnnnnnnnnnnnnnnnnnnnnnnnnnnnnnnnnnnnncnnnnnnnnnnnnnnnncnncctttgggggcggctcttttccccctaaaaaaatttttttcaaaacatttttgtggggccgccgcggcccccccgccgaaagaaacacgggcccatattatcgttttccacagaaaaaacccgcgcaaaaaacaagaggggttgaatc

SEQ ID NO: 249877 - DNA, 384 bp, Homo Sapiens
  misc_feature (26)..(26): n is a, c, g, or t
agggcctaaacaagtgggcatcccgnacctggaaaatggaaaaccgtgtattaaacaaagaaaaatggtcaaaacttttgggggggaaacaaaattttcctggttaccttccccaccccaactaaaagggaagataaaaccatcatcacccagaacaaaacagattttcctcccaaacaagtacaatgatagtgccgggttggcagttaactctttcaccctactaaattcaagagctcatctccaccctgtcctgtatattttctacatttctattaagaggctacttggtagtgtcagcgggcatcttttacaccttctagtagctcaagctagtaaaaccttgtacttctctattcgccgccattaaaagcagcattagtg

SEQ ID NO: 249878 - DNA, 879 bp, Homo Sapiens
ggggagggcgggactggactcggcttgggcgtgagatggcggcggcagcggtgagcagcgccaagcggagcctgcggggagagctgaagcagcgtctgcgggcgatgagtgccgaggagcggctacgccagtcccgcgtactgagccagaaggtgattgcccacagtgagtatcaaaagtccaaaagaatttccatctttctgagcatgcaagatgaaattgagacagaagagatcatcaaggacattttccaacgaggcaaaatctgcttcatccctcggtaccggttccagagcaatcacatggatatggtgagaatagaatcaccagaggaaatttctttacttcccaaaacatcctggaatatccctcagcctggtgagggtgatgttcgggaggaggccttgtccacagggggacttgatctcatcttcatgccaggccttgggtttgacaaacatggcaaccgactggggaggggcaagggctactatgatgcctatctgaagcgctgtttgcagcatcaggaagtgaagccctacaccctggcgttggctttcaaagaacagatttgcctccaggtcccagtgaatgaaaacgacatgaaggtagatgaagtcctttacgaagactcgtcaacagcttaaatctggattactacagccaaataatcagtgttttatatgagagtaaagcaaagtatgtgtatttttcccttgtcaaaaattagttgaaattgttcattaatgtgaatacagactgcattttaaaattgtaattatgaaataccttatataaaaccatctttaaaaaccaatagaagtgtgaatagtagaatattaattaaaatggaggctatcagcctgtgattttcagctt

SEQ ID NO: 249879 - DNA, 483 bp, Homo Sapiens
  misc_feature (56)..(56): n is a, c, g, or t
  misc_feature (68)..(68): n is a, c, g, or t
ccccgtgaggggtgatggtccggggagggaggccccttgtcccccacagggggganttggatcctcanccttcattccccccagccctggggttggaccaaaaccatgggcaacccgactgggagagggggcaaggggctacctatgatgcccctatctgaagcgctgtttgccagcatcagggaagtgaagcccctacaccccctggcgtgggctttcaaagaacagatttgccctcccaggtccccagtgaatgaaaacgacatgaaggtagatgaagtcctttacgaagactcgtcaacagcttaaatctggattactacagccaaataatcagtgttttatatgagagtaaagcaaagtatgtgtatttttcccttgtcaaaaattagttgaaattgttcattaatgtgaatacagactgcattttaaaattgtaattatgaaataccttatataaaaccatctttaaaaaccaaaaaa

SEQ ID NO: 249880 - DNA, 1795 bp, Homo Sapiens
  misc_feature (1367)..(1648): n is a, c, g, or t
  misc_feature (1653)..(1691): n is a, c, g, or t
  misc_feature (1714)..(1714): n is a, c, g, or t
  misc_feature (1716)..(1716): n is a, c, g, or t
ataaagtatggggaattcctctatgacaatctcatcattttctccccttcggtagaagattttggaggcaacatcaacgtggagaccatcagtgcctttattgacggcggaggcagtgtgctggtagctgccagctccgacattggtgaccctcttcgagagctgggcagtgagtgcgggattgagtttgacgaggagaaaacggctgtcattgaccatcacaactatgacatctcagaccttggccagcatacgctcatcgtggctgacactgagaacctgctgaaggccccaaccatcgttgggaaatcatctctaaatcccatcctctttcgaggtgttgggatggtggccgatcctgataaccctttggtgctggacatcctgacgggctcttccacctcttactccttcttcccggacaagcctatcacccagtatccacatgcggtggggaagaacaccctcctcattgctgggctccaggccaggaacaatgcccgcgtcatcttcagcggctccctcgacttcttcagcgactccttcttcaactcagcagtgcagaaggcggcgcccggctcccagaggtattcccagacaggcaactatgaactagctgtggccctctcccgctgggtgttcaaggaggagggtgtcctccgtgtggggcctgtgtcccatcatcgggtgggcgagacagccccacccaatgcctacactgtcactgacctagtggagtatagcatcgtgatccagcagctctcaaatggcaaatgggtcccctttgatggcgatgacattcagctggagtttgtccgcattgatccttttgtgaggaccttcctgaagaagaaaggtggcaaatacagtgttcagttcaagttgcccgacgtgtatggtgtattccagtttaaagtggattacaaccggctaggctacacacacctgtactcttccactcaggtatccgtgcggccactccagcacacgcagtatgagcgcttcatcccctcggcctacccctactacgccagcgccttctccatgatgctggggctcttcatcttcagcatcgtcttcttgcacatgaaggagaaggagaagtccgactgaggggctagagccctctccccacagcgtggagacggggcagggaggggggttattaggattggtggttttgttttgctttgtttaaagccgtgggaaaatggcacaactttacctctgtgggagatgcaacactgagagccaaggggtgggagttgggataatttttatataaaagaagtttttccactttgaattgctaaaagtggcatttttcctatgtgcagtcactcctctcatttctaaaatagggacgnnnnnnnnnnnnnnnnnnnnnnnnnnnnnnnnnnnnnnnnnnnnnnnnnnnnnnnnnnnnnnnnnnnnnnnnnnnnnnnnnnnnnnnnnnnnnnnnnnnnnnnnnnnnnnnnnnnnnnnnnnnnnnnnnnnnnnnnnnnnnnnnnnnnnnnnnnnnnnnnnnnnnnnnnnnnnnnnnnnnnnnnnnnnnnnnnnnnnnnnnnnnnnnnnnnnnnnnnnnnnnnnnnnnnnnnnnnnnnnnnnnnnnnnnnnnnnnnnnnnnnnnnnnnnnnnnnnnnnnnnncctcnnnnnnnnnnnnnnnnnnnnnnnnnnnnnnnnnnnnnnngccgagaaggtttgccccctttncnaaacagacaaaaatcgcacaccgaaaaaaagagaaatccctttgttccggggccccgccccttcgggcaccccctccaa

SEQ ID NO: 249881 - DNA, 926 bp, Homo Sapiens
ccgatcacttccgggtagtgctccacgggcacgagccgcgattgggctaccgtagatggggtacttccggtgtgcaggtgctgggtccttcggcaggaggaggaagatggagcccagcaccgcggcccgggcttgggccctcttttggttgctgctgcccttgcttggcgcggtttgcgccagcggaccccgcaccttagtgctgctggacaacctcaacgtgcgggagactcattcgcttttcttccggagcctgaaggaccggggctttgagctcacattcaagaccgctgatgaccccagcctgtctctcataaagtatggggaattcctctatgacaatctcatcattttctccccttcggtagaagattttggaggcaacatcaacgtggagaccatcagtgcctttattgacggtggaggcagtgtgctggtagctgccagctccgacattggtgaccctcttcgagagctgggcagtgagtgcgggattgagtttgacgaggagaaaacggctgtcattgaccatcacaactatgacatctcagaccttggccagcatacgctcatcgtggctgacactgagaacctgctgaaggccccaaccatcgttgggaaatcatctctaaatcccatcctctttcgaggtgttgggatggtggccgatcctgataaccctttggtgctggacatcctgacgggctcctccacctcttactccttcttcccgggacagcctatcacccagtatccacatggcggtgggggaagacccccctcctcattgctggggctccagggccaggaaaaatgccccgcggtatcttccagcgggttcctccgacttcttcaggggactccctcgttcaactcagcaatggcaaaaggggggggccccggctcccccaagggatttcccagaa

SEQ ID NO: 249882 - DNA, 562 bp, Homo Sapiens
ggggactgaggggtcagtggttccgggtaggagctaggtgaccctcggctgctgcagggatctgcagcgactgcagccatgggggcgcacctggtccggcgctacctgggcgatgcctcggtggagcccgaccccctgcagatgccaaccttcccgccagactacggcttccccgaacgcaaggagcgcgagatggtggccacacagcaggagatgatggacgcgcagctgaggctccagctgcgggactactgcgcccaccacctcatccggctgctcaagtgcaagcgtgacagcttccccaacttcctggcctgcaagcaggagcggcacgactgggactactgcgagcaccgcgactatgtgatgcgcatgaaggagtttgagcgggagcggaggctgctccagcggaagaagcggcgggagaagaaggcggcagagttggccaaaggccagggacccggggaagtggaccccaaggtggccctgtagggggtgcaccccccaccctatggaccagtcaaataaaagccttcaggcccctcacaaaactgtattgttc

SEQ ID NO: 249883 - DNA, 777 bp, Homo Sapiens; identical to SEQ ID NO: 169529
  misc_feature (582)..(591): n is a, c, g, or t
  misc_feature (593)..(610): n is a, c, g, or t
  misc_feature (702)..(702): n is a, c, g, or t

SEQ ID NO: 249884 - DNA, 1083 bp, Homo Sapiens
attcaataaacctgttccccaggaccaaaaggccaggaactgagaattttgggcttccaaattttacggtccccccggccacaccttttttccttttctcttttcacaccaatggactttatgggtgacttgggcataggtctttctaagaactggctcttaacaaaaatttctggccattatctgactgaatgtcacaaacaagtgctgtaagaacttgcttagagcctttttcctaaacctgtacaccagctcttgccttgtgaatttattcaccacaaaacacatgttcccaggggcccaggcaaagtctccaagtacccagtcccctttcttcagccttgcccacaccctcagccttcctgttaatccaggcgacccagggttacccagaggtccaggtcccagttgttcacttgagcatctgatgtaccccaaaccacctgtgtgaaacgctctctgtccaggatgcgtccatagcgcagggtgacgtagaaggtctgtttcccactgtaccgctggatacgcacaaacatctcctgaggccggtccttggtttctgtcaggggaatcacatctaccatgggacagtatgtgtcctgccgccagccccagaagttcagatgggccacccgcagcatggtgccagactcattcagatacaggataccaaccagtctccgtaagaaatagctcatccagcacagcatggtcagggcaaagcccgatatcccactcatgaggcacacggtgttgagagtgaggaggccctgggagtacaagtaatagcctggtggcaaagctaccactgtcagggcagtctgtgccaacttcagtcgtgacaggaacccgaaggttctgatggcatcaaaacggtaaaacatccagaatttctcagtctctgcgtttggtagtttctccttcgagatgggtgaactgctgcccacccacctcttaggatcctcctgcccactgcagcaccacagcccatggagaggcctttcccacacagcttttccccgaaacctacgcacagctcggagaagggcagccatggccccaccacctgctgccggaagtccc

SEQ ID NO: 249885 - DNA, 1122 bp, Homo Sapiens
ggggcctccgagcagctcagggcgcccttgaaagttcttggatctgcgggttatggccggtcccttgcagggcggtggggcccgggccctggacctactccggggcctgccgcgtgtgagcctggccaacttaaagccgaatcccggctccaagaaaccggagagaagaccaagaggtcggagaagaggtagaaaatgtggcagaggccataaaggagaaaggcaaagaggaacccggccccgcttgggctttgagggaggccagactccattttacatccgaatcccaaaatacgggtttaacgaaggacatagtttcagacgccagtataagcctttgagtctcaatagactgcagtatcttattgatttgggtcgtgttgatcctagtcaacctattgacttaacccagcttgtcaatgggagaggtgtgaccatccagccacttaaaagggattatggtgtccagctggttgaggagggtgctgacacctttacggcaaaagttaatattgaagtacagttggcttcagaactagctattgctgccattgaaaaaaatggtggtgttgttactacagccttctatgatccaagaagtctggacattgtatgcaaacctgttccattctttcttcgtggacaacccattccaaaaagaatgcttccaccagaagaactggtaccatattacactgatgcaaagaaccgtgggtacctggcggatcctgccaaatttcctgaagcacgacttgaactcgccaggaagtatggttatatcttacctgatatcactaaagatgaactcttcaaaatgctctgtactaggaaggatccaaggcagattttctttggtcttgctccaggatgggtggtgaatatggccgataagaaaatcctaaaacctacagatgaaaatctccttaagtattatacctcatgaattcccgtccaaggaagcagagttgttaaagagtactggaataggggctgaaggatctatattcccttattgcattttccttatgtataattttccagatggtgatgttacttttcagtgtactcatatgtctcattttcatctaaaattaaatggcaggaaacaaggactgcatagag

SEQ ID NO: 249886 - DNA, 360 bp, Homo Sapiens
  misc_feature (340)..(340): n is a, c, g, or t
ggcacgaggttcttggatctgcgggttatggccggtcccttgcagggcggtggggcccgtgcctgggacctactccggggcctgccgcgtgtgagcctggccaacttaaagccgaatcccggctccaagaaaccggagagaagaccaagaggtcgggagaagaggtagaaaatgtggcagaggccataaaaggagaaaggcaaagaggaacccggccccgcttgggctttttgagggaggccagacttccattttacatccgaatcccaaaatacgggttttaacgaaggacatagttttcagacgccatattaagccttttgagtcttcaattagactngcagtatctttatttgattt

SEQ ID NO: 249887 - DNA, 356 bp, Homo Sapiens
  misc_feature (19)..(19): n is a, c, g, or t
  misc_feature (74)..(74): n is a, c, g, or t
acccttcccctgatatccncctaaagatggaactccttcaaaaatgcctctgtacctagggaagggatcccaanggcagattttcctttgggccttgcccccacgatgggtggtgaatatggccgataagaaaatccctaaaaccctacagatgaaaatctccttaagtattatacctcatgaattcccgtccaaggaagcagagttgttaaagagtactggaataggggctgaaggatctatattcccttattgcattttccttatgtataattttccagatggtgatgttacttttcagtgtactcatatgtctcattttcatctaaaattaaatggcaggaaacaaggactgc

SEQ ID NO: 249888 - DNA, 645 bp, Homo Sapiens
ctgtcgtttcacgatgggctgaggggtggggggtttccaacacttgattcggaggaccgtgggcagccagggtcggtgaaggatcccaaaatggctgggcgaaaacttgctctaaaaaccattgactgggtagcttttgcagagatcataccccagaaccaaaaggccattgctagttccctgaaatcctggaatgagaccctcacctccaggttggctgctttacctgagaatccaccagctatcgactgggcttactacaaggccaatgtggccaaggctggcttggtggatgactttgagaagaagtttaatgcgctgaaggttcccgtgccagaggataaatatactgcccaggtggatgccgaagaaaaagaagatgtgaaatcttgtgctgagtgggtgtctctctcaaaggccaggattgtagaatatgagaaagagatggagaagatgaagaacttaattccatttgatcagatgaccattgaggacttgaatgaagctttcccagaaaccaaattagacaagaaaaagtatccctattggcctcaccaaccaattgagaatttataaaattgagtccaggaggaagctctggcccttgtattacacattctggacattaaaaataataattatacc

SEQ ID NO: 249889 - DNA, 471 bp, Homo Sapiens
accttccttccattagaaaatttctgctcaatacagaatggtccacatcacccaaagtgcactgtgggagatgctgtgaaattaaaacctctttgtacctgagacatctagattcacctcaggaggcctgaaggaaatgtgtaacttgtgggaaagaactagacaaccatttaggaattctctagatatactcagcctaacccagtggcttaacacaaggagattggctttgatctttttttcttgtggcatcttccagcaagttagaagtctcatgggataagactgcagttcccctggttcaatagctggaacagtgattttaaatgtccctttttctggatcccttgtaaacatgaaatcattccatggatggctgccttataattttgtctctttccactttaattgtgaatggttaaaaaaatgctgttttctgatattaaatttttattagtgcataccttaaaa

SEQ ID NO: 249890 - DNA, 403 bp, Homo Sapiens
agtaaattacagaacggtggtattacattctgctgtacaaggtactcaacctgatcttttctgccacttattgttaagttgctgattgcccaagcagcttctttttgtgttccaaagtcccccttagcaagctgatgaattatcataggaattaatccagcatctattacagcttgaacttgttgctggttgcctgctgttatgttggaaaggaaccacacggcttccttatttgatcttctcttttgggtgggataagagatttgggaagtgtgacaggacatcacaattgagaacaacctgggtctgctcgtcggtgccagtcactatgttgccaactgctctgagggctgctgtttgaactttgacttcctgatggctcagaaggggcacaagaaagggc

SEQ ID NO: 249891 - DNA, 2809 bp, Homo Sapiens
  misc_feature (1295)..(1295): n is a, c, g, or t
  misc_feature (1525)..(1525): n is a, c, g, or t
atgtctttctgaacgacagttctgctgtgagaagctgccattagagagatccagcaggccccaggactcagctggccagccggtgacactgctcactgctcattgtcctcagctgtggacctctgtccccctctgctggccactcacagaatttcctgctggcactgtcaagatgaagtccaaggaggaagagactgctgtcgataagggagaccggggggcccggagccgccccgccggccagggggacaccgacggccccagcagccgggacgggcccgagggggcaccggacccccagcggaccaaggccgccagggaccaccggcaccagaagagccggaagagcaccgagcagagcaagagggagcaggaggcgcgcgacgacaaggaggcagaggagcggaaacgggccaacaacgcggacaagcagcagggggcacgcagcaagcaagggtgcgagaagaagaaccagaagacagcccagaccagcgcccagctgcacaagaagctggagcactaccgccggcgcctgaaggagaatgagcagaacgggccctcgcggcagcccaaggacgtgctgcgggacatgcagcaggggctgaaggacgtgggcgccaacgtgcgcgcaggcatcagcggctttgggggcggcgtgggggagggcgtcaagggcagcctctctggcctctcacaggccacccacaccgccgtggtgtccaagccccgggagtttgccagcctcatccgcaacaagtttggcagtgctgacaacatcgcccacctgaaggaccccctggaagatgggccccctgaggaggcagcccgggcactgagcggcagtgccacactcgtcgccagccccaagcatggcagcgatgatgagtgctccagcgccagcgccagctcagccggggcaggcagcaactctggggctgggcctggtggggcgctggggagccctaagtccaatgcactgtatggtgctcctggaaacctggatgctctgctggaagagctacgggagatcaaggagggacagtctcacctggaggactccatggaagacctgaagactcagctgcagagggactacacctacatgacccagtgcctgcaggaggagcgctacaggtacgagcggctggaggagcagctcaacgacctgactgagcttcatcagaacgagatgacgaacctgtaagcaggaactggccagcatggaagaaaaaggtggcctaccagtcctataaaagggcacgggacatccaggaggccgtggagttcctgcctgnacccggggtcaccaagctggagctgcagcagcaacagcagcaggtggtacagctggagggcgtggagaatgccaacgcgcgggcgctgctgggcaagttcatcaacgtgatcctggcgctcatggccgtgctgctggttgttcgtgtccaccatcgccaacttcatcacgcccctcatgaagacacccctgcgcataaccagcaccaccctcctggtcctcgtcctgttncctcctctggaagcactgggactccctcacctacctcctggagcacgtgttgctgcccagctgagtggccagccacaccaaccctgtgctctctggcccccagctggccacacttctccaggagggacccttggacttctttgtgtgtccagtttggcctcctgcccaaactgtccattccagcagctcctgcccccttctctgtacttgcttctgtctgacaccttctccctgttggcctgaagggagcttagaatgcagccctacctggagatagtgcgggcacctgtggccaagtggagcagaggttggacatggggttggattgttttgattatttatagttacacaaggacttctcccagctgaccctcaggatgccccaagtcaggaagaccattaagaataggaggagagggctctgcctcaactttcctaggaaagagcccacctcggagatagctacggtttcctctggtggagatggtgaggatgaaggctggagagtgagggaggaggctctgctggccgcagagaacacagggatgggagggtccctagccttcgggcacctccagggccagagagcaggctcagagcagctagtgtggagctcagcatccccaccccacccctcctccctgtagagctgatttgaggcctccttctggggctgggctctgcaggccaggtgggtgtggcctgtgttttcccttctgttctttctgcctgtactggatctgttattttcagggaaacaggccccagggcccccctgagcctcaccctaagcccttaggcctctgagagtgctgttgggttctatttatttatttatttgttcctttgttccctacccgtgcccccagtgtcttccctgctgagtaccaggagaggtcctgccccatcctctctctgaagccagggcccttccattccatttagcctttggatcatcctggctgggagaagtgggaccgagccacccagccccactatccccaagcagccctacagccgggatgggaggcacgtggcctctcttttatccgtctatttattttgtaagtgtattcgtgtggaggaggttgttgctttatttttttaaggctctggagtgttgtgtatggtttcttttcacatcccagcctcccatgggcacttctaagaagagaggggatttcttggaaaaggagagaggaatcccctagagcagggaaagcagtgcctgccagctgttgtgcaccttcctgagaaataaatatcctctaaattttcaaacca

SEQ ID NO: 249892 - DNA, 461 bp, Homo Sapiens
  misc_feature (22)..(22): n is a, c, g, or t
  misc_feature (255)..(255): n is a, c, g, or t
tttgttccccctaacccgtgcnccccccaatgtccttcccctgcctgaagtacccaggaaaaggtccctgcccccatccctcctcctcctgaaagcccagggccccttcccattcccatttagcctttggatcatcccggcctgggagaagtgggaccgagcccaccccagccccactatccccaagcagccctacagccgggatgggaggcacgtggcctctcttttatccgtctatttattttgtaagtgtantcgtgtggaggaggttgttgctttatttttttaaggctctggagtgttgtgtatggtttcttttcacatcccagcctcccatgggcacttctaagaagagaggggatttcttggaaaaggagagaggaatcccctagagcagggaaagagtgcctgccagctgttgtgcaccttcctgagaaataaatatcctctaaattttcaat

SEQ ID NO: 249893 - DNA, 1739 bp, Homo Sapiens
  misc_feature (1254)..(1306): n is a, c, g, or t
ctttgactatgtcctgcctcctattctgcagtgccaggccgggcacctggtgtgtaaccaatgccgccagaagttgagctgctgcccgacgtgcaggggcgccctgacgcccagcatcaggaacctggctatggagaaggtggcctcggcagtcctgtttccctgtaagtatgccaccacgggctgttccctgaccctgcaccatacggagaaaccagaacatgaagacatatgtgaataccgtccctactcctgcccatgtcctggtgcttcctgcaagtggcaggggtccctggaagctgtgatgtcccatctcatgcacgcccacaagagcattaccacccttcagggagaagacatcgtctttctagctacagacattaacttgccaggggctgtcgactgggtgatgatgcagtcatgttttggccatcacttcatgctggtgctggagaaacaagagaagtacgaaggccaccagcagttttttgccatcgtcctgctcattggcacccgcaagcaagccgagaactttgcctacagactggagttgaatgggaaccggcggagattgacctgggaggccacgccccgttcgattcatgacggtgtggctgcggccatcatgaacagcgactgccttgttttcgacacagccatagcacatctttttgcagataatgggaaccttggaatcaatgttactatttctacatgttgtccatgatgtgactttcgtaaaccttcaaaattatttgggcatagtgctctatgtttaataaaggtttttatagatgttttattccatatgtcttcacaagtcaggacccacaattacccgtgttttgtttgaacagcagtgtcccatctggcttcgacccaacaaagttcattaacctgggatgaatggggttggcctgttggtgatttggatgctgttctgtgatctaaaacaactcttattgaattgtatttactccctaaacaacacttgacaggctgttgcacagggcttctatagatcagtgtgttaggaatgggaggccccttcctgcctgccttcccatattggtcccttgacattgacaaaagcacagtgactgtcagcagattcctttacttttgtttgtgggaggtaggaattgttttaatgcattttaaacagtgtttctggaaattgggatggctggctaatagacactgaatcacccggagtgcttatcttaaaattgcagatttagggagcctgccaannnnnnnnnnnnnnnnnnnnnnnnnnnnnnnnnnnnnnnnnnnnnnnnnnnnnggttaaattgtgggaaagggtccagattttaaaggtgctttaaggttgccctctgccgatactgtttgtctttctactgtttcatcccctaacttcccccaaccctcaaattaaaactagaactatagatccacatgaacgcacgcctgagatttggccactcacctatgttttgggtggattgcctaggaaagcaagtcatatggccattgatagttctcatgtaattagttttgctcaccactagtacagatgacccgtttacacgtggcttccctcggaagccctcctcaacagtagctggtgtgaaagactaaatcagtagagttggaaaagctttataaccggtgtgtcatatgcttgctatttaaagctgtgtgttggttttgtttttctgccacattcactagttttttaataaatattttccaaa

SEQ ID NO: 249894 - DNA, 1343 bp, Homo Sapiens
ggggcgctcttttccacgtgcgaaagccccggactcgtggagttgtgaacgccgcggactccggagccgcacaaaccagggctcgccatgaagccaggattcagtccccgtgggggtggctttggcggccgagggggctttggtgaccgtggtggtcgtggaggccgagggggctttggcgggggccgaggtcgaggcggaggctttagaggtcgtggacgaggaggaggtggaggcggcggcggcggtggaggaggaggaagaggtggtggaggcttccattctggtggcaaccggggtcgtggtcggggaggaaaaagaggaaaccagtcggggaagaatgtgatggtggagccgcatcggcatgagggtgtcttcatttgtcgaggaaaggaagatgcactggtcaccaagaacctggtccctggggaatcagtttatggagagaagagagtctcgatttcggaaggagatgacaaaattgagtaccgagcctggaaccccttccgctccaagctagcagcagcaatcctgggtggtgtggaccagatccacatcaaaccgggggctaaggttctctacctcggggctgcctcgggcaccacggtctcccatgtctctgacatcgttggtccggatggtctagtctatgcagtcgagttctcccaccgctctggccgtgacctcattaacttggccaagaagaggaccaacatcattcctgtgatcgaggatgctcgacacccacacaaataccgcatgctcatcgcaatggtggatgtgatctttgctgatgtggcccagccagaccagacccggattgtggccctgaatgcccacaccttcctgcgtaatggaggacactttgtgatttccattaaggccaactgcattgactccacagcctcagccgaggccgtgtttgcctccgaagtgaaaaagatgcaacaggagaacatgaagccgcaggagcagttgacccttgagccatatgaaagagaccatgccgtggtcgtgggagtgtacaggccaccccccaaggtgaagaactgaagttcagcgctgtcaggattgcgagagatgtgtgttgatactgttgcacgtgtgtttttctattaaaagattccctcccgccggacaaaagaggaacacagtgacccaaaaacttggcggccgcccttcggacccttcaaaaagccttttcaaggactatttgttttggagcgcgccggggttccaagtaagggtaaaacggaaaaatggggtatataactgtgtttcccttaagggaaaatccctgggcccatggaactaaggggcttgtgggatatttctcaccaaat

SEQ ID NO: 249895 - DNA, 486 bp, Homo Sapiens
  misc_feature (12)..(12): n is a, c, g, or t
  misc_feature (381)..(381): n is a, c, g, or t
  misc_feature (387)..(387): n is a, c, g, or t
  misc_feature (418)..(418): n is a, c, g, or t
  misc_feature (430)..(430): n is a, c, g, or t
  misc_feature (461)..(461): n is a, c, g, or t
  misc_feature (473)..(473): n is a, c, g, or t
ttcggcacaggnaagagagtctcgatttcggaaggagatgacaaaattgagtaccgagcctggaaccccttccgctccaagctagcagcagcaatcctgggtggtgtggaccagatccacatcaaaccgggggctaaggttctctacctcggggctgcctcgggaccacggtctcccatgtctctgacatcgttggtccggatggtctagtctatgcagtcgagttctcccaccgctctggccgtgacctcattaacttgggccaagaagaggaccaacatcattcctgtgattcgagggatgctcgacacccacacaaataccgcatgcttcattcgcaatgggtgggatgtgaatcttttgctggatgtgggccccagncagtanccagacccgggatttgtgggccttgaattgnccacaactttcnggcgtaatggaggacaatttgtgattttccnttaagggcaatngcattgaattcca

SEQ ID NO: 249896 - DNA, 542 bp, Homo Sapiens
cccgtgcaccaccagcgggtccagctacaaacccagttgccaatacagcctaaggacgagcctgcccacaactattccagttccatttggcacagccaggggcagggacagaagggccctgcaggactccgcctccccacctctgcacagatcctctctcctttcccctaatactcccatcatcctccttttagcttcttagaggaatcagcagctcagcttagcttagatttagctgatcaatcccaaagaaggatgtggctcatcctcttggccatccctggagtcgcagcacacgcttggctggtgtgggtccacagaggttctcatgggagggcccagcagaggggcccctcaggagagggattctagggagctagactgagacaagcctggccctgactgtcgcctcctgccttctggtcctggccattcctgcccctttctctctccagagcttgggaggagtcagaacattgctctagccgctggtgatctctcctggttgccaaccctcctggccatgactgatctccccactg

SEQ ID NO: 249897 - DNA, 2042 bp, Homo Sapiens
ggttgtgcttccaccactgccaataacaaaataactagcaaccatgaagtgggtggaatcaatttttttaattttcctactaaattttactgaatccagaacactgcatagaaatgaatatggaatagcttccatattggattcttaccaatgtactgcagagataagtttagctgacctggctaccatattttttgcccagtttgttcaagaagccacttacaaggaagtaagcaaaatggtgaaagatgcattgactgcaattgagaaacccactggagatgaacagtcttcagggtgtttagaaaaccagctacctgcctttctggaagaactttgccatgagaaagaaattttggagaagtacggacattcagactgctgcagccaaagtgaagagggaagacataactgttttcttgcacacaaaaagcccactccagcatcgatcccacttttccaagttccagaacctgtcacaagctgtgaagcatatgaagaagacagggagacattcatgaacaaattcatttatgagatagcaagaaggcatcccttcctgtatgcacctacaattcttctttgggctgctcgctatgacaaaataattccatcttgctgcaaagctgaaaatgcagttgaatgcttccaaacaaaggcagcaacagttacaaaagaattaagagaaagcagcttgttaaatcaacatgcatgtgcagtaatgaaaaattttgggacccgaactttccaagccataactgttactaaactgagtcagaagtttaccaaagttaattttactgaaatccagaaactagtcctggatgtggcccatgtacatgagcactgttgcagaggagatgtgctggattgtctgcaggatggggaaaaaatcatgtcctacatatgttctcaacaagacactctgtcaaacaaaataacagaatgctgcaaactgaccacgctggaacgtggtcaatgtataattcatgcagaaaatgatgaaaaacctgaaggtctatctccaaatctaaacaggtttttaggagatagagattttaaccaattttcttcaggggaaaaaaatatcttcttggcaagttttgttcatgaatattcaagaagacatcctcagcttgctgtctcagtaattctaagagttgctaaaggataccaggagttattggagaagtgtttccagactgaaaaccctcttgaatgccaagataaaggagaagaagaattacagaaatacatccaggagagccaagcattggcaaagcgaagctgcggcctcttccagaaactaggagaatattacttacaaaatgcgtttctcgttgcttacacaaagaaagccccccagctgacctcgtcggagctgatggccatcaccagaaaaatggcagccacagcagccacttgttgccaactcagtgaggacaaactattggcctgtggcgagggagcggctgacattattatcggacacttatgtatcagacatgaaatgactccagtaaaccctggtgttggccagtgctgcacttcttcatatgccaacaggaggccatgcttcagcagcttggtggtggatgaaacatatgtccctcctgcattctctgatgacaagttcattttccataaggatctgtgccaagctcagggtgtagcgctgcaaacgatgaagcaagagtttctcattaaccttgtgaagcaaaagccacaaataacagaggaacaacttgaggctgtcattgcagatttctcaggcctgttggagaaatgctgccaaggccaggaacaggaagtctgctttgctgaagagggacaaaaactgatttcaaaaactcgtgctgctttgggagtttaaattacttcaggggaagagaagacaaaacgagtctttcattcggtgtgaacttttctctttaattttaactgatttaacactttttgtgaattaatgaaatgataaagacttttatgtgagatttccttatcacagaaataaaatatctccaaatgtttccttttcaaaa

SEQ ID NO: 249898 - DNA, 344 bp, Homo Sapiens
gggcaagaaaacagatgtcttccctcttcacggctgcagcagtctgaatgtccgtacttctctaaacaccctgaagactgttcatctccagtgggtttctcaattgcagtcaatgcatctttcaccagcttacttccttgtaagtggcttcttgaacaaactgggcaaaaaatatggtagccaggtcagctaaacttatctctgcagtacattggtaagaatccaatatggaagctattccatattcatttctatgcagtgttctggattcagtaaaatttagtaggaaaattaaaaaaattgattccacccacttcatggttgctagttattttgttattggc

SEQ ID NO: 249899 - DNA, 648 bp, Homo Sapiens
  misc_feature (18)..(18): n is a, c, g, or t
ggaactgtgctgcccgtntgagaaagcattcaactgcacagctttgcagcaagatggaatttagtcatagcgagcagcccaaagaagaattgtaggtgcatacaggaagggatgccttcttgctatctcataaatgaatttgttcatgaatgtctccctgtcttcttcatatgcttcacagcttgtgacaggttctggaacttggaaaagtgggatcgatgctggagtgggctttttgtgtgcaagaaaacagttatgtcttccctcttcactttggctgcagcagtctgaatgtccgtacttctccaaaatttctttctcatggcaaagttcttccagaaaggcaggtagctggttttctaaacaccctgaagactgttcatctccagtgggtttctcaattgcagtcaatgcatctttcaccattttgcttacttccttgtaagtggcttcttgaacaaactgggcaaaaaatatggtagccaggtcagctaaacttatctctgcagtacattggtaagaatccaatatggaagctattccatattcatttctatgcagtgttctggattcagtaaaatttagtaggaaaattaaaaaaattgattccacccacttcatggttgctagttattttgttattggcag

SEQ ID NO: 249900 - DNA, 358 bp, Homo Sapiens
ccaaaggatctgtgccaagctcagggtgtagcgctgcaaacgatgaagcaagagctcaaaccttgtgaagcaaaagccacaaataacagaggaacaacttgaggctgtcattgcagatttctcaggcctgttggagaaatgctgccaaggccaggaacaggaagtctgctttgctgaagagggacaaaaactgatttcaaaaactcgtgctgctttgggagtttaactctttaaaactgatttaacactttttgtgaattaatgaaatgataaagacttttatgtgagatttccttatcacagaaataaaatatctccaaatgaaaagaaaaagtaaaaactcgagactagttctctc

SEQ ID NO: 249901 - DNA, 1036 bp, Homo Sapiens
  misc_feature (11)..(11): n is a, c, g, or t
  misc_feature (19)..(19): n is a, c, g, or t
  misc_feature (22)..(22): n is a, c, g, or t
  misc_feature (29)..(29): n is a, c, g, or t
  misc_feature (34)..(35): n is a, c, g, or t
  misc_feature (41)..(41): n is a, c, g, or t
  misc_feature (55)..(55): n is a, c, g, or t
  misc_feature (64)..(64): n is a, c, g, or t
  misc_feature (77)..(77): n is a, c, g, or t
  misc_feature (81)..(82): n is a, c, g, or t
  misc_feature (140)..(141): n is a, c, g, or t
ttttttccccnaagaaatngtnaaacccntcccnnaaaccngttagattggagangccttcagntttcatcatttcngcannattatacatgaccacgtccagcgggtcagttgcagcattctgtatttgtttgacaganntcttgtgagaacatatgtagacatgatttttccccatcctgcagacaatccagcacatctcctctgcaacagtgctcatgtacatgggccacatccaggactagtttctggatttcagtaaaattaactttggtaaacttctgactcagtttagtaacagttatggcttggaaagttcgggtcccaaaatttttcattactgcacatgcatgttgatttaacaagctgctttctcttaattcttttgtaactgttgctgcctttgtttggaagcattcaactgcattttcagctttgcagcaagatggaattattttgtcatagcgagcagcccaaagaagaattgtaggtgcatacaggaagggatgccttcttgctatctcataaatgaatttgttcatgaatgtctccctgtcttcttcatatgcttcacagcttgtgacaggttctggaacttggaaaagtgggatcgatgctggagtgggctttttgtgtgcaagaaaacagttatgtcttccctcttcacggctgcagcagtctgaatgtccgtacttctccaaaatttctttctcatggcaaagttcttccagaaaggcaggtagctggctaaacaccctgaagactgttcatctccagtgggtttctcaattgcagtcaatgcatctttcaccattttgcttacttccttgtaagtggcttcttgaacaaactgggcaaaaaatatggtagccaggtcagctaaacttatctctgcagtacattggtaagaatccaatatggaagctattccatattcatttctatgcagtgttctggattcagtaaaatttagtaggaaaattaaaaaaattgattccacccacttcatggttgctagttattttgttattggcag

SEQ ID NO: 249902 - DNA, 511 bp, Homo Sapiens
  misc_feature (29)..(29): n is a, c, g, or t
cactcctacatatgcccaacgggagcccnagctacaacagcttggtggtggatgaaaacatatggcccctcccggcaatcccctgatgaacaagttccattttcccataaggatctgtgcccaagcctcagggtgtagcgcctgcaaacgatgaaagccaagagtttcctcattaaccttgtgaagcaaaagcccacaaataacagaggaacaacttgaggctgtcattgcagatttctcaggcctgttggagaaatgtctgccaaggcccaggaacaggaagtctgctttgctgaagagggacaaaaactgatttcaaaaactcgtgctgctttgggagtttaaattacttcaggggaagagaagacaaaacgagtctttcattcggtgtgaacttttctctttaattttaactgatttaacactttttgtgaattaatgaaatgataaagacttttatgtgagatttccttatcacagaaataaaatatctccaaatgtttccttttaa

SEQ ID NO: 249903 - DNA, 4579 bp, Homo Sapiens
  misc_feature (3428)..(3515): n is a, c, g, or t
  misc_feature (4243)..(4243): n is a, c, g, or t
  misc_feature (4252)..(4252): n is a, c, g, or t
  misc_feature (4302)..(4302): n is a, c, g, or t
  misc_feature (4319)..(4319): n is a, c, g, or t
  misc_feature (4335)..(4335): n is a, c, g, or t
attgagaaaacaatgcaaaatgtgaagcatccggttactggagcaatttctatatcaggacagcaactgggccagcaaagcttgagaaactcactttagacaatgctgctttccctttccttgcatattctggaatcccagcagtttctttctgtttttgcgaggacacagattatccttatttgggtaccaccatggacacctataaggaactgattgagaggattcctgagttgaacaaagtggcacgagcagctgcagaggtcgctggtcagttcgtgattaaactaacccatgatgttgaattgaacctggactatgagaggtacaacagccaactgctttcatttgtgagggatctgaaccaatacagagcagacataaaggaaatgggcctgagtttacagtggctgtattctgctcgtggagacttcttccgtgctacttccagactaacaacagatttcgggaatgctgagaaaacagacagatttgtcatgaagaaactcaatgatcgtgtcatgagagtggagtatcacttcctctctccctacgtatctccaaaagagtctcctttccgacatgtcttctggggctccggctctcacacgctgccagctttactggagaacttgaaactgcgtaaacaaaataacggtgcttttaatgaaacgctgttcagaaaccagttggctctagctacttggactattcagggagctgcaaatgccctctctggtgacgtttgggacattggcaatgagttttaaatgtgatacccatagcttccatgagaacagcagggtagtctggtttctagacttgtgctgatcgtgctaaattttcagtagggctacaaaacctgatgttaaaattccatcccatcatcttggtactactagatgtctttaggcagcagcttttaatacagggtagataacctgtacttcaagttaaagtgaataaccacttaaaaaatgtccatgatggaatattcccctatctctagaattttaagtgctttgtaatgggaactgcctctttcctgttgttgttaatgaaaatgtcagaaaccagttatgtgaatgatctctctgaatcctaagggctggtctctgctgaaggttgtaagtggtcgcttactttgagtgatcctccaacttcatttgatgctaaataggagataccaggttgaaagaccttctccaaatgagatctaagcctttccataaggaatgtagctggtttcctcattcctgaaagaaacagttaactttcagaagagatgggcttgttttcttgccaatgaggtctgaaatggaggtccttctgctggataaaatgaggttcaactgttgattgcaggaataaggccttaatatgttaacctcagtgtcatttatgaaaagaggggaccagaagccaaagacttagtatattttcttttcctctgtcccttcccccataagcctccatttagttctttgttatttttgtttcttccaaagcacattgaaagagaaccagtttcaggtgtttagttgcagactcagtttgtcagactttaaagaataatatgctgccaaattttggccaaagtgttaatcttaggggagagctttctgtccttttggcactgagatatttattgtttatttatcagtgacagagttcactataaatggtgtttttttaatagaatataattatcggaagcagtgccttccataattatgacagttatactgtcggttttttttaaataaaagcagcatctgctaataaaacccaacagatactggaagttttgcatttatggtcaacacttaagggttttagaaaacagccgtcagccaaatgtaattgaataaagttgaagctaagatttagagatgaattaaatttaattaggggttgctaagaagcgagcactgaccagataagaatgctggttttcctaaatgcagtgaattgtgaccaagttataaatcaatgtcacttaaaggctgtggtagtactcctgcaaaattttatagctcagtttatccaaggtgtaactctaattcccattttgcaaaatttccagtacctttgtcacaatcctaacacattatcgggagcagtgtcttccataatgtataaagaacaaggtagtttttacctaccacagtgtctgtatcggagacagtgatctccatatgttacactaagggtgtaagtaattatcgggaacagtgtttcccataattttcttcatgcaatgacatcttcaaagcttgaagatcgttagtatctaacatgtatcccaactcctataattccctatcttttagttttagttgcagaaacattttgtggtcattaagcattgggtgggtaaattcaaccactgtaaaatgaaattactacaaaatttgaaatttagcttgggtttttgttacctttatggtttctccaggtcctctacttaatgagatagtagcatacatttataatgtttgctattgacaagtcattttaactttatcacattatttgcatgttacctcctataaacttagtgcggacaagttttaatccagaattgaccttttgacttaaagcagagggactttgtatagaaggtttgggggctgtggggaaggagagtcccctgaaggtctgacacgtctgcctacccattcgtggtgatcaattaaatgtaggtatgaataagttcgaagctccgtgagtgaaccatcattataaacgtgatgatcagctgtttgtcatagggcagttggaaacggcctcctagggaaaagttcatagggtctcttcaggttcttagtgtcacttacctagatttacagcctcacttgaatgtgtcactactcacagtctctttaatcttcagttttatctttaatctcctcttttatcttggactgacatttagcgtagctaagtgaaaaggtcatagctgagattcctggttcgggtgttacgcacacgtacttaaatgaaagcatgtggcatgttcatcgtataacacaatatgaatacagggcatgcattttgcagcagtgagtctcttcagaaaacccttttctacagttagggttgagttacttcctatcaagccagtacgtgctaacaggctcaatattcctgaatgaaatatcagactagtgacaagctcctggtcttgagatgtcttctcgttaaggagatgggccttttggaggtaaaggataaaatgaatgagttctgtcatgattcactattctagaacttgcatgacctttactgtgttagctctttgaatgttcttgaaattttagactttctttgtaaacaaatgatatgtccttatcattgtataaaagctgttatgtgcaacagtgtggagattccttgtctgatttaataaaatacttaaacactgnnnnnnnnnnnnnnnnnnnnnnnnnnnnnnnnnnnnnnnnnnnnnnnnnnnnnnnnnnnnnnnnnnnnnnnnnnnnnnnnnnnnnnnngaaacacgtggcgcccccccacgcccctccaagaaactttcccaaacccatgcgtttgggccccccaggcccccttaaggtaaccggaccggtggtccaaacccggtttccctaagaaaacccctgtcccttggccatagggcctgggattccccccccacaaacaaaaaacctcccgccgccgcgaaaccagagatgtgtatctgtaaacaaatgcccgcggagtgggggttttccgcaggcgcgcattcaccgtgggattcctctctccgagcggggcgccccccacgcggggaggcccgggggagaaataggagtgtgagaaacggcccgcggccgcgcggacactggtggtgtgggcggaacgtcactggggtatggaacatctcaattatataatggagtctcctccgcgcccaaataccgggggagatatgccctcctccccagaaatggtgggtgacttggtcgggtgttagaccgtcgtcgtgaactgtcgcgccccctggcgcctgtgggttaacactattttactccactcgtgtgtctctacgacgcctctctttcgccgcgagcaattcataacattatcgtttctggcccgccgcccatggcgcagagggcacaacaacaaaactagggtgagggtccccatatacccaaacaactgctccttcttgcgtgtaacaagaatggtgggcgcgaccacaaacctgttcctcataatnaatttatangtgaataatgtgtaggggcgtggaagaattcacccactcaccccgcgagngtgaggatattttttgnctgcgtcgtccctacntggcccgctacaacacacaatgtgatctttctctccgcgactactaacaccgccaccctctgtatgagaggtgtgtaatatgatgcgcgcgcacccactgtgtttctccgcggctagagtaatcgcgggcgctgaattgcagtccatgtgtggtggggactgtatgtgtgagtggggatgacaaaaacacttaattgtcgcgtgttatcactacgaggcgtccgagatgggtgagatcgttcaa

SEQ ID NO: 249904 - DNA, 445 bp, Homo Sapiens
  misc_feature (393)..(393): n is a, c, g, or t
  misc_feature (414)..(414): n is a, c, g, or t
  misc_feature (424)..(424): n is a, c, g, or t
catcaatcaagaaatttaatatggcaccaggagatttgcataattgacctatttggctttctgcatcaagtttggtgtcctgttgcagaagctgagcattgacggcacagaggcatgaaactgcagcgcttgataaaatagagcccagtattctgaggttagtgaaggaaaacacaaagacttgacagatgcactcccagatcgcatctcacagtcattcaaggtttagggcaaggcatttccatgtggagtctcaccttttcttgtcccagtcatgcatcttggagttccttggctaagtctgcagggaggagaagcagcaggcttgatttgcatcaataaaagcagcgatctgtgctggccatgctaaccctgttgggctattagggggtnggggcactctgtccagggggngtcactgggnccgtttagggtcagccttcag

SEQ ID NO: 249905 - DNA, 1232 bp, Homo Sapiens
gggacacacctccgcgggcactcacccaggccggccgctcacaaccgagcgcagggccccggagggagaccaggaaagccgaaggcggagcagctggaggcgaccagcgccgggcgaggtcaagtggatccgagccgcagagagggctggagagagtctgctctccgatgactttgcccactctcttcgcagtggggacaccggaccgagtgcacactggaggtcccagagcacgacgagcgcggaggaccgggaggctcccgggcttgcgtgggcatcacgtgccctccccccatgtccgtggaacacgcagacatctgggtcaagagctacagcttgtactccagggagcggtacatttgtaactctggtttcaagcgtaaagccggcacgtccagcctgacggagtgcgtgttgaacaaggccacgaatgtcgcccactggacaacccccagtctcaaatgcattagagaccctgccctggttcaccaaaggccagcgccaccctccacagtaacgacggcaggggtgaccccacagccagagagcctctccccttctggaaaagagcccgcagcttcatctcccagctcaaacaacacagcggccacaacagcagctattgtcccgggctcccagctgatgccttcaaaatcaccttccacaggaaccacagagataagcagtcatgagtcctcccacggcaccccctctcagacaacagccaagacctgggaactcacagcatccgcctcccaccagccgccaggtgtgtatccacagggccacagcgacaccactgtggctatctccacgtccactgtccttgctgtgtgggctgagcgctgtgtctctcctggcatgctacctcaagtcaaggcaaactcccccgctggccagcgttgaaatggaagccatggaggctctgccggtgacttgggggaccagcagcagagatgaagacttggaaaactgctctcaccacctatgaaactcggggaaaccagcccagctaagtccggagtgaaggagcctctctgctttagctaaagacgactgagaagaggtgcaaggaagcgggctccaggagcaagctcaccaggcctctcagaagtcccagcaggatctcacggactgccgggtcggcgcctcctgcgcgagggagcaggttctccgcattcccatgggcaccacctgcctgcctgtcgtgccttggacccagggcccagctt

SEQ ID NO: 249906 - DNA, 1001 bp, Homo Sapiens
gctgaccgagcgcaccccgcccccggcgccatcttcccgaccgcgagccgtccaggtctcagtgctgtgccccccccagagcctagaggatgtttcatgggatcccagccacgccgggcataggagcccctgggaacaagccggagctgtatgaggaagtgaagttgtacaagaacgcccgggagagggagaagtacgacaacatggcagagctgtttgcggtggtgaagacaatgcaagccctggagaaggcctacatcaaggactgtgtctcccccagcgagtacactgcagcctgctcccggctcctggtccaatacaaagctgccttcaggcaggtccagggctcagaaatcagctctattgacgaattctgccgcaagttccgcctggactgcccgctggccatggagcggatcaaggaggaccggcccatcaccatcaaggacgacaagggcaacctcaaccgctgcatcgcagacgtggtctcgctcttcatcacggtcatggacaagctgcgcctggagatccgcgccatggatgagatccagcccgacctgcgagagctgatggagaccatgcaccgcatgagccacctccccacccgactttgaggggcgccagacggtcagccagtggtgggtgtgcctcccagccaggcagagccccgcagtgcccgagaccctcccagccaggcgggagccccgcagtggccctgagggcctccccccccacatggccctggggctgcactcccagggctgcaaaccctgagcggcatgtcggcgtcaaatgagctggaccactcacaggtggggtcaaatgctgttcgacctggaatcagcctaacaagcccttcaaccggtttcctggatgcctggaccccgggggacttaccccttgccaaaaagggcaaaatcttgaggggatgggttccggtgcccccgggccgcccaccaagggcggggggcctcccacccaaattccctggtctgggggtc

SEQ ID NO: 249907 - DNA, 830 bp, Homo Sapiens
aagaagcgaggcctgggtggcgaattcggcacgagggaggaagtgaagttgtacaagaacgcccgggagagggagaagtacgacaacatggcagagctgtttgcggtggtgaagacaatgcaagccctggagaaggcctacatcaaggactgtgtctcccccagcgagtacactgcagcctgctcccggctcctggtccaatacaaagctgccttcaggcaggtccagggctcagaaatcagctctattgacgaattctgccgcaagttccgcctggactgcccgctggccatggagcggatcaaggaggaccggcccatcaccatcaaggacgacaagggcaacctcaaccgctgcatcgcagacgtggtctcgctcttcatcacggtcatggacaagctgcgcctggagatccgcgccatggatgagatccagcccgacctgcgagagctgatggagaccatgcaccgcatgagccacctcccacccgactttgagggccgccagacggtcagccagtggctgcagaccctgagcggcatgtcggcgtcagatgagctggacgactcacaggtgcgtcagatgctgttcgacctggagtcagcctacaacgccttcaaccgcttcctgcatgcctgagcccggggcactagcccttgcacagaagggcagagtctgaggcgatggctcctggtcccctgtccgccacacaggccgtggtcatccacacaactcactgtctgcagctgcctgtctggtgtctgtctttggtgtcagaacttttgggccgggcccctccccacaataaagatgctctccgaccttccaaa

SEQ ID NO: 249908 - DNA, 1487 bp, Homo Sapiens
  misc_feature (31)..(31): n is a, c, g, or t
  misc_feature (68)..(68): n is a, c, g, or t
  misc_feature (70)..(70): n is a, c, g, or t
  misc_feature (77)..(77): n is a, c, g, or t
  misc_feature (92)..(92): n is a, c, g, or t
  misc_feature (201)..(201): n is a, c, g, or t
  misc_feature (1007)..(1093): n is a, c, g, or t
  misc_feature (1103)..(1103): n is a, c, g, or t
agaaaaggaaattcagcagaaggtacaggantaatagcaatcccctgtagctctcaaagcaaattttnanctcattnttctttttctgcaancccagcagcagaatcgcccagagtcttccctggtagatgcaggttccatagcgacgttctcctgcaatgcacgctggtattctgcaatagcaggccatgtttttcctcnagcctggatgctttggagccaagctttcgtcccatgcaagggaaacaaccacttctgggatgtgcgctgcaatctgctccggggctgcagccacctcatcagctcttgcctggagtggctcagcctgggcctgcagggccaccaggagaatggcagcaaggatggcgagggtcctcatggctggggtcacctggaggagggagagcaggagcagctgtgtggggagggaggagccagcctggatttatagctctactgggagaaggctcggagacaagaaaccttcctcaatctcagtaagaggaggtgtgcattttacaagagaggcccattggtctcaaggttgctcgaatgctcctgttctcccagtttcatgctagtatacatctgtacctttaatgtctgtactaggttggagctaataatgacaagaaagaccctgctatgttactcgtgggttcacctgcttaaatattatgatttactttttaacattccaaaaagaatagaaattgcactttgattcaacaggctcagggaacaaatgcttcttattttctgaagatgggtcctgctgttctctggaggtctagattctggtgtcctatatgagtaccaatggaatagcgagtaattcacttcaggattcaggtgactcaccatcctcatgaagaggtttttgaggttatggggtgagtagtctcctgtaggaatcagggtggagaggacaatgattttatcaggctaaaggtgaaatcagctcagtgacacagagtggtttaagtaaaaaaaagaaagtttattannnnnnnnnnnnnnnnnnnnnnnnnnnnnnnnnnnnnnnnnnnnnnnnnnnnnnnnnnnnnnnnnnnnnnnnnnnnnnnnnnnnnnntaaatctttntctcacaccatgtagaaacatcaactcagaatgaattgaaaacctaaatgtaacaactgaaaccataaactactagaagtgtatagaaggataaagcttttgacattgatgtaggtaatgatttcttggctatgacaccaaaggcacaggcaataaaagggaaaatagacaagtgtggcttcatttaacgctaaagcatctgcacagcaaaggaaacaatcaaccgagtgaaaagataacccagaaaatgagagaaaatatttgcaaaacctacatggccgaaggggcaaatatctgaatacataaggaattccaacaactcaatagcaaaaatcaaacaacctgattgaaaaacagaccaaggacctaaataggttatctatc

SEQ ID NO: 249909 - DNA, 480 bp, Homo Sapiens
gaagatctgggacagaggactgctgtctgccctctctggtcaccctgcctagctagaggatctgtgaccccagccatgaggaccctcgccatccttgctgccattctcctggtggccctgcaggcccaggctgagccactccaggcaagagctgatgaggttgctgcagccccggagcagattgcagcggacatcccagaagtggttgtttcccttgcatgggacgaaagcttggctccaaagcatccaggctcaaggaaaaacatggcctgctattgcagaataccagcgtgcattgcaggagaacgtcgctatggaacctgcatctaccagggaagactctgggcattctgctgctgagcttgcagaaaaagaaaaatgagctcaaaatttgctttgagagctacagggaattgctattactcctgtaccttctgctcaatttcctttcctcatcccaaataaatgccttgttacaaa

SEQ ID NO: 249910 - DNA, 988 bp, Homo Sapiens
  misc_feature (77)..(100): n is a, c, g, or t
  misc_feature (638)..(676): n is a, c, g, or t
ctggtttttctttttgatccaaatgtgtgatctgccctgataaataacaagttatagtaccatctcccccgccaatnnnnnnnnnnnnnnnnnnnnnnnncccgtggcactatgtaaataaagtaagcatactttgttgttagtaaatagatgaggcatgcctgggaaatgctcccttggcataaatagcaatcaattataattagtaaacaggtgtaccaataaaaagaatttacatgataggttaacaaggaccaggaaagtgagtttcctgaaggagttctttgttcctgatcaaagaaattgatacctgttagcattcactgccaccatattttaaggagaaagaactctattggtgtcgtctgagcagccatttaaaaattggaatctaaaggatggttgctgatgtactgtgtggtctggtagaagtggggaaatatgagagatggaggaaaaacttgattatgtcttccatggcatatttactcttactttacttcgtgccaaatcaaatgaaacaagccgtcttacaagtcgttattgcctttaaaaatctgttccgtttttttcccaggtacttaaaatacaagtgccagtaagtggttcttatgtgttttggggggaaaattttattnnnnnnnnnnnnnnnnnnnnnnnnnnnnnnnnnnnnnnncaagatgaaccaaggttttttaaaagaattataggaaacacttcattctttataaaactttctataatgccttatttgaatgttaatcttatgtgctttctaaaaaatgttgtgaaataccaaacttatggattatcactaggttatcaagcatatattagtctttatcagaataaaatgaaatttcataactgtggctattactttgttcttggtccttcacagggcctgctccatcccacctgcctttctgctgcctgatgtctcaatggcttctgaatgaccgttctaataaatgatcttaaaacagtc

SEQ ID NO: 249911 - DNA, 586 bp, Homo Sapiens
attttaagtacctgtaaaaaaacggaccagatttttaaaggcaattaataacagcttgtacgagcgcttgtttcatttgacttggcatcaagtaaaggaagagtaaatacgccgtgaaagacgccatcgggcttttcctccacttctcccagaccacacagcacatcagcagccacccttgctgcccactcaggaatcactgtagattccaatttttaaatggctgctcagacgacaccaatagagttctttctccttaaaataaggcggcagtgaatgctaacaggtatcaagttctctgatcaggaacaaagaactccttcaggaaactcactcactttcctggtccttgttaacctatcacgtaaattctttttattggaacacctgtttactaattataattgattgctatttatgccaagggagcatttcccaggcatgcctcatctatttactaacaacaaagtaagcctactttatttacacagtgccacgggtttcctcttttttcttctctttttaaagggcgggggagatggtactataacttgttatttatcagggcagatcacacatttggatc

SEQ ID NO: 249912 - DNA, 1696 bp, Homo Sapiens
  misc_feature (143)..(143): n is a, c, g, or t
  misc_feature (156)..(156): n is a, c, g, or t
  misc_feature (160)..(162): n is a, c, g, or t
  misc_feature (165)..(165): n is a, c, g, or t
  misc_feature (177)..(177): n is a, c, g, or t
  misc_feature (179)..(179): n is a, c, g, or t
  misc_feature (181)..(182): n is a, c, g, or t
  misc_feature (228)..(228): n is a, c, g, or t
  misc_feature (251)..(251): n is a, c, g, or t
  misc_feature (257)..(257): n is a, c, g, or t
  misc_feature (260)..(260): n is a, c, g, or t
  misc_feature (284)..(322): n is a, c, g, or t
  misc_feature (325)..(325): n is a, c, g, or t
  misc_feature (327)..(327): n is a, c, g, or t
  misc_feature (330)..(333): n is a, c, g, or t
  misc_feature (353)..(353): n is a, c, g, or t
  misc_feature (362)..(362): n is a, c, g, or t
  misc_feature (376)..(376): n is a, c, g, or t
  misc_feature (393)..(393): n is a, c, g, or t
  misc_feature (432)..(432): n is a, c, g, or t
  misc_feature (441)..(441): n is a, c, g, or t
  misc_feature (446)..(446): n is a, c, g, or t
  misc_feature (450)..(451): n is a, c, g, or t
  misc_feature (476)..(476): n is a, c, g, or t
  misc_feature (500)..(502): n is a, c, g, or t
  misc_feature (504)..(504): n is a, c, g, or t
  misc_feature (529)..(530): n is a, c, g, or t
  misc_feature (561)..(561): n is a, c, g, or t
  misc_feature (565)..(566): n is a, c, g, or t
  misc_feature (576)..(576): n is a, c, g, or t
  misc_feature (578)..(578): n is a, c, g, or t
  misc_feature (861)..(884): n is a, c, g, or t
  misc_feature (1448)..(1449): n is a, c, g, or t
cattcagaagccattgaaacatcaggcagcagaaaggaaggagggatggagcaggcccggggaaggaccaagaacaaaggaagagccacagggatgaaagggcagggtaggcggataaagcactaatatatgcttgataaccnagtgataatccanaagnnnggnatttcacaacantntnnagaaagcacataagagtaacagtcaaataaggcattatagaaaggnttataaagaatgaaggggttccnataatnctnttaaaaaaccttggttcatcttgnnnnnnnnnnnnnnnnnnnnnnnnnnnnnnnnnnnnnnnaananaannnnccccccaaaacacataaganccacgtacnggcacggggagggnaaggaccggggaaaaanacggaacagagttttaaaggcaagaacgacgtggaaganggcgtgggncaggngagnnggcacgaaggaaaggaagaggaaanaggccagggaagacataagcaagnnntncctccagctctcatatttccccacnnctaccagaccacacaggacatcagcaaccanccgnnagatgccaantnttaaatggcggcgcagacgacaccaatagcggtctttctccttaaaaaatggtggcagtgaatgcgcaacaggtatcaatttctttgatcaggaacaaagaactccttcaggaaactcactttcctggtccttgttaacctatcatgtaaattctttttattggtacacctgtttactaattataattgattgctatttatgccaagggagcatttcccaggcatgcctcatctatttactaacaacaaagtatgcttactttatttacatagtgccacgggnnnnnnnnnnnnnnnnnnnnnnnnattggcgggggagatggtactataacttgttatttatcagggcagatcacacatttggatcaaaaagaaaaaccagcaagtagatcctaaaacacatttcttaacctgagtcataactgaaaacatagactttaattacattttgttgaaaattcattcaactttggtgcttgtaaaagcacttatgtcaatttttgacacaaatcataaccctcagtacacaggtattttcaaaggaaacaagtcatcttaaagtaatatttttctatatgctaattgatacatctttatagcaaattgaaaattctgagtaaactgaaagtatgcttaacgacaaaataaatacagcatatatggttaacatatacatttcttagtgtaaaggcagcagtgaatttgtgtctcacaataaatctgtaaatccagttgctttctttctggaattttatatagtgtctcaccatgttccacaatgctggaaatgtcttttttggcatcaatctatgcacaaatttctgattacgtattttctccaaatgacatgtaacttttttttaacttttnncagaaaatatggaaaactttatcaaccacttattaactgaacaaaaagttagattactaccaaaatggctcttttaatttttgctctaacagaatgttttaaagggttcagacatcggtgaaggtttttgagggataacctgcttaacaaaacacctatatttttttcaaaccgaatgccttttttagatttcccgaaacatttgggcacaatctcttttaagttcccaaaatataaaaaacagggg

SEQ ID NO: 249913 - DNA, 991 bp, Homo Sapiens
  misc_feature (819)..(819): n is a, c, g, or t
gcgggccgggcgtcatgggcggcctcttctggcgctccgcgctgcgggggctgcgctgcggcccgcgggccccgggcccgagcctgctagtgcgccacggctcgggagggccctcctggacccgggagcggaccctggtggcggtgaagcccgatggcgtgcaacggcggctcgttggggacgtgatccagcgctttgagaggcggggcttcacgctggtggggatgaagatgctgcaggcaccagagagcgtccttgccgagcactaccaggacctgcggaggaagcccttctaccctgccctcatccgctacatgagctctgggcctgtggtggccatggtctgggaagggtacaatgtcgtccgcgcctcaagggccatgattggacacaccgactcggctgaggctgccccaggaaccataaggggtgacttcagcgtccacatcagcaggaatgtcatccacgccagcgactccgtggagggggcccagcgggagatccagctgtggttccagagcagtgagctggtgagctgggcagatgggggccagcacagcagcatccacccagcctgaggctcaagctgcccttaccaccccatcccccacgcaggaccaactacctccgtcagcaagaacccaagcccacatccaaacctgcctgtcccaaaccacttacttccctgttcacctctgccccaccccagcccagaggagtttgagccaccaacttcagtgcctttctgtaccccaagccagcacaagattggaccaatcctttttgcaccaaagtgccggacaacctttgtggtggggnggggtcttcacattatcataacctctcctctaaaggggaggcattaaaattcactgtgcccagcacatgggtggtacactaattatgacttcccccagctctgaggtagaaatgacgcctttatgcaagttgtaaggagttgaacagtaaagaggaagttttgcacacgcaa

SEQ ID NO: 249914 - DNA, 1717 bp, Homo Sapiens
  misc_feature (36)..(36): n is a, c, g, or t
  misc_feature (41)..(41): n is a, c, g, or t
  misc_feature (1210)..(1210): n is a, c, g, or t
  misc_feature (1259)..(1271): n is a, c, g, or t
cccgggatgagggggcgagcgaccgagcgccgcgancgcgnaagtgaggtgcgtgcgggctgcagcgcagaccccggcccggcccctccgagagcgtcctgggcgctccctcacgccttgccttcaagccttctgcctttccaccctcgtgagcggagaactgggagtggccattcgacgacagtgtggtgtaaaggaattcattagccatggatgtattcatgaaaggactttcaaaggccaaggagggagttgtggctgctgctgagaaaaccaaacagggtgtggcagaagcagcaggaaagacaaaagagggtgttctctatgtaggctccaaaaccaaggagggagtggtgcatggtgtggcaacagtggctgagaagaccaaagagcaagtgacaaatgttggaggagcagtggtgacgggtgtgacagcagtagcccagaagacagtggagggagcagggagcattgcagcagccactggctttgtcaaaaaggaccagttgggcaagaatgaagaaggagccccacaggaaggaattctggaagatatgcctgtggatcctgacaatgaggcttatgaaatgccttctgaggaagggtatcaagactacgaacctgaagcctaagaaatatctttgctcccagtttcttgagatctgctgacagatgttccatcctgtacaagtgctcagttccaatgtgcccagtcatgacatttctcaaagtttttacagtgtatctcgaagtcttccatcagcagtgattgaagtatctgtacctgcccccactcagcatttcggtgcttccctttcactgaagtgaatacatggtagcagggtctttgtgtgctgtggattttgtggcttcaatctacgatgttaaaacaaattaaaaacacctaagtgactaccacttatttctaaatcctcactatttttttgttgctgttgttcagaagttgttagtgatttgctatcatatattataagatttttaggtgtcttttaatgatactgtctaagaataatgacgtattgtgaaatttgttaatatatataatacttaaaaatatgtgagcatgaaactatgcacctataaatactaaatatgaaattttaccattttgcgatgtgttttattcacttgtgtttgtatataaatggtgagaattaaaataaaacgttatctcattgcaacacacaanaatccccctaaatacctacaacccaacccccctaattcccttgtcttgnnnnnnnnnnnnnttcgcaaggttcctttaaaccatttcctttggccccccgacccccatccacgtctgggccacctcgccccttactctgctttcccccggagctcccgcgcccccagaccttagtggctttgggatcttttcccccgccacttaacaccctttcgtgtcgccaaacccaccggcccccgcaatttattcccccttcttttttttcccccgtggtaatttcccgtggcccttaacgtcacttgcatatctccatcccccctttttttccttccaccgttatcctcccgtcctttccggacccccattcgtacgcaacaaccccaccccaccgttttcaccccctttgccccgtgcaaatactctgcatccccgcatacacccctttcccaccacattatcgtcactgttgacaccccgaaccaccgctctcctatatttaacacatct

SEQ ID NO: 249915 - DNA, 1001 bp, Homo Sapiens
  misc_feature (150)..(159): n is a, c, g, or t
gggtttgcctcccactcccccagcctcgcgtcgccggctcacagcggcctcctctggggacagtcccccccgggtcgccgcctccgcccttcctgtgcgctccttttccttcttctttcctattaaatattatttgggaattgtttaaannnnnnnnnnaaaaaaagagagaggcggggaggagtcggagttgtggagaagcagagggactcagtgtggtgtaaaggaattcattagccatggatgtattcatgaaaggactttcaaaggccaaggagggagttgtggctgctgctgagaaaaccaaacagggtgtggcagaagcagcaggaaagacaaaagagggtgttctctatgtaggctccaaaaccaaggagggagtggtgcatggtgtggcaacagtggctgagaaagacccaaagagcaagtgacaaatgtttggaggagcagtggttgaccggtgtgacagcagtagccccagaagacagtggagggagcagggagcattgcagcagccactggctttgtcaaaaaaagggaccaagttggggcaagaatgaagaaggagcccccacaggaaggaaattctgggaaagatatgccctggcgggatccctgaccattgagggccttaatggaaaatggcctttcttgaaggaaagggttatcaaagactacgaaaccttggaaagcccctaaagaaatatccttttgcctccccggtttccttgaagaatctggcttgaaccgaatgtttcccattccttggaacaaagggcctcaggttccccaatggggccccaggtcattgaacatttttcctcaaaggtttttttacagggggtaattctgggaagatcctttccatttaaggcacgtcgaatttggaaagtaattctggtacccgtggcccccccacttttgcccatttttgggggggccttttccccttttctccgctggaaaagtggaaaaaccctggggcgaaacccgaggggctc

SEQ ID NO: 249916 - DNA, 563 bp, Homo Sapiens
  misc_feature (159)..(159): n is a, c, g, or t
gccgggggcaagaaggtgaagaaggcggccaagccagcgtccccaaagtgcccaagggccgcaagtgagcgtgtcggccggtcagagcggcgcgtgggcttttcggtgtttttgtttttctaccccaagtgacgtagattttgtacggctcacgccgcncggggcccgaagctgtgctctgagcctcagggaggggccccgggtcctctcagtctttcccctcccccaacgatgtagcgtttttcgttgtttgctttaggtttttgaaacagccccggcgacgcctctattggctctcggccttggcaacggccgtcgtcatggttactggcccctaggcgccgatggccgaggccgcgcccgcccaccgggcggggtcgctggttggccgggcccaggcgcgcggggaagcggaggccgcgcatcctttcccagctccccaccctccttgcctttgggtgcgcgacaaacaatcgctccgggctcagggctgcgcggctcttcccttcattccatgggcctttttttgggcacaataaagcgtttaaacctttcaaaaaaaa

SEQ ID NO: 249917 - DNA, 599 bp, Homo Sapiens; identical to SEQ ID NO: 13758

SEQ ID NO: 249918 - DNA, 1057 bp, Homo Sapiens
ctgccaacacactcatcgctgactatgttgccaagagtggcttctttcgggtgttcattggcgtgaatgaccttgaaagggagggacagtacatgttcacagacaacactccactgcagaactatagcaactggaatgagggggaaccagcgacccctatggtcatgaggactgtgtggagatgctgagctctggcagatggaatgacacagagtgccatcttaccatgtactttgtctgtgagttcatcaagaagaaaaagtaacttccctcatcctacgtatttgctattttcctgtgaccgtcattacagttattgttatccatcctttttttcctgattgtactacatttgatctgagtcaacatagctagaaaatgctaaactgaggtatggagcctccatcatcatgctcttttgtgatgattttcatattttcacacatggtatattattgacccaataactcgccaggttacatgggtcttgagagagaattttaattactaattgtgcacgagatagttggttgtctatatgtcaaatgagttgttctcttggtatttgctctaccatctctccctagagcactctgtgtctatcccagtggataatttcccagtttactggtgatgattaggaaggttgttgatggttaggctaacctgccctggcccaaagcccagacatgtacaagggctttctgtgagcaatgataagatctttgaatccaagatgcccagatcttttaccagtcacaccctatggccatggctatacttggaagttctccttgttggcacagacatagaaatgctttaaccccaaacctttatatgggggacttctagctttgtgtcttgtttcagaccatgtggaatgataaatactctttttgtgcttctgatctatcgatttcactaacatataccaagtaggtgctttgaacccctttctgtaggctcacaccttaatctcaggcccctatatagtcacactttgatttaagaaaaatggagctcttgaaatcaaaagaaaaaaatggggaattgttct

SEQ ID NO: 249919 - DNA, 1131 bp, Homo Sapiens; identical to SEQ ID NO: 178373
  misc_feature (419)..(421): n is a, c, g, or t
  misc_feature (423)..(429): n is a, c, g, or t
  misc_feature (431)..(432): n is a, c, g, or t
  misc_feature (434)..(436): n is a, c, g, or t
  misc_feature (438)..(438): n is a, c, g, or t
  misc_feature (440)..(440): n is a, c, g, or t
  misc_feature (443)..(443): n is a, c, g, or t
  misc_feature (456)..(456): n is a, c, g, or t
  misc_feature (626)..(636): n is a, c, g, or t
  misc_feature (824)..(824): n is a, c, g, or t
  misc_feature (1012)..(1012): n is a, c, g, or t
  misc_feature (1017)..(1017): n is a, c, g, or t
  misc_feature (1021)..(1021): n is a, c, g, or t

SEQ ID NO: 249920 - DNA, 743 bp, Homo Sapiens
  misc_feature (54)..(54): n is a, c, g, or t
tttctatagaagcagctcgctgtactgtcagtggctctttcgacgtgctctgantttccacattggcttctatgctatcaatcagatcaccctggtcatggatcatcatggccaaatctttaaatatctgattgacatccaaaatgtcagcctccagctgccgaattgccgtttctctttctttaataagttccaaatcctgctcagtgatggccacctcatcctcctggctctgcatctggttccactcctcatggctgtcaaatgagaccagctgctcctctctttgcccccagatacccttctctgcacagcctggaaattgtttaaggctgcagagaagtcattcatgaggcgttccttctgaagtctctgctggcgctgttctgaagtagataagggaaggggcaaggaccctaattctttcagcaattcatttgtttccttggcgagctgatttgtggagtgttgtaactgttgcagattttcctgtagcttgcttgagtcctgcttagttcctagctggctcatcaaattctttatctgagcagtggcttggctgatccgctggatgttgccgctgcacgtctggatgatgctgctgaagtcccggagctggggccccgagggccccgggttccggtacatgtctaagggaccgtatgacatgacgaggagctgagacctgctcgctctacaccgctctcctaccggaagcagccccagccgggacccgcaggctg

SEQ ID NO: 249921 - DNA, 676 bp, Homo Sapiens
  misc_feature (430)..(450): n is a, c, g, or t
ggggacgtactcgtcttggtgagagcgtgagctgctgagatttgggagtctgcgctaggcccgcttggagttctgagccgatggaagagttcactcatgtttgcacccgcggtgatgcgtgcttttcgcaagaacaagactctcggctatggagtccccatgttgttgctgattgttggaggttcttttggtcttcgtgagttttctcaaatccgatatgatgctgtgaagagtaaaatggatcctgagcttgaaaaaaaactgaaagagaataaaatatctttagagtcggaatatgagaaaatcaaagactccaagtttgatgactggaagaatattcgaggacccaggccttgggaagatcctgacctcctccaaggaagaaatccagaaagccttaagactaagacaacttgactctgctgattcnnnnnnnnnnnnnnnnnnnnnaaataaaaatactattaactggacttcctaatatatacttctatcaagtggaaaggaaattccaggcccatggaaacttggatatgggtaatttgatgacaaataatcttcactaaaggtcatgtacaggtttttatacttcccagctattccatctgtggatgaaagtaacaatgttggccacgtatattttacacctcgaaataaaaaatgtgaatactgctcc

SEQ ID NO: 249922 - DNA, 751 bp, Homo Sapiens
  misc_feature (480)..(501): n is a, c, g, or t
gggactaaggaccgagcaccaaataaccaaggaaaaggaagtgagttaaggacgtactcgtcttggtgagagcgtgagctgctgagatttgggagtctgcgctaggcccgcttggagttctgagccgatggaagagttcactcatgtttgcacccgcggtgatgcgtgcttttcgcaagaacaagactctcggctatggagtccccatgttgttgctgattgttggaggttcttttggtcttcgtgagttttctcaaatccgatatgatgctgtgaagagtaaaatggatcctgagcttgaaaaaaaactgaaagagaataaaatatctttagagtcggaatatgagaaaatcaaagactccaagtttgatgactggaagaatattcgaggaccccggccttggggagatcctgacctccctccaaggaagaaatccagaaaggccttaagactaacacaacttggactctgctgattcnnnnnnnnnnnnnnnnnnnnnnaaataaaaatactattaactgggacttcctaatatatacttctatcaagtggaaaggaaattcccggccccatggaaaactttggatatggggtaattttgatggacaaaataattcttccgctaaaagggtcattggtacagggtttttttattacttttcccagccttatttccaatcctggggggatggaaaagttaaaccaattggttggggcccacccgtattattttttaaccacccctcccgc

SEQ ID NO: 249923 - DNA, 456 bp, Homo Sapiens
  misc_feature (262)..(262): n is a, c, g, or t
cgcctgaagaaagtaagggaggtagccatgtgcaaagctggagcaagtggggtccaggcagaggaaacagtcagtgcaaatgtcctgaaatgggaatgtaattgagggaacatatcaggcaagtaggactgaaaccaagtgagtcagggagaaagatgaagtgaggtagagggaggaggggggtgcagatcataggctttgttggccattttaagtcctttggcttttctctgaagggaatggtgagcctatttattggagnagttttgaaccagaagaatgacataatctgacttacatcatacaagtatctctttggctctgcctaggttgaggcatgcatttgacttgaaccaaagctctccttcagatgatcttacatttcacatctctgcattggattacgagacaatggaagaattggaccttatcttgaaatattccagattccccctt

SEQ ID NO: 249924 - DNA, 1663 bp, Homo Sapiens
gtgctgattcagacatagaatggctacagaaagactttgggttgtatgtagtaaacatgtttgatactcatcaggcagcacgccttcttaacctgggcaggcactcactcgatcatctcctgaaactctactgcaacgtggactcaaacaagcaatatcagctggctgattggagaatacgccctctgcccgaggagatgctcagctacgcccgggatgacacccattacctgctatatatctatgacaaaatgaggctggagatgtgggagcgcggcaacgggcagcccgtgcagctgcaggtggtgtggcaacggagcagggacatctgcctcaagaaattcatcaaacctatcttcacggatgagtcctaccttgaactctataggaagcagaagaagcaccttaacacacagcagttgacagcctttcagctgctgtttgcctggagggataaaacagctcgcagggaagatgaaagttacggatatgtactgccaaaccacatgatgctgaaaatagctgaagaactgcctaaggaacctcagggcatcatagcttgctgcaacccagtaccgccccttgtgcggcagcagatcaacgaaatgcaccttttaatccagcaggcccgagagatgcccctgctcaagtctgaagttgcagccggagtgaagaagagcggaccgctgcccagtgctgagagattggagaatgttctctttggacctcacgactgctcccatgcccctccggatggctatccaatcatcccaaccagtggatctgtgccagttcagaagcaggcgagcctcttccctgatgaaaaagaagataacttgctgggtaccacatgcctgattgccacagctgtcatcacgttatttaatgaacctagtgctgaagacagtaaaaagggtccattgacagttgcacagaaaaaagcccagaacatcatggagtcctttgaaaatccatttaggatgtttctgccctcactgggacaccgtgctcccgtctctcaggcagcgaagttcgatccatcaaccaaaatctatgaaatcagcaaccgttggaagctggcccaggtacaagtacaaaaagactctaaagaagctgtcaagaagaaggcagctgagcaaacagctgcccgggaacaggcaaaggaggcgtgcaaagctgcagcagaacaggccatctccgtccgacagcaggtcgtgctagaaaatgctgcaaagaagagagagcgagcaacaagcgacccaaggaccacagaacagaaacaagagaagaaacgactcaaaatttccaagaagccaaaggacccagagccaccagaaaaagagtttacgccttacgactacagccagtcagacttcaaggcttttgctggaaacagcaaatccaaagtttcttctcagtttgatccaaataaacagaccccgtctggcaagaaatgcattgcagccaaaaaaattaaacagtcggtgggaaacaaaagcatgtcctttccaactggaaagtcagacagaggcttcaggtacaactggccacagagatagtcctggaagacacgtggcgcctgtggaccggaagcaccaaatgctggtgctgcttttgtacatacatatttttaaaccattaaaattcttcctgaagaaagctg

SEQ ID NO: 249925 - DNA, 1706 bp, Homo Sapiens
tttacattatcccagaaaacagaataaatggctttatttggtatcttcaagaagcttctccttccgtaggagatgtaggtgttgtgggagaaactgtaactggttttcgtgtaattctgtctagttctgcatgaacatctaagacaggcttctggcctgactttttggtggatggtggtaaaccactgcttccacctccagccccacctgcagggctaccaccactcacaccagggcctcctggagagccagtctttttactcaacaaactgttgaagaaatttgccagaacgccttcacttgtagctccagctttcatgtttggatcaattttttttgacccagcaggaatgggtgacacgctggcaacattagatgatacagatctatttggtgttcgtggggagcctcctgggactcttggtgaggcatccacaggccttccagctgcagttggtggttgctttgctaaaagggactgtagcttcataagaaacacctgatcatcttctgccataatttccttctcatgtacaaactttcgaacaggtggtttagttatgatgtcttcaaaattatcttctgcttttaatgtttgaaaattttcatgtaatattcctattttcttatcattatcccaccctgctggaataaatactgcatccttttccacaacaacagcaggaatcttatagggaaatccatatagtttctgaacgatgtatttatatactaagtctatatttttgttttcttttactgaagtgtaaataagtgctgcaccatactgtaaacaaaacttccggatatgtgactgaataaaatcaaaatgttcatctctgtagtcatgttctttctccaatacactaatggcatcacactttgtgcaaactactagtactggaatgcccaagttatgtgtaagtgtatccgcacccagaggtaaaactacactgtcatctttgtcttcttgtgacgcagtatttcttctctggggagaagccgggaaagtcttctcctggctctacatattcttggaagtctctaatcaacttttgttccatttgtttcatttcttcaggagggattttcagtttgtcaacatgttctctaacaacacttgcccatttctgtaaagaatccaaagcagtccaagcctttgacatgtcaacaaccagcataactagagtatccttcagagatacggcatccagtgaaaatttaaggaggcctttgtgatataggtctccatctaagatccaaacattacatcttgtttgatcatccctgtcttcatcatgcacatttaagtacaaatattccaatcctcttcctttcttatactcctctattccctgaatttttcttattaagcttgtttttccagctccatcttcacccagcagtagcacgttcttccccgcagggagcttggagcgcgagcgggtggagacctcgctgaggatgcaggaccaaaggttctgcccgtcctcgtcgtcgcctgccgcggcgccaccgttgcccgacgctatctcgttgcccaaggggccgccagtgtaagtcgaggataatcccggcggagaagaaccgaaggagccgactcgccccacggccgccatcttggtcgggaatcacaccactcccccacgcgtccgcgacgcgtgggtcgacgatatcccaagattcggaccgtaccagcgcttgct

SEQ ID NO: 249926 - DNA, 1646 bp, Homo Sapiens
acttatctgcagacttgtaggcagcaactcaccctcactcagaggtcttctggttctggaaacaactctagctcagccttctccaccatgagcctcagacttgataccaccccttcctgtaacagtgcgagaccacttcatgccttgcaggtgctgctgcttctgtcattgctgctgactgctctggcttcctccaccaaaggacaaactaagagaaacttggcgaaaggcaaagaggaaagtctagacagtgacttgtatgctgaactccgctgcatgtgtataaagacaacctctgggaattcatcccaaaaacatccaaagtttgggaagtgatcgggaaagggaacccaattgcaaccaagtcgaagtgatagccacactgaaggatgggaggaaaatctgcctggacccagatgctcccagaatcaagaaaattgtacagaaaaaattggcaggtgatgaatctgctgattaatttgttctgtttctgccaaacttctttaactcccaggaagggtagaattttgaaaccttgattttctagagttctcatttattcaggatacctattcttactgtattaaaatttggatatgtgtttcattctgtctcaaaaatcacattttattctgagaaggttggttaaaagatggcagaaagaagatgaaaataaataagcctggtttcaaccctctaattcttgcctaaacattggactgtactttgcatttttttctttaaaaatttctattctaacacaacttggttgatttttcctggtctactttatggttattagacatactcatgggtattattagatttcataatggtcaatgataataggaattacatggagcccaacagagaatatttgctcaatacattttttgttaatatatttaggaacttaatggagtctctcagtgtcttagtcctaggatgtcttatttaaaatactccctgaaagtttattctgatgtttattttagccatcaaacactaaaataataaattggtgaatatgaatcttataaactgtggttagctggtttaaagtgaatatatttgccactagtagaacaaaaatagatgatgaaaatgaattaacatatctacatagttataattctatcattagaatgagccttataaataagtacaatataggacttcaaccttactagactcctaattctaaattctacttttttcatcaacagaactttcattcattttttaaaccccaaaacttatacccacactattcttacaaaaaaattcacatgaaataaaaatttgctattgacttgctgtcatctattatcaaccttaacaggattgttgtgggaaaaaaagcgggaattttcctctcattattgtatacttggtatttcacagtttgaacaacaaaagatactaaattgatgatcggtgtcatccttaatgtagttatgataacagttccaatttattaaacattttaatatgccaggaatactaagtgtttcccatgcatgaactaaacaattttttaaaagatagatacgatctggttaaaagaacatcctctggagtttgaataatgaggtaacctggctctgccacttgttagctgtgtatatcaggtcatgttgcttaat

SEQ ID NO: 249927 - DNA, 663 bp, Homo Sapiens
gccttcgacgcacaatgcttgtagccaaagtcacctgcatcatcatttggctgctggcaggcttggcagtttgccagctataatccatcgaaatgtatttttcattgagaacaccaatattacagtttgtgctttccattatgagtcccaaaattcaaccctcccgataggctgggcctgaccaaaaatatactgggtttcctgtttccttttctgatcattcttacaagttatactcttatttggaaggccctaaagaaggcttatgaaattcagaagaacaaaccaagaaatgatgatatttttaagataattatgggcaatggtgctttcctttttcttttccgggattccccaccaaatattcacttttctgggatgtattggatttcaactaggcatcatacgtgactgtagaattgcagatattgtggacacggccatgcctatcaccatttgaatagctaattttaacaattgcctgaatcctcttttttatggctttctggggaaaaaaatttaaaagatattttctccagcttctaaaatatattcccccaaaagccaaatcccactcaaacctttcaacaaagcctgcaccatgttttgaggttgagtgacatgttcgaaacctgtccataaagtaattttgtgaaagaagga

SEQ ID NO: 249928 - DNA, 377 bp, Homo Sapiens
ggaaggcatactttatgatatataatctttttaccacaaactatatacacttctcagatattaaatcaaactaatatactaggaagacactactacttgggaccagtgcagcacctttacaagtagtttaacttttatatgtgactgtagtaacaccattatacaaataagccatcttacgggcattgatttggcagtgtaaacctataagacacaggttgaatttcacaaaaagatctgcaacttgacgactactgcttagcatatctttgtacaaaatgtgcagtaccaggtgcaagtgtagcacagttgctaatagctgaaaaccggcacgtgatgctcctctaacgatttaatatattctaaatacctttatg

SEQ ID NO: 249929 - DNA, 999 bp, Homo Sapiens
  misc_feature (890)..(928): n is a, c, g, or t
gccaaatcccactcaaacctttcaacaaaaatgagcacgctttcctaccgcccctcagataatgtaagctcatccaccaagaagcctgcaccatgttttgaggttgagtgacatgttcgaaacctgtccataaagtaattttgtgaaagaaggagcaagagaacattcctctgcagcacttcactaccaaatgagccttagctaacttttcagaattgaaggagaaaatgcattatgtggactgaaccgacttttctaaagctctgaacaaaagcttttctttccttttgcaacaagacaaagcaaagccacattttgcattagacagatgacggctgctcgaagaacaatgtcagaaactcgatgaatgtgttgatttgagaaattttactgacagaaatgcaatctccctagcctgcttttgtcctgttattttttatttccacataaaggtatttagaatatattaaatcgttagaggagcaacaggagatgagagttccagattgttctgtccagtttccaaagggcagtaaagttttcgtgccggttttcagctattagcaactgtgctacacttgcacctggtactgcacattttgtacaaagatatgctaagcagtagtcgtcaagttgcagatctttttgtgaaattcaacctgtgtcttataggtttacactgccaaaacaatgcccgtaagatggcttatttgtataatggtgttactaaagtcacatataaaagttaaactacttgtaaaggtgctgcactggtcccaagtagtagtgtcttcctagtatattagtttgatttaatatctgagaagtgtatatagtttgtggtaaaaagattatatatcataaagtatgccttcctgtttaaaaaaagnnnnnnnnnnnnnnnnnnnnnnnnnnnnnnnnnnnnnnntctaaactgctgttaattgattaaaatctggcaaagttatatttactttaaaataaaataattttattgcg

SEQ ID NO: 249930 - DNA, 1697 bp, Homo Sapiens
gtgactgtgagcatttgcagaaagtatagtgacgcttccgactgccacggtgaagattcacaggctttctgtgagaaattcagtggacagctaaacagccatggctgcttctatcagcaagtaaaaaccaaggtcttccagctgaagaggaaggagtatgaaatgaaacttcacactgaggcccagatccaagaagaaggaacagtggtggaattgactggaaggcagtccagtgaaatcacaagaaccataaccaaactctcatttgtgaaagtggactcacactttcgacagggaattcccttctttgggcaggtgcgcctagtagatgggaaaggcgtccctataccaaataaagtcatattcatcagaggaaatgaagcaaactattactccaatgctaccacggatgagcatggccttgtacagttctctatcaacaccaccaatgttatgggtacctctcttactgttagggtcaattacaaggatcgtagtccctgttacggctaccagtgggtgtcagaagaacacgaagaggcacatcacactgcttatcttgtgttctccccaagcaagagctttgtccaccttgagcccatgtctcatgaactaccctgtggccatactcagacagtccaggcacattatattctgaatggaggcaccctgctggggctgaagaagctctccttctattatctgataatggcaaagggaggcattgtccgaactgggactcatggactgcttgtgaagcaggaagacatgaagggccatttttccatctcaatccctgtgaagtcagacattgctcctgtcgctcggttgctcatctatgctgttttacctaccggggacgtgattggggattctgcaaaatatgatgttgaaaattgtctggccaacaaggtggatttgagcttcagcccatcacaaagtctcccagcctcacacgcccacctgcgagtcacagcggctcctcagtccgtctgcgccctccgtgctgtggaccaaagcgtgctgctcatgaagcctgatgctgagctctcggcgtcctcggtttacaacctgctaccagaaaaggacctcactggcttccctgggcctttgaatgaccaggacgatgaagactgcatcaatcgtcataatgtctatattaatggaatcacatatactccagtatcaagtacaaatgaaaaggatatgtacagcttcctagaggacatgggcttaaaggcattcaccaactcaaagattcgtaaacccaaaatgtgtccacagcttcaacagtatgaaatgcatggacctgaaggtctacgtgtaggtttttatgagtcagatgtaatgggaagaggccatgcacgcctggtgcatgttgaagagcctcacacggagaccgtacgaaagtacttccctgagacatggatctgggatttggtggtggtaaactcagcaggtgtggctgaggtaggagtaacagtccctgacaccatcaccgagtggaaggcaggggccttctgcctgtctgaagatgctggacttggtatctcttcccactgcgcccggccagaatggcattatatttaaatagttcataaagaagcacaaaagaatattatttcataacatgtaaaaattatataaaacgtaaatttccatgttgataaataaagttgtattggaacaaaaaaaga

SEQ ID NO: 249931 - DNA, 272 bp, Homo Sapiens
gactgagatgcacaggtgtagggagggctgtgacctccttcgcgtcctttgtgggatgctggtcctctgtggctcctggcccccaccccttcctgcacagaaggcacagcttccttctgagtttcgccgcatgatttgcagagagaggagaaccacatggagagtgtggtcaagcacctctgcacaatatgatgttgaaaattgtctggccaacaaggtggatttgagcttcagcccatcacaaagtctcccagccgaccctatgcagtctc

SEQ ID NO: 249932 - DNA, 823 bp, Homo Sapiens
  misc_feature (769)..(769): n is a, c, g, or t
ggggaggccggcgcggagaatctgctgtcgcctgcagctgctcgcctgtctccgtcggaagggagcccaagctttgcagagaacatgaacgattggatgcccatcgccaaggagtatgatccactcaaagcgggcagcattgatggcaccgatgaagacccacacgaccgcgcggtctggagggcaatgctggcacgatatgtccccaacaaaggtgtcataggagatcccctcctcaccctgtttgtggccagactaaacttgcagaccaaggaggacaaattaaaggaagtcttttcccgctatggtgacatccggcggcttcggctggtcagggacttggtcacaggtttttcaaagggctacgccttcatcgaatacaaggaggagcgtgccgtgatcaaagcttaccgagatgctgatggcctggttattgaccagcatgagatatttgtggactacgagctggaaaggactctcaaagggtggatccctcggcgacttggaggcggtcttgggggaaaaaaggagtctgggcaactgagatttgggggacgggaccggccttttcgaaaacctattaacttgccagttggtaaaaacgacctctatagagagggaaaacgggaaaggcgggagcgatctcgatccccgagaaagacactgggactcgaggacaaagggatcgagaccatgacaggggcccggagaaagagatggcaaagaaagagagccgacccggggtgggggcccgacaatgactgggganagagaaagggactttcgaaatgacaagaatccagggggaggggagagaaaggaa

SEQ ID NO: 249933 - DNA, 505 bp, Homo Sapiens
  misc_feature (480)..(480): n is a, c, g, or t
ttacaaattatctctctacaactgcttctccacttgtttctattcacaaacgccttatattaccacagttaattcttacattatctttcctccttcacaactgcctctcatagttgagtcctacagcctcaggaaatgttttcctggaagaaggaatgcctaacaaccccttgacgccaaactgggtaatctgctcacaaagagaaggcacccggtccacgaaagaaccaccatctaaaggggcttgactttcaccatcgccagcactttcttaactgagttcactgaccacaaagcttttacagttcgcagcggctatgctcgggaagccgctctctaagtaatccagggaagaggaatccagggtactttacggaagccactgggaaacgttccactccagtgactggctaatcctaatatcccaagctaagctgcggctcaagataaaaaacagaattttttcacgtcccatggccnttcataaatacaactttaaacttcc

SEQ ID NO: 249934 - DNA, 784 bp, Homo Sapiens
gccgccccgcgagaagaagagcgggaagaggcggacagcgaggccaagatttcagctgcgggacggtcaggggagacctccaggcgcagggaaggacggccagggtgacacggaagcatgcgacggctgctgatccctctggccctgtggctgggtgcggtgggcgtgggcgtcgccgagctcacggaagcccagcgccggggcctgcaggtggccctggaggaatttcacaagcacccgcccgtgcagtgggccttccaggagaccagtgtggagagcgccgtggacacgcccttcccagctggaatatttgtgaggctggaatttaagctgcagcagacaagctgccggaagagggactggaagaaacccgagtgcaaagtcaggcccaatgggaggaaacggaaatgcctggcctgcatcaaactgggctctgaggacaaagttctgggccggttggtccactgccccatagagacccaagttctgcgggaggctgaggagcaccaggagacccagtgcctcagggtgcagcgggctggtgaggacccccacagcttctacttccctggacagttcgccttctccaaggccctgccccgcagctaagccagcactgagctgcgtggtgcctccaggaccgctgcgggtggtaaccagtggaagaccccagcccccagggagaggaacccgttctatccccagccatgataataaagctgctctcccaaaaaaaaaaataacccatccaactaacaccctcctttcccgtcttctctctttt

SEQ ID NO: 249935 - DNA, 991 bp, Homo Sapiens
  misc_feature (145)..(145): n is a, c, g, or t
  misc_feature (617)..(617): n is a, c, g, or t
  misc_feature (634)..(634): n is a, c, g, or t
  misc_feature (845)..(845): n is a, c, g, or t
  misc_feature (847)..(847): n is a, c, g, or t
  misc_feature (871)..(871): n is a, c, g, or t
  misc_feature (881)..(881): n is a, c, g, or t
  misc_feature (922)..(922): n is a, c, g, or t
  misc_feature (925)..(925): n is a, c, g, or t
  misc_feature (944)..(946): n is a, c, g, or t
  misc_feature (948)..(949): n is a, c, g, or t
  misc_feature (951)..(951): n is a, c, g, or t
  misc_feature (969)..(969): n is a, c, g, or t
  misc_feature (971)..(971): n is a, c, g, or t
  misc_feature (980)..(980): n is a, c, g, or t
  misc_feature (982)..(982): n is a, c, g, or t
tgggctataacaaagaatcaacacctcaaaaatcaaatcttacaaataaataaatagaataggtgacagctgaaccacactgaaggcgatgggtggaaagaacccatcggagaaggattattgccttcacacgagcacaagcagncgcatccatgcatacatcacacacccatccacccacactcctgcatacaaaccacatacatgcgtgttttatgcatgtgccacacaacccatctgggaaggactcctgcctgcacacacatgaaagttccatagtttgaaaactgcatgggtctgacttctgacattctagggtggctgtgcctgaaacctgctggcctgcatgacctcttgctcctgggctcgagggccttagttggggatctggtcccatgatgggcagccctggctcccaccctcatgatgcccaggcctccctcacccttttcctctgctcaccccatgctccccgctcccccacagaggaaacggaaatgcctggcctgcatcaaactgggctctgaggacaaagttctgggccggttggtccactgccccatagagacccaagttctgcgggtaagaaggggcaagggtgcacaggtggtaacagngctgggaagatggatgnaagctgagcctatgggctggtctcgaggctaaagcttggccaagcaggagggagggcagtgggggctagaaagcgctgtgcctgtttggacattctccaagggatgtggaggggatgtggaggatgctggcagccctccactggcactgcccacccctcctacactgcctgaacagttttgggcactggcaggaggctgaggagcaccagnanacccagtgcctcagggtgcagcgngctggtgagnacccccacagcttctacttccctggacagttcgccttctcnaangccctgccccgcagctaannnannantggtaggcaccagggggntnagagcaccntntaggatgag

SEQ ID NO: 249936 - DNA, 367 bp, Homo Sapiens
cagtgctgggaggggtgagctgcctcataatctgcttttttgctttggtgcccctgtggcctgggtggccctcccgcccctccctggcaggacaatctgcttgtgtctccctcgctggcctgctcctcctgcagggcctgtgagctgctcacaactgggtcaacgctttaggctgagtcactcctcgggtctctccataattcagcccaacaatgcttggtttatttcaatcagctctgacacttgtttagacgattggccattctaaagttggtgagtttgtcaagcaactatcgacttgatccagttcaaccaagcaactgacaaatcaaaaacccacttgtcagttcagtaaaataatttggtc

SEQ ID NO: 249937 - DNA, 730 bp, Homo Sapiens
ccagtgtctagcagttcctgatacatagttttagctgaattttgggacatggccactgcttcaccaaggtctgatactagtaataaccacagtggaaggttgcagttacaggtaactgtttctagtgccaaacttaaaagaaaaaagaactggttcggaacagcaatatatacagaagtagttgtagatggagaaattacaaaaacagcaaaatccagtagttcttctaatccaaaatgggatgaacagctaactgtaaatgttacgccacagactacattggaatttcaagtttggagccatcgcactttaaaagcagatgctctattaggaaaagcaacgatagatttgaaacacgctctgttgatacacactagaaaattggaaagagtgaaagaacacttaaaactttccttggaaaacaagaatggcatagcacaaactggtgaattgacagttgtgcttgatggattggtcgattgagcaagaaaatataacaaactgcagctcatctccaaccatagaaatacaggaaaatggtgatgccttacatgaaaatggagagccttcagcaaggacaactgccaggttggctgttgaaggcacgaatggaatagataatcatgtacctacaagcactctagtccaaaactcatgctgctcgtatgtagttaatggagacaacacaccttcatctccgtctcaggttgctgccagacccaaaatacac

SEQ ID NO: 249938 - DNA, 336 bp, Homo Sapiens
gaaaaagggtggatgaaaatgcattccgaatctgtgagggcccaaaacagaatttaggggtgggtgaaagcacttgtgctttagctttttcatattaaatatatattatatttaaacattcatggcatagatgatgatttacagacaatttaaaagttcaagtctgtactgttacagtttgagaattgtagataacatcatacataagtcatttagtaacagcctttgtgaaatgaacttgtttactattggagataaccacacttaataaagaagagacagtgaaagtaccatcataattaacctaaatgtttgttatagcagagtttcttgttt

SEQ ID NO: 249939 - DNA, 411 bp, Homo Sapiens
  misc_feature (305)..(366): n is a, c, g, or t
aaaagaaaaaaacccatcacctgtctcagtagggcctgaaaggagagaagtagtgtggggaacccctgcggtatggagagtcacggccccttgacccagaccgagaccgtgagtagccatagctggtgcttctctcaggataaactcggatgtaggaagtttcaccttgaaatgcaaccaaaaacaaaaagagtaaaggggaaaaaaatcagagccagaagaataagcaaaccaacatctaacaataatagttaagtattgagcacttactgtgtactctgtgcctggcatgaggctatcctcannnnnnnnnnnnnnnnnnnnnnnnnnnnnnnnnnnnnnnnnnnnnnnnnnnnnnnnnnnnnnattaagacttaagttatatcatgtgcacaaggtaacactatatat

SEQ ID NO: 249940 - DNA, 1011 bp, Homo Sapiens
  misc_feature (826)..(844): n is a, c, g, or t
  misc_feature (884)..(884): n is a, c, g, or t
  misc_feature (904)..(904): n is a, c, g, or t
  misc_feature (978)..(978): n is a, c, g, or t
ggcctgggtggcgaattcggacgagggggctgcggcgggcccgcggcgtcgggcggtgcggatgtcgggctgggcggacgagcgcggcggcgagggcgacgggcgcatctacgtggggaaccttccgaccgacgtgcgcgagaaggacttggaggacctgttctacaagtacggccgcatccgcgagatcgagctcaagaaccggcacggcctcgtgcccttcgccttcgtgcgcttcgaggacccccgagatgcagaggatgctatttatggaagaaatggttatgattatggccagtgtcggcttcgtgtggagttccccaggacttatggaggtcggggtgggtggccccgtggtgggaggaatgggcctcctacaagaagatctgatttccgagttcttgtttcaggacttcctccgtcaggcagctggcaggacctgaaggatcacatgcgagaagctggggatgtctgttatgctgatgtgcagaaggatggagtggggatggtcgagtatctcagaaaagaagacatggaatatgccctgcgtaaactggatgacaccaaattccgctctcatgagggtgaaacttcctacatccgagtttatcctgagagaagcaccagctatggctactcacggtctcggtctgggtcaaggggccgtgactctccataccaaagcaggggttccccacactacttctctcctttcaggccctactgagacaggtgatgggaattttttctttattttttaggttaactgagctgctttgtgctcagaatctacattccagattgaggatttagtgtcttaggaaannnnnnnnnnnnnnnnnnnaaagaagaaaaaatactacataatttctaccagggccatnttagcagtgaaacattttanactgcagaaattgtggttttggttcagaaacaagttgtatatttttcacccctgattatgggaaaaaaatcagntctgtctttgtgggttgctctactatggagatc

SEQ ID NO: 249941 - DNA, 630 bp, Homo Sapiens
  misc_feature (70)..(104): n is a, c, g, or t
ttgagtagaggtgggggttttgctatgttgcctatctggtcgcgagctcctggcctaaaggatcctctgnnnnnnnnnnnnnnnnnnnnnnnnnnnnnnnnnnngcaaaagccaccgtgtgtttatttttcccattcccttcctttatctgcaatgcttttttctttaaagcagcctaatttacaagcttggccttgaattaaaagagaacccagaacccgctcttggagtttacgttctcaaaccaacatcagagcaactgtctatccccatataaataaagttatctacccctgctcctaactgggtacaagttatgactacaactcagtgattttttaaattagtgtgcctatttggtgaaatctgtgaacttaatcaaggacaaccacacatgtcaattactaaacatttaaaatatatttctaaacagaatgggccgactcagtcacagtaactgttgatctccatagtagagcaacccacaaagacagaactgatttttttcccataatcaggggtgaaaaatatacaacttgtttctgaaccaaaaccacaatttctgcagtttaaaatgtttcactgctaatatggccctggtagaaattatgtagttttttttcttctttt

SEQ ID NO: 249942 - DNA, 937 bp, Homo Sapiens
  misc_feature (841)..(857): n is a, c, g, or t
tactctgcgcgcgcctcgcggcgccccctccccccggggctgggtggcgaattcggcacgagggcgcctcggagcccgcggggacgctgcggggggacccgtgctgaggcggcggcggcgacgtgggctgcggcgggcccgcggcgtcgggcggtgcggatgtcgggctgggcggacgagcgcggcggcgagggcgacgggcgcatctacgtggggaaccttccgaccgacgtgcgcgagaaggacttggaggacctgttctacaagtacggccgcatccgcgagatcgagctcaagaaccggcacggcctcgtgcccttcgccttcgtgcgcttcgaggacccccgagatgcagaggatgctatttatggaagaaatggttatgattatggccagtgtcggcttcgtgtggagttccccaggacttatggaggtcggggtgggtggccccgtggtgggaggaatgggcctcctacaagaagatctgatttccgagttcttgtttcaggacttcctccgtcaggcagctggcaggacctgaaggatcacatgcgagaagctggggatgtctgttatgctgatgtgcagaaggatggagtggggatggtcgagtatctcagaaaagaagacatggaatatgccctgcgtaaactggatgacaccaaattccgctctcatgagggtgaaacttcctacatccgagtttatcctgagagaagcaccagctatggctactcacggtctcggtctgggtcaaggggccgtgactctccataccaaagcaggggttccccacactacttctctcctttcaggccctactgagacaggtgatgggaannnnnnnnnnnnnnnnnaggttaactgagctgctttgtgctcagaatctacattccagattgaggatttagtgtcttaggaaatttttttaattttt

SEQ ID NO: 249943 - DNA, 573 bp, Homo Sapiens
  misc_feature (548)..(548): n is a, c, g, or t
ccagattaaaaataagtcatgatatacagggtcaaataaaacccatctgatgagaatttatgatttgtaaggcgcgactccctagaccccttaggtaggaatttgggcaagataaaaaaatcagagcttagtcctcgtgtgaaggtgggtgccggccacagggtctcccacacgccagtttctctataccaattttaaatgaaattccagggaaataaatggaaacagacactgggcttttgagccagatgtcagaaggcagtggcctccactttgtatcactgggatgcagtgaatagacctcagggtgtaggtgagagcggttgggtgttacataatggggaggcatcagggctgaggatattttattctccaggctgtggtgcagcttttgagggtgctttgcaaggcataaggatggccttgttaggccgcacactccaggagaagcgatgaaggaagaggaggaggagaccctggttagtggagcagaccagactccaccccctcaccttggggatgtaacccagtcccttgcatgtgaaaancaaggcttcggagactcagctcccc

SEQ ID NO: 249944 - DNA, 981 bp, Homo Sapiens
  misc_feature (562)..(591): n is a, c, g, or t
  misc_feature (593)..(606): n is a, c, g, or t
cctacaccctgaggtctattcactgcatcccagtgatacaaagctggaggccactgccttctgacatctggctcaaaagcccagtgtctgtgttccatttatttccctggaatttcatttaaaattggtatagagaaaaaaaggatgtgacagaagcagagatgaccagaaagcacaggggcagggttctgactggcgtgtgggagaccctgtggccggcacccacctccacacgaggactaagctctgatttttttatcttgcccaaattcctacctaaggggtctagggagtcgcgccttacaaatcataaattctcatcagatgggttttatttgaccctgtatatcatgacttatttttaatctgactatggcataacattacaagacgaggcaaaaatatttaacccccaaatatatttctttgccctaccttgaacttgccctgcagagtctcttgtgaggagaatccacatcctataaagaagcccctttcccctttgttttccttcctttctttccagtccaggagatcatcaactaagagccaggcacccctnnnnnnnnnnnnnnnnnnnnnnnnnnnnnngnnnnnnnnnnnnnngaagtctgctgagagcttccctgcacaatcaacttggcctcacaatcctttatcttacgtgaacattcttgtcattgatctaggcttcagcaagctaacgattgtaacagaaatgttagattactcagctggagactaccgcgtgttcggtgctgcgtttgactacgatgatcgtatgaatgatggccgtccctaatgcaaacagcgcctgcactggaagtcagcctgggtgtacgcacgacaatgccggatcttagttcaaaaagaaacgtgtgttgggggttctggttcgcggttttgaagagcatttgaccttgggaaggcgccaattgggcgcgaggtgcggacggtcttcgtagggcaagagggcccagc

SEQ ID NO: 249945 - DNA, 264 bp, Homo Sapiens
ggggaagaccacgagggcagtgcctgcctcaggacctgccttccccaaaagctggcttcttgctccaaggagagagcattgacccacctgccagagtcttgccttttgcccaaaggagcctggtcttcagggctgcataggatggtctgttcctggtttcccagatgcataaaggaagacatatccctcccctgggcagcaaggctacaatgggagggagggagaacatgggagcatgtgaataaaatggcattaaatactgaa

SEQ ID NO: 249946 - DNA, 1477 bp, Homo Sapiens
ttcctccatggtgagcaacggcttccggccccgcagaagtctcctcttcatcagctgggacggtggtgactttggaagcgtgggctccacggagtggctagagggctacctcagcgtgctgcacctcaaagccgtagtgtacgtgagcctggacaacgcagtgctgggggatgacaagtttcatgccaagaccagcccccttctgacaagtctcattgagagtgtcctgaagcaggtggattctcccaaccacagtgggcagactctctatgaacaggtggtgttcaccaatcccagctgggatgctgaggtgatccggcccctacccatggacagcagtgcctattccttcacggcctttgtgggagtccctgccgtcgagttctcctttatggaggacgaccaggcctacccattcctgcacacaaaggaggacacttatgagaacctgcataaagtgctgcaaggccgcctgcccgccgtggcccaagccgtggcccagctcgcagggcagctcctcatccggctcagccacgatcgcctgctgcccctcgacttcggccgctacggggacgtcgtcctcaggcacatcggaaacctcaacgagttctctggggacctcaaggcccgcgggctgaccctgcagtgggtgtactcggcgcggggggactacatccgggcggcggaaaagctgcggcaggagatctacagctcggaggagagagacgagcgactgacacgcatgtacaacgtgcgcataatgcgggtggagttctacttcctttcccagtacgtgtcgccagccgactccccgttccgccacatcttcatgggccgtggagaccacacgctgggcgccctgctggaccacctgcggctgctgcgctccaacagctccgggacccccggggccacctcctccactggcttccaggagagccgtttccggcgtcagctagccctgctcacctggacgctgcaaggggcagccaatgcgcttagcggggatgtctggaacattgataacaacttctgaggccctggggatcctcacatccccgtcccccagtcaagagctcctctgctcctcgcttgaatgattcagggtcagggaggtggctcagagtccacctctcattgctgatcaatttctcattacccctacacatctctccacggagcccagaccccagcacagatatccacacaccccagccctgcagtgtagctgaccctaatgtgacggtcatactgtcggttaatcagagagtagcatcccttcaatcacagccccttcccctttctggggtcctccatacctagagaccactctgggaggtttgctaggccctgggacctggccagctctgttagtgggagagatcgctggcaccatagccttatggccaacaggtggtctgtggtgaaaggggcgtggagtttcaatatcaataaaccacctgatatcaataaaaaa

SEQ ID NO: 249947 - DNA, 1378 bp, Homo Sapiens
ggaaccgcctgcagaggatcaaggtggaaaacactgaagagaaccgccggcagttccatcaaccagagcatcgggggtgtgatccttttccacgagaccctctaccagaaggacagccagggaaagctgttcagaaacatcctcaaggaaaaggggatcgtggtgggaatcaagttagaccaaggaggtgctcctcttgcaggaacaaacaaagaaaccaccattcaagggcttgatggcctctcagagcgctgtgctcagtacaagaaagatggtgttgactttgggaagtggcgtgctgtgctgaggattgccgaccagtgtccatccagcctcgctatccaggaaaacgccaacgccctggctcgctacgccagcatctgtcagcagaatggactggtacctattgttgaaccagaggtaattcctgatggagaccatgacctggaacactgccagtatgttactgagaaggtcctggctgctgtctacaaggccctgaatgaccatcatgtttacctggagggcaccctgctaaagcccaacatggtgactgctggacatgcctgcaccaagaagtatactccagaacaagtagctatggccaccgtaacagctctccaccgtactgttcctgcagctgttcctggcatctgctttttgtctggtggcatgagtgaagaggatgccactctcaacctcaatgctatcaacctttgccctctaccaaagccctggaaactaagtttctcttatggacgggccctgcaggccagtgcactggctgcctggggtggcaaggctgcaaacaaggaggcaacccaggaggcttttatgaagcgggccatggctaactgccaggcggccaaaggacagtatgttcacacgggttcttctggggctgcttccacccagtcgctcttcacagcctgctatacctactagggtccaatgcccgccagcctagctccagtgcttctagtaggagggctgaaagggagcaacttttcctccaatcctggaaattcgacacaattagatttgaactgctggaaatacaacacatgttaaatcttaagtacaagggggaaaaaataaatcagttattgaaacataaaaatgaataccaaggacctgatcaaatttcacacagcagtttccttgcaacactttcagctccccatgctccagaatacccacccaagaaaataataggctttaaaacaatatcggctcctcatccaaagaacaactgctgattgaaacacctcattagctgagtgtagagaagtgcatcttatgaaacagtcttagcagtggtaggttgggaaggagatagctgcaaccaaaaaagaaataaatattctataaaccttca

SEQ ID NO: 249948 - DNA, 673 bp, Homo Sapiens
aaacatgatggtcatcaggcccttgtagacagcagcagggactttctcagtaacatacggacagtgtcaaaggtcatggtctccatcagaattacccgtgggttcaacaataggtaccagtccattctgcttgacagatgcgggcgtagcgacccagggcgttggcgttcttcctggatagcgaggctgaatgcacactggtcggcaatcctcagcacagcacgccacttcccagagtcaacaccatctttcttgtactgagcacagcgctctgagaggccatcaagcccttgaatggtggtttctttgtttgttcccttgaggatgtttctgaacagctttccctggctgtccttctggtagagggtctcgtggaaaaggatcacacccccgatgctctggttgatggaactgtccacagagaagaggatttctcggaactgccggcggttctcttcagtgttttccaccttgatcctctgcaggcggttccccatggtacctacagattcatctgcagccaggatcccctttccattggcaacaatgctctgggcaatttctgagagctccttcttctgctcctgggtgagggctggaaatcggtgggccatggtgacaggtagtttgggagagaagagtcctcctagatatcaaaagctgtgggtgaggc

SEQ ID NO: 249949 - DNA, 1436 bp, Homo Sapiens
tcttctgtctttattcccagaatgcttggttcaccctacaatataatcgctgcttttcttggttgcttctcttcttcatcttcccaaaataaaaagtatcctaggttcagttcttggtcctcttatctccttccctctgaagtgtttctgttgaaattgtccttcagtctcctgtcatcaactatactctagtgtggataattcaaaattctctctagcctcaatcctcatactgacctctactgccacattttcaaatgcctaatagacactattggtagataccttcttggcccgaagaaaacaatgcttctccgtgttggaaagtcaagccccaaatgtgaacatcatcaagtagataagaggtggcagcatcttaccatggcccgcttcataaaagcctcctgggttgcctccttgtttgcagccttgccaccccaggcagccagtgcactggcctgcagggcccgtccataagagaaacttagtttccagggctttggtagagggcaaaggttgatagcattgaggttgagagtggcatcctcttcactcatgccaccagacaaaaagcagatgccaggaacagctgcaggaacagtacggtggagagctgttacggtggccatagctacttgttctggagtatacttcttggtgcaggcatgtccagcagtcaccatgttgggctttagcagggtgccctccaggtaaacatgatggtcattcagggccttgtagacagcagccaggaccttctcagtaacatactggcagtgttccaggtcatggtctccatcaggaattacctctggttcaacaataggtaccagtccattctgctgacagatgctggcgtagcgagccagggcgttggcgttttcctggatagcgaggctggatggacactggtcggcaatcctcagcacagcacgccacttcccaaagtcaacaccatctttcttgtactgagcacagcgctctgagaggccatcaagcccttgaatggtggtttctttgtttgttcctgcaagaggagcacctccttggtctaacttgattcccaccacgatccccttttccttgaggatgtttctgaacagctttccctggctgtccttctggtagagggtctcgtggaaaaggatcacacccccgatgctctggttgatggaactgtccacagagaagaggatttctcggaactgccggcggttctcttcagtgttttccaccttgatcctctgcaggcggttccccatggtacctacagattcatctgcagccaggatcccctttccattggcaacaatgctctgggcaatttctgagagctccttcttctgctcctgggtgagggctggaaatcggtgggccatggtgacaggtagtttgggagagaagagtcctcctagatatcaaaagctgtgggtgag

SEQ ID NO: 249950 - DNA, 974 bp, Homo Sapiens
caggcccgtccataagaaaacttagttccaggctttgtagaggcaaagttgatagcattgagttgagagtgcatcctcttcactcatgccaccagacaaaaagcagatgccaggaacagctgcaggaacagtacggtggagagctgttacggtggccatagctacttgttctggagtatacttcttggtgcaggcatgtccagcagtcaccatgttgggctttagcagggtgccctccaggtaaacatgatggtcattcagggccttgtagacagcagccaggaccttctcagtaacatactggcagtgttccaggtcatggtctccatcaggaattacctctggttcaacaataggtaccagtccattctgctgacagatgctggcgtagcgagccagggcgttggcgttttcctggatagcgaggctggatggacactggtcggcaatcctcagcacagcacgccacttcccaaagtcaacaccatctttcttgtactgagcacagcgctctgagaggccatcaagcccttgaatggtggtttctttgtttgttcctgcaagaggagcacctccttggtctaacttgattcccaccacgatccccttttccttgaggatgtttctgaacagctttccctggctgtccttctggtagagggtctcgtggaaaaggatcacacccccgatgctctggttgatggaactgtccacagagaagaggatttctcggaactgccggcggttctcttcagtgttttccaccttgatcctctgcaggcggttccccatggtacctacagattcatctgcagccaggatcccctttccattggcaacaatgctctgggcaatttctgagagctccttcttctgctcctgggtgagggctggaaatcggtgggccatggtgacaggtagtttgggagagaagagtcctcctagatatcaaaagctgtgggtgaggcagcagc

SEQ ID NO: 249951 - DNA, 630 bp, Homo Sapiens
  misc_feature (127)..(127): n is a, c, g, or t
  misc_feature (241)..(241): n is a, c, g, or t
  misc_feature (252)..(252): n is a, c, g, or t
  misc_feature (264)..(264): n is a, c, g, or t
gtgctaagtctcagtactagcatagctgacacacagcttcagacacgcatgtcagcagtccacagatacttgtcacatagacagcatctgtgcaatctgcgacgagcaggcgtgcgtttctgatacnagctgatgacactgtcgcaatcctagacagacgcactccaagtcaacacatcttcttgtctagcacagcgctctgagggccatcaagccttgaatggtggttctttgttgttcntcaagagagcnacctccttggtntacttgatcccaccacgatcccctttcccttgagaatgtttctgacacagctttccctgcctgtccttctgatagaggtgtctcgtgaaaaaggatcacacccccaatgctctggttaatgaaactccaccttgatcctctgcagccggttccccatggtacctacagattcatctacagccaggatcccctttccattgccaacaatgctctggccaatttctgagagctccttcttcgtgctcctgggtgaggctctggaaatcggtggcccatggtcacaggtagtttgagagagaagagtcctcctagatatcaaagctgatgggtgaggcctcgtgccgaattcctgcagcccggggatcc

SEQ ID NO: 249952 - DNA, 662 bp, Homo Sapiens
catcaggggcctgtagcagcagccaggacttctcagtacatacttgcagtgttcccaggtcatggtctccatcaggaattacctctggttcaacaataggtaccagtccattctgctgacagatgctggcgtagcgacccagggcgttggcgttctcctggatagcgaggctggatgcacactggtcggcaatcctcagcacagcacgccacttcccaaagtcaacaccatctttcttgtactgagcacagcgctctgagaggccatcaagcccttgaatggtggtttctttgtttgttcccttgaggatgtttctgaacagctttccctggctgtccttctggtagagggtctcgtggaaaaggatcacacccccgatgctctggttgatggaactgtccacagagaagaggatttctcggaactgccggcggttctcttcagtgttttccaccttgatcctctgcaggcggttccccatggtacctacagattcatctgcagccaggatcccctttccattggcaacaatgctctgggcaatttctgagagctccttcttctgctcctgggtgagggctggaaatcggtgggccatggtgacaggtagtttgggagagaagagtcctcctagatatcaaaagctgtgggtgaggctcgcg

SEQ ID NO: 249953 - DNA, 384 bp, Homo Sapiens
cactgttatcctttccttaggaggagattcaacagttgcaattggtataaatcagaatgagataaaaaataaatacaaacccgtaattactgtatttctttctagagattattctagctgcctcagaacctagctactgcctttttagggcatctaagcataaatcattaagaaagatgtctctaagttgggttaatgaagaaattcaagcagtgtttagagttctaattggggatctccagctgtccacaactctagtaaccccaacatagtactcacagaagaaaatcaaacttaactcggacccagagacattttagtatgtgttggaaactttagcatctggtcaccatcctccaaagaattatttggattggaactcgg

SEQ ID NO: 249954 - DNA, 1153 bp, Homo Sapiens
  misc_feature (72)..(72): n is a, c, g, or t
aaagccctgaagttaggctgcagggcattggccctaggtaggtatagcagcttgtgaagaccgattgggtgnaacaagcccagaaagaacccgtgtgaacatactgtccttggcccacctggcagttaccaatggccccttcataaaagcctcctgggttgcctccttgtttcaagccttgccacccaagacagcaagtgcactggcctgcagggcccgtccataagagaaacttagtttccagggctttggtagagggcaaaggttgatagcattgaggttgagagtggcatcctcttcactcatgccaccagacaaaaagcagatgccaggaacagctgcaggaacagtacggtggagagctgttacggtggccatagctacttgttctggagtatacttcttggtgcaggcatgtccagcagtcaccatgttgggctttagcagggtgccctccaggtaaacatgatggtcattcagggccttgtagacagcagccaggaccttctcagtaacatactggcagtgttccaggtcatggtctccatcaggaattacctctggttcaacaataggtacctggatagcgaggctggatggacactggtcggcaatcctcagcacagcacgccacttcccaaagtcaacaccatctttcttgtactgagcacagcgctctgagaggccatcaagcccttgaatggtggtttctttgtttgttcctgcaagaggagcacctccttggtctaacttgattcccaccacgatccccttttccttgaggatgtttctgaacagctttccctggctgtccttctggtagagggtctcgtggaaaaggatcacacccccgatgctctggttgatggaactgtccacagagaagaggatttctcggaactgccggcggttctcttcagtgttttccaccttgatcctctgcaggcggttccccatggtacctacagattcatctgcagccaggatcccctttccattggcaacaatgctctgggcaatttctgagagctccttcttctgctcctgggtgagggctggaaatcggtgggccatggtgacaggtagtttgggagagaagagtcctcctagatatcaaaagctgtgggtgagctcgtgccgaattcggcacgag

SEQ ID NO: 249955 - DNA, 595 bp, Homo Sapiens
  misc_feature (101)..(101): n is a, c, g, or t
  misc_feature (120)..(120): n is a, c, g, or t
  misc_feature (149)..(149): n is a, c, g, or t
caccttggccctctccaaagccctggaaactaagtttctctaatggacgggccctgcagcccagtgcactggctgcctggggtggcaaggctgcaacaagnaggcaacccaggaggcttntatgaagcgggccatggctaactgccagncggccaaagcacagtatgttcacacgggttcttctggggctgcttccacccagtcgctcttcacagcctgctatacctactagggtccaatgccctccaatcctggaaattcgacacaattagatttgaactgctggaaatacaacacatgttaaatcttaagtacaagggggaaaaaataaatcagttattgaaacataaaaatgaataccaaggacctgatcaaatttcacacagcagtttccttgcaacactttcagctccccatgctccagaatacccacccaagaaaataataggctttaaaacaatatcggctcctcatccaaagaacaactgctgattgaaacacctcattagctgagtgtagagaagtgcatcttatgaaacagtcttagcagtggtaggttgggaaggagatagctgcaaccaaaaaagaaataaat

SEQ ID NO: 249956 - DNA, 687 bp, Homo Sapiens
acgaggccagccgctcctggatgccgtcctggccaacatccgctcacctgtcttcaaccattccctgtaccgcacattcgttccagccatgaccgccattcacggcccacccatcacggccccagtggtgtgcacccggaagcgcaggcttgaggatgatgagcggcagagcatccccagtgtgctccagggtgaggtggccaggctggaccccaagttcctggtaaacctggacccttctcactgcagcaacaatggcactgtccacctgatctgcaagctggatgacaaggacctcccaagtgtgccaccactggagctcagtgtgcccgctgactatcctgcccaaagcccgctgtggatagaccggcagtggcagtacgacgccaaccccttcctccagtcggtgcaccgctgcatgacctccaggctgctgcagctcccggacaagcactcggtcaccgccttgctcaacacctgggcccagagcgtccaccaggcctggctctcagccgcctagccaagactgcagggatggcccgcagcctcatcggggccaaggacacacgcctcctgtcagacacttctaggtgttggcttccttagagagcctggggttagggtagcttttctggttttatcttctggcctggggaccttgccaacgttcacacctgtacagatggg

SEQ ID NO: 249957 - DNA, 584 bp, Homo Sapiens
acatcaagcccctgcaccgcgtggtcaacaagatagacaagagtgaagacagaaaaaaggacctgagcaagatgaagagccttctggacattgtgacagacctctccaagcagtcccctgaagaccttgccaaagtgtgagatcgccctggagaaactcaagaatgacatggcggtgtggtgtgcacccggaagcacaggcttgaggacgatgagcggcagagcatccccagcatgctccagggcgaggtggccaggctggaccccaagtgcatgataaacctggactcttctcgctgcagcaacaatggcaccgtccacctggtctgcaagctgggcgagcgtccaggagggccaggccagcacaagttcgcaagccttgtccacagcaccaggtctctgccatccgagccgagaaaagcgtcaagaaatcttcctctaccggccctctctggccgatgagggctgccttacggaaccggatgagaggctccgggaggatgctcgcgactcgggcgcaccagcaatagcgctgcaacagctgagcgaaccgtcgcaggaggaccgcgcgcagctccttgtcct

SEQ ID NO: 249958 - DNA, 1271 bp, Homo Sapiens
acaggtgtatatagatgccaaggcattgatgataacacatctatactgtctgccacaacacagatagatgagctaagtctaggtattagacaaaatatcaacaataatgatgtcagcagtttcattaaaatcctcacagaaatgaagaatatgatttcacactcctgttttcaagtcatagtacctaacagatagaggtaacatatttctgctgccatgattcggcatatttcttaaaattgatgtactgtagaaaccagcattgttggtgagatatgacagaaattggctttatactgtaaggagccaacacatctgttatcaaaaaatttcccttcttctttgtccagagaatattttagctgcaattcttgtatcaggaaatgaaactttactcagtttcatagagcaatcaagggaacgctatgacaatgcaggcttatttgcctggtatgcccatgctaattcaacagctgctatttataactgagcattggtgtcttttggggaaacaaaggtatttttgattggtttagaagcattcacctgtcccatcttacttgtgagatttgccctccatatgtgcttgcacatccccttctccaccatgtccaatctcaaatttttttctgtatattatgtagtatgctctgttttggttatttaccttcctagttcagtagtatgtgtccttccatccatcatcaaaattacatagtcgtttagccttcttcttcagtgatggggtcatggttgcattggtattataaccattctcattatctgacctcttagaaaacatggtcacaatattcacaatgttaaaaaattaaactagcactatcttgttacaaagcacaccaattaatccacaggcaaagtcgaagatgaactattaataatcattatatacacttaagccacatcactttgaatgatgcaacgatggatggatgaccattctgaactacaaattatggttgccaatatcagtggtcaaatgggtgacaacaagtaaagatgaataatctgtgccgtatccatttgatagacaatgttgctttcagaccctctaaaacttacgggttttgtgcatttcctccaaccttccacactttgttgctaaaaccaggattatttacattccagggaagggtctcccaggacacaatgctctcaatgctaaaatgggatggttggttaccctattgggttgccattaaccaaagggctacctctccagaggcaggaggggaggcacatggaggtag

SEQ ID NO: 249959 - DNA, 454 bp, Homo Sapiens
  misc_feature (355)..(355): n is a, c, g, or t
  misc_feature (380)..(380): n is a, c, g, or t
  misc_feature (397)..(397): n is a, c, g, or t
  misc_feature (407)..(407): n is a, c, g, or t
  misc_feature (412)..(412): n is a, c, g, or t
  misc_feature (418)..(418): n is a, c, g, or t
  misc_feature (436)..(436): n is a, c, g, or t
cgggaacgtgggtgctctgaagttcctttactcactccttccttgggtctggtccaggtccaggagcagggtcctgatgcccagtgatgctgagcagccagccccgcttccttcctctttaaccatgctgtcttctgtcacctctctgttaaattttgtttttttctcttaaaacacttgttccaagtgtgaaggtttactcaatattttgggttcttctccatgagagaaggcacaatccagctggcatctagtcagccatctcttaagctctctacaaatcttgataaaatttattttatccaaactgtaaaaaggtacttattttagggaataggatcttcaatgagggaangtgggggggttattttttccaattnaatttatttaatagggngggggtattnccctnattgcntaggggtaaaggccggtnttagggggcttaaattcc

SEQ ID NO: 249960 - DNA, 2233 bp, Homo Sapiens
gggaatgaccttggctgctttcatctctggaagcgccacttctcagaaacacagagctttagctccgccaaaatgaaacactcattaaacgcacttctcattttcctcatcataacatctgcgtggggtgggagcaaaggcccgctggatcagctagagaaaggaggggaaactgctcagtctgcagatccccagtgggagcagttaaataacaaaaacctgagcatgcctcttctccctgccgacttccacaaggaaaacaccgtcaccaacgactggattccagagggggaggaggacgacgactatctggacctggagaagatattcagtgaagacgacgactacatcgacatcgtcgacagtctgtcagtttccccgacagactctgatgtgagtgctgggaacatcctccagctttttcatggcaagagccggatccagcgtcttaacatcctcaacgccaagttcgctttcaacctctaccgagtgctgaaagaccaggtcaacactttcgataacatcttcatagcacccgttggcatttctactgcgatgggtatgatttccttaggtctgaagggagagacccatgaacaagtgcactcgattttgcattttaaagactttgttaatgccagcagcaagtatgaaatcacgaccattcataatctcttccgtaagctgactcatcgcctcttcaggaggaattttgggtacacactgcggtcagtcaatgacctttatatccagaagcagtttccaatcctgcttgacttcaaaactaaagtaagagagtattactttgctgaggcccagatagctgacttctcagaccctgccttcatatcaaaaaccaacaaccacatcatgaagctcaccaagggcctcataaaagatgctctggagaatatagaccctgctacccagatgatgattctcaactgcatctacttcaaaggatcctgggtgaataaattcccagtggaaatgacacacaaccacaacttccggctgaatgagagagaggtagttaaggtttccatgatgcagaccaaggggaacttcctcgcagcaaatgaccaggagctggactgcgacatcctccagctggaatacgtggggggcatcagcatgctaattgtggtcccacacaagatgtctgggatgaagaccctcgaagcgcaactgacaccccgggtggtggagagatggcaaaaaagcatgacaaacagaactcgagaagtgcttctgccgaaattcaagctggagaagaactacaatctagtggagtccctgaagttgatggggatcaggatgctgtttgacaaaaatggcaacatggcaggcatctcagaccaaaggatcgccatcgacctgttcaagcaccaaggcacgatcacagtgaacgaggaaggcacccaagccaccactgtgaccacggtggggttcatgccgctgtccacccaagtccgcttcactgtcgaccgcccctttcttttcctcatctacgagcatcgcaccagctgcctgctcttcatgggaagagtggccaaccccagcaggtcctagaggtggaggtctaggtgtctgaagtgccttgggggcaccctcattttgtttccattccaacaacgagaacagagatgttctggcatcatttacgtagtttacgctaccaatctgaattcgaggcccatatgagaggagcttagaaacgaccaagaagagaggcttgttggaatcaattctgcacaatagcccatgctgtaagctcatagaagtcactgtaactgtagtgtgtctgctgttacctagagggtctcacctccccactcttcacagcaaacctgagcagcgcgtcctaagcacctcccgctccggtgaccccatccttgcacacctgactctgtcactcaagcctttctccaccaggcccctcatctgaataccaagcacagaaatgagtggtgtgactaattccttacctctcccaaggagggtacacaactagcaccattcttgatgtccagggaagaagccacctcaagacatatgaggggtgccctgggctaatgttagggcttaattttctcaaagcctgacctttcaaatccatgatgaatgccatcagtccctcctgctgttgcctccctgtgacctggaggacagtgtgtgccatgtctcccatactagagataaataaatgtagccacatttactgtgaaaaaaa

SEQ ID NO: 249961 - DNA, 727 bp, Homo Sapiens
cacacagacagtgacttctatgagcttacagcatgggctattgtgcagaattgattccaacaagcctctcttcttggtcgctaagctcctctcatatgggcctcgaattcagattggtagcgtaaactacgtaaatgatgccagaacatctctgttctcgttgttggaatggaaacaaaatgagggtgcccccaaggcacttcagacacctagacctccacctctaggacctgctggggttggccactcttcccatgaagagcaggcagctggtgcgatgctcgtagatgaggaaaagaaaggggcggtcgacagtgaagcggacttgggtggacagcggcatgaaccccaccgtggtcacagtggtggcttgggtgccttcctcgttcactgtgatcgtgccttggtgcttgtcaaacagcatcctgatccccatcaacttcagggactccactagattgtagttcttctccagcttgaatttcggcagaagcacttctcgagttctgtttgtcatgcttttttgccatctctccaccacccggggtgtcagttgcgcttcgagggtcttcatcccagacatcttgtgtgggaccacaattagcatgctgatgccccccacgtattccagctggaggatgtcgcagtccagctcctggtcatttgctgcgaggaagttccccttggtctgcatcatggaaaccttaactacctctctctcattcag

SEQ ID NO: 249962 - DNA, 651 bp, Homo Sapiens
gaaaaaaatgcaatacaagaagcaagaccaaacagatatctaaacactacaaccacttctactacgaaaggccaaaacagcagacttgattgtgacatcaggtgacctagtaatcagctgtgtattctagctggtgcctctaccagcttcccatgtgaccttgaacatgtcattgaatgctcgctaggcctctgtttctttatctgtgaaatgggcttgatattcctcctctaccccaaccgatagtgcagaatgaaaagtaactgaaagtccttcctccagggcaccatagtgtctgggtgaaaagtagaatataaactcggtagacttctggtcccttcattggtcatggaatggaccagtgcttgcttcattgagcaacagttctgttgttcagaattcctgggatttcacctcacttctgctctccctgcaggtgaatgtgatgttcatgcttgccattcttctgacattcttccaccccttttctgggtatattcgggaatgccgtacttgggaaaggaaagtccctctggcaattggcatagttcaggaaggccctcacttttcagccccgaggatgggtttgttcatcttccaccacctttgaagaactcgtgtcccaaaagactttgcctatcccagcaaaac

SEQ ID NO: 249963 - DNA, 1139 bp, Homo Sapiens
  misc_feature (393)..(419): n is a, c, g, or t
ggatcctgcaagtgatcagccgctccttcctctatgggagcaacgcggccttcctcacccttgctttcccttcagagcactttggcaagctctttgggctggtgatggccttgtcggctgtggtgtctctgctccagttccccatcttcaccctcatcaaaggctcccttcagaatgacccattttacgtgaatgtgatgttcatgcttgccattcttctgacattcttccacccctttctggtatatcgggaatgccgtacttggaaagaaagtccctctgcaattgcatagttcagaagccctcacttttcagccccgaggatggttttgttcatcttccaccacctttgaggacctcgtgtcccaaaagactttgcctatcccagcaaannnnnnnnnnnnnnnnnnnnnnnnnnnaaataaagacacacaaggacgtctgcgcagcaagaaaagaatctcagttgccaagcagattgatatcacacagactcaaagcaaaggcatgtggaacttctttatttcaaaacagaagtgtctccttgcacttagccttggcagacccttgactccaggggagatgacctgggggaggaagtgtgtcaactatttctttaggcctgtttggctccgaagcctatatgtgcctggatcctctgccacgggttaaattttcaggtgaagagtgaggttgtcatggccctcagctatgcttcctgggctctccctcaagagtgcagccttggctaagagaactcacagctctgggaaaaagaggagcagacagggttccctgggccccagtctcagcccagccactgatgctggatgaccttggcctgaccctggtctggtctcagaatcacttttcccatctgtaaaattgagatgaattttggtgttgaaagttcttcctggagcagatgtcctagaaggttttaggaatagtgacagagtcaggccaccccaagggccatgggagccagctgacctgcttgaccgaaggatttctgacagactatctttggggatgttttcaagaagggatataagttatttactttgggcatttaaaagaaaatttctctcgggaataattttatagaaaaataaagcttctgtgtctaaggcaaaaaa

SEQ ID NO: 249964 - DNA, 618 bp, Homo Sapiens
  misc_feature (25)..(25): n is a, c, g, or t
  misc_feature (50)..(50): n is a, c, g, or t
  misc_feature (53)..(53): n is a, c, g, or t
  misc_feature (73)..(105): n is a, c, g, or t
ggcacccacccacaaagcaagaccngtatttataagccgagggtcagggngcnaaactgcgggacccgtcagnnnnnnnnnnnnnnnnnnnnnnnnnnnnnnnnntccaccgctgggcccatcagtgtgtgttggggggatgcttggcagctgggggtgaggagacaacaaacctcgggaactggagccagagctgcggcctgactgacgccttttgatgctcacgggaaatttctgcccaggatctcagccccaggctggttgtttctacaaatctctctcaaatgtattattttggtgacaaaaatgaaggagctttgtaaatttttttaaaattatgaatcatatcaagtagttgtttacatttcttgaaaaaataggaactcgggcagcagaatcagattggcagaatctttagactacacaggcaataatcaagtctgctgttttggcctttcgtagtagaagtggttgtagtgtttagatatctgtttggtcttgcttcttgtattgcatttttttcaataaacaacaacaaaaagaactctctctgtgaggattgatccacttttaaatttctcttctaccagcaacttgggaaaaattaaatatgggtgg

SEQ ID NO: 249965 - DNA, 410 bp, Homo Sapiens
gggggagggtttaactgcccggaaacggaagtctcgttctttttcgtccttttccccggttgctgcttgctgtgagtgtctctagggtgatacgtgggtgagaaaggtcctggtccgcgccagagcccagcgcgcctcgtcgccatgcctcggaaaattgaggaaatcaaggacttcctgctcacagcccgacgaaaggatgccaaatctgtcaagatcaagaaaaataaggacaacgtgaagtttaaagttcgatgcagcagatacctttacaccctggtcatcactgacaaagagaaggcagagaaactgaagcagtccctgccccccggtttggcagtgaaggaactgaaatgaaccagacacactgattggaactgtattatattaaaatactaaaaatcctaaaa

SEQ ID NO: 249966 - DNA, 604 bp, Homo Sapiens
tccttctctgtctctttctctctgactttctgcgctgcgccttgctggccggctcgtcttcgctcacctccaccttattgaagatcagcccgggcggctcccgggctccgtgcaggccccctctggggtggcctccaccacctcctgggcctccatggctgcctcagccttcctggccttctctttcgcccacagctcctttcgcttcctcttcttccggtcccgttcctgctttttcgtccttttccccggttgctgcttgctgtgagtgtctctagggtgatacgtgggtgagaaaggtcctggtccgcgccagagcccagcgcgcctcgtcgccatgcctcggaaaattgaggaaatcaaggacttcctgctcacagcccgacgaaaggatgccaaatctgtcaagatcaagaaaaataaggacaacgtgaagtttaaagttcgatgcagcagatacctttacaccctggtcatcactgacaaagagaaggcagagaaactgaagcagtccctgccccccggtttggcagtgaaggaactgaaatgaaccagacacactgattggaactgtattatattaaaatactaaaaatcctaaaaa

SEQ ID NO: 249967 - DNA, 1106 bp, Homo Sapiens
  misc_feature (199)..(230): n is a, c, g, or t
gggggaggtggtgagagtcgcacgcgcagcggggaaggtgtgagtcgtgaacggcccgggtctccgccatggcctctctactcgccaaggacgcctacctgcagagcctggccaagaagatctgctcccattcggccccggaacagcaggcgcgcacgcgggctggcaaaactcaaggctcagaaactgcagggccccnnnnnnnnnnnnnnnnnnnnnnnnnnnnnnnnttccggaagcgagaagagaaggctgctgagcacaaggccaagtccttgggggagaaatctccagcagcctctggggccaggaggcctgaggcagccaaagaggaagcagcttgggcttccagctcagcagggaaccctgcagatggcctggccactgagcctgagtctgtctttgctctggatgttctgcgacagcgactgcatgagaagatccaggaggcccggggccagggcagtgccaaggagctgtcccctgccgccttggagaaaaggcggcggagaaagcaggaacgggaccggaagaagaggaagcgaaaggagctgcgggcgaaagagaaggccaggaaggctgaggaggccacggaggcccaggaggtggtggaggcaaccccagagggcgcctgcacggagccgcgggagccgcccgggctgatcttcaataaggtggaggtgagcgaagacgagccggccagcaaggcgcacgcagaaaaagagaagaggcagagggtgaaggggaacctcacgccgctgaccgggaggaactaccggcagctgctggagcgcctgcaggcacggcagagccggctcggacgagctgcgcggccaggatgaggggaaggcgcaggagctggaggcgaagatgaagtggaccaacctcctctacaaggcggagggcgtgaagatccgtgacgacgaacgcctgctgcaggaggccctgaagcgcaaggagaagcgcagggcgcagcggcagcgccggtgggagaagcgcacggccggcgtggtggagaagatgcagcagcgccaggaccggcggcggcagaacctgcgcaggaagaaggcggcccgcgccgagcgccgcctgctcagagcccgcaa

SEQ ID NO: 249968 - DNA, 626 bp, Homo Sapiens
  misc_feature (166)..(169): n is a, c, g, or t
  misc_feature (171)..(267): n is a, c, g, or t
aaagggtaaagtaccccccggggcttttttaagggtttgtattcaaaccattattaccccccggtttttcttgggggccgcggtggccaagtttaattttcttaagggccctcggggccaaaggagggggaaaaaaagttttttagggtcgagggggccgaaaaannnntnnnnnnnnnnnnnnnnnnnnnnnnnnnnnnnnnnnnnnnnnnnnnnnnnnnnnnnnnnnnnnnnnnnnnnnnnnnnnnnnnnnnnnnnnnnnnnnnntaggatttttagtattttaatataatacagttccaatcagtgtgtctggttcatttcagttccttcactgccaaaccggggggcagggactgcttcagtttctctgccttctctttgtcagtgatgaccagggtgtaaaggtatctgctgcatcgaactttaaacttcacgttgtccttatttttcttgatcttgacagatttggcatcctttcgtcgggctgtgagcaggaagtccttgatttcctcaattttccgaggcatggcgacgaggcgcgctgggctctggcgcggaccaggacagcaagcagcaaccggggaaaaggacgaaaaagaacgagacttccgtttccgggcccc

SEQ ID NO: 249969 - DNA, 1016 bp, Homo Sapiens
  misc_feature (372)..(476): n is a, c, g, or t
  misc_feature (481)..(487): n is a, c, g, or t
  misc_feature (489)..(505): n is a, c, g, or t
  misc_feature (543)..(564): n is a, c, g, or t
  misc_feature (673)..(682): n is a, c, g, or t
  misc_feature (694)..(694): n is a, c, g, or t
ggggcttgctgtgagtgtctctagggtgatacgtgggtgagaaaggtaatctggggcaatccactgccaggtcctggtccgcgccagagcccagcgcgcctcgtcgccatgcctcggaaaattgaggaaatcaaggacttcctgctcacagcccgacgaaaggatgccaaatctgtcaagatcaagaaaaataaggacaacgtgaagtttaaagttcgatgcagcagatacctttacaccctggtcatcactgacaaagagaaggcagagaaactgaagcagtccctgccccccggtttggcagtgaaggaactgaaatgaaccagacacactgattggaactgtattatattaaaatactaaaaatcctannnnnnnnnnnnnnnnnnnnnnnnnnnnnnnnnnnnnnnnnnnnnnnnnnnnnnnnnnnnnnnnnnnnnnnnnnnnnnnnnnnnnnnnnnnnnnnnnnnnnnnnnttttnnnnnnngnnnnnnnnnnnnnnnnnaaaaaaattttgcgcgcccctcccgcccctcaaaaaannnnnnnnnnnnnnnnnnnnnnggggcggggggggcccccccaaggaaaaaagaaaaaggggggcataaagtggttttcccagaaaaaacccgggggcaaaaagaaaagggggtggggattctcccccccnnnnnnnnnncgccccgggggnggagaaaccggaggggtgtttaaaaaaacaaatccccaagaaggggggtgttctgggaggggctcttttctggggatattttttatcaaaaggagggggtgccccaggcgggagttttcttaatattaaaaatttttccgccccccgccctgtgtgggatatttagtgggagaaagtggggggtgggaaattctctataaaaacctttcttgcccccccatgtgggaagacccccctcccaaaaaaggggggtgtgtgatgaacacccttttatattcccccgcgcgcggaggatataaaaccaacccttttgtgcgcccgc

SEQ ID NO: 249970 - DNA, 446 bp, Homo Sapiens
  misc_feature (147)..(164): n is a, c, g, or t
  misc_feature (171)..(172): n is a, c, g, or t
  misc_feature (174)..(175): n is a, c, g, or t
  misc_feature (312)..(312): n is a, c, g, or t
atcactctggaagaatatcgaaatgtaaagtggtcgaggagctgctgtcggaaaccctcacatcgagaaggagtccgctcgctccatcgccgacggggccatgatggaggcggccagcgtgtgcatgggacaaatggaacctgaacnnnnnnnnnnnnnnnnnncagaaannannacaaaacaaaaatcaaagaaaacgacattgagaccaagatgcacgtccgcttccttaacatggaaaccatggccctctgccactgacccaccgccacctccgcggagaaactgcactttgcaatggggccgcctccncgcgtagctggagcagcccaggcccggcggacagcctcttcctgcagcgccggtacatagccaaggctcgtcgtctgcgcaccttgtgtcttgtagggtatggtatgtgggacttcgctgtttttatctccaat

SEQ ID NO: 249971 - DNA, 631 bp, Homo Sapiens
ccgacaacaggaacctgcgcaagggacccagtggcctggctgatgagatcaatttcgaggacttcctgaccatcatgtcctacttccggcccatcgacaccaccatggacgaggaacaggtggagctgtcccggaaggagaagctgagatttctgttccacatgtacgactcggacagcgacggccgcatcactctggaagaatatcgaaatgtggtcgaggagctgctgtcgggaaacccttcacatcgagaaggagtccgctcgctccatcgccgacggggccatgatggaggcggccagcgtgtgcatggggcagatggagcctgatcaggtgtacgaggggatcaccttcgaggacttcctgaagatctggcaggggatcgacattgagaccaagatgcacgtccgcttccttaacatggaaaccatggccctctgccactgacccaccgccacctccgcggagaaactgcactttgcaatggggccgcctccccgcgtagctggagcagcccaggcccggcggacagcctcttcctgcagcgccggtacataaccaaggctcgtctgcgcaccttgtgtcttgtagggtatggtatgtgggacttcgctgtttttatctccaatat

SEQ ID NO: 249972 - DNA, 320 bp, Homo Sapiens
atgttatagaaatctgtttaatggtttaggaatgtgtacactctggctctgccaagtttccataaaggcaacttttccatgttttaaaaaatagatttggtataaagatttatatattcataaataggtggcatgaaaaattaccaaatgcaaatggaatacttgcgctgactgaagccctgttcaccccaagtccaggccctgcaggggtccgagggtctctgctggaggaggccccaactccggcagcctcttagggaagagaaactgaattaaatgtgtattaggaacccctccagctccttaagccaggtcgcact

SEQ ID NO: 249973 - DNA, 603 bp, Homo Sapiens
atggaacatagacagctttcagcctagaaaatttagtttgaacgtaagatggaggaacatcacctatggcactagcaagatcttcccagtctatttcattagtatcttccacatttatttcatacaacctttcaataaggctgaccttggcccgcagggcattcatgccatagtatatacgccgaccattagtcatcctcttggttagaatttctgtccacttacttttacactgcatccaatttctggtttgcactttagcttctacttctacccaagatatgcccttgtagagtttttcccgaacaattgataggcaactttcaggattttcttggagtttggaatccacctcttttaactcctggggagacatcttcttcagaatcacttcttcgacagccttgattagtttccgggtttcagacttactccaagcaccacgatttctttgactgctgatctgtgagaacttgagggccacggagaggctacttcgggccaccatctcaccaatcgtcttccagtcattcccaaggagagaatggtacatctttaacttctcagtatctccttcgctatacctgcctttgtaattgttga

SEQ ID NO: 249974 - DNA, 352 bp, Homo Sapiens
tccgctgcccgagaatgggaattctcttcactagaatatggagactgttcaatcaccaggagcacaaagttatcattgttgggctggataatgcagggactaccattctttaccaattttctatgaatgaagttgtacatacatctcctacaataggaagtaatgtagaagagatagtgattaataatacacgtttcctaatgtgggatattggtggccaagaatctcttcgttcttcctggaacacttactatactaacacagagtttgtaatagttgttgtggacagtacagacagagagaggatttctgttaactagagaagaactctattgttagcgcatgaggcctg

SEQ ID NO: 249975 - DNA, 1115 bp, Homo Sapiens
  misc_feature (635)..(703): n is a, c, g, or t
  misc_feature (725)..(733): n is a, c, g, or t
ccacaatcagccactgcgggcgaggagggcacgaggccaggttcccaagagctcaggaacatggagctgatccaggacacctcccgcccgccactggagtacgtgaagggggtcccactcatcaagtactttgcagaggcactggggcccctgcagagcttccaggcccggcctgatgacctgctcatcagcacctaccccaagtccggcaccacctgggtgagccagattctggacatgatctaccagggcggtgacctggaaaagtgtcaccgagctcccatcttcatgcgggtgcccttccttgagttcaaagccccagggattccctcaggtgtgtgagtgtgtcctgggtgcaaggggagtggaggaagacagggctggggcttcagctcaccagaccttccctgacccactgctcagggatggagactctgaaaaacacaccgatccccacgactcctgaacacaccacctgcccctggtctctgctccccccatactctctatccctctgaaggtccttccaccccaatcctcccgtttatgcacccctcctgccgccccaaaaccccaaaagggcagtacccccccgtgcccttgtctccatgtagcccattcccttctgaaccttnnnnnnnnnnnnnnnnnnnnnnnnnnnnnnnnnnnnnnnnnnnnnnnnnnnnnnnnnnnnnnnnnnnnntctcaagctcaccgtgcacttnnnnnnnnnacaagctcacccccacacgtttctgtattccacacccctcccctaatctatcggcatcgtcaccctccaccccaccatcgtatctgttcgagttcagtatccccgcccgagctataacctcttgcaacaccttcccacctagtgtctcgcccctcatcattgtacccacactattattccacgccatcgccctgttcccaatgcggaataaccgccagattttattggcgtccccccaccccgcctaatattaccccgtgtttttcccccaccgtagtttttatccacgcattgcgcacaaagccggacgaataaaccccttttgttgcgggaggacaatagagacagatatcccccctcccattgcccgccccactctccg

SEQ ID NO: 249976 - DNA, 1017 bp, Homo Sapiens
gatttcggccaccattcccctttgggccaggggactcccaggaaggccccttctccacagcttcagaggcggaaggtgaaggcttgcaggcctgccatcttctccggcatagtccgcatcgaagcgctcattttgcgccacggtgaaggtggtcttccagtccccagccatgcctttcctcatgaagggggagatgctgtggtccatgagctcctgggggacggtggtgtagttggtcatagggttcttcttcatctccttgaacgacgtgtgctgaaccatgaagtccatggtctcctctggcagggagcgccccacaaactccaggatcttttgaatctcccttttggggttctccttcatgtcttcatagaagaggtagagaacagggtgggtgcggctcagcttcccaccactccctgcacgtgctggtaccaggacccgtaggacacttctccagccatgaacttttccaggaagctgtcccaggtcccaggctcagggtgcgccttttccatacggtggaaatggtagtaggagaccgccacgtcctttgggtttcgggcaacatagaccaccttgaccttctgatccaacagagtctgagggagcagagccaggggcaggtgtgacttgatgagccgtgggggcggtgtgtctttcagagtctccagccctgagggttcccctggatcattgacctcaaggaagggcacccgtacgtagatgggagcccggttacacttctctaggtcgccgccctggtagatcatgtccagtatctggctcacccaggtggtgccagacttggggtaggtgttgatgagcaggtcatcaggtcgggcttggaagctctgcaggggccccagtgcctctgcaaagtacttgatgagcgggacccccttcacgtactccagtggcgggcgggaggtgtcctggatcagctccatgttcctgagctctcgggaacctgacctgttctctccttgccctcgtgccgaattcgccacccaggcc

SEQ ID NO: 249977 - DNA, 1117 bp, Homo Sapiens
ggcctgggtggcgaattcggcacgaggaacacccacaatcagccactgcgggcgaggagggcacgaggccaggttcccaagagctcagggaacgggcctggctctggcccctgacgcaggaacatggagctgatccaggacacctcccgcccgccactggagtacgtgaagggggtcccgctcatcaagtactttgcagaggcactggggcccctgcagagcttccaggcccggcctgatgacctgctcatcagcacctaccccaagtccggcactacctgggtaagccagattctggacatgatctaccagggtggtgacctggagaagtgtcaccgagctcccatcttcatgcgggtgcccttccttgagttcaaagccccagggattccctcagggatggagactctgaaagacacaccggccccacgactcctgaagacacacctgcccctggctctgctcccccagactctgttggatcagaaggtcaaggtggtctatattgcccgcaacgcaaaggatgtggcagtttcctactaccacttctaccacatggccaaggtgcaccctgagcctgggacctgggacagcttcctggagaagttcatggtcggagaagtgtcctacggatcctggtaccagcacgtgcaggagtggtgggagctgagcccgcacccaccctgttctctacctcttctatgaagacatgaaggagaacccgaaaagggagattcaaaagatccctggagtttgtggggcgctccctgccagaggagaccgtgggacttcatggttcagcacacctcgttccaggagatgaagaagaaccctatgaccaactacaccaccgtccccccagggagctcatggaacccagcatctccccctttcttgaagaaaaggcctgggctgggggacctggaagaacacccttcaccgctggcgcaaaatgaagcgccttccatgccggacttttggggaaaaaaaggggaaggctggaagccttaaccttccgccttctgaacctgggaaaaaggggctcctcgaaatccccggccaaagggaaaatggggcaattctaccccggaaccatgggggtcccaaataacaaggc

SEQ ID NO: 249978 - DNA, 1197 bp, Homo Sapiens
taggaaaccctcagctcagagaacaaccctgcattccccacacaacacccacaatcagccactgcgggcgaggagggcacgaggccaggttcccaagagctcaggaacatggagctgatccaggacacctcccgcccgccactggagtacgtgaagggggtcccgctcatcaagtactttgcagaggcactggggcccctgcagagcttccaggcccggcctgatgacctgctcatcagcacctaccccaagtccggcactacctgggtaagccagattctggacatgatctaccagggtggtgacctggagaagtgtcaccgagctcccatcttcatgcgggtgcccttccttgagttcaaagccccagggattccctcagggatggagactctgaaagacacaccggccccacgactcctgaagacacacctgcccctggctctgctcccccagactctgttggatcagaaggtcaaggtggtctatgttgcccgcaacgcaaaggatgtggcagtttcctactaccacttctaccacatggccaaggtgcaccctgagcctgggacctgggacagcttcctggagaagttcatggtcggagaagtgtcctacggatcctggtaccagcacgtgcaggagtggtgggagctgagccgcacccaccctgttctctacctcttctatgaagacatgaaggagaaccccaaaagggagattcaaaagatcctggagtttgtggggcgctccctgccagaggagaccgtggacttcatggttcagcacacgtcgttcaaggagatgaagaagaaccctatgaccaactacaccaccgtcccccaggagttcatggaccacagcatctcccccttcatgaggaaaggcatggctggggactggaagaccaccttcaccgtggcgcagaatgagcgcttcgatgcggactatgcggagaagatggcaggctgcagcctcagcttccgctctgagctgtgagaggggctcctggagtcactgcagagggagtgtgcgaatcaaacctgaccaagcggctcaagaataaaatatgaattgagggcccgggacggtaggtcatgtctgtaatcccagcaatttggaggctgaggtgggaggatcatttgagcccaggagttcgagaccaacctgggcaacatagtgagattctgttaaaaaaat

SEQ ID NO: 249979 - DNA, 809 bp, Homo Sapiens
  misc_feature (43)..(43): n is a, c, g, or t
  misc_feature (94)..(94): n is a, c, g, or t
  misc_feature (168)..(168): n is a, c, g, or t
  misc_feature (181)..(181): n is a, c, g, or t
  misc_feature (383)..(383): n is a, c, g, or t
  misc_feature (548)..(548): n is a, c, g, or t
gaagaggtagagaacaggggtgggtgcggctcagctcccaccnctcttgcacgtgctggtaccaggacccataggacacttctccagccatgancttctccaggaagctttcccaggtcccagggtgagggtacactttggccatgtggtagaagtggtagtaggaanccgccacatcctntgcgttgcgggcaacatagaccaccttgaccttctgatccaacagagtctgggggagcagagccaggggcaggtgtgtcttcaggagtcgtggggctggtgtgtttttcagagtctccatccctgagggaatccctgggactttgaactcaaggaagggcacccgcatgaagatgggagctcggtgacacttttccaggtcnccgccctggtagatcatgtccagaatctggctcacccaggtggtgccggacttggggtaggtgctgatgagcaggtcatcaggccgggcctggaaactctgcaaggggcccaagtgcctctgcaaaagtacttgaatgaagcgggacccccttcacgtaactccnagtggcgggcgaagagatgtccctggatcagctccatgttcctgcgtcaggggccagagccaggcccgttccctttcattcacctgcggagctgttcaaaatccccaggccctgggccatggtgcagaccagtgaaagcaccctcgtggcgcggggcccagatgtcagggtgtgtgaaggtctccaggagagtccagctgcactgaggaacctctaggaccttcctgtgctgtctgagctcttgggaacctggccttgtgc

SEQ ID NO: 249980 - DNA, 1216 bp, Homo Sapiens
ctggaacgtctgaggttatcaataagctcctcctccacgtcagctcccagtcatggtcacacagcggcagtgataaagagcacagggatgtggagagatctcaagaacaagaatctgaagcacaaagataccatgtggatgacggcaggaggcacagagctcaccacgagcctgaacggctttccagaaggagaccggccagccttgcagctgtatgatccaggagctcgctcccgagcgcgagagtgtggcggaaacaggaggatctgcaaggcagaaggttcggggactggtcctgagaagagggaagaggcagagtgagtcactgcacgcacctggcctccatggacgagcaagggcatcccagaaacgtgtaaatgaccccgagtgtgactgggaaggagaacttattccttaccaggaaactggaagctaaaaatacagagggtgacgtagaaacacgcagaaaccattctaaagaaagtagtgatcttgtattaaatcgagcagaattctcacagattttaccattcctgttataaactagtatttgttgtttagccaaaacagaaaatgatttccactggacagtagaaaaatatgtgtaaaatagggaagaaagttagtattggatcagtgtgagtcctgaagcactttcagtgctgtgagaacgacatccactttgggtttcattcgtttgtaagcagaggagctgtcagtcactcgtgcttctcggtggcctctgagccatggtgtcgagtgaagagtagttcttgtttgttacaacctttgtgagtcagccatgcccgcaaagcgtgctgtgttttagtcctggtaggaatatttatcagagttcacactatataaaacccaacagcttcaactattgccctttcaacagttttgccactgaccggatagaaacggtttcagtctctggatggatgtgtttgtggtttgtaaccattacggtttaaaccatggtttaagaatttgcccaaataacagaaattttgttcgggaagggataaactagatatagcatacagagcctgtttttgagttttagatactttatttgtaaataacttaaaatagctttctgaaaccgtgcattctgtagtttcttcctttcagtgaaattgctaaatgtcaatgtatttttggcactgcgattttaaccatttattaaataaaaattttgttaaagaaaaaa

SEQ ID NO: 249981 - DNA, 832 bp, Homo Sapiens
  misc_feature (689)..(722): n is a, c, g, or t
cagataaacagaagaaaattgcagagaaagaagtaaggattaagcttcttaagaaaccagaaaagggagaggaaccaaccacagagaaaccaaaagaaagaggagaggagattgatactggaggtggcaagcaggaatcctgtgcccccggtgcagtcgtaaaagccaggcccatggaaggctcgctggaggagccccaggagacgtcacacagcggcagtgataaagagcacagggatgtggagagatctcaagaacaagaatctgaagcacaaagataccatgtggatgacggcaggaggcacagagctcaccacgagcctgaacggctttccagaaggagtgaggatgagcagagatgggggaaaggacctggccaagacagagggaagaaggggagccaggacagcggggctccgggggaggccatggagagactgggaagagcgcagaggtgtgacgacagtccagcacccaaataagaggggatgggaaaacaaggacggccagccctgccccctgcattgatccacggagcctcgcttccgagcgccgagagggtggtgggaaacaggagggactggcaagggcacaaagtctcggggcactgggtcctgagaaacaggggaaaaagtacaatggcggtcccctgcgtgtaacctggccctcccatgggaggaaccaaaggnnnnnnnnnnnnnnnnnnnnnnnnnnnnnnnnnngcgcctgggaaaaggaaaaccttattcccttacccaggaaacccggccaccccacaaataaaaaatggcggacggtaaaaaaccgccccgcaaacctctccctgatgaaa

SEQ ID NO: 249982 - DNA, 389 bp, Homo Sapiens
gcgccgcagccatggagcagcttcgcgccgccgcccgtctgcagattgttctgggccacctcggccgcccctcggccggggctgtcgtagctcatcccacttcagggactatttcctctgccagtttccatcctcaacaattccagtatactctggataataatgttctaaccctggaacagagaaaattttatgaagaaaatgggtttctagtaatcaaaaatcttgtacctgatgccgatattcaacgctttcggaatgagtttgaaaccatttcgaaatccgaatatgctccaagtgagaagatgatcacgaaggtccaggatttccaggaagatggagctcttcagatactgcactctccccgagattctgtatgtgggtgcttc

SEQ ID NO: 249983 - DNA, 1581 bp, Homo Sapiens
atcacgcccacgccgcgaggcctgggtggcgaattcggcacgaggccgcgccgcagccatggagcagcttcgcgccgccgcccgtctgcagattgttctgggccacctcggccgcccctcggccggggctgtcgtagctcatcccacttcagggactatttcctctgccagtttccatcctcaacaattccagtatactctggataataatgttctaaccctggaacagagaaaattttatgaagaaaatgggtttctagtaatcaaaaatcttgtacctgatgccgatattcaacgctttcggaatgagtttgaaaaaatctgcagaaaggaggtgaaaccattaggattaacagtaatgagagatgtgaccatttcgaaatccgaatatgctccaagtgagaagatgatcacgaaggtccaggatttccaggaagataaggagctcttcagatactgcactctccccgagattctgaaatatgtggagtgcttcactggacctaatattatggccatgcacacaatgttgataaacaaacctccagattctggcaagaagacgtcccgtcaccccctgcaccaggacctgcactatttccccttcaggcccagcgatctcatcgtttgcgcctggacggcgatggagcacatcagccggaacaacggctgtctggttgtgctcccaggcacacacaagggctccctgaagccccacgattaccccaagtgggaggggggagttaacaaaatgttccacgggatccaggactacgaggaaaacaaggcccgggtgcacctggtgatggagaagggcgacactgttttcttccatcctttgctcatccacggatctggtcagaataaaacccagggattccggaaggcaatttcctgccatttcgccagtgccgattgccactacattgacgtgaagggcaccagtcaagaaaacatcgagaaggaagttgtaggaatagcacataaattctttggagctgaaaatagcgtgaacttgaaggatatttggatgtttcgagctcgacttgtgaaaggagaaagaaccaatctttgaaatagccatctgctataactctttcaacagaaaaccaaaaccaaacgaaatgtctaaggaaaatgttttcttaatgagatgatgtaaccttttctatcacttgttaaaagcagaaaacatgtatcaggtacttaattgcatagagttagttttgcagcacaatggtgttgctttaatggaaaaaaaaaacagtaaaagtgaaatattactgttttaaggaaaactaatttagggtggcagccaataaaggtggttggtgtctaatttaagtgttaaatcaatttctttcattcagttagctctttacccaagaagaagtgaatgatttggagcttagggtatgttttgtatcccctttctgataaacccattccctaccaattttatgtcataagagatttttttcccccaaatctagaacaatgtataatacattcacatctagtcaagggcataggaacggtgtcatggagtccaaataaagtggatattcctgctcggacaag

SEQ ID NO: 249984 - DNA, 2453 bp, Homo Sapiens
  misc_feature (44)..(44): n is a, c, g, or t
  misc_feature (83)..(83): n is a, c, g, or t
  misc_feature (482)..(482): n is a, c, g, or t
  misc_feature (510)..(510): n is a, c, g, or t
  misc_feature (2345)..(2376): n is a, c, g, or t
ttcccgggatggaacatggcgacttgcgccgaaatcctgcggangagttccccgaaattgacggacaggtcttcgactacgtnaccggcgtcttgcacagcggcagcgcggacttcgagtctgtggatgacctggtggaagctgtaggggaactattgcaagaggtgtccggggacagcaaggatgacgcgggcatcagggccgtgtgccagcgcatgtacaacactctgcgtctggctgagccacaaagccagggaaatagccaggtgctactggacgcccctatccagttgtcaaagataacggagaactacgactgtggaaccaaacttccaggactgctaaagagggaacagtcctcgacagttaatgcaaagaagttagagaaggccgaggctcgacttaaggcaaagcaggagaagcgctcagagaaggacacgctcaagaccagcaaccctctagtcttagaagaggcatcagcnagccaggcaggcagcagaaaggagagtnggttggaatcatctggcaagaacaaatcctatgatgtgcgaattgagaactttgatgtgtcttttggcgatagagtactgctggctggagcggatgttaacctggcatggggccgccgtatacgggctggtggggcggaatgggttggggaagacaacgttactgaagatgctggccacccggagtctgcgggttccagcccacatttccctgctgcacgttgagcaagaagttgctggagataacactcctgccctgcagagtgtgctggagagtgacagtgtgcaaaaggatttgctacggagggagcgggagctcactgcccagattgctgctggcagggcggagggctctaaagctgcagagctggcagaaatctatgccaaactggaggagattgaggctgacaaggcacctgccagggcatcagtcattctcgctgggcttggctttacccctaaaatgcagcagcagcccacccgggagttctcaggtggctggaggatgaggctggccctggcccgggccctctttgctaggccagatcttctgctgttagatgaacctacaaacatgctggatgtcagggccatcctgtggctggagaattacctgcagacgtggccctccaccatcctagtcgtctcccacgaccgcaacttcttgaatgccatcgccacagacatcatccacctgcacagccagcggctagatggttaccggggagactttgagaccttcatcaagagtaagcaggagcggctgctcaaccagcagcgtgaatatgaggcgcagcagcagtatcgccagcacatccaggttttcattgaccggtttcgctacaatgccaacagggcctctcaagtgcagagtaaactcaagatgctggagaagctgcctgagctgaagcctgtggacaaggaatcagaggtcgtaatgaagttccctgatgggtttgagaagttctcgccgccaattctgcagctagatgaggtggatttctactacgatccgaagcacgtcatcttcagtcgcctctctgtgtctgctgatctcgagtctcgcatctgtgtggttggagagaatggggctgggaagtctaccatgctgaagctgcttttgggggacctggcacctgttcggggcatcagacacgctcacaggaatctgaagattggctatttcagccagcaccatgtggagcagctggacctaaacgtcagtgctgtggaactgctggcacgcaagtttcctgggcggcctgaggaggagtaccgtcaccagctgggtcggtatggcatctccggagaactggccatgcgtcctcttgccagcctgtctgggggccagaagagccgagtggcctttgctcagatgactatgccctgccccaacttctacattctggatgaacccacaaaccacctggacatggagaccattgaggctctgggccgtgccctcaacaatttcaggggtggtgtgattctggtgtcccacgatgagcgctttatcaggctggtgtgccgggagttgtgggtatgcgaaggaggcggcgtcacccgtgtggaaggaggatttgaccagtaccgcgccctcctccaggaacagttccgccgcgaaggcttcctctagggccaccaggctgaggactcgcccaggacatggactggtctctcagacccctgggccaccatgtaggccaccactccaggccgtggacttcccccaacttggggacagccttattcccaaatgtctctatccttttgactggagcatcttctgcacaaccttgggagcccatccaagggttggtgaggactggtctcccnnnnnnnnnnnnnnnnnnnnnnnnnnnnnnnntatagattcccccactgccccagctctgactggaccccaagtggctgctatgtaaattaaatctctccccgcgtcaa

SEQ ID NO: 249985 - DNA, 1512 bp, Homo Sapiens
  misc_feature (135)..(135): n is a, c, g, or t
  misc_feature (149)..(149): n is a, c, g, or t
  misc_feature (195)..(195): n is a, c, g, or t
  misc_feature (221)..(221): n is a, c, g, or t
  misc_feature (1228)..(1250): n is a, c, g, or t
  misc_feature (1462)..(1462): n is a, c, g, or t
gccaccttctgtcaacccccaaggttcgccatttcttgcaagaacccagctttattccaccccaatattttagaggtggtaacagataggcctgacaaccacgacaaacacaccagtctttattctgatcttacnttagagtctcacanatatcctgaaagtgccagattttaaaatactctcctaacaccgccncctcccgcacgactggtctctgattntaactggctgaattcgaatatgttccaaagcgagctgtgaaattctagtctctgcaagattaaggatgtgaatctaaccttggaaactggattcttacaaagtccacccagaaggttttccctgaacacagagccctggtccgaacacccaggaaggaatggcctctatgagcgtcagggtctcgtctcaccattggataactactttgctctcaaaaagaggacatttgagctaagaatatagctgtatcccaatacaaggcaccaaccagtaccagaaagtaaactacaaaggagttattcctcaagttaggaagttgcttttgagtggcaccatttcccaaagtcaacaaagcagtactagttaaaatcctgacgtaccataagggtaaggggttagtgcagaggtgaagctgaagaataagcagattcagggttttagcaatttgattattaatgtgtcaccacaaaacacaagttcatacacagcttgctgtgactcaaaccccagtgaaaatcaaactggacaaaaactgaaatgccaaactacatctgtagcatctatcaggaactaagcatcatcttccttacccaactcaccccatctgccaggtcccccaggtgtgggccatcccacaggcatccccatcaggaactctgattggaaggcattagtaatagagttcagtttcagcattgaaattattgaatgaggaataatgtgttactgccaaggtaagatttaaaggggagactagagctcaaggtcaggcatctagtgcgtgctattctgccaatgtgagaggaaaaggtactgtcttcatctcactgatgctcaacctgactccaagcagcaggctaggagaacaggctgcagacatgccgaaagcatcagaaaaagagtcaaatcagagtcccgaaacaaataagagactgcttaactttagattagaacttgcatgtgaacttcagtgctctctgctactgccaagtttcatgttactcannnnnnnnnnnnnnnnnnnnnnntaaaataggaaccactggactcagtataagctcagggtacctggtgcttgtgtgagcattaggaaaggcaggtttcagctagagtttccagggccctgaaattcaaggttacctcgcctattctgaggctggcaaaaggctcatagagcaagtagagacatcactagcccaggggttgtgttttaaaagtacagctttggtcagtgcagctnttaaccctgatagctcttgaataggtctattctcaaactacaaaaagatc

SEQ ID NO: 249986 - DNA, 1778 bp, Homo Sapiens
  misc_feature (1227)..(1227): n is a, c, g, or t
  misc_feature (1350)..(1424): n is a, c, g, or t
  misc_feature (1436)..(1554): n is a, c, g, or t
  misc_feature (1678)..(1678): n is a, c, g, or t
  misc_feature (1748)..(1748): n is a, c, g, or t
ttgtgaatataatcatttatttgtctttacagtgatgatggaagaatgtacaggtgtcccctttcaataaagtataaaaatatgtttatatacagtgaagtcacaataatctttaactgggaaatttatttagaattcctgatctgttcttattaaaactgtgggggaaacaaatgttttacgtaagtgctacatttccagtagattgcacctggcatcaaaagctcagcttcatcttagggtcctgcttgatattacaaaagactaattttaagtcctaggactcaaaataaacatgattttttgaataatagatatatacatcaaaaatacatctaaaaaggcattggttagtgctattaaaaagctctatgtgctcgggtacattttttttcttacaggcaaaagccagtggaaacatttttgttcaatttctaggaattttctcttggggaaagtcggtcgaaagttacctgatcatattcttaggcttcatctccactgtccatttcaatatccatctcttctgtatcagcagctcgcgacaagatgtctgccatcagtgcttcttccaatttcttgcgtacttgctgtactcgctcttcctgtttcctgatgtcttcatctgtgacaataaaagctttgcagaggggttgagatgtgttaagccaaacagcagggttcttttccacagcagcggagacttgccctgtgattggcgcagagcttgtgtgcaaagcactggcaacagcagataaaagggtctcatcattgctacctggaccaactccttgaagacctttgggtagttccatggtttttataatttgttctgttacatctgatgcactaagtccttgtagcctcttctcccagaaaagctgacgtggctgttcattcattcgttgtgggtctgatttcactttattactaggatgatttgtgactttggttaccggttgtttgaaaattgatgctgtttgtctaattggcaatgttgtattcaagtctggtttacccttattttgattgagaggatcgtttcgcagtctctgtttgttcttctgtaatttactaggcatcatctttccagttctgaagtcaaaactgctgagatcaacagtatttcccaggtaccttgccaactgaggcttgcttctgaacttcttaccacttggactgaagtagtagacatcgctcttgccagcacttagcccagattttcgnatcacttcctccttcttccatccgggggggagggccgggaaatccatcctcttcccgctctccgtggcccggggtcccctgggccccggccccgcgctccccgacgggaaagggagcggctcnnnnnnnnnnnnnnnnnnnnnnnnnnnnnnnnnnnnnnnnnnnnnnnnnnnnnnnnnnnnnnnnnnnnnnnnnnnactcgggggacnnnnnnnnnnnnnnnnnnnnnnnnnnnnnnnnnnnnnnnnnnnnnnnnnnnnnnnnnnnnnnnnnnnnnnnnnnnnnnnnnnnnnnnnnnnnnnnnnnnnnnnnnnnnnnnnnnnnnnnccccgagcgccttccctgcgcacgccgctcaccggggacggggcgagcgcgctgccctggcccccctgctctatggcggagtcgccgccagcgccgctgccgcccgccgcactctccccctccncctgctccgggcagcagcggcctccccccgggtgcgcgcgcatccagccccctccccagccgggggcgcntcttccgtaaccgatcccgggaattccgga

SEQ ID NO: 249987 - DNA, 428 bp, Homo Sapiens
  misc_feature (19)..(19): n is a, c, g, or t
  misc_feature (32)..(32): n is a, c, g, or t
ctggtatccaagcaagctncgcgaacaaaganggtctgcccatcaagtgccttccttcccaatttcttgccgtacttgcctgtactcgctcttccctgtttcctgatgtcttcatctgtgacaataaaagctttgcagaggggttgagatgtgttaagccaaacagcagggttcttttccacagcagcggagacttgccctgtgattggcgcagagcttggtgtgcaaagcactggcaacagcagataaaagggtctcatcattgctacctggaccaactccttgaagacctttgggtagttccatggtttttataatttgttctgttacatctgatgcactaagtccttgtagcctcttctcccagaaaagctgacgtggctgttcattcattcgttgtgggtctgatttcactttattactaggat

SEQ ID NO: 249988 - DNA, 790 bp, Homo Sapiens; identical to SEQ ID NO: 170413
  misc_feature (647)..(647): n is a, c, g, or t
  misc_feature (675)..(675): n is a, c, g, or t

SEQ ID NO: 249989 - DNA, 1271 bp, Homo Sapiens
gggaggtgtcatggctgccccaagagtctaggtaagagtttgttcccgtggtgcggagggtcaaggcccacacccggaaacctagcgaggtaaagttgcgtcttggttgtagagacgacaacttctccgcttcctcggcgatggcggcgtccgggagcggtatggcccagaaaacctgggaactggccaacaacatgcaggaagctcagagtatcgatgaaatctacaaatacgacaagaaacagcagcaagaaatcctggcggcgaagccctggactaaggatcaccattactttaagtactgcaaaatctcagcattggctctgctgaagatggtgatgcatgccagatcgggaggcaacttggaagtgatgggtctgatgctaggaaaggtggatggtgaaaccatgatcattatggacagttttgctttgcctgtggagggcactgaaacccgagtaaatgctcaggctgctgcatatgaatacatggctgcatacatagaaaatgcaaaacaggttggccgccttgaaaatgcaatcgggtggtatcatagccaccctggctatggctgctggctttctgggattgatgttagtactcagatgctcaatcagcagttccaggaaccatttgtagcagtggtgattgatccaacaagaacaatatccgcagggaaagtgaatcttggcgcctttaggacatacccaaagggctacaaacctcctgatgaaggaccttctgagtaccagactattccacttaataaaatagaagattttggtgtacactgcaaacaatattatgccttagaagtctcatattcaaatcctctttggatcgcaaattgcttgagctgttgtggaataaatactgggtgaatacgttgagttcttctagcttgcttactaatgcagactataccactggtcaggtctttgatttgtctgaaaagttagagcagtcagaagcccagctgggacgagggagtttcatgttgggtttagaaacgcatgaccgaaaatcagaagacaaacttgccaaagctacaagagacagctgtaaaactaccatagaagctatccatggattgatgtctcaggttattaaggataaactgtttaatcaaattaacatctcttaaacagtctctgagaagtactttacctgaaagacagtatgagaaaaatattcaagtaacactttaaaaccagttacccaatataagtgtcctaaatattaatatcctgtaataaagctctttaaaatga

SEQ ID NO: 249990 - DNA, 1093 bp, Homo Sapiens
  misc_feature (748)..(767): n is a, c, g, or t
cggctggaccggtccggatttccgggatctggcacaacgtcctggcccatcggtccctgcccctttctgaaggagggcccccactaaggatcgcccagaggatgcggctggaggcaacgcagctggaaggggttgcccgaaggatgacggtggagacagattactgtctgctgctggctctgccctgtggccgtgaccaagaggatgttgtgagccagaccgagtccctcaaggctgccttcatcacttacctgcaggccaagcaggcggcagggatcatcaacgttcccaaccctggctccaatcagcctgcctacgtgctgcagatcttcccgccctgtgagttctctgagagtcacctgtcccgcctggcccctgacctccttgccagcatctccaacatctctccccacctcatgattgtcattgcctccgtgtgagccactgagtggttatcacctcagtgaatcttcccagggctctgcagtaaaaacaaaggacaacccagccaagcagaggaagaagctgccgaaggggacagactccactgccagacggccagccgtttgctgtcctgccgcccggctcagtcggccagacttcctctaggagtggtgctgctaccttgtatgtttacataatgctttagcccaaggacacatcaccaacccatggactcgcagacaccgggggctgggtttccctttcctctttttggagaaaaggaacagggcagtggaatgaaaannnnnnnnnnnnnnnnnnnnaagaaacaagaaaaccgaacctgccctttgcactaaattagtgacttggatttttgcccagggaagaccagctgtgacactctggatgccttggtgtgggtaaacacccattgcaaactcttaacgcagggaaggacttcaaaccttctggctgagaaccttggggtcaaaggaacatttccttgggttttttttgtccacccccactcttcccttggctcatttgggatgcgctcccctttaattccccctggctgcccccgcggcttttgattccacccgggaaggtacccgttttaccggttggagaagccaaaccgaaacgg

SEQ ID NO: 249991 - DNA, 367 bp, Homo Sapiens
tttttttgagaaagactctctctctgtcacccaggctgggttgtcctttgtttttactgcagagccctgggaagattcactgaggtgataaccactcagtggctcacacggaggcaatgacaatcatgaggtggggagagatgttggagatgctggcaaggaggtcaggggccaggcgggacaggtgactctcagagaactcacagggcgggaagatctgcagcacgtaggcaggctgattggagccagggttgggaacgttgatgatccctgccgcctgcttggcctgcaggtaagtgatgaaggcagccttgagggactcggtctggctcacaacatcaaacaccctcgtgccgctcgttgccga

SEQ ID NO: 249992 - DNA, 1955 bp, Homo Sapiens
  misc_feature (1238)..(1253): n is a, c, g, or t
ttgaagaaacttgttacttagttagggtggtgaaaacacagaagaaacttacctcggcgtcccctcccaaatggtgccactttggaggaagattaggacttgtcatttcaaacatagcaactgagcatattccaagccctgccaagaaagtaccaagactccctgccacagcagcagaacctgaagcagctgtcattagtaatggggaacattaagatactctgtgaggtgcaagacttcagggtggggtgggcatggggtgggggtatgggaacagttggaggaatgggatatctggggataattttaaaggattacatgttatgtaaatttttatgtgactgacatggagcctggatgactatcgtgtacttgggaaagtctctttgctctatttgctgacatgcttcctgttgtggtctggccaatgccaaatgtactcgaatgatgttaagggctctgtaaaacttcatacctctttggccatttgtatgcatgatgtttggtttttaaacatggtataatgaattgtgtacttctgtcagaagaaagcagaggtactaatctccaattaaaaaattttttaacatgtaagaattttgtactttgaacaacaagattacagaaagtacctgtggtttttggaaaacatttctagcttggggaatgtgacaacattccccagtgtggtaaaattggggtaaaatgtggtaaaatgtgatacgcacaaaccctttgaaaatagcaaaacaaacatgccctttttctaaaattgataaatcctaaagaggaagaaaagagctgggacaataaaacactggctctggaatctggaatgttaagtccaggccagcagtgacaaaagttattgtaatgacctctgaacagagaaacactgccattgaagaggcttctggtatagaaaacatggtacattcaggagctgtgaatatagctctaggtgtgctcctgaatcagttcatggtagattatgctgaacaacagtgagatgttattggaggtgtggatgagggagtttgttgttgcagtccttctttgcaccttattttaaagaataaatgaaacatttttctggttacttttttaaaaatttaaaatggaagggaagaataggggcagggcattattaggctatttctgatgcttcagtgttataaattcaacatagaggctgacaacctaaattcatggtgtaacacagctcttttccttttccnnnnnnnnnnnnnnnnggtatctgttcaatgaaaataaggtatgacccaagtttttacctagtctgactagaagtattccacttcaaggtctgaagtaggacttttaccttaaaaaacaacaacaaacaaaactatcacacaggatagataagaagattggttaaacagttttgtgtagatctttttggtgctgaactatgacatgagccttatagattgtaaaatagggatagttggaactaatgtacagaactaaattttttaaactttatttgctgttaaattctgtgaagtttcagttatctaaaataaatatacacaaatatgaaatataatgtttcagattgcaaggtaatatgtaatagtagtgtttgtaagatactcttgtctaatattaactagtagtattttgatttgtacagtcataatttgttaaaatgacttcatttaacattcactgatgtagattaataatgtaagttctgatttaaagaatggtggcaaaatggtgcatgtaatacttttgcaagtgttggggagatcggtatgttttgaaaagagtaatttaacttttgggtgccaggaaatgggttttctcaaagtccattgccggcaatgggcaggcctgcaaatactggcacagagcattaatcatacaccttattaacggtgaggtgaataactttgaaataaagttttagagaaatgtttcaaaaa

SEQ ID NO: 249993 - DNA, 537 bp, Homo Sapiens
ctggtgtcaggcaggtttgccagtgaagacttcttgggtagtttagatcccatgtcacctcagctgatattatggcaagtgatatcacctctcttcagcccctagtgctattctgtgttgaacacaattgatacttcaggtgcttttgatgtgaaaatcatgaaaagaggaacaggtggatgtatagcatttttattcatgccatctgttttcaaccaactatttttgaggaattatcatgggaaaagaccagggcttttcccaggaatatcccaaacttcggaaacaagttattctcttcactcccaataactaatgctaagaaatgctgaaaatcaaagtaaaaaattaaagcccataaggccagaaactccttttgctgtctttctctaaatatgattactttaaaataagtaacaaggtgtcttttccactcctatggttttgtttcagaattttgtatattgtaggaatcctttgagaatgtgattccttttgatggggagaaagggcttattttaatattttgtttttcct

SEQ ID NO: 249994 - DNA, 1311 bp, Homo Sapiens
aaccaactatttttgaggaattatcatgggaaaagaccagggcttttcccaggaatatcccaaacttcggaaacaagttattctcttcactcccaataactaatgctaagaaatgctgaaaatcaaagtaaaaaattaaagcccataaggccagaaactccttttgctgtctttctctaaatatgattactttaaaataaaaaagtaacaaggtgtcttttccactcctatggaaaagggtcttcttggcagcttaacattgacttcttggtttggggagaaataaattttgtttcagaattttgtatattgtaggaatcctttgagaatgtgattccttttgatggggagaaagggcaaattattttaatattttgtattttcaactttataaagataaaatatcctcaggggtggagaagtgtcgttttcataacttgctgaatttcaggcattttgttctacatgaggactcatatatttaagccttttgtgtaataagaaagtataaagtcacttccagtgttggctgtgtgacagaatcttgtatttgggccaaggtgtttccatttctcaatcagtgcagtgatacatgtactccagagggacagggtggaccccctgagtcaactggagcaagaaggaaggaggcagactgatggcgattccctctcacccgggactctccccctttcaaggaaagtgaacctttaaagtaaaggcctcatctcctttattgcagttcaaatcctcaccatccacagcaagatgaattttatcagccatgtttggttgtaaatgctcgtgtgatttcctacagaaatactgctctgaatattttgtaataaaggtctttgcacatgtgaccacatacgtgttaggaggctgcatgctctggaagcctggactctaagctggagctcttggaagagctcttcggtttctgagcataatgctcccatctcctgatttctctgaacagaaaacaaaagagagaatgagggaaattgctattttatttgtattcatgaacttggctgtaatcagttatgccgtataggatgtcagacaataccactggttaaaataaagcctatttttcccaaatcacacccatgcaactcaaatttgaccttgtcgggccgccttcggccctcaaaaaagcttttctaaacccattcgtttgggcgccgcgggcccccagtaagggtaaaggggaacatgggcccgataaccttgttttcccttagggaagaaccccctgggcccttggaacctaagtggcctttggcgaatttccttcccccatat

SEQ ID NO: 249995 - DNA, 987 bp, Homo Sapiens
  misc_feature (932)..(942): n is a, c, g, or t
attttggtggccgggcgcggaggtgattccacactgaggcgagcgcggcggccggggtggtagtggcagtgttcgtgtgctcaggtctgaatcgccgagggaggaggcggtggaggaagaggtggcggcggtggcggtggtcgtagcggtggcggaggaggcgggtacgaatcagctgcgggcggagacatggccaacatcgcggtgcagcgaatcaagcgggagttcaaggaggtgctgaagagcgaggagacgagcaaaaatcaaattaaagtagatcttgtagatgagaattttacagaattaagaggagaaatagcaggacctccagacacaccatatgaaggaggaagataccaactagagataaaaataccagaaacatacccatttaatccccctaaggtccggtttatcactaaaatatggcatcctaatattagttccgtcacaggggctatttgtttggatatcctgaaagatcaatgggcagctgcaatgactctccgcacggtattattgtcattgcaagcactattggcagctgcagagccagatgatccacaggatgctgtagtagcaaatcagtacaaacaaaatcccgaaatgttcaaacagacagctcgactttgggcacatgtgtatgctggagcaccagtttctagtccagaatacaccaaaaaaatagaaaacctatgtgctatgggctttgataggaatgcagtaatagtggccttgtcttcaaaatcatgggatgtagagactgcaacagaattgcttctgagtaactgaggcatagagagctgctgatatagtcaagcttgcctcttcttgaggagcaccaacatctgttatttttaggattctgcatagatttcttttaaactggcattcttgcctaatgatgttatctaggcaccattggagactgnnnnnnnnnnntccctgctctgtaaataaagctaattaaacgtctgtgtaaattta

SEQ ID NO: 249996 - DNA, 750 bp, Homo Sapiens
gggtggtagtggcagtgttcgtgtgctcaggtctgaatcgccgagggaggaggcggtggaggaagaggtggcggcggtggcggtggtcgtagcggtggcggaggaggcgggtacgaatcagctgcgggcggagacatggccaacatcgcggtgcagcgaatcaagcgggagttcaaggaggtgctgaagagcgaggagacgagcaaaaatcaaattaaagtagatcttgtagatgagaattttacagaattaagaggagaaatagcaggacctccagacacaccatatgaaggaggaagataccaactagagataaaaataccagaaacatacccatttaatccccctaaggtccggtttatcactaaaatatggcatcctaatattagttccgtcacaggggctatttgtttggatatcctgaaagatcaatgggcagctgcaatgactctccgcacggtattattgtcattgcaagcactattggcagctgcagagccagatgatccacaggatgctgtagtagcaaatcagtacaaacaaaatcccgaaatgttcaaacagacagctcgactttgggcacatgtgtatgctgggagcaccagtttctagtccagaatacaccaaaaaaataggaaaacctatgtggctatggggcttttgataaggaatgccagtaattagtgggccttggccttccaaaatcctgggggatggtagagaactgccaacagaaattgcctttctgga

SEQ ID NO: 249997 - DNA, 588 bp, Homo Sapiens
  misc_feature (16)..(16): n is a, c, g, or t
  misc_feature (434)..(434): n is a, c, g, or t
  misc_feature (462)..(462): n is a, c, g, or t
  misc_feature (489)..(489): n is a, c, g, or t
  misc_feature (514)..(514): n is a, c, g, or t
  misc_feature (567)..(567): n is a, c, g, or t
gtcgtagcggtggcgnaggaggcgggtacgaatcagctgcgggcggagacatggccaacatcgcggtgcagcgaatcaagcgggagttcaaggaggtgctgaagagcgaggagacgagcaaaaatcaaattaaagtagatcttgtagatgagaattttacagaattaagaggagaaatagcaggacctccagacacaccatatgaaggaggaagataccaactagagataaaaataccagaaacatacccatttaatccccctaaggtccggtttatcactaaaatatggcatcctaatattagttccgtcacaggggctatttgtttgggatatcctgaaaagatcaatggggcagctggcaatggactctccgcacggtatttatttgttcattggcaaggcactattgggccagcttgcaggagcccaggntggttcccacagggatggctgttaggtngggccaaatcaggttaccaaaccaaanttccccggaaatgtttttccaaacnggacagcttcgttttttgggggggcacatgttgttattgcttggggggcaccngttttttttgggttccccggg

SEQ ID NO: 249998 - DNA, 1494 bp, Homo Sapiens
  misc_feature (1209)..(1209): n is a, c, g, or t
  misc_feature (1286)..(1286): n is a, c, g, or t
  misc_feature (1369)..(1369): n is a, c, g, or t
gggactgttcgcgctgccgtgtttccgggcggggacactcagggcgcgacgcttttctgttacccacagaggcccgccgcggctgcgccatccgcggccatgaagtttcgggccaagatcgtggacggggcctgtctgaaccacttcacacgaatcagtaacatgatagccaagcttgccaaaacctgcaccctccgcatcagccctgataagcttaacttcatcctttgtgacaagctggctaatggaggagtgagcatgtggtgtgagctggaacaggagaacttcttcaacgaatttcaaatggagggtgtctctgcagaaaacaatgagatttatttagagctaacatcggaaaacttatctcgagccttgaagactgcccagaatgccagggctttgaaaatcaaactgactaataaacactttccctgcctcacggtctccgtggagctgttatctatgtcaagcagtagccgcattgtgacccatgacatccccataaaggtgattcctaggaaattgtggaaggacttacaagaaccggtggtcccagatcctgatgttagtatttatttaccagtcttgaagactatgaagagtgttgtggaaaaaatgaaaaacatcagcaatcaccttgttattgaagcaaacctagatggagaattgaatttgaaaatagaaactgaattagtatgtgttacaactcattttaaagatcttggaaatccctccattagcctcctgaaagcacccatgagagacagaaaacgtggaacacatggctgaagtgcacatagatattaggaagctcctacagtttcttgctggacaacaagtaaatcccacaaaggccttatgcaatattgtgaataacaagatggtgcattttgatctgcttcatgaagacgtgtcccttcagtatttcatccctgcgctgtcctagcaccctgtcgctggagttggcatgcagagactttgtcaggatgggagaggccgcaggtgttgtgttctgatcactggtctgtgccctcacagcaccgcacatcgacacactgtacttatttgtccctctctaacattttaactaaaagttgattcaacaacacacagttggataaacatatcacttcatgttgctcatgtctgttttgctttgtttttaagacactgaaaagaaaagctagaatttatttattcagactttanagaacaatttctcattgatgttgtgaaaatcgtcatgtatttagacttggtgtagtagccagaatttcgtaagctgntgcctgggagcttggtactttccctccaggcagaggctctagctcagcacggcctgtagcgcacagtcagtcttgcatttcantgtgtccaccccgctgctcctgcccctttggagcccagtgacagaaagaacagcctctgtcaccccgccgccactggccttggtactcccaacccctggggggggtcccacctggcacatttgga

SEQ ID NO: 249999 - DNA, 415 bp, Homo Sapiens
  misc_feature (219)..(219): n is a, c, g, or t
gagaggttaaggaacttgcccaaatgtacacatttaataaaaaatgtggcaaagtttgcatttaagtcacatgagtgattaaaaaaacccacattcataactcctgcatggagctggaacagaagagacctttgtgaagcaacatctactaacttgaggcatcttccttcttcacaccaaggtctggggataggcattggctcccatggcacttgtctngttcaaataaccagtgttttctgcaagcacctttctgtagggtaactgcctgagcttcctgcctggattgaggggcaatcagggatcagcccttcattgttaggcagttgttctgttaaccctgggtatagctggggggtggggacatggcatattactttaccaggcagttttggggaaaaggatgtttgggcct

SEQ ID NO: 250000 - DNA, 606 bp, Homo Sapiens
tgcagcctgggctgtgtccagcagcagccgccggacaccggctcctggcggagcaggaggtcctggcccctcaggtggtgctggccccgggtggcggcgccgcctacaatctcggggctcctccgcgcacgcagttctcagggctgcgcagggacctgccgccctcggtgcacctgctcacgctggccagctggggccccgaaatggtgctgctgcgcttggagcaccagtttgccgtaggagaggattccggacgtaacctgagcgcccccgttaccttgaacttgagggacctgttctccaccttcaccatcacccgcctgcaggagaccacgctggtggccaaccagctccgcgaggcagcctccaggctcaagtggacaacaaacacaggccccacaccccaccaaactccgtaccagctggacccggccaacatcacgctggaacccatggaaatccgcactttcctggcctcagttcaatggaaggaggtggatggttaggtctgctgggatgggccctccaagcccaagcctcctgctccgggggcagaccagactctgactctcctcttggggctgctgccattaaaacgctactaac

SEQ ID NO: 250001 - DNA, 456 bp, Homo Sapiens
tttaataagttaaagttaatacaaatataaaaaggggaaagtcctctagattcaatgacatccacaaattgtacattatttacaccaaaagcacagggctcgtgtgggtgaacagtctgcagtcaaagccgatgctgggtgtcctgtagtgtagcagcccccgcgccggggctaaggctcaactgagggttttgtcattttcaagtctgaaagtggctgttctcctgcctttgttgtttcttcttttcctggcgtctgggtttttctcccaatggggtgggtggtttgtgtcccgattcactgctagtcccagaaggtgtccagccgagactctttcgggaggaggctcttcgtgctggtactggtgttgtgatcggaacgtgtcgatcccctcttctcatcactgctgctccaactggatttattactccgggaatggtctgaaggggaaaacca

SEQ ID NO: 250002 - DNA, 1187 bp, Homo Sapiens; identical to SEQ ID NO: 2825
  misc_feature (908)..(963): n is a, c, g, or t
  misc_feature (983)..(991): n is a, c, g, or t
  misc_feature (1026)..(1038): n is a, c, g, or t
  misc_feature (1063)..(1115): n is a, c, g, or t

SEQ ID NO: 250003 - DNA, 1312 bp, Homo Sapiens
  misc_feature (257)..(257): n is a, c, g, or t
  misc_feature (414)..(414): n is a, c, g, or t
  misc_feature (418)..(418): n is a, c, g, or t
gggaacatctggagtcagcagaaccattgggacctgaggcaggagtgtcacctgcgggagaagtctgcccgctgccctctgtcatcccattcaagattgtgccataccagctgaggtttttcctctgtctctctaggaatagggtctgtttcacaggccatttctgtgaaccctactccattgtggtttctgccactatcaaagttccagctacctgcaaggtgaaggaaggcatcccttttggggcatgcactttnctttcctttctcaaaataatgttatatgtggccacactgatgttcacctttacgtccagggtctttgtgccttgtctctactccctctcttggatctggggaggaggggcagagacctgggactctgtatttctataagttctcctggcagagcttntgangaatggggagaaacagccctgggctgggggctacaggtctgtcactatgctctcttgccttcagacagaccattctgaattctctaaagggaaagggcttttgcatctaatcacaatagagttgaaagagaggccttaggattctcctctctctaggtgctgagccctcacctccctgttccaggctgagaactcaaatggttaccctgcttcttcctacaatgctgtgtgatatgggtgaacccagcccctgaccttcctctatcccctgcccatcctcccttttacctcctctcttttttaaacacctgttgatcccaacctttttgagctcaagctgtgataaagaagggcccatcctatttcccctcatctaggtccatttacgattctcactgactccccgtcttcctggcagacacaaataaacccagtgtcaggtctaggaaattaatggctattcttccccagatacattctggcttatttgagatacatgattctcttagaatcctgtcccttggttcaggaaagtagcttggaaaaggagtaggggtatagcttgggtcccttttcctgccaaggccccatggggcagaatataataaatattctgagtgaggagtgtggtctttttctgatcttcctcagcttccgtaagttgcagagtgaggtatattaggagactagttctacacaatattgtaatgctgggttccatcaacacccaccttccacaactcagtctgcacctcagttggcaaaggagactggatggccatctttcctcatgttcccttgagtatttcaatgtagaaagcccttcaagtggtattatattttaaccttttacattattgttattaatgttagtaatatattgttatgttttct

SEQ ID NO: 250004 - DNA, 426 bp, Homo Sapiens
  misc_feature (306)..(306): n is a, c, g, or t
gggggtccctccctcaggggctgtaagggaaggcccaccccaactcttaccaggagctgctacaggcagagccaagcactgatagggccccgcacacggccccgcccaccccaggccacatccccacccatctggaagtgaaggcccagggactcctccaacagacaacggacggacggatgccgctggtgctcaggaagagctagtgccttaggtgggggaaggcaggactcacgactgagagagagaggagggggatatgaccaccctgccccatctgcaggagcctgaagatccagctcaagntgccatcctgccagatggcccccagactgtggggttgggacgcctggcctctgtgtcctagaagggaccctcctgtggtctttgtcttgatttttcttaataaacggtgctatccccgcc

SEQ ID NO: 250005 - DNA, 378 bp, Homo Sapiens
  misc_feature (28)..(28): n is a, c, g, or t
  misc_feature (42)..(42): n is a, c, g, or t
  misc_feature (52)..(52): n is a, c, g, or t
ggagctgcttacaagcagagccccagcnactgaataaggccnccgacaaccngccccgccccaccccaggccaacatccccacccatctggaagtgaaggcccagggactcctccaacagacaacggacggacggatgccgctggtgctcaggaagagctagtgccttaggtgggggaaggcaggactcacgactgagagagagaggagggggatatgaccaccctgccccatctgcaggagcctgaagatccagctcaagtgccatcctgcagtggcccccagactgtggggttgggacgcctggcctctgtgtcctagaagggaccctcctgtggtctttgtcttgatttttcttaataaacggtgctatccccgc

SEQ ID NO: 250006 - DNA, 489 bp, Homo Sapiens
aaaatttagttcctgagccatcaacagctatagaatctacacttccagcatgacctctacagcagtgtagggctttcactttgtttctctctacattccactcccataagagaatagtctgatccatagaagcactcaataataagcaggacaaactatcttttttcacccaggccacatcttttacaacatccgtatgtcccacaattgtcattattgactttccttccaaggaccagatccgagaagtcttatcataagaaccagtcaagatccattcctctgcccctttaattgaactgatccagtcatcatggaacatgcattgctctggctggggtgcagtatacttctccacgtattctatttccacaacttcttctgatgagatgttctccatttccatgtgtttgtccaagggcattcgcagaaactggcccttaataaggaaatcaaactccacatgtttgtggaactcatttttgtcct

SEQ ID NO: 250007 - DNA, 1259 bp, Homo Sapiens
ctctgctccggtgcaggcccgcagggcgccctgggctgggagcaacgcgactgaccgtggtcgtgggcggacggcggctgcagcgcggaggagctggggtcgctgtgggtcgcgaagcagagcccgggacgtgcgcgcttggtgcacgatcctgaaggggagctccgaggggcccgggtcgccagggctgctgcggccattcccggagcccggcgcggggcccgcgagatactggtttaggccgtcccagggctccgggcgcacccggtggccgctgctgcagcggagggagcgcggcggcgcgggggctcggagacagcgtttctcccggaagtcttcctcgggcagcaggtgggaagtgggagccggagcggcagctggcagcgttctctccgcaggtcggcaccatgcgccctgcagccctgcgcggggccctgctgggctgcctctgcctggcgttgctttgcctgggcggtgcggacaagcgcctgcgtgacaaccatgagtggaaaaaactaattatggttcagcactggcctgagacagtatgcgagaaaattcaaaacgactgtagagaccctccggattactggacaatacatggactatggcccgataaaagtgaaggatgtaatagatcgtggcccttcaatttagaagagattaaggatcttttgccagaaatgagggcatactggcctgacgtaattcactcgtttcccaatcgcagccgcttctggaagcatgagtgggaaaagcatgggacctgcgccgcccaggtggatgcgctcaactcccagaagaagtactttcggcagaagcctggaactctacagggagctggacctcaacagtgtgcttctaaaattggggataaaaccatccatcaattactaccaagttgcagattttaaagatgcccttgccagagtatatggagtgatacccaaaatccagtgccttccaccaagccaggatgaggaagtacagacaattggtcagatagaactgtgcctcactaagcaagaccagcagctgcaaaactgcaccgagccgggggagcagccgtcccccaagcaggaagtctggctggcaaatggggccgccgagagctggggtctgagagtctgtgaagatggcccagtcttctatcccccacctataaaagaccaagcattgatgcccaagttttggaaatattctgttttaaaaagcaagagaaattcacaaactgcagctttctaaaaaacaactccaaa

SEQ ID NO: 250008 - DNA, 800 bp, Homo Sapiens
ggcctgggtggcgaattcggcacgaggctcgtttccaatcgcagccgcttctggaagcatgagtgggaaaagcatgggacctgcgccgcccaggtggatgcgctcaactcccagaagaagtactttggcagaagcctggaactctacagggagctggacctcaacagtgtgcttctaaaattggggataaaaccatccatcaattactaccaagttgcagattttaaagatgcccttgccagagtatatggagtgatacccaaaatccagtgccttccaccaagccaggatgaggaagtacagacaattggtcagatagaactgtgcctcactaagcaagaccagcagctgcaaaactgcaccgagccgggggagcagccgtcccccaagcaggaagtctggctggcaaatggggccgccgagagccggggtctgagagtctgtgaagatggcccagtcttctatcccccacctaaaaagaccaagcattgatgcccaagttttggaaatattctgttttaaaaagcaagagaaattcacaaactgcagctttctaaaaaacgggccaaaagcggccccggcgaagggccccccgcgccaggcacagaaagccgggcacccgccaggccaacccacgcgagagcggcgggcgacggcgcggcggaacaggaggaagaccagccccccccgcgcgcggccgcgacggcctctggtcgtgtggactcgcgggctccaagtagtttttttgttggggggccgctcgcgccccacgaagaaattttttctaaaaaacccttctt

SEQ ID NO: 250009 - DNA, 951 bp, Homo Sapiens
ggagcgaggcctgggtggcgaattcggcacgaggcatttttgtcagaaccatcatctccaggaagaaccaagactactaaaggattcaaacttggggaagcacaagcatgagacctttataacgtcaagtggaaaatctgaatacattgaacctgccaaaagagctcatgttgtgccaccaccaagaggaaggggcaggggaggatttggacagggtatacgacctcatgatatttttcgtcagagaaaacagaacacaagtagaccaccatctatgcatgtggatgactttgttgctgctgaaagtaaagaagtggttcctcaagatggaatacctccaccaaaacggccactcaaagtatcacagaagatttcttcccgtggtgggttttcaggcaatagaggaggacggggtgctttccacagtcagaataggtttttcacaccacctgcttcaaaaggaaactacagtcgtcgggaaggaacaagaggctccagttggagtgctcagaatactcctcgaggaaattacaatgaaagtcgtggaggccagagcaattttaacagaggccctcttccaccattacgaccccttagttctacaggttaccgcccaagtcctcgggaccgtgcttctagaggtcgtgggggacttggaccttcctgggctagtgcaaatagcggcagtggaggctcaagaggaaagtttgttagtggaggcagtggtagaggtcgtcatgtacgctcctttacacgataaaaatccttttgggaacatcttaactgtatatgaacatttcacgaggacaataaaaataagacattgaaggaccaatttagacttagcagttatctggagacatctgagagaatatttttatctgaagaaagcagaatttgtttgatacctaacaagatttcaataaaaatccaaactttgtatgtaaaaaa

SEQ ID NO: 250010 - DNA, 779 bp, Homo Sapiens
aatggcagcgtcctacagtgtagcctccgcctcccgattgactggcctgcttggcaaggcaagtagcggcggcgcttcaagatgcgctgcctgaccacgcctatgctgctgcgggccctggcccaggctgcacgtgcaggacctcctggtggccggagcctccacagcagtgcagtggcagccacctacaagtatgtgaacatgcaggatcccgagatggacatgaagtcagtgactgaccgggcagcccgcaccctgctgtggactgagctcttccgaggcctgggcatgaccctgagctacctgttccgggaaccggccaccatcaactacccgttcgagaagggcccgctgagccctcgcttccgtggggagcatgcgctgcgccggtacccatccggggaggagcgttgcattgcctgcaagctctgcgaggccatctgccccgcccaggccatcaccatcgaggctgagccaagagctgatggcagccgccggaccacccgctatgacatcgacatgaccaagtgcatctactgcggcttctgccaggaggcctgtcccgtggatgccatcgtcgagggccccaactttgagttctccacggagacccatgaggagctgctgtacaacaaggagaagttgctcaacaacgggggacaagtgggaggcccgagatccccgcccacatccagggctgactacctgtatcgggtgaacgcccccaccgggcccgcagccccctgccgccccaataaaaaccacttccgaccccaaaa

SEQ ID NO: 250011 - DNA, 793 bp, Homo Sapiens
  misc_feature (732)..(732): n is a, c, g, or t
gggaaggcaagtagcggcggcgcttcaagatgcgctgcctgaccacgcctatgctgctgcgggccctggcccaggctgcacgtgcaggacctcctggtggccggagcctccacagcagtgcagtggcagccacctacaagtatgtgaacatgcaggatcccgagatggacatgaagtcagtgactgaccgggcagcccgcaccctgctgtggactgagctcttccgaggcctgggcatgaccctgagctacctgttccgggaaccggccaccatcaactacccgttcgagaagggcccgctgagccctcgcttccgtggggagcatgcgctgcgccggtacccatccggggaggagcgttgcattgcctgcaagctctgcgaggccatctgccccgcccaggccatcaccatcgaggctgagccaagagctgatggcagccgccggaccacccgctatgacatcgacatgaccaagtgcatctactgcggcttctgccaggaggcctgtcccgtggatgccatcgtcgagggccccaactttgagttctccacggagacccatgaggagctgctgtacaacaaggagaagttgctcaacaacggggacaagtgggaggccgagatcgccgccaacatccaggctgactacttgtatcggtgacgccccaccggcccgcagcccctgctgcccaataaaaccactccaccccaaagatgagtcagaaggcaancaaaaaactgtcggccgcctccggcctcaaaagctttcataaccatttcgttgggcgcgct

SEQ ID NO: 250012 - DNA, 480 bp, Homo Sapiens
  misc_feature (408)..(408): n is a, c, g, or t
  misc_feature (432)..(432): n is a, c, g, or t
  misc_feature (438)..(438): n is a, c, g, or t
  misc_feature (444)..(444): n is a, c, g, or t
  misc_feature (457)..(457): n is a, c, g, or t
gcaaggcaagtagcggcggccttcaagatgcgctgcctgaccacgcctatgctgctgcgggccctggcagtgctgcacgtgcaggacctcctggtggccggagcctccacagcagtgcagtggcagccacctacaagtatgtgaacatgcaggatcccgagatggacatgaagtcagtgactgaccgggcagcccgcaccctgctgtggactgagctcttccgaggcctgggcatgaccctgagctacctgttccgggaaccgccaccatcaactacccgttcgagaagggcccgctgagccctcgcttccgtggggagcatgcgcttgcgccggtaacccattccgtgggaggagcgttgcatttgcctgcaagcttttgcaagggccatcttgccccgtccagggncattcaaccattcgagggttgagncaaagnagttgnattggcaagccgncggaaccaacccgttattgaaca

SEQ ID NO: 250013 - DNA, 1429 bp, Homo Sapiens
ggggcagtgtagccgggtcagctggacagggtcatcctgagggtgcgactccgccgcgatggtgacccggttcctgggcccacgctaccgggagctggtcaagaactgggtcccgacggcctacacatggggcgctgtgggcgccgtggggctggtgtgggccaccgattggcggctgatcctggactgggtaccttacatcaatggcaagtttaagaaggataattaattacacaaacccttcacagactgctctggtgcctggtggtgctagctcctcccacctcagcacctgctgcatctggagcagcccaagcctcaggatggacaagaggaaacccacagctcagcttcaggcttcttatgtttctgaaaacagcttggatattttaatgcacgttgcattaaacctcactgaaacctgctccgtgcccggatgttgatcatgctggtggcttggttactgtgactgtagctggagtggcacaggtgacccaggcgtcctttcagctccagaatgttgcaagtctaggagagtgttccaatggctgacagaaactgcctatttgaaatggctcataagtagtatctgcagtgtgttcatccgttgctgccttaacaagtcacccacacgtagtggcttaaagcaacgaacattcactctctcacagtctgtgtcagtcggggatttgggagtgatgtatctgggtggttgtggcccagagtctctcatgaagtttggcgtaagaccttcagggcccatggccaacttccggcgggaagggaaggcctcaactggggtctgaagcccacttccaaagccagggggccctcacgtgggttgtcgggtgacagcccacaggtccttcccccatgggggtgcccctaaaacgaaaagctggtttgaagcattcctcaacggattgggcatctggcctttccccagagcagtggtgaacccaagggagagggaaggaagcaaagccaacaggtgctttctattgaagccacccttgagaaagttcttccacgttgattcacttccgcgcaacagtcctgttttactcaaaagccaaggccccccaaggcctcagacccacacgtgacagagggacggcacgaaatgagggtcctcgggttcggaacgggacaagacatattccagcaatttgggtagaacattttcacaaacttgttcacgattacagcggatacacataaaatgcaaccaggctgggaagtggtgggatacagcgcctacaaatgctcaaccatttttgggagggctgaaggaacgggcgcttcacattggaacccacggagttcaggaaataactggggcacaaaagagggcccctgttcttggaaaagacacaacaaaacagaggcggcggttaaaaaaccctcaaggtgccagttaacggtacaa

SEQ ID NO: 250014 - DNA, 1531 bp, Homo Sapiens
aacgggagcccgcgggaccctggagcgcgcggggccggaagaggcgggcggccagtggaggtccgcagagtttgggcgccaggcgagacggcagggcttaaagttccgggtgaggcgtgggtcccacaaccgcttggaatttgcctcccggctccgctctggaagctaagaaggggcacgagagccggagacgggaacctgagagcagggaagccagtagccggccggaggagcgcgcggccgctccagtcggaaggagccgttgcagccctgcccggcgtgtggcggggtcagcgaggcccctgcggtgcttcgcccgcgccttccgctccgcactcacccgccctctgggcctcccacaggaatcaaagatcaagctcccactgaggacaaatggacctgtaattccgggtgtgacgagagaacgagatttaccttcctgaattaaaaaacaggtcattaagcttgggccctgactcttctttgtgagaaggtacagagatggaaaccttacaatccgagactaaaacgagggtccttccctcatggctgacagcccaggtggctacaaagaatgtggcaccaatgaaggcccccaagaggatgagaatggcagcagtgccagtggcagcagcaaggtgcgacagctctggtcagaagactcctgcgaatctgactccctgcgacaaggactgtgtactgcatgaatgaggctgagatagttgatgttgctctgggaatcctgattgagagccgcaaacaggaaaaggcctgcgagcagccggccctggcgggggctgataacccagagcactcccctccctgctccgtgtcgcctcacacaagttctgggagcagcagtgaggaagaggacagtgggaaacaggcactggctccaggcctcagcccttcccagaggccggggggttccagctctgcctgtagcaggagccctgaggaggaggaggaagaggatgtgctgaaatacgtccgggagatctttttcagctagggcataaactgtgcactgaactgtctgccgagagcagctggaggacagctgagcttccactggtgctgctgggccgcccgcctgtgggaatggggctctctgtgctcctacctttgtgccttcttgggcctggcagattcacctcaggccagaagcccctggacactccgggccttggggctgccgttctgagtgtgcggaaggcaggactcaaaatgagatcccatttgactccctctgtatgtactgtgccctctcctggctcttgaggctctggagtcccaattgtctgtgttagtcagtgaccaggttccaggggaaaatgatgtgcatgtggtggtccaacttactggaacccaaagagacagtacttttgcaaagaaaaggatcactgcccaggtggcactggaaattgcctacagtttaaggtcccgcatgaatctctccctgaaagggaaggaaaccctgttttcaaaaaaataagtttcccatcctggaggtcctatccaatgaacctcc

SEQ ID NO: 250015 - DNA, 847 bp, Homo Sapiens
  misc_feature (631)..(655): n is a, c, g, or t
gggggaagtaacccacgtgcttccgctggagcctctcgggaggcgggtaacgttatagtatttgtcagaagttggggtctccgtgggcattgtgatccgtcccaggcagtggattaggaggccagaaggagatcccttccacggtgctaggctgagatggatcctctcagggcccaacagctggctgcggagctggaggtggagatgatggccgatatgtacaacagaatgaccagtgcctgccaccggaagtgtgtgcctcctcactacaaggaagcagagctctccaagggcgagtctgtgtgcctggaccgatgtgtctctaagtacctggacatccatgagcggatgggcaaaaagttgacagagttgtctatgcaggatgaagagctgatgaagagggtgcagcagagctctgggcctgcatgaggtccctgtcagtatacaccctggggtgtaccccaccccttcccactttaataaacgtgctccctgttgggtgtcatctgtgaagactgccaggcctaggctctctgtagagagtcttcaagatcccggagtggtagcgctgtctcctggtgaaggagtatttgtcacactggaatgtgactgcgtgtgtatggcatgtgcnnnnnnnnnnnnnnnnnnnnnnnnncacaagtttgttgacacctacgcaccccccatattggcaccgcacccaaaaaacattgtcgggcgcctttggcccttgaaaaaaccttttctaaaccttttccttttgggccccccgggtgctctttagggcaacatgggacaccgggggtcattaccctgggtttctcctatggcaaaaaaccccccgggt

SEQ ID NO: 250016 - DNA, 335 bp, Homo Sapiens
  misc_feature (286)..(286): n is a, c, g, or t
  misc_feature (289)..(289): n is a, c, g, or t
gtcctgtgtcccccggacccgatgtgtcctcctaagtaccccggacatcccatgagcggatgggcaaaaagttgacagagttgtcctatgcaggatgaagagctgatgaagagggtgcagcagagctctgggcctgcatgaggtccctgtcagtaatacaccccgggtgtaccccaccccttcccactttaataaacgtgctccctgctgggcgccatctgtgaagactgccaggcctaggctctctgtagagagtcttcaagatcccggagtggtagcgctgtcnccnggtgaaggagtatttgtcacactggaatgtgactgtgtgtgtatgt

SEQ ID NO: 250017 - DNA, 278 bp, Homo Sapiens
caatgttagactgtgtgcatggaagtaattaaggtacatcattattgtagtttgaaagttgtacatgataagacattttgtttttactgtatgtttttactgaatgatctattccccatcccaaggcaagcatgaataaaattaggttaaacgtagcatgtggcatcgcagtctcttagaatttgtttcatctattttattttattgaatactgtctgtatctttggttatcctgtttgaagaaaaaggacaaataaaacatggccagcaaataccat

SEQ ID NO: 250018 - DNA, 668 bp, Homo Sapiens
  misc_feature (52)..(52): n is a, c, g, or t
gaacaatccgcagtattcgtgtaattaaaacctataggtccattaaaggaanacttagaaaggcttccagaggtattcaatgctcacaataaacaagccaaatgcaatcaaagaaaactcaaacatgagattaaatcagttacctggctgcccaactataataatgccctgtgcccagagctttacagaaactatcacacgaaatattagcttattaagcccacagctcctttaccaggataaaatggccaaagacattggtctcaaacacctcctgaagtccatcagcagtgatcttatcaccctgggtcagcaggccttcagcttgaaaagaggccaaagaaaagtgctttgatatttagttgtggattaggcatgatcccagcatttagatatatacagtctaatctctgaaacctttgcttaagttccttggaggcccggaagaccgactgcaggttgctgacatccacctggacaatggtgacctcagcagtggggtgagaggccagcagagcagcacagacagcttctgccttgctcatgttcctgcacgccaaacacagatgaagctcatcatcttccgccagcagccgcttgcagagggccaggccaatgccactgctagccccggtgatcaaaaccacctttcgcatcttcgcgcactc

SEQ ID NO: 250019 - DNA, 346 bp, Homo Sapiens
  misc_feature (291)..(300): n is a, c, g, or t
cttcactgcttggaagtgtgagtgcgcgaagatgcgaaaggtggttttgattaccggggctagcagtggcattggcctggccctctgcaagcggctgctggcggaagatgatgagcttcatctgtgtttggcgtgcaggaatatgagcaaggcagaagctgtctgtgctgctctgctggcctctcaccccactgctgaggtcaccattgtccaggtggatgtcagcaacctgcagtcattcttccgggcctccaaggaacttaagcaaaggtatatctcttgctgatggannnnnnnnnnctcgtgtgattgtgcagcataacacttaataaaatgagagggacct

SEQ ID NO: 250020 - DNA, 748 bp, Homo Sapiens
  misc_feature (204)..(204): n is a, c, g, or t
gggaaagggagaccggcggcgagggaaagtggcggaaggccggcggagaggatggtgcctatgaagggaagagggaccagagagatgcatcggaagggttgagaggcaggcgtatcaaatgaggggctgagcgggctcctgttagggctcaagcctgttcaacaaccccttacctttcatcccatcaacttaacacgccatcanaactaggcagaaaaatgaacacattccttccaatcagttcatccataaaatgaaaattaccttgaaaagaggccaaagagaagtgctttgatatttagttgtggattaggcatgatcccagcatttagatatatacggtctaatctctgaaacctgcaactaaaccaccaaacaagattgtgagttgcaagtaaaaacatcaggacaagattgtgtattctatctctagagtgactagattcaaggaggccctaagaaagacaaaaaatactttttaaattaataaattagcccacagcaagcctcagaagaatttatagcacattagagttacagcatttctttctcaacagtttttctttagctacagtaaacatttgagaattctttctttggtagtggcttcaaacagaatctgtggagtcatcgtggactttaagtaaaacctctgatcaataattccttccagctctgtcctctcaataaggaattgcagcaaccctctaactcttaaacccactctcctcatcttacaaagtctctt

SEQ ID NO: 250021 - DNA, 1433 bp, Homo Sapiens
  misc_feature (21)..(21): n is a, c, g, or t
  misc_feature (23)..(23): n is a, c, g, or t
  misc_feature (82)..(107): n is a, c, g, or t
  misc_feature (121)..(186): n is a, c, g, or t
  misc_feature (260)..(373): n is a, c, g, or t
  misc_feature (1008)..(1008): n is a, c, g, or t
atccactcagtagaaatccangnaccccagaatgtacagaaggtatgcaatgttccagagtgtcattgtcagctctggtttnnnnnnnnnnnnnnnnnnnnnnnnnntttgagacagggtnnnnnnnnnnnnnnnnnnnnnnnnnnnnnnnnnnnnnnnnnnnnnnnnnnnnnnnnnnnnnnnnnnctcaagagatcctcccacctcatccttctgagtagctgggactacatgcgcatgccaccacacccagctattannnnnnnnnnnnnnnnnnnnnnnnnnnnnnnnnnnnnnnnnnnnnnnnnnnnnnnnnnnnnnnnnnnnnnnnnnnnnnnnnnnnnnnnnnnnnnnnnnnnnnnnnnnnnnnnnnatgagccactgagcctggcctgattatctgttttttgaatagtgaccctaatgtgcttttccagttccagtaacttttgataaaatttttcagcagtgtcttcatctaggtccatcttctgggtcataatgtaatttcttccaaagccagtggtggcactcagatatttgatcagaggattgagagattcaggcttttggtggaaaagccataccagagcttctgttccattatatggtgtcaaagtgaatgcatttgcaaaaaagcgaagtagcaatattgccggcatcaacagcgtccatataaacggaggcagaattccatatgtcaaattggtcaatgctgtacctggacaggccacattggaatagagaccctgctggttgaagttcctgttcaaagccacactcaaaaggtcagtggcatatttggaagagctgtagggttccttgcctttgctgtgctggaagtcctcgaggctgaaattagatttccttgcactgcgagatgatgtccagatgagctgagatggattgtcactgtgacagaggagaggctccagttcccgaatcaggataaaatggccaaagacattggtctcaaacacctcctgaagtccatcagcagtgatcttnatcaccctgggtcagcaggccttcagctgtggagaacatatgaatcacttttcttgaaaagaggccaaagaaaagtgctttgatatttagttgtggattaggcatgatcccagcatttagatatatacagtctaatctctgaaacctttgcttaagttccttggaggcccggaagaccgactgcaggttgctgacatccacatggacaatggtgacctcagcagtggggtgagaggccagcagagcagcacagacagcttctgccttgctcatgttcctgcacgccaaacacagatgaagctcatcatcttccgccagcagccgcttgcagagggccaggccaatgccactgctagccccggtgatcaaaaccacctttcgcatcttcgcgcactcacacttccaagcagtgaagcaaacgccgc

SEQ ID NO: 250022 - DNA, 721 bp, Homo Sapiens
  misc_feature (222)..(508): n is a, c, g, or t
ggaccatataatggaacagaagctctggtatggcttttccaccaaaagcctgaatctgtcaatcctctgatcaaatatctgagtgccaccactggctttggaagaaattacattatgacccagaagatggacctagatgaagacactgctgaaaaattttatcaaaagttactggaactggaaaagcacattagggtcactattcaaaaaacagataatcannnnnnnnnnnnnnnnnnnnnnnnnnnnnnnnnnnnnnnnnnnnnnnnnnnnnnnnnnnnnnnnnnnnnnnnnnnnnnnnnnnnnnnnnnnnnnnnnnnnnnnnnnnnnnnnnnnnnnnnnnnnnnnnnnnnnnnnnnnnnnnnnnnnnnnnnnnnnnnnnnnnnnnnnnnnnnnnnnnnnnnnnnnnnnnnnnnnnnnnnnnnnnnnnnnnnnnnnnnnnnnnnnnnnnnnnnnnnnnnnnnnnnnnnnnnnnnnnnnnnnnnnnnnnnnnnnnnnnnnnnnnnnncatatatacatttaatatatatgtaaaaccagagctgacaatgacactctggaacattgcataccttctgtacattctggggtacatggatttctactgagttggataatatgcatttgtaataaactatgaactatgactctcttttccttccttttgggattatctccaagactgggtatgtgtatgcatatgagaaaaaagattgggccg

SEQ ID NO: 250023 - DNA, 657 bp, Homo Sapiens
  misc_feature (434)..(434): n is a, c, g, or t
  misc_feature (462)..(462): n is a, c, g, or t
  misc_feature (500)..(500): n is a, c, g, or t
  misc_feature (511)..(512): n is a, c, g, or t
  misc_feature (525)..(525): n is a, c, g, or t
  misc_feature (566)..(566): n is a, c, g, or t
  misc_feature (605)..(605): n is a, c, g, or t
  misc_feature (629)..(629): n is a, c, g, or t
ggattataggagacaaaatctgtttctctaaatatgatctagcttactgaaatggttaattctgttcatacggtgaaataaaacctcatagtagttgactaaattttgttgtatatttatgcacttttccagaaatttgcctgtaatggtactgtgattgaacatcctgaatacggagaggttattcagcttcaaggtgaccaaagaaaaaacatctgccagtttctcttggaggtgagtgattgggtgctttatgtgtaaccttgagattgcttttaaaattgtatttaaaggcaacatgatttgttttctactaagtaaaaagcaaagacctttatctggtttattttgtcattagagtattctgatcatttctgtatatacacacacaggctatttcttggcatgtaaagtattcaaatacgtgttgaatngttggctatcagcagtgcatgccacagnacacagtgttgcagtaaggctgtgatagtgattctttntaattactctnntcatgtttctaantgaaattttatatttctcagttattttgctaaattagattntattttacaggtttgcattgtaaaggaggaacagcttanggttcatgaattcttaaatgaccntaaatacgtggagaatttcttgaatagt

SEQ ID NO: 250024 - DNA, 1699 bp, Homo Sapiens
  misc_feature (840)..(848): n is a, c, g, or t
  misc_feature (1001)..(1016): n is a, c, g, or t
  misc_feature (1041)..(1050): n is a, c, g, or t
  misc_feature (1127)..(1136): n is a, c, g, or t
  misc_feature (1530)..(1542): n is a, c, g, or t
gcctcctcccggcttccgccgccgccactccagcctaatcccaaccccagggcgaagcgttttcttatttatttccgttttctcgccactacagcctcctgacaaggtgatccgggcgggccccgcaggaattttatcccctcaccggcctcacactagtatcgcatgtccactatccagaacctccaatctttcgacccctttgctgatgcaactaagggtgacgacttactcccggcagggactgaggattacattcatataagaatccagcaacggaacggcagaaagacactgactactgttcagggcattgcagatgattatgacaaaaagaaacttgtgaaagctttcaaaaagaaatttgcctgtaatggtactgtgattgaacatcctgaatacggagaggttattcagcttcaaggtgaccaaagaaaaaacatctgccagtttctcttggaggttggcattgtaaaggaggaacagcttaaggttcatggattctaaaatgaacctaaatacgtggagaatttcttgaatagttttgttctctaaacccggtttggctgccttgtgaaatgattccctgcagtaaacggacttttcatttatttaatcattcaaacttccattcacatctgcatgattacagaaaacatggggtatgtagactagtaacacataagaaaattgcagtaagatggtaacaaaacctcatattgtctttacatgtttccaatggaaaatgttttgagtgtttattgttcagtttattacgtttcacttgattaaattttttttgttgttgtattaaaccatgtacgttgcagcttaacaatnnnnnnnnntctatgaatctttgtgagcaattatgctcccaaatctaagcaaaagaaaaaacacccgccccgcgccgcgaattaacatatggtaccaaaaaatcccctaacgaaaccaggaacccgaaaaaaagatcccagtaaagaaaaaaaaccgtgcgnnnnnnnnnnnnnnnnaaaaggttttcaaacactttttttnnnnnnnnnnccccagaaggaaagaaaactttcccaagttgttttccaaaaaattccggcacagacacacgggttggatttcccccnnnnnnnnnnccccgggggggcaagcggccggctcagaaaataatccaaggggggtttcggaggcatttttcggggatttattaagcgggggtcccagcgggggcttcaaatctaaaatttcgccccccgcgccctgggcctgcttaacaaaaatcacgcgtggaaccttcccctcaaaatcctccccgccccagatgtggaaaacccctccccaacccggagattattgaaaccgctccatgcggcccgggggccttcatccgccctttggcgccccctgtggggtaaaaatatattggcccacgggagggcacaacagggggggtttagagaagatttgttatttgtatgtgccccgcccgctcagaacatacaaagttggggggcccccgcttactacgtnnnnnnnnnnnnntgaccaccaaacacggctgtcttcctccacgacgcgcccatttgtggggaaacctggggtgcaggtgtctttgtccgcgcgcccgaattctccgctatctctggcgataatataagcgggtgaaaaaaggggcgcgggcaaacacgacccgggggca

SEQ ID NO: 250025 - DNA, 1558 bp, Homo Sapiens
ctcttcaggttgctcatccaataccatgagcctgagctttgttcttatcttgatacaaagaaaattactccagactcctatgcactcaactggaagtaaaaatggaagctttaaagaggttgacatgtcctaagtcacacagttaatatgtggctccattgtcccttgaattcacatgttttgcctttggatttcatacactaagattaagcttggaagtctttttgcatgttactgttccactgaagtcactcaggcaatatgggatggatatctacaacaagcagatccgttttttatttatttcttaatgttaattatccttgttaatgcaaaagaagttattttaacacaagagtcagacagcaaagaagaggttatcagtctataatatttcagagttcttggaaaatactccatccagtctgaatatagaagatatagaagaccttttctctctggctcagtattattgcagcaaaacaccggcttcttttaggaaggataatcaccatctctttggtagtactttgttgggaattaaggatgatgatgcagatctgagtcaggctctttgtctggccatctccgtgtcagagacccttcaagcgaatcagctacaaggggaaggagtccggttctttgtggtggattgccgtcctgcagaacaatataatgctgggcatttatcaactgctttccacttggattcagacctgatgcttcagaatccatctgagtttgcacagtcagtaaaatccttgctggaagcacagaagcagtccattgagtctggctccatagctggtggggagcacctctgttttatgggcagtggcagggaggaagaagacatgtatatgaacatggtcctggcacactttttacagaaaaacaaagaatatgtgagtattgccagtggaggatttatggcagcacctggcagacattaatgtggatggaccagaaaatggatatggccattggattgctagtacctcaggctcaaggagcagtatcaattctgttgatggtgaatctcctaatggctcaagtgatagaggaatgaaatcactagtaaataaaatgactgtggctttgaagacaaaatccgttaatgtcagggaaaaagttatcagttttatagagaatacatcaactcctgtggatcggcatgtgagcagcagtgacagagtgggcaagccttaccgtggcgtaaagcctgttttcagcattggggatgaagaagaatacgacacagatgaaattgacagttcttcaatgtcagatgatgatagaaaagaggttgtaaacattcagacttggataaacaaaccagatgtcaaacatcattttccttgtaaagaagtaaaagaaagtggacacatgtttcccagtcatctgttggttactgcaacacatatgtactgtttaagggagattgtttcacggaaaggattggcttatatacagtctcgacaagcgctgaattctgtagttaaaattacatccaaaaatagaaatcttggcaatcgaaaggtatttgattccaaatgca

SEQ ID NO: 250026 - DNA, 1291 bp, Homo Sapiens
  misc_feature (79)..(87): n is a, c, g, or t
ggggatcaagagataggcagtgcaaaggaacaggatttgagacagcccagggtttcctcttcaagtaggtctaaaacannnnnnnnnctcattgacttccttcctgttctaactgccagtactcagaagtcagagttgagagacagaggcaccccggacagagacgtgaagcactgaataaatagatcagaatgactgaaaaagccccagagccacatgtggaggaggatgacgatgatgagctggacagcaagctcaattataagcctccaccacagaagtccctgaaagagctgcaggaaatggacaaagatgatgagagtctaattaagtacaagaaaacgctgctgggagatggtcctgtggtgacagatccgaaagcccccaatgtcgttgtcacccggctcaccctggtttgtgagagtgccccgggaccaatcaccatggaccttactggagatctggaagccctcaaaaaggaaaccattgtgttaaaggaaggttctgaatatagagtcaaaattcacttcaaagtgaacagggatattgtgtcaggcctgaaatacgttcagcacacctacaggactggggtgaaagtggataaagcaacatttatggttggcagctatggacctcggcctgaggagtatgagttcctcactccagttgaggaggctcccaagggcatgctggcccgaggcacgtaccacaacaagtccttcttcaccgacgatgacaagcaagaccacctcagctgggagtggaacctgtcgattaagaaggagtggacagaatgaatgcatccacccctttccccacccttgccacctggaagaattctctcaggcgtgttcagcaccctgtccctcctccctgtccacagctgggtccctcttcaacactgccacatttccttattgatgcatcttttcccaccctgtcactcaacgtggtccctagaacaagaggcttaaaaccgggctttcacccaacctgctccctctgatcctccatcagggccagatcttccacgtctccatctcagtacacaatcatttaatatttccctgtcttacccctattcaagcaactagaggccagaaaatgggcaaattatcactaacaggtctttgactcaggttccagtagttcattctaatgcctagattcttttgtggttgttgctggcccaatgagtccctagtcacatcccctgccagagggagttcttcttttgtgagagacactgtaaacgacacaagagaacaagaataaaacaataactgtggag

SEQ ID NO: 250027 - DNA, 836 bp, Homo Sapiens
gggagtactcagaagtcagagttgagagacagaggcaccccggacagagacgtgaagcactgaataaatagatcagaatgactgaaaaagccccagagccacatgtggaggaggatgacgatgatgagctggacagcaagctcaattataagcctccaccacagaagtccctgaaagagctgcaggaaatggacaaagatgatgagagtctaattaagtacaagaaaacgctgctgggagatggtcctgtggtgacagatccgaaagcccccaatgtcgttgtcacccggctcaccctggtttgtgagagtgccccgggaccaatcaccatggaccttactggagatctggaagccctcaaaaaggaaaccattgtgttaaaggaaggttctgaatatagagtcaaaattcacttcaaagtgaacagggatattgtgtcaggcctgaaatacgttcagcacacctacaggactggggtgaaagtggataaagcaacatttatggttggcagctatggacctcggcctgaggagtatgagttcctcactccagttgaggaggctcccaagggcatgctggcgcgaggcacgtaccacaacaagtccttcttcaccgacgatgacaagcaagaccaccctcagctgggagtggaacctgtcgatttaagaaagagtggacagaatgaatgcatccaccccttttccccacccttgccacctggaagaatttctctcaggccgggttcagcacccctggcccctccctccctgttcccacagctggggtcccctccttcaacactggccacatttttccccttaattggatggcaatct

SEQ ID NO: 250028 - DNA, 483 bp, Homo Sapiens
  misc_feature (359)..(359): n is a, c, g, or t
  misc_feature (459)..(459): n is a, c, g, or t
aagtcagagttgagagacagaggcaccccggacagagacgtgaagcactgaataaatagatcagaatgactgaaaaagccccagagccacatgtggaggaggatgacgatgatgagctggacagcaagctcaattataagcctccaccacagaagtccctgaaagagctgcaggaaatggacaaagatgatgagagtctaattaagtacaagaaaacgctgctgggagatggtcctgtggtgacagatccgaaagcccccaatgtcgttgtcacccggctcaccctggtttgtgagagtgccccgggaccaatcaccatggaccttactgggagatctggaagcccttcaaaaaggaanaccattgtgtttaaagggaaggttctggaatattaggagtccaaaatttcactttcaaagtggaacaggggatttttgtgttcaggcctgaaatacgttncggcacacctacaggatttggggt

SEQ ID NO: 250029 - DNA, 663 bp, Homo Sapiens
attacgagattggcttggattctgtcggatggacttggggctagctgcggcggggctggaggaggccagataaccatgtcagccacagttgtagatgcagttaatgctgcacccctatcggggtccaaagaaatgagtttggaagaaccaaagaagatgaccagagaggactggagaaagaagaaggagctagaagaacagcgaaaattgggcaatgctcctgcagaagttgatgaagaaggaaaagacatcaacccccatattcctcagtatatttcttcagtgccatggtatattgatccttcaaaaagacctactttaaaacaccagagaccacaaccagaaaaacaaaagcagttcagctcatctggagaatggtacaagaggggtgtaaaagagaattccataattactaagtaccgcaaaggagcatgtgaaaattgtggggccatgacacacaaaaagaaagactgctttgagagacctaggcgagttggagccaaatttacaggtactaatatagctccagatgaacatgtccagcctcaactgatgtttgactatgatgggaagagggatcggtggaatggctacaatccagaagaacacatgaaaattgttgaagagtatgccaaagttgatttgggcaaacgaacattgaaa

SEQ ID NO: 250030 - DNA, 896 bp, Homo Sapiens
  misc_feature (17)..(17): n is a, c, g, or t
ggcctgttaacactttngaataacttgaattttccactcttgaggagccaattttcctaaacccctttaaggtttcccccgacattattgaaagaaattgcaggctctggaagaagtctgactgttctccaaggtctgcttttgggtaagccagtcctgggggtcggtgctgggtatgtaaggagcttgataaccactggcaggtttgcttccaaggagccattcgctgaaagggacagctacaataccggatgctgacttctgctctggcatggagatacagcctctcttctccaggaagggcccaatatttgctgaactagcatgagccatcaagtgctcaggaatttgaatggttttgagagacccaaatgtggtgatggtctggcgcagagtaattgtgtcagcttcaaagagcaggacagttgaatcttcaggcttaagggtcaaactgcccagtctctccaggcacacagagacttgattggctagatctttgttttgggtacactccagttgatgagtaagacaattgaactggcccaataacgagtagagctgctgagcctgctgttgaagtgtctcctctttaagctgataaataaggtccacctgttcatacagccatacctcacggcttctaagacattccaggtgacggcttatgcaactgtgaatctgagctttgacctctcgcaagttatctttaatttgctgttcagcccggagaactccaccaatagcaagctccaagtccctccgtgcatcactacacctcaaaaggggttctctattactggagctgccactctggtcttggaaggtattcattctcctcactgctcctcacaggacaggtcaccgactcaacagctgcccggcaagcgacaggctgc

SEQ ID NO: 250031 - DNA, 795 bp, Homo Sapiens
  misc_feature (656)..(656): n is a, c, g, or t
  misc_feature (684)..(684): n is a, c, g, or t
ggggttgtcgcgagaactctgcctttgggccgtaggttagtgtggggccgtgtctcagtccacccaaggtctcctcggatcgcctggagaggcactcggacctggagcagtgaggagaatgaataccttccaagaccagagtggcagctccagtaatagagaaccccttttgaggtgtagtgatgcacggagggacttggagcttgctattggtggagttctccgggctgaacagcaaattaaagataacttgcgagaggtcaaagctcagattcacagttgcataagccgtcacctggaatgtcttagaagccgtgaggtatggctgtatgaacaggtggaccttatttatcagcttaaagaggagacacttcaacagcaggctcagcagctctactcgttattgggccagttcaattgtcttactcatcaactggagtgtacccaaaacaaagatctagccaatcaagtctctgtgtgcctggagagactgggcagtttgacccttaagcctgaagattcaactgtcctgctctttgaagctgacacaattactctgcgccagaccatcaccacatttgggtctctcaaaacattcaaatttctgagcacttgatggctcatgctagttcagcaaatattgggccctttcctgnagaagagaggctgtatctccatgcccanagccagagtccgcatccggtattgtacctgtccctttcagcggatggctccttgggagcaacctggcagtggttatcaaggctccttacatacccagcaacgaacccccag

SEQ ID NO: 250032 - DNA, 895 bp, Homo Sapiens
gggggccgtaggttagtgtggggccgtgtctcagtccacccaaggtctcctcggatcgcctggagaggcactcggacctggagcagtgaggagaatgaataccttccaagaccagagtggcagctccagtaatagagaaccccttttgaggtgtagtgatgcacggagggacttggagcttgctattggtggagttctccgggctgaacagcaaattaaagataacttgcgagaggtcaaagctcagattcacagttgcataagccgtcacctggaatgtcttaggaagccgtgaggtatggctgtatgaacaggtgggaccttatttatcagcttaaagaggagacacttcaacagcaggctcagcagctctactcgttattgggccagttcaattgtcttactcatcaactggagtgtacccaaaacaaagatctagccaatcaagtctctgtgtgcctggagagactgggcagtttgaccctttaagcctgaagattcaactgtcctgctctttgaagctgacacaattactctgcgccagaccatcaccacattttggggtctctcaaaaccatttcaatttcctgagcacttgatgggctcatggctagttcaacaaatattgggccccttccctggaaaagagaggctgtatctccctggccagaacagaagtcaccctcccggtattgtaactgttcccttttcaccgaaatggcttctttgggaaagcaaacctggccaagggggtttatcaaggcttcctttaaattacccaagcaaccgaaccccccagggaattgtgccttaccctcaaaagcaagaacctcttgggagaaacaagttccaaaaattctcttccacagagaccctgggcaatttttctcttcca

SEQ ID NO: 250033 - DNA, 402 bp, Homo Sapiens
ggtgattaaacagaagtcagcatcccggtattggtagctgtcccctttccagcgaatggctccttggaagcaaacctgccagtggttatcaagctccttacatacccagcaccgaccccccaggactggcttacccccaaaagcagcccttggagaacagtcaggtctgttgctgcttttattgtttcctacagtagacacagcagtaggtggagttagttactaatcagtagtactatgtgtcattgttaactttttggttgcagtctggaaacatatttattaatagtctcttcatcatagaaagtttagaaaataaggaactctttatcatagaaaattttaaaaataaagaattttatattaaaaaagcccacaaacccataatctcaacacaaagag

SEQ ID NO: 250034 - DNA, 1146 bp, Homo Sapiens
  misc_feature (517)..(532): n is a, c, g, or t
  misc_feature (823)..(823): n is a, c, g, or t
acaattcaaattatggttggagagccctgagactattagcacggagaagccctcacttcttccagccaaccaaccagcagtttaaaagtttaccagaatatcttgaaaatatggtaataaagctagccaaggaattaccgcctccttctgaagaaataaaaacaggtgaggatgaagatgaggaagataatgatgctctactgaaggaaaatgaaagtcctgatgttcggcgagacaaacctgtaacaggagaacaaatagaggtatttgccaacaagctgggtgaacaatggaagattctggctccctacttggaaatgaaagactcagaaattaggcagattgagtgtgacagtgaagacatgaagatgagagctaagcagctcctggttgcctggcaagatcaagagggagttcatgcaacacctgagaatctgattaatgcactgaataagtctggattaagtgaccttgcagaaagtctaactaatgacaatgagacaaatagttagcttcnnnnnnnnnnnnnnnnattaaaactgtgatagattttgttaccaagcagcatttgataagaggtccactggttttggtaaacaataaacatttttataacaacaattgttgtacagtcggctggtgctctgagaacaatagaacacatattggctcaaaccagagtttggggaggttgggttgagataatgacctaaacgaagtgacctcaagatcacaaaatatatttttttgttaagtagatgtatttataatgaagttaaataagcactatttagggatatgtcgtttcttataccaaaatagntttcctggggggtgttttgttagtagttttacaaaatttaatcctggaaatcccagaataaccactttctgaaaccatatgactgctctgttctcacttattcgtgctttcaagcagaggatcaacaaatgatggtttgttctgcctgccacgagtcttgatcattaaaattgtactggcacccagctgtgctcactcataactaactaactaactgtctatggctccagctacactataacaacagcaaagctaaggagctgcagcactttatagcctgcaaagcctgaaataatttactatcaatcatcaatcaatcatca

SEQ ID NO: 250035 - DNA, 889 bp, Homo Sapiens
  misc_feature (72)..(163): n is a, c, g, or t
aactaactaactaactttttgtatttttagtagagacagggtttcactgtgttagccaggatggtcttgatnnnnnnnnnnnnnnnnnnnnnnnnnnnnnnnnnnnnnnnnnnnnnnnnnnnnnnnnnnnnnnnnnnnnnnnnnnnnnnnnnnnnnnnnnnnncttgactgtcctaaccttaccttagatgctaacagaagggtcctgctgaaataacactgggtgctatattgatgggtaaatgtgtacatcctattccttcctctttatctcacaatttttgtctccactaagcaagaagtaaactaacacttcgtcactctaaagaaataacttatgtaaaactcttagtaaccctggtttgtcttcaaatgagtaaatagaccaaagtggggggacaattttctagttctgtagagggaaaaacatctgagtcaacattttgaaatgcagagggtattggtacatgacgacatggaaaagggcacttttaaacacagcttactcttcctcaagtacagagagtatatagtgaatcaaaactaactacagccattctttttaaagcccaagggatggagcaaaggtgtaaggatgttacctgtttgttttaatcagagagcaaaaagaagtcacaatagtttgggagaaaaagtagtatggtgagtaaggttatgcgtataatttcatactgaatttattactatttgggatgtacgtcaatgttctaacaaacactgccaacacgtcaattttttaaaaagcgtgggccacattgctaagaatttgttaaagcataactgtattttttgttttagggccttattgatgttttgccgttccaatgtatgcatttttttactcaataaacttgtcttaattttaaaa

SEQ ID NO: 250036 - DNA, 730 bp, Homo Sapiens
aagaattcggcacgaggaagagccctggataggaagccactgagtctgccctgggctctgataaaaccttcaccattaacttgctgtgtgaccttgggcatgtggctttcccttctctgggcctcagtctgttcatcctcccaaatggataatgaagcctcttgggaggccctaccataggatctgttgccatgctcaaatgagttactgaataaggtgcttctgcttcttctagagatggtgctaaagaaaggactagcatatgagacttctggtaccaatggggctggtgggcatgctgtccactgtgtggtgctaggactgccaatgccaggcccaagggacaaaaagaacagagctttttgttctcatggctggccctgctacctccgaggcaccctgcagggcaatgcatgtcatcccaacccccacactccccatcctccaacccactggtctcatgcccaaagaagagttgaaggcatgggagccaacattttattgaagaagccacagaggctgaaattcaataaacacaagttttatgagtaccttgaagctccagaatgtgctggggaaaggggttgtgatggccaggaggaggatacccttcaaaacgggctgttccctaaccagatagaaatgggaaagggaaaaaattggcagagaaagtctagactctctggcctaccatggagcctaggcccaggcccccaagatcccaccttcc

SEQ ID NO: 250037 - DNA, 927 bp, Homo Sapiens
  misc_feature (220)..(220): n is a, c, g, or t
  misc_feature (502)..(679): n is a, c, g, or t
tggatgtagagaggctgtaactgtccaagctatacttatggcgtgatcgccctgctgactgtcggcaccgccctactgctgacagagacgaggcatgcacagctgccacagaccatccatgacgtggagagatagagtgcccctaccagtcttcatgagggagagatagcccatgaagcatgttcagaactaagtgggagtggaggcaggccctccacangaagctctgcagcagaggctgggagagcagaagggcacgccctgcaactcaagctgggagtatcgaaccctctgcctagggacggagtagctgccacaacccgctccctctgctcatacatccttgagtattaggcttctaggaacagttgacttcccagaatgcagtgggctgctgggcacccctctcacggttggggaggattctgtaaataaaggtgccccttgggttggggcagtggtgacgagctgtggggaagagccctggataggaagccactgnnnnnnnnnnnnnnnnnnnnnnnnnnnnnnnnnnnnnnnnnnnnnnnnnnnnnnnnnnnnnnnnnnnnnnnnnnnnnnnnnnnnnnnnnnnnnnnnnnnnnnnnnnnnnnnnnnnnnnnnnnnnnnnnnnnnnnnnnnnnnnnnnnnnnnnnnnnnnnnnnnnnnnnnnnnnnnnnnnctgcttcttctagagatggtgctaaagaaaggactagcatatgagacttctggtaccaatggggctggtgggcatgctgtccactgtgtggtgctaggactgccaatgccaggcccaagggacaaaaagaacagagctttttgttctcatggctggccctgctacctccgaggcaccctgcagggcaatgcatgtcatcccaacccccacactccccatcctccaacccactggtctcatgcccaaag

SEQ ID NO: 250038 - DNA, 467 bp, Homo Sapiens
  misc_feature (174)..(174): n is a, c, g, or t
  misc_feature (334)..(334): n is a, c, g, or t
ttcggcacagtgagcactgagactcctttcaggttcggagtgaacttctcctattacggcctgagtctggatgtgtcggggctggggctgaacgtgtaccagacacagctgttgttcggggctgtggaactgccctccaagctgctggtctacttgtcggtgcgctacgcaggnacgccgcctcacgcaagccgggacactgctgggcacggccctggcgttcggcactagactgctagtgtcctctgatatgaagtcctggagcactgtcctggcagtgatggggaaagctttttctgaagctgccttcaccactgcctacctgttcacttcnagagtttgtaccctacggtgcttcaggtgaggaagcctgcaactgatctgggggtatggggcttgttagtcacgtgtccttaacccaacacttcctacatacacgcacccacaaccctggtcctcctcacgcc

SEQ ID NO: 250039 - DNA, 1387 bp, Homo Sapiens
cttgccatgatgcccaggctgatcttgaactcctgggctcaaacccaccctcccgccttgacctccaaaagtgtttggattacaggcatgggccattgcacccagcccagaggtggcttttaaactgggcattaaaagatgaataagagctcatcaagtgtggagggctttggggaggagatgatgttccaggctaaggggactacatgagcaagagcctggaagttgagagcctgtagtatgtccaggaacatgtggcttagggtcatgactttctggctgatggaccttctgcctattcctaggtgggtgcctgagtctgcacgctggcttctgacccaaggccatgtgaaagaggcccacaggtacttgctccactgtgccaggctcaatgggcggccagtgtgtgaggacagcttcagccaggaggtgtggagcaaagtggccgccggggaacgggtggtccgaagaccttcatacctagacctgttccgcacaccacggctccgacacatctcactgtgctgcgtggtggtgtggttcggagtgaacttctcctattacggcctgagtctggatgtgtcggggctggggctgaacgtgtaaccagacacagctgttgttcggggctgtggaactgccctccaagctgctggtctacttgtcggtgcgctacgcaggacgccgcctcacgcaagccgggacactgctgggcacggccctggcgttcggcactagactgctagtgtcctctgatatgaagtcctggagcactgtcctggcagtgatggggaaagctttttctgaagctgccttcaccactgcctacctgttcacttcagagttgtaccctacggtgctcagacagacagggatggggctgactgcactggtgggccggctggggggctctttggccccactggcggccttgctggatggagtgtggctgtcactgcccaagcttacttatggggggatcgcctgctggctgccggcaccgccctcctgctgccagagacgaggcaggcacagctgccagagaccatccaaggacgtgggagagaaagagagatggtgctaaagaaaggactagcatatgagacttctggtaccaatggggctggtgggcatgctggtcactgtgtggtgctaggactgccaatgccaggcccaagggacaaaaagaacagagctttttgttctcatggctggccctgctacctccgaggcaccctgcagggcaatgcatgtcatcccaacccccacactccccatcctccaacccactggtctcatgcccaaagaagagttgaaggcatgggagccaacattttattgaaagaagccacagaggctgaaattcaataaacacaaggtttatgag

SEQ ID NO: 250040 - DNA, 1064 bp, Homo Sapiens
gagaccactggccgtggtgtcatggccctcaaacataaaggtgtcagcttctgctcttatgtcctcatcagataacttcttcccgtcttcatccttgctcagcaggagtacatcaatgaagtccaaagtcttggatttggccttggcttggaggaagtcatcaacaccctggctagggagagtgcggcgccgctcctggatgacggcatctgtgaagtcgtgcaccaggcggcaggccctgcggaaacgctgcccatcaggggtgagataatacaggaagtcaatatgcaggaggatctcatggtgtctttttgatacaagggcactgagctccaagatggcggcaatatattcactgggtttctcctgacaatggctgtcaaagctgaagacacatttctgcagactgtccaaggtcatgaggctgatgtgctcaaacatatccaaacaggcactaccctctgaggccaggagctgccacttggcgtgcatgatgttcacactctcattgaaaatcttcatatagggcttcaggatgttgaaatggaaggcaggcgtcagcatccgacggtggcggctccacttttcaccagcactcagcaggagcccatcccccagccagggcttcaggaagctgtagaagaccttgtcctttggtacaatggcagctgaggcgttgatgacagaccggatgatgttggggtggcaaaaacggatgacggggaagatggggcccatccagaccttaaagccctgggggtaggtggccaccagctgagtcaggaccctcatgccctgctccgtgggggtgaccaggcccaggtgacccaagaaccaattccgtttcgggggttgcgggaaacaccggaggcggcagcagttgtcatagaaggtataggtccaggccaggatgcgggccaggagccaggaggccccaaccagcagcaggagcagccacggggatgctgccattggccaaaggcccagcgaggacaggctcagctgtggcatcctgcagggcagatggggtggtgagtgaggtcctgaggcccgagggaagggcc

SEQ ID NO: 250041 - DNA, 1212 bp, Homo Sapiens
caacatcctgaagtcctatataacgatcttcaacaagagtgcaaacatcatgcttgacaagtggcagcacctggcctcagagggcagcagttgtctggacatgtttgagcacatcagcctcatgaccttggacagtctacagaaatgcatcttcagctttgacagccattgtcaggagaggcccagtgaatatattgccaccatcttggagctcagtgcccttgtagagaaaagaagccagcatatcctccagcacatggactttctgtattacctctcccatgacgggcggcgcttccacagggcctgccgcctggtgcatgacttcacagacgctgtcatccgggagcggcgtcgcaccctccccactcagggtattgatgattttttcaaagacaaagccaagtccaagactttggatttcattgatgtgcttctgctgagcaaggatgaagatgggaagaagttgtcagatgaggacataagagcagaggctgacaccttcatgtttgggggccatgacaccacggccagtggtctctcctgggtcctgtacaaccttgcgaggcacccagaataccaggagcgctgccgacaggaggtgcaagagcttctgaaggaccgtgatcctaaagagattgaatgggacgacctggcccagttgcccttcctgaccatgtgcatgaaggagagcctgaggctgcatcccccagtcccggccatctcccgccactgtcacccaagacattgtgctcccagacggccgggtcatccccaaaggcattatctgcctcatcagtgttttcggaacccatcacaacccagctgtgtggccggaccctgaggtctacgacccctttcgctttgacccagagaacatcaaggagaggtcacctctggcttttattcccttctcagcagggcccaggaactgcatcgggcaggcgttcgcgatggcggagatgaaggtggtcctggggctcacgctgctgcgcttccgcgtcctgcctgaccacaccgagccccgcaggaagccggagctggtcctgcgcgcagagggcggactttggctgcgggtggagcccctgagctgagttctgcagagacccactctgaccccactaaaatgacccctgattcatcaaaagtgaagcctagaatgaccctaagaccctgttccacagtcctgtattccatcctagatatctactc

SEQ ID NO: 250042 - DNA, 1007 bp, Homo Sapiens
  misc_feature (229)..(267): n is a, c, g, or t
ctgaaagtctgtattatgcagaaaaatgaaaatattcgagaaccattgattcctgtcaccagggtccaaagaggaggcaaaggatctgggggaagcccttggagttggggctttggtgatggtgaacaagagagatctagacgtgcagagtgcatttgagtttctggaagatcagagcttcagagattatctcaggttagactccggagtctcagagatagtataattnnnnnnnnnnnnnnnnnnnnnnnnnnnnnnnnnnnnnnncttgctttctcttcaggatgaagatgggaaggcattgtcagatgaggatataagagcagaggctgacaccttcatgtttggaggccatgacaccacggccagtggcctctcctgggtcctgtacaaccttgcgaggcacccagaataccaggagcgctgccgacaggaggtgcaagagcttctgaaggaccgcgatcctaaagagattgaatgggacgacctgggcccagctgcccttcctgaccatgtgcgtgaaggagagcctgaggttacatcccccagctcccttcatctcccgatgctgcacccagggcattgatcaggaaaatccaacatcatccccaaaagcattacctgcctcatcgatattataggggtccatcacaacccaactgtgtggccggatcctgcaggctacgaccccttccgctttgacccagagaacagcaaggggaggtcacctctggcttttattcccttctccgcagggcccaggaactgcatcgggcaggcgtttcccatggcggagatgaaagtggtcctggcgttgatgctgctgcacttccggttcctgccagaccacactgagccccgcaggaagctggaactgatcatgcgcgccgagggcgggctttggctgcgggtggagcccctgaatgtaggcttgcagtgactttctgacccatccacctgtttttttgcagattgtcatgaataaaacggtgctgtcaccaaaaaaa

SEQ ID NO: 250043 - DNA, 393 bp, Homo Sapiens
  misc_feature (319)..(319): n is a, c, g, or t
  misc_feature (331)..(331): n is a, c, g, or t
  misc_feature (340)..(340): n is a, c, g, or t
  misc_feature (377)..(377): n is a, c, g, or t
ttctgctgctggttgggggctcctggctcctggccgcgtcctggcctggacctacaccttctatgacaactgccgccgcctccagtgttttcctcaacccccgaaacagaactggttttggggacaccagggcctggtcactcccacggaagagggcatgaagacattgacccagctggtgaccacatatccccagggctttaagttgtggctgggtcctaccttccccctcctcattttatgccaccctgacatcatccggcctatcaccagtgcctcagctgctgtcgcacccaaggatatgattttctatggcttnctgaagcctggnttggggatnggctcctgctggagtggttgtgacaagttggaaccgncaacgtcggatgtttg

SEQ ID NO: 250044 - DNA, 418 bp, Homo Sapiens
  misc_feature (16)..(16): n is a, c, g, or t
  misc_feature (37)..(37): n is a, c, g, or t
  misc_feature (65)..(65): n is a, c, g, or t
  misc_feature (102)..(102): n is a, c, g, or t
  misc_feature (174)..(174): n is a, c, g, or t
  misc_feature (210)..(210): n is a, c, g, or t
ggactttgtgctcccnagacggccgcgtcattccccnaaaggcattgtctgcctcatcaatattntcggggatcccattacaaccccaactgtgtggccaanacccctggaggctacgaccccttccgtttcaacccaagagaacatcaaggagaggtcacctctggcttttantcccttctcggcagggcccagaaactgcatcgggcnagcgtttcgccatggctgagatgaaggtggtccctgggctcacgctgctgcacttccgcatcctgccgacccacactgaaccccgcaggaaacccgagctgatattgcgcgcagagggtggactttggctgcgggtggagcccctgggtgcgaactcacagtgactgccctacccacccacccacctctgtagagtcccagaaacaat

SEQ ID NO: 250045 - DNA, 889 bp, Homo Sapiens
ggggttgcctgagcagtgggctgcttaggaagagaaggtcagagttcgcgggggcagaggcattcttgccgctggcccagtcactatgtagtggaggggcagacaccctcccgcaaattctggaaggttcttagtctcgactagggcagtagccccaggactcctagtcgccggcttcaggtcactgccggctgaacggagctgccgtcgccatgtttggctgcttggtggcggggaggctggtgcaaacagctgcacagcaagtggcagaggataaatttgtttttgacttacctgattatgaaagtatcaaccatgttgtggtttttatgctgggaacaatcccatttcctgagggaatgggaggatctgtctacttttcttatcctgattcaaatggaatgccagtatggcaactcctaggatttgtcacgaatgggaagccaagtgccatcttcaaaatttcaggtcttaaatctggagaaggaagccaacatccttttggagccatgaatattgtccgaactccatctgttgctcagattggaatttcagtggaattattagacagtatggctcagcagactcctgtaggtaatgctgctgtatcctcagttgactcattcactcagttcacacaaaagatgttggacaatttctacaattttgcttcatcatttgctggcctctcaggcccagatgacaccaagccccatctggaaatgttcattcccggcaaatgtgggttctgaaaagggtatgaaaacttttcaaagacgactaagcccagaacccctctctttttggaaaaacataaatttgaatcaaataattttttccttccccccgattacagctaatagaacaaaaaatcctttggccggccgcc

SEQ ID NO: 250046 - DNA, 566 bp, Homo Sapiens
gggctttcttttcgccatcttttgtctttccgtggagctgtcgccatgaaggtcgagctgtgcagttttagcgggtacaagatctaccccggacacgggaggcgctacgccaggaccgacgggaaggttttccagtttcttaatgcgaaatgcgagtcggctttcctttccaagaggaatcctcggcagataaactggactgtcctctacagaaggaagcacaaaaagggacagtcggaagaaattcaaaagaaaagaacccgccgagcagtcaaattccagagggccattactggtgcatctcttgctgatataatggccaagaggaatcagaaacctgaagttagaaaggctcaacgagaacaagctatcagggctgctaaggaagcaaaaaaggctaagcaagcatctaaaaagactgcaatggctgctgctaaggcacctacaaaggcagcacctaagcaaaagattgtgaagcctgtgaaagtttcagctccccgagttggtggaaaacgctaaactggcagattagatttttaaataaagattggattataactctaaaa

SEQ ID NO: 250047 - DNA, 483 bp, Homo Sapiens
ggaacctgaaactttccacagcctcaacaaccttttgccttaaggtgctgccctttggtaaggtgcccttaaccagcaagcccattgccagtcttttttaagatgccttgccttaagccttttttgccttcccttagcaagccctgaatagcttgttctcgttgagcctttctaacttcaggtttctgattcctcttggccattatatcagcaagagatgcaccagtaatggccctctggaatttgactgctcggcgggttcttttcttttgaatttcttccgactgtccctttttgtgcttccttctgtagaggacagtccagtttatctgccgaggattcctcttggaaaggaaagccgactcgcatttcgcattaagaaactggaaaaccttcccgtcggtcctgcgtagcgcactccgtgtccggggtagatcttgtacccgctaaaactgcacagctcgaccttcatggcgacagctc

SEQ ID NO: 250048 - DNA, 543 bp, Homo Sapiens
  misc_feature (60)..(60): n is a, c, g, or t
gtccgaacctgtgccagtttttaccgggttacaaagatcctacccccggacacgggaggnccctagccccccgacccaagggaaggttttccccagtttccttaatgccgaaatgccgagtcggcctttcccttccccaagaggaatcccctcggcagataaactggactgtccctcctacagaaggaagccacaaaaagggacagtcggaagaaattcaaaagaaaagaaccccgccgagcagtcaaattcccagagggcccattactggtgcatctcttgcctgatataatggcccaagaggaatcagaaacctgaagttagaaaggctcaacgagaacaagctatcagggctgctaaggaagcaaaaaaggctaagcaagcatctaaaaagactgcaatggctgctgctaaggcacctacaaaggcagcacctaagcaaaagattgtgaagcctgtgaaagtttcagctccccgagttggtggaaaacgctaaactggcagattagatttttaaataaagattggattataactctatac

SEQ ID NO: 250049 - DNA, 1139 bp, Homo Sapiens
  misc_feature (508)..(541): n is a, c, g, or t
tgaagatgcagcccctggatggtcccagactctcaggacatgcccagctcaggggcttcgagccacaggcctggcctcatatggcatgagggggatctggcataggagccagactgctcttagccccctggctttgtgccaggcctggaggagggcagtcccccatggggtgccgagccaacgcctcaggaatcaggaggccagcctggtaccaaaaggagtacccagggcctggtacccaggcccactccagaatggcctctggactcaccttgagaagggggagctgctgggcctaaagcccactcctgggggtctcctgctgcttaggtccttttgggacccccacccatccaggccctttctttgcacacttcttcccccacctctatgcatcttccccccactgcggtgttcggcctgaaggtggtgggggtgagggggggtttggccattagcatttcatgtctttccccaaatgaagatgccctgcaaagggcagtaaccnnnnnnnnnnnnnnnnnnnnnnnnnnnnnnnnnnggggggggcgccaaaaatttcccccggggggcccaatttagcggggtcacccacgtgtttcctggttgcacagggggcccccaacaaggagagcgcgaaaaaaaagagccaagggacagcgggccccgcgtcaccaacgctcggcgaccgggggacaaccggcgctgacctggggcaacctcggggcagaggaaccccatacagcccggggccggcgcccactacgcggcgccaaccctacctcacgagacaaataaagcgacccagggaaacatacacattgtccccgggggctatagggggctcaaccaggcgcaataagctggcgccggaacaatttggccacggcattgatgtcaggaccattctccccgagcacgtcgagaaaacggcggacgcacagcgccacgacagcaacaggcagaactcatgcatacgctacaatggcgccgacgacagagcacgggaccccaaccgtcagcagcaccacaacacgacgacgacctcaaccggccatcatcgctgccccggcaaagcacgctccaccaagccgaaacgacgctcacaacaacaagcaaacaacgaagacggaccacaa

SEQ ID NO: 250050 - DNA, 1051 bp, Homo Sapiens
aaaagcaacttaagaaacataaacgatacttctcaattttgtggtactttttcatttttaaaacagctaatgaggaatgtttcatgcttaagtatattggtctatctctagatcgaacttcacatttacaaacatggcttttaggagttcccacatatgtttgggaagtggagtgggcaaaatcctggagaagacagaattgttgaaagcggggctgataccccagaatgtgcctaatatactagaccataggtgccacagagagctggagagggagtgggcatcaacatgtatgtgtactttgccagggctttcgtccacatctgatatttacctaattcaacactatttcctgaaaatctggtttgtgttctgtctctgggaagcactaaggaaataatggcgggcccaacactctcgtgaaagttctcagggagtgtttgcagagagacaggtatttaacaaacaatgaaatgactatgtaattaagtgatttgaaaaaaaagtacagagtcctttggaaatgtgtaacaaaaatgtgatctaatttggggtggagaggtggtgaagcaggaaaagatatgagtgaggtttaagtgagctctgagcgataaaaacaaggtaactaggtgaaggagaaggaagagagctccagggaaatcaatagtggtgcaaaggctcttagttaagagtgattgatgagatgaatcacgtagttaggcggcaactgaagtagcccaagcaaaagacaagaatggtggtggagacagagacaggtggtcagatgagatgatgtttctgacagtgattgtgcgaacggaggtgactgaaggtatcagtgccaaacaggttcttttctgcttcatacacattccggggaactaactctaacaacttgcaaagcctgtggttgcatggctttctcactgctaatcttaaatctttactaaaacaaagtcagatcatgcttcgtttctgccttgcaggtctttctcttgctggtgctagcagaatattctcatgtttgaaattatacttccttaaatcttta

SEQ ID NO: 250051 - DNA, 794 bp, Homo Sapiens
  misc_feature (663)..(663): n is a, c, g, or t
  misc_feature (744)..(744): n is a, c, g, or t
aatgcgattggagaccgcggaggcctacgtcggacccggaggccctgaatgccccatgcgcaccccacagctcgcgctcctgcaagtgttctttctggtgttccccgatggcgtccggcctcagccctcttcctccccatcaggggcagtgcccacgtctttggagctgcagcgagggacggatggcggaaccctccagtccccttcagaggcgactgcaactcgcccggccgtgcctggactccctacagtggtccctactctcgtgactccctcggcccctgggaataggactgtggacctcttcccagtcttaccgatctgtgtctgtgacttgactcctggagcctgcgatataaattgctgctgcgacagggactgctatcttctccatccgaggacagttttctccttctgccttccaggcagcgtaaggtcttcaagctgggtttgtgtagacaactctgttatcttcaggagtaattccccgtttccttcaagagttttcatggattctaatggaatcaggcagttttgtgtccatgtgaacaactcaaacttaaactatttccagaagcttcaaaaggtcaatgcaaccaacttccaggccctggctgcagagtttggaggcgaatcattcacttcaacattccaaacacaatncaccaccatctttttacaggggctggggaccccattctttacttacttcccccaagtggtctgtaataagcttgctggagncaacctgcaggagttgggagctggggggatttggtggtggaaagaattcc

SEQ ID NO: 250052 - DNA, 362 bp, Homo Sapiens
tcgtgctgcaccggctccgaggagcgggtgatggacgacaccagcggctcctcggctggctcatccagctcattgtcagtgtaggcgcctccttcaccgtccgtgtcttcaaagtcactgatgaggcggctgtcgcaactcagatagtccgcgcccatggcggttaagtaggacatgcggtcttcggggtcatcatccatcccttccatctttccttcagagacccaaaccgcttctccttgctgatgctgaatagtgtcctttaagctgccaaaccagcttttaagcttgttggcttgatcaaataactttcgagaacttttgttggacgttggatttaacctttgtctcatggttttgac

SEQ ID NO: 250053 - DNA, 607 bp, Homo Sapiens
ctctccgcaggccaaaacccagaacaaagaagaatcctatgacttctccaaatcctatgaatataagtcaaacccctctgccgttgctggtaatgaaactcctggggcatctaccaaaggttatcctcctcctgttgcagcaaaacctacctttgggcggtctatactgaagccctccactcccatccctcctcaagagggtgaggaggtgggagagagcagtgaggagcaagataatgctcccaaatcagtcctgggcaaagtcaaaatatttgagaagatggatcacaaggccaggttacagagaatgcaggagctccaggaagcacagaatgcaaggatcgaaattgcccagaagcatcctgatatctatgcagttccaatcaaaacgcacaagccagaccctggcacgccccagcacacgaggtaagggctgcctagtgggtacaggtctagggcggggacttctcaaggactgggacttgaagaaagaatttcctttacccaaatttcagagtaacaggaggattttttccccacagattgactgtttgccttactcattccatcaaatttaattgtaaagattacagagtcaaaacttaag

SEQ ID NO: 250054 - DNA, 2009 bp, Homo Sapiens
gggaattacacccagtggttcccaattgtgatttttttcaacccagactccagacaaggtgtcaaaaccatgagacaaaggttaaatccaacgtccaacaaaagttctcgaaagttatttgatcaagccaacaagcttaaaaaaacgtgtgcacaccttttttacagctacaatcaacctaaattcagccaatgatagctggtttggcagcttaaaggacactattcagcatcagcaaggagaagcggtttgggtctctgaaggaaagatggaagggatggatgatgaccccgaagaccgcatgtcctacttaaccgccatgggcgcggactatctgagttgcgacagccgcctcatcagtgactttgaagacacggacggtgaaggaggcgcctacactgacaatgagctggatgagccagccgaggagccgctggtgtcgtccatcacccgctcctcggagccggtgcagcacgaggagagcataaggaaacccagcccagagccacgagctcagatgaggagggctgctagcagcgatcaacttagggacaatagcccgcccccagcattcaagccagagccgcccaaggccaaaacccagaacaaagaagaatcctatgacttctccaaatcctatgaatataagtcaaacccctctgccgttgctggtaatgaaactcctggggcatctaccaaaggttatcctcctcctgttgcagcaaaacctacctttgggcggtctatactgaagccctccactcccatccctcctcaagagggtgaggaggtgggagagagcagtgaggagcaagataatgctcccaaatcagtcctgggcaaagtcaaaatatttgagaagatggatcacaaggccaggttacagagaatgcaggagctccaggaagcacagaatgcaaggatcgaaattgcccagaagcatcctgatatctatgcagttccaatcaaaacgcacaagccagaccctggcacgccccagcacacgagttccagaccccctgagccacagaaagctccttccagaccttatcaggataccagaggaagttatggcagtgatgccgaggaggaggagtaccgccagcagctgtcagaacactccaagcgcggttactatggccagtctgcccgataccgggacacagaattatagatgtctgagcacggactctcccaggcctgcctgcatggcatcagactagccactcctgccaggccgccgggatggttcttctccagttagaatgcaccatggagacgtggtgggactccagcctcgtgtgtcctcatggagaacccaggggacagctggtgcaaattcagaactgaaggctctatttgtgggactgggttagaggaagtctgtggctttttgttcagaattaagcagaacacttgcagtcagatcctgttacttgcttcagtggaccgaaatctgtattctgtttgcgtacttgtaatatgtatattaagaagcaataactatttttcctcattaatagctgccttcaaggactgtttcagtgtgagtcagaatgtgaaaaatgaataaaaaatactgttgggctcaaactaaattcaaagaagtactttattgcaactcttttaagtgccttggatgagaagtgtcttaaattttcttcctttgaagctttaggcagagccataatggactaaaacattttgactaagtttttataccagcttaatagctgtagttttccctgcactgtgtcatcttttcaaggcatttgtctttgtaatattttccataattttggactgtctatatcataactatacttgatagtttggctataagtgctcaatagcttgaagcccaagaagttggtatcgaaatttgttgtttgtttaaacccaagtgctgcacaaaagcagatacttgaggaaaacactatttccaaaagcacatgtattgacaacagttttataatttaataaaaaggaatacattgcaatccgtaaaa

SEQ ID NO: 250055 - DNA, 729 bp, Homo Sapiens
gagaaaaatacaccattaccacagcaacaaattagtttatgctagacaacttgtaaagaataaattaacttccaaatgcctatagacatggatattagtgacacaagagattttagacttttggagggttcttaaaaaattgtgctttaaaggaagagactctacattggatgcagccagtttttaaaaatgtgtctgaagcatttggtgatggtttctgcctgttcagtaaagaagcaccggctcagaacctcaacttctggacttactcaagtttgcagaactcctccaaagcagtcgagtgctctgttctctctgcttggatgttcttgttgtgaatgaacctttatgtcttgtagagcataaggaaacccagcccagagccacgagctcagatgaggagggctgctagcagcgatcaacttagggacaatagcccgcccccagcattcaagccagagccgcccaaggtacgtggctgggaagcccaggatgggaaggaagaggaagcagatgcctctgaagcctcctggacggccagggaggagcatgcacactgagatggtgtttaattacggttctgactcactgtgttctctattagagcctatcttttggcctgttgggtgaactcccaaattagggaagggcaaaaaggaaggaaaggcaatattaggagagcatatgattttaggactggtagtggttatttaatttactcttcttggt

SEQ ID NO: 250056 - DNA, 475 bp, Homo Sapiens
  misc_feature (433)..(433): n is a, c, g, or t
tttacaagaagagtaaattaaataaacactaacagtcctaaaatcatatgctctcctaatattgcctttccttcctttttgcccttccctaatttgggagttcacccaacaggccaaaagataggctctaatagagaacacagtgagtcagaaccgtaattaaacaccatctcagtgtgcatgctcctccctgggccgtccaggaaggcttcagagggcatctgcttcctcttccttcccatcctggggcttcccagccacgtaccttggggcgggctctgggcttgaaatgctggggggcggggctattgtccctaaggttgatcgctgctagcagcccctcctcatctgaggctcgtgggctctggggctggggtttccttatggcttctaacaaggacataaagggtttcatttcacaacaaggaacatnccaaggcaggaggggaacaggggcacttcgactgttttggtt

SEQ ID NO: 250057 - DNA, 2358 bp, Homo Sapiens
  misc_feature (1755)..(1763): n is a, c, g, or t
  misc_feature (1996)..(2020): n is a, c, g, or t
ggggcgcccgggttcggctacaaaagacgacggctgcggcgcgccgggcggaactttccagaacgctcggtgagaggcggaggagcggtaactaccccggctgcgcacagctcggcgctccttcccgctccctcacacaccggcctcagcccgcaccggcagtagaagatggtgaaagaaacaacttactacgatgttttgggggtcaaacccaatgctactcaggaagaattgaaaaaggcttataggaaactggccttgaagtaccatcctgataagaacccaaatgaaggagagaagtttaaacagatttctcaagcttacgaagttctctctgatgcaaagaaaagggaattatatgacaaaggaggagaacaggcaattaaagagggtggagcaggtggcggttttggctcccccatggacatctttgatatgttttttggaggaggaggaaggatgcagagagaaaggagaggtaaaaatgttgtacatcagctctcagtaaccctagaagacttatataatggtgcaacaagaaaactggctctgcaaaagaatgtgatttgtgacaaatgtgaaggtagaggaggtaagaaaggagcagtagagtgctgtcccaattgccgaggtactggaatgcaaataagaattcatcagataggacctggaatggttcagcaaattcagtctgtgtgcatggagtgccagggccatggggagcggatcagtcctaaagatagatgtaaaagctgcaacggaaggaagatagttcgagagaagaaaattttagaagttcatattgacaaaggcatgaaagatggccagaagataacattccatggtgaaggagaccaagaaccaggactggagccaggcgatattatcattgtgttagatcagaaggaccatgctgtttttactcgacgaggagaagaccttttcatgtgtatggacatacagctcgttgaagcactgtgtggcttccagaagccaatatctactcttgacaaccgaaccatcgtcatcacctctcatccaggtcagattgtcaagcatggagatatcaagtgtgtactaaatgaaggcatgccaatttatcgtagaccatatgaaaagggtcgcctaatcatcgaatttaaggtaaactttcctgagaatggctttctctctcctgataaactgtctttgctggaaaaactcctacccgagaggaaggaagtggaagagactgatgagatggaccaagtagaactggtggactttgatccaaatcaggaaagacggcgccactacaatggagaagcatatgaggatgatgaacatcatcccagaggtggtgttcagtgtcagacctcttaatgggccagtgaataacactcactgctggcatttaatgtgcagtagtgaatgagtgaaggactgtaatcataatatgctcactacttgctcttgtttttgttttaataaactatagtagtgttttaaaaagttaaatgaagaataaacgcaaatataaaagctctgattttgccctgtatgtatgatgacttcagtgtgcaagatgaagtttaatacctgtaaaaactacaaagaagttcccctagcatttctaggccaaaccttgtaattgacttcagctatgtacgtggacaagcttagactgaaatgctaggtatatgtattggcttcagtgtatgacccttcattgttaagctatgaaagtaaaactctgtatttaactggcaatgaggnnnnnnnnnttttgtagagaagtgttggtctgtatagttctttatattaagtgggattcattgtaatgcctctgcatttattctgttgcctcagctgttacttgaagatggcgtaatatataatttatcctgtggtatcagtgataaaaatgatacctttctgtaggaggggtttatcataatatgctgcttcttgaaggcttgcacttccagaattgtgtttccttctgctgtgccattcnnnnnnnnnnnnnnnnnnnnnnnnnatcttgaccagtcctggtcatttgctcccctccttgtctgtggaccatgataagcccaagtagtgacttcagagctgggtaacagaaattaaagtgaaaagacctttacgtggagaatttgcatgcgtaatataggaaggtgttctttaggtatgttacaggattactttaaaccatttgactttcgctccaaagttatgttggtagtatagcaaattatgatgaatagctttaattgtatgtttaaaagtctcatatgttcacatgcttaaatctgggtatcagaatttaagcaattcttgaaatgtattgtctccttaatatactaattacaaagc

SEQ ID NO: 250058 - DNA, 1957 bp, Homo Sapiens
gcaaaaatcacaagcatctgtggaaaaaactaaggtaacagacactacacggaggtcatgttcttacaaaaacccaatgttctcaacttgaaaagggaacactttgtttcacaaacaagctggtcggttggaattctttttggaacagtagtcccgcgctaaacactggttcttgcctccccacccccattctctaaaataaacccagcaaactgggaggtgcatttgtgccgctgcaggcttctactgctcactccatgcagcacacttagaccaaggagaaacggctgctttccagctcaaagtcgactcattagaagaaaaggtgggagactgggggtgacacatcgctgatttgtccggggttgttatctgctgctggcctttgcctcaaaggccaggggcaagaggccttcccaggcactgtgttctggggccctggcctcaatgctgtgctcagcgggtttgccacgcggccccaggaagtgcagggcagtggcgctttgatcatacacagcaaacaggaatgggcggttcagggtcacctccaagacctcaggcttgttaagctgttgggtagactctgtgggctctctctcatccgcttcaagctcaaaaaaaatgctgttcagcacctcccccaccctgatgcggtcattgctcaatttttgcaggttcagctcggtgtgcagaatggcgggcagctcagcctgggcgagcaggtcctgcaggtcataagatccttgcagcaccagttggggcatggtcaggtggatggtccggggagacagtttcttcatccagttgagggagttttgctggaaagtgagaccctccaccttgtccaggtcagaggcatagtgaggctggatcagcagcaggcaggcgctctcagtgaagggcacttgagtcaccgagaagttgtcctggatgtcactccagtgctggaaggtgcccatgccagagagcatgggaacagacactgaggtgctgttgtccacccagaactcctggggctcggccagcagggagaagcccttcatcttcccttggaagtggacgtaggtgttgaaagccagggtgctgtccacactggctcccgtcagggagcagccagtcttccatcctgtcacagcctgcatgaacctgtcaatcttctcagcagcaacatccagttctgtgaagtccagagagcgtgggaggaccacaggggtatagagagccaggccctgcacaaacggctgcttcaggtgcaggcctggggctgtgaacacgcccaccaccgtggacagcagcagctgggcctggctatcagccctgccctgggccactagcaggccctgtacagcctgcagggcagacaggaccttgtgcgcatccagccgggaggtgcagttcttgtccttccaaggaacacccaggattgcctgtagcctgtcagctgtgtggtccaaggctcccagatagagagaggccagggtgccaaagacagccgttggggagaggacggtggccccatggaccacgccccatagctcactgtgcatgccatatatacggaagcccaagaagttggccagcatcccgaccattgcggccctcaacttgtcttcggtgtcaagttttgcagcgactagcaccagctggtcctgtagggccttttcatccacaggggatgtcttggcctgaattggagcaggtatgaaggtggggtctttgggcttcccggcattggcctttgccagctgctcacaggtactctcattgtggatgacgaggtggaaggggtgtatgtacacccggtcacctgcagccaggccagcccaggccaggaggcagaggatggtggccctcaggctcacaccggcaggagccatctcagactggggtgctcgcttccgcatacccttctgctgtagtacccagaacaaccctcgtgccgaattcgccacccagc

SEQ ID NO: 250059 - DNA, 1395 bp, Homo Sapiens
caagcagggcagagccctgcaggcactgtgtctgggccctgcctcatctgtctcagcgggtggccagcggcccagaagtgcaggcagtgcgcatcatacacacaaacaggaatggcgggtcagggtcacctccaagacctcaggcttgttaagctgttgggtagactctgtgggctctctctcatccgcttcaagctcatgcaggttcagctcggtgtgcagaatggcgggcagctcagcctgggcgagcaggtcctgcaggtcataagatccttgcagcaccagttggggcatggtcaggtggatggtccggggagacagtttcttcatccagttgagggaggctggaaagtgagaccctccaccttgtccaggtcagaggcatagtgaggctggatcagcagcaggcaggcgctctcagtgaagggcacttgagtcaccgagaagttgtcctggatgtcactccagtgctggaaggtgcccatgccagagagcatgggaacagacactgaggtgctgttgtccacccagaactcctggggctcggccagcagggagaagcccttcatcttcccttggaagtggacgtaggtgttgaaagccagggtgctgtccacactggctcccgtcagggagcagccagtcttccatcctgtcacagcctgcatgaacctgtcaatcttctcagcagcaacatccagttctgtgaagtccagagagcgtgggaggaccacaggggtatagagagccaggccctgcacaaacggctgcttcaggtgcaggcctggggctgtgaacacgcccaccaccgtggacagcagcagctgggcctggctatcagccctgccctgggccactagcaggccctgtacagcctgcagggcagacaggaccgtgcgcatccagccgggaggtgcagttcttgtccttccaaggaacacccaggattgcctgtagcctgtcagctgtgtggtccaaggctcccagatagagagaggccagggtgccaaagacagccgttggggagaggacggtggccccatggaccacgccccatagctcactgtgcatgccatatatacggaagcccaagaaggcagcgactagcaccagctggtcctgtagggcccatccacaggggatgtcttggcctgaattggagcaggtatgaaggtggggtcgggcttcccggcattggcctttgccagctgctcacaggtactctcattgtggatgacgaggtggaaggggtgtatgtacacccggtcacctgcagccaggccagcccaggccaggaggcagaggatggtggccctcaggctcacaccggcaggagccatctcagactggggtgctcgcttccgcatacccttctgctgtagtacccagaacaac

SEQ ID NO: 250060 - DNA, 1686 bp, Homo Sapiens
  misc_feature (7)..(7): n is a, c, g, or t
aaatcanagttcatcagctttacagatgaaaactggcctcctgacggagccatttgacagcaccttgcttcaacactactccactccaaggaagatgaaggcttctccctgctgccgagccccaggagttctgggtgacaacagcacctcagtgtctgttcccatgctctctggcatgggcaccttccagcactggagtgacatccaggacaacttctcggtgactcaagtgcccttcactgagagcgcctgcctgctgctgatccagcctcactatgcctctgacctggacaaggtggagggtctcactttccagcaaaactccctcaactggatgaagaaactgtctccccggaccatccacctgaccatgccccaactggtgctgcaaggatcttatgacctgcaggacctgctcgcccaggctgagctgcccgccattctgcacaccgagctgaacctgcaaaaattgagcaatgaccgcatcagggtgggggaggtgctgaacagcattttttttgagcttgaagcggatgagagagagcccacagagtctacccaacagcttaacaagcctgaggtcttggaggtgaccctgaaccgcccattcctgtttgctgtgtatgatcaaagcgccactgccctgcacttcctgggccgcgtggccaacccgctgagcacagcatgaggccagggccccagaacacagtgcctggcaaggcctctgcccctggcctttgaggcaaaggccagcagcagataacaaccccggacaaatcagcgatgtgtcacccccagtctcccaccttttcttctaatgagtcgactttgagctggaaagcagccgtttctccttggtctaagtgtgctgcatggagtgagcagtagaagcctgcagcggcacaaatgcacctcccagtttgctgggtttattttagagaatgggggtggggaggcaagaaccagtgtttagcgcgggactactgttccaaaaagaattccaaccgaccagcttgtttgtgaaacaaaaaagtgttcccttttcaagttgagaacaaaaattgggttttaaaattaaagtatacatttttgcattgccttcggtttgtatttagtgtcttgaatgtaagaacatgacctccgtgtagtgtctgtaataccttagttttttccacagatgcttgtgatttttgaacaatacgtgaaagatgcaagcacctgaatttctgtttgaatgcggaaccatagctggttatttctcccttgtgttagtaataaacgtcttgccacaataagcctccaaaaattttatctttcatttagcagccaaacagatgtattacaattccagcagatagactgtgcaaacgaaagtgctttccccggactttggatggaatttccatgggaggtctgagccagtacttagcagtcctttgaaattttaggtgatgcttttctctggacacttccattggtaagcagtggtggccatctgtgtgatggacagggggcgggaagagggtgacagggaaggccccataccccatgtggcacctgggaaaggaaccaggcagatgggacttcttccgtcctggtgacacagggccagactgctgctggtattgtgccccgggagtggaaggtagagaaataaatcttcacaaataaatatttgcaattttc

SEQ ID NO: 250061 - DNA, 988 bp, Homo Sapiens
  misc_feature (95)..(95): n is a, c, g, or t
  misc_feature (531)..(531): n is a, c, g, or t
gagcgaggcctgggtggcgaattcggcacgaggcaggctgtgacaggatggaagactggctgctccctgacgggagccagtgtggacagcacccntggctttcaacacctacgtccacttccaagggaagatgaagggcttctccctgctggccgagccccaggagttctgggtggacaacagcacctcagtgtctgttcccatgctctctggcatgggcaccttccagcactggagtgacatccaggacaacttctcggtgactcaagtgcccttcactgagagcgcctgcctgctgctgatccagcctcactatgcctctgacctggacaaggtggagggtctcactttccagcaaaactccctcaactggatgaagaaactgtctccccggaccatccacctgaccatgccccaactggtgctgcaaggatcttatgacctgcaggacctgctcgcccaggctgagctgcccgccattctgcacaccgagctgaacctgcaaaaattgagcaatgaccgcatcagggntggggggaggtgctgaacagcattttttttgagcttgaagcggatgagagagagcccacagagtctacccaacagcttaacaagcctgaggtcttggaggggaccctgaaccgcccattcctggttgctgggtatgatcaaagcgccactgcccctgcaacttcctgggccgcgtggccaacccgctgagcacagcatgaggccagggccccagaacacagtgcctggcaaggcctctgcccctggcctttgaggcaaaggccagcagcagataacaaccccggacaaatcagcgatgggtcacccccagtctcccaccttttcttctaatgagtcgactttgagctgggaaagcaccgttttctccttgggtctaaatgtgcttccatggaagtgaacattaaaaagccttgcaccggcacaaatgcacttcccaagttttgctggggttttattt

SEQ ID NO: 250062 - DNA, 1176 bp, Homo Sapiens
  misc_feature (464)..(464): n is a, c, g, or t
gttgttctttcgcgcagccgggggtggttgtttcgggcgcccgtcctctggttaccgccccgctcctgtttggttcggctgtgagcggccttgggctggtctctcgttattgcatcgctctgcgtcggtggcgggtggcgcggcgtgggtccggccctgtcgcgtcgtgggctcacgctctggtggttgctggtaactctgggggcgggtggctggctgtcggtcgtgctcggggtgctcggcggtggcgcgcttgtttgtggtgggtcgtgtcgatggtcttgcgtgtgacgtgttgtcgtggggtgttcctccccccgtcgtagtacccgcgggggctaacaaaaagtttgaagagcagagtcaccccctttaacgggtatcaattaacacctccggattttaaggtggacacttatagaaacctcgaaggatccaacaagtttgtacaaaaagcaggggcnggtaaaacgacggccaggaaactattaacggtcctaacggtagtcgaggccctgggtcgcgaattcggcacgaggggagaagtgggagctggacctggacatcaaggaggtcttcgtccaccccaactacagcaagagcaccaccgacaatgacatcgcactgctgcacctggcccagcccgccaccctctcgcagaccatagtgcccatctgcctcccggacagcggccttgcagagcgcgagctcaatcaggccggccaggagaccctcgtgacgggctggggctaccacagcagccgagagaaggaggccaagagaaaccgcaccttcgtcctcaacttcatcaagattcccgtggtcccgcacaatgagtgcagcgaggtcatgagcaacatggtgtctgagaacatgctgtgtgcgggcatcctcggggaccggcaggatgcctgcgagggcgacagtggggggcccatggtcgcctccttccacggcacctggttcctggtgggcctggtgagctggggtgagggctgtgggctccttcacaactacggcgtttacaccaaagtcagccgctacctcgactggatccatgggcacatcagagacaaggaagccccccagaagagctgggcaccttagcgaccctccctgcagggctgggcttttgcatggcaatggatgggacattaaagcggacatgtaacaagc

SEQ ID NO: 250063 - DNA, 956 bp, Homo Sapiens
ggggccggcctgcggaacgaaagtgaacaggagccgctcttaggcgacacacctggaagcagagaatgggacattttagagactgaagagcattataagagccgatggagatctattaggattttatatcttactacgtttctcagcagtgtagggttttctgtagtgatgatgtccatatggccatatctccaaaagattgatccgacagctgatacaagttttttgggctgggttattgcttcatatagtcttggccaaatggtagcttcacctatatttggtttatggtctaattatagaccaagaaaagagcctcttattgtctccatcttgatttccgtggcagccaactgcctctatgcatatctccacatcccagcttctcataataaatactacatgctggttgctcgtggattgttgggaattggagcaggaaatgtagcagttgttagatcactatactgctggtgctacttcccttcaggaaagaacaagttccatggcaaacataagcatgtgtcaagcattaggttttattctaggtccagtttttcagacttgttttacattccttggagaaaaaggtgtgacatgggaatgtgattaaactgcagataaacatgtatacaacaccagttttacttagcgccttcccggggaattttaaatattattctgatccttgccatactaagagaacatcgtgctggatgactcaggaaagacagtggtaaaaggtattaattttgaaagaaccaagtacagatggaagctcaggttccccaaggaaatattgaccaggttgctgttgtggccatcaatgttctgttttttgtgactctatttatctttgccctttttgaaaccatcattactccattaacaatggatatgtatgcctggactcaagaacaagctgtgttatataatggcataatacttgctgctct

SEQ ID NO: 250064 - DNA, 704 bp, Homo Sapiens
  misc_feature (531)..(539): n is a, c, g, or t
  misc_feature (541)..(546): n is a, c, g, or t
  misc_feature (549)..(551): n is a, c, g, or t
  misc_feature (553)..(555): n is a, c, g, or t
  misc_feature (563)..(563): n is a, c, g, or t
ggggtgggatactgcgagtatggcggcgtcaaaggtgaagcaggacatgcctccgccggggggctatgggcccatcgactacaaacggaacttgccgcgtcgaggactgtcgggctacagcatgctggccatagggattggaaccctgatctacgggcactggagcataatgaagtggaaccgtgagcgcaggcgcctacaaatcgaggacttcgaggctcgcatcgcgctgttgccactgttacaggcagaaaccgaccggaggaccttgcagatgcttcgggagaacctggaggaggaggccatcatcatgaaggacgtgcccgactggaaggtgggggagtctgtgttccacacaacccgctgggtgccccccttgatcggggagctgtacgggctgcgcaccacagaggaggctctccatgccagccacggcttcatgtggtacacgtaggccctgtgccctccggccacctggatccctgcccctccccactgggacggaataaatgctctgcagaccttgaaacnnnnnnnnnannnnnnaannnannncttgtcgnccggcctcggccccccaaaaacttttctaaaacatttcctttgggggcccggggcccccgtagggaaagggaaacttggccataagctgtttcccaagggaaaacccgggccatggactaaggggcttggaattccccccc

SEQ ID NO: 250065 - DNA, 692 bp, Homo Sapiens
agggaatggagctcccaggatgcccacttgagctggttctccacagcatcaagctcagaacttggtaatccctgagcttcttcttgagataccatgtcttctactagtacttcccgttttcgtcgacggagagaaaccggttgtccagggtcatcaagttcactctccaaatcctccagcactgtcactgcctcctctccattctctggatgatgatctcgaacccaaagtctgtagctctttgggtaggatggcaacaaactgctccagcactaccagctccaagatttgttcttttgtgtgcgtctctggcctgagccacagacggcaaagttctcggagctggctcacagcctcacggggcccaggtgaatcctggtatccaaactgcctgaatcgctgtcggaaaatctctgggtctgggagatggttccaggggatacttgatccctcttcgccatcaggatcctcctccaacttcactctcagaattttttcctcttcatctggagttgggatgataagtattgaatcttcttccactgactgtgcagacattctgatttataatatttcaagaaaagacaactgaggcagaatataagcctcagggcaataccccgttttcttcacaggcactcctccggctcaggaaccgcagcagcttcgctgtccacggcagacgcagaccc

SEQ ID NO: 250066 - DNA, 512 bp, Homo Sapiens
ggtcgtccctctctcctgagacacgacgaggtgaggacttactttcatgagtttggtcacgtgatgcatcagatttgtgcacagactgattttgcacgatttagcggaacaaatgtggaaactgactttgtagaggtgccatcgcaaatgcttgaaaattgggtgtgggacgtcgattccctccgaagattgtcaaaacattataaagatggaagccctattgcagacgatctgcttgaaaaacttgttgcttctaggctggtcaacacaggtcttctgaccctgcgccagattgttttgagcaaagttgatcagtctcttcataccaacacatcgctggatgctgcaagtgaatatgccaaatactgctcagaaatattaggagttgcagctactccaggcacaaatatgccagctacctttggacatttggcagggggatacgatggccaatattatggatatctttggagtgaagtattttccatggatatgttttacagctgttttaa

SEQ ID NO: 250067 - DNA, 365 bp, Homo Sapiens
cagatatctgcccttggtacactggattaccatatattccgtatttggataacttgccaaacttcaacagatcaattgatggaccaataagactgccaattgtggataagtacaaagatatgggcactgtggtcctgggaaagctggaatccgggtccatttttaaaggccagcagctcgtgatgatgccaaacaagcacaatgtagaagttcttggaatactttctgatgatactgaaactgattttgtagccccaggtgaaaacctctgtgatcctagtaacctctgccattctggacgcacgtttgatgttcagatagtgattattgagcacaaatccatcatctgcccaggttataatgcg

SEQ ID NO: 250068 - DNA, 2014 bp, Homo Sapiens
  misc_feature (1801)..(1820): n is a, c, g, or t
ggggccgccgccgcctctgtcgtcgtcgcgagtgtggagtcgggactggagctgctgccgcggcgacgccggggatctttgtcgctagctcccggcccttctgccccgccgccttccctcagtcagcgttgcccatgaaatgatggaggaggaagaggaaatcccaaaacctaagtctgtggttgcaccgccaggtgctcctaagaaagagcatgtaaatgtagtattcattgggcacgtagatgctggcaagtcaaccattggaggacaaataatgtatttgactggaatggttgacaaaaggacgcttgaaaagtatgaaagagaagctaaagagaaaaacagagaaacctggtacttgtcttgggccttagacacaaatcaggaagaacgagacaagggtaaaacagtagaagtgggtcgtgcctattttgaaaccgaaaagaagcatttcacaattctagatgcccctggccacaagagttttgtcccaaatatgattggtggtgcctctcaagctgatttggctgtgctggtaatctcagccaggaaaggagagtttgaaactggatttgaaaaaggaggacagacaagagaacatgcaatgttggcaaagacagcaggtgtaaaacacctaattgtgctaattaataagatggatgatccaacagtaaattggagcaatgagagatatgaagaatgtaaggagaaactagtgccatttttgaaaaaagttggcttcaatcccaaaaaggacattcactttatgccctgctcaggacttactggagcaaatctcaaagagcagtcggatttctgtccttggtacattggattaccgtttattccatatctggataatttgccgaacttcaatagatcagttgatggaccaatcaggctgccaattgtggataagtacaaggatatgggcactgtggtcctgggaaagctggaatcaggatctatttgtaaaggccagcagcttgtgatgatgccaaacaagcacaacgtggaagttcttggaatactttccgatgatgtagagactgataccgtagccccaggtgaaaacctcaaaatcagactgaaaggaattgaagaagaggagattcttccagggtttatactttgtgatcctaataatctttgtcattctggacgcacatttgatgcccagatagtgattatagagcacaaatccatcatctgcccaggctataatgcggtgctgcatattcatacctgtattgaggaggtggaaataacagccttaatctgcttggtagacaaaaaatcaggagaaaaaagtaagacccgaccccgttttgtgaaacaagatcaagtatgcattgctcgcttaaggacagcaggaaccatctgccttgagacctttaaagacttccctcagatgggtcgtttcaccttaagagatgagggtaagaccattgcaattggaaaagttctgaaactggttccagagaaagactaagcattttcttgatgaccctgcacaatactgtgaggaaaattgactgcagaagcctacttcacaccgccttctcttattttctgcccattgataaacctctccccatattttgcaaagaggaaattcacagcaaaagtccacattatgtcagctttctcatattgagagctctgctatgccactgttgaatttttcccaagattcctgtccctagccctcacttcaaactctgcttccttggacagatttggcaatagctttgtaagtgatgtggacataattgcctacaataatgaaaacctacaggannnnnnnnnnnnnnnnnnnnccccttaggcatatttagtatttttcccccaggcagatcattctgagtgtgcgagtgtgtgtgcacatgttacaaaggcaactaccatgttaataaaatatttcatttgaaatccttttcggtatttgaattgcttttgaataatgtttttttatctgggatgtaacattggttgcatttagcttttttaactt

SEQ ID NO: 250069 - DNA, 539 bp, Homo Sapiens
  misc_feature (14)..(14): n is a, c, g, or t
agtgatatatctancctatcaggcagaatgacttagagaaatttctcaaacctgagttaggaaaaaatacatagtggactcctaagtcccttaacatctgctcataaattaagtcaaccattacattgagggattaaaccagggaccagaatatcaaatgtctacacatgtcagccaaagaagagatgcagagggttgggtggggctggaagcagataggaggggtctccagggactataggagtacaatcaacttgagtaatcacctgcttttttccccaaaccctgtgtggaatgcagccagctagctggtttaaaccagttcatgacagacctcagcaatttacagatggatcccagtgtactttcctcattaccatgctagtatcttcaccctgggagatgctatagcttcattaccataacatgtgacctgtgtgctgaaataacgactcactgcatctgcacaactgcaacccctttccatgcaacgacataccctcttccctctctatcaccccataaaacccccctgtcac

SEQ ID NO: 250070 - DNA, 655 bp, Homo Sapiens
  misc_feature (272)..(272): n is a, c, g, or t
  misc_feature (319)..(328): n is a, c, g, or t
gaggctgctgccatttttccacttaaccaaaccagcctgaaggtgaacctcgaaacttgtttcataaatctttcaaaagttgttttacatcaatgttaaaatttcaaaatgttgcagggtaatttaatgtataaaatattagtaagaaaaagtatgtattgcatacttagtagaatagatcacaacatacaaattcaattcagtgcatgctttaggtgttaagccatgagattgtacatgtttactgttaggtccttgcatctgtggtgccnaggtgagtatgagaagatgtcaaggactggacgtattttgttgcctnnnnnnnnnnggctgtttgtaggcgttttaaatatgcttattttgtgtgtctctcactacctattacacactgttgctttgtgggtttgttttgtatgtgcgtgtgttatacagtagttaaatttccatgcagaaaaataaatgtcctgaattctcatattagtattctttattgtatatcatgcatgtaatttatttagaaatgtaggtcttactaaatgtatatgcatgtatttcagattatactaggatttcttggattagaagcagattgtgttaactgtaacttaaagaatgaatgttaaataaaatgatacagatttattttcttcattac

SEQ ID NO: 250071 - DNA, 397 bp, Homo Sapiens
aagtgtaaatatgagctatttatatagttaatttcaaagtgctatgcttttaatgaacatatgtttaacattatagatttatatatttagtttaaaatatttatattactaaccaataaattttctcactataaaagagactgactggcaattatacctggccaagtaatttaaatagcatacttgcaagaactgtagtgaaagagttaaatacttcattattgcttcattgaactgagaagcccaaaaggcatagatcaaaaatgctcagtgatgaaaaatgaatacccagaacagcggtgcacgcccccaaaatgacctctgtgcaataaaaactaagcattctccacgttatcaatgccgttggcatccacatggatatcagactccccacaca

SEQ ID NO: 250072 - DNA, 1275 bp, Homo Sapiens
  misc_feature (67)..(93): n is a, c, g, or t
  misc_feature (117)..(130): n is a, c, g, or t
  misc_feature (143)..(144): n is a, c, g, or t
  misc_feature (151)..(268): n is a, c, g, or t
  misc_feature (987)..(1231): n is a, c, g, or t
gttgtgggagatcccaacccttagtcgagggcccgggttttccttggaacacagtaagacccaggtnnnnnnnnnnnnnnnnnnnnnnnnnnnaaaaaatgttttaaaaagtttttnnnnnnnnnnnnnngcccccaggaatnntttatgnnnnnnnnnnnnnnnnnnnnnnnnnnnnnnnnnnnnnnnnnnnnnnnnnnnnnnnnnnnnnnnnnnnnnnnnnnnnnnnnnnnnnnnnnnnnnnnnnnnnnnnnnnnnnnnnnnnnnntgctctttcagccatttctttttatttacagtttgtgttcaatgcaaatcaattccataagaagttactatgaatcaaagcgtaaatacacaaacacaatatacaatccaaaatagatgtacagcattctggaataaagcaagagtgttcattcacacacacagtagcttcaaaactgttcgatctgtttgttcccatgtagttttctaaagatggaaaaaaaggactttggtcatcaagactactgtggccatattagattactggaacatctaagcatcagtgtgtgaccatgcgaacaaaagacttcggggagtgtctatttttaaaaaggtttatgtgtgtcgaggcagttgtaaaagatttactgcagaatcaagcccacttttaggcttaggaccaggttctaactatctaaaaatattgactgataacaaaaagtgttctaaatgtggctattctgatccatagttgttttttaaagaaaaaaaatgtatatacagaaagagtataaaagtttgtgaatttaatgcaaattagcttccagtcttcacttcccaaatacttgatttatagttttgactcctttacatttttgccttcttaatttcaagatttgcaattttgccttcaaaacagatcatttttttaaattgtaaaaagtattcaacatatgcagaaataaaaagcattttgatggctgggcgcgggggctcaannnnnnnnnnnnnnnnnnnnnnnnnnnnnnnnnnnnnnnnnnnnnnnnnnnnnnnnnnnnnnnnnnnnnnnnnnnnnnnnnnnnnnnnnnnnnnnnnnnnnnnnnnnnnnnnnnnnnnnnnnnnnnnnnnnnnnnnnnnnnnnnnnnnnnnnnnnnnnnnnnnnnnnnnnnnnnnnnnnnnnnnnnnnnnnnnnnnnnnnnnnnnnnnnnnnnnnnnnnnnnnnnnnnnnnnnnnnnnnnnnnnnaagtgagactgtctaaaaaataataataataaaaagcattttga

SEQ ID NO: 250073 - DNA, 2712 bp, Homo Sapiens
  misc_feature (2402)..(2482): n is a, c, g, or t
ctggccttcgcgcatctcccaggttagctgcgtgtccgggtgctaggctgcagacccgccgccatgacgctgcgcgcggccgtcttcgaccttgacggggtgctggcgctgccagcgatgttcggcgtcctcggccgcacggaggaggccctggcgctgcccagaggacttctgaatgatgctttccagaaagggggaccagagggtgccactacccggcttatgaaaggagagatcacactttcccagtggataccactcatggaagaaaactgcaggaagtgctccgagaccgctaaagtctgcctccccaagaatttctccataaaagaaatctttgacaaggcgatttcagccagaaagatcaaccgccccatgctccaggcagctctcatgctcaggaagaaaggattcactactgccatcctcaccaacacctggctggacgaccgtgctgagagagatggcctggcccagctgatgtgtgagctgaagatgcactttgacttcctgatagagtcgtgtcaggtgggaatggtcaaacctgaacctcagatctacaagtttctgctggacaccctgaaggccagccccagtgaggtcgtttttttggatgacatcggggctaatctgaagccagcccgtgacttgggaatggtcaccatcctggtccaggacactgacacggccctgaaagaactggagaaagtgacgggaatccagcttctcaataccccggcccctctgccgacctcttgcaatccaagtgacatgagccatgggtacgtgacagtaaagcccagggtccgtctgcattttgtggagctgggctccggccctgctgtgtgcctctgccatggatttcccgagagttggtattcttggaggtaccagatccctgctctggcccaggcaggttaccgggtcctagctatggacatgaaaggctatggagagtcatctgctcctcccgaaatagaagaatattgcatggaagtgttatgtaaggagatggtaaccttcctggataaactgggcctctctcaagcagtgttcattggccatgactggggtggcatgctggtgtggtacatggctctcttctaccccgagagagtgagggcggtggccagtttgaatactcccttcataccagcaaatcccaacatgtcccctttggagagtatcaaagccaacccagtatttgattaccagctctacttccaagaaccaggagtggctgaggctgaactggaacagaacctgagtcggactttcaaaagcctcttcagagcaagcgatgagagtgttttatccatgcataaagtctgtgaagcaggaggactttttgtaaatagcccagaagagcccagcctcagcaggatggtcactgaggaggaaatccagttctatgtgcagcagttcaagaagtctggtttcagaggtcctctaaactggtaccgaaacatggaaaggaactggaagtgggcttgcaaaagcttgggacggaagatcctgattccggccctgatggtcacggcggagaaggacttcgtgctcgttcctcagatgtcccagcacatggaggactggattccccacctgaaaaggggacacattgaggactgtgggcactggacacagatggacaagcccaccgaggtgaatcagatcctcattaagtggctggattctgatgcccggaacccaccggtggtctcaaagatgtagaacgcagcgtgtgcccacgctcagcaggtgtgccgtccttccacctgctggggcaccattcttagtatacagaggtggccttacacacatctcgcatggatggcagcattgttctgaaggggtttgcagaaaaaaaagattttctttacataaagtgaatcaaatttgacattattttagatcccagagaaatcaggtgtgattagttctccaggcatgaatgcatcgtccctttatctgtaagaacccttagtgtcctgtagggggacagaatggggtggccaggtggtgatttctctttgaccaatgcatagtttggcagaaaaatcagccgttcatttagaagaatcttagcagagattgggatgccttactcaataaagctaagatgactatgctgctggctgtctttgttcttggagaggtggagtgactgttcacggagaatgcacggtatggggatgaaccctttccctctgcttttgagccctgttctgggctccaaggtgctgtatgatctaggccgtgctggccagggagacaatcctatggggatggcagtggtgtcttgtgctctgtcccctagagcagtcactggccacaggtagccacctgcctttctcccagctttccctagcagagttttgcttcaggcacaaatgtgcacctgnnnnnnnnnnnnnnnnnnnnnnnnnnnnnnnnnnnnnnnnnnnnnnnnnnnnnnnnnnnnnnnnnnnnnnnnnnnnnnnnnagcagctgccatgaggctcaggcagatccagctcatcttcccctctgccccctcctccctatcttcccctctaccctctcctgcctcctgtcacatccggttaggctcccatctcactgatgtgtctcctgcagtggtctctcccctgccctgcttccagccccagagtcctggagcagcagcctcctcacgggtcttgccgcccacatggttggatcctgaaactcgca

SEQ ID NO: 250074 - DNA, 846 bp, Homo Sapiens
aaggacgcgaggcctgggtggcgaattcggcacgagggtccccacctggttggaaggctgtgggtccgggaacccgagcccaaggagtgggggcggccccggagcgaggctcacactccctgccctgcagatgactgtccacaacctgtacctgtttgaccggaatggagtgtgtctgcactacagcgaatggcaccgcaagaagcaagcagggattcccaaggaggaggagtataagctgatgtacgggatgctcttctctatccgctcgtttgtcagcaagatgtccccgctagacatgaaggatggcttcctggccttccaaactagccgttacaaactccattactacgagacgcccactgggatcaaagttgtcatgaatactgacttgggcgtgggacccatccgagatgtgctgcaccacatctacagtgcgctgtatgtggagctggtggtgaagaatcccctgtgcccgctgggccaaactgtgcaaagtgagctctttcgctcccgactggactcctatgttcgctctctgcccttcttctccgcccgggctggctgaagcaacctacctcaagtctcaggagaattcatgtctgcctggggcccttccgaacctgtgccaactaaggggccccaactgtaaggccccggaaccccaacccctgcccagagcaacagccctaagggcctgcccctaatgcttttcctcctaccaaaagtggagccccacgaaggtccctccaccttccaaaccaaggcccctctctcccagttttatccccctgggcttaatgcgtgcggagaaacccccaaattaaacttttttggcccctcccc

SEQ ID NO: 250075 - DNA, 759 bp, Homo Sapiens
  misc_feature (570)..(606): n is a, c, g, or t
acccgagcccaaggagtgggggcggccccggagcgaggctcacactccctgccctgcagattgactgtccacaacctgtacctgtttgaccggaatggagtgtgtctgcactacagcgaatggcaccgcaagaagcaagcagggattcccaaggaggaggagtataagctgatgtacgggatgctcttctctatccgctcgtttgtcagcaagatgtccccgctagacatgaaggatggcttcctggccttccaaactagccgttacaaactccattactacgagacgcccactgggatcaaagttgtcatgaatactgacttgggcgtgggacccatccgagatgtgctgcaccacatctacagtgcgctgtatgtggagctggtggtgaagaatcccctgtgcccgctgggccaaactgtgcaaagtgagctctttcgctcccgactggactcctatgttcgctctctgcccttcttctccgcccgggctggctgaagcaacctacctcaagtctcaggagaattcatgtctgcctggggcccttccgaacctgtgccaactaagggnnnnnnnnnnnnnnnnnnnnnnnnnnnnnnnnnnnnnagagcaaccacctaaaggcctgccctgatgctctcctcctaccagagtgaagcccacagagtccctccacctccacaccaggccctctctccagttttatcccctgcctaatgctgcgagaagcacagaataaactttttgtcactctcaaaa

SEQ ID NO: 250076 - DNA, 421 bp, Homo Sapiens
  misc_feature (17)..(17): n is a, c, g, or t
  misc_feature (102)..(102): n is a, c, g, or t
  misc_feature (109)..(109): n is a, c, g, or t
  misc_feature (119)..(119): n is a, c, g, or t
  misc_feature (139)..(139): n is a, c, g, or t
  misc_feature (234)..(271): n is a, c, g, or t
  misc_feature (277)..(277): n is a, c, g, or t
  misc_feature (283)..(283): n is a, c, g, or t
gatttcttcaccacatntacagtgcgcttgtaatgtggagctggtggtgaagaatcccccttgtccgctgggccaaactgtgccaaagtgagctctttcgcntcccgantggactcctnatgttcgctctctgcccttntttctccgcccgggctggctgaagcaaccttacctcaagtctcaggagaattcatgtctgcctggggcccttccgaacctgtgccaactaagggnnnnnnnnnnnnnnnnnnnnnnnnnnnnnnnnnnnnnnagagcnaacganctaaaggcctgccctgatgctctcctcctaccagagtgaagcccacagagtccctccacctccacaccaggccctctctccagttttatcccctgcctaatgctgcgagaagcacagaataaactttttgtcactctc

SEQ ID NO: 250077 - DNA, 1295 bp, Homo Sapiens
aattttctttatttttccatctaaaatggcaaagagaacatttacttttgatcacttaacaaggacacacccaggaaatttgattttctcaacattaggaggatgaggggagtacagatggaaaaacaaaagataaaacacaaaaggagtacataaaacattgtttagtacaaataatgaaaaatgacttcatgacattttccaataaaagttatttttacagattttgcaatgctgtaaaaaccaggtatattgaaaggggttatttataggttaaaaataaagccattgatgagtgataatcagttttaacagagttcacgcaattatcttagctggaaagctactgtcccaagtgacaaaatttatgtcctgacacaatgattacatattaaatcattttgtaaaagaaatgattctgtatgtgggactgacagctcttgagaaagtgctatacaaacaaggttatagaaatgttgaagtgattgataatcttaaaataccatacaaaaatgtgtaaacaaaaggatggtttagagttgcagggcattataaaatatgtaattttagttaagactaataataatatttttgtgcactttaaaaatggttagtgtaatcttgtaagttcaaagctgggttctcagtgagcagcaaaaggtgttagatgcatcaccacacttcacaggacctcctgaatgactgcagatgtgctgtgtaccttcttaaggggctttggctgaccttatgagagcaggagctcaccatgcttatgggtgactatatcaaaaagatctgcaataaggctcacctgggagatgctctagcattcaaattcctatactcctcttttatctacgctgtcagatgaaaactgcttactgcttttaaaagatataataaacaatataaattctgatagtaaagcactataaaaattaggtatgatatttttggcacaaagcactttttaaacccaagctcattttgcaaaatatatgtctagagtttatcatttgaaaataaaaacatatacacaatatgtaaatggttttataagtgaattaattagaatgtacattttcttaaatactgcacataccttcagcttactccagtaccagacatctgcatgcacaccccacattctacattacacagatattgcacaagtttcaatgccaaaatactaatgcagtctggcaagatttagggtttacctttcagtattattttgtgaaagtattcagattcaatactatttcgcagaaaagctacatgaccaatttcaggac

SEQ ID NO: 250078 - DNA, 482 bp, Homo Sapiens
  misc_feature (27)..(27): n is a, c, g, or t
  misc_feature (55)..(55): n is a, c, g, or t
  misc_feature (70)..(70): n is a, c, g, or t
aaaagggtaagtgtaaccctggtaagntccaaaagctggggtccctcagtgagcnagcaaaaaggtggtnaggatgccatcaccccacacctccacaggaccccccctgaatggacctggcagatggtgcctgtggtacccctcccttaagggggctttgggctgacccttatggaggagcagggaggctcacccatgccttatggggtgacctatatcaaaaagatctgcaataaggctcaccctgggagatgctctagcattcaaattccctatactcctcttttatcctacgctgtcagatgaaaactgcttactgcttttaaaagatataataaacaatataaattctgatagtaaagcactataaaaattaggtatgatatttttggcacaaagcactttttaaacccaagctcattttgcaaaatatatgtctagagtttatcatttgaaaataaaaacatatacacaatatgtaa

SEQ ID NO: 250079 - DNA, 756 bp, Homo Sapiens
  misc_feature (311)..(325): n is a, c, g, or t
  misc_feature (724)..(724): n is a, c, g, or t
  misc_feature (733)..(733): n is a, c, g, or t
tttcttgcactgaagttatgtattttaacagctttacatgtaatattcatatataaaaaactttaagtgcttttctccaatttaaaaatctaaagaattcaaaaataaggcattcaatatttgaaaaaagtacagatttacaaaatgtgtatattctgtcatgaaaactccacaccaacattatacacttggaaaaaaatacaaacaggatatattacaaatttatgcagcaataacttagttcacaccatgcaataaaaagtacattaatcaagatacacaagcttttgtaggttctaaactgaaggacnnnnnnnnnnnnnnnctgcagaatccttaaaacctgtggcacttaaaatttgttagcctttctaatgagaggtaaattatacacaacaatgatgaaaaagattaacagaccagttgtctattatgaatcattccagctttgttcaacaatggccgaaactcttttctcatattctcgtttgttttcctgataaagctgtgctgcctggctattggctggactgttaggattcggttcatccagcagagactgaattgatgttaagatagaagatacatcatatgttggactccatcgattctgaaggatatctaaacatatgctaccatcagcatacacatttggatgaaacattttggataaaaacctaacagttgggtgggtttatttgggatatttctttcaggaaaattnctatttacncagttttaaaagtaccctcttca

SEQ ID NO: 250080 - DNA, 603 bp, Homo Sapiens
ctgcaggaattccttaaaagcccggtggccgctttaaaatttgttagccctttctaatggggagggtaaatttatccccaacaatgatggaaaaagattaccagcccagttgtctattatgaatcattccagctttgttcaacaatggccgaaactcttttctcatattctcgtttgttttcctgataaagctgtgctgcctggctattggctggactgttaggattcggttcatccagcagagactgaattgatgttaagatagaagatacatcatatgttggactccatcgattctgaaggatatctaaacatatgctaccatcagcatacacatttggatgaaacattttggataaaaacctaacagttggtggtttatttggatattcttcagaaaattctattactagtttaaaagtaccatcttcaaaaggtgtcccttctggtccaaatataactgcattccactgcatgatgttgttttcagatggtgcgccactgaacaccacaggtgggtcctcttgtaaccgcttgaaatcccgcatgagcctctccgggccggggtcgaccatgtccgcagctgccccgcggtcagtctat

SEQ ID NO: 250081 - DNA, 475 bp, Homo Sapiens
  misc_feature (388)..(388): n is a, c, g, or t
  misc_feature (458)..(458): n is a, c, g, or t
tcagtactgaccgcggggcagctgcggacatgttcgaccccggcccggagaggctcatgcgggatttcaagcggttacaagaggacccacctgtgggtgttcagtggcgcaccatctgaaaacaacatcatgcagtggaatgcagttatatttggaccagaagggacaccttttgaagatggtacttttaaactagtaatagaattttctgaagaatatccaaataaaccaccaactgttaggtttttatccaaaatgtttcatccaaatgtgtatgctgatgggtaggcatatgtttaggatatccttcaggaatcgatgggagttccaacatatggatgtatcttctatcttaacatcaattcagtctctgcgggatggaaccgantcctaacagttccaggccataggcgggggaggcacagttttattcagggaaaacaaacgagatttggagnaaaggagtttcgggcct

SEQ ID NO: 250082 - DNA, 1824 bp, Homo Sapiens
  misc_feature (1275)..(1419): n is a, c, g, or t
  misc_feature (1428)..(1441): n is a, c, g, or t
  misc_feature (1482)..(1574): n is a, c, g, or t
  misc_feature (1597)..(1637): n is a, c, g, or t
  misc_feature (1661)..(1671): n is a, c, g, or t
  misc_feature (1712)..(1734): n is a, c, g, or t
aggtagcgaggcctgggtggcgaattcggcacgaggggaaagatggcgtcccgcaaggaaggtaccggctctactgccacctcttccagctccaccgccggcgcagcagggaaaggcaaaggcaaaggcggctcgggagattcagccgtgaagcaagtgcagatagatggccttgtggtattaaagataatcaaacattatcaagaagaaggacaaggaactgaagttgttcaaggagtgcttttgggtctggttgtagaagatcggcttgaaattaccaactgctttcctttccctcagcacacagaggatgatgctgactttgatgaagtccaatatcagatggaaatgatgcggagccttcgccatgtaaacattgatcatcttcacgtgggctggtatcagtccacatactatggctcattcgttacccgggcactcctggactctcagtttagttaccagcatgccattgaagaatctgtcgttctcatttatgatcccataaaaactgcccaaggatctctctcactaaaggcatacagactgactcctaaactgatggaagtttgtaaagaaaaggatttttcccctgaagcattgaaaaaagcaaatatcacctttgagtacatgtttgaagaagtgccgattgtaattaaaaattcacatctgatcaatgtcctaatgtgggaacttgaaaagaagtcagctgttgcagataaacatgaattgctcagccttgccagcagcaatcatttggggaagaatctacagttgctgatggacagagtggatgaaatgagccaagatatagttaaatacaacacatacatgaggaatactagtaaacaacagcagcagaaacatcagtatcagcagcgtcgccagcaggagaatatgcagcgccagagccgaggagaacccccgctccctgaggaggacctgtccaaactcttcaaaccaccacagccgcctgccaggatggactcgctgctcattgcaggccagataaacacttactgccagaacatcaaggagttcactgcccaaaacttaggcaagctcttcatggcccaggctcttcaagaatacaacaactaagaaaaggaagtttccagaaaagaagttaacatgaactcttgaagtcacaccagggcaactcttggaagaaatatatttgcatattgaaaagcacagaggatttctttagtgtcattgccgattttggctataacagtgtctttctagccataataaaataaaacaaaatcttgnnnnnnnnnnnnnnnnnnnnnnnnnnnnnnnnnnnnnnnnnnnnnnnnnnnnnnnnnnnnnnnnnnnnnnnnnnnnnnnnnnnnnnnnnnnnnnnnnnnnnnnnnnnnnnnnnnnnnnnnnnnnnnnnnnnnnnnnnnnnnnnnnccttggcgnnnnnnnnnnnnnngaaaaaattttttaaaaccttttttgggggcgggggccccnnnnnnnnnnnnnnnnnnnnnnnnnnnnnnnnnnnnnnnnnnnnnnnnnnnnnnnnnnnnnnnnnnnnnnnnnnnnnnnnnnnnnnnnnnnnncccaggtttttagaaaaacccgnnnnnnnnnnnnnnnnnnnnnnnnnnnnnnnnnnnnnnnnncccagggggtttttttttaatttnnnnnnnnnnngggcccctcttcgaagaggggggaaatttctataacatttnnnnnnnnnnnnnnnnnnnnnnnaaccggtttggggaccctgattcccccggggcaacccacccttttgcccccttggaaaaaaatatttcccccggggaaaaaaaccggggg

SEQ ID NO: 250083 - DNA, 1652 bp, Homo Sapiens
  misc_feature (1400)..(1543): n is a, c, g, or t
  misc_feature (1551)..(1551): n is a, c, g, or t
  misc_feature (1582)..(1582): n is a, c, g, or t
  misc_feature (1584)..(1584): n is a, c, g, or t
  misc_feature (1588)..(1600): n is a, c, g, or t
ggggcggacggcgttggtttgaagaccttcagcgttgccctggcggagcagagacaggccctcggggtggaggtctttggtttcataagagcctgagagagatttttctaagatatgtgtaacacaccaacgtactgtgacctaggaaaggctgctaaggatgtcttcaacaaaggatatggctttggcatggtcaagatagacctgaaaaccaagtcttgtagtggagtggaattttctacttctggtcatgcttacactgatacagggaaagcatcaggcaacctagaaaccaaatataaggtctgtaactatggacttaccttcacccagaaatggaacacagacaatactctagggacagaaatctcttgggagaataagttggctgaagggttgaaactgactcttgataccatatttgtaccgaacacaggaaagaagagtgggaaattgaaggcctcctataaacgggattgttttagtgttggcagtaatgttgatatagatttttctggaccaaccatctatggctgggctgtgttggccttcgaagggtggcttgctggctatcagatgagttttgacacagccaaatccaaactgtcacagaataatttcgccctgggttacaaggctgcggacttccagctgcacacacatgtgaacgatggcactgaatttggaggttctatctaccagaaggtgaatgagaagattgaaacatccataaaccttgcttggacagctgggagtaacaacacccgttttggcattgctgctaagtacatgctggattgtagaacttctctctctgctaaagtaaataatgccagcctgattggactgggttatactcagacccttcgaccaggagtcaaattgactttatcagctttaatcgatgggaagaacttcagtgcaggaggtcacaaggttggcttgggatttgaactggaagcttaatgtggtttgaggaaagcatcagatttgtccctggaagtgaagagaaatgaacccactatgttttggccttaaaattcttctgtgaaatttcaaaagtgtgaactttttattcttccaaagaattgtaatcctccccacactgaagtctaggggttgcgaatccctcctgagggagacgcttgaaggcatgcctggaagttgtcatgtttgtgccacgtttcagttcagttctgaagtgttattaaatgtgttcctcagcgacagtgtagcgtcatgttagaggagacgatctgacccaccagtttgtacatcacgtcctgcatgtcccacaccattttttcatgaccttgtaatatactggtctctgtgctatagtggaatctttggttttgcatcatagtaaaataaaataaacccatcacatttggaacatnnnnnnnnnnnnnnnnnnnnnnnnnnnnnnnnnnnnnnnnnnnnnnnnnnnnnnnnnnnnnnnnnnnnnnnnnnnnnnnnnnnnnnnnnnnnnnnnnnnnnnnnnnnnnnnnnnnnnnnnnnnnnnnnnnnnnnnnnnnnnnnncccccccncacccccaaaaaaacctttaaaaaccacccncnaggnnnnnnnnnnnnnaacaacaacgggcaacgagggccaacccggggtccccagggaaacccggccc

SEQ ID NO: 250084 - DNA, 438 bp, Homo Sapiens
  misc_feature (285)..(285): n is a, c, g, or t
  misc_feature (304)..(304): n is a, c, g, or t
  misc_feature (318)..(318): n is a, c, g, or t
  misc_feature (399)..(399): n is a, c, g, or t
tttagtagtcatttatgctagaaatttgctgaaatctatagttacaaaatgggatccttgtttagatagtcttagaatttgttttcataccataataacaatggtacaaactagatatttatgacgttttcttatctatgaaaacaggaacgatggcactgaatttggaggttctatctaccagaaggtgaatgagaagattgaaacatccataaaccttgcttggacagctgggagtaacaacacccgttttggcattgctgctaagtacatgctggattgtangaacttctctctctgtaangaatgtgctgccangattcggatctgctcttatgtttgtgtcttaagttttcagagaatgttgtgatatgagtgtaagtttgcttgttccgtaantaattctaataagccagctcattgtgtagtgaaaggaat

SEQ ID NO: 250085 - DNA, 349 bp, Homo Sapiens
aactagctcctcacatgcattgtagcctgcattccattcatccgagtaacccagaaaaatctcataccctgaaattaaattcagttgatttcagatagctagtagccccagacacctgaggataaaagtacaagtattctttggaggaatacaacaatatcctgggcttcaaactatttatttaaaataaaatctaatgtctacgtcatgcaatgcatgtttgtgcaaaacctggcgctaaagcatttgtagatgacctgcttctgtgtgagggtttcatccacagcggggcagctctctcactgtgatctatggagagtcagcctttgacacaagggtttgtaagaaa

SEQ ID NO: 250086 - DNA, 830 bp, Homo Sapiens
tttaaaattttatcttgtgtgtatttattggtttgacaatcatttataaagcaactgatgcagagaggaagactgagataaatcaccacccccatttaaaattcagatatattacatgttacaaacaacacatgttaaaaaacgatgcacacaggatatgtgggagggtaaaaccggcccctaggactcctcctaccaccttcttcctggtgctggtgactgcccctcagcctcagcctcatgtgctggtccctcttcccttcaataaggaggttgtcccaggctctgcaagtgctctgtttcacacttcagagacgtgtgtgttgtttttctttaagcccagtcctgaatttctgctgtagcaactattaaggtagaaaattaggccagtcacattaatgggctgccatcaggatgaaggttttaaaccaggcggattccggatcctgcttaaggatcaatccagtcaaagtggaagcaattagtcctcctatcattccagttaaagttgaacatgctttaataaatccaaaatatctgggagcaatatccaagccatttataaacactccacccaagcaaaagctgcctgttgcaccagcaagtattaggaaaatgacaatgctgtagaaggtggaactcaggtaaggcaggcagacaccaaagattgcaggaaggagaaatcctgctgctgtgaagagtttccggacagcaattacgctgagaatattcctggtcaggaagaagtctgataactgacctgctaggttaccacagatccaggcaaacaaatagggaagggaagacaagaacccattctcttttatatt

SEQ ID NO: 250087 - DNA, 915 bp, Homo Sapiens
ctccttcctgcaatctttggtgtctgcctgccttacctgagttccaccttctacagcattgtcattttcctaatacttgctggtgcaacaggcagcttttgcttgggtggagtgtttataaatggcttggatattgctcccagatattttggatttattaaagcatgttcaactttaactggaatgataggaggactaattgcttccactttgactggattgatccttaagcaggatccggaatccgcctggtttaaaaccttcatcctgatggcagccattaatgtgactggcctaattttctaccttatagttgctacagcagaaattcaggactgggctaaagaaaaacaacacacacgtctctgaaggtgagaagtgatcagattaaggacaatttttgaaactgggaatgcaggagacagaggagataaggatgactcctcagatgagaaggaataacgggtgcaggtttggaaaagaggagaccatgttaagcctgagaatattagacatcctgaaatggctgtgggactctgtggggatgctaaggctggagatataaatttgggaggctgggcctctttaacatcaaaagatgaggatgaaaaagaaaagtttccaaaaaagactggaaaggcgccttcaacgaagtaggaagaacagtgtgtaaaatgaacactcaaagtgaaaaaggttggaaccaagcacctttggcaagtgctataatatcaagccattacattatataagtgtctaagaatttcaaatgaatgatggacacaaagagtcctttaaggtgtgtccaaggtataacactgtgctttgcttatgtaaactctaccagtggtaaatgaattggaggagaaatgtctctttgtagaataattgtggctaacacataaataagttttg

SEQ ID NO: 250088 - DNA, 448 bp, Homo Sapiens
  misc_feature (28)..(28): n is a, c, g, or t
accggaaaccccccgggttaaaaccctncaccccgaagggcggcccattaaaggtgaactgcccctaattttcccacccttataggttgccaacagccagaaattccaggaactgggcctaaagaaaaacaacaccacacgtcccctgaagtgtgaaacagagcaccttgcagaccccggggacaaccctccttattgaagggaagagggacccagcacatgaggctgaggctgaggggcagtcaccagcacccaggaagaaggtggtaggaggagtcctaggggccggttttaccctcccacatatcctgtgtgcatcgttttttaacatgtgttgtttgtaacatgtaatatatctgaattttaaatgggggtggtgatttatctcagtcttcctctctgcatcagttgctttataaatgattgtcaaaccaataaatacacacaa

SEQ ID NO: 250089 - DNA, 1250 bp, Homo Sapiens
actcttggcgagctggacctggagcgcgcgcccgcgctgggcggcagcttcgcggggcttgagcccatggggctgctctgggccttggagcccgagaaacctttggtgcggctggtgaagcgcgacgtgcgaacgcccttggccgtggagctggaggtgctggatggccacgaccccgaccccgggcggctgctgtgccagacgcggcacgagcgctacttcctcccgcccggggtgcggcgcgagccggtgcgcgtgggccgggtgcgaggcacgctcttcctgccgccagaacctgggccctttcctgggattgtggacatgttcggaactggaggtggcctgctggagtatcgggctagtctgctggctgggaagggttttgctgtgatggctctggcttattataactatgaagacctccccaagaccatggagacgctccatctggagtactttgaagaagccatgaactacttgctcagtcatcccgaggtaaaaggtccaggagttgggctgcttggaatttccaaagggggtgagctctgcctttccatggcctctttcctgaagggcatcacggctgctgtcgtcatcaacggctctgtggccaatgttgggggaaccttacgctacaagggcgagaccctgccccctgtgggcgtcaacagaaatcgcatcaaggtgaccaaagatggctatgcagacattgtggatgtcctgaacagccctttggaaggacctgaccagaagagcttcattcctgtggaaagggcagagagcaccttcctgttcctggtaggtcaggatgaccacaactggaagagtgagttctatgctaatgaggcctgtaaacgcttgcaggcccatgggaggagaaagccccagatcatctgttacccagagacagggcactatattgagcctccttacttccccctgtgtcgggcttccctgcatgccttggtgggcagtcctattatctggggaggggagcccagggctcatgccatggctcaggtggatgcttggaaacaactccagactttcttccacaaacacttgggtggccacgaggggacaatcccatcaaaagtgtaaattttatttgatcatgtggcctctctgttgctaatctctcctggaaacatctgccacatttagtgtgtgtatgtgtattcattcttttgtttttaataactaaagttttttcccctcattattaaaatgaatttaccaagcaaaaaaca

SEQ ID NO: 250090 - DNA, 469 bp, Homo Sapiens
  misc_feature (85)..(136): n is a, c, g, or t
  misc_feature (302)..(344): n is a, c, g, or t
ggctgagagacaaggtggagatccagggagaccccagggagcagtgcaggtgtccgtggattctgctttcagttaaacccctgannnnnnnnnnnnnnnnnnnnnnnnnnnnnnnnnnnnnnnnnnnnnnnnnnnncggataattgtatgtcatctattctaccgacggcagccagaggacgcctgtgagcacctgagtcagggcccatccctgctctgcctacagccctccatggctcccaccttcctatgcgtcaaagcccaagtcctccctgcagtccacaaggccctgcacaccttgnnnnnnnnnnnnnnnnnnnnnnnnnnnnnnnnnnnnnnnnnnngttcactcttctggagccacacgggccatcctccctgttcctccaacacccaggtgcagtcctgccttggcgccttggcacgggctgtgccctcttctcaagaaaaccctcttcttccaaatatc

SEQ ID NO: 250091 - DNA, 1592 bp, Homo Sapiens
  misc_feature (374)..(374): n is a, c, g, or t
  misc_feature (447)..(447): n is a, c, g, or t
  misc_feature (735)..(735): n is a, c, g, or t
  misc_feature (900)..(912): n is a, c, g, or t
cccaagtgtaattatcatgcgttttatatcttcctaataaggtgtggtctgtttgtctgaacaaagtgctagactttctggagtgataatctggtgacaaatattctctctgtagctgtaagcaagtcacttaatctttctacctcttttttctatctgccaaattgagataatgatacttaaccagttagaagaggtagtgtgaatattaattagtttatattactctcattctttgaacatgaactatgcctatgtagtgtctttatttgctcagctggctgaggacactgaagaagtcactgaacaaaacctacacacgtaccttcatgtgattcactgccttcctctctctaccagtctatttccactgnaacaaaacctacacacattaccttcatgtgggtcagtgcctttcctctctctaccagtctatttccactgaancaaaacctacgcacataccttcatgtggctcagtgccttcctctctctaccagtctatttccattctttcagctgtgtctgacatgtttgtgctctgttccattttaacaactgctcttacttttccagtctgtacagaatgctatttcacttgagcaagatgatgtaatggaaagggtgttggcattggtgtctggagacctggatttgagtcttggtgctatcaatcaccgtctgtgtttgagcaaggcatttggctgctgtaagcttattgcttcatctgtaagncggtggtttgtaattcctgatcttcccacctcacagtgatgttgtggggatccagtgagatagaatacatgtaagtgtggttttgtaatttaaaaagtgctatactaagggaaagaattgaggaattaactgcatacgttttggtgttgcttttcaaatgtttgnnnnnnnnnnnnntgttaagaaatgggtttcttgccttaaccagtctctcaagtgatgagacagtgaagtaaaattgagtgcactaaacgaataagattctgaggaagtcttatcttctgcagtgagtatggcccaatgctttctgtggctaaacagatgtaatgggaagaaataaaagcctacgtgttggtaaatccaacagcaagggagatttttgaatcataataactcataaggtgctatctgttcagtgatgccctcagagctcttgctgttagctggcagctgacgctgctaggatagttagtttggaaatggtacttcataataaactacacaaggaaagtcagccaccgtgtcttatgaggaattggacctaataaattttagtgtgccttccaaacctgagaatatatgcttttggaagttaaaatttaaatggcttttgccacatacatagatcttcatgatgtgtgagtgtaattccatgtggatatcagttaccaaacattacaaaaaaattttatggcccaaaatgaccaacgaaattgttacaatagaatttatccaattttgatctttttatattcttctaccacacctggaaacagaccaatagacattttggggttttataatgggaatttgtataaagcattactctttttcaataaattgttttttaatttaaa

SEQ ID NO: 250092 - DNA, 649 bp, Homo Sapiens
  misc_feature (37)..(37): n is a, c, g, or t
  misc_feature (40)..(40): n is a, c, g, or t
agcaggtgctatgcagagccctccctatgcagttacnacnagattgacggatgctatttgcaggccaccagtctcgcatgtctttacttcacataatggtattacactgtcctaggagagcaaatgcatattatgtgagagaaaaataggactcattatctcgtaccacaaacaggggctggcaggcccctcataggcactgagatgaggcctaaaaatatgctggggtgagttccgtccttccttctgtggttaccacctggattaggcttcctgagctcggtcggtttttccctgtgatccagtcatggaaagtttcaactaggaattctaagggtgtccaggagctgaagtcagcctcaggcattgatttcctgttcatcggggtatccagggtaaccgggagcacagcgatggcggctgccccgggcggcatgccgctgttcttcccagccaggctctggcagagctggtgaacagcacccttggccatgccgtacccgatcataccaggagtcccatccagggcagcctttgcgccagccaaggtcaggaggcctccttccttgagatgcttggtagccagatggctggagatggtcgatgtccatatgctctgcttccacatcaggtcacagttcttctcgtg

SEQ ID NO: 250093 - DNA, 1413 bp, Homo Sapiens
  misc_feature (1182)..(1286): n is a, c, g, or t
  misc_feature (1288)..(1293): n is a, c, g, or t
aaggtagcgaggcctgggtggcgaattcggcacgaggaagcagagcatatggacatcgaccatctccagccatctggctaccaagcatctcaaggaaggaggcctcctgaccttggctggcgcaaaggctgccctggatgggactcctggtatgatcgggtacggcatggccaagggtgctgttcaccagctctgccagagcctggctgggaagaacagcggcatgccgcccggggcagccgccatcgctgtgctcccggttaccctggataccccgatgaacaggaaatcaatgcctgaggctgacttcagctcctggacacccttagaattcctagttgaaactttccatgactggatcacagggaaaaaccgaccgagctcaggaagcctaatccaggtggtaaccacagaaggaaggacggaactcaccccagcatatttttaggcctcatctcagtgcctatgaggggcctgccagaaaagtcactaacctgtctcagtgtggccttgtccagccttgtgttttctgtaacccctgtttgtggtacgagataatgagtcctatttttctctcacataatatgcatttgctctcctaggacagtgtaatacatttatgtgaagtaaagacatgcgagactggtggcctgcaaatagcatccgtcaatctgtgttaactgcatagggagggctctgcatagcacctgctatagcggtgtcatgttggatcgcttttgtgactgttcatctgtccttgacagtggctgtcatcttgactactttgttgatttgttggtattggggacattttaaaggctgagttatttttgaatgtcatgtttatgtcatagacgtagttttcgcatccttgaattaaactgccttaactccttttgtggtataagcaaaactccatggactctgtcctggtatccttttcctgtgtggttgccctgtgtcctctggcctagggttaagtgtgcaagataactactcgtgagtattcagaatgttgttcctaataaatgcacttgttgtctgtcttctttaatcaaatcacatcttatatacagcagtcagagatgagtatactagaatcatggattgctggaggtcttttaatctggtgttctcggaagggggtggatttaaatcctgaaataaatatttcaacacaannnnnnnnnnnnnnnnnnnnnnnnnnnnnnnnnnnnnnnnnnnnnnnnnnnnnnnnnnnnnnnnnnnnnnnnnnnnnnnnnnnnnnnnnnnnnnnnnnnnnnnnnannnnnntttgggcgcccgccctccccccccaaaaaaatttttttaaaccctttcttttgggcgccccgcggccccaaagggaaaggaaaaatgggccaaatttgtttcccaaaagaaaacccgggc

SEQ ID NO: 250094 - DNA, 1036 bp, Homo Sapiens
  misc_feature (1007)..(1007): n is a, c, g, or t
ccccgctattggccggtgttatccagaagccctccttatgcaggtaacacagattcaccggatgctatttccaggccaccagttttggcatgtctttacctccccataatggtattcccctgtcctaggggagcaaatggcatattatgtgagagaaaaataggattcattatctggtaccacaaacaggggttacagaaaacacaaggctggacaaggccacactgagacaggttagtgacttttctggcaggcccctcataggcactgaagaggaggccctaaaaatatgcgggggggaggttccgtccttcctttctgtggttaccacctggattaaggcttccggaagctcggtcggtttttccctgtaatccagtccaatggaaagttttcaactaggaattctaagggtgtccaggagctgaagtcagcctcagggcattgatttcctgttcatcggggtatccagggtaaccgggagcacagcgatggcggctgccccgggcggcatgccgctgttcttcccagccaggctctggcagagctggtgaacagcacccttgggccatgccgtacccgatcataccaggagtcccatccagggcagcctttgcgccagccaaggtcaggaggcctccttccttgagatgcttggtagccagatggctggagatggtcgatgtccatatgctctgcttccacatcaggtcacagttcttaaagagagacttggatttggcattgcccccggcccatcctccagcaacgcaaagaattgcatccaccttctcttcacccaagagctttccaacctcagcagtcacccagttgcgggcccgaaaagcctgcacgcatcgagaacccagagcgcccctgccgccgtacaccagcacccggcgcgcctcgcctgcagccgccgccgccgccatcctgctcctgccagcccggctccccctcgtgccgaattcgccacccaggcctcgctacattagaaccgttatatntttgtggataaaaaaggggcgggtggcgg

SEQ ID NO: 250095 - DNA, 1110 bp, Homo Sapiens
gctgggtggcgaattcggcacgaggggcaggagcaggatggcggcggcggcggctgcaggcgaggcgcgccgggtgctggtgtacggcggcaggggcgctctgggttctcgatgcgtgcaggcttttcgggcccgcaactggtgggttgccagcgttgatgtggtggagaatgaagaggccagcgctagcatcattgttaaaatgacagactcgttcactgagcaggctgaccaggtgactgctgaggttggaaagctcttgggtgaagagaaggtggatgcaattctttgcgttgctggaggatgggccgggggcaatgccaaatccaagtctctctttaagaactgtgacctgatgtggaagcagagcatatggacatcaaccatctccagccatctggctaccaagcatctcaaggaaggaggcctcctgaccttggctggcgcaaaggctgccctggatgggactcctggtatgatcgggtacggcatggccaagggtgctgttcaccagctctgccagagcctggctgggaagaacagcggcatgccgcccggggcagccgccatcgctgtgctcccggttaccctggataccccgatgaacaggaaatcaatgcctgaggctgacttcagctcctggacacccttagaattcctagttgaaactttccatgactggatcacagggaaaaaccgaccgagctcaggaagcctaatccaggtggcaaccacagaaggaaggacggaactcaccccagcatatttttaggcctcatctcagtgcctatgaggggcctgccagaaaagtcactaacctgtctcaatgtggccttgtccaaccttgtgttttctgtaccccctggttgtgggtacaaaataatgagtcctatttttctctcacataatatgcattttgctctcctaggaccgtggaaatacttttatgggaagtaaaatacttgccaagactggtgggcctggaaaataaccatccggccaatctggggtcaacatggaataggggagggctctggcataagcccctgacttattacccgcggttcatgtgattggcatccccttttttgaggaaatgggttctttctt

SEQ ID NO: 250096 - DNA, 984 bp, Homo Sapiens
  misc_feature (10)..(10): n is a, c, g, or t
  misc_feature (13)..(13): n is a, c, g, or t
  misc_feature (28)..(28): n is a, c, g, or t
  misc_feature (34)..(34): n is a, c, g, or t
  misc_feature (48)..(48): n is a, c, g, or t
  misc_feature (59)..(59): n is a, c, g, or t
  misc_feature (70)..(70): n is a, c, g, or t
  misc_feature (73)..(73): n is a, c, g, or t
  misc_feature (76)..(77): n is a, c, g, or t
  misc_feature (79)..(79): n is a, c, g, or t
  misc_feature (87)..(87): n is a, c, g, or t
  misc_feature (92)..(94): n is a, c, g, or t
  misc_feature (96)..(96): n is a, c, g, or t
  misc_feature (100)..(100): n is a, c, g, or t
  misc_feature (117)..(117): n is a, c, g, or t
  misc_feature (128)..(129): n is a, c, g, or t
  misc_feature (138)..(138): n is a, c, g, or t
  misc_feature (143)..(143): n is a, c, g, or t
  misc_feature (148)..(216): n is a, c, g, or t
  misc_feature (218)..(218): n is a, c, g, or t
  misc_feature (221)..(221): n is a, c, g, or t
  misc_feature (228)..(229): n is a, c, g, or t
  misc_feature (238)..(238): n is a, c, g, or t
  misc_feature (241)..(241): n is a, c, g, or t
  misc_feature (246)..(246): n is a, c, g, or t
  misc_feature (270)..(270): n is a, c, g, or t
  misc_feature (273)..(273): n is a, c, g, or t
  misc_feature (285)..(285): n is a, c, g, or t
  misc_feature (291)..(291): n is a, c, g, or t
  misc_feature (299)..(300): n is a, c, g, or t
  misc_feature (303)..(303): n is a, c, g, or t
  misc_feature (324)..(324): n is a, c, g, or t
  misc_feature (337)..(337): n is a, c, g, or t
  misc_feature (340)..(340): n is a, c, g, or t
  misc_feature (342)..(342): n is a, c, g, or t
  misc_feature (344)..(344): n is a, c, g, or t
  misc_feature (346)..(346): n is a, c, g, or t
  misc_feature (350)..(350): n is a, c, g, or t
  misc_feature (355)..(355): n is a, c, g, or t
  misc_feature (362)..(362): n is a, c, g, or t
  misc_feature (365)..(366): n is a, c, g, or t
  misc_feature (369)..(369): n is a, c, g, or t
  misc_feature (379)..(380): n is a, c, g, or t
aaataaattnatnacaaaaactcccaanaatttnaaacaacatctttnccatcccaaantctcccccccnccnacnnanccaccatnccttnnntnctcnctccccccaatttcaancccaaaaacannatatattanccatnttccnnnnnnnnnnnnnnnnnnnnnnnnnnnnnnnnnnnnnnnnnnnnnnnnnnnnnnnnnnnnnnnnnnnnnantcnccccatnnccccaattnatnaaaantccaacatcacaaaaaacttttantcnttttcccccccncaattntcatacannttnaaattattacatttctttttnttagatgagtaanccncnananccanaagcncaaaaanccnncantatgaggganncaaagtattaataaaaacactgccctctaaaaatttcctcagatctgaagtatggtcttggtcctgaatatacagtgttatcctatgtttaaaagggtgatccagacatgagacgcaactagttggtgcataagaaggccccacttggctatttcatatctacctacaattgaccaaaaaaaattttttaggccagcaattattatttagttcgctctttctagtgcaagaaactgcaggctggatcagtagttcaacagctaaacagtcataaaatagtcattgtgcatgttaaatttctttcaatgctttcaaagataaattccaatttctatttacttattcattgtgacagtattactaaacaggtaaggatgggaatattttgttatactgtgtatagtgaatgtattgtactgtgtctgtgaaaactgtgctttaaattatattttcatatgttttgttggggacagagcacattaagtctgaaagcaacagaggtttgttttagaactgaaggcaatttaatcaaaattcctgtcaagaaaagctgcttataaatgtaaatgaaatcacatttaaaataaactgcctctgacccaaa

SEQ ID NO: 250097 - DNA, 2899 bp, Homo Sapiens
gagacgtcagatggacatcattgtgtctgaagtttctatgatcagagatattcgagagagggagattcggatctatacggatgcaggccgtatttgtagaccacttctgattgtggacacaactatagttggcaggatcttgtggccagtggggtagtggagtatattgataccctggaagaagaaacagtgatgcttgcaatgactccagatgatttacaggagaaagaagtagcttattgttccacatatacacactgtgagattcatccctcaatgatccttggtgtctgtgcatctattattccctttcctgatcataaccagtcccctagaaacacataccagtctgctatgggtaagcaggctatgggagtttacatcaccaacttccatgttcgcatggacacattggcccatgttctctattatcctcaaaagccacttgtgactacacggtctatggaatatctacgatttagagagctgccagcaggcatcaactcaattgtggccattgcatcatacactggatataatcaggaagactctgttatcatgaatcgttcagctgtagaccgcggcttcttcaggtctgttttctatcgctcatacaaagaacaggagtctaaaaaaggatttgatcaagaagaagtttttgagaagcctacacgtgaaacatgccagggcatgaggcatgccatttacgacaagctggatgatgatggtttgatagctccaggggttcgtgtatcaggagatgatgttattataggcaaaacagtcaccttgcctgaaaatgaagatgaattggagagcaccaatagacgctataccaagagagactgtagcacttttctcagaactagcgagacgggcattgtggatcaggttatggtaactctcaatcaggaaggatataaattttgtaaaataagggtacgctctgttaggattccacagattggagacaaatttgctagtcgacatggtcaaaagggtacttgtggtattcagtatagacaagaggatatgcctttcacctgtgaaggtatcacccctgatatcatcatcaatccccatgccatcccctctcgtatgactattggtcacttaattgaatgccttcaagggaaggtatcggctaacaagggtgaaattggtgatgccactccatttaatgatgctgttaacgtgcagaagatttctaatcttttatctgattatggctatcatctcagaggaaatgaggtcctgtacaatgggttcactggtcgaaaaatcacatcacaaatatttattggccccacttattaccagcgtttgaagcatatggtggatgataagattcactctcgtgctaggggacctattcagatcctcaatagacagcccatggagggtagatctcgtgatggtggcctgcgttttggagaaatggaacgagattgtcagattgcccatggagcagcccagtttttaagggaaagattgtttgaggcatcagatccatatcaggttcatgtttgcaatctttgtggaataatggcgattgccaacaccaggacccatacatatgaatgcaggggctgccgcaataaaacccagatttctttggtgcgaatgccttacgcatgcaaactattgtttcaggaacttatgtctatgagtattgcaccgcgaatgatgagtgtttagctattttacaggagtcaacaagataattaaatatcttggtgtcttgtttctattgtgtggctttttaaaaatgacaaatatgtactgtgttgtgataaaaagtattttatttgtttaatgatatgcatgcttttcttctgtaaatatataataaatttttgtagatagtcttgatgtgtgatctttattttgtatttctctgtgtaaaaccagtgaatataactaaagtgttagtggattggattaaaagaaacttattaggcaagaacaggtaatgtagttatccatgactacttttaaccatgcagactaataatattctggaggtttatagctcggcaccttcaccttttttcactggtatttcatgtaaggcatcaaccactgtaatttttgctgatgctgaagcctgtccttgggaattggatgcatggcactcatattctccagcatcttccttacttagaggagataccagcacccagccagttacttcatgcttttctgggccaccccgggtctgaatggccaggttgtcccggtcaccaggcaggagttctgtcctttgaactccatagtgacccctttttaccttgttccagatgaggacaggtgtcgggattccgatgacctcacagctcaagtacacctgggcaccagtgacattccagatgtccttggggggcgtcactatggaaggaccttgctcgcaggtgcccttgctgacctgggtgatggccttctccccgcggctctcggccctctggctggcggcgcgcagctggcagccgctcgggtaggtggtgccgtcgctgccgcacaccgggtagcggctcttgcacacgcacacgccgcttacacccggaccgccggctgctgccccggctttacccctccgcctcttgcggctcttcacgcactccatgcccggcgcgcagtaccccctgccggcgccgccacccccgcacggctcgccctcgccgcgggcgcacatagggcagcagccgcacgcgtcgcgggtctcgcccagcaggcagcccagcgggggcaggggcgggcaggaggccggctcgcaggggccgcaggtgtccgaagaggaggaagaggagaggggcaggagcaggagcagcagcccagcggcgccgaggagcagggcgcgcagcgacggccgctccatggcggcggtgcggtggcagcggca

SEQ ID NO: 250098 - DNA, 979 bp, Homo Sapiens
  misc_feature (15)..(15): n is a, c, g, or t
cctgtatggttaatnacattttccatggtacaaaaatcaaagcctggagatgtttttacagattgctttttacacaatgtcttaaattgccaaatatttacaacattaaagaggaaatacattgtgatgcagagtaaaattctgaaatgattattataaaacctcaatctatctacgtgaggcactcctgaagcaagtggcattagcccatgaggtcctttggtacaaggcccattgcttgaagaaccacagtagctgctgtggctttagcatgcttcttattagggctggcaaagctgggctggtaagcgcttccatttatcaatacctattcaagaaaaacatacaattgggctggtaagggcttccatttctcaataccctaaagagaaaatgtttgcgatgatcagggccactatcatggaccaatagaaattcaggtggttgccaccttcttttattacagatctccatcaaagcagacacaggatgtttgcctgacagatctttcattgcagcagagaagttcccagacctcttttgtgctctttctcctactgcaacaagaccttttcggtctgtcttaaaatcaactaggatgggttccttattgccttctttgttttttcctaatccttctccttctctccagcccatttttctcatcaaaacggctcccattcctccagttaccggggctgctcttaagaactgatcctaggcctcggtagcagcagtgttgtgaatagtacggctggcactgaccggggcaagaagacagctacaaggatttggccctgaaacaagtttccatacagaggggtgaaagttcacaggttattctgtgaacagtcatctctcttgtatccaacccactgaaccataatttccatcaaagcagcaaaccacttaatgtcctaagatgcacaagtatatatacattagcatggtcaacagttatttttacaggttaagaaat

SEQ ID NO: 250099 - DNA, 511 bp, Homo Sapiens
aacagaccacaaaacaggcccggaacccctcacagatctttcattgcaacaaaaaagttcccaaaccttctttgggcctttttcccaagggaaacaaagcctttttgggtctgttttaaatcatctagtatgggttcctaatcgctttctgtgtttttccaaactccttctccttctctccagcccatttttctcatcaaaacggctcccattcctccagttaccgggcctgctcttaagaactgatcctatccaaagaaagaaagtgtaaaatgtccccatttcacagttagaacttggtcacagatccatggttcactttctaaaaagaggaatctcacttcacttctagatcggtatataccaattaaatgtaaattcctcatatacttatatacatactatagtgtgatatgttctgattatttgcacattaacgtaatagtattttgaaagtcaaataacacaagtaaatccacagttttgaaacagtagccctcgtgcccccctc

SEQ ID NO: 250100 - DNA, 2007 bp, Homo Sapiens
attccagagaagtttgtatttgggccttaagcttttgaaaataaagtttagagacatagcatatgaataccactgtaatacacatgaaatattctatcagaccctaaaaattaacataaacttttaactttctcatagtcaacaaaatagtggctggttgccaattttattagataagttggttacagcattttaattatcattttacgtctatctaggtgtagctgaaatccaaaatgcacatcaaagtaaaactatatcacaactcaatgccatactaaatgtacttggcctctgcaatagaattctagtcagacttcattttttactcccttcttatgacccaagtggctttaacaggaatgcaggacttagtgctgatcatcacacaacataccactttctttttagaacctctacaaaattttgaggggagatggtggcattagccctgtggaacagatcttgatcacctcaataacgctggcccattatctgtccagcagaacccattgtgaaatagtacaaggtgcacagcccttcactgattacaggcaagtgttacagtagcctagccataaggaaggggagttacatcatagtacaaaatacagtataaaagcgttatttaacattccacactgaagattactctgatgccttcaaacagtcgtttggatgttagccacttaaacaaatacatcactaaggtaaacaatataaacataccaaaaccctgtatggttaaatacaatttccatggtacaaaaatcaaagcctggagatgtttttacagattgctttttacacaatgtcttaaattgccaaatatttacaacattaaagaggaaatacattgtgatgcagagtaaaattctgaaatgattattataaaacctcaatctatctacgtgaggcactcctgaagcaagtggcattagccatgaggtcctttggtacaaggcccattgcttgaagaaccacagtagctgctgtggctttagcatgcttcttattagggctggcaaagctgggctggtaagcgcttccatttatcaataccctaaagagaaaatgtttgcgatgatcagggccactatcatggaccaatagaaattcaggtggttgccaccttcttttattacagatctccatcaaagcagacacaggatgtttgcctgacagatctttcattgcagcagagaagttcccagacctcttttgtgctctttctcctacggcaacaagaccttttccggtctggtcttaaaatcaactaggatgggtttccttggtgccttcttggttttttcctaatccttctccttctctccagcccattgtttctcatcaaaacggctcccattcctccagttaccggggctgctcttaagaactgatcctttttaatccaggcttgggcaccagtattggccaactgttcttgtgtcaaaacctgtactcctgtacttcctgtgaactggccaggaatagagttcagctgagcccaggcatcaatcctttcctgagctctatttaacatgctcatggcttcaagatcaaatgcattctcactgagtcttttctgagcaagtgcccgttcactcattgctgtagagatgtccacaggctctgagggcaaattgctgctgaaaacattatcatcatctttgttttcttcaccatttttctccacaggaacccattctccataaacactatccgcttcttttttccgatgttgagatccagatgatacagggaattcttttgttaatgttacctggctttttggtggagttggttttgctgcagcaatattcagattgaaaaaaataggtttgggttcactgagtttaaagggatgatgataaaaaggaggttcttcttcctcttcatccgaaacatgaggtttattcactattacatcatcatcttctttactctgtgcgatctgtttacatttctcagttagttcttctatagtagctcctcctgactttttag

SEQ ID NO: 250101 - DNA, 1035 bp, Homo Sapiens
ggagatcaaggtctgtggtaagaagacgaagcttcagtatctcaccagtcagattaaggcgatcaagaacacccttaagaagaaggtttagcagatctcccatccgtcgtaaaagatccaggtcttctgaacgaggcagatcacccaaacgtctgacagatttggataaggctcaattacttgaaatagccaaagctaatgcagctgccatgtgtgctaaggctggtgtccctttaccaccaaacctaaagcctgcacctccacctactatagaagagaaagttgctaaaaagtcaggaggagctactatagaagaactaactgagaaatgtaaacagatcgcacagagtaaagaagatgatgatgtaatagtgaataaacctcatgtttcggatgaagaggaagaagaacctcctttttatcatcatccctttaaactcagtgaacccaaacctatttttttcaatctgaatattgctgcagcaaaaccaactccaccaaaaagccaggtaacattaacaaaagaattccctgtatcatctggatctcaacatcggaaaaaagaagcggatagtgtttatggagaatgggttcctgtggagaaaaatggtgaagaaaacaaagatgatgataatgttttcagcagcaatttgccctcagagcctgtggacatctctacagcaatgagtgaacgggcacttgctcagaaaagactcagtgagaatgcatttgatcttgaagccatgagcatgttaaatagagctcaggaaaggattgatgcctgggctcagctgaactctatttctggccagttcacaggaagtacaggagtacaggttttgacacaagaacagttggccaatactggtgcccaagcctggattaaaaggatcagttcttaagagcagccccgcgtacctggaggaatgggagccgttttgatgagaaaaatgggctgcagagagggagaaggtttgcgaaaaaccagaaagcaacaaggaacccatctagttgattttaggaacaaacgcaaac

SEQ ID NO: 250102 - DNA, 453 bp, Homo Sapiens
  misc_feature (436)..(436): n is a, c, g, or t
ttgctgcagaaaaccaactccaccaaaaagccaggtaacattaacaaaagaattccctgtatcatctggatctcaacatcggaaaaaagaagcggatagtgtttatggagaatgggttcctgtggagaaaaatggtgaagaaaacaaagatgatgataatgttttcagcagcaatttgccctcagaggtaagtaggaggaatattatgtatttttccttttttatacctgaatctgccatttcattgttatgttatgtctgatttggattctgtttcactcttcttagggccgggttaaacggcagggccggtttagacgacagatgaaacaacccgcagcttctcatttgacagtaactcgatgcaattcactttgtgggaaccaaggccacaaagtgaaaagcatcggaattgcagagaacagtgttatcactncctacccaccttggggc

SEQ ID NO: 250103 - DNA, 743 bp, Homo Sapiens
gggactccaacgctgggtgacattgagctcaccagcgccaccgtccccggcgaagttctgcgctggtcggcggagtagcaagtggccatggggagcctcagcggtctgcgcctggcagcaggaagctgttttaggttatgtgaaagagatgtttcctcatctctaaggcttaccagaagctctgatttgaagagaataaatggattttgcacaaaaccacaggaaagtcccggagctccatcccgcacttacaacagagtgcctttacacaaacctacggattggcagaaaaagatcctcatatggtcaggtcgcttcaaaaaggaagatgaaatcccagagactgtctcgttggagatgcttgatgctgcaaagaacaagatgcgagtgaagatcagctatctaatgattgccctgacggtggtaggatgcatcttcatggttattgagggcaagaaggctgcccaaagacacgagactttaacaagcttgaacttagaaaagaaagctcgtctgaaagaggaagcagctatgaaggccaaaacagagtagcagaggtatccgtgttggctggattttgaaaatccaggaattatgttataacgtgcctgtattaaaaaggatgtggtatgaggatccatttcataaagtatgatttgcccaaacctgtaccatttccgtatttctgctgtagaagtagaaataaattttcttaacataatgaacaacaaacgcacaaaaac

SEQ ID NO: 250104 - DNA, 544 bp, Homo Sapiens
ccagcgccaccgtccccggcgaagttctgcgctggtcggcggagtagcaagtggccatggggagcctcagcgttctgcgcctggcagcaggaagctgttttaggttatgtgaaagagatgtttcctcatctctaaggcttaccagaagctctgatttgaagagaataaatggattttgcacaaaaccacaggaaagtcccggagctccatcccgcacttacaacagagtgcctttacacaaacctacggattggcagaaaaagatcctcatatggtcaggtcgcttcaaaaaggaagatgaaatcccagagactgtctcgttggagatgcttgatgctgcaaagaacaagatggcgagtgaagatcagctattcttaatggatttgccctgacggtggtagggatgcatcttcatggttatttgaggggcaagaaggcttgcccaaaggacacggaggacttttaacaagctttgaaacttaggaaaaagaaagctccttttgaaagagggaggccgcttttggagggcccaaaaccgggttgg

SEQ ID NO: 250105 - DNA, 350 bp, Homo Sapiens
agtagataaatatttgaaatgtgagcatttctaaacttggtaccaaatggaaaagggtctcatgaggtgacagtggcttttaaacattcatttgaccgattactctaattttccttgttaaatcattgcaacagttgcatgggggagaatggatattttttgaagaattgcttattccactttcaatttttaaaaatcgaggggattaaaatattactttttaaatatgcataaaagtatcttaactgtaattacattttcagttgctttgttatagtagcatgcatattaaatataaaatgcatttatgaaaatttttgtaaaaaataaaagatttttcatttctcaaa

SEQ ID NO: 250106 - DNA, 1087 bp, Homo Sapiens
  misc_feature (5)..(5): n is a, c, g, or t
  misc_feature (8)..(8): n is a, c, g, or t
  misc_feature (16)..(16): n is a, c, g, or t
  misc_feature (20)..(20): n is a, c, g, or t
  misc_feature (27)..(27): n is a, c, g, or t
  misc_feature (41)..(41): n is a, c, g, or t
  misc_feature (52)..(52): n is a, c, g, or t
  misc_feature (59)..(59): n is a, c, g, or t
  misc_feature (62)..(64): n is a, c, g, or t
  misc_feature (75)..(75): n is a, c, g, or t
  misc_feature (79)..(79): n is a, c, g, or t
acagnganctggtacncttnatttatnccccttacacttgntatgaaactgnggaggtntcnnnccaaactgatnccanggaacacagtgtgcctaccaagaagtctcagatcttttctacagcttctgataatcaaccaactgttacaatcaaggtctatgaaggtgaaagacccctgacaaaagacaatcatcttctgggtacatttgatctgactggaattcctcctgctcctcgtggggtcccacagattgaagtcacctttgagatagatgtgaatggtattcttcgagtgacagctgaagacaagggtacagggaacaaaaataagatcacaatcaccaatgaccagaatcgcctgacacctgaagaaatcgaaaggatggttaatgatgctgagaagtttgctgaggaagacaaaaagctcaaggagcgcattgatactagaaatgagttggaaagctatgcctattctctaaagaatcagattggagataaagaaaagctgggaggtaaactttcctctgaagataaggagaccatggaaaaagctgtagaagaaaagattgaatggctggaaagccaccaagatgctgacattgaagacttcaaagctaagaagaaggaactggaagaaattgttcaaccaattatcagcaaactctatggaagtgcaggccctcccccaactggtgaagaggatacagcagaaaaagatgagttgtagacactgatctgctagtgctgtaatattgtaaatactggactcaggaacttttgttaggaaaaaattgaaagaacttaagtctcgaatgtaattggaatcttcacctcagagtggagttgaaactgctatagcctaagcggctgtttactgcttttcattagcagttgctcacatgtctttgggtgggggggagaagaagaattggccatcttaaaaagcgggtaaaaaacctgggttagggtgtgtgttcaccttcaaaatgttctatttaacaactgggtcatgtgcatctggtgtaggaagttttttctaccataagtgacaccaataaatgtttgttatttacactggtaaaaaaa

SEQ ID NO: 250107 - DNA, 1255 bp, Homo Sapiens
ggtgcgacttcgatggctctctaccatgacatggtgtctcgaagtgtgccactaatgagatactcatctgggtggagaagactttgaccagcgtgtcatggaacacttcatcaaactgtacaaaaagaagacgggcaaagatgtcaggaaagacaatagagctgtgcagaaactccggcgcgaggtagaaaaggccaaacgggccctgtcttctcagcatcaagcaagaattgaaattgagtccttctatgaaggagaagacttttctgagaccctgactcgggccaaatttgaagagctcaacatggatctgttccggtctactatgaagcccgtccagaaagtgttggaagattctgatttgaagaagtctgatattgatgaaattgttcttgttggtggctcgactcgaattccaaagattcagcaactggttaaagagttcttcaatggcaaggaaccatcccgtggcataaacccagatgaagctgtagcgtatggtgctgctgtccaggctggtgtgctctctggtgatcaagatacaggtgacctggtactgcttgatgtatgtccccttacacttggtattgaaactgtgggaggtgtcatgaccaaactgattccaaggaacacagtggtgcctaccaagaagtctcagatcttttctacagcttctgataatcaaccaactgttacaatcaaggtctatgaaggtgaaagacccctgacaaaagacaatcatcttctgggtacatttgatctgactggaattcctcctgctcctcgtggggtcccacagattgaagtcacctttgagatagatgtgaatggtattcttcgagtgacagctgaagacaagggtacagggaacaaaaataagatcacaatcaccaatgaccagaatcgcctgacacctgaagaaatcgaaaggatggttaatgatgctgagaagtttgctgaggaagacaaaaagctcaaggagcgcattgatactagaaatgagttggaaagctatgcctattctctaaagaatcagattggagataaagaaaagctgggaggtaaactttcctctgaagataaggagaccatggaaaaagctgtagaagaaaagattgaatggctggaaagccaccaagatgctgacattgaaagactttccaaagctaagaaagaagggaaactggaaaagaaaattggtttccaacccaattttatccagccaaaaccttctaattgggaaagtggccaaggg

SEQ ID NO: 250108 - DNA, 1062 bp, Homo Sapiens
caaagatccccaaagaaagaagttaagaccttcatggatcgaaagaagggatttacagaagttaagtcgcagaatggagaattcatgacccacaaacttaaacatactgagaatactttcagccgccctggagggagggccagcgtggacaccaaggaggctgagggcgccccccaggtggaagccggcaaaaggctggaggagcttcgtcgtcgtcgcggggagaccgagagcgaagagttcgagaagctcaaacagaagcagcaggaggcggctttggagctggaggaactcaagaaaaagagggaggagagaaggaaggtcctggaggaggaagagcacaggaggaagcaggaggaagccgatcgaaaactcagagaggaggaagagaagaggaggctaaaggaagagattgaaaggcgaagagcagaagctgctgagaaacgccagaagatgccagaagatggcttgtcagatgacaagaaaccattcaagtgtttcactcctaaaggttcatctctcaagatagaagagcgagcagaatttttgaataagtctgtgcagaaaagcagtggtgtcaaatcgacccatcaagcagcaatagtctccaagattgacagcagactggagcagtataccagtgcaattgagggaacaaaaagcgcaaaacctacaaagccggcagcctcggatcttcctgttcctgctgaaggtgtacgcaacatcaagagtatgtgggagaaagggaatgtgttttcatcccccactgcagcaggcacaccaaataaggaaactgctggcttgaaggtaggggtttctagccgcatcaatgaatggctaactaaaaccccagatggaaacaagtcacctgctcccaaaccttcttgacttgagaccaggagacgtatccagcaagcggaacctctgggaaaagcaatctgtgggataaggtcactttcccccactaaggttttgaggacagtttccagaaagaaccccaagctcaagacgcaggacgagctcagttgttagagggctaatttcgctctgttttgtatttat

SEQ ID NO: 250109 - DNA, 682 bp, Homo Sapiens
  misc_feature (627)..(627): n is a, c, g, or t
ctggcgtactgtcctctccactgtggtcttggcacataggtcgatcttgctgaccacgatgaagaagggcactttcagggccagggccagccccagatgttcccttgtggtgccagcaatcccagtgttggcactgacgaggagcagggcgcagtcggggcagtatgatgtgaggccaaagatggtggtgtgtaggtacttatggtggcctgccaggtcgatgaaggtgatcatcttggagctgctctcacagatctcttctgctgtccgtgagtcgctgtaattcaccacctggcccagggcccagggccctcagtgcctcctgccagcccttccaaccccttcagagttgccaggacctaaaccattccctgggtgaccctgcctcttaatcttgaccccattttttatttaatttagttgattccccattgatttcctaagaggggcagagcttgttcacagtcccctcagggcattcatctatactatttcaaaaagtctccacactctacccccatcctatgtccttcactactaccatcccatcctcagagtctggccccattgggtcccattgatcccatgcacctctcccttgctgttaaagccccagaatctccaaanctgatgctggaaggttcggccaaactgaatctcatgcaggttggcggaaaaaagt

SEQ ID NO: 250110 - DNA, 986 bp, Homo Sapiens
  misc_feature (852)..(929): n is a, c, g, or t
ccaagggagcgaggcctgggtggcgaattcggcacgaggagttcctagacctccgtgtggccgtcctggggaatgtggactctgggaagtcaactctgcttggagtcctgacccagggagagctggacaatgggcggggccgggctcggctcaaccttttccgccacctgcatgagattcagtctggccgaacctccagcatcagcttcgagatcctgggctttaacagcaagggagaggtggtgaattacagcgactcacggacagcagaagagatctgtgagagcagctccaagatgatcaccttcatcgacctggcaggccaccataagtacctacacaccaccatctttggcctcacatcatactgccccgactgcgccctgctcctcgtcagtgccaacactgggattgctggcaccacaagggaacatctggggctggccctggccctgaaagtgcccttcttcatcgtggtcagcaagatcgacctatgtgccaagaccacagtggagaggacagtacgccagctggagcgggtcctcaagcagcctggctgccacaaggtccccatgctggtcacctctgaggatgatgccgtcactgctgcccagcagtttgctcagtcacccaatgtcacccccatcttcacattgtccagtgtgtctggagagagtctggacctcctcaaagtctttctgaatattctgccgccactcaccaacagcaaagagcaggaggaactcatgcaccagctgacgggagttcacggggggatgaaatctacacagtaccagaagggggggactggttggtggaggaacactttcccaggggggattttgccggaannnnnnnnnnnnnnnnnnnnnnnnnnnnnnnnnnnnnnnnnnnnnnnnnnnnnnnnnnnnnnnnnnnnnnnnnnnnnnatccgagcgcgaacggcgtttgcccggggggtggggctgcagagcgtgggtcagggt

SEQ ID NO: 250111 - DNA, 560 bp, Homo Sapiens
cagtttccctaatccctgctatcacattcttgacaaacttcatagatgtcttgagccgagcaatactaatatccagttgtccaacaaatttccggtatcttccacaatcacagacagtacctgctttgcctttttctccaggtattccaagcaaacctttttcccctttgtcacccttcttcccaatgggcccagtcttgccaatattgccctgatctcccatatcacccagttctcctttaattcctttcggccccatgcgtcccactttgccatgctttccctcttctcctggatctcctttttcaccatcatctcctttgggtcctggtgaaattgtgtgtgtggcacagacttcagcggtaggacggctatcaatatccagacccagactctgaatttgcaaaagaaatagtaccaggaggataaattggtttcttcgaagcaaggatgcaaagccattcattgctgtggttcctcagaaaagggtctcccagaaatgccaaataaacagctttattttaaataaaacctcctgctttggggaagaaggggaagtc

SEQ ID NO: 250112 - DNA, 570 bp, Homo Sapiens
  misc_feature (193)..(193): n is a, c, g, or t
tttatctcggtattcctgatacaggagccctatttgttcaatgaggtttctccaggagtcggcgggaatggggtggatcatccgcaggcctcggtgagcgtggtggggctgtcggcagggcgccactcctcgggcgtggcccaatttcccggggtggaggacgactcactcatttcctgggctcctgggtctntctgcattgctgttctgcaaggaggcattctgctccaggggatattcaaggtcaggggctcatttacagattttccattgtccctgtgaatctgccaggcagctggcgtttcccgttcgggggttgtctctggccttggctttgcttttgcgtcttatggagcgattgaagatggaatttctcttaattgggatgtggcaatgaggctctttgtcttggatatcctggtcagcttgagaagtctcctctctggcagcactcaaaccagtgaagcttgggaaagtcattgacctccagtcgttctgctgagaaacatctggctctatttccatggagaccagggaatctgaagatttggaaaagacccggaggaaatc

SEQ ID NO: 250113 - DNA, 693 bp, Homo Sapiens
aaagaagattgatagatgctggcaaaaccattgcagacaaatgatcatgatcaggagcatttttttgtttctggatagaacttacgttcttcagaattcaatgctaccctccatttgggacatgggactggagttatttagggctcatattataagtgatcagaaagtgcagaataagacaattgatggcattcttctcttgattgagagggaaaggaatggtgaagcaattgatagaagtttacttcgaagccttttaagcatgctgtctgatttgcaaatttatcaagattcttttgaacaacgatttttggaagaaactaaccggctctatgcagctgaaggccaaaaattaatgcaagaaagagaggttcctgaatatctacatcatgttaacaaacgtctagaagaagaagcagacagacttattacttacttagatcagaccacccagaagtcattaattgctactgtagaaaaacaacttctaggtgaacacttaacagcaattcttcagaaaggtttaaataacctccttgatgaaaaccgaattcaagatttgtctcttctgtatcagctcttcagtagagttcgatgtggagttcaggttcttttgcagcagtggatcgaatatatccaggcatttggcagcactattgtaattaatcctgaaaaagataacaccatggttca

SEQ ID NO: 250114 - DNA, 723 bp, Homo Sapiens
  misc_feature (169)..(192): n is a, c, g, or t
  misc_feature (684)..(684): n is a, c, g, or t
aacaacaacagatctagagatacctcaaggatatcatttttgattttgtgttacagtacacttgtagccaaaactggaagacaaaaccaatatataatttggctgctgattggcttacttttagatttaaagttactttgggtatcctgtaatttagttgtaacatagnnnnnnnnnnnnnnnnnnnnnnnngtgaagtagttgcaaagtgttttgcactgttgaactaagtaactgtgtaaatctgtgcaaaggtacgtatgtttatcttactcttcctataaactaaaataacattacagtttccgaatttagcatgggacatagtcagtgtttgaagtgccaacttcatcaagtaatgcatgctttattataaataaaattctagctttgaaaggcgttatgtgttgaacagtatgcttcaggggtaaatttaaaatagtctcttgaagccctagtcatggaagtaacttttattttaattgacattctcttattaaatgccctatccatcattaaaaggtttattatcagtgggcaaaacatgaaataatatgatcgaatggcaatcttgctagttgcgctacctaacagtaccatcttggatccttcaaaaccaaagacttgccccagcactgctgtggaaccacctggcttatgacccctatggatgatctttagganaagcagccctttacttttaatacaggctttaatgaacta

SEQ ID NO: 250115 - DNA, 1272 bp, Homo Sapiens
catagattcaggggtaaaaaccatgggcatatacaatgtatgtctactggtagtcattaattgttacctgcttttgttagcaaaaggttatccaggtgcctgtctccaactccaagtatataggtgatcacgcaatatccagcacagcttttaacgtaagtgtccatgacctcagcactaatcccatttggcccattctcacttggtgcatattttctaaaaaagttctgaatgcttccctctgttatcaagaacttcagccacaggaactgactggataaactgcatgaagccatgttttgtactggtggctaacaccttataaggtgtcaatttcaagtccagattttctttccgtaacagcttgtccatgagtgaaatgatttgaagaataagttgatcttgacgtaaatcatctccatgcttaaatataactggatatttgcctccatcttccgtcttaaaaaacaactgtgcaggcataagggcacttttaaacagtgtagctgtttccggaattattcctctaattttcacttggggttctaaaggcaacgggataagttccacatctgacaaattcatcttttcattatctccaagcaatgcctgtagtctctcattctttttcttacgatttccactttcgcgttgtactgccttcattagatgcaccaaccgatctacaaatgtctgttgtgcagccagcaaagaacgcataactctgacagacttatcacccttcaacaatgcttggctgaatcttctcattacattcaagtacatctcatgggtctttggatctctctgctgagtatcttgatcttcacattccactatcacataccttaaaaatagtttgagccattcatgtgatgtgaaatgaaacttagattcagtttgtaaatactcatatcatttcactaaaacagattaatttacatatgcaaaaataataaaattggagtaataaaacacattttatcatcacttttaaaagtgaaaacttaaagaggaacacatacaaccatcaataaaaggtaaactaagagtggtaatgccttaatttgtgtaatatcccaaattttctaaaacttttgccaccaaaccaagcattttctcctatttatgaggtagagtattaacatcctcagaaatcatctaagctcacatatttactgagtaactcgagaacaaaaactattattttcataatctgtgtaatactttggtattacataagactctcttattctgaaaacctctctgaag

SEQ ID NO: 250116 - DNA, 952 bp, Homo Sapiens
  misc_feature (734)..(734): n is a, c, g, or t
  misc_feature (770)..(770): n is a, c, g, or t
  misc_feature (835)..(835): n is a, c, g, or t
  misc_feature (858)..(858): n is a, c, g, or t
  misc_feature (876)..(876): n is a, c, g, or t
  misc_feature (878)..(878): n is a, c, g, or t
  misc_feature (908)..(908): n is a, c, g, or t
  misc_feature (924)..(924): n is a, c, g, or t
  misc_feature (926)..(926): n is a, c, g, or t
  misc_feature (946)..(946): n is a, c, g, or t
gtcagaagcctcctggcagacactggagccacgatgaagcccccaaggcctgtccgtacctgcagcaaagttctcgtcctgctttcactgctggccatccaccagaccactactgccgaaaagaatggcatcgacatctacagcctcaccgtggactccagggtctcatcccgatttgcccacacggtcgtcaccagccgagtggtcaatagggccaatactgtgcaggaggccaccttccagatggagctgcccaagaaagccttcatcaccaacttctccatgatcatcgatggcatgacctacccagggatcatcaaggagaaggctgaagcccaggcacagtacagcgcagcagtggccaagggaaagagcgctggcctcgtcaaggccaccgggagaaacatggagcagttccaggtgtcggtcagtgtggctcccaatgccaagatcacctttgagctggtctatgaggagctgctcaagcggcgtttgggggtgtacgagctgctgctgaaagtgcggccccagcagctggtcaagcacctgcagatggacattcacatcttcgagccccagggcatcagctttctggagacagagagcaccttcatgaccaaccagccggtagacgccctcaccacctggcagaataagaccaaggctcacatccggttcaagccaacactttcccagcagcaaaagtccccagagcagcaagaaacagtcctggncggcaacctcattatccgctatgatgtggaccgggncatctcccgggggctccattcagatcgagaacggctactttgtacactactttgcccccgagggnctaaccacaatgcccaagatgtngtctttgtcattgacaanancggctccatgagtggcaggaaatccagcanaccgggaagcctaatnangttctggatgactcagcccngagacc

SEQ ID NO: 250117 - DNA, 839 bp, Homo Sapiens
  misc_feature (116)..(116): n is a, c, g, or t
gccgccctgtgcaaagtggtcatgccatgaccttcagcggcgtctccggcatctgatctgcggagatccccagagccctcttggtaaactggccaaggtccttccaacgtggctgnagaagcggtcagtgtcacgcagaaggagccggagcccctccccacggccatcccagaacaacaggccgatggtcacgtctgggtcactaagcagcaggagacccgtcttgtccatggtcatcttcaggccgggcatcactgagaatagcgtctccttccacttgtacgcagagcttcttcggttccgagtcaccaccacgtgttcaggggatgcgtgaacccataccagggggttcttgaaggtcacttcgatccatgagaacccagccttctccctctcatactggccagtcacctcaaccccttgctcagggtctgagagcaggttcactggcccctggcggtgtctggggtccacacagagccgctccacactctgcccaggcagtggcaggatggcagacatattcatgacacgagacacagctggatcaggatttgaggtggctggtggtgctaaagcaggcaagatggccagacggcggaaggggtggtaagcagcatggtcaggaacatcaggaggtcctgggagtccaagttgcctggagctgagaaccccaggtctgaaattcatccgggagccagcagctccagcttgtctattccatcctcttcttggagaaaaggaagcctctgtgtggtcaagtcctgatcagatacaactgaactgaggcccgagggctgtcaccagccagaggagctgggcaaggcactaccctccac

SEQ ID NO: 250118 - DNA, 2070 bp, Homo Sapiens
  misc_feature (54)..(54): n is a, c, g, or t
  misc_feature (142)..(142): n is a, c, g, or t
aacccacgacggaggtgctgtgtaagcagcaaatgccaacgcggaagggtgtancagcatgtcaggacatcaggggtcctggagtcaggtgcctgagctgagacccagggtctgaattcatccgggagccagcaggtatttntgctccctggagataatatttgaagaaagtggaacctgagtggcacacctgtttctactttcgccttccatggggcttctcagcaacttgagactgctcttggtcatcgggtttggtgactaccatagatgtgagaggcgtgacaaagctgtaggcaagtgataaattcagcgcttggttccggagggcctgctgatcagcatcggatgcggagacagtttgctccagcagctgctggatagtcaggtatgcccagagcctctccatgaagttgtggaagatatacttggggctctggaactccgcctcctgctctgccacactggactccgtttggaaagtgatgttctgtgtaggcagcttcccactgactgtggctgtgagcacatcaggcccccggtcctggagccccagccaccaccatctctgagcccttgaagaggagccggaagttgttctgagtgacctcctccacggcattgcttgggtactcgaaggtcactgctgtcagcagtgggttggccacttcctggtagaagtcctggagctgcagggcagagtctgagtcctcatggatgcgccgggccaggccgccattgtccagtgccagcttctccaggaaggcatagctgacgtcgaaaccgaagcccaggcagaagaggctgtaccggccacttacagcttcccgcacgttattctggatgctcctggggttagtctcccccacagtggggtcgccatcggtgagcaggatgatgagtgagacactcccttcgggcagccgctcctcctggttgctgctgtccagcaactgcacagccatcagcattgcatcattgatgttggtccctcccagggcctggatgcccgcagcaaagctcctggccttgttcacgttctcggctgaggctggcaccagtgatggcctccactgagttgcttctgtactgaagacgatgaggttgaactggtctctggggctgaggtcatccaggatcttgattagggcttcccgggtctgctggattttcctgccactcatggagccgctcttgtcaatgacaaagaccacattcttgggcattgtggttaggccctcgggggcaaagtagtgtacaaagtagccgttctcgatctgaatggagcccccggagatggcccggtccacatcatagcggataatgaggttgccgtccaggactgtttcttgctgctctggggacttttgctgctgggaaagtgttggcttgaaccggatgtgagccttggtcttattctgccaggtggtgagggcgtctaccagctggttggtcatgaaggtgctctctgtctccagaaagctgatgccctggggctcgaagatgtgaatgtccatctgcaggtgcttgaccagctgctggggccgcactttcagcagcagctcgtacacccccaaacgccgcttgagcagctcctcatagaccagctcaaaggtgatcttggcattgggagccacactgaccgacacctggaactgctccatgtttctcccggtggccttgacgaggccagcgctctttcccttggccactctgcgctgtactgtgcctgggcttcagccttctccttgatgatccctgggtaggtcatgccatcgatgatcatggagaagttggtgatgaaggctttcttgggcagctccatctggaaggtggcctcctgcacagtattggccctattgaccactcggctggtgacgaccgtgtgggcaaatcgggatgagaccctggagtccacggtgaggctgtagatgtcgatgccattcttttcggcagtagtagtctggtggatggccagcagtgaaagcaggacgagaactttgctgcaggtacggacaggccttgggggcttcatcgtggctccagtgtctgatcccgggaattccggac

SEQ ID NO: 250119 - DNA, 1111 bp, Homo Sapiens
  misc_feature (23)..(23): n is a, c, g, or t
  misc_feature (34)..(34): n is a, c, g, or t
cggagttccagagccccaagtangtcttccacanacttcatggagaggctctgggcatacctgactatccagcagctgctgagccaaactgtctccgcatccgatgctgatcagcaggccctccggaaccaagcgctgaatttatcacttgcctacagctttgtcacgcctctcacatctatggtagtcaccaaacccgatgaccaagagcagtctcaagttgctgagaagcccatggaaggcgaaagtagaaacaggaatgtccactcagctggagctgctggctcccggatgaatttcagacctggggttctcagctccaggcaacttggactcccaggacctcctgatgttcctgaccatgctgctcaccaccccttccgccgtctggccatcttgcctgcttcagcaccaccagccacctctgatcctgatccagctgtgtatcgtgtcatgactggccagtatgagagggagaaggctgggttctcatggatcgaagtgaccttcaagaaccccctggtatgggttcacgcatcccctgaacacgtggtggtgactcggaaccgaagaagctctgcgtacaagtggaaggagacgctattctcagtgatgcccggcctgaagatgaccatggacaagacgggtctcctgctgctcagtgacccagacaaagtgaccatcggcctgttgttctgggatggccgtggggaggggctccggctccttctgcgtgacactgaccgcttctccagccacgttggagggacccttggccagttttaccaggaggtgctctggggatctccagcagcatcagatgacggcagacgcacgctgagggttcagggcaatgaccactctgccaccagagagcgcaggctggattaccaggaggggcccccgggagtggagatttcctgctggtctgtggagctgtagttctgatggaaggagctgtgcccaccctgtacacttggcttccccctgcaactgcagggccgcttctggggcctggaccaccatggggaggaagagtcccactcattacaaataaagaaaggtggtgtgagcctggcaataaaacaaaaaaacaatactcgcgactagt

SEQ ID NO: 250120 - DNA, 930 bp, Homo Sapiens
ctcacatctatggtagtcaccaaacccgatgaccaagagcagtctcaagttgctgagaagcccatggaaggcgaaagtagaaacaggaatgtccactcagctggagctgctggctcccggatgaatttcacacctggggttctcagctccaggcaacttggactcccaggacctcctgatgttcctgaccatgctgcttaccaccccttccgccgtctggccatcttgcctgcttcagcaccaccagccacctcaaatcctgatccagctgtgtctcgtgtcatgaatatgtctgccatcctgccactgcctgggcagagtgtggagcggctctgtgtggaccccagacaccgccaggggccagtgaacctgctctcagaccctgagcaaggggttgaggtgactggccagtatgagagggagaaggctgggttctcatggatcgaagtgaccttcaagaaccccctggtatgggttcacgcatcccctgaacacgtggtggtgactcggaaccgaagaagctctgcgtacaagtggaaggagacgctattctcagtgatgcccggcctgaagatgaccatggacaagacgggtctcctgctgctcagtgacccagacaaagtgaccatcggcctgttgttctgggatggccgtggggaggggctccggctccttctgcgtgacactgaccgcttctccagccacgttggagggacccttggccagttttaccaggaggtgctctggggatctccagcagcatcagatgacggcagacgcacgctgaggggtcagggcaatgaccactctgccaccagagagcgcaggctggatttaccagggagggggcccccgggaattgggagatttccttgctggtcttgtgggagctgttagttcttgatgggaaggagcttttgcccaccctgt

SEQ ID NO: 250121 - DNA, 1037 bp, Homo Sapiens
  misc_feature (1003)..(1004): n is a, c, g, or t
  misc_feature (1012)..(1012): n is a, c, g, or t
  misc_feature (1014)..(1015): n is a, c, g, or t
  misc_feature (1029)..(1029): n is a, c, g, or t
ctcacatctatggtagtcaccaaacccgatgaccaagagcagtctcaagttgctgagaagcccatggaaggcgaaagtagaaacaggaatgtccactcagctggagctgctggctcccggatgaatttcagacctggggttctcagctccaggcaacttggactcccaggacctcctgatgttcctgaccatgctgcttaccaccccttccgccgtctggccatcttgcctgcttcagcaccaccagccacctcaaatcctgatccagctgtgtctcgtgtcatgaatatgaaaatcgaagaaacaaccatgacaacccaaaccccagcccccatacaggctccctctgccatcctgccactgcctgggcagagtgtggagcggctctgtgtggaccccagacaccgccaggggccagtgaacctgctctcagaccctgagcaaggggttgaggtgactggccagtatgagagggagaaggctgggttctcatggatcgaagtgaccttcaagaaccccctggtatgggttcacgcatcccctgaacacgtggtggtgactcggaaccgaagaagctctgcgtacaagtggaaggagacgctattctcagtgatgcccggcctgaagatgaccatggacaagacgggtctcctgctgctcagtgacccagacaaagtgaccatcggcctgttgttctgggatggccgtggggaggggctccggctccttctgcgtgacactgaccgcttctccagccacgttggagggacccttggccagttttaccaggaggtgctctggggatctccagcagcatcagatgacggcagacgcacgctgagggttcaaggcaatgaccactctgccaccagagagcgcaggctggattaccaggaggggcccccgggagtggagatttcctgctggtctgtggagctgtagttctgatggaaggagctgtgcccaccctgtacacttggcttccccctgcaactgcagggcnncatctggngnntggaccaccatggngaggaaga

SEQ ID NO: 250122 - DNA, 368 bp, Homo Sapiens
aaaatgaggaaactgaaatcagaagatttaagggccttcccacccaaggccactccgtgacttcctggacaagaggggaagcccagcccactccccaccctgactactgaggttctgtgcacacgtctctaccttcctgctcaagacactgggtctttccacagcctgaagatgaccatggacaagacgggtctcctgctgctcagtgacccagacaaagtgaccatcggcctgttgttctgggatggccgtggggaggggctccggctccttctgcgtgacactgaccgcttctccagccacgttggagggacccttggtactgagcccattaccggggcccaggccttcctcagaaaccagctgtg

SEQ ID NO: 250123 - DNA, 868 bp, Homo Sapiens
ctggggtttgggttgtatggttgtttcttcgattttatattcatgacactgagacacagctggatcaggatttgaggtggctggtggtgctgaagcaggcaagatggccagacggcggaaggggtggtaagcagcatggtcaggaacatcaggaggtcctgggagtccaagttgcctggagctgagaaccccaggtctgaaattcatccgggagccagcagctccagcttgtctattccatcctcttcttggagaaaaggaagcctctgtgtggtcaagtcctgatcagatacaactgaactgaggcccgagggctgtcaccagccagaggagctgggcaaggcactaccctccacagccaggactgagcccaatctgtcaatctcccctccccccacctcctactttgtcacctggttttggtatttttgctccctggagataatatttgaagaaagtggaacctgagtggacattcctgtttctactttcgccttccatgggcttctcagcaacttgagactgctcttggtcatcgggtttggtgactaccatagatgtgagaggcgtgacaaagctgtaggcaagtgataaattcagcgcttggttccggagggcctgctgatcagcatcggatgcggagacagtttgctccagcagctgctggatagtcaggtatgcccagagcctctccatgaagttgtggaagatatacttggggctctggaactccgactcctgctctgccacactggactccgtttggaaagtgatgttctgtgtaggcagctttccactgactgtgggttgtgagcacatcaagcccccgtcccggaagcttccaaaacaccaccatcttttgagccct

SEQ ID NO: 250124 - DNA, 520 bp, Homo Sapiens
aaaatctcctgtgacaaaggccattctaggtggagtgtatgtgtggcaggatggggggctggagcttggtggcagcgctgctggttgcccgcctcctgactgccttcctgctccctttctgtttccggatgttcctgccctagagcctgcttcagcaacaccagccacctcaaatcctgatccagctgtgtctcgtgtcatgaatatgaaaatcgaaggtgcccccaaggccagaggccctgtcctaacagggggatcctgggaggggagtgacctgtcacatgtctcgatgttgaagtagtgagggaacccagccacacctagtcactgctccctccctcaacctcccactcctcaggaaggggctgcctaaacccagactttttcttcttttagaaacaaccatgacaacccaaaccccaggtaagttcccagcccccttggcccctttccacatccttgcccccagcctgcccttcctgctccaggagccgtgccccggctgtcccagcccccatac

SEQ ID NO: 250125 - DNA, 1047 bp, Homo Sapiens
ggccgacagcataatgcgagacaaggtccagctgttccccctggcatacaagcttatggagcagccccctttgaagatctccaggtggacttcacagagatgccaaagtgtggaggtaacaagtatttactagttcttgtgtgtacctactctgggcaggtggaggcttatccaacacgaactgagaaagctcatgaagtaactcgtgtgcttcttcgagatcttattcctagatttggactgcccttacggattggctcagataatgggccagcatttgtggctgacttggtacagaagacggcaaaggtattggggaacacatggaaactgcatgctgcctaccagcctcagagttccagaaaggtagagccgatgaatcggactatcaaaaatagcttagggaaagtatgtcaagaaacaggattaaaatggatacaggctctccctatggtattatttaaaattagatgtaccccttctaaaagaacaggatattccccttatgaaatattatatcataggccccctcccatattgcagggacttccaggcactccccgagagttaggtgaaattgagttacagcgacaactacaggctttaggaaaaattacacaaacaatctcagcctgggtaaatgagagatgccctgttagcttattctccccagttcaccctttctccccaggtgattgagtgtggatcaaggactggaacgtagcctctttgtgcccacagtggaaaggaccccagattgtcgtcctgaccactcccaccgctgtgaaggtagagggaatcccagcctggatccaccacagccatgtaaaacctgcagcacctgaaacctagaaggcaagaccaagcctggacaacccttgcagagtgaccctgaagaagacaagccctgctccagtcacacccggaagctgactggtccacgcatagccgaagcatgaggaagttcactgtggaactcatttttttaaattttggacttgtacagtaaggacttcaactgaccttcttcagactgaggtagggtta

SEQ ID NO: 250126 - DNA, 559 bp, Homo Sapiens
  misc_feature (294)..(405): n is a, c, g, or t
gggctgcgttgcggtgggcgcgaaaggctcgtgtgtaccgaagtataggggacctgtctgcagcaggagggactcgaaggacacggaggattatatcactgaaggcataagattcagagatgatatcatcaagttgaatcgaaaggaagggaagaagcagaattttccaagactaaatagaagactcctccagcaaagtggtgcccagcaattcaggatgagagtgcgatggggaatccaacagaattctgacacaaaaactttggagtcctcaattgttaagcatatgaagannnnnnnnnnnnnnnnnnnnnnnnnnnnnnnnnnnnnnnnnnnnnnnnnnnnnnnnnnnnnnnnnnnnnnnnnnnnnnnnnnnnnnnnnnnnnnnnnnnnnnnnnnnnnnnnagagaaagagtataaagaggttttggtaagactagtctgaatcatagaggaagagtaatgcctggaaagagacgtcctaatggagttatcactggccttgcagctaggaaaacgactggaattcgaaaaggaattagtcctatgaatcgtccac

SEQ ID NO: 250127 - DNA, 197 bp, Homo Sapiens
aggggctggcgaggggacgcgtggggactggcccctcacatgaccagaggctggaggtaccttcctctctgaggggcacccgggtgctgctggccatggccacccacgaagctctccctgccccctccgtcgcccaactcctggagctggctgccaggccagcatcaaagcctcctgcagccgggcacggtggctca

SEQ ID NO: 250128 - DNA, 787 bp, Homo Sapiens
gggtgaagtcccaggggcataaggacaaagccaaggagctgaagtcgcttgagaaagaaattgctggccaagatgaggaccacttcattacagtggacgctgtgggttgcttcgagggtgatgaagaagaggaagaggatgatgaggatgaagaagagatcgaggttgaggaggaactctgcaagcaggtgaggtccagagatatatccagagaggagtggaagggctcggagacctacagccccaatactgcatatggtgtggacttcctggtgcccgtgatgggctatatctgccgcatctgccacaagttctatcacagcaactcaggggcacagctctcccactgcaagtccctgggccactttgagaacctgcagaaatacaaggcggccaagaaccccagccccaccacccgacctgtgagccgccggtgcgcaatcaacgcccggaacgctttgacagccctgttcacctccagcggccgcccaccctcccagcccaacacccaggacaaaacacccagcaaggtgacggctcgaccctcccagcccccactacctcggcgctcaacccgcctcaaaacctgatagagggacctccctgtccctggcctgcctgggtccagatctgctaatgctttttaggagtctgcctggaaactttgacatggttcatgtttttactcaaaatccaataaaacaaggtagttgggctgggcaacccaccgtacgataggccacaaccctaaaaaaacaaagggggcataatctaccctaatgagaac

SEQ ID NO: 250129 - DNA, 825 bp, Homo Sapiens
ggtaccgaactgtgggagagcagctgttaaagtctcaatcagctgacccatttttgaaccttgagatggatgctggcatctccaacatccagcgaagtcagagctggctcagcaacattggccccacccatcatgagatagacacagcttcatcccatggaccacaaatgcaagatgccttcttgtcacctttatctaataaaggtgatgaatgcagtattggttcagccacagacttgactgaaagtagctccatggtggatggcgactggacaatggtggatgaaaatttctctacactcagtttaactcagtcagagctggagcacatttccatggagttggccagtaaagggcctcataaatcccaggtccagcttcggtatttgctacacattttcatggaggcagggtgcctagactggtgcatcgttataggcctgattcttagagaatcctcaataatcaatcagattttggttattacacagtcttcagaggtagatggagagatgttaccagaacataaagacagggctccatgcagtggaccgatgggcctctacagactgtcctggatataagccatttttaaacatcattaagccaccacttgcgaaagctcagtgagataacagaagagcagggtccagcccagatgcccttccaaccaattaactatgggggtaagactcccgaaaaggactagccccccgggcaaaaagaaagcaagggggcttcctccagccatggaaagcatccccccaggggtgaaatttgggaaacaacaaataagggtcagcccggaaaagagggaggaccccc

SEQ ID NO: 250130 - DNA, 520 bp, Homo Sapiens
ataaaagtttacaaataacggtttttattttgattttttcagtataaaaaaagttgccttgatggcatattatgatgtaatgctaattgcttgtaggatagtaaatggtcagtattgaaacctaatctctagctgccgtcttgtagatatgaacgaatgttcaccaagcatgtattttgtattttgttgcattgtacactgcaactaataagccaaggaatcgacatatattaggtgcgtgtactgtttctaaaaaccacaaactaagaatgataaattatcaatatagtttagtatttgctaattttactacactcttttgttatgtatatgtagggaagtcatagggattataaattcaatttgagtaaaatttaaaaccatatattttatgataaagggcctttaacttaagatggccaaagcactgatattatatatttgctgtaaagagaattataagagttttatttttctgatattaaaagttacttaataaagacttgtttccattaacttg

SEQ ID NO: 250131 - DNA, 587 bp, Homo Sapiens
ttcccagaagcatgaacttgcttaggtataaatgtctttttaatataccaaagattgagtcacttaatttgctcctactcagtcattcattcatttgcctgttcattctgctaacatttatttcataagtgctgtgagccagggaatattagggatataaactttgcaagaagaatgaaatatctgccctgtggagatgaattgtctagcaggaaagcaacgtgacagaagcacgactagagctctacaaagaaagatgcatttagctgagtgtcaaaaaatgaagaggagcctatggggatagaattgtggttgaaggaggtcatagttggtttaggaaacaggtcaagtgaaaagagggctggacagaacgcttgaaaagaataccttttaagggacgatggaaggagagcaagtgaagataactaaatggaagcagaggccaaagaataccaggagtgaatggtgtatcagaaatcttaaaagggaagttttgagatggagaagtgggaagaggcatcaactgctacagaaaagctacatgctttctaagatctctttctgctaaaaaaaatttctttgattcc

SEQ ID NO: 250132 - DNA, 3193 bp, Homo Sapiens
  misc_feature (139)..(139): n is a, c, g, or t
  misc_feature (1853)..(1853): n is a, c, g, or t
  misc_feature (1885)..(1885): n is a, c, g, or t
  misc_feature (3060)..(3082): n is a, c, g, or t
attgaaagagtccacttctcagtgactcctagctgggcactggatgcagttgaggattgctggtcaatatgattcttcttgctgtgctttttctctgcttcatttcctcatattcagcttctgttaaaggtcacacaanctggtctctcattaaataatgaccggctgtacaagctcacgtactccactgaagttcttcttgatcggggcaaaggaaaactgcaagacagcgtgggctaccgcatttcctccaacgtggatgtggccttactatggaggaatcctgatggtgatgatgaccagttgatccaaataacgatgaaggatgtaaatgctgaaaatgtgaatcagcagagaggagagaagagcatcttcaaaggaaaaagcccatctaaaataatgggaaaggaaaacttggaagctctgcaaagacctacgctccttcatctaacccatggaaaggtcaaagagttctactcatatcaaaatgaggcagtggccatagaaaatatcaagagaggcctggctagcctatttcagacacagttaagctctggaaccaccaatgaggtagatatctctggaaattgtaaagtgacctaccaggctcatcaagacaaagtgatcaaaattaaggccttggattcatgcaaaatagcgaggtctggatttacgaccccaaatcaggtcttgggtgtcagttcaaaagctacatctgtcaccacctataagatagaagacagctttgttatagctgtgcttgctgaagaaacacacaattttggactgaatttcctacaaaccattaaggggaaaatagtatcgaagcagaaattagagctgaagacaaccgaagcaggcccaagattgatgtctggaaagcaggctgcagccataatcaaagcagttgattcaaagtacacggccattcccattgtggggcaggtcttccagagcaagtgtaaaagatgtccttctctctcggagctctggcggtccaccaggaaatacctgcagcctgacaacctttccaaggctgaggctgtcagaaacttcctggccttcattcagcacctcaggactgcgaagaaagaagagatccttcaaatactaaagatggaaaataaggaagtattacctcagctggtggatgctgtcacctctgctcagacctcagactcattagaagccattttggactttttggatttcaaaagtgacagcagcattatcctccaggagaggtttctctatgcctgtggatttgcttctcatcccaatgaagaactcctgagagccctcattagtaagttcaaaggttctattggtagcagtgacatcagagaaactgttatgatcatcactgggacacttgtcagaaagttgtgtcagaatgaaggctgcaaactcaaagcagtagtggaagctaagaagttaatcctgggaggacttgaaaaagcagagaaaaaagaggacaccaggatgtatctgctggctttgaagaatgccctgcttccagaaggcatcccaagtcttctgaagtatgcagaagcaggagaagggcccatcagccacctggctaccactgctctccagagatatgatctccctttcataactgatgaggtgaagaagaccttaaacagaatataccaccaaaaccgtaaagttcatgaaaagactgtgcgcactgctgcagctgctatcattttaaataacaatccatcctacatggacgtcaagaacatcctgctgtctattggggagcttccccaagaaatgaataaatacatgctcgccattgtttcaagacatcctacgttttgaaatgcctgcaagcaaaattgtccgtncgagttctgaaggaaatggtcgctcacaattnatgaccgttgctccaggagtggatcttcttctgcctacactggctacatagaacgtagtccccgttcggcatctacttacagcctagacattctctactcgggttctggcattctaaggagaagtaacctgaacatctttcagtacattgggaaggctggtcttcacggtagccaggtggttattgaagcccaaggactggaagccttaatcgcagccacccctgacgagggggaggagaaccttgactcctatgctggtatgtcagccatcctctttgatgttcagctcagacctgtcacctttttcaacggatacagtgatttgatgtccaaaatgctgtcagcatctggcgaccctatcagtgtggtgaaaggacttattctgctaatagatcattctcaggaacttcagttacaatctggactaaaagccaatatagaggtccagggtggtctagctattgatatttcaggtgcaatggagtttagcttgtggtatcgtgagtctaaaacccgagtgaaaaatagggtgactgtggtaataaccactgacatcacagtggactcctcttttgtgaaagctggcctggaaaccagtacagaaacagaagcaggcttggagtttatctccacagtgcagttttctcagtacccattcttagtttgcatgcagatggacaaggatgaagctccattcaggcaatttgagaaaaagtacgaaaggctgtccacagggcagaggttatgtctctcagaaaagaaaagaaagcgtattagcaggatgtgaattcccgctccatcaagagaactcagagatgtgcaaagtggtgtttgcccctcagccggatagtacttccagcggatggttttgaaactgacctgtgatattttacttgaatttgtctccccgaaagggacacaatgtggcatgactaagtacttgctctctgagagcacagcgtttacatatttacctgtatttaagatttttgtaaaaagctacaaaaaactgcagtttgatcaaatttgggtatatgcagtatgctacccacagcgtcattttgaatcatcatgtgacgctttcaacaacgttcttagtttacttatacctctctcaaatctcatttggtacagtcagaatagttattctctaagaggaaactagtgtttgttnnnnnnnnnnnnnnnnnnnnnnncacacaaggagaacccaattttgtttcaacaatttttgatcaatgtatatgaagctcttgataggacttccttaagcatgacgggaaaaccaaacacgttccctaatcagg

SEQ ID NO: 250133 - DNA, 824 bp, Homo Sapiens
ggggactggctgtgaggcggtcctgcctcgctgccttcagtccctagtgtctgggtccccgccctccagccgcctttgagtcgtgcctgggtcctcgcccttgcctcagaaccgcgaagaaaggaagctcgcgtgtttgctagaaaacctagttgggagtgcgaggcagagaacgttcagcacctttgttcctcccgaaccctcgggacagaggcagggttctgagggcagggattccccctcgtcttggccccaccgcccgggctgggcactaaactcgggccgcggcggggcgagcgaggcgggctccggagggagctgacgcctgatgatggcgcagtccaacatgtttaccgtggctgatgtgttgagtcaagatgaactgcgcaaaaagctataccagacgtttaaggatcggggtatactggatacactcaagacacaacttcgaaaccagctaattcatgagttgatgcaccctgtattgagtggagaactgcagcctcggtccatttcagtagaagggagctcccctcttagtaggcgccctctaactctttagtggcagatcacttacaaagatgtggctatgaatattcactttctggtttctttccaaaagtggtttgccaaaagaaaggtatttactatgcaggatctattacaactcattaaatccaccctacttccgtctctacaaatcactggtttccggatctgattaagaaaatcaaagggctttcctatgcatttttttaaagattgggcagaatatcatcaagctaaagaagagtggtaatttgggaacttcggaccagttccac

SEQ ID NO: 250134 - DNA, 834 bp, Homo Sapiens
ctgcatgttctccacaccagtctgcccacaggaggcatgctccttcctctccaaagcctctggcacctgctcctctgtatcagagtcctcccgttcttcttcctcctggggctggaaaccttggtcagtagggccattctctccaccttcttcatcggcttccttgtctttttcctccacagactgctgctgctcctcagagtgttcttcaggatgctgagcagcatctccatcttggtcatcagctcctgtgtccatttcctcttccccttctgccttgtcatcttcactggggccttcctcaggctcctgtggactctgactttcgttctggtcggtctcggtctctcctctttcctcagcttcatgacctgcttcttctggtttttcttttatctccaaaggattctcttcttctccttcttcattgtcggtgtcctcaccaccattcttgtcttcactgtcaaggttcaagtcatctggaaggtccaaagcctcgggttctggcaccttttcctgattgccatggtaagggtccacctcattttcatcatagtccctctcatctatttgttcattaattttgtcttcaccttgtccaccatcatcagcttctgcttcttccttttcttccttcttatcttgctggcttttatctttgtttgaattgccactatccaagttgtcatctttagcaacaagttcagaatcttcctcatccattcctggtcctgtttcttcagttttattgtcttcttcctcctcatcttcctcctcatcatcatcaccccaaagcctctcatctagtttgtcagcttcctcaccattgagatc

SEQ ID NO: 250135 - DNA, 1953 bp, Homo Sapiens
aaagctactaaaatatcagtaattcaagcaattgggaccacaggagagaaattgccattactttcctatgaagaaagatctgccttaagaacatcacaacgatgttattaagaaatgctacagcatactttaaaaatcaaaatggtgaaacagatgcatcaggatattcttttacagataccagccctatagcagcatttcagaaggtgatttaaatctaataactgacttgggtttttattctcttctagaaatacatattacatgtatagagttaagaacatttccattataaatgggaacttttcatactgattatctaaaggtataagaaattaagtaattggatagtctagcacttcattagaaatatatccactgactccacaaaaacaacttttacatataagcaaattactaaaaatatctgaatcaggagaaatgaaataaaatacagtgaatggttttctcttttatctctaactgtaaaaatcccttttgcctatttatttgacccgtctctattcatgcaatttaatgaaccctcaaaagaatttacacatctttatacagaattcacatctacatcagtaaactaccagtccttttatattttcagtgccttatcaaaatatgtgtaacaaagttcttcattctatgaggcaggaagatgtttcctaagtacttctttggatgaagaagatatagtatctgggaaggacacctcaaattctattagaaggtcaccacgttggtcaggattttttggaaatggcagcccatatccaataattcttctcctcattccgggtttcacaatatcatttactgacataggtatgtttcttccatccagtgttggtacattaattgagcagccacacaatgcctctcgtaaactaattttagcagtataaattatatttgatccatcccttttaaattttggatgatctttgtctttaatgataaaaacaatgtctgctggaatactatttggtgtttcatctccttctcttggaaaagtaattttggtgccttctttccacccttttttaatctcaatggtaagaattttgtcctcagatctgtaactccttccatcagcgtttagcctttttcgagaaatcttcatccgtttggtacaccactatatatctcttcaagtgatactctaagttcatgaataactggaggatcttgtttgaggcgggatgggccccacagaattcctgtctcttggatatccattcaggctgaaaccaaaggcactaaaaggatcaccatctatttccatttcttcagaatctctaccaccacccattcgtcttccaaagaaaatttcaaaggggttggaccctccgaaaaatgcagcaaatgtagcatgaggatcgccatgaaaggtgtaccggaaggtacctccttgtccatcagtacctcctgctcctcctttcaacccttcctccccaaactgatcatatatttctctctttttaggatcactcaatacttcataagcttctgcgacctctttaaatttttcctctgcctgaggagatttgttcttgtccggatgaaatttgagggcttgttttcggtaagcctttttaatatcttcatctgaagctcctttctcaattcccaaaatgcaataatagtctttccccatttcgaatgccttgaaattaacttagatttccctttgtaaaagaaaacagcgtccccagtcttagcaacagattctaagaaaaataaaccaagctgggtattttaaaagttaatcagcaattcagctagctgtcttaaggcagcaagcagacagcgtctctgtattcaatccttccccaacggctcacttacagataaatatacactacacaggagacagcctccttctagatcctcccattttcactacgtgtctctgtactttctagaacagcaaatgctacc

SEQ ID NO: 250136 - DNA, 1262 bp, Homo Sapiens
  misc_feature (1045)..(1057): n is a, c, g, or t
  misc_feature (1159)..(1182): n is a, c, g, or t
ggggcctgctcttgaaaaaaccaacggtgccaccgcagtctttaacactggtattttccaataccaacaggctctagccaacatgcagttacaacagcatacagcatttctcccaccagttcccatggtgcacggtgctacgccagccactgtgtccgcagcaacaacatctgccacaagtgttcccttcgctgcaacagccacagccaaccagatacccataatatctgccgaacatctgactagccacaagtatgttacccagatgtagaattttcatcactaaacaatcatgctaaagagaaaaggacagtgtgcttggttagagtaaaggacgaggtcattagccatattgtatatatcgtcaagcaacacacacaaaagttcctcagccacaagacatccacatattgcatgttaaccagaagaaaagacaacattttccggaaatccactgcacactgttgcctatacactttgtacatttaattgatatttgtgctgaggtgatattcctgtctaaaagaacaacattgtctttcttttctagcacagagttatgcattcaaagatgcatacctagttagtttcctatatattcatgccatcttgaaaagacagactatggtgtaaccatgattctattatgtattggtacgtctgtagaccaagatataattttttaaaaataagtttatttctttcaaggtttacaaataacaaaggtgcaccttgtatttaaaattgccattatagatgagagcgtgcatgcacagtcatttttgtttaagagtaatatttttaatgtaatagattgtaagacgtggtgagggagggatctgacagagatgaatgtgccaagcaaaaccacaactgtgtatattttaaagcacatcatggctttaagtaccatgttgttaaggattctcatgaagtgccatagactgtacatcaaattagagtattatttcttcagtgttattgttttcagagccacattttgttgcatatctgctagtgctaatcagtcaaagggcaccattcnnnnnnnnnnnnngaaaccaaagctgtctcagaaatggccaatttaactttacagtaacaatagacagcacaacacaaactctctcaatacagataaactcacacatactggagnnnnnnnnnnnnnnnnnnnnnnnnaaattattttaatgcattgtagtgtaatatttatgcatactatactgtataacatgttattcaaaagggattgccatttc

SEQ ID NO: 250137 - DNA, 1888 bp, Homo Sapiens
  misc_feature (1278)..(1326): n is a, c, g, or t
  misc_feature (1602)..(1654): n is a, c, g, or t
gggcgcagaaaagggggcggcggactcggcttgttgtgttgctgcctgagtgccggagacggtcctgctgctgccgcagtcctgccagctgtccgacgatgtcgtcccacctagtcgagccgccgccgcccctgcacaacaacaacaacaactgcgaggaaaatgagcagtctctgcccccgccggccggcctcaacagttcctgggtggagctacccatgaacagcagcaatggcaatgataatggcaatgggaaaaatggggggctggaacacgtaccatcctcatcctccatccacaatggagacatggagaagattcttttggatgcacaacatgaatcaggacagagtagttccagaggcagttctcactgtgacagcccttcgccacaagaagatgggcagatcatgtttgatgtggaaatgcacaccagcagggaccatagctctcagtcagaagaagaagttgtagaaggagagaaggaagtcgaggctttgaagaaaagtgcggactgggtatcagactggtccagtagacccgaaaacattccacccaaggagttccacttcagacaccctaaacgttctgtgtctttaagcatgaggaaaagtggagccatgaagaaagggggtattttctccgcagaatttctgaaggtgttcattccatctctcttcctttctcatgttttggctttggggctaggcatctatattggaaagcgactgagcacaccctctgccagcacctactgagggaaaggaaaagcccctggaaatgcgtgtgacctgtgaagtggtgtattgtcacagtagcttatttgaacttgagaccattgtaagcatgacccaacctaccaccctgtttttacatatccaattccagtaactctcaaattcaatattttattcaaactctgttgaggcattttactaaccttataccctttttggcctgaagacattttagaatttcctaacagagtttactgttgtttagaaatttgcaagggcttcttttccgcaaatgccaccagcagattataattttgtcagcaatgctattatctctaattagtgccaccagactagacctgtatcattcatggtataaattttactcttgcaacataactaccatctctctcttaaaacgagatcaggttagcaaatgatgtaaaagaagctttattgtctagttgttttttttcccccaagacaaaggcaagtttccctaagtttgagttgatagttattaaaaagaaaacacagcagnnnnnnnnnnnnnnnnnnnnnnnnnnnnnnnnnnnnnnnnnnnnnnnnntattttaaaccagctttggagccacttttttgtctaagcctcctaatagcgtcttttaatttataggaggcaaactgtataaatgataggtatgaaatagaataagaagtaaaatacatcagcagattttcatactagtatgttgtaatgctgtcttttctatggtgtagaatctttctgataaggaacgtctcaggcttagaaatatatgaaattgctttttgagatttttgcgtgtgtgtttgatattttttacgataattagctgcatgtgannnnnnnnnnnnnnnnnnnnnnnnnnnnnnnnnnnnnnnnnnnnnnnnnnnnnctctaaaaagaggctttggaatgagttccaatttgtgatgttaatacaggcttcttgttttaggaagcatcacctatactctgaagcctttaaactctgaagagaattgtttcagagttattccaagcacttgtgcaacttggaaaaacagacttgggttgtgggaacagttgacagcgttctggtcttcccggtgtctgcgactgcaggcactgggcattttctcatgtgctg

SEQ ID NO: 250138 - DNA, 531 bp, Homo Sapiens
tcatggctccacttttcctcatgcttaaagacacagacgttttagggtgtctgaagtggaactccttgggtggaatgttttcggggtctactggaccagtctgataccccagtccgcacttttcttcaaagcctcgacttccttctctccttctacaacttcttcttctgactgagagctatggtccctgctggtgtgcatttccacatcaaacatgatctgcccatcttcttgtggcgaagggctgtcacagtgagaactgcctctggaactactctgtcctgattcatgttgtgcatccaaaagaatcttctccatgtctccattgtggatggaggatgaggatggtacgtgttccagccccccatttttcccattgccattatcattgccattgctgctgttcatgggtagctccacccaggaaccttgtgaacttgtcttttttcttttctcgtcccacgggtttctactttctagggttttcattaaaccctgttgatttgggagcagaaacaactgcacatcagc

SEQ ID NO: 250139 - DNA, 573 bp, Homo Sapiens
  misc_feature (23)..(23): n is a, c, g, or t
  misc_feature (35)..(35): n is a, c, g, or t
  misc_feature (45)..(45): n is a, c, g, or t
  misc_feature (88)..(88): n is a, c, g, or t
aaagccttaaaaaacacaaaaangtttaaaggtgncctgaaatgnaaatcccttgggtggaaaaagtttttcggggtctaatggaacnaatctgaaatacccaatcccgcaacttttccttcaaaaccctccgaacttcccttctctcccttcctaaaaacttcttccttctgaactgaaaacctaaggtcccctgctggtgtgcaatttcccacatcaaaacatgaatctgccccatccttcttgtggcgaaagggctgtcacagtgaagaactgcctctggaactactctgtcctgattcatgttgtgcatccaaaagaatcttctccatgtctccattgtggatggaggatgaggatggtacgtgttccagccccccatttttcccattgccattatcattgccattgctgctgttcatgggtagctccacccaggaactgttgaggccggccggcgggggcagagactgctcattttcctcgcagttgttgttgttgttgtgcaggggcggcggcggctcgactaggtgggacgacatcgtcggacagctggcaggatctgcggcagca

SEQ ID NO: 250140 - DNA, 793 bp, Homo Sapiens
tggtacggtccggaattttgggatatcgtcgacccacgcgtcgcgcggaacagcaggcccgagcccaccgcgccgggccccggacgccgcgcggaaaagatgaatttacaaccaattttctggattggactgatcagttcagtttgctgtgtgtttgctcaaacagatgaaaatagatgtttaaaagcaaatgccaaatcatgtggagaatgtatacaagcagggccaaattgtgggtggtgcacaaattcaacatttttacaggaaggaatgcctacttctgcacgatgtgatgatttagaagccttaaaaaagaagggttgccctccagatgacatagaaaatcccagaggctccaaagatataaagaaaaataaaaatgtaaccaaccgtagcaaaggaacagcagagaagctcaagccagaggatattactcagatccaaccacagcagttggttttgcgattaagatcaggggagccacagacatttacattaaaattcaagagagctgaagactatcccattgacctctactaccttatggacctgtcttactcaatgaaagacgatttggagaatgtaaaaagtcttggaacagatctgatgaatgaaatgaggaggattacttcggacttcagaattggatttggctcatttgtggaaaagactgtgatgccttacattagcacaacaccagctaagctcaggaacccttgcacaagtgaacagaactgcaccagcccatttagctacaaaaatgtgctcagtcttactaataaaggagaagtat

SEQ ID NO: 250141 - DNA, 1027 bp, Homo Sapiens
acagaactggctactctctgactatgggcagtgggaagtatgtggacactatggattcaaacagcaacccaatactgttggcccctgaggtgtgctgcttgcccctttatcaaatatacactgtgccctatggggagtccagtccccactctgggctgatgagaggagggtccatgttaatcactgagacccgtttaaaaacaaggctccctccaactacaactactgggaaaacttacatctcctacacacacaggatccagcgtaggtagtcgatagatggcaagactgttggggttgtctcctccagtggctagcagtgttctagaaggattcagctcgatggcatggataccacagccctgctgggttcacacctccaggctcccggtctttcagaatggggatcttggtgatctggcttgtctggacatctacgacaaatagcgtgttgcattttgtgccacacaccacttgcctatgattcaaccactgagatgcaaacactttattaagggtcccaaggtgaaactctctctccttcaggagactgggaagttgctgtgctgcataaccatgcaacactcgagagtagctggtttcattctgtagcctgacttcccggttcttcaagtagtatactaaggatctcttcacaggaggaagtcttttccttttgtgaagcgagtgatcccagccaaactgcgggccctgagcgtcgctcccagctcccggcgaggcgggcgctttccgcttcctgctaactactttccgggccatagtgggcagcgccgccgcggccccgcagccacatggggcgggggaagcgaaggatagcaggacggcgggtcatatactgggccccggggccgcgcaccttagtgcgcccggcccggaaaatggcccggacccggagcggcagcagaaaaaagataggcggaaagaaaggaaagagagaggaaggacttgagccgggaaagggaaggggaagcgagaatgagcggctttccgacggcagagcctgcaa

SEQ ID NO: 250142 - DNA, 549 bp, Homo Sapiens
gcaacatagacagcagtggtgaaacagttggatctcgagaaagatgtgtcatggcaatgctgagaaggaggatcagggatgagaagaccaacgttaggaagtctgcactgcacgtattagtgagtattctgaaacactgtgatgtctcaggcatgaaggaagacctgtggattctgcaggaccagtgtcgggaccctgcagtgtctgtccggaagcaggccctccagtctcttactgaactccttatggctcagcctagatgcgtgcagatccagaaagcctggttgcggggggtggtcccggtggtgatggactgcgagagcactgtgcaggagaaggccctggagttcctggaccagctgctgctgcagaacatccggcatcacagtcattttcactctggggacgacagccaggtcctcgcctgggcgcttcttactctcctcaccaccgaaagccaggaactgagccgatatttaaataaggcttttcatatctggtccaagaaagaaaaattctcacccacttttataaacaatgtaatatctc

SEQ ID NO: 250143 - DNA, 1169 bp, Homo Sapiens
  misc_feature (245)..(245): n is a, c, g, or t
  misc_feature (756)..(756): n is a, c, g, or t
cactagataaatgaagaaaggtttgaattcaccaatcctacttttcccactgggatgctaggctagaaaaatagtttcttatgctaataactgtgattaaagccaaagcatttacttaaataattaactttacaaataaaaaagttcaaagagaaaaaaattcatattttatatccctgttgggtaaacaaaaccaaatgtgaacgtgggcaattgggcatctttgcctgacccagcccagtggnacatggtggcctggccagcggtccaggacgttgccagaaccatagctaaggaggtgccacttgtacacagctgtcatggatctatatattgattacaacagctgcccaacatatgacaataaagtgtcctgaggaaagggtgtcttactcttattcactcaagaggcactctacaggccagcagggagggtccctgagtgtgtccctgagacttctctgccttttaggtgttggacccttggcagatgaggacctctggcctcactgggccccttgctatgagccagctccttcaaattctctcattaaagctcagtgaagcagcctttgcagagagcttcctaatccatgcacacttcacccttttggctaaagttctgcagaaatagtcaggggctccattttcaatcaagagtttgatagtcactgggaacaccgtggccttaaaatggaaacccaaggacttactgcatgcctgccgtgctactctgcctctctggctagatctganggcagccgcagctgtgatggaaggaggactccatgccctgcagcagtcacagcctttttgaggagacaaagcatttgaagagaatgtgcagcaataaacatctatcttatctggggtcagtgagggtttctggtcccttctgacaaagaaattggcagcagagattccataaaaatttcaataagttttagcattctgaaacacttcaattagtttgatgttaacgtttaagcaccttgatgaaataaatttatctcttccaaatcctagaaagaatctccctttcggcaaagattctgcagatgggttttgatgccatttttccattttgtagttagatctctatcatttatcacactgtagaccaaatggtcgttttagtgccattaaaaactgatttgcaatttgctgtt

SEQ ID NO: 250144 - DNA, 832 bp, Homo Sapiens
  misc_feature (370)..(405): n is a, c, g, or t
  misc_feature (478)..(500): n is a, c, g, or t
  misc_feature (766)..(781): n is a, c, g, or t
ttagaaacaactagtgtattgatttggggaggagagaaggggtgcagatgggaaatggggaggcaagggctctttagcgtttgccaaaaccactgccacacccctccaccccctcttgccttcctcctccacggtgggtgccagcaggctctcccctttccagtgacctccctctccctcctcccagcaccccacttggcttcaacctccagtgactgcacagagcccacccagggtctaaagctagggaaggcagctcaaactcacctttcttctcccttcttccacctcccacctcattcccatctcttgtctaaataaaatacagaaaagcaagcgcagtggttacctgggagaatggactcacccnnnnnnnnnnnnnnnnnnnnnnnnnnnnnnnnnnnncaggcagaggaacctcagccaggtgtagtggaatcacagcaggccaagcccaggggcccggctcaagctgtcnnnnnnnnnnnnnnnnnnnnnnnggaggctggcctggcagtgagcctgccgtccagaggaggctggcggagaagcctctatgcctgcctctcaggcaccatgtcacagggtccccggggtgggggcagcagccagggcagaaaagcagaagctagcctctataaaagcacccctttcccttggcttctagaggaagccctctttggttttaaggcagatgtggagtttcctggaagcagggaaaaggaagggaggagaaattaggattgagatagatgagatagatgcnnnnnnnnnnnnnnnncttgtgtttttccttcagtataaaaccactgtagaaaataacttctcttag

SEQ ID NO: 250145 - DNA, 550 bp, Homo Sapiens
gaggttcataacatctgtgccagggactacggtgtattaacttgtgagagctcaatcaagagtcactgaatgaatgaatgtctttggctgcccccacgccatgacttgtgattctcttggctgtctactgaactcatctgtgcttcgtggctaacagctgagggtctcccattcatgcattgcacaagtgtggtccccaggattttaaaggtgatggcttaacccagctctcaggaccacggtggctgctgggaagagatgggctggtcagggaggtcctggctacactgtaggttatggtatccaaactgtagtacctgatagtactggccagggatggcgctgtgtcctattcattctcctagggctgtttcagtaccgagaaactcagcatttagttggaggtctgcgtagccccttgaggtggagaaaaggactccaggctaggaagcccaattcctgcctctacttcaccttatgactttgggcaaataacctgttatcttaatatgttaactctaagatattaaatatttgattaagtttgtaa

SEQ ID NO: 250146 - DNA, 802 bp, Homo Sapiens
  misc_feature (246)..(311): n is a, c, g, or t
caccaaggcctctgtatcaaaactgcaattgggaaactgaggctcgctttctttgttaagtggaaattttaggaatggcacatggcaaaagacaagaaacctaaagggaaaacaaacgtccactgaataatccatacctgaacgttaaggcattattgcttccacttcgagaatctaaaagctcatgattctctgaatgatacttaaacattcacaaatgggagaatacaggcattgtatagtacnnnnnnnnnnnnnnnnnnnnnnnnnnnnnnnnnnnnnnnnnnnnnnnnnnnnnnnnnnnnnnnnnntaaatcctaacttttaacttctgtgcaagatatcatttatgtcttccattccagcaaaatgtctggagcttgaagtatttgggatgaactttgttcctggttgagtgggtaactagatgcattgaatagaatgagtgaacacacgccatacgctggctgaagaacttgagtaagaacatgtaagaacttctgagtgatgctctcaaattataaaagctggattttaagaaaaattgaaagactttgtcataattcacttgagagaattaagtatttaccaagagagatgagtgtacagaaaatgatccaaatttaactctgaggaattgaacagtgtctcatgctaaggaatttcttgtgtggctagtatttttatactcatttatttttttggctacgctcttaatcgtgggttttcttacaaggtgggattttggggaaaaaaatccacagtttttttagttaatgccattcggtgttaaatataactt

SEQ ID NO: 250147 - DNA, 546 bp, Homo Sapiens
  misc_feature (135)..(174): n is a, c, g, or t
  misc_feature (310)..(319): n is a, c, g, or t
cttctgaatttactatttagccacagactatgaaataattctctaaggtgaccagtaacatcagtgaaatggaaagaaaaagttaacacttcaaactttgtgtattcacctgaatagtcagggaactttcacctnnnnnnnnnnnnnnnnnnnnnnnnnnnnnnnnnnnnnnnncaaattccaaccagaagctaaatacaattggaaactggtaagcactagttttactccaaaggagtaggatcattcagatttactccaataaaagtatgcaacccttaagcaaagcttttcttcatttaaaaggagnnnnnnnnnncctatacagtagtctttccttatgttcattgcacaaaatgagttctgcttttagaactttgacactcaatggttaattttacaatttaagattccaactttataaccttttttctactccaaaacacccttgtaaagtttttctttaggatggtgtaaaaaccagcatttctgcacaattcactggaatttttttctttgtaataaaaatctcttctctgtaaaacc

SEQ ID NO: 250148 - DNA, 486 bp, Homo Sapiens
  misc_feature (36)..(36): n is a, c, g, or t
  misc_feature (61)..(61): n is a, c, g, or t
  misc_feature (82)..(82): n is a, c, g, or t
  misc_feature (87)..(95): n is a, c, g, or t
gttgaacccgggaatgggaggttgcagtgagccganggccggcccaatgcactcccacccngcccaacaagagcgagacccngcctnnnnnnnnnggaaagccttgccttccgtgtaggttttttaacttaggtccagtgcccataggactgaccaaatccataaattgaggatgctgttggtattcaaagtttttactcattacccttactcagtttgcagctgcaatgatctgtacttaacctgcttttacatattatgcttccttgacaatgggaggaattttaatggttaacttgcagaatatgacagatacttgtcttaatatcattcttcctaccataatctaattcaaaactatccagtagaactttctgaaatgattggaatgttttttatctgtgctgtccagtgtgggaagccagtaccacatgtggctgttgagcacttgcagtgtcactaatgcgtttgagggactgaattgtt

SEQ ID NO: 250149 - DNA, 1363 bp, Homo Sapiens
attgtgggagaggaatttgagtttaggatctgaatcttgtacataagaaatgaaaaggcttccctccaccccgcccccaaaatatgcccgtcctgtatccatgagagtgcatgtcggttctcagtgagggtcagagtgggggtgggggatgtaaggcctgggtccctttcagcggcctctagggcaggagcgtgcgtcttcttcccagtgcagtggtggtttgagtgctgtgggctctggtggggagggggctctgctcctcttcatttgctggtagctgggtcagggcactggcgcccagtgaggatgcccactagcattctgccccagttggttggtggggggacacctgaccactgagcctttggtaaccttattttttatagtaagtacttcttataattttctttttcacatcttattttataagaagtttaggaatatttttgcatggatcattgtaaacagcagattctttattcctgatgtctattaacatagaatgtttactgataagtactttaaattgcttcatgagcacttaatccatcttagtgtctatgtgtgggggcagacatttaccgcaggcacacagtttgtgcccctttcttcaagtctctgttggtaattccatctgtttagtggatggttggcaggattagtaggttctaacggttccaggggttcagctgaccaagtagcagagaagtcttttttcccaattgagtgctaatagattaggataaaatactcacaatgttagtgtatgcttttaaaaagccccacacaacaaaatggaaacatacatgtacaactccagtgagggctggagtacttggcacacacaggatggaggttagaagttacaggcaatctcttcaggcttgcttggtacttggcacacacaggatggtgttttaaagagtgggctgcaccccccacacgccatttacatcagcttcataaacacttttcttcctccctgtaacttaaccttttttcccttttatgaagttgagaggctttatgaaataagtttgcattgcacatccgtgcagaaatctttctgactttgaaatttttaggacgtcagctgtcagatacgaaaggtagatatcaggtaagaatctggacttaggaaatagtcacaaaactgtcataggttgtaattttatcaacattcgcttctagtaaaattaaagtcaattaagaaatagaacttgggtctgagaaatttgctttttgtgtgtttgacattcctaatttgggagtccttcagctgaattactattcttttagaagttgagacagcaggtaagcaaaggacctagttcatgtaaacatggacatcatgatggctatt

SEQ ID NO: 250150 - DNA, 1332 bp, Homo Sapiens
attaagaaatagaacttgggtcaaaattctgttacaaagcttcataatttgtcccgaagcatatggtggagcattctgagaaatttgctttttgtgtgtttgacattcctaatttgggagtccttcagctgaattactattcttttagaagttgagacagcaggtaagcaaaggacctagttcatgtaaacatggacatcatgatggctatttaaaaaatatttgttctacaccttctcccctgaggcttggggagtgtgttcagccgctgcagtttctctgctcatggaggtcttgtttggatctgtgctggcggctgagcatttagtgtgagccagtgacccatgaacttgccgctctgtgagggccagagtcagggccagtcatggtaatgggcctgaaggcacttccagaaccttttatgtctctcgtgagccatctgttaagaacgttcttcttggtgtggtttgtaggcctacctgtcgctattctgggaaaccttcttgagtgctatgcaaatgtgttcacaggcaatgggggtggtcctgagccttggggtgggcacctggtcagtgagtgtcttgcccttccccagctgggcatacagtaccttgctctttctggtggcatcatctggctgtgatgaatgaggtctaggaaataatttgcatgtgtcttgggggacacaacagtaacgagaggaaatacattattacagcaacttgcgacgtactaatacctgtcagtgttggcccccgtaaggtatgtaaggcacctgtgagtgccagtgagtgctggtgaaaggccaacatgtactagttatgtaagtattggtgtctgctttaaaaaaggagacccagacttcacctgtcctttttaaacatttgagaacagtgttactctgagcagttgggccaccttcaccttatccgacagctgactgttggatgtgtccattgtcgccagtttggctgttgcccggacaggacaggacctccattgggcgcagcagcaggtggcaggggtgtggcttgaggtgggtggcagcgtctggtcctcctctctggtgctttctgagagggtctctaaagcagagtgtggttggcctgggggaaggcagagcacgtatttctcccctctagtacctctgcatttgggagtggtccctctggctttctgaagggcagcagactcttgagtatactgcagaggacatgctttatcagtaggtccctgaggctccaggggctcaactgaccaagtaacccagaaattgggggtatgtggcctaatttgggtcggaaactgcctggttcccaaaagtttgtctct

SEQ ID NO: 250151 - DNA, 608 bp, Homo Sapiens
gggatttgaaacttggcggttaaagctccggctgggacagggcggcgggaggcccagggagaacggggaagggacatttagtttgagacggtgctgagataggatcatgaaggaagaggtgaagggaattcctgtaagagtggcgctgcgttgtcgccctctggtccccaaagagattagcgagggctgccagatgtgcctttccttcgtgcccggagagcctcaggtggtggttggtacagataaatccttcacctacgattttgtatttgatccctctactgaacaggaagaagtcttcaatacagcagtagcgccactcataaaaggtgtatttaaaggatataatgcaacggtcctggcctatgggcagactggctctggaaaaacctattcaatgggaggtgcatatactgcagagcaagagaatgaaccaacagttggggttattcctagggtaatacaactgctcttcaaagaaattgataaaaagagtgactttgaatttactctgaaagtgtcttacttagagatttacaatgaagaaattttggatcttctatgcccatctcgtgagaaagctcaaataaatatacgagaggatccta

SEQ ID NO: 250152 - DNA, 1205 bp, Homo Sapiens
  misc_feature (30)..(30): n is a, c, g, or t
gagaacaagagcgcactgcagttggagcancaagtaaaggagctgcaggagaagctgggccaggtgacggagacgctcacctcggccgagaaggagccagaggcagcagtcccagcctcagggactgggggcgagtctagcggccttatggacctcctggaggagaaggcggacctgagggagcatgtggagaaactggaacttggattcatccagtaccggagagagagatgccatcagaaagtacatcgccttctaacagagccaggggacagtgccaaagatgcgtcaccgggaggaggccatcatcaggctggcccaggacaaggaggagaggaaggtgaagctgctggagctgcaggagatggtgttgcggcttgtggcagctacaacgaggggcacggcaaattcctggccgctgcccagaaccctgctgctgaacccagtccaggagccccagccccccaggagctcggggctgccgacaagcatggtgatctttgtgaggcgagcctcaccaacagcgtggagcctgcacaaggagaagacagggagggttcttcccaggacaaccctactgcacagccagtcctgcagctccttggtgagatgcaggaccaccaggagcacccaggcttgggcagcaactgctgtgtgccatgcttttgctgggcttggctgccgagaagaaggagataaacaccaccatcatcaaagagctgctcaagaaatttttaaaaacgaaacaaagttatggggttaatctcctacacaattcatttacttcatttgaatgttagagctactcatgattatttgtgtttctaatttatagtttaagtttatttgtaaaaagttaaaagagagtgggtctctgtgcctctcactgatgttcactctggcatcctttagcatttttcttttttcatttcataattgtaggtcattagcatgcatatcgagtttgcccttacgtggtgggagttcaaacacacgacccactctttgcacctgttctcgctggtttggaataggctcccgtgcttttttaatgttattgcagcatggatgttcattacagaattcagatacttccatagctcaatatgcggattgccctcaagtgtgcacctgtttttacttttgttatatggcccctatgaagtccgacacctaagagctggtttaaggccgagaactggaag

SEQ ID NO: 250153 - DNA, 624 bp, Homo Sapiens
  misc_feature (442)..(442): n is a, c, g, or t
ggggtctcgacgtgtcaccggcggcgccgctgctgtggcaaaggaaggagctgactgggggagttcgaggcggcgggcggcggtgaccccggcctggaactgccccggtacggaagtgttccggggtccgtggggagcaggagagggaggcggcggaccgtcccgcgcggggcacgatgttgaacatgtggaaggtgcgcgagctggtggacaaagccaccaatgttgttatgaattattcagagatcgagtctaaggttcgagaggcaacgaacgatgatccttggggaccttctgggcaactcatgggagagattgccaaggctacatttatgtatgaacaatttccagaacttatgaacatgctttggtcacgaatgttaaaagacaacagaattggagaagagtttataagtcgttgctgctcctagcttacctcatnaggaatggatcagagcgtgttgttacaagtgccagagaacacatttatgatttacgatccctggagaagggtgaaagaattgcttgaatttggccaggatgaccacagcctttgtgaagagcggaagaatgcccagagaaccaagacaagtatgttgggggttccttcagggttgaagttct

SEQ ID NO: 250154 - DNA, 367 bp, Homo Sapiens
  misc_feature (26)..(26): n is a, c, g, or t
  misc_feature (46)..(46): n is a, c, g, or t
  misc_feature (50)..(58): n is a, c, g, or t
  misc_feature (101)..(101): n is a, c, g, or t
  misc_feature (126)..(126): n is a, c, g, or t
  misc_feature (137)..(156): n is a, c, g, or t
acccctctcccctgtccaacagaatnctccccatttcctgcctcanattnnnnnnnnnatctccccattgcattccatgtacctacccctcagtcctacanctcacaatcatccttctcccccaanactgctccccnnnnnnnnnnnnnnnnnnnnaggggaattaaggaaaaataagtgggggcaggtttggagagctgcttccagtggatagttgatgagaatcctgaccaaaggaaggcacccttgactgttgggatagacagatggacctatggggtgggaggtggtgtccctttcacactgtggtgtctcttggggaaggatctccccgaatctcaataaaccagtgaacagtgtgactcgg

SEQ ID NO: 250155 - DNA, 639 bp, Homo Sapiens
ggcccacagttcatccggaaatggagggggtcgctttcctcaccttcctcgctgcgcgggcggcggttggtaaccggtcagaccagcccgagagggacctggtgcctgtacccaggcttctgtcgctctgtcgcctgcgctatgccctgctgtagtcacaggagctgtagagaggaccccggtacatctgaaagccgggaaatggacccagtggcctttgaggatgtggctgtgaacttcacccaggaagagtggacattgctggatatttcccagaagaatctcttcagggaagtgatgctggaaactttcaggaacctgacctctataggaaaaaaatggagtgaccagaacattgaatatgagtaccaaaaccccagaagaagcttcaggagtctcatagaagagaaagtcaatgaaattaaagaagacagtcattgtggagaaacttttacccaggttccagatgacagactgaacttccaggagaagaaagcttctcctgaagttcatgtgacagctttgtgtgtgcagaagttggcataggtaactcatcttttaatatgagcatcagaggtgacactggacacaaggcatatgagtatcaggaatatggaccgccatataagtgtcaaccct

SEQ ID NO: 250156 - DNA, 3239 bp, Homo Sapiens
ctgttggatctcatttattatctggcaagccacaaaaatgttgttgtgttttattagacagttcaaggagaaaaaagtgttaagagctgtccaaatagatacttgcttttctaagttaagtttgttcccttcctctcttgtataggtgaggaacccaagatccaagcgttagggggcctaggaaagtcttccatagctattggcttgctgagtgatggagctcaggcttagccccagggcccctggtccagcgcaggttttccacctctggtggtgacatattgacctgttcaataggctttcttcacctagctgttccaggttcccagaggggtggatctggctcaatacaaccacttctggtgtctactttggagtggaccttctttgacatgaatgaccgtggcttggcaggaatgtagggcagtagtccctttcaccctgacgacgcacactggcaaggccacctacctgtctgctgtgataaaatccattcttgttgcagtttggcaggtaaaatttggaaatttcttctcctgatgtctcctgtgccttggctaaactctctacgactctgtagagttctattcggcagggctcctaagagaataacttgacattagcatatctaacaagacacagtgaattatcagcctagacaatgactgatggaagaggttttgtagaagcaggagtggccctacgatctggccacggggacctgggactaggtgtcatgtgatgtgctccctctgggcctctttttcccacctgcagttagtctgtcttaagttgttcagataaagaacaagaacaccattctctccctcaccaatcactctctcaacacctgcacagagacatcccctggcaagagcctcaccaacaccacaaaactcttcccaactcttcctgccacctactgaatacttttggcacccgccatctggttagaagagtgggcataactcttaattaagaatttagcagaagacatttctagattttgaataactttcctctgcaatctacaaggttcttttacataaactaaatcaagtgaggattaaggcattcatttggataatttaagaattaactttcctccatttatcgttattctcagatgaaattccaaaatgttgagaaaatggtttaatcctccctttttctgggtaggcatgtttgtggaagtaatttattttctcaaatcaaatcactccgactttgattctctgtcgccctcaagtggtagaattcaaaacagacataattaagataatggagagttgatgtttaatgagttccgagcttcagtttgggaagatgaaaattctgaaggtagatattggtagtggttgcagaataacatgcattacttattgttacttaatgccacagaaacctatgcttcaaaatagttaaaacagtacattttatgtctattttatgacaacttttttaaagggaggcaaatcatacaatgggggtgaaagcagttaggcccttgtactaagttttggaacaatgtaactcaatgttctcacaccctttagagaggagctcagagacatgaagtaacctatcgtccggaactacattttctttgcatccagtgggctcctctcctgaaagtccatgtgttcacagtttgacaaagtttaactgagaaatggccactaggttttgggggaaaagcatttctttccagggcatcaggaccaggaaggagtgggccaggtctgcttgtcacagccgactcaagctacatcctctgacaggagagtgcccaccacccacctgctgggcctcaccttccattttttgatgtcggtgacatggagagccttcgagccatcataggtactgatggcgccccaaaggatggaatgatcctcttcagaaggggccatcagatggaaattatccaggagctcctcctcagttatctccgtgctctctgggctttcagggctccctgcctctggaaaggaaacattgcagaccccatgagccctcccaaagcatctgcccctttcgggcccccaggagatcacttccttccctcaaaaccaggctgggccatgaggatggccacattccctaacctgattttcactgactctcactgtaaaggaccttgtaatggtttccaggaagagttatgtcccaacagcatgccagctctgttcctgacaatagtaagtttcagggcctggcaagggtgccccacgtttctgcttttaaagcagcaggggagcagagcaacaaatgcatttgctgaggttgagaacaaccctaaagaagccaggattagagttcagttcctaaccgcattagtagggagcctcgaaacctcagcttctccatccttaaaatggggaactaatatccctgaatgcatggtacagttcatctagaagtgcagtctagaatgcagctctcctgacccaaactactaccctcttctattgtggggcccctgccttcccacgtcctaatggacttctctgcaacaccccctccacccccatggcaagaggatcttgcagatagagtccaaaggtacatgaacagaatcagcacactggcctataagggaccccctgtggaaatccatctccttgaggatcagtgagacgactccctttcatttcctctgaagggcagagaatccgcaggaaatccctgttccctccttggaagggtcactgactctcacacactcactctaacaccctatcagggtatggaagtcctaattcctccaagaatggcacaggacaggacgtgcaagcagtccagatgaggagataggggctggagtagagaaagaggcatttcctccacttcccgctacaaacaaatgcctgcttaaatccaggaaagaacctgattgtcatgttcttagggggcaacatacacatcaaacattgtttttctatggcaatgaatggaagtgaagcttttagcctcaactctcacattatgttctgtaaacatctgggaagcacatactgtatccaggacgtatattacaaaggacattccaaacacctcctggggaggccagcaggagggattcccttcttaggccttcccggatgctccagccactggggctgcccacgtgctggcaaggagactggtgggggacccagggtggcatcccaactgcggaggcagccccaccgcctccctctactcttgctgtctgggtctctaaagatccctgggct

SEQ ID NO: 250157 - DNA, 1074 bp, Homo Sapiens
  misc_feature (792)..(858): n is a, c, g, or t
aactagtggatcccccgggctgaggaattcggcacgagggtccccgttgctcgcgtctggctggtactgctcctgctgactgtccaggtcggcgtgacagccggcgctccgtggcagtgcgcgccctgctccgccgagaagctcgcgctctgcccgccggtgtccgcctcgtgctcggaggtcacccggtccgccggctgcggctgttgcccgatgtgcgccctgcctctgggcgccgcgtgcggcgtggcgactgcacgctgcgcccggggactcagttgccgcgcgctgccgggggagcagcaacctctgcacgccctcacccgcggccaaggcgcctgcgtgcaggagtctgacgcctccgctccccatgctgcagaggcagggagccctggcccagagagcacggagataactgaggaggagctcctggataatttccatctgatggccccttctgaagaggatcattccatcctttgggacgccatcagtacctatgatggctcgaaggctctccatgtcaccaacatcaacaaggcacaggagacatcaggagaagaaatttccaaattttacctgccaaactgcaacaagaatggattttatcacagcagacagtgtgagacatccatggatggagaggcgggactctgctggtgcgtctacccttggaatgggaagaggatccctgggtctccagagatcaggggagaccccaactgccagatatattttaatgtacaaaactgaaaccagatgaaataatgttctgtcacgtgaaatatttannnnnnnnnnnnnnnnnnnnnnnnnnnnnnnnnnnnnnnnnnnnnnnnnnnnnnnnnnnnnnnnnnngtaactactttttatactccatacataacttgatatagaaagctgtttatttattcactgtaagtttattttttctacacagtaaaaacttgtactatgttaataacttgtcctatgtcaatttgtatatcatgaaacacttctcatcatattgtatgtaagtaattgcatttctgctcttccaaagctcctgcgtctgtttttaaagagcatgga

SEQ ID NO: 250158 - DNA, 1134 bp, Homo Sapiens
cataattaagataatggagagttgatgtttaatgagttccgagcttcagtttgggaagatgaaaattctgaaggtagatattggtagtggttgcagaataacatgcattacttattatgtctattttatgacaacttttttaaagggaggcaaatcatacaatgggggtgaaagcagttaggcccttgtactaagttttggaacaatgtaactcaatgttctcacaccctttagagaggagctcagagacatgaagtaacctatcgtccggaactacattttctttgcatccagtgggctcctctcctgaaagtccatgtgttcacagtttgacaaagtttaactgagaaatggccactaggttttggggaaaagcatttctttccagggcatcaggaccaggaaggagtgggccaggtctgcttgtcacagccgactcaagctacatcctctgacaggagagttcccaccacccacctgctgggcctcaccttccattttttgatgttggtgacatggagagccttcgagccatcataggtactgatggcgtcccaaaggatggaatgatcctcttcagaaggggccatcagatggaaattatccaggagctcctcctcagttatctccgtgctctctgggctttcagggctccctgcctctgcagcatggggagcggaggcgtcagactcctgcacgcaggcgccttggccgcgggtgagggcgtgcagaggttgctgctcccccgacagcgcgcggcaactgagtccccgggcgcagcgtgcagtcgccacgccgcacgcggcgcccagaggcagggcgcacatcgggcaacagccgcagccggcggaccgggtgacctccgagcacgaggcggacaccggcgggcagagcgcgagcttctcggcggagcagggcgcgcactgccacggagcgccggctgtcacgccgacctggacagtcagcaggagcagtaccagccagacgcgagcaacggggacctctgacatctccaggcgcgagcagcagacaggggccgatgctctctgggctggtggcggcgggcggtggcccaaactctgggcaagtgatggtggagcggtggccagtgctctctgggagggtggcggcggc

SEQ ID NO: 250159 - DNA, 1006 bp, Homo Sapiens
  misc_feature (409)..(438): n is a, c, g, or t
  misc_feature (442)..(442): n is a, c, g, or t
  misc_feature (881)..(881): n is a, c, g, or t
  misc_feature (883)..(883): n is a, c, g, or t
  misc_feature (888)..(888): n is a, c, g, or t
  misc_feature (905)..(905): n is a, c, g, or t
  misc_feature (910)..(910): n is a, c, g, or t
  misc_feature (912)..(913): n is a, c, g, or t
  misc_feature (918)..(920): n is a, c, g, or t
  misc_feature (922)..(922): n is a, c, g, or t
  misc_feature (924)..(924): n is a, c, g, or t
  misc_feature (936)..(939): n is a, c, g, or t
  misc_feature (963)..(963): n is a, c, g, or t
  misc_feature (973)..(975): n is a, c, g, or t
atatccagtgtacattttaacaggcggcaacatcaccacaggtagctttgattatgtaatcaacacttttaactttccctacacatgtacatcaaatgtgaatggtggaatatacaagttaaccgtcctccttcaaactagctgaaaaactactctctcttatttcattttgcattttctaggcagtatttttccatgctctttaaaaacagacgcaggagctttggaagagcagaaatgcaattacttacatacaatatgatgagaagtgtttcatgatatacaaattgacataggacaagttattaacatagtacaagtttttactgtgtagaaaaaataaacttacagtgaataaataaacagctttctatatcaagttatgtatggagtataaaaagtagttacnnnnnnnnnnnnnnnnnnnnnnnnnnnnnnaatntgcatgttctagagtataaatatactatatacttaaatatttcaggtgacagaacattatttcatctggtttcagttttgtacattaaaatacatctggcagttggggtctcccctgatctctggagacccagggatcctcttcccattccaagggtagacgcaccagcagagtccccgcctctccatccatggatgtctcacactgcaaagacaagaccaaggtcaagagcagcagatgacaagctgacagggaaagtagagccatagctggcccttttttcagtgcagccgagcactgcagagccaagccaagagtcccggctgtgaaaccagctgcccatgatgcaggcaaatctcacaccctcctggttctcatcataaaatagagacagtgaaccgagtggcatgtgcaataatgacttcccatgtgtgttaanantacantgtgtgcacagctgtcngcttnannccccnnngncnggggagccaaannnnagggaaaatgttttgtgtgtgccnaatgttaatnnntgtgaaaagggctagtcttagttttccaata

SEQ ID NO: 250160 - DNA, 1523 bp, Homo Sapiens
  misc_feature (1021)..(1048): n is a, c, g, or t
atcggccaccgccatcccatccagcgagcatctgccgccgcgccgccgccaccctcccagagagcactggccaccgctccaccatcacttgcccagagtttgggccaccgcccgccgccaccagcccagagagcatcggcccctgtctgctgctcgcgcctggagatgtcagaggtccccgttgctcgcgtctggctggtactgctcctgctgactgtccaggtcggcgtgacagccggcgctccgtggcagtgcgcgccctgctccgccgagaagctcgcgctctgcccgccggtgtccgcctcgtgctcggaggtcacccggtccgccggctgcggctgttgcccgatgtgcgccctgcctctgggcgccgcgtgcggcgtggcgactgcacgctgcgcccggggactcagttgccgcgcgctgccgggggagcagcaacctctgcacgccctcacccgcggccaaggcgcctgcgtgcaggagtctgacgcctccgctccccatgctgcagaggcagggagccctgaaagcccagagagcacggagataactgaggaggagctcctggataatttccatctgatggccccttctgaagaggatcattccatcctttgggacgccatcagtacctatgatggctcgaaggctctccatgtcaccaacatcaaaaaatggaaggagccctgccgaatagaactctacagagtcgtagagagtttagccaaggcacaggagacatcaggagaagaaatttccaaattttacctgccaaactgcaacaagaatggattttatcacagcagacagtgtgagacatccatggatggagaggcgggactctgctggtgcgtctacccttggaatgggaagaggatccctgggtctccagagatcaggggagaccccaactgccagatgtattttaatgtacaaaactgaaaccagatgaaataatgttctgtcacgtgaaatatttaagtatatagtatatttatactctagaacatgcacattnnnnnnnnnnnnnnnnnnnnnnnnnnnncagtaactactttttatactccatacataacttgatatagaaagctgtttatttattcactgtaagtttattttttctacacagtaaaaacttgtactatgttaataacttgtcctatgtcaatttgtatatcatgaaacacttctcatcatattgtatgtaagtaattgcatttctgctcttccaaagctcctgcgtctgtttttaaagagcatggaaaaatactgcctagaaaatgcaaaatgaaataagagagagtagtttttcagctagtttgaaggaggacggttaacttgtatattccaccattcacatttgatgtacatgtgtagggaaagttaaaagtgttgattacataatcaaagctacctgtggtgatgttgccacctgttaaaatgtacactggatatgttgttaaacacgtgtctataatggaaacatttacaataaatattctgcatggaaatactgttaa

SEQ ID NO: 250161 - DNA, 768 bp, Homo Sapiens
  misc_feature (450)..(523): n is a, c, g, or t
tgacacctcgtataaaaagcaggctggtacggtcggaattgtcgggatatcgtcgacccacgcgtccgctgaagaggatcattccatcctttgggacgccatcagtacctatgatggctcgaaggctctccatgtcaccaacatcaaaaaatggaaggagccctgccgaatagaactctacagagtcgtagagagtttagccaaggcacaggagacatcaggagaagaaatttccaaattttacctgccaaactgcaacaagaatggattttatcacagcagacagtgtgagacatccatggatggagaggcgggactctgctggtgcgtctacccttggaatgggaagaggatccctgggtctccagagatcaggggagaccccaactgccagatgtattttaatgtacaaaactgaaaccagatgaaataatgttctgtcacgtgaannnnnnnnnnnnnnnnnnnnnnnnnnnnnnnnnnnnnnnnnnnnnnnnnnnnnnnnnnnnnnnnnnnnnnnnnngtaactactttttatactccatacataacttgatatagaaagctgtttatttattcactgtaagtttattttttctacacagtaaaaacttgtactatgttaataacttgtcctatgtcaattgtatatcatgaaacattctcatcatatggtatgtaaagtaatgcatttctgtcttccaaagtcctggtctgtttttaaagagcatggaaaaataatgctagaaaatgcaaatgaaatagaga

SEQ ID NO: 250162 - DNA, 444 bp, Homo Sapiens
  misc_feature (149)..(215): n is a, c, g, or t
gagaagtgtttcatgatataccaaattgacataggaccaagttattaacatagtacaagtttttactgtgtagaaaaaataaacttacagtgaataaataaacagctttctatatcaagttatgtatggagtataaaaagtagttacgnnnnnnnnnnnnnnnnnnnnnnnnnnnnnnnnnnnnnnnnnnnnnnnnnnnnnnnnnnnnnnnnnnntaaatatttcacgtgacagaacattatttcatctggtttcagttttgtacattaaaatatatctggcagttggggtctcccctgatctctggagacccagggatcctcttcccattccaagggtagacgcaccagcagagtcccgcctctccatccatggatgtctcacactgtctgctgtgataaaatccattcttgttgcagtttggcaggtaaaatttggaaattt

SEQ ID NO: 250163 - DNA, 578 bp, Homo Sapiens
  misc_feature (279)..(305): n is a, c, g, or t
  misc_feature (548)..(548): n is a, c, g, or t
acatcaggagaagaaattgccaaatttacctgccaaactgcaacaagaatggattttatcacagcagacagtgtgagacatccatggatggagaggcgggactctgctggtgcgtctacccttggaatgggaagaggatccctgggtctccagagatcaggggagaccccaactgccagatgtattttaatgtacaaaactgaaaccagatgaaataatgttctgtcacgtgaaatatttaagtatatagtatatttatactctagaacatgcacattnnnnnnnnnnnnnnnnnnnnnnnnnnncagtaactactttttatactccatacataacttgatatagaaagctgtttatttattcactgtaagtttattttttctacacagtaaaaacttgtactatgttaataacttgtcctatgtcaatttgtatatcatgaaaccttctcatcatattgtatgtaagtaattgcatttctgctcttccaagctcctgcggctgtttttaaagagcatgggaaatactgcccagaaaatgccaatggnatagagagagtagttttcagccagtttgag

SEQ ID NO: 250164 - DNA, 395 bp, Homo Sapiens
gctgcaggtttctgctgtctgattacagagtcacgggagacaccgttctgtgttactgctgtggcctgcgcagcttccgtgagctgacctatcagtatcggcagaacattcctgcttccgagttgccagtggccgtaacatcccgtcctgactgctactggggccgtaactgccgcactcaggtgaaagctcaccacgccatgaaattcaatcatatctgtgaacagacaaggttcaaaaactaagcatccagaggccctgagcagctttcagcactggaggtgaagagagcgtgtttttcgcagggtctccgacaggtgctctggggtgactcttctgtggagctttaccctctgagtgagaccctccccagagccccgggggccgcagcccgt

SEQ ID NO: 250165 - DNA, 707 bp, Homo Sapiens
agcattccaacatagatggtgatctcaggccatctcagtttattgaataaaaacttagaaaacacataactgtactcattagaagcccggaccgctcacttacccgggagttgaatacaaagtatttgggttcacacttgtcatcactatgagcttcatattctactccactgtcatgaagagagcccttggcctggttctcatccagccctgcaggattgcggtgggtgtaatccatcatgaagttcacatcagaactctcagagttgttgggtaacattaccacatgcattggaagcgtgttgttgaatgacagatttccaacactgtgatccaaaacaggtagagggcagggtatttggaatttcttgtaaatcaccacactaacaaaaaacaccatgcaggtaagagaaaatccactggtatagccaagataacctaaatttttaaggagcgaaagtggaagaataattccaacagacacaaatatgatgaggtagttgccattgaggtaccattctccagtattttcttcaagtcccatgaatgctctgattacttcaggtagttcatatttaatgataaagatggtagcttgacattgctccaatgttctgcattgtaatggaaacaaaagctccaatttttcccggccatccaaatgccttttctcctaatttttcataaatcaaagaccctccttcctt

SEQ ID NO: 250166 - DNA, 803 bp, Homo Sapiens; identical to SEQ ID NO: 150624
  misc_feature (358)..(435): n is a, c, g, or t

SEQ ID NO: 250167 - DNA, 1372 bp, Homo Sapiens
  misc_feature (1265)..(1265): n is a, c, g, or t
  misc_feature (1338)..(1338): n is a, c, g, or t
  misc_feature (1350)..(1350): n is a, c, g, or t
gggcacagggcgagggcggctgcggcgcagtctgcagcatggcgtacccggggcatcctggcgccggcggcgggtactacccaggcgggtatggaggggctcccggagggcctgcgtttcccggacaaactcaggatccgctgtatggttactttgctgctgtagctggacaggatgggcagatagatgctgatgaattgcagagatgtctgacacagtctggcattgctggaggatacaaaccttttaacctggagacttgccggcttatggtttcaatgctggatagagatatgtctggcacaatgggtttcaatgaatttaaagaactctgggctgtactgaatggctggagacaacactttatcagttttgacactgacaggagtggaacagtagacccacaagaattgcagaaggccctgacaacaatgggatttaggttgagtccccaggctgtgaattcaattgcaaaacgatacagcaccaatggaaagatcaccttcgacgactacatcgcctgctgcgtcaaactgagggctcttacagacagctttcgaagacgggatactgctcagcaaggtgttgtgaatttcccatatgatgatttcattcaatgtgtcatgagtgtttaaatcaagaggaagctgcatgaatgtaatcaacattccaactggagctctcctttgcttgtcctctttgccttcggtaatatgtataaacttacatcacgactttctcttaacagctgttgtaaagtttattactttatgtacaactgaagttttgttttagttttgataataaattctttggaacttccccaaaacctacccacaaccacccccccgcccgtgcctggcttgcctccgtacactcagagaattttccctagacccattccgtttgcgcgcgccgggccccccctagggtaagtcgaaccttggtccataacttgctttccctaagaagatcccctggccgatgaactacgggctttgggattctccacccaacaaaaaaaccgtctccggggcgtttatgcacgctgttttttcacccaactcccatattggccgctccccaaccgccctttatctgcggatctatcccacccccggagcgcccatattcccatccccgcaatattcccccctttatttctccgcccccccctggcccatctcctatcggcgagaccaatgtgcgttggtaaaactctcatctagaagccactttccggccccggaccaatggggcgagtntcccctctcgtccataaattcgctgcgttggaaccgcgataacttcgcgaaatgtccgccgccacgatggtgncatatcctcgantcgcacgatccgcgtgtgcgcg

SEQ ID NO: 250168 - DNA, 408 bp, Homo Sapiens
  misc_feature (333)..(333): n is a, c, g, or t
  misc_feature (386)..(386): n is a, c, g, or t
aatcctctaaggatcaccagcttctacctataagacttcaactcaagatgcagtatggaggggctcccggagactgacgtttcccggacaaactcaggatccgctgtatggttactttgctgctgtagctggacaggatgggcagatagatgctgatgaattgcagagatgtctgacacagtctggcattgctgggaggatacaaaccttttaacctgggagacttgccggcttatggtttcaatgctggatagagatatgtctggcacaatgggtttcaatgaatttaaagaactctgggctgtactgaatggctggagacaacactttatncagttttggacactgacagggagtgggaacagtaggacccacaaggaattttncagaagggccctggacaaccat

SEQ ID NO: 250169 - DNA, 694 bp, Homo Sapiens
gggggacggaaggcggaagcagagcgtgagcgggaggcggagccgggagagcggctctcgtagctcaccctggccccaggccgggcggctcgagggggaggagttaccgccgttcttcggcatcagaacacaccatgatggctgtgacctaagaccctcaggaagccccggggtcatggcccagaagcaccccggagaaagagggttgtatggagcccaccacagtggtggtgcctccctcaggactttaggaccctccgtggaccctgaaataccttcattctcaggactcagggactcagcagggactgctcctaatggtacccgctgcctcacagagcactctggtcctaagcacacacagcacccaaacccagcccattggttggacccaagccatggccccccagggggtccaggaccacctagagatgcagaggaccctgatcagagtgagacgtcttcagaagaagaatcaggagtggaccaggaactctcaaaagaaaacgagactgggaaccagaaggatgagaactcttttctttccattccatctgcttgcaactgccagggaacacctggaattccagaaggggcttactctgagggaggaaatggttcttctagcaacttttgccaccactgtacctctccagctttggggggaagatgagttggaagaggaatatgatga

SEQ ID NO: 250170 - DNA, 895 bp, Homo Sapiens
agaggaacagcagagcatcctcttagcacaattggagagccaggatggggacatcttgaggcaacgggatgaatttgatttgctggttgctggggagatctgccggtttagtgctcttattgaagaactggaggagaagaatgagaggccagcaagggagctcctgacggtgaggcctgaaccggaaccctgccccacctgtgctgtcctgtgactcttgcatctttgtcttgcctaagccatgtctccctgactcacacatctctgtatcccagatgggaggtgggtaagaggaccagaaagtcttcaattcttagttacatgcttttccaagagttccctggtcactttttgctctctggtctccacctctccgtcccaccatctgccaaatagggaagatactttccttaaatatttcacagggcttttgtgaggatccaacagtaagatggaagtgaaagtaccactttgaaaaagtattaagtaagttgcaaaccattctctataacctaaatgtcaccaaccaccagtcaggaagtttgtcctggtctatttcacttcctcacactggaggagaggtattggggtccccacaaagtattggaaaggcagcatgacttagaatgatgctcttaggactgagaaacaggagaccttggtatgagacttactttgcctccagtgagcaggggaaggtcacttcaccatctttatctaaaaaataaaggctttgggctctgatccacagagatgggtgagtcctaatgctctgtgactctatgcatctggtatccttttcctgtccagggctagaaatatattttgtcttttccagtcataagaaaagtgggaggagcctgggcaacataacaaaaccccatctctacaaaaa

SEQ ID NO: 250171 - DNA, 1764 bp, Homo Sapiens
  misc_feature (1393)..(1393): n is a, c, g, or t
  misc_feature (1435)..(1435): n is a, c, g, or t
aatatttcttctgacagtggacagctgacatatcaccactttccttctactgtgagtgtctctggatgggcagaaaggaatggccagcccctggttatggtcatctaaggtcacctctgaaatgctgtgagcccctcttccttcctctcctctgctatttcccatctctgctgttggcaggagaatagaaccctgggctgccagagatgcaagtgtgtgacgatatgggtgctggtgcatatttagtatgtgcctgtgtccagccatgtgcatgtgtggggtgtgtgagtgtgtgacccagcccttcccccgtggccaagcagagagagtggccttgaggaagccatagcagcaggaccagcatggcctctgctgcctctgtgaccagcctggcagatgaagtcaactgccccatctgtcagggtaccctgagggagccggtcactatcgactgcggccacaacttctgccgggcctgccttacccgctactgtgagataccaggcccagacctggaggagtcccctacttgcccactctgcaaagaacccttccgtcctgggagcttccggcccaactggcagctggctaacgtggtggagaacattgagcgcctccagctggtgtccacactgggtttgggagaggaggatgtctgccaagagcacggagagaagatctacttcttctgtgaggatgatgagatgcagttgtgcgtggtgtgccgggaggctggggagcacgctacccacaccatgcgcttcctggaggatgcagcggctccctatagggaacaaatccataagtgtcttaaatgtctaagaaaagagagagaggagattcaagaaatccagtcaagagaaaataaaaggatgcaagtcctcctgactcaggtgtccaccaagagacaacaggtgatttctgagttcgcacacctgaggaagtttctagaggaacagcagagcatcctcttagcacaattggagagccaggatggggacatcttgaggcaacgggatgaatttgatttgctggttgctggggagatctgccggtttagtgctcttattgaagaactggaggagaagaatgagaggccagcaagggagctcctgacggacatcagaagcactctaataagatgtgaaaccagaaagtgccggaaaccggtggctgtgtcgccagagctgggccagaggattcgggactttccccagcaggccctcccgctgcagagggagatgaagatgtttctggaaaaactatgctttgagttggactatgagccagctcacatttctctagaccctcagacttcccaccccaagctcctcttgtccgaggaccaccaacgagctcagttctcctaacaaatgggcagaacttcaccagnacaacccccaatcgttttgaaccgggcccacctgtgtttctnggcccacactgggcatcacaggggggagacacacgtgggtgtggatggcccagggtaccctggggactcaggctgctgccagttctgctcaccaccatccgtgcttggcacagaagtagctgcatagaaagggcactggatttgaagtcagaagacctgggttcttgaaccagcctgtcaaccagttgtatgactttaaacaaggcatctcacctcttttcatcttgttttcttccaataatgttagagttcatgtaatcacattctctagaaccatttagtttgtgttaactatgaaccaagcagtgtggtggccactggtgacttga

SEQ ID NO: 250172 - DNA, 543 bp, Homo Sapiens
tgggcttcttggggcccgagggtccaagtttctccctgagctccttgagaaggagcagttacctactctcctctaagtacaggactcatatcaacccaagtaccatgtggacttgatccctggctgaatcacctggatgacttggaatagaaatgactgctttagaagatgggatggggccgggtggtaagggatagaagagaggactctcaatctactgatcaagtcctttccccaatgcccagtggatggccagggtacctggggactcaggctgctgccagttctgctcaccaccatccgtgcttggcacagaagtagctgcatagaaagggcactggatttgaagtcagaagacctgggttcttgaaccagcctgtcaaccagttgtatgactttaaacaaggcatctcacctcttttcatcttgttttcttccaataatgttagagttcatgtaatcacattctctagaaccatttagtttgtgttaactatgaaccaagcagtgtggtggccactggtgacttgaaaatatagagaa

SEQ ID NO: 250173 - DNA, 718 bp, Homo Sapiens
gagaaggaggtgggaacgccgtgaagcaagagcggtcggcagagcggggaggcgaactgcagcagagttcttgctttccggcaggtgatggcgccccccgcggcctagaggtccagcgcccgccgcgagcagcggacagtcctcctgttgtgtccgaccgagagtcctggtgactttgaacatgctggtgccgctagccaagctgtcctgcctggcatatcagtgctttcatgccttaaaaattaagaaaaattatctacctctatgtgctataagatggtcttcaacttctactgtgcctcgaattactacccattatactatttatccccgggataaggacaagagatgggaaggagtgaacatggaaaggtttgcagaagaagcagatgttgtaatagttggtgcaggccctgcagggctctctgcagctgttcgtctaaaacagttggctgtggcacatgaaaaggacatccgtgtgtgtctagtggagaaagctgcccagataggagctcatactctctcaggggcttgccttgatccaggtgcttttaaagaactcttcccagactggaaagagaagggggctccacttaacactcctgtaacagaagacagatttggaattttaacagagaaatacagaattcctggtgccaattcttccagggcttccaatgaataatcatggcaattacattgtacgcttgggacattt

SEQ ID NO: 250174 - DNA, 568 bp, Homo Sapiens
agtattcaaactcaaaatcagactccatcaaggccactgtgacccagaatatggtggccagcaggttggtgggatggtttatgtgggatgggtccgtgagactgtccttcaaggaggatgagcttctggtttttgaggagaggccttgttgggtacaagcctgaattctgtccagtgtggcacttcgaggtgggtcagaggatcggtcgatgacaccaaacttcttgggcacagagaagcttcgttgatgccggctccgttcggcagttgcggtgttgccgctggtggttcccgggttcatgtttagttgtcctgtgctctttctgcttgctgttagtttactgctggagcttaaatctggtgaggaagagcgggacaatacagttaggaggtcactgttcttcaagcagtcagacaagttatccacagccgcctccaaggttaggagcgcttccattacataaccctgaatctcatctccatgttctcctatcacctccaccaatcttgagagaaggtcagataaggcatgtgctgacagaggttgcttgagggcccggaatccccg

SEQ ID NO: 250175 - DNA, 569 bp, Homo Sapiens
  misc_feature (349)..(349): n is a, c, g, or t
  misc_feature (494)..(494): n is a, c, g, or t
  misc_feature (513)..(513): n is a, c, g, or t
agggtcttgcagaataagttaaagttcataggagtaagcatctctgatcgactttcccctcttcccccatctaactatcctactttttgccaacggcatttcccactcatttcaattatttcatgtcttctcaggtgattcctcagcatctggccaatcaattctaccctgtggtacatgtccatcccaaaggccaattcagtagttctggttggtgcctgggaatctgaaatcgtaatgtcccccaggtgatggccagacttgcacactaaaatccaacttcttgcaagggtagaacagaaatgcaaagaggttaatgactcccttgtaatcaagaagccatgtagtngcaggatatgaggggactcaactctgggagctttcttcttggataggaaaattctaatgtggaaaccagatttgcagtgattggaggtattgtcccttctcacaggtaagggacaagccttctaggtcagtggagactcagaacntctttgaggggaaggaganggaggagaagcagtgctgaaggcagtcacaaccagcaaaccacattcttgaagttt

SEQ ID NO: 250176 - DNA, 564 bp, Homo Sapiens
ggcttttttccctggcgggggatttggctagaaggctgggccggcagcggttgtgaggagttagctcgcggcattgcaggctctgagaggaggggacccggttcccgggtgagtgtccaggcatgccagcggaacggcccgcgggcagcggcggctcggaggctccagcaatggttgaacaactggacactgctgtgattaccccggccatgctagaagaggaagaacagcttgaagctgctggactagagagagagcggaagatgctggaaaaggctcgcatgtcttgggatagagagtcgacagaaattcggtaccgtagacttcaacatttgcttgaaaaaagcaatatatactccaaatttttattgacgaaaatggaacagcaacaattagaggaacagaagaagaaagaaaaattggagagaaaaaaggagtctttaaaagttaaaaagggtaaaaattcaattgatgcaagtgaaaagaagccagttatgaggaaaaaaagaggaagagaagatgaatcatacaatatttcagaggtcatgtcaaaagaggaaattt

SEQ ID NO: 250177 - DNA, 587 bp, Homo Sapiens
  misc_feature (22)..(22): n is a, c, g, or t
attctggacccaggcgtcattncagcttatgtaaggagaggatgaggccccgtgaaaaagggcactgaaaacagctcgacaaacctgacaaggggctcaacgtgcaagaacagctggaacacacccggaactgcctgctgaaaatcggagaccggatagccgagtgccttaaagcctactcagatcaggagcacatcaaactctggaggaggaacctatggatttttgtttccaagtttacagaatttgatgctcgaaaactgcataagttatacaagatggctcataagaaaaggtctcaagaagaagaggagcaaaagaagaaagacgacgtgactgggggtaagaaaccatttcgtccagaggcctcaggctccagccgggactctctgatatctcagtcccatacctcacacaaccttcaccctcagaagcctaatttgcctgcctcccatggcccacagatgcatggacacccaagagataactacaatcaccccaacaagagacacttcagtaatgcagatcgaggagactggcagagggaaagaaagttcaactatggtggtggcaacaacaatccacca

SEQ ID NO: 250178 - DNA, 874 bp, Homo Sapiens
gggtgcggctggcggacccgggctggcttgtggggaaacgaaactgagggaggaggcggcggctctggcagcggcggcgacagtgtcggcctgaccccccctccgctccccggcagctcgctctctcccctcagcttaacgatgaagaggagaactgacccagaatgcactgcccccatcaagaaacagaaaaaaagagttgcagagcttgccctgagcctcagctccacgtccgatgatgaacctccctcctctgtcagtcatggagcaaaagcatctactacaagccttagtgggtctgatagtgagaccgaggggaaacaacacagctctgactcttttgacgatgcattcaaagcagactctcttgtggaaggaacttcttctcgctattccatgtataatagcgtctcccagaagcttatggccaagatgggcttcagggaaggtgaaggattgggtaaatacagccagggtcggaaggacatcgttgaggcttccagtcagaaaggtcgaagaggcttgggtctgacactccggggctttgaccaggagctgaacgtggactggcgagatgagccagagcccagtgcttgtgagcaggtgtcatggtttccagaatgtaccactgaaattcctgacactcaggaaatgagcgattggatggtggtgggaaagagaaagatgattattgaagatgaaacagagttttgtggggaagagctgcttcacagtgtgttgcagtgtaagagcgtgtttgatgtcttggatggggaagagatgcggcgagctcggactcgggccaatccctatgagatgatccgaggagtcttctttctaaacagggcagcaatgaagatggctaacatggatt

SEQ ID NO: 250179 - DNA, 602 bp, Homo Sapiens
ggagaccagaaagcggatcccgtggagtaaaggtcgcaccgagccggcaggaggtgtgttgattctgagcagtagacaacatatttctaacattcaggattgacttctaaagacttggtacgtgaggaaaaaacacggaagaggaagaggaaagcaaaggagtcagggatggctcttcctcagggtctactgacattcagggatgtggccatagaattctctcaggaggagtggaaatgcctggaccctgctcagaggactctatacagagacgtgatgctggagaattataggaacctggtctccctggatacctcttccaaatgcatgatgaagatgttctcatcaacaggacaaggcaatacagaagtggtccacacagggacattgcaaatacatgcaagtcatcacattggagatacttgcttccaggaaattgagaaagatattcatgactttgtgtttcagtggcaagaaaatgaaacaaatggccatgaagcactcatgacaaaaaccaaaaagttgatgagtagtacagagcgacatgatcaaaggcatgctggaaacaaacctattaaaaatgagcttggatcaagctttca

SEQ ID NO: 250180 - DNA, 542 bp, Homo Sapiens
cgggggcagaccaggaagcggatcccgtggaatgacggtcacgccgcggcgggcggattgacttctaaagactgttggtacgtgagaaagaaacccagaagaggaagaggaaagcaaaggagtcagggatggctcttcctcagggtctattgacattcagggacgtggccatagaattctctcaggaggagtggaaatgcctggaccctgctcagaggactttatacagggacgtgatgctggagaattataggaacctggtctccctgggaatctgtcttcctgacctgagtattatctccatgttggagcaaaggagagagccctggactgtgcagagtgaagtgaaaatagcaaaaaattcagatgggagggagtgcatcaaaggtgtgaacacagggagcagctatgcattgggaagcaatgcagaagacaaaccaattaaaaaacaacttggagtatcctttcacttacatctgtctgaactggagctatttccagatgaaaaggtaataaatggatgtaatcaagttgaaaacttt

SEQ ID NO: 250181 - DNA, 751 bp, Homo Sapiens
  misc_feature (252)..(252): n is a, c, g, or t
  misc_feature (259)..(259): n is a, c, g, or t
  misc_feature (692)..(692): n is a, c, g, or t
agaagaggaagaggaaagaaaaggagtcagggatggcccttactcaggtaaagtgatactcctggtggattgttcttttatttcttcctgaaatgcctggcattggcattgcgaatcttctctgagtctgaagcgtcctgcctgacatgtttgctagcactcacccgcgccttccctcagtccctctcatctcgtttagattccatctcccgtgatccagtgacatgaacttggggaagaggctgcactggngcatggntcctggggaagggctcacacccagacatggatggagacggggtgagggtcctgtggtgtcagtgctgttgggcagcagggattgctcaggggccgcatctggatgcactgtcagcgctgtgtaaaccatgataacagaagctgcccatgaagtcaggtgcacacgtacctgctcactggcatagaaaagaacactaaggggaaagctttcctgcctcattggtaactgcatttgaagccgaacaagtgagtcattgggtttccgactccaaactcgtaaagactgggaacagaatggaaagcttagacactgacattggagatagatgattctttcattccatcatccattttaatgtatgacgtcaacataaatgtgtaacaagattcattaaactagtctcagaagctctatcccatggagactgtgatgntcttacaagaacctttgtccgtcgggtattgtaggtgagaatggcatataagcagaaca

SEQ ID NO: 250182 - DNA, 1010 bp, Homo Sapiens
  misc_feature (564)..(564): n is a, c, g, or t
ggcgccagccccgcctgcccttcctcgccaccgggctgctctggtctcgtcggtcccctcctccgccccgtcgtcctgactctctctccctcctttcctcagaggatgtccggcttccagatcaacctcaacccgctcaaggagccactcggcttcatcaaggtcctcgagtggattgcttctatctttgcttttgccacctgtggaggttttaagggccaaacagaaattcaagtgaattgtcctcctgcagttactgagaataaaactgttacagctacttttggttatccattcaggttgaatgaggcatcatttcagccacctccaggtgtaaacatatgtgatgtaaattggaaagattacgtcctcataggcgattactcttcttctgcacaattctatgttacctttgcagtctttgtgttcctgtactgcattgctgcccttctgctttatgttggctacacgagtctgtatctggatagtcgtaaacttcctatgatagactttgttgttacacttgttgccacttttttgtggttggtgagcacttcagcctgnggctaaagctctgacagatattaaaatagctactggtcacaatattattgatgaacttccgccttgtaagaagaaagcagtactgtgttactttggctctgtgaccagtatgggatccctaaatgtatctgtgatatttggctttctaaatatgatactctgggggaggaaatgcttggtttgtgtacaaggagaacagcctacacagtccatcaaatacatctgcccctataagcaaggaggatttcacctcctacgcaatataattaaaggggaaaatacactgaatgaagaatatgctcgacctatgacctgttgccaacccctgagaaaaatgatttgtttccaataaaaagaaggccttcctacaaaaatggggggggcccaaaacttgggtggctttttcaattcaagcctgtgcccttccctcaaaattcagatgtcac

SEQ ID NO: 250183 - DNA, 632 bp, Homo Sapiens
ggaagtaactttagaggaggatctgactctctctccctcctttcctcagaggatgtccggcttccagatcaacctcaacccgctcaaggagccactcggcttcatcaaggtcctcgagtggattgcttctatctttgcttttgccacctgtggaggttttaagggccaaacagaaattcaagtgaattgtcctcctgcagttactgagaataaaactgttacagctacttttggttatccattcaggttgaatgaggcatcatttcagccacctccaggtgtaaacatatgtgatgtaaattggaaagattacgtcctcataggcgattactcttcttctgcacaattctatgttacctttgcagtctttgtgttcctgtactgcattgctgcccttctgctttatgttggctacacgagtctgtatctggatagtcgtaaacttcctatgatagactttggtggtacacttgttgccacttttttgtggttggtgagcacttcagcctgggctaaagctctgacagatattgcagtactgggttactttggctctgtgaccaatatgggatccctaaatgtatctgggatatttggctttctaaatatgatactcttgggaggaaatgctg

SEQ ID NO: 250184 - DNA, 435 bp, Homo Sapiens
  misc_feature (31)..(31): n is a, c, g, or t
  misc_feature (87)..(87): n is a, c, g, or t
cacaaaaaagtggcaacaagtgtaacaacanagtctatcataggaagtttacgactatccagatacagactcgtgtagccaacatanagcagaagggcagcaatgcagtacaggaacacaaagactgcaaaggtaacatagaattgtgcagaagaagagtaatcgcctatgaggacgtaatctttccaatttacatcacatatgtttacacctggaggtggctgattctcagtaactgcaggaggacaattcacttgaatttctgtttggcccttaaaacctccacaggtggcaaaagcaaagatagaagcaatccactcgaggaccttgatgaagccgagtggctccttgagcgggttgaggttgatctggaagccggacatcctctgaggaaaggagggagagagagtcagatcctcctctaaagttacttcc

SEQ ID NO: 250185 - DNA, 769 bp, Homo Sapiens; identical to SEQ ID NO: 170889
  misc_feature (650)..(650): n is a, c, g, or t

SEQ ID NO: 250186 - DNA, 1405 bp, Homo Sapiens
  misc_feature (892)..(892): n is a, c, g, or t
ggctcaaagagttggccaaggcccgaggacttaagttggaagaatccctagaatacttgcaattcatgcagaatgctgaggaagaggaagcttggatcaatgaaaagaatgctttggctgtccgaggagattgtggagatacattagctgctactcagagcttgctaatgaagcatgaagctttggaaaatgactttgctgtccatgagacccgagtacaaaatgtgtgtgcacaaggagaagacatcctaaataaggtgttgcaggaggaaagtcagaacaaagagatttcttccaagatagaggctctgaatgaaaagaccccttctctggctaaggcaatagctgcttggaagttgcaattggaagacgattatgcctttcaggaattcaactggaaggctgatgtggtagaggcttggatagctgataaggaaacaagcctaaagaccaatggcaatggtgcagaccttggtgacttcctcactcttctggcaaaacaggacactctggatgccagtctgcagagtttccagcaagagagacttcctgagatcactgacctgaaggacaaactgatttctgctcaacacaaccagtctaaagccattgaagagcgttatgccgctctgctgaagcgctgggaacagttgctggaagcctcggcagtccacagacagaaattgctggagaaacagctgcctctacagaaggtttaaaaaaattatgaggcatgatcagttctctgttacctgtatattagccatgaaattcggaaacagatattgggaaactcagtttgggataatacaaaaaccttttattgcattgaaagatgttgggaagacattcttactgagcaaaaagtagattgaaaagaagctttaaaaantttttttagattgattgattagttgcataactaacttgagatggaaacccaggcaaacagtggaagaggtggatggaacaagaggatgggaggtctttgtgtatgatagaattaaaactgtcaggcaaaagtcaaggttgtccctgtacttttcctaacccaaataaaaggagcactggacaagttgtcataaaacatgttctcaccttatatcaagctttcctaggttgaagaccttgtaaaagtcatttaatatctctaaaccttgatatccccatttagaaaattgagtagcatcaccattctattctgcctttctgttatcactattaaaaaagataatgaatctaaaagtgtaataattccatattattacattattacattcatataaatatgtatggttgtaatatgtgtgtattaataatacataattatatgtacattatctgtacctaaatatatgtacattaataatacataataaatatgtatgattaatatggaaaaaaa

SEQ ID NO: 250187 - DNA, 1119 bp, Homo Sapiens
ctgccccctggagcacgaggcctggctctccgagctgtggaccgggatgtaagggaaggaacttgacatgctaatggtgaagccgggaatgccctacctggacatcgtgcgggaggtaaaggacaagcaccctgacctccctctcgccgtgtaccacgtctctggagagtttgccatgctgtggcatggagcccaggccggggcatttgatctcaaggctgccgtactggaggccatgactgccttccgcagagcaggtgctgacatcatcatcacctactacacaccgcagctgctgcagtggctgaaggaggaatgatggagacagtgccaggcccaagaactagaactttaaaacgttcccggggcctcagacaagtgaaaaccaaagtaaatgctgcttttagaactgtgccctcatgccctcttcctgctcacatgctagcggggcccagcagccctgggtggttttgccagcatgctaactcttgtaactcgcagctgcatcctatgagctctcccaagcttccccgcccctcccctgggtcagccgtgaggcccacctttgccaccctcagctctttcctctggtgtggcttcagcttgaaagcaacctggagtcgggggcacagcctttggggcctggctgggagagggtcttggagcattaggggaagaagagagcagtgggatcttggggcctgagaagccttggaacgcttctggcagcagagctgggtgtgggaatgaggcctagatcgatatccctgggttagagttgaaatttgctgcaattccactggaaggcatttcccacgaggccagaggttgccaggcttgcctgaggtctcctattctactctgaaccataaacccagagaagaattactcattaaccagcataaatactgcctgaggatcaaaactcagaggcaaagagggagttcctgactgctagaggtgccaccaccacaaacactttttattcaggagatactttttgagaatctctgctctgttcctaggttcagtgctgggtcctgggaatacagcaggacagacctcagcttatctcttcatagaaattatacaaagagaattggggagacagctaagaag

SEQ ID NO: 250188 - DNA, 582 bp, Homo Sapiens
agcttacattttaatttattgtggttgaccacattttatggctcctgagtgccttcacccagctacactttaccttgtatctataaaagtgtaatttagagtaaatacattggctgtaaagtcgagatcaggtgctctccaccaaaagcaaaacaaaactgctgaaatgtggcaaggtttctcagtgcaagcttaaatgtttaaactgttgaccatttggaaaatactggacaaaggggaaggacaaaacatcatttgcaatagttaaaggttatgcaaggcaaggcaacattatactttttgactaagttattaaaagttaaatgcatttcttctttgaagtgtggattataaaagccaatcaaagacaaaaccagtttgaaaaaccttttgtattctacaataccttttatgagtaagagtaaaacatacatttcttatttgtaattttatttaaggagaaatactctttccctttgatacgactataatattataaacagcaaggaatatgttctgctttctgcaattttagaaagtcattccattctgggtgacagaatgaggtaagactgtctcttt

SEQ ID NO: 250189 - DNA, 959 bp, Homo Sapiens
cgaaggtcgccgagccccccacgccgctcttcttagaagtgtgcaaccttgcaccagtagtggacttacacataggctccgttaggacctggcttatgtgctcggcttgtggcttagacgctgccgtgccccagtggactcactgtgcctccccccacgacggacggaaatgggcccctccaggacaggcggcgcatgcgccttggggcccgcgggcggcgggggcggggagccgggagcacggtggagcggtggagggcgtcactgggtttcggcgtctggcaagcggttcagctgtctgctccctagcagccggccttcgggtcgggcgtctccgccggctactgccgcttcagttctcccggtgtggccacgagtcgggttgcactgctgtgatccatcctcatctcctaaagatgcatcctgacttatctccacacttgcacactgaagaatgcaacgtcttgattaacttgcttaaggaatgtcacaaaaatcacaacattctgaaattttttggttattgtaatgatgttgatcgggagttgagaaaatgcctgaagaatgagtacatagaaaacaggaccaagagcagggagcatggcattgcaatgcgaaagaaactttttaatcctccagaggaatccgaaaaataaattgtattttcactcgatgccttggctgagagaagacctaaagactctgggttgatacctgaaagaatcctgtcttatttggtctccataatcctttgaatggaaagtgacctgtgagagattgaaccatggagaaatatgaaaaccctggattctgagtatttgttgggcagggcgtttagtactggctcccctttaccagcaaacctgacttcaccatgtttattccctttgcctacaaccagttaatatctgagtaacttatctccttcaataaaataatttaaaattacctaaggaaca

SEQ ID NO: 250190 - DNA, 1106 bp, Homo Sapiens; identical to SEQ ID NO: 176833
  misc_feature (602)..(603): n is a, c, g, or t
  misc_feature (684)..(859): n is a, c, g, or t
  misc_feature (875)..(889): n is a, c, g, or t

SEQ ID NO: 250191 - DNA, 779 bp, Homo Sapiens
  misc_feature (291)..(351): n is a, c, g, or t
gggggttcagctgtctgctccctagcagccggccttcgggtcgggcgtctccgccggctactgccgcttcagttctcccggtgtggccacgagtcgggttgcactgctgtgatccatcctcatctcctaaagatgcatcctgacttatctccacacttgcacactgaagaatgcaacgtcttgattaacttgcttaaggaatgtcacaaaaatcacaacattctgaaattttttggttattgtaatgatgttgatcgggagttgagaaaatgcctgaagaatgaggttctnnnnnnnnnnnnnnnnnnnnnnnnnnnnnnnnnnnnnnnnnnnnnnnnnnnnnnnnnnnnnaagtgatcctcccacctcaaccccctgagtagcctaggacgacagtaccgtagaaaacaggacccaagagcagggagcatggcattgcaatgcgaaagaaactttttaatccctccagaggaatccgaaaaataaattgtattttcactcgatgccttggctgagagaagacctaaagactctgggttgatacctgaaagaatcctgtcttatttggtctccataatcctttgaatggaaagtgacctgtgagagattgaaccatggagaaatatgaaaaccctggattctgagtatttgttgggcagggcgtttagtactgtctcccctttaccagcaaacctgacttcaccatgtttattccctttgcctacaaccagttaatatctgagtaacttatctccttcaataaaataatttaaataaat

SEQ ID NO: 250192 - DNA, 501 bp, Homo Sapiens
  misc_feature (462)..(462): n is a, c, g, or t
  misc_feature (468)..(468): n is a, c, g, or t
tttcggcgtctggcaagcggttcagctgtctgctccctagcagccggccttcgggtcgggcgtctccgcggctactgccattcagttctcccggtgtggccacgagtcgggttgcactgctgtgatccatcctcatctcctaaagatgcatcctgacttatctccacacttgcacactgaagaatgcaacgtcttgattaacttgcttaaggaatgtcacaaaaatcacaacattctgaaattttttggttattgtaatgatgttgatcgggagttgagaaaatgcctgaagaatgaggttcttgctctgtcacctaagctggagtgcagtagggtgatcggtaactccacggaagccttcaaacttcaagtgatcctcccacctcaagcctcctggagtaagctaaggacgacagtacgtaggaaaacaggacccaagagcatggaggcatggcaattgcnaatgcnaaaggaaacttttttaatccctccagagggaat

SEQ ID NO: 250193 - DNA, 1718 bp, Homo Sapiens
cagcgctcggcatggcggagccagatctggagtgcgagcagatccgtctgaagtgtattcctgggacgatgccggagtgtgaaggagtttgagaagctgaaccgcattggagagggtacctacggcattgtgtatcgggcccgggacacccagacagatgagattgtcgcactgaagaaggtgcggatggacaaggagaaggatggcatccccatcagcagcttgcgggagatcacgctgctgctccgcctgcgtcatccgaacatcgtggagctgaaggaggtggttgtggggaaccacctggagagcatcttcctggtgatgggttactgtgagcaggacctggccagcctcctggagaatatgccaacacccttctcggaggctcaggtcaagtgcatcgtgctgcaggtgctccggggcctccagtatctgcacaggaacttcattatccacagggacctgaaggtttccaacttgctcatgaccgacaagggttgtgtgaagacagcggatttcggcctggcccgggcctatggtgtcccagtaaagccaatgacccccaaggtggtcactctctggtaccgagcccctgaactgctgttgggaaccaccacgcagaccaccagcatcgacatgtgggctgtgggctgcatactggccgagctgctggcgcacaggcctcttctccccggcacttccgagatccaccagatcgacttgatcgtgcagctgctgggcacgcccagtggagaacatctggccgggcttttccaagctgccactggtcggccagtacagcctccggaagcagccctacaacaacctgaagcacaagttcccatggctgtcggaggccgggctgcgctgctgcacttcctgttcatgtacgaccctaagaaaagggcgacggccggggactgcctggagagctcctatttcaaggagaagcccctaccctgtgagccggagctcatgccgaccattccccaccaccgcaacaagcgggccgccccagccacctccgagggccagagcaagcgctgtaaaccctgacggtgggcctggcacacgcctgtattcccacaccaggtcttccgatcagtggtgtctgtgaagggtgccgcgagccaggctgaccaggcgcccgggatccagctcatccccttggctgggaacatcctccactgacttcctcccactgtctgccctgaacccactgctgcccccagaaaaaggccgggtgacaccggggggctcccagcccgtgcaccctggaagggcaggtctggcggctccatccgtggctgcaggggtctcatgtggtcctcctcgctatgttggaaatgtgcaaccactgcttcttgggaggagtggtgggtgcagtccccccgctgtctttgagttgtggtggacgctggcctgggatgagagggcccagaagaccttcgtatcccctctcagatcgcccggggctgtcccgtgcatgggttggctgtggggaccccaggtgggcctggcaggactccagatgaggacaagagggacaaggtatggggtgggagccacaattgaggataccccgagactaccaggagagccctgggctggaggctgagctgcatccctgctccccacatggaggacccaacaggaggccgtggctctgatgctgagcgaagctataggctcttgttggataaaagcttttttaagag

SEQ ID NO: 250194 - DNA, 676 bp, Homo Sapiens
  misc_feature (125)..(189): n is a, c, g, or t
cccagcactttgggaggccaagatggacagattgcttgagctcgagttcaagatgagcccgggcaacatagtgagaatccatctctacaaaaaatataaaaattagccaggcatagtggtaggtnnnnnnnnnnnnnnnnnnnnnnnnnnnnnnnnnnnnnnnnnnnnnnnnnnnnnnnnnnnnnnnnntgcagtaagccttgatggtgcaactacactccatcccaggtgacagagcaagaccctgtctcaggaaggaaaaaaatatcagaaaggttgggaaaaaacatccactgctatagagtaaaaccatgatttcaatggaacttcaaatggaattcagattttaattagccaggaaaccaaatcaatgactctttagtttatgaacacttcactatgaaatacagtttaccagcagttacagagatactgccattatctgctgccactgtattttgttttgaacaacgtattttgtttttaaattatacatgggaaaataacataaaacaatactgctctataagatacaagggacctctgagacctgggacaaaagaggatgtgaatgccaattcctagtttaaacaaaacaaattaaaccatggaagtcctagaggaaaatatggggaaacttactaacatttacaatcttcaaatgagctttcttaag

SEQ ID NO: 250195 - DNA, 1420 bp, Homo Sapiens
  misc_feature (1045)..(1045): n is a, c, g, or t
gggtgagtttaaatgagcaggggctggccgggccggagccgctacagggggggcctgaggcactgcagaaagtgggcctgagcctcgaggatgacggtgctgcaggaacccgtccaggctgctatatggcaagcactaaaccactatgcttaccgagatgcggttttcctcgcagaacgcctttatgcagaagcaagacagatcggcttgccaaaggatcagaatgttaccaaaagagccttagtttaaatcctttcctctggtctccctttgaatcattatgtgaaataggtgaaaagccagatcctgaccaaacatttaaattcacatctttacagaactttagcaactgtctgcccaactcttgcacaacacaagtacctaatcatagtttatctcacagacagcctgagacagttcttacggaaacaccccaggacacaattgaattaaacagattgaatttagaatcttccaattcaaagtactccttgaatacagattcctcagtgtcttatattgattcagctgtaatttcacctgatactgtcccactgggaacatggaacttccatattatctaaacaggttcaaaataaaccaaaaactggtcgaagtttattaggaggaccagcagctcttagtccattaaccccaagttttgggattttgccattagaaaccccaagtcctggagatggatcctatttacaaaactacactaatacacctcctgtaattgatgtgccatccaccggagccccttcaaaaaagtctgttgccagaatcggccaaactggaacaaagtctgtcttctcacagagtggaaatagccgagaggtaactccaattcttgcacaaacacaaagttctggtccacaaacaagtacaacacctcaggtattgagccccactattacatctcccccaaacgcactgcctcgaagaagttcacgactctttactagtgacagctccacaaccaaggagaatagcaaaaaattaaaaatgaagtttccacctaaaatcccaaacagaagaaccnaaagtaaaactaataaaggagcaataactccaccgaacataagtgatagcctggaagtgacaaaattggactcttccgtcatttcagaagggaaaatagccgcaatcgcgcctcagattcaggcttttaatctacaaaaagcagcagcggaaggcttgatgagccttcttcgtgaaagggggaaaggttatttagctttgtgttcttaccacggcaaagaagctatcagcatcttgagccatctagcttctcaccactgcaataccggttgggtactgtgccaaatcggaagggcctattgtaaactttcagagtccacgcaagctgaaagacaattctcagaggttaggaggattgagaattacagagtcgaag

SEQ ID NO: 250196 - DNA, 662 bp, Homo Sapiens
tagcaggggctggccgggccggagccgctacagggggggcctgaggcactgcagaaagtgggcctgagctcgaggatgacggtgctgcaggaacccgtccaggctgctatatggcaagcactaaaccactatgcttaccgagatgcggttttcctcgcagaacgcctttatgcagaagtacactcagaagaagccttgtttttactgggcaacctgttattaccgctcaggaaaggcatataaagcatatagactcttgaaaggacacagttgtactacaccgcaatgcaaatacctgcttgcaaaatgttgtgttgatctcagcaagcttgcagaaggggaacaaatcttatctggtggagtgtttaataagcagaaaagccatgatgatattgttactgagtttggtgattcagcttgctttactctttcattgttgggacatgtatattgcaagacagatcggcttgccaaaggatcagaatgttaccaaaagagccttagtttaaatcctttcctctggtctccctttgaatcattatgtgaaataggtgaaaagccagatcctgaccaaacatttaaattcacatctttacagaactttagcaactgtctgcccaactcttgcacaacacaagtacctaatcatagtttatctcaca

SEQ ID NO: 250197 - DNA, 794 bp, Homo Sapiens
  misc_feature (32)..(32): n is a, c, g, or t
  misc_feature (49)..(49): n is a, c, g, or t
  misc_feature (57)..(57): n is a, c, g, or t
  misc_feature (68)..(68): n is a, c, g, or t
gcccagtgcccaagcctaaaaattaacccctncactaaagggaaataangcttgcgnccgcttaattnaaaaaagaaatattatataatatttaccaaaggactaattaacttcacaaaaatcatagatggccctctaaattaaaacattttaaaattcgaaatagtctctttgttaacttattaggaatggagtcatcaatgaagagaaatgttagcaggcgaagcattaagtaaatgtgacatacagaaatctttaaattaccttggttgtggagctgtcactagtaaagagtcgtgaacttcttcgaggcagtgcgtttgggggagatgtaatagtggggctcaatacctgaggtgttgtacttgtttgtggaccagaactttgtgtttgtgcaagaattggagttacctctcggctatttccactctgtgagaagacagactttgttccagtttggccgattctggcaacagactgtaaaacacgaaaagtctttttggaaggggctccggtggatggcacatcaattacaggaggtgtattagtgtagttttgtaaataggatccatctccaggacttggggtttctaatggcaaaatcccaaaacttggggttaatggactaagagctgctggtcctcctaataaacttcgaccagtttttggtttattttgaacctgtttagataatatggaagtttctgttcccagtgggacagtatcaggtgagattacagctgaatcaatataagacactgaggaatctgtattcgaggagtactttgaattgg

SEQ ID NO: 250198 - DNA, 1297 bp, Homo Sapiens
  misc_feature (236)..(236): n is a, c, g, or t
atatacctttcatccttagatttaatatttctaatttgtgatatttctctgaaaatcaatcaagtacacagttctagtgaaatataaactgaattttgcttcattaactaaattaaaatacgtcaaacatggttaaatcttatattctgtcctttcagataatttacattttattgataaatgtagattagccacaccatgagttatatcctaacccattttaccctaaatgtagnaaaagctgaaagttggactggatagttaaaaagctgttatatagttatctctttcagaaacctatgatgccttttcttagacataagtatggaaaaagaattctgttcattttcatgatatatcaacaaaaattacatgacttatgtcgatttctgtcagccattctgaaaccaaatttccatttgttctacccactaaagagcacacattttcctttagaatcacggccacagtctggaaacataattgagaaaggctaactctgggccaataaaatattcaaggaaagacgcaacacaaaacagggaggtgaataaagcaagtatgttgtaaaatcctcccttgtaaacacatctgtcctttcctcccatatttggaagtgttacccaagttttaaaaattatcatcaagacattttacaccacaagtcacataaaattaggtctacttaagccagataacctatagctgttaaagaattatattatcctgttcataagatgagaggtagtgacattttattctctcaatgctgagctaaaaattccacacatctggcacatgggttacaagggggaaaagcacagaagcaccattgcccactcctcaggttttggtatttcaagtcacccataacttcatttgctattggcagctgacaatcactgctgtgttaacactgaagcagtgggtattagtgctattcatcatatagtagtggtgggtctccatcatctttcaaaaatgaagcagctttccttccattcttctgaacgtgatcttcattcattttctccaaagcttctatctcagctaaaaaatcagcttcattatctgctgtgatgtttaagcctgaaacagcattgaagagttctcgttcactaagggcttccttgactcctcctttctggaaaaactgcgagacattcctgcagtcccggaacaagaactccaggccgtgagggtgggtaggttctactgactgactgacatcgatcaaccagacctttccagcatgccacagcatgttatactcactgaggtcagcatggacaagcgt

SEQ ID NO: 250199 - DNA, 883 bp, Homo Sapiens
gaacaatggaggagcgaggcggaaaatttcgaatgtggcggcggtagttccaggcgacggcggacggtggtacggtcctggagggcccagtgcgcggggctagccgtggctggagagcttcgaagagccttgaaatgtgaggaggaggaagatagctgttgcagaagtagtggccaaggtatcgttctggacgcgcctgcggcaggagggtcgccgcgtccacttccgccagccccacctccccccggccttcctggagtccctgaaagaggaagaagtaggttttaaggcaaaagatggccaaggaaagatgcctgaaaaagtcctttcaagatagtcttgaagacataaagaagcgaatgaaagagaaaaggaataaaaacttggcagagattggcaaacgcaggtcttttatagctgcaccatgccaaataatcaccaacacttctacactgctgaaaaattaccaagacaacaacaaaatgttagttttagctttggaaaatgaaaaatccaaagtgaaagaagcccaagatatcatcctacagctgagaaaagaatgttactatctcacatgtcagctatatgcattgaaaagaaaacttacatcacaacaaacagtagaacctgctcagaaccaggaaatattgttcctctggaatggaccccaatagtgatggacgctcccgaaatttattttggaaggatttaccgcaaattcctcttgagaaactggacctcccggacaagggaatcttttccaatagaaaaaccaatccctctattccttccgaaccccctgggaggtggtttttgattcaggggaaactaaggcccccgtggaaagggcctaccctaaaactggatctggttcctaaccaaa

SEQ ID NO: 250200 - DNA, 2115 bp, Homo Sapiens
cgggggggctgcaaagctgaagctttggtttctgctctaaatgaaggacttttccaggacccaaggccacacactggaagtcttgcagctgaagggaggcactccttggcctccgcagccgatcacatgaaggtggtgccaagtctcctgctctccgtcctcctggcacaggtgtggctggtacccggcttggcccccagtcctcagtcgccagagaccccagcccctcagaaccagaccagcagggtagtgcaggctcccaaggaggaagaggaagatgagcaggaggccagcgaggagaaggccagtgaggaagagaaagcctggctgatggccagcaggcagcagcttgccaaggagacttcaaacttcggattcagcctgctgcgaaagatctccatgaggcacgatggcaacatggtcttctctccatttggcatgtccttggccatgacaggcttgatgctgggggccacagggccgactgaaacccagatcaagagagggctccacttgcaggccctgaagcccaccaagcccgggctcctgccttccctctttaagggactcagagagaccctctcccgcaacctggaactgggcctcacacaggggagttttgccttcatccacaaggattttgatgtcaaagagactttcttcaatttatccaagaggtattttgatacagagtgcgtgcctatgaattttcgcaatgcctcacaggccaaaaggctcatgaatcattacattaacaaagagactcgggggaaaattcccaaactgtttgatgagattaatcctgaaaccaaattaattcttgtggattacatcttgttcaaagggaaatggttgaccccatttgaccctgtcttcaccgaagtcgacactttccacctggacaagtacaagaccattaaggtgcccatgatgtacggtgcaggcaagtttgcctccacctttgacaagaattttcgttgtcatgtcctcaaactgccctaccaaggaaatgccaccatgctggtggtcctcatggagaaaatgggtgaccacctcgcccttgaagactacctgaccacagacttggtggagacatggctcagaaacatgaaaaccagaaacatggaagttttctttccgaagttcaagctagatcagaagtatgagatgcatgagctgcttaggcagatgggaatcagaagaatcttctcaccctttgctgaccttagtgaactctcagctactggaagaaatctccaagtatccagggttttacaaagaacagtgattgaagttgatgaaaggggcactgaggcagtggcaggaatcttgtcagaaattactgcttattccatgcctcctgtcatcaaagtggaccggccatttcatttcatgatctatgaagaaacctctggaatgcttctgtttctgggcagggtggtgaatccgactctcctataattcaggacacgcataagcacttcgtgctgtagtagatgctgaatctgaggtatcaaacacacacaggataccagcaatggatggcaggggagagtgttccttttgttcttaactagtttagggtgttctcaaataaatacagtagtccccacttatctgagggggatacattcaaagacccccagcagatgcctgaaacggtggacagtgctgaaccttatatatattttttcctacacatacatacctatgataaagtttaatttataaattaggcacagtaagagattaacaataataacaacattaagtaaaatgagttacttgaacgcaagcactgcaataccataacagtcaaactgattatagagaaggctactaagtgactcatgggcgaggagcatagacagtgtggagacattgggcaaggggagaattcacatcctgggtgggacagagcaggacaatgcaagattccatcccactactcagaatggcatgctgcttaagacttttagattgtttatttctggaatttttcatttaatgtttttggaccatggttgaccatggttaactgagactgcagaaagcaaaaccatggataagggaggactactacaaaagcattaaattgatacatattttttaaaa

SEQ ID NO: 250201 - DNA, 643 bp, Homo Sapiens
tgaggggctgggttctctggcgactgaggactgggggccaagccgggtaccagccacacctgtgccaggaggacggagagcaggagacttggcaccaccttcatgtgatcggctgcggaggccaaggagtgcctcccttcagctgcaagacttccttcctgttcttggagcttgtcctgcagtctgcagtggtagcccagtaattcctgggtgctcctggacatatatcgcctaaggtctttgtaaagtctttgctcatctacccaaccctttggagtctaggccaggagctcagggggtgctcctggactaggacaccatccagcatggtgaggacgcaccttcctagacagaacctgggcagtaaggaatcaccagctcacctgccacttctcagccctgggacagcacacatccctgcctcccctcagccctgggaaggggagacctgcttactccggcagtgagtggtggtgggtgaaatatcaagcctttcaagcctctttcccttggcctccttcctgcagaggagccccttgtgtctataattcgcctcttaccccactccagctcccaatctgtatgtacagtccctgtggagtgtaggatggaggtctttgcactgctcagccacacagccctc

SEQ ID NO: 250202 - DNA, 1821 bp, Homo Sapiens
ggcccctaggattttgttgagcatgtacactcttcttctgaattggccacccagaaaccaattattgaatcagaacaacacaaattggtttgtgcttgagccaggtttattttattgttttcgatctgcatgcacaatatgaaatcataaaagcaacaaacatcaccacaccaacactgagtaagatcatttctatcaggccaaggaggtttatttttccagttacttgacttctgaacatgtttgccttctcatcaccaatggtcccagtctcattaagccaaagaataggcacaatatagttcctcttcagattctttaatacttgaattttttctgatggcttgaccaataggttgacctgcagccgttttgcaaattgtaaagtgaatccagttataggttcaatatccaagtatgtcctatgttcttcttcatttgggtttaatccatcaataggttctgaaacatcaggacttgcatacagaaaatgaggaagtgaaatgtacacaggtctcccttctttgcatttgctgatgtctagcacaccatatgatgtacaattttttgagataattttttctgtgcagaaacaatagttgtctgggttttcaactggagaggcaaaggccttggatggaagaacaaatctatacacagggattcctttcagattaacgtcggattcaaatacagcatagattgacctgcaaatatcagaagaaaagaactgcaatacctggcttttctcaacaaaaggtggaaatgaggctgcatctgtaccattaatcatgtcgcagtgactttcccaataggacagattccttttacctttatatgtgtcgattatggcaactttacttatgttatcttttccattgaaaactttataaactccatctgcagtattgttgtaaggataaaacagaccaactgtggtagtaacagggtacggaaccaaactcaaaaatggatccctatagccccataacagttctctcaaagttctgacttggaacatagaagattttgacttgttaataagtgaattgaggatcatttgaacaaattgattttgatagatatgggatgcagctgccacagccagattgagaactgtgaagttgtcagcctctgttccaactgatagtgaaggttcgaagatggcaccattgggctgcaggaaagagactgtgttgtcctcagcgtcctgggttacattttccttggctagaaaacgaactctgtacgtataaggacctctttgcttaacttgaatgttgctgctgttcatcatcacttcctgtggattttgcacatcaaagatccaaaactgtctgtaaacttctgtgcctgttttaacccaatttttaaaagcaattgtaccttcttcgaggacaacttgctttttaattgtcttctggataagcaggtctccaactggcattagaatacctccaaacacagccaggacagcaccaatgacagccccagcgatgagcccacagttccggtcacagcccatttttcttgttcaggaggtgaattagtgttaagcacctgtttcttgcaaactcctggatatgattaaagtggtttctacaagctctggttctatcattagaaagagatcataaaacagaagcttaaatatcagtacaaaaagatcaaagtacaaagaaaacacccactgaaacgtatcattttgcccgttctaaataaacaaatgcttttctttttgtttcaccaaagtggcttcctcggtccgtctcccttttcttgcttctaatgcctaccagtggcagaactaataatgtcatc

SEQ ID NO: 250203 - DNA, 1337 bp, Homo Sapiens
  misc_feature (338)..(353): n is a, c, g, or t
cttaggcagtttgcattacattactatggactacactggaggagagatttctaggtttttttctagaacacacattacatctaatcatttgccactcgatttttaaacagatgcagcctcatttccaccttttgttgagaaaagccaggtattgcagttcttttcttctgatatttgcaggtaagacagatactgaagtataagtatgtctgagtcagaccccaggtgacaaaatgcagaccaagaaacttaaacacagcataggaaattcatcatgtttattaactaactctttgcaaaatgttcttctgcatcttccaatttttgatagtacaaannnnnnnnnnnnnnnngccatttctatctaagcaagaaccattttgccttttaaaaactaaactagtagtctattaacgatcaagtccagaagggcgtgcccaatctttctaaagacatacagagaagatgatgcaaatgtaacagaactgtgttaatgtgctctgcctcagatttgtggggccccagtagataacacacaagcactggagcctttacccactacccttgagcccaagctctgtccctaaagactgtatgcttgtgggtaggcatttaacatctctgaatttttttcttatctgtacaatttaagacagcagtatttcttcatatacgtgtatctggggataagaaaaaaatgtgtattgaaccctatgatagacacttggtaaacgatggaaatgtacccaggtatatatccagcatgtatatgcatacactccagtgagtggtctttctttccaggattaattaagccgtgaaagaaactatttcatttaaactgatcacaaataaagtatttgaaggaagtcctataaatatttactctattggataaattgcctgtgagaagtaacttgagtataaataaacatggtacttcacaaacaagaatagttcatgcttggctattgagttttagtatgtgttaaaatttcccaatcactttctttctaagaatgaaacaagaatttaaaagagtatatgatgtttctaagttaaaacaagaataagaaaaaatgaatctccagaatgtaagttcaggttcctggaatgcagctcttttttctctgtatttaggtcaatctatgctgtatttgaatccgacgttaatctgaaaggaatccctgtgtatagatttgttcttccatccaaggcctttgcctctccagttgaaaacccagacaactattgtttctgcacagaaaaaattatctcaaaaaattgtacatcatatggtgtgctagacatcagcaaatgcaaagaagggagacctg

SEQ ID NO: 250204 - DNA, 411 bp, Homo Sapiens
gaactatattgtgcctattctttggcttaatgagactgggaccattggtgatgagaaggcaaacatgttcagaagtcaagtaactggaaaaataaacctccttggcctgatagaaatgatcttactcagtgttggtgtggtgatgtttgttgcttttatgatttcatattgtgcatgcagatcgaaaacaataaaataagtagtaaatgattcttcacatttgtgcgccagctagcatcatgacccttggtaataccgaccaacaggatgaaaattggatatgctttacttttacaaagcacaccttatcttttagttgaagaaatggtggcactatttctttttttgcactaagcaactgcacatttcaaaaggattattgagatgttatgaaaatgctctaccttgcac

SEQ ID NO: 250205 - DNA, 1108 bp, Homo Sapiens
  misc_feature (31)..(31): n is a, c, g, or t
  misc_feature (52)..(52): n is a, c, g, or t
  misc_feature (54)..(54): n is a, c, g, or t
  misc_feature (139)..(139): n is a, c, g, or t
ggttaaccccaatgaggggacctgggacatnctggatattgaccctatactngnttcactttacaattggcaaaccggctgcaggtcaacctattggtcagcccatccggaaaaattccagtattaaggaatctgaagnggaactatatgggcctattctttgccttaatgagactgggaccattggtgatgagaaggcaaacatgttcagaagtcaagtaactggaaaaataaacctccttggcctgatagaaatgatcttactcagtgttggtgtggtgatgtttgttgcttttatgatttcatattgtgcatgcagatcgaaaacaataaaataagtaagtatgtaccaaaaaatattgcttcaataatattagcttatatattacttgttttcactttatcaaagagaagttacatattaggccatatatatttctagacatgtctagccactgatcatttttaaatataggtaaataaacctataaatattatcacgcagatcactaaagtatatctttaattctgggagaaatgagataaaagatgtacttgtgaccattgtaacaatagcacaaataaagcacttgtgccaaagttgtccaaaattgactggtgcatggctcaattatatagctagttatatattatctgatacttaaaaataattgactaggaaatggtttcataagaccaggattgctgcatgtagacatgctggccgtgcattttccaaatccagaaaagtcctgaacaaaaatttgaatataatagtatcaggaaataggggaaaatagtgttcaacatagtagaaccaagtactcagagtggtgtacaagagtttaggcctctatgctttagatattagtgtccatgcactcttaaagatgaatgaatgcctgacctttcctaaaggaaaacctttttttagttatcacaggtagcattggtgttgcctgtgggggagaattttttactttctccctatttttcttcagcccacctcaaggcaatgtaaataaaagcagtatgtgtgttataataacttatttagttgtttactgtgtgccagtaccatgctaaagaaagattctttatctcacat

SEQ ID NO: 250206 - DNA, 1096 bp, Homo Sapiens
  misc_feature (980)..(1005): n is a, c, g, or t
gtgcaaggtagagagtttcataacatctcaataatccttttgaaatgtgcagttgcttagtgcaaaaaaagaaatagtgccaccatttcttcaactaaaagataaggtgtgctttgtaaaagtaaagcatatccaattttcatcctgttggtcggtattaccaagggtcatgatgtagctggcgcacaaatgtgaagaatcatttactacctgtagagtggcagtatatcttagatatcatactttttattaatcagttcagtttctctagctgcagagagaagttctctaacggacttcaccaatagggcaaaacacattcccattccagaaaggcacataagaagggtgcttctcaaccctcaagacaagcacacaccaggcaaggaacggtagctgaagtgcatctgccctggaccagcatttccacacccttcagaccaagttccatttaaaggtgtatgtactactttcaaaaggaccattgggttattttcttgtgaccccctgagtaaaaccacacattaaagctccaccgtcttacactttgctacttcttacatacctgtcttcttacttgttcctattgtttacaaatctgcccaaagatataatttttatgatattaagagctgaattttgcttaagaaaatctacatatcttttgtgattcttctaaatctagtaaatcaagtaatcaacagtttattctctgcttgtaaaaaagggtagtaatttttccacataaaaatcaaatatataagcaaaactaatatatttgttgacaaagttgctccagcaagccttgaatttttcattataatttagctataaatagacccaaggaatctgacatccaaggatcattaagcaatcataaaaatgtatcacataattttaattctgaatacttacttacaaaacatgtttataacttctgcatttccttttattaagcatgctttcccattaggacaagnnnnnnnnnnnnnnnnnnnnnnnnnncagcggaggatctattacagagtcacacaaatacctttgtttagtcataatttgtcagtaggctactgacaggtattgaaggtaatattta

SEQ ID NO: 250207 - DNA, 978 bp, Homo Sapiens
  misc_feature (137)..(160): n is a, c, g, or t
accacttctgctgttcatggtagtagtggaaggtaaatttggaaatggcattgacataaaatgaaaatgtttacggacacttctcttttttgcttttttattgtatttggataaagatccacttaaaagttatctgnnnnnnnnnnnnnnnnnnnnnnnnccccaaagtgtagttatgttttcactattgctgcttctatagagggcattgtgatagagagttacagatgaaacattaaatgccacagtgagtagaaataattactacaaaaagtaataaatatgattacttggtaatatcattctccatctaaaatactagtttcacctgtgagcagatttcagctcagtttatagttaaaaacaatgagggtaaaatgggattcatgctcagggaatgaatcagccatagttagagtgggaaattattattttcttcatttaaaggtagattttatgtttatttccctaaattgcataagataaaattgtctgtttaataaaaagacatttattaccattattaacagtcattttagagccaaatttaagaaaaggatattgaaagggtctttattggccttgtttgggtaactctatgctgttagatagaagagacttaggtaaataactttttatgtctgaggtgagtacacaatattggttcttggaaaaatagctgtttcttcataagatacccaagtgataattttttttcccctagactgtcaggcctatgagtaaatactaaatctattagctgtctccactcataaaccaaaccaaaccaatacaaacagatgaggagaggaaatgtagtaaaaatactggctgggtcttatgattgggatgagtgattttataagataatatggtgataattttattctaggattttatttttggcctaatataggaatgtttaaaaaaggcttttctatgaaaattagaaatttatacttgaaattaaaagtctag

SEQ ID NO: 250208 - DNA, 1070 bp, Homo Sapiens; identical to SEQ ID NO: 15304
  misc_feature (705)..(705): n is a, c, g, or t

SEQ ID NO: 250209 - DNA, 610 bp, Homo Sapiens
tgagccacgacacccagctgcaattcacttttaattgatgagaaaggcaaactcaacccctacttataagctctgggtgttataaatgacatcagcttataatgacattgtttggggggaaaaaaagccagtgctcttagttccaagtacgcatactatctgaacaaaaggtagtattttaaaacactgaaaataaatcctatttaaaaaaatttccaacaattgttattagaaaacatgttatctttttattatagacattttcaatcataaaagaaaagaacagaataatcaactgcccatatgtcccatcacccagaacaatcacatttggaaagcacttttaaaacttcctacatatccccaaatgtaggttaacttcataacatatgtacactaatacgattttactgatataatcctaccaataaaataatcaacccggtgacccatcatattggtggactttgttggacagttgaatcgaagatacttggccacagccttctcttctttagatggttcaccaacttcctgcaacgtatgaatattaatttagtataatcatatacttgaaaaattcatgcgctgaataataatttctcgtgcc

SEQ ID NO: 250210 - DNA, 360 bp, Homo Sapiens
  misc_feature (313)..(313): n is a, c, g, or t
  misc_feature (334)..(334): n is a, c, g, or t
ttaccgaatgcagacagggaggtaaaaattaacttgctcaaagttactcagccaataattgggggaggtggggtacaaacaggcagtttggctcaagttttagctctctgccactgtcacattactccacagcctctggatccgcttcttgtgtctcctgcgttccgccatgttggccgctccgcccggttccctctgacgtggagcgaggagggggcggtggaaacctcgcgagaacggccccgaggcccgttatgtaatccgccggctggccccctgggaatggggaggtcggccgcctggcgggccaacnggtcccttagcggtgcttctntcccctctttcccttcgctcctgctt

SEQ ID NO: 250211 - DNA, 2172 bp, Homo Sapiens
  misc_feature (2106)..(2107): n is a, c, g, or t
  misc_feature (2117)..(2117): n is a, c, g, or t
cggccggggagacgcggagctgggaaaagggaggcagaggaggcggaggcagaggcagaggcagagcccggtgccgagaccaagcgacagaccggcggggctgggcctcgcaaagccggctcggcgagctctcccgacacccgagccggggaggaaaagcagcgactcctcgctcgcatccccgggagccgcactccagactggcccggtagtcaggggctcaggagcagatcccgaggcaggctttgctcagcctccgacgagggctggccctttggaaggcgccttcaacagccggaccagacaggccaccatgaccgagaattccacgtccgcccctgcggccaagcccaagcgggccaaggcctccaagaagtccacagaccaccccaagtattcagacatgatcgtggctgccatccaggccgagaagaaccgcgctggctcctcgcgccagtccattcagaagtatatcaagagccactacaaggtgggtgagaacgctgactcgcagatcaagttgtccatcaagcgcctggtcaccaccggtgtcctcaagcagaccaaaggggtgggggcctcggggtccttccggctagccaagagcgacgaacccaagaagtcagtggccttcaagaagaccaagaaggaaatcaagaaggtagccacgccaaagaaggcatccaagcccaagaaggctgcctccaaagccccaaccaagaaacccaaagccaccccggtcaagaaggccaagaagaagctggctgccacgcccaagaaagccaaaaaacccaagactgtcaaagccaagccggtcaaggcatccaagcccaaaaaggccaaaccagtgaaacccaaagcaaagtccagtgccaagagggccggcaagaagaagtgacaatgaagtcttttcttgcggacactccctcctgtctcctattttctgtaaataattttctccttttttctctcttgatgctcaccaccaccttttgcccccttctgttctgactttataagagacaggatttggattcttcagaaattacagaataattcatttttccttaaccagttgtgcaaggacagcaacaaccaatctaatgatgagaatgtacttatattttgttttgctattaacctacttacggggttagggacttgcggggggggcttgtgtgttttgttggcttgtttgccatgaaggtagatgtgggtggggagaagacacaaggcagtttgttctggctagatgagagggaacccaggaattgtgaggttagcaggaatatctttagggtgagtgagttttccttgagttgggcacccgttgtgagagtttcagaacctttggccagcaggagagaggtggtagggagcagccagccggcaaaggaaggaggtggaaaaaaaccgccaccgggctgacttccacctcccagtggtgagcagtgggggcccaaacccagtttccttctcatttttgttagtttgccctttcggcctccctattttcttagggaaggggagtggggtccaagtgacagctggatgggagaagccatagtttctcccagtcagctaggatgtagccattgggggatctttgtggcttcagcaaattctcttgttaaaccggagtgaaaacttcaggggaagggtggggagtcagccaagtgcctcagtgtgccctgttgaaacttaggtttttccacgcaatcgatggattgtgtcctaggaagacttttcttttcctctggatttttgttcctcctgtacaagaggtgtctttgcttggtttggtggggctgcggccacttaaaacctcccgatctctttttgagtcctttattataagtagttgtagctgcgggagggggagggggagtgggcgggcagtggatagtaagacttactgcagtcgatttgggatttgctaagtagttttacagagctagatctgtgtgcatgtgtgtgtttgtgtatatatacatatctagggctagtacttagtttcacacccgggagctgggagaaaaaacctgtacagttgtctttctcttatttttaataaaatagaaaaaatcgcgcacttgcgcgtccccnnccccaccccntttttttaaacaagtgttacttgtgccgggaaaattttgctgtctttgtaatttt

SEQ ID NO: 250212 - DNA, 1115 bp, Homo Sapiens
  misc_feature (9)..(9): n is a, c, g, or t
  misc_feature (11)..(12): n is a, c, g, or t
  misc_feature (24)..(24): n is a, c, g, or t
  misc_feature (36)..(36): n is a, c, g, or t
  misc_feature (43)..(43): n is a, c, g, or t
  misc_feature (48)..(48): n is a, c, g, or t
  misc_feature (52)..(52): n is a, c, g, or t
  misc_feature (65)..(65): n is a, c, g, or t
  misc_feature (71)..(71): n is a, c, g, or t
  misc_feature (74)..(74): n is a, c, g, or t
  misc_feature (94)..(94): n is a, c, g, or t
  misc_feature (101)..(101): n is a, c, g, or t
  misc_feature (106)..(106): n is a, c, g, or t
  misc_feature (118)..(118): n is a, c, g, or t
  misc_feature (127)..(127): n is a, c, g, or t
  misc_feature (135)..(135): n is a, c, g, or t
  misc_feature (147)..(147): n is a, c, g, or t
  misc_feature (157)..(157): n is a, c, g, or t
  misc_feature (181)..(181): n is a, c, g, or t
  misc_feature (335)..(335): n is a, c, g, or t
  misc_feature (409)..(409): n is a, c, g, or t
cttaaccantnncaagacaccacnaccaatctatcnagagatngattntatntctttgctatcanccactnacngggttaggattgctgggggnctatctnttttntcgctttttccnatgaagtanatgtggtngggagaagacanaaagcagttnttctgctagatgagaggaacccangaattgtgaggtagcaggaatatctttagggtgagtgagtttccttgagtgggcacccgttgtgagagtttcagaacctttggccagcaggagagaggtggtagggagcagccagccggcaaaggaaggaggtggaaaaaaacccgccaccggnctgacttccacctcccagtggtgagcagtggggcccaaacccagttccttctcatttttgttagtttgcccttncggcctccctattttcttagggaaggggagtggggtccaagtgacagctggatgggagaagccatagtttctcccagtcagctaggatgtagccattgggggatctttgtggcttcagcaaattctcttgttaaaccggagtgaaaacttcaggggaagggtggggagtcagccaagtgcctcagtgtgccctgttgatacttaggttttttccacgcaatcgatggattgtgtcctaggaagacttttcttttcctctggatttttgttcctcctgtacaagaggtgtctttgcttggtttggtggggctgcggccacttaaaacctcccgatctctttttgagtcctttattataaagtaagttgtagctgccgggagggggagggggagtgggcgggcagtggatagtaagacttactgcagtcgatttgggatttgctaagtagttttacagagctagatctgtgtgcatgtgtgtgtttgtgtatatatacatatctagggctagtacttagtttcacacccgggagctgggagaaaaaacctgtacagttgtctttctcttatttttaataaaatagaaaaattgcgcacttgcgcgtccccccgggacccccttttttaaacaagtgttacttgtgccgggaaaattttgctgtctttgtaattttaaaactttaaaataaattggaaaagggaaaatt

SEQ ID NO: 250213 - DNA, 397 bp, Homo Sapiens
  misc_feature (127)..(127): n is a, c, g, or t
tgcacctcctaatctactctagatcacctctgcagcctgcacagccgggcctttggactcctggatgctagagtgacctgggcgctgaggaggcccccgagccagtaccaggaaaggatagactcantgtcttgcagcattcccagcagaggcatcgcctgtggacaccgcgtctgtgtctgtatatggcagagctcccagatatatgcacaagggagtgaaaaaatgtgtttgcaccccagtctctaaaaattcaacagcctggttacttctgggtggtatatcgtaggtggctttaatacgtgttatttgctcatctgtatttcttactcttcgcacaattaaaccatgttccttttacttatgtacatttttaataaaagaaagttgttaatga

SEQ ID NO: 250214 - DNA, 365 bp, Homo Sapiens
  misc_feature (268)..(268): n is a, c, g, or t
ctgactctatgtgaaaattcttttcaaagtaggtaaaagccatcactatatttcaaagaggtcacagtgacatcatatacaaaaggaaccagattgaaaaagatattgctgacatagccagtagtgagattactaaagaataaacagaaatgccttggaaattatttttacaccggcttgaattgaaacattaaagcaaaatgaaagctgtaaggtgttcactagttttcccaaatgcgttgtcaagtttattgggtaggaaataggnctccctaaataggatgcaggaaggcactttaggtgtttctgcctccaattccactttggtggatttttgtctctccgggtttaaaatttgtcccccc

SEQ ID NO: 250215 - DNA, 353 bp, Homo Sapiens
aggaagccgttgggaggggagaggaagtgcccgtggagggcggcaggccccttcatcccgcgccaattatcttcagctcgggccgtcccccgctcccgaaggctggccttaagtcacgacttgacccgctgcgcctcggcgtgcacttagaggagcccggagctcttcgccaagcgcagaactgacccccccgcaactccacccgcgggggcggaaacctaccgtgggccgtgtcgggggcggctcccccaggtcgcctttcccatcccgggagctcacctcctgcagccgtttcaccagcagcgtcttcccgacgcccgtggcccccagcaggagacacattccgtgcttcc

SEQ ID NO: 250216 - DNA, 621 bp, Homo Sapiens
  misc_feature (312)..(362): n is a, c, g, or t
gcacgagctgtgggccacgggcgtcgggaagacactgttgttgaaacggctgcaggaggtgagctcccgggatgggaaaggcgacctgtgggagccgcccccgacacgggccacggtgggcaccaatcttactgacatcgtggcacagagaaagagcaccatccgggagcttggggggtgcatgggccccatctgggccaggtactatgtgaaactggcgctctctctctggcctgtgccgcggataccagaatggagaactgagggccacatgaggacagagacgagtgacaccacgtcggcttcatttgnnnnnnnnnnnnnnnnnnnnnnnnnnnnnnnnnnnnnnnnnnnnnnnnnnntttgtgatggacgcctctgaccccacccagatctctgtatactgtgtgcagatcttatgtctcctttctgcagaacaacttgcagaagcatcggggctgatactcttcaatataatcgacctaccctgttacatgtgcacggaggagatgaagtcattaatcaggcttccagacatcattgcttgtgccaagcagaacatcaccacggcggatatcaacgcccgcgaaagcactgtcttatcacgggtgctggcctggc

SEQ ID NO: 250217 - DNA, 737 bp, Homo Sapiens
acggaatgtgtctcctgctgggggccacgggcgtcgggaagacgctgctggtgaaacggctgcaggaggtgagctcccgggatgggaaaggcgacctgggggagccgcccccgacacggcccacggtgggcaccaatcttactgacatcgtggcacagagaaagatcaccatccgggagcttggggggtgcatgggccccatctggtccagttactatggaaactgccgttctctcctgtttgtgatggacgcctctgaccccacccagctctctgcatcctgtgtgcagctcttaggtctcctttctgcagaacaacttgcagaagcatcggtgctgatactcttcaataaaatcgacctaccctgttacatgtccacggaggagatgaagtcattaatcaggcttccagacatcattgcttgtgccaagcagaacatcaccacggcagaaatcagcgcccgtgaaggcactggcttagcaggggtgctggcctggctccaggccacccacagagccaacgattgactgcacggcagaggcgcagctggcctgagctggggagaggtggcagagggcagtatggctttgctgccaatagtttcttctcacaggggcagaataacccaaagtaaccctacatgatggggctctgtgctgagatgcaatgaatgtgtaaactgaaggcatgtggagatggaagttgacatcttggcctctgaaaaaagtgtccccagg

SEQ ID NO: 250218 - DNA, 338 bp, Homo Sapiens
  misc_feature (1)..(1): n is a, c, g, or t
  misc_feature (5)..(5): n is a, c, g, or t
  misc_feature (7)..(7): n is a, c, g, or t
  misc_feature (11)..(11): n is a, c, g, or t
ntgananctgncacctgggccccaaatttaatttttaacattactattttgaaccttgacatagtagggttatatataatcatcatgctttatgttcaaaattctcacctaattaataatttgtagttaccagaaagcagaaccaaaccaaaccaaaacacacacctgttaaaacagtttaccatggcacttcctgacagactccccgttatactggctccagctagtgccatggtgctggccgtttcactcaggttgtctcggatggctcctattcgatccatgtggcttccactagcactcaaactgccagtcagcccaccaacacttccctcccc

SEQ ID NO: 250219 - DNA, 767 bp, Homo Sapiens
tggatgaccgccagcatgacttcgggtggcacgccatcatccacactactgcttccactgttgtgcctgaatttggatggctttgactcaatatctacttgcacctccatactgttgccttctttgtccaatgggatgtaggaattcagaatggatcctgccattgctttggtgctggcattatcactaactgttcccaagctgactgtgccagattctccacttagactgtaccgttctttctgtacatctgcttgtacttccaacctgttaaaacagtttaccatggcacttcctgacagactccccgttatactggctccagctagtgccatggtgctggccgtttcactcaggttgtctcggatggctcctattcgatccatgtggcttccacttgcactcaaactgccagtcagcccaccaacacttccctcccctatgcttgggttgtgtcttgcttctgctactgatgttgtgtctacagctgtgttagttccaccaacatttatatcattttcatcatcaaattcaatcctaactccttttccattgcctgctgagactccacaacctccgcttcgacaaagagaaattggaactacgccatagacataagctaacataataggaacaccgatacctacagtcactgcagctactactggagacacgattacagacaacgttacaccacctgctatggccaaattccgtttgtgctttgaaacatccttgccttcatagcgattgtgaatcttgcggcc

SEQ ID NO: 250220 - DNA, 1970 bp, Homo Sapiens
  misc_feature (1638)..(1668): n is a, c, g, or t
  misc_feature (1738)..(1746): n is a, c, g, or t
cacatcggcagcatcgaccccaactgcaacgtctctgaggtggtcaaagatgcctacgacatggctaagctcctgtgtgacaagtattacatggcctcacctgacctggagatccaggagatcaatgcagccaactccaaacagccgattcacatggtctacgtcccctcccacctctaccacatgctctttgagctcttcaagaatgccatgagggcgactgtggaaagccatgagtccagcctcattctcccacccatcaaggtcatggtggccttgggtgaggaagatctgtccatcaagatgagtgaccgaggtgggggtgttcccttgaggaagattgagcgactcttcagctacatgtactccacagcacccaccccccagcctggcaccgggggaacgccgctggctggctttggttatgggctccccatttcccgcctctacgccaagtacttccagggagacctgcagctcttctccatggaaggctttgggaccgatgctgtcatctatctcaaggccctgtccacggactcggtggagcgcctgcctgtctacaacaagtcagcctggcgccactaccagaccatccaggaggccggcgactggtgtgtgcccagcacggagcccaagaacacgtccacgtaccgcgtcagctaaaggccgccgtgcatctgcacctgagaggacggactgccgcctctgggtccccccaccgtggtgcccctcaccatcctcctgggggagcaagaggtgggttctccctgatgaccaggttctgtctctatggaaatcactgcggtgataggtctgtgatggtccctaagtgccagtccatctctgtggagacccctcggtggcctccctatctctgtgggcgatgcctgagggttagggatgtctccaccctgatggggtgtcccagagacattttcccatggcagtcctcctctctgagaccagggctgtcacttttctgccaggggtactgggtccccctcagcaccctccacagcacaggccttccaagtggatgtcccgttgccttattcccccagcccacaaaggcaccctggccttggtctgctgaagtgttaggaagagggtgggtgccctccagacctggggactgagtggggaaaggagttacacccgtgagtggggaatgaggctggtcctgcagcctctccctccgctcagggcttgaaggtcggtggcggagggggtggctctcacagggcccaactctaaagtggaagaaccttgttagaccgagagcttgccatccagccaagcctgctccaggccctggagcggacccttggcaatgtcttgtgccaacctccttgagcccttccccagccatgtccctcacctggttcattgccccacccggctccctccacaaagccctatttccaatcctggccttgaaacttcccagccccgccaggtagcctacccacctggtggccccctacaaccactggccggctgacctaccacagagagtgggcccctcttctcctctccccatatagacggcaaactccttctcccggggggggaatacttaactagagctgtcaaacgttccttttctatacacaccctcctgtgcgaatatggccnnnnnnnnnnnnnnnnnnnnnnnnnnnnnnntcaagaggcccagcagacactgggggcggagcttatatacaaccctttgtatgatgtgtctccccacctnnnnnnnnntctggggccctcgagcggggcctaagcgcacacaaccggcgccagtaattctccgcgctccaccccgtgttgtactataacgacgcatttatgagcctttcaactttgccgcccatcttcacataactcttctcgtcttacttaccaccttcccccgggggcgaattctttcactgtcgctcggggccgggtcgcgcacgacagaggcgcgccgaatcgctcca

SEQ ID NO: 250221 - DNA, 1703 bp, Homo Sapiens
  misc_feature (1082)..(1082): n is a, c, g, or t
  misc_feature (1084)..(1084): n is a, c, g, or t
  misc_feature (1160)..(1160): n is a, c, g, or t
  misc_feature (1162)..(1162): n is a, c, g, or t
  misc_feature (1167)..(1167): n is a, c, g, or t
  misc_feature (1178)..(1178): n is a, c, g, or t
  misc_feature (1187)..(1187): n is a, c, g, or t
  misc_feature (1189)..(1189): n is a, c, g, or t
  misc_feature (1194)..(1196): n is a, c, g, or t
  misc_feature (1198)..(1198): n is a, c, g, or t
  misc_feature (1200)..(1202): n is a, c, g, or t
  misc_feature (1207)..(1211): n is a, c, g, or t
  misc_feature (1216)..(1216): n is a, c, g, or t
  misc_feature (1219)..(1220): n is a, c, g, or t
  misc_feature (1222)..(1222): n is a, c, g, or t
  misc_feature (1230)..(1230): n is a, c, g, or t
  misc_feature (1274)..(1274): n is a, c, g, or t
  misc_feature (1279)..(1279): n is a, c, g, or t
  misc_feature (1295)..(1295): n is a, c, g, or t
  misc_feature (1298)..(1298): n is a, c, g, or t
  misc_feature (1303)..(1305): n is a, c, g, or t
  misc_feature (1307)..(1307): n is a, c, g, or t
  misc_feature (1315)..(1316): n is a, c, g, or t
  misc_feature (1320)..(1321): n is a, c, g, or t
  misc_feature (1328)..(1328): n is a, c, g, or t
  misc_feature (1353)..(1353): n is a, c, g, or t
  misc_feature (1493)..(1493): n is a, c, g, or t
  misc_feature (1585)..(1585): n is a, c, g, or t
  misc_feature (1602)..(1602): n is a, c, g, or t
  misc_feature (1676)..(1676): n is a, c, g, or t
gacagtagaaacaggaagtgggaccaaaacaaaggagcggcggccgggagcggacttaccttaccttctctgccttcggcgcgcttctcagccgggccgccgacccaaaggagccgtccgactatgtctaacatggagaaacacctgttcaacctgaagttcgcggccaaagaactgagtaggagtgccaaaaaatgcgataaggaggaaaaggccgaaaaggccaaaattaaaaaggccattcagaagggcaacatggaagttgcgaggatacacgccgaaaatgccatccgccagaagaaccaggcggtgaatttcttgagaatgagtgcgcgagtcgatgcagtggctgccagggtccagacggcggtgacgatgggcaaggtgaccaagtcgatggctggtgtggttaagtcgatggatgcgacattgaagaccatgaatctggagaagatttctgctttgatggacaaattcgagcaccagtttgagactctggacgtccagacgcagcaaatggaagacacgatgagcagcacgacgacgctcaccactccccagaaccaagtggatatgctgctccaggaaatggcagatgaggcgggcctcgacctcaacatggagctgccgcagggccagaccggctccgtgggcacgagcgtggcttcggcggacaggatgaactgtctcagagactggcccgccttcgggatcaagtgtgacggcagaacccgctctgaggtttcctggccatagccaccctttgaaatgctctctgtgtgttagagagatactataccctagaaactctgaacacgccagaatgctgaaatgcccttctacctttgggtttacagccccctccacataaattaagaaattcagtatttctgcactcttagctggattctaaagttctgtatagctcgtaatgatggtatttttatagcagccttttaacagaactagttaatttcgtgtatatgaatctttctcgaagatctggtcaaaactgtattcagtttcctgcccagaatgatcagattgaaggtggttggtttttattattatttagtgtgatngntagtatctagaatggcaggtggtgcataaaagttaaagagaggggaaagaggacgtagttgggttatacagttatncnccccnggcagggtatncggtggacngngccannncngnnnacccnnnnnggggnggnncncgtgtcgngttttgccttcacagtgagaccgcaaatgattgttctcataacncatantattaataaatgtggnccnataannnanactgaaannaccnnaggatancctggcaaaaaactctctgacagcngacaaactataaatttttcacgtgataattgtcttagcgtaactgggaaaaatgccgaataacttcctttattatctggaaaaattaaatttgttcatttatattttctacttactaacatatgagtttttaaaaagacntagtgtgacatttgacagtgtctttcaaacgaacttctctaacaagtttatagttatttccctgtttcaacactattagaagtcttataaantatgctaattatgcatngcagtcatgaacacactcttaacattgccaaaggactgttgatgtcgtttgagacaaaccctgggactgtgtgngcgggggtgttgttttgattaaacaac

SEQ ID NO: 250222 - DNA, 1448 bp, Homo Sapiens
  misc_feature (246)..(306): n is a, c, g, or t
  misc_feature (464)..(464): n is a, c, g, or t
  misc_feature (572)..(572): n is a, c, g, or t
  misc_feature (591)..(591): n is a, c, g, or t
  misc_feature (597)..(597): n is a, c, g, or t
  misc_feature (599)..(599): n is a, c, g, or t
  misc_feature (604)..(605): n is a, c, g, or t
  misc_feature (607)..(607): n is a, c, g, or t
  misc_feature (613)..(613): n is a, c, g, or t
  misc_feature (621)..(621): n is a, c, g, or t
  misc_feature (643)..(643): n is a, c, g, or t
  misc_feature (661)..(661): n is a, c, g, or t
  misc_feature (677)..(677): n is a, c, g, or t
  misc_feature (680)..(681): n is a, c, g, or t
  misc_feature (694)..(694): n is a, c, g, or t
  misc_feature (711)..(711): n is a, c, g, or t
  misc_feature (730)..(730): n is a, c, g, or t
  misc_feature (735)..(736): n is a, c, g, or t
  misc_feature (746)..(746): n is a, c, g, or t
  misc_feature (771)..(771): n is a, c, g, or t
  misc_feature (774)..(774): n is a, c, g, or t
  misc_feature (780)..(780): n is a, c, g, or t
  misc_feature (804)..(804): n is a, c, g, or t
  misc_feature (814)..(814): n is a, c, g, or t
  misc_feature (818)..(818): n is a, c, g, or t
  misc_feature (828)..(828): n is a, c, g, or t
  misc_feature (848)..(848): n is a, c, g, or t
  misc_feature (851)..(851): n is a, c, g, or t
  misc_feature (856)..(856): n is a, c, g, or t
  misc_feature (858)..(858): n is a, c, g, or t
  misc_feature (875)..(875): n is a, c, g, or t
  misc_feature (893)..(1161): n is a, c, g, or t
  misc_feature (1208)..(1208): n is a, c, g, or t
  misc_feature (1241)..(1241): n is a, c, g, or t
  misc_feature (1243)..(1243): n is a, c, g, or t
  misc_feature (1245)..(1245): n is a, c, g, or t
  misc_feature (1247)..(1247): n is a, c, g, or t
  misc_feature (1251)..(1251): n is a, c, g, or t
  misc_feature (1255)..(1255): n is a, c, g, or t
  misc_feature (1258)..(1258): n is a, c, g, or t
  misc_feature (1267)..(1267): n is a, c, g, or t
  misc_feature (1279)..(1279): n is a, c, g, or t
agtctcaaactggtgctcgaatttgtccatcaaagcagaaatcttctccagattcatggtcttcaatgtcgcatccatcgacttaaccacaccagccatcgacttggtcaccttgcccatcgtcaccgccgtctggaccctggcagccactgcatcgactcgcgcactcattttcaagaaattcaccgcctggtttttttggcggatggcattttcggcgtgtatcctcgcaacttccatgttgcnnnnnnnnnnnnnnnnnnnnnnnnnnnnnnnnnnnnnnnnnnnnnnnnnnnnnnnnnnnnnggcactcctactcagttctttggccgcgaacttcaggttgaacaggtgtttctccatgttagacatagtcggacggctcctttgggtcggcggagcaggatgaactgtctcagagactggcccgccttcgggatcaagtgtgacggcagaacccgctntgaggtttcctggccatagccaccctttgaaatgctctctgtgtgttagagagatactataccctagaaactctgaacacgccagaatgctgaaatgcccttactccntttgggttcaccgcccccnccgccntncattnngnaattcngtatttcngcactcttagctggattctaangttctgtatagctcgtantgatggtatttttatngcnnccttttaacaganctagttaatttcgtgtntctgactctttctcgccgntatgnncacccatgtnttaccgtttcctgccccagaatgantcngattgnaggtggttggttttctattacttntttagtgtgnttgntagtatcctngaatggccaggtggtgcatnaanagttnanagagaggggaaagattnacttagtttggttataannnnnnnnnnnnnnnnnnnnnnnnnnnnnnnnnnnnnnnnnnnnnnnnnnnnnnnnnnnnnnnnnnnnnnnnnnnnnnnnnnnnnnnnnnnnnnnnnnnnnnnnnnnnnnnnnnnnnnnnnnnnnnnnnnnnnnnnnnnnnnnnnnnnnnnnnnnnnnnnnnnnnnnnnnnnnnnnnnnnnnnnnnnnnnnnnnnnnnnnnnnnnnnnnnnnnnnnnnnnnnnnnnnnnnnnnnnnnnnnnnnnnnnnnnnnnnnnnnnnnnnnnnnnngaataacttcctttattatctggaaaaattaaatttgttcatttacnttttctacttactaaattgagtttttaaaaagncntngngtgncatntgncagtgtctntcaaacgaactnctctaacaagtttatagttattttcctgtttcaacactattagaagtcttataaattatgctaagttagcagtggcagtcatgttacacactcttaacattgccaaagaactgttgatttcgtttgagaaaaccctgggactgtgtgtgtgtaggttttgttttgattt

SEQ ID NO: 250223 - DNA, 1169 bp, Homo Sapiens
gagaagagatggagctggacagagctgtgggggtcctgggcgctgccaccctgctgctctctttcctgggcatggcctgggctctccaggcggcagacacctgtccagaggtgaagatggtgggcctggagggctctgacaagctcaccattctccgaggctgtccggggctgcctggggcccctgggcccaagggagaggcaggcaccaatggaaagagaggagaacgcggcccccctggacctcctgggaaggcaggaccacctgggcccaacggagcacctggggagccccagccgtgcctgacaggcccgcgtacctgcaaggacctgctagaccgagggcacttcctgagcggctggcacaccatctacctgcccgactgccggcccctgactgtgctctgtgacatggacacggacggagggggatggaccgttttccagcggagggtggatggctctgtggacttctaccgggactgggccacgtacaagcagggcttcggcagtcggctgggggagttctggctggggaatgacaacatccacgccctgaccgcccagggaaccagcgagctccgtgtagacctggtggactttgaggacaaccaccagtttgctaagtacaaatcattcaaggtggctgacgaggcagagaagtacaagctggtactgggagcctttgtcgggggcagtgcgggtaattctctaacgggccacaacaacaacttcttctccaccaaagaccaagacaatgatgtgagttcttcgaattgtgctgagaagttccagggagcctggtggtacgccgactgtcatgcttcaaacctcaatggtctctacctcatgggaccccatgagagctatgccaatggtatcaactggagtgcggcgaaggggtacaaatataggtgcatggtgtcagagatgaaggtgcggcccgcctagacgggccaggacccctccacatgcacctgctagtggggaggccacacccacaagcgctgcgtcgtggaagtcaccccatttccccagccagacacactcccatgacgcccacagctgcccctttgcccccagctcagtcaagccgccacatgcccacaacctcaccagagggagaattatgtttctaaatatgtttacaatgggacagaaaagttcaaa

SEQ ID NO: 250224 - DNA, 843 bp, Homo Sapiens
ggtgcgtgtgtgtgcgcgcgctagtgtgtggacaaggaggtgggggcagctgagttagagtcccaactcttggactccatttgctattctcttctttctcccccacacctatctggtggtggtagtgggcgtttatatttgcgttccttttcattcatttctaaatctcttaaaaattttgggttgggggtattggggaaggcaggaaagggaaaaggagagtagtagctgaagagcaagaggaggacatggagatgaagaagaagattaacctggagttaaggaacagatccccggaggaggtgacagagttagtccttgataattgcctgtgtgtcaatggggaaattgaaggcctgaatgatactttcaaagaactagaatttctgagtatggctaatgtggaactaagttcgctggcccggcttcccagcttaaataaacttcgaaaattggagcttagtgataatataatttctggaggcttggaagtcctggcagagaaatgtccaaatcttacctacctcaatctgagtggaaacaaaataaaagatctcagtacagtagaagctctgcaaaatcttaaaaattcgaacagtctgacctgtttaactgtgagatcaccacagctggcagattatcgagaaagtattttgacctactgaacaactccatcatcagacgggtttgaccaggaagataagaaggccgactctgacacggcgacgctcagctgcctgaaacgctagcactgccggaaccgcggtccgcaagactaaccgagaacagacacaactacataacggccgcgtcgcaaccatggtccaccacaccacacagcac

SEQ ID NO: 250225 - DNA, 883 bp, Homo Sapiens
aggatttagatgaagaatttcgtgaaaccacatagaaattgtgaccagattttatttagcatttcaaagtgtacataaatatattgtagacttaaacagatatctagatgatctcaatgaaggggtttatattcagcaaaccttagaaactgtgcttctcaatgaagatggaaaacaacttctatgtgaagcactgtacttatatggagttatgctactggtcattgaccaaaagattgaaggagaagtcagagagaggatgctggtttcttactaccgatacagtgctgctcgatcttctgctgattcaaatatggacgatatttgtaagctgcttcgaagtacaggttattctagccaaccaggtgccaaaagaccatccaactatcccgagagctatttccagagagtgcctatcaacgaatccttcatcagtatggtcattggtcgactgagatctgatgatatttacaaccaggtctcagcgtatcctttgccggagcatcgcagcacagccctggcaaaccaagctgccatgctgtacgtgattctctactttgagccttccatccttcacacccatcaagcaaaaatgagagagatagtggataaatactttccagataattgggtaattagtatttacatggggatcacaggtaatctagtagatgcttgggaaccttacaaagctgcactgctttaaataataccctggacctttcaaatgtcagagaacaggcaagcagatatgctactgtcagtgaaagagtgcatgctcaagtgcagcaatttctgaactgtctgagagactgcaatgttgccatacgatggctgatgcttcatacagcagactcagactgtgacccaacccgccttcgtc

SEQ ID NO: 250226 - DNA, 2009 bp, Homo Sapiens
ataggtaggtgtggtgatggtcgtgagacgaaggaagaagtggggttagatagtgtgtatggttggctggtgatggtgtttgcgcgagaggggacagggcacaggtgtggggtttgggagaggggctggcgcgtgatgaggaggagggatgcagagtggcgtgtattgaagttgtgtcgtgcggggccgttgtcggacgccgcatgttttagaccgactcggagtgaccgtgttccgcttggggagatggtggttgaccccaggctgggggtttgtccaagattccgtagaccaagtacgtcttaggtaaatggttttggttactcacactacggggaatctgagcagagagtccagaagaagtgggagatctcaaccgaaggtaaccacacattctgacagctgccgtgcgtaagcagacacttagaaagtcaaagggatgttttttgaacgaatatagattccgaggtttatggtacatgtctggagttataagtgtaaggcttgtcagtgatcaggatctcgtgagagagtctctccactgtagtgtgtcgcctgtctgagtcatatggtgaacttaaggggttattaagggccttgttttggcttctcagtggggaaccactctatcatctctgaatgttaaaggtgatcccacagagctcaaagagaagaggcaatatggtaagaaacaatttgaaagtttgcaataccaagacaacaatgatcaacactatgaagcaagatgaataaattaaaattcttggttagacattaaagcattcttgccaagaataagagtacactgtatggagggatatttgattcctacatacgagtcccaatatgcccattacatttgtttatgggagatactgcaagtttaaggtaatttacattccttggcaatcaagtcactgttataggcaacgtcttttattgttccatctggcacttgcaaacaccattcttgaagaacctagaaatgaaggtcagttactctgtttatcaggaacagaaccaaataaaaacaaatttttgaaaaagcaaccaagaaactctggttcatcactattttccatatctaatggttccttcaagataaagcataactcttcctttcatgatactttccaacaaagggagattaaagaaaaacagaaaagaaagttccccaccctaccccccataaattgtcattcatactggtaaaagagccagtcttgttagcagctaaatattgcactgcctttcattctgtatacagtcagggtccaatgaaagtggcacactcatggtataagtgacggacgatgacaccgccagctcaagagtaaagactcagtatacagaggggacaagaaaacacgtcagcactagtcacacatccagttgtaaaagtctgatttccagaagttaaaattcatcactttcagctgcatgaagttgtgtgtcatccgcatctgtcatgctgctctcctgggattcatctgttcccatgatctgttcttcttgggttattggctcctcatcatctggaagataacgcttatcaattgcctctttaatctggttattggctcctttaggatctttcctattaagaagtaaacgagggattctttgggaacaatttgtttcaattcttcaagttcttgtaaagcagacttatatttttcatttgcaaataaaactgaggctctgtgaaatttgcatagagggttcttgggatcaatgacaatggctttgtttagggtatccaaagccttctctgattttttcagtgcatgttgaactactccaatgtggcaaagtaaaactgaactttgagggttgatatcaagcgctttttggaaatgcatttctgcaaggctgaatttttcttgcttgtaataaatcattcctaaaccataccatgcattataatgtctaggattgactctgatagcatttcgaaaacaagctaatgctttgtccaattcttcagttaagacaaactcatgccctcc

SEQ ID NO: 250227 - DNA, 230 bp, Homo Sapiens
gagatcggtggacgtgctcgcctccactcggggccaggtctatgtcccggtttcccgcagtcgcgggcagggcgccaaggcggcaggaggagggtgagcggtcaagagacctccaggaagagcggctctcggctgtttgcatcgccgatagagaagagaaaggatgcacgtcccaggagggaggaactactccaacttttcctattcagaaacaaagaaaaaagattatt

SEQ ID NO: 250228 - DNA, 823 bp, Homo Sapiens
cagcatgagtgctacactaactagaatttaataagtgttatttttattgagttttcaaatttggaaggattttgatccaaaatatatacctatgccttaaaaaacaaagtcaagataatcagtatgggctttagtaccaattttactttccaatccattttctcccccagtatttcacttgtatccctcataacttcatagcaaattatccagattatatcttccagactactcagtgaaggaacctaaatctcaaatgttattttgaagaagtgtagagtaaataattttggtaatctgtaaaacagctgcatgcagtgtgtactgtattataacagcaccaaaccctttataaaaaccaaacactccttcctcctgccttatggtattgatacagtctctcattccctcatattgtgtattaattggaagcacttcatagccaaggtctgtattgtcaattattgtgcgtgttccttgaatgtgaaggcggtgcaaaactgtttccaatgggtaaagtataacgtcagaacaaagactggcagcaaagttagcaataagttctggaaaataagcatccaacatactctgcacagggctagtgctctcagctaggtggctattgtaagtctttctctttagaattagtaggacaaacttctgaataactgagctgatgatgtaatgaagaactccatgaagcaccgtagggaagatcaaggaaagaagcggaagaagtcgtttgctatgaggcactcccatgcctatcactcttccaattccttctttaacacactccaaaatgccagtattatctcgaatt

SEQ ID NO: 250229 - DNA, 841 bp, Homo Sapiens
ggcgcggtggacggtctgaaagggagtgttcgggtttcgctggggcctcgcggctccagagcccagcatggcttcctcgcgagcctcttccacggcaaccaaaactaaagcacccgacgacttagttgctccggtcgtgaagaaaccacacatctattatggaagtttggaagagaaggagagggagcgtctggccaaaggagagtctgggattttggggaaagacggacttaaagcagggatcgaagctggaaatattaatataacctctggagaagtgtttgaaattgaagagcatatcagcgagcgacaggcagaagtattggctgagtttgagagaaggaagcgagcccggcagatcaatgtttccacagatgactcagaggtcaaagcttgccttagagccttgggggaacccatcacactttttggagagggtcctgctgaaagaagagaaaggttaagaaatatcctctcagttgtcggtactgatgccttgaaaaagaccaaaaaggatgatgagaagtctaagaagtccaaagaagagtatcagcaaacctggtatcatgaaggaccaaattagcttgaaggtggcagaactatggatttgctaataatccgttggccagggcaatgaaacgcttgggaagaagcccgactcccataaaggagattccttgaaaacaaaccagggacctccccagaaggcaaagaggttggcccaaggtcttctcccgggccttttggaaccaaattttttggcgcgacccaaaatatgtggggggaaggaaactcgggcgccctaatcctcccccataagtggggggaacctctttcgaaa

SEQ ID NO: 250230 - DNA, 1107 bp, Homo Sapiens
  misc_feature (1084)..(1084): n is a, c, g, or t
gatgacatggccttcatcaagaatgcagtagttaaatttaatatttctaaagaaatctatgtcattcctcacaacatcatatgaagccactattagattgtgcctttttacttggtgctgtaaccttattctttcagtgggaggtccagtgtaatgcaacgggttgagatattctctagagcaaaatttacctacttcatccacccaatggcctgttaatgttggcggacaaaccactaaggaaggaagtggcatacattctgctaattttgatcttgcatattcctgggccctatgacaatgatctcctgctagaatgcagatggactgtaaagtttttcctaaacccatgtcatcacacagaattccatgaagtttatacttattaagaaatgctaaccagttcacaccatcctgctgatattttctgagttcagcattgattggtactggaattttataattttccaattttttcccatctaacaattgctccaaaaagtgtcgctccttggctttcaattggattaattctgctgacatgtttggagggtctggaatgcctgcctcaagtggcatgagtctaattagcgttgcaaagcactgcgtggccatgaatctcacactgtctgtctgatcactcattcttcctaatacaggaacaactaaaaggacaatatatggaacaataccaacatctagttgttccattacacaggcaagtgcttcaattacaccctcttgtttgacactgtcatcaattgctcccagccacggaagaaccttctccaaaaaaatattcattgtttccatggtagctattttgctcatggacacctacacaacgagcagccatgtgcctcactgcagtactggggtattgaaggcacatataaagatgtgggcaaatgctggaccaacaagggatgaagctcagaatccattgaagctgctgctgtttcaaaaacctgcagagaattcaccaattcttgagcagggctatctcccttatccaggagggattttccatcaaaattatttatgtcgattgtattcctcaatgggccaaccatagcatcccagngatgtggcaacttcactgccatt

SEQ ID NO: 250231 - DNA, 883 bp, Homo Sapiens
  misc_feature (64)..(107): n is a, c, g, or t
  misc_feature (681)..(681): n is a, c, g, or t
  misc_feature (752)..(752): n is a, c, g, or t
gggggggaacacaggtttgcctgagggttaagaagcatccaagagtaagggaagactgggtaannnnnnnnnnnnnnnnnnnnnnnnnnnnnnnnnnnnnnnnnnnnagacaccctagcaaaggcttcccacagtgcccccacctgacagccccatcctcaaagactgtcttaattactcatggcaggttctagagacttaaggggaaaagctgctttcaaggccaccacatgtctgtgctccccaaccagctctatatgccttgtgtgcatattgtgattttgtgacgtgagactgcaaagaccaataaaaacatattttataagaacaaaaggcctgggtgcctacccgtgtgggggcactgtgggaagcctttgctagggtgtcttgtgctgtgtggtttggtttgtgtgcccctttattttgctttgcttacccagtcttcccttactcttggatgcttcttaaccctcaggcaaacctgtgttccccctgtattcaagctctgctttaaagcaagccatgaggctgttggagtttctgtttaaggcattaaaaattcccgcaaactataaagagcaatggtttcagacttttaggattagaagaattacatataaattaataaacattttcaatgatggaaaaatgtgtcttgtaattctctggctcttgcctcgntgagtacatcagagaggaagactctcagacatgtttgctccctaaatgcttgtcttgtatggggtcatctnttctagctgtgttgagatctggtaagtttgcacatgagtttggggcctctggcaacatatagactcaggaactgtgtaagaaaaaaacacatgtacaatcatgtacatacaacgcgttcttctgctaaaat

SEQ ID NO: 250232 - DNA, 977 bp, Homo Sapiens
aatagtgaggggcaccgggagcgaggtgcagggggcggggctcggcctggccgcagcctttttggtgcgagagaaacaataggacggaaacgccgaggaacccggctgaggcggcagcagagcatcctggccagaacaagccaaggagccaagacgagagggacacacggacaaacaacagacagaagacgtactggccgctggactccgctgcctcccccatctccccgccatctgcgcccggaggatgaccccagccttcagggccatggatgtggagccccgccccaaaggcgtccttctggacccctttgtccaccaggtcggggggcactcatgcgtgctccgcttcaatgagacaaccctgtgcaagcccctggtcccaagggaacatcagttctacgagaccctccctgctgagatgcgcaaattcactccccagtacaaaggggacatcagcagccaccagcatggtggggtctttgttggggagtgggggagtcttttgtaaatcaagacaaagccaaaggccccttgttagctggccatccctgccccattttttcccctggtcctttcccctgtggccacagggaagtgtggcctgaataccccaccccggctcctctgcacccagagctgggggccacctcagaagtgtcatctctctctgagcacgcattcccctgcagcagtcgaggactgagcagattgagtgatgctggggcagagaggcctgggaggaaaggtgttcagccagtcgtttgtaaggcgctcgtcggcacctgctgaaacgcccccacctgacagcccccatcctcaagactgtcttaattactcatggcagggtctagagacttaaggggaaaagctgcttttcaagccaccacatgtctgtgctcccccaccagctctatctgccctggggttcattttggtaaatttggggaccgggaaactggcaaaggcccaattaa

SEQ ID NO: 250233 - DNA, 583 bp, Homo Sapiens
  misc_feature (30)..(30): n is a, c, g, or t
  misc_feature (149)..(149): n is a, c, g, or t
  misc_feature (433)..(481): n is a, c, g, or t
cgtgctcacagagagatgacacttctgagntggcccccagctctgggtgcagaggagccggggtggggtattcaggccacacttccctgtggccacaggggaaaggcccaggggaaaaaatggggcagggatggccagctaacaagggncctttggctttgtcctggaaaaaaacaacagagaaggaccaagtgagggcccccaactcccccatccccaccgcaatacacatgcatattcagagtacagagaaaggcacccagtacattctgtccttaaagacaatgtttcaacagtcccaaaagaacctaagttgttctagagtcctttatgtaaccaggtaatgcacatttaaaattaatttctttaatggattcttacttgatttacaaaagactcccccactccccaacaaagaccccaccatgctggnnnnnnnnnnnnnnnnnnnnnnnnnnnnnnnnnnnnnnnnnnnnnnnnntatcatatgtgaatcgaagggttgctttcatatagcaattttggggacattctgtaacagcaaagggcttgggctaatcagcacaggcctcccactcctgca

SEQ ID NO: 250234 - DNA, 719 bp, Homo Sapiens
attaagacagtctttgagggatggggctgtcaggtgggggcgtttcagcaggtgccgacgagcgccttacaaacgactggctgaacacctttcctcccaggcctctctgccccagcatcactcaatctgctcagtcctcgactgctgcaggggaatgcgtgctcagagagagatgacacttctgaggtggcccccagctctgggtgcagaggagccggggtggggtattcaggccacacttccctgtggccacaggggaaaggaccaggggaaaaaatggggcagggatggccagctaacaaggggcctttggctttgtcctttgtactggggagtgaatttgcgcatctcagcagggagggtctcgtagaactgatgttcccttgggaccaggggcttgcacagggttgtctcattgaagcggagcacgcatgagtgccccccgacctggtggacaaagggctccagaaggacgcctttggcgcggggctccacatccatggccctgaaggctgggctcatcctccgggcgcagatggcggggagatgggggaggcagcggagtccagcggccagtacgtcttctgtctgttgtttgtccgtgtgtccctctcgtcttggctccttggcttgttctggccaggatgctctgtgccgcctcagccgggttcctcggcgtttccgtcctattgtttctctcgcaccaaaatggctgcccc

SEQ ID NO: 250235 - DNA, 1110 bp, Homo Sapiens
ggccggacccggaacgcaggcggagcgcaagtctgtcagccagtcagtccgccagtccgccagcccagtacctctctctcctcggccctcgtaagctgtccgcggtctgtttggcccgaacggcggcggaggcgctgatcatggcgacattcatctcggtgcagctgaaaaagacctcagaggtggacctggccaagccgctggtgaagttcatccagcagacttacccaagcggcggggaagagcaggcccagtactgccgcgcggcggaggagctcagcaagctgcgccgcgccgcagtcggtcgtccgctggacaagcacgagggcgcgctcgagacgctcctgagatattatgatcagatttgttctattgaacccaaattcccattttctgaaaatcagatctgcttgacatttacctggaaggatgctttcgataaaggttcactttttggaggctctgtaaaactggctcttgcaagcttaggatatgaaaagagctgtgtgttgttcaattgtgcagccttagctagccaaattgcagcagaacagaacctggataatggtgaaggattgaaaatcgctgctaaacattaccagtttgctagtggtgcctttttacatattaaagagacggttttatctgccttaagtcgagcagccgaccgtggacactatctccagatactgttgggaccctcagtctcattatgctggcacaggctcaagaagtattttttttaaaagccacaagagataaaatgaaagatgccatcatagctaaattggctaatcaggctgcagattattttggtgatgctttcaaacagtgtcaatacaaagatactctccccaaggaggtgttccctgtcttggctgcaaagcactgtatcatgcaggccaatgctgagtaccatcagtctatcctggcaaaacagcagaagaaatttggagaagaaattgcaaggttacagcatgcagcagaactgattaaaacagtggcatctcgctatgatgaatatgttaatgtgaaggatttttctgacaaaatcaatcgtgcccttgctgcagcaaagaaggataatgacttcatttatcatgatcgagt

SEQ ID NO: 250236 - DNA, 597 bp, Homo Sapiens
ttgatcacagggactctgtggagcaggtagctgtgctggcgtctttgggaatcctttctttcctgggactggtggctggggccctggcactggggctctggctgaggctgagacggggtgggaaggatggatccccaaagcctgggttcttggcctcagtgattccagtggacaggcgtccaggagctccaaacctgtagaggacccaggagggcttcggcagattccacctataattctgtcttgctggtgtggatagaaaccaggcaggacagtagatccctatggttggatctcagctggaagttcctgtttggagccccatttctgtgagaccctgtatttcaaatttgcagctgaaaggtgcttgtacctctgatttcaccccagagttggagttctgctcaaggaacgtgtgtaatgtgtacatctgtgtccatgtgtgaccatgtgtctgtgaggcagggaacatgtattctctgcatgcatgtatgtaggtgcctggggagtgtgtgtgggtccttggctcttggccttttcccttgcaggggttgtgcaggtgtgaataaagagaataaggaagttcttggaaaaaaa

SEQ ID NO: 250237 - DNA, 393 bp, Homo Sapiens
  misc_feature (21)..(21): n is a, c, g, or t
  misc_feature (44)..(44): n is a, c, g, or t
  misc_feature (110)..(110): n is a, c, g, or t
taaataccctgaaagggaaantccaacctggggtcccttccctnaagtaccctgaagaggagggaaaagagaccccacttctgagccccagggactcaaagaatgaaaangcccagccctcagcctagacatcaattaaaatgaggagacccaacttggattcccagcatgttttaaaatgactagggcagccagctcttaatctggacactcaaaatagggggaaacatctccaagtccaaatcttctggatgtcctactcacctggacgcctgtccactggaatcactgaggccaagaacccaggctttggggatccatccttcccaccccgtctcagcctcagcctggggcatagaaaggcagctgtctctccaacaatgtgggttatct

SEQ ID NO: 250238 - DNA, 503 bp, Homo Sapiens
tgcaaatccaactacaaacaactgggttatctttcttgaattaattcttatttcttgttaaacttagggccactgtttgtggaagatataatgacaatggtgctgtgtaaacccaaacttttacccttaaaatctctgactctggaaaaactagagaaaatgcatcaagcagcacagaatacaattcgccaacaagaaatggcagaaaaggatcaacggcaaataacccactgaatgataactgagcactttagggaacaacctgccttatctactatttaacaataactagaaaatatgcttctgtgtgctgaaagtagtatgtgttatcaataaaattgatagtattcatagaaatacaaaaatatccaagattgatgaaatttgtattgtgaatgtaaacactctggtttgtattgaacataaacagttaaactatgaaccaagttttatggggtttaagtcatgtttttagaattgcaaattaaattatttgttcacca

SEQ ID NO: 250239 - DNA, 554 bp, Homo Sapiens
cacttcacactccttatgttcccttccccttcatgcagaacagcagacttccatctgttcatccaagaccgttcaaacagtagcagcttcttccctccggtcacaaactgcttgcaactggatctcacgaaatgtgggtgcacagcaataattttaatgggacagtcaaaagtctcgtgaaattcttctccagaatacagtccaaatacctggaccttgccatcctctgaacacacacccatgtgctctccactttcatccaagctaatctgatttatcttcacaggacttacatcaaacttctgagtgatgttcccctggacatcaagtaaataaaccttgccataatgtgtgcccaatgccaaaaacttgtcatggactgtcatgcagctagctgcatccttctgaagtatttcagttaccccattggaaagcctttcatacttcagcttgggttcctcttcgctctcttcttcctcagactcatctgtagattcttcaagggacccagtttcctgctcctctgcttccgccatggcgccacgggagagtcc

SEQ ID NO: 250240 - DNA, 966 bp, Homo Sapiens
atccaattacctacttagatcataacaacttttggaggacaatggatgacatggggcgagagattccgagtgatgccccatggaaggctccccttgcagaagagtgggacaacatgacaatgaaggagctactggacaagctctgctggactgaatctgcaaagcagcttgccactctctttgtgaacctgtgtgtcactgcagagacccatgaggtctctgctctctggttcctgtggtatgtgaagcagtgtggaggcacaacaagaatcatctcgacaacaaatggaggacaggagaggaaatttgtgggcggatctggtcaagtgagtgagcggataatggacctccttggagaccgagtgaagctggagaggcctgtgatctacattgaccagacaagagtgtccttgtggagaccctaaaccatgagatgtatgaggctaaatatgtgattagtgctattcctcctactctgggcatgaagattcacttcaatccccctctgccaatgatgagaaaccagatgatcactcgtgtgcctttgggttcagtcatcaagtgtatagtttattataaagagcctttctggaggaaaaaggattactgtggaaccatgattattgatggagaagaagctccagttgcctacacgttggatgataccaaacctgaaggcaactatgctgccataatgggatttatcctggcccacaaagccagaaaactggcacgtcttaccaaagaggaaaggttgaagaaactttgtgaactctatgccaaggttctgggttccctagaagctctggagccagtgcattatgaagcccctgggatcctgactcaatatggaagggttctacgccagccagtggacaggatttactttgcaggcaccgagactgtcacacactggagcggctacatggagggggctgtagaggccgcggagagagcagcccgagg

SEQ ID NO: 250241 - DNA, 975 bp, Homo Sapiens
  misc_feature (923)..(923): n is a, c, g, or t
  misc_feature (940)..(940): n is a, c, g, or t
catcaagtgtatagtttattataaagagcctttctggaggaaaaaggattactgtggaaccattgattattgatggagaagaagctccagttgcctacacgttggatgataccaaacctgaaggcaactatgctgccataatgggatttatcctggcccacaaagccagaaaactggcacgtcttaccaaagaggaaaggttgaagaaactttgtgaactctatgccaaggttctgggttccctagaagctctggagccagtgcattatgaagaaaagaactggtgtgaggagcagtactctgggggctgctacacaacttatttcccccctgggatcctgactcaatatggaagggttctacgccagccagtggacaggatttactttgcaggcaccgagactgccacacactggagcggctacatggagggggctgtagaggccggggagagagcagcccgagagatcctgcatgccatggggaagattccagaggatgaaatctggcagtcagaaccagagtctgtggatgtccctgcacagcccatcaccaccacctttttggagagacatttgccctccgtgccaggcctgctcaggctgattggattgaccaccatcttttcagcaacggctcttggcttcctggcccacaaaagggggctacttgtgagagtctaaagagagagggtgtctgtaatcacactctcttcttactgtatttgggatatgagtttggggaaagagttgcagtaaagttccatgaagacaaatagtgtggagtgaggcggggagcatgaagataaatccaactctgactgtaaaatacatggtatctctttctccgttgtgggcccctgccttagtgttcccttacctgggcttagcgttgctgttttcaccagttttccaagtttattntccctcaaaatgctttnagaatagtttaaattgggcttgttttaaggttctt

SEQ ID NO: 250242 - DNA, 1258 bp, Homo Sapiens
  misc_feature (114)..(114): n is a, c, g, or t
ccaatggtggccggaacggaagtttgtaggtggatctggtcaagtgagcgaacggataatggacctcctcggagaccaagtgaagctgaaccattctgtcactcacgttgaccngtcaagtgacaacatcatcatagagacgctgaaccatgaacattatgagtgcaaatacgtaattaatgcgatccctccgacctggactgccaagattcacttcagaccagagcttccagcagagagaaaccagttaattcagcgtcttccaatgggagctgtcattaagtgcatgatgtattacaaggaggccttctggaagaagaaggattactgtggctgcatgatcattgaagatgaagatgctccaatttcaataaccttggatgacaccaagccagatgggtcactgcctgccatcatgggcttcattcttgcccggaaagctgatcgacttgctaagctacataaggaaataaggaagaagaaaatctgtgagctctatgccaaagtgctgggatcccaagaagctttacatccagtgcattatgaagagaagaactggtgtgaggagcagtactctgggggctgctacacggcctacttccctcctgggatcatgactcaatatgggaagggtgattcgtcaacccgtgggcaggattttctttgcgggcacagagactgccacaaagtggagcggctacatggaaggggcagttgaggctggagaacgagcagctagggaggtcttaaatggtctcgggaaggtgaccgagaaagacatctgggtacaagaacctgaatcaaaggacgttccagcggtagaaatcacccacaccttctgggaaaggaacctgccctctgtttctggcctgctgaagatcattggattttccacatcagtaactgccctggggtttgtgctgtacaaatacaagctcctgccacggtcttgaagttctgttcttatgctctctgctcactggttttcaataccaccaagaggaaaatattgacaagtttaaaggctgtgtcattgggccatgtttaagtgtactggatttaactacctttggcttaattccaatcattgttaaagtaaaaacaattcaaagaatcacctaattaatttcagtaagatcaagctccatcttatttgtcagtgtagatcaactcatgttaattgatagaataaagccttgtgatcactttctgaaattcacaaagttaaacgtgatgtgctcatcagaaacaaaaaaaa

SEQ ID NO: 250243 - DNA, 512 bp, Homo Sapiens
  misc_feature (50)..(50): n is a, c, g, or t
  misc_feature (133)..(133): n is a, c, g, or t
aagccacatcacgtttaactttgtgaaatttccagaaagtgaatcaccangcctttaatcctaatcaataaacatgagttgaacctaacactgaacaaaataagaagggagcttgaaccttaactgaaaattnaattaggtgattctttgaaattgtttttacttttaacaatgattggaattaagccaaaggtagttaaatccagtacacttaaacatggcccaatgacacagcctttaaacttgtcaatattttcctcttggtggtattgaaaaccagtgagcagagagcataagaacagaacttcaagaccgtggcaggagcttgtatttgtacagcacaaaccccagggcagttactgatgtggaaaatccaatgatcttcagcaggccagaaacagagggcaggttcctttcccagaaggtgtgggtgatttctaccgctggaacgtcctttgattcaggttcttgtacccagatgtctttctcggtcaccttcccgagaccatttc

SEQ ID NO: 250244 - DNA, 508 bp, Homo Sapiens
  misc_feature (484)..(484): n is a, c, g, or t
ccccaaaccctccggggaaaggggaaccctgcccccctgtttcctggcccgctgaaagaacattgggattttccccacatccagtaacctgcccccggggtttgtgcctgtaccaaataccaagctccctgcccacggtccttgaagttcctgttccttatgcctctctgcctcactggttttcaatacccacccaagaggaaaatattgacaagtttaaaggctgtgtcattgggcccatgtttaagtgtactggatttaactacctttggcttaattccaatcattgttaaagtaaaaacaattcaaagaatcacctaattaatttcagtaagatcaagctccatcttatttgtcagtgtagatcaactcatgttaattgatagaataaagccttgtgatcactttctgaaattcacaaagttaaacgtgatgtgctcatcagaaacaatttctgtgtcctgtttttattcccttcaatgcnaaatacatgatgatttcagaaaca

SEQ ID NO: 250245 - DNA, 571 bp, Homo Sapiens
tgttaacagttatgttaacattgggggtagctatgcaaggggtgtgagaatgctgttatatctttaaccttggcccatggttaaggtgtttccagtgtaaggtcactgttattccttgtagttaacatatatttggcaccacaggattcattctggaattctccttggcttatttataactttttttctagtagtgagaaacctggctttcatgcagagtttacaaacgccaatttaaacttttgttttgtcatacgcaatgattttattacctgtctttatttcagagcttatgaatttttaattattctaagggctaacatagaacttttccatgttttctactcttcaagagtaggtaagactttagtttgtaatacattacaaaaggaatcctgtggttctctaagagctaatttgtcttggcaaaaggccttagcgagctgggattacaggagtgagccaccacacccagcctctagtagtacttttatcaaaagtaaatgggaaacatgaaattaattttcacaatacattttatttaaactaatatgttcacaatgttaaaatt

SEQ ID NO: 250246 - DNA, 839 bp, Homo Sapiens
  misc_feature (312)..(320): n is a, c, g, or t
ggggaaatatctgtgtcttgatttcttagttgccttgaaaatcatgtactgaactgtaaccgctaacttgactggatgaactagtttgcttgtgtgtagagagtgtattgcttcctcagatttcactgttttcatctccttttccatcttagtctttattccttaagaccaaaaactgtaatatcctttagaaatgctctagaagatctgtattgtgtagaatgatcatgtatttataaatattttacaagtttagattataaaatgaaaaagaaggtcatgtgttttggggggtattttgcatgttcggannnnnnnnncccttcaccgaacccttctgattctttcaaactattgccaggtagttgttagtgtttctaattggactcttaatatgaacttcaagaagctgttaccagttatcggctctgtcatctgaaattttaaccacttaatttaaagttacaattttagaatttgtttttgttgttttaccttaagaaacacaataaatcactgtttaaaaaagatctcaatttatataaagtactggaaaaaaagctaagtaatttttaattctatctataatctccgtaagatgaattagaaataaattgggaagaaaagaaattaactgcttatttatgaatctaatcatttaaaaaatgtatggaaaagaaaacctgcctttcttaataaaaccaaggcccaaatttggcattcaagctcctgaaattgaattttttgccttgggaactggttgctaacggcaaaccggtaaatttttgcctaccccgaaagggccttaaaactgttttaaaatttggcgtgctaatctc

SEQ ID NO: 250247 - DNA, 212 bp, Homo Sapiens
gttgttttcctatttctaccatcacaccttcaaggataaatttgctggttgcattcacatattcataaccagttcccctggttattccacctattgcagattaaatcacgtatatcaatcccaacatcttagaggaatacagtcttttcatgttacccaacagaggggttgagagagtggaggaaggaggcctcttttaatgggtttttttt

SEQ ID NO: 250248 - DNA, 2396 bp, Homo Sapiens
  misc_feature (507)..(507): n is a, c, g, or t
  misc_feature (2005)..(2005): n is a, c, g, or t
tgcagggcaccttacagaggcccctggtccgggacagccgcacctcccctgccaactgcacctggctcatcctgggcagcaaggaacagactgtcaccatcaggttccagaagctacacctggcctgtggctcagagcgcttaaccctacgctcccctctccagccactgatctccctgtgtgaggcacctcccagccctctgcagctgcccgggggcaacgtcaccatcacttacagctatgctggggccagagcacccatgggccagggcttcctgctctcctacagccaagattggctgatgtgcctgcaggaagagtttcagtgcctgaaccaccgctgtgtatctgctgtccagcgctgtgatggggttgatgcctgtggcgatggctctgatgaagcaggttgcagctcagaccccttccctggcctgaccccaagacccgtcccctccctgccttgcaatgtcaccttggaggacttctatggggtcttctcctctcctnggatatacacacctagcctcagtctcccacccccagtcctgccattggctgctggacccccatgatggccggcggctggccgtgcgcttcacagccctggacttgggctttggagatgcagtgcatgtgtatgacggccctgggccccctgagagctcccgactactgcgtagtctcacccacttcagcaatggcaaggctgtcactggggaaacactgtcctggccaggctggtgtgttcctaccacacagttgcttggagcaatggtcgtggcttcaatgccacctaccatgtgcggggctattgcttgccttgggacagaccctgtggcttaggctctggcctgggagctggcgaaggcctaggtgagcgctgctacagtgaggcacagcgctgtgacggctcatgggactgtgctgacggcacagatgaggaggactgcccaggctgcccacctggaccttccccctgtgggggctgctggcacctctggtgccacagcctgctacctgcctgctgaccgctgcaactaccagactttctgtgctgatggagcagatgagagacgctgtcggcattgccagcctggcaatttccgatgccgggacgagaagtgcgtgtatgagacgtgggtgtgcgatgggcagccagactgtgcggacggcagtgatgagtgggactgctcctatgttctgccccgcaaggtcattacagctgcagtcattggcagcctagtgtgcggcctgctcctggtcatcgccctgggctgcacctgcaagctctatgccattcgcacccaggagtacagcatctttgcccccctctcccggatggaggctgagattgtgcagcagcaggcacccccttcctacgggcagctcattgcccagggtgccatcccacctgtagaagactttcctacagagaatcctaatgataactcagtgctgggcaacctgcgttctctgctacagatcttacgccaggatatgactccaggaggtggcccaggtgcccgccgtcgtcagcggggccgcttgatgcgacgcctggtacgccgtctccgccgctggggcttgctccctcgaaccaacaccccggctcgggcctctgaggccagatcccaggtcacaccttctgctgctccccttgaggccctagatggtggcacaggtccagcccgtgagggcgggggcagtgggtgggcaagatgggggagcaggcacccccactgcccatcaaggctcccctcccatctgctagcacgtctccagcccccactactgtccctgaagccccagggccactgccctcactgcccctagaggcatcactattgtctggaagtggtgcaggcccctgcaaggcccgcctggttgcccagccctggggcccccaggaccaacccggagcccccctggaccccacacagcagtcctggccctggaagatgaggacgatgtgctactggtgccactggctgagccggggatgtgntggtagctgaggcagaggatgagccactgcttacctgaggggacctggggactctacttgaggcctctcccctgggggctctactcatagtggcacaaccttttagaggtgggtcagcctcccctccaccacttcctttcctgtccctggatttcaaggacttggtgggcctcccgttgaccctatgtaactgctataaagttaagtgtcccctccggcaggggagagggctccacagagtctccctctggtacgtgggccatgggccaggaacacccccaagtctccttcaccaaccaacctgggttccccacggggcagccaacaattttggggcggggcttgctcttttcaaaaaaggttgaaaggcctcctttacaaggggatccct

SEQ ID NO: 250249 - DNA, 642 bp, Homo Sapiens
  misc_feature (477)..(477): n is a, c, g, or t
  misc_feature (494)..(494): n is a, c, g, or t
  misc_feature (505)..(527): n is a, c, g, or t
gggagtgaacggagagcgtagtgaccatcatgagcctcctcaacaagcccaagagtgagatgaccccagaggagctgcagaagcgagaggaggaggaatttaacaccggtccactctctgtgctcacacagtcagtcattaacaatacccaagtgctcatcaactgccgcaacaataagaaactcctgggccgcgtgaaggccttcgatagtgcctcccctccctgttccccaccaggcactgcaacatggtgctggagaacgtgaaggagatgtggactgaggtacccaagagtggcaagggcaagaagaagtccaagccagtcaacaaagaccgctacatctccaagatgttcctgcgcggggactcagtcatcgtggtcctgcggaacccgctcatcgccggcaagtaggggccgcctgtctgttgacagaactcactcctctgtcctatgaagaccgctgccattggtgttgngaataataaagctctgngtttttttctnnnnnnnnnnnnnnnnnnnnnnngatctttattattctcaacaccaatggccgcctgtctgttgacagaactcactcctctgtcctatgaagaccgctccattggtgttgagaataataaagctctgtgtttttttct

SEQ ID NO: 250250 - DNA, 857 bp, Homo Sapiens
  misc_feature (828)..(828): n is a, c, g, or t
  misc_feature (845)..(845): n is a, c, g, or t
agtagatacgtcagtaacgcgtcccagagggaagaggggcggtgcctgtctccgaagcgaggagcggattggcttcacggaggccgcgcccccgaagtcacggccggcgggcatttggaaatagcttgtcatttccctccttcaacctgtaccattcttcaagaaacggtttgaatcagaccgcctttccttttgtcttcattgtcataaacatctgcccccgtgtggttctgactggccgcgaacccctacccgaagcttttattccatcattgtgcaccgttggtggggaatgctgtggcaacaggccacgcctccacttactggttggctttgcgcaggcgccaacggaagtgggtcgcaggaagaggaagtcccgcctctctctcctcaggcagcagcaacgcggaggaaacgggagtgaacggagagcgtagtgaccatcatgagcctcctcaacaagcccaagagtgagatgaccccagaggagctgcagaagcgagaggaggaggaatttaacaccggtccactctctgtgctcacacagtcagtcaagaacaatacccaagtgctcatcaactgccgcaacaataagaaactcctgggccgcgtgaaggcctttcgataggcactgcaacatggtgctggagaacgtgaaggagatgtgggactgaggtacccaagagtgggcaagggcaagaaaggaagtccaagccagttcaacaaagaccgttacattttccaagatgtttcctggcggcggggaattcagttcttcgtgggtccttgcgggaacccgtttcattcggccgggcaagttaggggggnccgctgttttgttttgnacagaatttcat

SEQ ID NO: 250251 - DNA, 602 bp, Homo Sapiens
  misc_feature (527)..(527): n is a, c, g, or t
  misc_feature (551)..(551): n is a, c, g, or t
  misc_feature (559)..(559): n is a, c, g, or t
gggagtcccgcctctctctcctcaggcagcagcaacgcggaggaaacgggagtgaacggagagcgtagtgaccatcatgagcctcctcaacaagcccaagagtgagatgaccccagaggagctgcagaagcgagaggaggaggaatttaacaccggtccactctctgtgctcacacagtcagtcaagaacaatacccaagtgctcatcaactgccgcaacaataagaaactcctgggccgcgtgaaggccttcgataggcactgcaacatggtgctggagaacgtgaaggagatgtggactgaggtacccaagagtggcaagggcaagaagaagtccaagccagtcaacaaagaccgctacatctccaagatgttcctgcgcggggactcagtcatcgtggtcctgcggaacccgctcatcgccggcaagtaggggccgcctgtctgttgacagaactcactcctctgtcctatgaagaccgctgccattggtgttgagaataataaagctctgtgtttttttcttncggcgacccactgaagcaaaaaanaaaaaganaaaacccaccagccacccccccctaccaaaccggaaaaagcgc

SEQ ID NO: 250252 - DNA, 807 bp, Homo Sapiens; identical to SEQ ID NO: 15290
  misc_feature (526)..(550): n is a, c, g, or t
  misc_feature (620)..(648): n is a, c, g, or t
  misc_feature (674)..(702): n is a, c, g, or t

SEQ ID NO: 250253 - DNA, 838 bp, Homo Sapiens
gggggcccggccgggggggcaagatggcggcggcagtaggggttcgtggccggtacgagctgccgccttgctccggcccaggctggctcctcagcctttccgccttgctgagtgtggcggcacgaggggccttcgccaccacgcactgggtcgtcacggaggacgggaaaatccagcagcaggtggattcaccaatgaacttgaagcatcctcatgacctagtcatattaatgagacaagaagcaacagttaactacctcaaagaattagagaaacaattagttgctcaaaaaattcacatagaagagaatgaggacagagacacaggactggaacagagacataataaagaagacccagactgcatcaaagccaaggtgcccttaggggacctggatctatatgatggcacatacataactttggagagcaaagacatcagtcctgaagattatatagacacagaatctcctgtccctccagacccagagcaacctgattgtactaaaattctagaacttccatatagtatacatgcttttcagcacttgagaggtgtacaggagagagttaatctttctgcacctctgctacctaaagaagacccaatcttcacatatttagctaaaccggttaggaaaggagtatagaatgacatagggccaacttcattcatggaaggcctaccggaagaacacttccttccggggtactgtaataacatggctttcatttttacttggagatttaagaattgagccctattcggggaataaaaatgtgcccttgcggaacacttccctttctcctttccggggaacaattaaaaaaccattgt

SEQ ID NO: 250254 - DNA, 836 bp, Homo Sapiens; identical to SEQ ID NO: 15291

SEQ ID NO: 250255 - DNA, 620 bp, Homo Sapiens
  misc_feature (585)..(585): n is a, c, g, or t
gttattggtggtatctgtttccgtatgttcccatctcaaggattcacagagattgtcttctgtgctgtaacctcaaatgagcaagtcaagggctatggaacacacctgatgaatcatttgaaagaatatcacataaagcatgacatcctgaacttcctcacatatgcagatgaatatgcaattggatactttaagaaacagggtttctccaaagaaattaaaatacctaaaaccaaatatgttggctatatcaaggattatgaaggagccactttaatgggatgtgaggctaaatccacggatcccgtacacagaattttctgtcatcattaaaaagcagaaggagataattaaaaaactgattgaaagaaaacaggcacaaattccgaaaaagtttaccccgggactttcatgttttaaagatggagttcgacagattcctatagaaagcattcctggaattagagagacaggctggaaaccgagtggaaaagagaaaagtaaagagcccagagaccctgacccagctttacagcacgctccagagcatcctccagcaggtgaagagccatccaagcgcttggnccttccatgggacctgtgaagagaccggagctccc

SEQ ID NO: 250256 - DNA, 733 bp, Homo Sapiens
  misc_feature (150)..(168): n is a, c, g, or t
ggccggggactcgggagcaagtgtgaatcattgccggggctgggaaaggaggaaggcgcatttaaccctcctcccacccctctccatgtccgcgtgtcactcggctcggtccacctggcgcggccggtcctggggctgctgctgctgttnnnnnnnnnnnnnnnnnnnggggctgcctctgctgtcccgggagtttcctcctgctccggccacacagctcctggggattgttcctcttcgaaccagaacctcggcctgaccggcactttggctccaaaataactttatttttgggggagaaagcacatcacgaaccagtcaaaatcgtggtttatttctgtaacgtgaagacttctgctcttttcttctttgtatgttttgtcgtaaacatctgggtgtatatcaaacggcaagatgtccagtaatgtcccggcggatatgataaatttgcgcctcattttggtaagcggaaaaacaaaagagttcctgttttctcctaacgattctgcttctgacattgcaaagcatgtatatgacaattggccaatggactgggaagaagagcaggtcagcagtccaaatattctacgacttatttatcaaggacgatttctacatggaaatgtcacattaggagcattaaaacttccttttggcaaaacaacagtgatgcatttggtggccagagagacattaccagagccaaactctcaaggtcagaggaatcgtgaga

SEQ ID NO: 250257 - DNA, 995 bp, Homo Sapiens
ccacatcccacccagaagctgtagagcctgttccaaagccagtccctttggcccaatataactgttgttcttctgttgatgtagggttatgagagcttgacacctgtggctcagtttgattcacgctagagtttggaactcgtggggaatggtggctcaaagcagagagacagacaagaatgagggtgtaaggctccaatttcccaatgccatccgccttagaagtacaccatcatcagttgtcaaagggtgtagtgctaaacaagctacgaagggacgtggaaaggaaagggtgggaagcacattggctgatggagattgaagaatatgacttccttctccatcatctgtcactcccaataccaatcgaagaaggcactgggcatgttttctctctttcagtagcacttccgcatagcccggaagacgaagaaataatccaaaagcagccaaagaatgggcaggtatgggagacatggtctgtactgctgacttgataggtggaggttcagccgcaacagtttctggtgcttcataaactaactcccctgactgttcaatggtcacccattcaaactgatcgctatccttcggcttttcctgagtggtagatgttacaactggagcactcacctgttgaattactttctgaatatagcaggggtagtctttcagcaataagagccagtccacccattcctgcaaaaacttgtaatggtgactgaattgcacaggtttcaaacaaagattcatccagtatcccatccatgcattcatcacctggagtgagagcctcatcttctgcacagctagcaagtaagtctccatgatcttttcaagggtgtagtcttttataagaatctgtttttgatagagtggggtctgttataactcttgatcccaattacacagtcagatctattgagcggtacccctgagaaagttttcggtcatatagaagagttaaaagctggacaagtgtcattccagcggcc

SEQ ID NO: 250258 - DNA, 971 bp, Homo Sapiens
  misc_feature (913)..(913): n is a, c, g, or t
ggcagccgacgtgaccttcccaacatggcggaggcccgccgtatgtgaaggagtaccccagggggagccaaagccaatggaaaaccgcgagaggcgtcggggcggggaagacggcggccgcttgcccaacccgaggctcgggaggtggctggggagtgaattttctggaaggcgactttaaaggcgccgggactgagcgaagggcgtttgggtactgccgtcgccgccgcccaggccggggaggggtgcgttagtgtcaggaagcgggctgcgccgaggtcgtagcggaaccagctggcgaccccgcagaatgaaccacaagagcaagaagcgcatccgcgaggccaagcggagtgcgcggccggagctcaaggactcgctggattggacccggcacaactactacgagagcttctcgctgagcccggcggccgtggcggataacgtggaaagggcagatgctttacagctgtctgtggaagaatttgtggagcggtatgaaagaccttacaagcccgtggttttgttgaatgcgcaagagggctggtctgcgcaggagaaatggactctggagcgcctaaaaaggaaatatcggaaccagaagttcaagtgtggtgaggataacgatggctactcagtgaagatgaagatgaaatactacatcgagtacatggagagcactcgagatgatagtcccctttacatctttgacagcagctatggtgaacaccctaaaagaaggaaacttttggaagactacaaggtgccaaagtttttcactgatgaccttttccagtatgctggggagaagcgcaggcccccttacaggtggtttgtgatggggccaccacgctccggaactgggattcacatcgaccctctgggaaccagtgcctggaatgccttagttcanggccacaagcgctggtgcctgtttcctaccacactcccagggaactcatcaagtgacc

SEQ ID NO: 250259 - DNA, 925 bp, Homo Sapiens
  misc_feature (126)..(126): n is a, c, g, or t
  misc_feature (144)..(144): n is a, c, g, or t
  misc_feature (541)..(541): n is a, c, g, or t
catgtatcaggtaaagtgcaacactcacaatcttttgtttcagaatataacaaaagatttgaagattactcctgggtatgcttgataaaggtgtgttataggaagaatagataggaagaatggtanatatatacctacataaanacacatgtatatatacagaaagaaagatggtgaaatccataattataaaaaaataattatccagaagtcatttcactaagctcaaaccagtgtacatgttcagtctgaagtttgccagtttggcctataatactataatattcatagtctgctgaaaaaaaatggttgttggaacacagcccgtaggaaatgcattataaataaagggctttaaagtgataatggtccactcgttagaaaatttgggaacagctctctaaaaaattatatttttaaagaacatattttgaacaagtatcaaagatgtatttgaaatgaacctctgcccacccagtggggttcattttactgaggcaagcacatatggtaagtagtatttcaagtctaagacttctcncagtataatttaactcagttatactttcatttcaagatatcttcaagggcttacttttcttgaataaattgaatgctttagtgtttctctacccatttaaaagctgagagattatctttggctgtattattacctttgcagttcttctatctcaaagagtaatcattgctgagattttccccttgcatgaagacataatatgtcacaagatcatgagtaaaagaagtccaaacaaaattcattttttcttgtaaacagtgtcttttaaatttctttactacaacctgagtctgttttccattctctcaatttgaaagaagtccttaatcatcattgcttttactgttgatataactccaactgtctcttctgttttcttcttgt

SEQ ID NO: 250260 - DNA, 638 bp, Homo Sapiens
tttatgacatttatgtatttttaaaaaactttgtatcgttataaaaaggctagtcattctttcaggagaacatctaggatcatagatgaaaaatcaagccccgatttagaactgtcttctccaggattgtctctaaggaaatttacatttggttctttcctactcagaactactcagaaacaactatatatttcaggttatttgagcacagtgaaagcagaggactatggttgtccaacacaggcctctcagataacaaggggaacacaattacatattgggctagattttgcccagttcaaaatagtatttgttatcaacttactttgttacttgtatcatgaattttaaaaccctaccactttaagaagacagggatgggttattcttttttggcaggtaggctatataactatgtgattttgaaatttaactgctctggattagggagcagtgaatcaaggcagacttatgaaatctgtattacatttgtaacagaatataggaaatttaacataattgatgagctcaaatcctgaaaaatgaaagaatccaaattatttcagaattatctaggttaaatattgatgtattatgatggttgcaaagtttttttgtgtgtccaataaacacattgt

SEQ ID NO: 250261 - DNA, 1002 bp, Homo Sapiens
tcagacaaaaccagaaaaggacaaacttacatatcgactatgggacaccgcaagattagaagaacggttaggaaaaggcccaaaggggtttggtagcccctgaggccgagactgggcttcaaacacgctacagagcatcgccagtgtctgaacatcccggagccggcaatagtgagccaacctgaggaaaagataagaggaatgaaaacaagtcaggaggagggattgaggagggaagcggtcacagtcatggcgtgttactgccacaggggtgggaagggaggagtcttgattctgcctcaaaaacccatcaggaaatggggctttctacagatccggcagtttgacctactttgagtttgcctaaacttgttttggaatataaggcatccacgtactacaaatgatctagagaacgcatctcaaagcctctggctaactttcagacatgggcttaaacatgaatgtggcttctcaaaaatctaagtggactaacctgacatctgagcgagccaatacatgctctgtcttcacagctccaaggaagaatcacactgcttgtggggaattcccacacatgtcatttatataacctaaagctacatgaaggagctcagagcacactggaccgccacagcatgctagcaggcaatcgactctgaaggtgcagttatgaagatgagctattaggtaagaccaccaagaagtgtttctgtcctttaggtactcatatcccctttgccctttcaggaagattatgctagaatgtgagtaaggaatcagaggggctttgcctttacacactcactatcttatttgagtcttacacgaaataagtagagtaacccttatcatccctgtgttagtgacaaggaaacggaagcacgaacacgtgtcccaggggtggccttaatgcataaattaagcaaacctcaacttgaagtcaggagcgtttctctccacaggccctgggcctccaagttatggagattcaagtggttt

SEQ ID NO: 250262 - DNA, 1366 bp, Homo Sapiens
  misc_feature (1182)..(1182): n is a, c, g, or t
gcgtgagggatcagactctggcaatcgacagatcaaggctgctgggaaagtcatcatccaggatattgcttgcctcctgcctgttcacaaatcgctgggagagctgtacatattgaatgtgaatgatattcaggaaacatgtcagaagaatgccgcctctgccttgctcgttggaagaaaggatcttgtccaggtttggtcgctggctacggtagctacagatctttgccttggtccgaaatctgacccagatttggaaacaccctgggctcgacatccatttgggcggcagctgctggagtccctgttagctcactattgccggctccgggatgttcagacactggcgatgctctgtagcgtgtttgaagcccagtctcggcctcaggggctaccaaacccctttgggccttttcctaaccgttcttctaatcttgtggtgtcccatagtcgatatcctagctttacctcttctggttcctgctccagtatgtcagacccagggctcaacactggcggctggaacatagcgggaagagaggcagagcacttgtcctccccttggggagaatcctcaccagaagagctccgctttgggagtctgacctacagtgatccccgtgagcgagaacgcgaccagcatgataaaaataaaaggctcctggaccccgccaatacccagcaatttgatgactttaagaaatgctatggggaaatcctctaccgttggggtctgagagagaagcgagctgaagtgttgaagtttgtctcctgtcctcctgaccctcacaaagggatcgagttcggcgtgtactgcagccactgccggagtgaggtccgtggcacgcagtgtgccatctgcaaaggcttcacgttccagtgtgccatctgtcacgtggctgtgcggggatcgtccaatttctgcctgacctgtgggcacggtggccacaccagccacatgatggagtggtttcggacccaggaggtgtgtcccaccgggtgtgggtgccactgcctgcttgaaagcactttctgaacctacagaagttgggtattgtctgaaatcccagaggacccataagtgccggtgacaagctgtctgtcaggggagaggctccagaaacctgggttcgtccccagtggagaccggaggatgatcccccaaagactgcgcagcatcangctcttggtgggcctctgcccttctcttctgtttggccaccctggtggtgggatggcactgggtggaaaaataaggacagaagtgcagaagctgcgcctttgggtgggtggcccatggccggctgagctacccaaagggggaaggttttcatggaagaaaaagcccttgtgttcccggggccaa

SEQ ID NO: 250263 - DNA, 925 bp, Homo Sapiens
ggtacggtccggaattccgggatatcgtcgacccacgcgtccgcacaaagggatcgagttcggcgtgtactgcagccactgccggagtgaggtccgtggcacgcagtgtgccatctgcaaaggcttcacgttccagtgtgccatctgtcacgtggctgtgcggggatcgtccaatttctgcctgacctgtgggcacggtggccacaccagccacatgatggagtggtttcggacccaggaggtgtgtcccactgggtgtgggtgccactgcctgcttgaaagcactttctgaaccctaccagacgttgggtattgtctgaaatcccagaggacccataagtgccggatggacaagccgtctgtcaggggagaggctccagaacctgggttcgtccccagtgagaccggaggatgatcccccaaggactgcgcagtatcagctcttggtgggcctctgccttctcttctgtttggccacctggtgtggatgtcactgtgtgaagataaggacagaagtgcagagctgcgctttgtgtgttgtctatgtcggctgagctaccaaggtggaagttttcatggagaaaagcacctggctccagggccagtgttacagtgttaccctgtaaggtgttagccttaaaccaccgagcagcgttctcttgatgccagtgcagagaccagagtcagatgcccgaggacagtgggtaggaatttcatcaacaaatggacctatggcatcatggctttagaagctggtacatttactgagctgatggacagtggccttctaaaatacgacacttaaattgtaaatatgcactgtacttaaggattcttaagatgtatttttttgttatttctcctccagctgctatcccttggctaataaaattctagtaatttgaaaaacaaaaaaaagagagaa

SEQ ID NO: 250264 - DNA, 955 bp, Homo Sapiens
  misc_feature (28)..(28): n is a, c, g, or t
  misc_feature (31)..(31): n is a, c, g, or t
cacctagtgaccttgaacaggtcccagnagnacaaaatctttttatctgaggaatttaaaagggagcaaagaccacctggtgactatcaggccatgcagaggcaaaatgccttatttggggaaaattaaaagtaattagactttcctattatctaaagcaggcatctggttccagatttcttttccccgaaaaaaaccttagaagtaactaaaatttctgtacatctccggaatgccatgctgaaactcactgcaaccccacggtcccgctttaaggtccataaatatccctaaggaaaaatccaccgtggtacattcagtcctctcaccgaggtgccccatggcagtcttctgcagcattcttctaatacctttcctttttcaaacctatactgttgttggtgaattctttttaccaacccacgagttgaccacttcccaatgccggggatctgacacctcacctggcaatgacctccacagccgtttccctctgttggatcttccagccttattctcaacagttcatttttagttcacattcttgaccgaatctcagtagctcagttaatctttttatgtctgctctgctcttgggtcatatgttccgtgaggtttcttaggggtgggggatgaggagttaaaggtggcatcttcaatcgcaggtcaaagcagactttaatggtgctgagccaactggaaagccccttggagaaagttgaagttagacctgtacttcacaccatatgcaagaatgaactccatctggatccaggatccaaatgtaagaaaatgaagccatataaatacagaaggaaacgtggtggaaatatccagtggcaacaaaatattgacacatttgactacatgaagataataaaaatgcttagtaaaaacacaataaaatcaaatgactgggagaaaaatttatccagcctatataatagacaaacag

SEQ ID NO: 250265 - DNA, 551 bp, Homo Sapiens
ggccgtgtccgcggctgcgcaagacagtgtagaacctgcggcctcgatgtccttctcccgtgccctattgtgggctcggctcccggcggggcgccaggctggccaccgggcagccatctgctctgcccttcgtccccactttgggccctttcccggggttctggggcaagtttctgtccttgccaccgcctcctcctctgcctccggtggctccaaaataccaaacacgtccttgttcgtgcccctgactgtgaaacctcagggccccagcgccgacggcgacgtcggggccgagctaacccggcctctggacaagaatgaagtaaagaaggtcttagacaaattttacaagaggaaagaaattcagaaactgggtgctgattatggacttgatgctcgtctcttccaccaagctttcataagctttagaaattatattatgcagtctcattccctggatgtggacattcacattgttttgaatgatatttgcttcggtgcagctcatgcggatgatttattcccatttttcttgagacatgccaaacaaa

SEQ ID NO: 250266 - DNA, 1198 bp, Homo Sapiens
aatgtgagattcattggccgtgaagagaatgggggaaaaagaaagcatgtgttgtcctctttaagctcaatgcaacacatgaaaattcaagtttataaggtaagggcagcttctacagcgagaagaaatcttctccaaggtgagcttctatttatccccccgaatggagactattacattgttaggaaaccttccataaggtgaatcatacttctctccactaggattttcccttggctcaggtaactggagcagccaccctgggtcctgcatttagaaagtagatgcaggataatgtaccttactcttcttttctaaacatcattaaatttcaattttgaagtttttgtccttaatgatatcccaaaggggcctatgaaagatgtcaacagtgtggccatatctcaagggtgattatcttgggtggtctgcactaattaagttgacctggggatctgcaccctggttaaaggaggtacctactcccagctcttcctctttcatgcaaatccatattctcatagagtggtcttgctgaaatgtgggaccccagcctgttgggatcagtttagccacctgaaaaagaggagtcaaaattctagagggctcatcttagaataatgactaaaagtttcaggagcccgtacatatgtgtttgtcaggtatggtgtgcttcagcatacagcctaaactgttgcctaccatggctcccctggaaagactggacttctcatcatgggatgtgtactggctgcttttgtattagcctagctcaggactgtgacgtagtgtgttcaagcattaggagtaaaggttgcataaggtggaacttgactccaacctgtcttgaaagccttcacatcttcctggacttctggggctgccttctgcacaatcttgctcttcccatcctggagttcctgacagcatgaagggacagtggcccttcgcccaagatggagaatctcctccagcctttgttgccttaaggtggatttgagaacagtttggtccttgggtagccaggatgggacagcgtccaataccaaacaggaactggtgagtcttaaccaccttgcctaggaggcttgtggggccccgggcaagcactgggcagcactgtagcagcatggctgcagtcaccataaagaacctaaagtcctgttgccctgcactgaggacgaacgaatgacaggtc

SEQ ID NO: 250267 - DNA, 1000 bp, Homo Sapiens
caggactttaggttcaagatggtgactgcagccatgctgctacagtgctgcccagtgcttgcccggggccccacaagcctcctaggcaaggtggttaagactcaccagttcctgtttggtattggacgctgtcccatcctggctacccaaggaccaaactgttctcaaatccaccttaaggcaacaaaggctggaggagattctccatcttgggcgaagggccactgtcccttcatgctgtcggaactccaggatgggaagagcaagattgtgcagaaggcagccccagaagtccaggaagatgtgaaggctttcaagacagggagaccctgcagcgtcatggtgctggagctggtggcacccgcaacatctcaggcaccagtaagtttcatgtggagcttgagcaggagctggctgagctgcaccagaaggactcagccctgctcttctcctcctgctttgttgccaatgactctactctcttcaccttggccaagatcctgccagggtgcgagatttactcagacgcaggcaaccatgcttccatgatccaaggtatccgtaacagtggagcagccaagtttgtcttcaggcacaatgaccctgaccacctaaagaaacttctagagaagtctaaccctaagatacccaaaattgtggcctttgagactgtccaactccatggatggtgccatctgtcccctcgaggagttgtgtgatgtgtcccaccagtatggggccctgaccttcgtggatgaggtccatgctgtaggactgtatgggtcccggggcgctgggattggggagcgtgatggaattatgcataagattgacatcaatctctggaactcttggcaaggcctttggctgtgtgggcggctacattgccagcacccgtgacttggtggacatggtgcgctcctatgctgcaggcttcatctttaccacttctctgcccccctcttaatactcaccaataaattctacttcctgtccacct

SEQ ID NO: 250268 - DNA, 1803 bp, Homo Sapiens
caggactttaggttcaagatggtgactgcagccatgctgctacagtgctgcccagtgcttgcccggggccccacaagcctcctaggcaaggtggttaagactcaccagttcctgtttggtattggacgctgtcccatcctggctacccaaggaccaaactgttctcaaatccaccttaaggcaacaaaggctggaggagattctccatcttgggcgaagggccactgtcccttcatgctgtcggaactccaggatgggaagagcaagattgtgcagaaggcagccccagaagtccaggaagatgtgaaggctttcaagacaggaaactatgtcttcagttatgaccagtttttcagggacaagatcatggagaagaaacaggatcacacctaccgtgtgttcaagactgtgaaccgctgggctgatgcatatccctttgcccaacatttctctgaggcatctgtggcctcaaaggatgtgtccgtctggtgtagtaatgattacctgggcatgagccgacaccctcaggtcttgcaagccacacaggagaccctgcagcgtcatggtgctggagctggtggcacccgcaacatctcaggcaccagtaagtttcatgtggagcttgagcaggagctggctgagctgcaccagaaggactcagccctgctcttctcctcctgctttgttgccaatgactctactctcttcaccttggccaagatcctgccagggtgcgagatttactcagacgcaggcaaccatgcttccatgatccaaggtatccgtaacagtggagcagccaagtttgtcttcaggcacaatgaccctgaccacctaaagaaacttctagagaagtctaaccctaagatacccaaaattgtggcctttgagactgtccactccatggatggtgccatctgtcccctcgaggagttgtgtgatgtgtcccaccagtatggggccctgaccttcgtggatgaggtccatgctgtaggactgtatgggtcccggggcgctgggattggggagcgtgatggaattatgcataagattgacatcatctctggaactcttggcaaggcctttggctgtgtgggcggctacattgccagcacccgtgacttggtggacatggtgcgctcctatgctgcaggcttcatctttaccacttctctgccccccatggtgctctctggagctctagaatctgtgcggctgctcaagggagaggagggccaagccctgaggcgagcccaccagcgcaatgtcaagcacatgcgccagctactcatggacaggggccttcctgtcatcccctgccccagccacatcatccccatccgggtgggcaatgcagcactcaacagcaagctctgtgatctcctgctctccaagcatggcatctatgtgcaggccatcaactacccaactgtcccccggggtgaagagctcctgcgcttggcaccctccccccaccacagccctcagatgatggaagattttgtggagaagctgctgctggcttggactgcggtggggctgcccctccaggatgtgtctgtggctgcctgcaatttctgtcgccgtcctgtacactttgagctcatgagtgagtgggaacgttcctacttcgggaacatggggccccagtatgtcaccacctatgcctgagaagccagctgcctaggattcacaccccacctgcgcttcacttgggtccaggcctactcctgtcttctgctttgttgtgtgcctctagctgaattgagcctaaaaataaagcacaaaccacagcaaaaaaaa

SEQ ID NO: 250269 - DNA, 1127 bp, Homo Sapiens
  misc_feature (10)..(10): n is a, c, g, or t
  misc_feature (18)..(18): n is a, c, g, or t
  misc_feature (23)..(23): n is a, c, g, or t
  misc_feature (36)..(36): n is a, c, g, or t
  misc_feature (41)..(41): n is a, c, g, or t
  misc_feature (59)..(59): n is a, c, g, or t
  misc_feature (61)..(61): n is a, c, g, or t
  misc_feature (70)..(72): n is a, c, g, or t
  misc_feature (75)..(75): n is a, c, g, or t
  misc_feature (80)..(80): n is a, c, g, or t
  misc_feature (110)..(111): n is a, c, g, or t
  misc_feature (116)..(119): n is a, c, g, or t
  misc_feature (123)..(123): n is a, c, g, or t
cccaatccanccccgganccaanatcctacacatgnctcanccacgaagtcaggcccanantgtggacannncanacacncctcgagggacagatgcaccatccatgganngacannnncaangccacaatttgggtatcttagggttagactttctctagaagtttctttaggtgttcagggtcattgtgcctgaagacaaacttggctgctccactgttacggataccttggatcatggaagcatggttgcctgcgtctgagtaaatctcgcaccctggcaggatcttggccaaggtgaagagagtagagtcattggcaacaaagcaggaggagaagagcagggctgagtccttctggtgcagctcagccagctcctgctcaagctccacatgaaacttactggtgcctgagatgttgcgggtgccaccagctccagcaccatgacgctgcagggtctcctgtgtggcttgcaagacctgagggtgtcggctcatgcccaggtaatcattactacaccagacggacacatcctttgaggccacagatgcctcagagaaatgttgggcaaagggatatgcatcagcccagcggttcacagtcttgaacacacggtaggtgtgatcctgtttcttctccatgatcttgtccctgaaaaactggtcataactgaagacatagtttccaggcatattgttctgaatcaggtgtgtgaccttcccagagatctgctcctgctcctggggaccggaaaatggcttccttaggctgactgagaccagggagctaggcagatctgtcttgaaagccttcacatcttcctggacttctggggctgccttctgcacaatcttgctcttcccatcctggagttccgacagcatgaagggacagtggcccttcgcccaagatggagaatctcctccagcctttgttgccttaaggtggatttgagaacagtttggtccttgggtagccaggatgggacagcgtccaataccaaacaggaactggtgagtcttaaccaccttgcctaggaggcttgtggggccccgggcaagcactgggcagcactgtagcagcatggctgcagtcaccatcttgaacctaaagtcctgttgccctgc

SEQ ID NO: 250270 - DNA, 1089 bp, Homo Sapiens
  misc_feature (21)..(21): n is a, c, g, or t
  misc_feature (56)..(56): n is a, c, g, or t
  misc_feature (61)..(61): n is a, c, g, or t
  misc_feature (467)..(467): n is a, c, g, or t
  misc_feature (826)..(826): n is a, c, g, or t
  misc_feature (873)..(873): n is a, c, g, or t
  misc_feature (899)..(899): n is a, c, g, or t
  misc_feature (903)..(903): n is a, c, g, or t
  misc_feature (917)..(917): n is a, c, g, or t
  misc_feature (924)..(924): n is a, c, g, or t
  misc_feature (935)..(935): n is a, c, g, or t
  misc_feature (951)..(951): n is a, c, g, or t
  misc_feature (968)..(968): n is a, c, g, or t
  misc_feature (971)..(971): n is a, c, g, or t
  misc_feature (974)..(974): n is a, c, g, or t
  misc_feature (977)..(977): n is a, c, g, or t
  misc_feature (980)..(980): n is a, c, g, or t
  misc_feature (991)..(991): n is a, c, g, or t
  misc_feature (1011)..(1011): n is a, c, g, or t
  misc_feature (1023)..(1023): n is a, c, g, or t
  misc_feature (1029)..(1029): n is a, c, g, or t
  misc_feature (1034)..(1034): n is a, c, g, or t
  misc_feature (1044)..(1044): n is a, c, g, or t
  misc_feature (1051)..(1051): n is a, c, g, or t
  misc_feature (1057)..(1057): n is a, c, g, or t
  misc_feature (1060)..(1060): n is a, c, g, or t
  misc_feature (1066)..(1066): n is a, c, g, or t
  misc_feature (1071)..(1071): n is a, c, g, or t
  misc_feature (1075)..(1075): n is a, c, g, or t
  misc_feature (1086)..(1086): n is a, c, g, or t
gagtaggcctggacccaagtnaagcgcaggtggggtgtgaatcctaggcagctggnttctnaggcataggtggtgacatactggggccccatgttcccgaaattaggaacgttccccactcactcatgagctcaaagtgtacaggacggcgacagaaattgcaggcagccacagacacatccctggaggggcagccccaccgcagtccaagccagcagcagcttctccacaaaatcttccatcatctgagggctgtggtggggggagggtgccaagcgcaggagctcttcaccccgggggacagttgggtagttgatggcctgcacatagatgccatgcttggagagcaggagatcacagagcttgctgttgagtgctgcattgcccacccggatggggatgatgtggctggggcaggggatgacaggaaggcccctgtccatgagtagctggcgcatgtgcttganattgcgctggtgggctcgcctcagggcttggccctcctctcccttgagcagccgcacagattctagagctccagagagcaccatggggggcagagaagtggtaaagatgaagcctgcagcataggagcgcaccatgtccaccaagtcacgggtgctggcaatgtagccgcccacacagccaaaggccttgccaagagttccagagatgatgtcaatcttatgcataattccatcacgctccccaatcccagcgccccgggacccatacagtcctacagcatggacctcatccacgaaggtcagggcccatactggtgggacacatcacacaactcctcgaggggacagatggcaccatncatggagtggacagtctcaaaggcacaattttgggtatctagggtanactctctagaagttctttaaggtggnaggncattgtgctgaganaacttgntgctcactgtnacgatactttgatatngaacatggttcctgcgnctnagnaanatngaccctgcagnattttgcaaagtgaaaaagnaagtatttgcanaaacangaganaaacagggcnagtcttntgtganctnacagcnctgcnaacncacataaattnctg

SEQ ID NO: 250271 - DNA, 966 bp, Homo Sapiens
ccccagtaattcggcacgagtagttagattcaacttgagtatgtgaagagctgtgtttctaaacccctcccccaccctagccccaagcttcatcttagctccactcctgaccctatccagctaaaggtccccacccagctcctgcctatctagtcattgcatatggcaagacttgaaagtcctatctcaaagcagcagaattatcagctacgactgccttgtcatggacagatgagcagaggcctgggaagacagcctgggagccccaacttctggtgcacccccttgtgttatctggcacatgatcctgttgctctgggactgattatgggatctgtgtatatcttattcctttctgtctccaggcaaggcctttggctgtgtgggcggctacattgccagcacccgtgacttggtggacatggtgcgctcctatgctgcaggcttcatctttaccacttctctgccccccatggtgctctctggagctctagaatctgtgcggctgctcaagggagaggaggccaagccctgaggcgagcccaccagcgcaatgtcaagcacatgcgccagctactcatggacaggggccttcctgtcatcccctgccccagccacatcatccccatccgggtgagagccccaccatgcccattgccctctccacctatttattctgggagcctcacgctcccaacaaacctacatctgttgctgtcttcaattatttgctttcctgctaaccattccctttattgccagctttgtttccctttttgaaaaattatcagccattctggattaaccagtcttttccttgcatcagccattacctcatgcttattagattatcctaaccctaacaatagcgagtgctcacagcctataattcagagtttttcaaactggatcaagacaattaatgggtcacaaaatcagcttagtgggttatcattagcatttatt

SEQ ID NO: 250272 - DNA, 861 bp, Homo Sapiens
tggaaatatcaaaaggttccaccccttaattcatatacagcatggccttgtcttttgatttgtctaggccctagccaagagcagcagctgtgggctcattaaccacccgaagcacattcagtccagatatctggccagcatctttagtggcctgtctctgcgagtcattgaaataagctgggactgtgatcacagcattttttgctgtgtgccccaagtaattttctgcagtctctttcatcttcatcaacacaaatgctccaatctgactcggagaatacaatttcccatgagcctcaacccaggcatcaccattggaggcacggacaattttaaagggaacatttttaatgtctttctgtacttcaggatcatcatatcgccggccaatgagacgcttggtagcataaaatgtattgtttgggttggtgacagcctgtcgcttggccggcattccaacaagtcgctcaccatctgctgtaaaggccacaactgaaggggtggttctggcaccttcggcattctccagcacctttgcttgtttaccttccataactgccacgcaggagttggtagtacccaaatcaataccaacaactgctcccttgattgcttctgatgcataatcccgccttgaaacaagtctaaaagcctcatgactaaggccattccagctatcctggtggcgggcggccgtagggccccgggaggctgcggcgcccacgagacgggctgctgcagctcggctggcacttatcatggcggataaatggaggagtacgaggcagcaaacaagcgctccgacggcaaagagctgcgcgatgcggtggcggcagcgcttctggaaacctcccccggccg

SEQ ID NO: 250273 - DNA, 1211 bp, Homo Sapiens
gccaccagcacaaggtactccagcatcgtgcacagcagccatgtagaagatgatccgcagctgggtcatgcccatggtgaggaggctccacaggactgaggtgctccgaacatcctggggtgacatgaaggcatccgaaccgtcctccaggctgggggccttctggctgagcctgtggcccatggtggtcacatgggtgtagaagaggtcacctgtcaccttgtggtccagggccagcccactcagcttgatcttcttcgtgtaattgacttcctcaggggcaggaaaggcttcgatgggccagttgagggtgcagttcagaaagataaggcaggccaggccagaccaggtgaacatgatgaccacgaaggccacacccgcatcgtagatcagcttgattcctgggaacgtaatggcagaagaggcgtaagagccaatcatgagggccattaacgtggagcgcaggttcccaaacatgttgggcagcgtgagtgaagtgaacgttaggcagatgccaccaaagccattcagggacagcgccaggaatatcaacggagacagagcttccacgtcccgggaggccagggccatgagggtgcaggacgcagtgaagcaggcactgccaaccagccgcacgggtcgggggccaaagcggtccatgaggatccccagtggcagggtggtggcgctgagcacgaaggaaccaatggtgaagcccaggttgagcatctcgtcctgctggtcacagcctggccacctgcgctgctcatcctgggtggtgttggtgctgctctcagctgggcacgtgctggaatagaagccctcgttcttcagaatgatcaacagggagccccagcccaggagtacagcagagaagaagaggttctccagcacagccgtgcaggccatccaccagcgcctccggtacgcctgttgcagcgtggggccatgctggccccgagcctccggtcaccggcaaatgagcagccagcagctgcggacgcctccgggagcgcaacgctttcgcggcgcgtccggagtcccgtgggcccagccctgagccgcgccggcgctggggtcttctctgcgtgcaggacccggccgccacggagcttcagcctgacagcccggtggcctcgcctccgctgtctcctcggaagaagcgggggaactgggaacccgccgggcgccagaggtctgcgaagctgggc

SEQ ID NO: 250274 - DNA, 897 bp, Homo Sapiens
ggtagaagaaaacaaaaacaaacagagcgagaagggccagagactctccgaggcggcggcagagacagaagagcggggtcggggccggctgaccaggaacctgggcgagcagcggcgggggcccgagggattctgaaggaagatttccattaggtaatttgtttaatcagtgcaagcgaaattaagggaaaatggatgtagaaaatgagcagatactgaatgtaaaccctgcagatcctgataacttaagtgactctctcttttccggtgatgaagaaaatgctgggactgaggaagtaaagaatgaaataaatggaaattggatttcagcatcctccattaacgaagctagaattaatgccaaggcaaaaaggcgactaaggaaaaactcatcccgggactctggcagaggcgattcggtcagcgacagtgggagtgacgcccttagaagtggattaactgtgccaaccagtccaaagggaaggttgctggataggcgatccagatctgggaaaggaaggggactaccaaagaaaggtggtgcaggaggcaaaggtgtctggggtacacctggacaggtgtatgatgtggaggaggtggatgtgaaagatcctaactatgatgatgaccaggagaactgtgtttatgaaactgtagttttgcctttggatgaaagggcatttgagaagactttaacaccaatcatacaggaatattttgagcatggagatactaatgaagttgcggaaatgttaagagatttaaatcttggtgaaatgaaaagtggagtaccagtgttggcagtatccttagcattggaggggaaggctagtcatagagagatgacatctaagcttctttctgacctttgtgggacagtaatgagcacaactgatg

SEQ ID NO: 250275 - DNA, 730 bp, Homo Sapiens
  misc_feature (264)..(454): n is a, c, g, or t
  misc_feature (526)..(559): n is a, c, g, or t
gctcaatgctcaaaatattcctgtatgattggtgttaaagtcttctcaaatgccctttcatccaaaggcaaaactacagtttcataaacacagttctcctttgaggggaaaagggagtaagagttataaaaaacaaaatgcaaataaacaagtgaaattgttgtacaattttatattctaagtggttaataatccccacttagcacaagacaaagacatgctacatacattgatcgcatataaaaatagaatctaggccaggcnnnnnnnnnnnnnnnnnnnnnnnnnnnnnnnnnnnnnnnnnnnnnnnnnnnnnnnnnnnnnnnnnnnnnnnnnnnnnnnnnnnnnnnnnnnnnnnnnnnnnnnnnnnnnnnnnnnnnnnnnnnnnnnnnnnnnnnnnnnnnnnnnnnnnnnnnnnnnnnnnnnnnnnnnnnnnnnnnnnnnnnnnnnnnnntcttaagcccaagagttcgaggctgcagtgagctataattcatcactgcactccagcctggacaacaaagcnnnnnnnnnnnnnnnnnnnnnnnnnnnnnnnnnngtagaatttatatgtcactgctcttttacaaaatcagaatacaataagccaatatatagattagaatcattaaccacagcaaatacataatttgctcccaacccccatgtcttctgttaattttttctctcaaaatttttatgtctctctcaaaaccaatcttttagtaat

SEQ ID NO: 250276 - DNA, 1053 bp, Homo Sapiens
  misc_feature (129)..(190): n is a, c, g, or t
  misc_feature (751)..(886): n is a, c, g, or t
  misc_feature (907)..(965): n is a, c, g, or t
  misc_feature (972)..(972): n is a, c, g, or t
  misc_feature (974)..(974): n is a, c, g, or t
  misc_feature (1006)..(1007): n is a, c, g, or t
  misc_feature (1021)..(1021): n is a, c, g, or t
  misc_feature (1034)..(1034): n is a, c, g, or t
  misc_feature (1044)..(1044): n is a, c, g, or t
gtccacgccgccatggccaagtggggccaggggaacccccactggatcgtggaggagcgggaggacgggaccaacgtgaacaactggcgctggcgcggctggcggcggcctccttccgggatctggggnnnnnnnnnnnnnnnnnnnnnnnnnnnnnnnnnnnnnnnnnnnnnnnnnnnnnnnnnnnnnntcagggggccgccccccctcagctgctggacgcagggctcggccttcgcctctcggctcgggagagtccttgagtacggtgaccggctaggagggttgcagctgcctctttttgaaagttgggttgggccccaaaagtgacttccgacagacctttccactcccaccgtctgtggcctgagggccttcccttctcctcccgcccacccctctggatgtttcggggagttagaagggagctggattgagagactgtgttaggggcgggggtatggaacgtagtgaaaagggcagaaatttggatctcagttcgcgcccaccccgcaggcgcctcccgcgagccgggccctctgtgagtgagacaagctccccttcctttacgcgcctcacctggcgcgtgggggagaggtcggcagccctccgccgcagaacctccggaagggatgtcctctgccctgcgcctctggccggggctgtggtccctccaggccgtcgaggggatgctgaggccggtcccagaggagcatgacttggctggtccggagagctctgagggcatggnnnnnnnnnnnnnnnnnnnnnnnnnnnnnnnnnnnnnnnnnnnnnnnnnnnnnnnnnnnnnnnnnnnnnnnnnnnnnnnnnnnnnnnnnnnnnnnnnnnnnnnnnnnnnnnnnnnnnnnnnnnnnnnnnnnnnnnnaccatgttggtcaggctgctnnnnnnnnnnnnnnnnnnnnnnnnnnnnnnnnnnnnnnnnnnnnnnnnnnnnnnnnnnncgtgacnanatctgacttctagtgtctagcttggccgatgnnatgtcattctctcnctcgttctgtccntaagtgaganatgctggga

SEQ ID NO: 250277 - DNA, 869 bp, Homo Sapiens
cagacagacacccagaccggtagatggatagatagagagagagatagacaggctatgatattttcttttaccaaatagcaattttaggagcccagcattattagctctacttcacaaattatgaaacacgtacctggaattgttaagtgacttgccaaggcccacacagctagtagctgataaagataaattttaaacaaggtctgcctggtttcatagccactgttccttggtcaaataactttcctctctccaaactggctcctgcaggtaaagtgtagtggagctcacctggtggaaactgagttcatcctctcctccactcaccctacacaccttgaccaggcatgagtccatctctgactttgtctagccttgtggtttgggacaaatcatttatacagtatgagatttcttttttgttctcatctataaagtggatactctgcatccgtgtaaagaataaatggtatattaacaactaataattattgattatttatgtgtcagtcagtaatctaagtgctgtacatgtatgaatgcatttgatcttcactacaaaatagtagctatataatcctcactgtgcagataagaaatctgggagagatgaaggtacttaccagacggccctgtccaggccttaaattgtctcacttctttgtgtgagatgacaattgtgggaaaatttataaaggctgtgctaagcatgcagctgacacttactaaacagtggccactataaagcaattattattttgacttacggagttgcccagaaagccctcaatcatatcagtgagttatttccattctaatgtgtctatgtccccagtgccaaaagaactggtgtaaaacagcccagcggg

SEQ ID NO: 250278 - DNA, 458 bp, Homo Sapiens
  misc_feature (121)..(144): n is a, c, g, or t
caaaaaattggagctggaaagaaaaagaaccttttgattggtacaatttaaaaaaaattcaagtaaaaattagcaaacatgcatctagtatattataggatatctggccatgggactttgnnnnnnnnnnnnnnnnnnnnnnnncaccaaaccatattttcttgaagataaattcttctagagagctctcaaaaaatatgggcttggtcctgattttgcaaacaacagcagggttctcaagtggagcagggtgataatttttacaaggtaaatgtaaattatctttcatataggggaaaaaatgggaaatctaattttagtaacactgggttaagatgaaaggaaaaaaggtattaataaaagatccattagctttaaaatccaaagcatgttgaaaagcagtaataaatttatagtttatctttctaaattcaatgcttgaataaaatacagctttt

SEQ ID NO: 250279 - DNA, 774 bp, Homo Sapiens
  misc_feature (37)..(37): n is a, c, g, or t
  misc_feature (49)..(49): n is a, c, g, or t
  misc_feature (74)..(74): n is a, c, g, or t
  misc_feature (81)..(131): n is a, c, g, or t
  misc_feature (154)..(154): n is a, c, g, or t
  misc_feature (158)..(158): n is a, c, g, or t
  misc_feature (162)..(162): n is a, c, g, or t
  misc_feature (199)..(199): n is a, c, g, or t
  misc_feature (644)..(653): n is a, c, g, or t
aataacccaagttcaattgcaaacgcctgtgtcccanctactcaaggangctgagattggaggatttcttgaanccaaggnnnnnnnnnnnnnnnnnnnnnnnnnnnnnnnnnnnnnnnnnnnnnnnnnnntgacacggcaagactgtctcaanatanactnttaggcagaacacagaaatgtgtttgatgctgaacanttatatacaataaaacccaggatctggtttgactctgattacttcattatcatttaaaaacggatttccctgtgtattagatgttgtggattgcattcctaactaaaagcttacatacatttctgtttgagcttcagagaagctctgaacctcattcagctttcttctcagcttagaattttcatctttcagctgtggagagagaacatccttattagaaagtcagcatgtctggctcaaaagggtgtgtgcttctgcggtgtggctccagagcctcctgataagcagagatgctgggtcagtgcagcgtccacctgcagccactacagagggagaccacagacggaggcaggcacttttcaaagacctgtggtcacagatgccagttaattttactcagaggccgggggcagtggctcgcgcctgtaatcccagctaaaaaaannnnnnnnnnattcagagcttataaccttttaggtgattataattttttaaaaattttcctcctcttggaatacttagcaagctggcgactgcagcctgcctttactgagggtacagccctgtaagtgccc

SEQ ID NO: 250280 - DNA, 1284 bp, Homo Sapiens
catgacccacagccatctggttatgtcttatttttttcctaaaagataatgtttatttttaaaaaggaaggaagaagcaagtgaagtttcattctgctccagcggtggggaagccgctgaatccacctgcttctcctttgcaaccgacagcaaacagctttctccggcctcagggcataaaaagggaatggcagggagtaagaggcgctgggctcggagcctgtttccaagaaggaattggttgtcatctggcagtgttgcgcgtcacaagagagcctgtatataaattaaaatagtcaagacaacactgaccttgcacttgtacataactatacagtagtgtccagaatgttcagacattcggagtgtacataaaacagaaaaaatcttcatgtatttttattaaatataacaatgtctgagtttcacctaagatgtttttgtgccatatgctggatatccaggttctcgccaggccccgatacatgaataacaaacccaagaaacgcatccccattgtgtgatgtgttcagatgcatctggcaccaattaggtatttcttaaaacaggactcatctgtcagagtgcacatgaaaaatcaggcagggaatcgaaacgacagcgctggaggagactcaggaagcagaggcgtccctgccgctgcccttggccctgcaagcacatcatgaccctttctggcagcctcttggtgctctgggtagtgagggatgaccagtcttgtcctgagaaatgtttctcttagtctttaagttcaaagactatcctgtagcaatcagactttccaaaagggggttctccattttttgtagttttgtctaaatttttaatgaccatttcctggaatcagtttattatactgaaaactgggggtgggagtagggagctagtttgttgataaatagttcccatttccccgtggagaatttgacataccctggactcctgtgtgcctcctgccatccctgcacacagcctggggagaagcctgtgcctccccgtgtggagagaaggcaaccccagatcccctgagctaccccggaggaaaggcagtcctggacagaagactgtcagcagaaggaaagtactggactacccgtgggtaagtcctgccattcaagactggagacacctgggaaataaaaagagcagggcactgctgggtgggaagaggcattttaaccttccagtgcaaatcctgctcctttgatttaaaggggtgtactggggccaggggctgattcacttccttgggagatggtggtg

SEQ ID NO: 250281 - DNA, 835 bp, Homo Sapiens
attagtggcttttagatcaatttgctgtaaaactatctgaaatggttgcagattattttaagcaaaaacagaatgatacctataatgtacaaatggaggtggatttaaagaacatattattgagcaagctctataatgacattttcttaacatcatcatagtttttcttcctagaagggaaaaaacttacttaaaattttccccttctttacttaaagcattcttaagtatattgacaaatgtttaaatcagttcaagctctcagctgttggaagatcaaaacacaaagataagcattttcaacacaaacatcaaaagatgaacagaattgctttccatgtaatagttaataccttaatacaatgaacttgtcaggattttgcgacatattgtatagctggacaataaagcatgaaaatattctttaaaaattaagtgaagatattcccaaagttgagatgtcccctacaagaaaccaatttttaaattcctgtaatactgaaaagctaaattgccactattgtaaagaaagtgaaccaaatttttaaaataattttatcttattgagaaactaattttaacgcaagcactttaaatgtatgtgctatacaacactgcatcttattttccaattggatatgtcttaccactcttctaacaagtttgaaagaaagaggtctgtcaacagacacgagcaaatacttataaagtctcaggtcttgctctatcacatactagccagtccttaaacacttgatatatacccacattaaaaggtgtgctaaatatcgtcatgttttagatgaaattatgtccttaaaaggttggtttctgt

SEQ ID NO: 250282 - DNA, 1383 bp, Homo Sapiens
  misc_feature (449)..(449): n is a, c, g, or t
  misc_feature (454)..(454): n is a, c, g, or t
ctggggagaagatttatgaaattcctgagaatgaattcagttttcagcaaagctttaaacttttaacagattcctcacaataagaaaaaattttaaagttctactattagaccaacttttactatacagtatttcacataaatcatgttttacatttttttctaattacatacagaaaaattctccaatcaacacaagaatggcagaggaaaaaagatgcattatgcttggcagatgcaaattaaaacacacagacagaaagaagcagtaaaatgtcaaataaatcacacccactctaagtatcaatgaatagctgatatgcattgttgggagaatcatttctgaatgagtttgtgaacaagttgtgcttcttattaattgtgcacttaaaaaatgaccactaaagaataatttaacttgttattaatgttctccagatattaaaaaanaaaanttataccattaacgtgattaccaagcacctaattttggaaaggcttcataatgtatgttttctttttctccctcagcaaaagtgttaatcccccaaattaagttaaagcttattgttgaaaaataaattcgtagcgaaaatgatgatacgatgcaatgctgaggtggagagtcacagcccattgtaatgtggaccccatcttttattgatgtgatcaaaagtatgagaaatccactgttgctcaagaactttgtatctttccttacaaatgtagagaggtttgcctcgcctaagatcccggtcttcctctccatgagcatccaaatacacggaacccccagaggcagaagcggtgacctcgaatgatgcataattaccgatgcattgatcaaaaggaaaatacctgttcctgcaccacagttctgagagtgcagtacacattcacagtaactttgttgcttgcagcaaagtcctttcaggcatacaaaagtaccacacacaaggcaaacagcaggatctttaggaaccttggtgcagacactacaggtttttctgtggtagtaactgaaaaaatggtgttataattctccaggccaactgtagtaggtgtggtaatttccattttgactcttggataagcaaggcctttccttgttctgcatgtctttcagtaaatgattttatctcaaaacaccaatgagttataatatcaaatgctggaactggccaatccagacaggaggcactgatgaatggatgttctgtttggtaaaacgttggcagaagtcccaggcagctggcaagaactgaaaattcttcttcttcctggcagctaggtaaatcttccccaaaaaggtggtgctgaagaaggctggtgattctgagaaaaggtaagcagaagtcctgtaagcatttttccatggattcag

SEQ ID NO: 250283 - DNA, 2103 bp, Homo Sapiens
ggggggcgcaggaaacaatagaggccgcgcgcacagagcgagctcttgcagcctccccgcccctcccgcaacgctcgaccccaggattcccccggctcgcctgcccgccatggccgacaaggaagcagccttcgacgacgcagtggaagaacgagtgatcaacgaggaatacaaaatatggaaaaagaacaccccttttctttatgatttggtgatgacccatgctctggagtggcccagcctaactgcccagtggcttccagatgtaaccagaccagaagggaaagatttcagcattcatcgacttgtcctggggacacacacatcggatgaacaaaaccatcttgttatagccagtgtgcagctccctaatgatgatgctcagtttgatgcgtcacactacgacagtgagaaaggagaatttggaggttttggttcagttagtggaaaaattgaaatagaaatcaagatcaaccatgaaggagaagtaaacagggcccgttatatgccccagaacccttgtatcatcgcaacaaagactccttccagtgatgttcttgtctttgactatacaaaacatccttctaaaccagatccttctggagagtgcaacccagacttgcgtctccgtggacatcagaaggaaggctatgggctttcttggaacccaaatctcagtgggcacttacttagtgcttcagatgaccataccatctgcctgtgggacatcagtgccgttccaaaggagggaaaagtggtagatgcgaagaccatctttacagggcatacggcagtagtagaagatgtttcctggcatctactccataagtctctgtttgggtcagttgctgatgatcagaaacttatgatttgggatactcgttcaaacaatacttccaaaccaagccactcagttgatgctcacactgctgaagtgaactgcctttctttcaatccttatagtgagttcattcttgccacaggatcagctgacaagactgttgccttgtgggatctgagaaatctgaaacttaagttgcattcctttgagtcacataaggatgaaatattccaggttcagtggtcacctcacaatgagactattttagcttccagtggtactgatcgcagactgaatgtctgggatttaagtaaaattggagaggaacaatccccagaagatgcagaagacgggccaccagagttgttgtttattcatggtggtcatactgccaagatatctgatttctcctggaatcccaatgaaccttgggtgatttgttctgtatcagaagacaatatcatgcaagtgtggcaaatggcagagaacatttataatgatgaagaccctgaaggaagcgtggatccagaaggacaagggtcctagatatgtctttacttgttgtgattttagactccccttttttcttctcaaccctgagagtgatttaacactggttttgagacagactttattcagctatccctctatataataggtaccaccgataatgctattagcccaaaccgtgggtgttttctaaatattaataggggggcttgattcaacaaagccacagacttaacgttgaaattttcttcaggaattttctagtaacccaggtctaaagtagctacagaaaggggaatattatgtgtgattatttttcttcttatgctatatccccaagtttttcagactcatttaagtaaaggctagagtgagtaaggaatagagccaaatgaggtaggtgtctgagccatgaagtataaatactgaaagatgtcacttttattcaggaaatagggggagattcaagtcgtatagattcctactcgaaaatcttgacacctgactttccaggatgcacattttcatacgtagaccagtttcctcttggtttcttcagttaagtcaaaacaacacgttcctctttccccatatattcatatatttttgctcgttagtgtatttcttgagctgttttcatgtcgtttatttcctgtctgtgaaatggtgtgcttggtagtagaggtttctttttttaaacttgggacccccaagttgtaaacgattgtctgtttttacctgacagttatacc

SEQ ID NO: 250284 - DNA, 1155 bp, Homo Sapiens
ggcataataatctgtttaccatataactagctgtttgtaaaatctgtaatggttattaaaaaatccttacgaatatagtactaatatgtagtaaattcccccaattaaataagcagctcaaattcataaggctaaagacccaatatccctgaatttctaagtgttcataataactcctccatccttaatacatcatcatactttcagaagtggagagggaacaatttccctaccacttttgtccattctcataaatcagtgttattacaaaatctaggctagcacaggtgccttaaaggatacaatggactgaagtaaacagaatttcaaggtccaggatattgttggtgttgtacaatttgtctgtctgccagaaagttgtgtctctggttgaaatattcctggatcaatgattaagaagttaaggccaactgccaacgaagtcagattattccccaactgccaggtaacattttgatcttctctattaaaatgtcttactggatggaaccagatctcatacttttcatgtatcctctatagcacctactaaagtgttaggcagagatatatgctcaaggaaataatcagtgacgggggcgagaaatgaatcaagggtgaatgaatcaaggttatggtaaagccataccttacttcacccataactcaaaaggcagtcaccagagtaaatctctagtgtactcactgaagaacagacttcttgtcccctactaaattatgtctgaaagagaacaaaccattatggcccttttatttatttctcctagccactaagagattgtatatgggcacgagtactgcttgatggaagatatctccaaaaaagagttttctgcctcagaggaaacactaacctgtcataaagcacattctaatcccaataatacaatttatggaatcattaatgttaaaaattattacatgttattcataagtaggtgatatttagaatggtagtcttattctaacatcattaaaatacattttacttttaaacagtggcatgaggtagaagaaagtcacaaaagaaagtaatcttcaacatactgacacctattcatacaattagccccgatagaagagttacagccttaagctagattactgactactattaaaatattacccttacct

SEQ ID NO: 250285 - DNA, 3261 bp, Homo Sapiens
  misc_feature (1266)..(1266): n is a, c, g, or t
  misc_feature (1284)..(1284): n is a, c, g, or t
  misc_feature (1345)..(1345): n is a, c, g, or t
  misc_feature (3229)..(3229): n is a, c, g, or t
  misc_feature (3232)..(3232): n is a, c, g, or t
ataatgctctggggcgtgccgccgccgtcgctgccacctcccctaccgctagtggaagaagatggcggaaggcggagcggcggatctggacacccagcggtctgacatcgcgacgctgctcaaaacctcgctccggaaaggggacacctggtacctagtcgatagtcgctggttcaaacagtggaaaaaatatgttggctttgacagttgggacaaataccagatgggagatcaaaatgtgtatcctggacccattgataactctggacttctcaaagatggtgatgcccagtcacttaaggaacatcttattgatgaattggattacatactgttgccaactgaaggttggaataaacttgtcagctggtacacattgatggaaggtcaagagccaatagcacgaaaggtggttgaacagggtatgtttgtaaagcactgcaaagtagaagtatatctcacagaattgaagctatgtgaaaatggaaacatgaataatgttgtaactcgaagatttagcaaagctgacacaatagatacaattgaaaaggaaataagaaaaatcttcagtattccagatgaaaaggagaccagattgtggaacaaatacatgagtaacacatttgaaccactgaataaaccagacagcaccattcaggatgctggtttataccaaggacaggtattagtgatagaacagaaaaatgaagatggaacatggccaaggggtccttctactcctaagtccccaggtgcatccaatttttcaactttaccaaagatctctccttcatctctatcaaataattataacaacatgaacaacagaaatgtgaaaaactcaaattactgtcttccatcatataccgcttataagaactatgattattcggaacctggaagaaacaatgaacagccaggcctctgtggcctaagtaacttgggaaatacgtgtttcatgaactcagctattcagtgtttgagcaacacacctccacttactgagtatttcctcaatgataagtatcaagaagaactgaattttgacaatcccttaggaatgagaggtgaaatagctaaatcttatgccgaactgatcaagcaaatgtggtctggaaagtttagctacgtcaccccaagagcctttaagacacaggtaggacgttttgcacctcagttctctggatatcagcagcaagactgtcaagaactgttagctttcctattagatggattacatgaggatttgaatagaattaggaaaanaccatatatacaattaanagatgcagatggaaggccagataaggtggttgccgaagaagcctgggaaaaccatttaaanacgaaatgattctatcatagtagatatatttcatggccttttcaaatcaactttagtttgtcctgagtgtgctaagatttcagtaacatttgatcctttttgttacttgacacttccattgcccatgaaaaaagaacgcaccttggaagtttacttagttagaatggatccacttaccaaacctatgcagtacaaagtggttgtccccaaaattggaaacatattagatctttgtacagcattgtctgctttgtcaggaatacctgcagataagatgatagttactgatatatacaatcatagatttcacagaatattcgctatggatgaaaaccttagtagtattatggaacgggatgatatttatgtgtttgaaattaacatcaataggacagaagatacagagcacgtgattattcctgtttgcctaagagaaaaattcagacactcgagttatacccaccatactggttcttcactttttggtcagccctttcttatggctgtaccacgaaacaatactgaagacaaactttataatctcctgctcttgagaatgtgccgatatgtcaaaatatctactgaaactgaagaaactgaaggatccctacactgctgtaaggaccaaaatattaatgggaatggcccaaatggcatacatgaagaaggctcaccaagtgaaatggaaacagatgagccagatgatgaatccagccaggatcaagaacttccctcagagaatgaaaacagtcagtctgaagattcagttggaggagataatgattctgaaaatggattatgtactgaggatacttgcaaaggtcaactcacgggacacaaaaaacgattgtctacattccagttcaacaacttaggcaatactgatatcaactacatcaaagatgataccaggcatataagatttgatgataggcagcttaggctagatgaaagatcttttcttgctttggattgggatcctgatttgaaaaaaagatattttgatgaaaatgctgctgaggactttgaaaaacatgaaagtgtggagtataaacctcctaaaaaaccctttgtgaaattaaaagattgcattgaactttttacaacaaaagaaaagctaggtgctgaagatccctggtattgtccgaattgtaaagaacatcagcaagccacaaagaaattggatttatggtccctgcctccagtacttgtagtacatctcaagcgattttcttacagtcgatacatgagagacaagttggataccttagttgattttcctatcaatgacttggatatgtcggaattcttaattaatccaaatgcaggtccttgccgctataatctgattgctgtttccaaccactatggagggatgggaggaggacactatactgcttttgcaaataaataaagatgatggaaaatgggtactattttgatgacagtatgtgtctccactgcatctgaagaccaaattgtgtccaaagcagcatatgtactcttctaccagagacaagacactttcagtggaactggcttttttcctcttgaccgagataactaaatggtgcttgcagctgccactggcatcccattagaaagtgatgaagatagcaatgataatgacaatgatatagaaatatgaaaactgtatgcacactaactaatgaaagtcctagaagccataaaagagacactttcctgctgagtggtatctatggaaatgatgaagttacccaccacattaaatacaaaagtcatgagatggggagtttcagataaccgaatgtaaatcctttatcagattttaacttgtgcagtacttgaatgtgaaaaacaatgaaaactttaacagaaatttgtctcttaatacatttacantanttgtatttaaaagctaaatatatatagga

SEQ ID NO: 250286 - DNA, 1073 bp, Homo Sapiens
  misc_feature (727)..(799): n is a, c, g, or t
  misc_feature (1015)..(1015): n is a, c, g, or t
  misc_feature (1060)..(1060): n is a, c, g, or t
atgctccattcatcatcatcgggcttcatttagctttggggatcttttctttcactcttgacacctggagcacatcccgaggagacacagccgagatactaggaagtggtgctggaattgcatgtggatctcatgttacttataacatgggtctagtattagatccttctctagatacattacctttagctgggccccccattactgtgactctgtttggaaaagccatattgcggatcctcatagggatggtatttgtactaataatcagagatgtaatgaaaaagatcaccattcctttagcctgcaaaatcttcaatataccgtgtgatgatattcgaaaagcaagacagcacatggaagttgaacttccttatcagtatattacctatggaatggttggtttctccatcacattttttgttccttacatatttttctttattggtatctcttgatggagaagtattgtttatgataagaaaggagggtatcagttactgatacccaaaaatatattccaggtaaagccaggtcagaattaggcttttgcaggaatttaacttaaataattatttaagtaaattcataagagtcagtgcattttatcattgcacatccagatactgttttaggtgagctgagctatttcgttactgagaaaatgataagtatccatttagaatgttcatgtaatgtttggagagttttgtattatggattcaannnnnnnnnnnnnnnnnnnnnnnnnnnnnnnnnnnnnnnnnnnnnnnnnnnnnnnnnnnnnnnnnnnnnnnnncctaagtgttttttttaaactatgggagtgtattattcaataataatatgcaaacagttgtgcctgtgtatttgaactacatacaggtatgttgttattaacagatatatttaacatttatttactatgggagccatttcctaattgaattgcgtaattactagaccagaatgcatatgctactatacattgatttactggctgtttttacactgncattaccttttatgttatccatgatgttgaacatgggaggcattntttggaccttttg

SEQ ID NO: 250287 - DNA, 663 bp, Homo Sapiens
  misc_feature (172)..(172): n is a, c, g, or t
ccattagcattaaaagagtgtaatgaagtcatctgacacctggacacatttttaaagttcatcatttaccatatgtaaatttgacaacaattttgacttgcaatgtctgttgttcaaaagcaaagtcagactatctaaatcttgttttcctttggtcctacttaaaaaaaanttagacatcttgtcagttttattaccatcagaggcacagatagtactacagtcactcagtttagaaggaagacaccgtgctccagagtaggtcaacccaggctaccatgagctcctcagccctttcagctttggtgaatctgtgaccctgtgaccctccccttctagaaagagaaatttgctctagaaagataccttgctctgggaggtatggctcctaatccttgtctccctattattgtgtagaggctaaccagggattggatcctattcaactgggttcctctcttttctgcctccgctggtcagataatagtcttttcaatggtctgttctcttcactcctctataatgttttccttagtctacctgtgcactggcacactccaaccctttggctgtaacaaacttaaaaataaataaggctgtaagagttctaaccatcaagagtataccacactacgtttcaattaaataaccattttatgatac

SEQ ID NO: 250288 - DNA, 962 bp, Homo Sapiens
  misc_feature (350)..(350): n is a, c, g, or t
gctggggcggcactgcaaggtgggtccgttcgagggcacgggtcttggggcattcaggggccgcgactaccagttgcggacgtagtcgtcaacttccccgcgggtgggccctccaggcactgggggacagagcacccccggcaggcgttagggttcctgcccaccagtcttcataaaagtccttggggtcccaaattccgctgacgattttccaggcaaagctgcctcttcaaaaggtttaatggcttacagagggcaaagggcacctggatgactgaacaacacaaaaggcaagattctaaaactcagaacccaccagggagaacagaaaaaatacagttttttctaangtggttatggtgactgcagactcagtgccaaaatgaaaaagacacagtccaaagaagtgaaactccacaatctctgatctgttagattggggctagttgaacagtcatttaaatctaatagtcatttgtatacaatgtaagacatggatacaatatgcagtgctagcctgtattttcctatttgaatatcccacataaattactacagataggataaaaaagacacatatctatttaaatgacttcctagtttccattccaaaagcagaagatatgtacttaagcagcacatgctacagtgtcttctctttcaaactatctgttcctagcctctagggattttgttttgttatgcttcattccactgcctaagaaactaagattttgccagcaagagggccaatatgacaaatcatcgatgattcttagcatggagccaagaagcctgcctccttgatcagattttcagctggaaagatatccacaccttgcctagtccaatatttgttaagtgagaatataaaattcaaagatgttctgtcacactctagatttgtattaatgtccacaaattattaaagattcaccctcgtgccgaattcgccacccagc

SEQ ID NO: 250289 - DNA, 857 bp, Homo Sapiens
  misc_feature (575)..(642): n is a, c, g, or t
agagtcaaaaaggaactttttttacctactttcttttaaagaagcgttagggtaaactacaaatacctgaggagttggttaccttttaatgttggctgacaaatgtatgaactattatgaaaattcccatattgggcccaattgtatgtttctaaaagtaaaatgacatggcttctttgattggggaaaactgattggagtaattccttatttatctgaaagcatatgcctagtcttgacccactaggacttatgcatcagtaaaataagatcttgattttatacagacatcagggaaattacccctgaataaactttagacataattaggtacaataattttacctatttttaaataaagttaaaatctcctctaagttattaaaaatgttaatcagatatgaattttaacatttccattaagacaattacagttgaaaacattaaatgacggaagtagccttgtaaaagccacccgtatgaaaggagtacatgtttgacaaaaataagcataaaaaaggtattaaatccctgttccttttctctgattttggctgatttatgtgtgtgtgtgnnnnnnnnnnnnnnnnnnnnnnnnnnnnnnnnnnnnnnnnnnnnnnnnnnnnnnnnnnnnnnnnnnnngttatgtgtatatattgttttggaatgtcaatgggtttccataaccgtcggctaggttcaagcagaacttgctcccgaagccatcggctttagctctctggaatcagcgacgcctcccttaccagcttctttcattgctttcctactgttttccacaaactccatcagcactttatccatatagaattctctgccagggctcccatcattgtacc

SEQ ID NO: 250290 - DNA, 363 bp, Homo Sapiens
ggggattagtttaccctcaagccgatgactccatggctactgatattagttagtttaggatttttaaaaagcatatcagacccccagtttcaggaattgagtataaatattgcttcttgtcaccctgggacagtaatgccttatagtggcactagtcaccttaagtagattacacatggttgaggtgaataaagctgcatgggaatttgctttcgtgatatatttcatttgcaaacttctacataatcaagttttatgtttaaaaccatcggttctatatatctagctttaggaagttgcccttacaggtgggaccttttgtgttaatctgttttctccccagtcatcttatttggctatgtt

SEQ ID NO: 250291 - DNA, 531 bp, Homo Sapiens
gagctaggcacattactctctgaacgaaattcatattatcttattaaggaagagtgttggtcttcaggaggggaagtttgctgtattggatgccatcatcgtgtccttgtcattgcccttccggttttcattcttgctaaacccctgtgaatgttcttctaaccttcctgttccccaccccctctctcagatttgacctagaattcccagcccaaatccataatttcttagctctaatacgaattttcatgttggacaaaaacctagctacaaatgggtttctatggaacttctaattaatgtgcaaaatacatattttctccaggttaagaaattttaagtcagatcatgctgacacaataagaaaatttgtttgtgtaattcattgacctcttccttccaaaataacatcaagtagccacctcagtgtgacaatatccagtcaatagtagagaatttaatccttggtcctataaaagaataaaattcattgtcgtatttatagcacgtaagccttgagtaacaggtctt

SEQ ID NO: 250292 - DNA, 572 bp, Homo Sapiens
  misc_feature (265)..(270): n is a, c, g, or t
ggtgctggtgaatgtgagtacagggaagcagcggccgccatttcagggagcttgtcgacgctgtcgcaggggtggatcctgagctgccgaagccgccgtcctgctctcccgcgtgggcttctctaattccattgttttttttagattctctcgggcctagccgtccttggaacccgatattcgggctgggcggttccgcggcctgggcctaggggcttaacagtagcaacagaagcggcggcggcggcagcagcagcagcagcannnnnnatctcttcccgaacacgagcaccacaggcgcccgaaggccggaacaggcgtttagagaaaatggcagacgatattgatattgaagcaatgcttgaggctccttacaagaaggatgagaacaagttgagcagtgccaacggccatgaagaacgtagcaaaaagaggaaaaaaagcaagagcagaagtcgtagtcatgaacgaaagagaagcaaaagtaaggaacggaagcgaagtagagacagagaaaggaaaaagagcaaaagccgtgaaagaaagcgaagtagaagcaaagagaggcgacg

SEQ ID NO: 250293 - DNA, 1963 bp, Homo Sapiens
  misc_feature (176)..(199): n is a, c, g, or t
  misc_feature (925)..(936): n is a, c, g, or t
  misc_feature (1492)..(1492): n is a, c, g, or t
  misc_feature (1817)..(1817): n is a, c, g, or t
  misc_feature (1861)..(1861): n is a, c, g, or t
  misc_feature (1872)..(1872): n is a, c, g, or t
  misc_feature (1907)..(1907): n is a, c, g, or t
  misc_feature (1950)..(1950): n is a, c, g, or t
gtggatcctgagctgccgaagccgccgtcctgctctcccgcgtgggcttctctaatcccattgttttttttagattctctcgggcctagccgtccttggaacccgatattcgggctgggcgggtccgcggactgggcctaggggcttaacagtagcaacagaagcggcggcggcgnnnnnnnnnnnnnnnnnnnnnnnnatctcttcccgaacacgagcaccacaggcgcccgaaggccggaacaggcgtttatagaaaatggcagacgatattgatattgaagcaatgcttgaggctccttacaagaaggtgagaaaaaacatgtcggtgaggtttatatatttcttaatttagcattattcacgaaactactgctgaaatgtaaactaacctccccggagccctcttgatttatcttatcagagatgcattacgtgtaacttacaaaagtaaatatatgctatggatggaataatattgtgcaatagtttcaacttcaccgtaataaaaaaatgccaatcaatctctcttggaaaactggcctaacaatatctcacctctactcccatgaattcacctttgattccagtgtgaactgtcaatcataaggtagtaattgagtgacttatcgctgtaccgtggtcccctaggtaaaatgactcaactaagaattaccacctccagtttggtatagcaaaaaggtgaatgtagtggtttgggaaaaagcaggggtccaagaataacaaagcatgaccagtctgtggcaagttaaatcttctaatagtcttataagaagaaatgggtgagattttaaaatttatgtatctatgtaagactggtgatagtaaatcttaaaacagtccagtggcaatctgctgctcagttaataattactaaaattcttggatccctgaatagaaattnnnnnnnnnnnntacaagaggcagtagagtcaatacaagcttaatacaagcttagagtaaatacaagcttagagtcacttgatgactgttttactgttctccatattgtttttatttttaattaggccctaccatagtatttcacactaaaaacaaaggaattatattggctaatatagtctttgactcatttcggtatctcagtaaaagtaaactgtcttttcattgtttcaccagttggtggtgaaaatagcagtatgcatgcattatcactggggtcacaaactgtaagctttgtaagttagcactttactcctatagctgatgtaatcaaactttaaaataaacatttcactaaaccttttaaaaataatacatttgttttggattgtatagcacgaccatgtggtaccaatttggatgaattcttgatagatttaaatagtgtatgtaattttgtaatgcttagactcttgaagagctactttctgttttaatggtaagaatcttgtgtcttagatttttttaacatggatgtaattccatgtaaacaggtatggaagtaccnaaatgtttaggctggacctggtggattattaattgactttcttgggttcttgggagtcaacattactaaagcagtgtgaatccctgtttgcttcagggcgagatgtgtgacagaggtggcatcaagctcttacagtcccaaccctccaacggaaatgggcgaagatctcaggaatggcatcggtcacaggaaatcgatagtggctggctgctagcatggccacttggggcttaggcagaaatagagccatggtactgaccaaagggaccatagcacatgggaataaaactcaaaacaggactttcatgttttatgggaaattatnatttaaccactttcaacattgttaaatctgggataacttttaantatctaaactntataaggaaagttaaaattttaacatgtttaatanggggaaaatttttttaatttttgtaatcttggaggacttaaantgtaaggcaacaa

SEQ ID NO: 250294 - DNA, 349 bp, Homo Sapiens
agaaagcaaaataatccaccaagtccagcctaaacacctacttccatacctgtttacatggaattacatccatgttaaaaaaaactaagacacaagaatcttaacattaaaacagaaagtagctcttcaagagtctaagcattacaaaattacatacactatttaaatctatcaagaattcattaaaaggtttagtgaaatgtttaaaagtttgattacatcagctataggagtaaagtgctaacttacaaagcttacagtttgtgacaccagtgataatgcatgcatactgctattttcaccaccaactggtgaaacaatgaaaagacagtttacttttactgagata

SEQ ID NO: 250295 - DNA, 373 bp, Homo Sapiens
gtacagcgataagtcactcaattactaccttatgattcacagttcacactggaatcaaaggtgaatccatgggagtagagtgtgagatatcgttagccaagtctctaaacgcctgttccggccttcgggcgcctgtggtgctcgtgttcggaaagagattgctgctgctgctgctgccgccgccgccgcttctgttgctactgttaagcccataggcccaggccgcggaaccgcccagcccgaatatcgggttcacaagcacggctaggcccgagagatatctaaaaaaaacatatggaattagaaaagcccacgcgagagagcagcacggcggcttcgacagctcaggatccacccctgcgacagcgtcgac

SEQ ID NO: 250296 - DNA, 497 bp, Homo Sapiens
  misc_feature (247)..(248): n is a, c, g, or t
  misc_feature (252)..(252): n is a, c, g, or t
gctacgttcttcatggccgttggactgctcaacttgttctcatccttatgattgacagttcacactggaatcaaaggtgaattcatgggagtagaggtgagatatcgttaggcaagtcttcttgtaaggagcctcaagcattgcttcaatatcaatatcgtctgccattttctctaaacgcctgttccggccttcgggcgcctgtggtgctcgtgttcgggaagagattgctgctgctgctgctgcnntgcncgccgccgccgcttctgttgctactgttaagcccctaggcccaggccgcggaaccgcccagcccgaatatcgggttccaaggacggctaggcccgagagaatctaaaacaatggaattagagaagcccacgcgggagagcaggacggcggcttcggcagctcaggatccacccctgcgacagcgtcgacaagctccctgaaatggcggccgctgcttccctgtactcacattcaccagcacacat

SEQ ID NO: 250297 - DNA, 511 bp, Homo Sapiens
  misc_feature (54)..(54): n is a, c, g, or t
  misc_feature (75)..(75): n is a, c, g, or t
ctgaccaaagggaccatagcacatggaataaaactcaaaacaggacttcatgtnttaatggaaattatatttaancccaccttcaacattgtaaatccgggataacttttaatatcctaaacctatataagaaagtaaaatttaacatgttaatatggaaaatttttttatttttgtatcttgatgacttaaatgtaagcaacaaagtggttaaacacatacccatctaaatttttttatagccttccatgttaaactataagtaaataattagttttaaaattgttttgtattttcttattcctgttccctttaccctttgacaacttgaaatgttaccacttcgtcctcatgatgttcttctatcaaccctgcttaggatgagaacaagttgagcagtccaacggccatgaagaacgtagcaaaaagaggaaaaaaagcaagagcagaagtcgtagtcatgaacgaaagagaagcaaaagtaaggaacggaagcgaagtagagacagag

SEQ ID NO: 250298 - DNA, 665 bp, Homo Sapiens
gggggaccgaaagtggtggagtgcagtggtggaggagagagatgcccagtcctggaccatctctgtgaccacacctgcggacgctgtcattggccactactcgcttctgctgcaggtctcaggcagaaagcaactccccttgggtcagttcacactgctttttaacccctggaatagaggtaagtttggacctgggccagcctgggctgcatggagactccagacactggagctggggtgcagctctggcagggagcacctgcaccaggcccctgtggcagccctctctaaggacagcaccaacacccagtctgtgccagggctttctccctgaatgaaccagctctcagacccagggtcctgttttggtgtcacccctgggagaagcaggttgagccttcccactgaaagcaaaagcttgtctcaccaccagaccctggtgctggctcaggctattttggtcacaggagttgagactcactgagatgaccctgggaaagctgcccttcattataacagtgcaggggtgagaactggagagggcctcgggaatgaggtggcctgaggatgggcttctctctctctccccggctattctgtttccagagtgcactcaggctttgcaggacctgaagctgatgcaatctgggggaccctctttaaga

SEQ ID NO: 250299 - DNA, 1075 bp, Homo Sapiens
  misc_feature (11)..(11): n is a, c, g, or t
  misc_feature (17)..(17): n is a, c, g, or t
  misc_feature (26)..(26): n is a, c, g, or t
  misc_feature (32)..(32): n is a, c, g, or t
  misc_feature (60)..(60): n is a, c, g, or t
  misc_feature (74)..(74): n is a, c, g, or t
cctgggtcctntatctngtgccgttnagagantcaaggaggggacgctgggctgaccccnagcattgtcagacnttttgctgccaaaaatgcctcatgtgtggtctggaagtgctgtgaggatgggacactggagttgactgactccaacacaaagtatgttggcaacaacatcagcaccaagggtgtgggcagtgaccgctgcgaggacatcactcagaactacaagtatcctgaagggtctcttcaggaaaaagaggtgctggagagagtcgagaaagagaaaatggaacgtgagaaagacaacggcatccgtcctcccagtctcgagactgccagtcctctgtacctgctcttgaaagcacccagctccctacccctgagaggggatgcccagatctcagtgacgctggttaatcacagtgagcaggagaaggcagtgcagctggcaattggggtccaggctgtacactacaacggtgtccttgctgccaagctctggaggaagaagctgcacctcacgctcagtgccaacctggaaaagataataaccatcggcctgttcttctccaattttgagcgaaacccacccgagaacaccttccttagactcaccgccatggcaacacactctgaatccaaccttagctgctttgctcaggaagacattgccatttgtagaccacaccttgccatcaagatgccagagaaagcagagcagtatcaacccctcacagcctcagtcagcctccagaactccctagatgcccccatggaggactgtgtgatctccatcctgggaagggggctcattcacagagagaggagctacagattccgttcagtgtggcctgaaaacaccatgtgtgccaagttccagttcacgccaacacatgtggggctccagagactcactgtggaagtggactgcaacatgttccagaacctaaccaactataaaagcgtcaccgtggtagcccctgaactatcagcttaaacttccagctctatcaccactctcctgccaacccttgttctacaatctaaaccaaacatgtgcctaggaagaaaaaaaa

SEQ ID NO: 250300 - DNA, 2055 bp, Homo Sapiens
  misc_feature (1686)..(1686): n is a, c, g, or t
  misc_feature (1931)..(1931): n is a, c, g, or t
  misc_feature (1990)..(1990): n is a, c, g, or t
  misc_feature (1998)..(1998): n is a, c, g, or t
  misc_feature (2007)..(2007): n is a, c, g, or t
  misc_feature (2030)..(2030): n is a, c, g, or t
  misc_feature (2038)..(2038): n is a, c, g, or t
caaaagtgccttcatattttctgtctggaagacagaaagcccagaaggagcccagaagcaacagtttgagagaggcgctttctgcggccaagtggataagaggagcggcctgcaaccatgggacaggccctgggtatcaagagctgtgactttcaggcagcaagaaacaatgaggagcaccacaccaaggccctcagctcccggcgcctctttgtgaggagggggcagcccttcaccatcatcctgtacttccgcgctccagtccgtgcatttctgcctgccctgaagaaggtggccctcactgcacaaactggagagcagccttccaagatcaacaggacccaagccacattcccaatttccagtctgggggaccgaaagtggtggagtgcagtggtggaggagagagatgcccagtcctggaccatctctgtgaccacacctgcggacgctgtcattggccactactcgcttctgctgcaggtctcaggcaggaagcaactcctcttgggtcagttcacactgctttttaacccctggaatagagaggatgctgtgttcctgaagaatgaggctcagcgcatggagtacttgttgaaccagaatggtctcatctacctgggtacagctgactgcatccaggcagagtcctgggactttggccagttcgagggggatgtcattgacctcagcctgcgcttgctgagcaaggacaagcaggtagagaagtggagccagccggtgcacgtggcccgtgtgttgggtgccttgctgcattttctcaaggagcagagggtcctgcccaccccgcagacccaggccacccaggaaggggccttgctgaacaagcgccggggcagcgtgcccatcctgcggcagtggctcaccggccgaggccgacctgtgtatgatggccaggtctgggtgttggctgctgttgcttgcacagtgctgcgatgcctgggaatccctgcccgcgtggtgaccacgtttgcctcagcacagggcaccggtgggcgtcttctcatagatgaatactataatgaggagggacttcagaacggagaaggccagagaggcagaatctggatcttccagacttccacagagtgctggatgacgcggcctgccttgccccagggttatgatggatggcagattctgcacccaagtgctcctaatggaggtggagtcctggggtcctgtgatctggtgccggtcagagcagtcaaggaggggacgctggggctgaccccagcagtgtcagacctttttgctgccataaatgcctcatgtgtggtctggaagtgctgtgaggatgggacactggagttgactgactccaacacaaagtatgttggcaacaacatcagcaccaagggtgtgggcagtgaccgctgcgaggacatcactcagaactacaagtatcctgaagggtctcttcaggaaaaagaggtgctggagagagtcgagaaagagaaaatggaacgtgagaaagacaacggcatccagtcctcccagtctcgagactgccagtcctctgtacctgctcttgaaagcaccaagctccctacccctgagaggggatgcccagatctcagtgacgctggttaatcacagtgagcaggagaaggcagtgcagctggcaattggggtcaaggctgtacactacaacggtgtccttgntgccaagttctggaggaagaagctgcacttcacgctcagtgccaacctggatgccagagaaagcagagcagtatcaacccctcacagcctcagtcagcctccagaactccctagatgcccccatggaggactgtgtgatctccatcctggggaagggggctcattcacagagagagggagctacagattccgtttcagtgtggcctagaaaacaccatgtgttgccaagtttccagtttcaaggncaacaaatgtggggggttccaggaggatttcattgtggggaagtggggatttgcaaacntgtttttncaggaaacnttaaaccaatttttttaaaaggngtttcaantggggttagggcccctt

SEQ ID NO: 250301 - DNA, 413 bp, Homo Sapiens
  misc_feature (32)..(32): n is a, c, g, or t
  misc_feature (41)..(41): n is a, c, g, or t
  misc_feature (47)..(47): n is a, c, g, or t
  misc_feature (54)..(54): n is a, c, g, or t
  misc_feature (64)..(64): n is a, c, g, or t
gtagacccaaactttgcccataaagatggccnagagaaagnaggagnaggtatnaacccccctnaaagccctaagtcagccctccaagaactccccctagatgccccccatgggaggactgtgtgatctccaccccgggaagggggctcattcacagagagagggagcctacagattcccgttcagtgtggcctgaaaacacccatgtgtgcccaagttcccagttcacgccaacacatgtggggctccagagactcactgtggaagtggactgcaacatgttccagaacctaaccaactataaaagcgtcaccgtggtagcccctgaactatcagcttaaacttccagctctatcaccactctcctgccaacccttgttctacaatctaaaccaaacatgtgctaggaagag

SEQ ID NO: 250302 - DNA, 676 bp, Homo Sapiens
  misc_feature (375)..(389): n is a, c, g, or t
ccgctgcgaggacatcactcagaactacaagtatcctgaagggtctcttcaggaaaaagaggtgctggagagagtcgagaaagagaaaatggaacgtgagaaagacaacggcatccgtcctcccagtctcgagactgccagtcctctgtacctgctcttgaaagcacccagctccctacccctgagagggaatgcccagatctcagtgacgctggttaatcacagtgagcaggagaaggcagtgcagctgacaattggggtccaggctgtacactacaacggtgtccttgctgccaagctctggaggaagaagctgcacctcacgctcagtgccaacctgggtaatgctctatggccccaccagacaccccccgnnnnnnnnnnnnnnntggcccctccttgggcagcagcagccacagggcaccccctgcagtctctagagatggctttgagcccctgctgctcactctcatgttctctctcattcattcattcaacacatatttattgggcctgaagcaggaaaaaaacacgatgccaactgcagtcagataagtaaacagacccttcgtagcagtgtgagaagtgtttgctgagtttaacagagtacagtggcaggagagcacctccccccaggctggaataagctgcccccaaataaattgtactgcatgga

SEQ ID NO: 250303 - DNA, 1801 bp, Homo Sapiens
  misc_feature (982)..(996): n is a, c, g, or t
  misc_feature (1536)..(1549): n is a, c, g, or t
  misc_feature (1571)..(1571): n is a, c, g, or t
  misc_feature (1573)..(1577): n is a, c, g, or t
  misc_feature (1580)..(1593): n is a, c, g, or t
  misc_feature (1595)..(1617): n is a, c, g, or t
  misc_feature (1619)..(1620): n is a, c, g, or t
  misc_feature (1623)..(1624): n is a, c, g, or t
  misc_feature (1628)..(1634): n is a, c, g, or t
  misc_feature (1636)..(1644): n is a, c, g, or t
  misc_feature (1646)..(1652): n is a, c, g, or t
gtggggttgagtcagttgtgggacccggagctgctgacccagcgggtggcccaccgaaccggtgacacagcggcaggcgttagggctcgggagccgcgagcctggcctcgtcctagagctcggccgagccgtcgccgccgtcgtcccccgcccccagtcagcaaaccgccgccgcgggcgcgcccccgctctgcgctgtctctccgatggcgtccgcctcaggggccatggcgaagcacgagcagatcctggtcctcgatccgcccacagacctcaaattcaaaggccccttcacagatgtagtcactacaaatcttaaattgcgaaatccatcggatagaaaagtgtgtttcaaagtgaagactacagcacctcgccggtactgtgtgaggcccaacagtggaattattgacccagggtcaactgtgactgtttcagtaatgctacagccctttgactatgatccgaatgaaaagagtaaacacaagtttatggtacagacaatttttgctccaccaaacacttcagatatggaagctgtgtggaaagaggcaaaacctgatgaattaatggattccaaattgagatgcgtatttgaaatgcccaatgaaaatgataaattgaatgatatggaacctagcaaagctgttccactgaatgcatctaagcaagatggacctatgccaaaaccacacagtgtttcacttaatgataccgaaacaaggaaactaatggaagagtgtaaaagacttcagggagaaatgatgaagctatcagaagaaaatcggcacctgagagatgaaggtttaaggctcagaaaggtagcacattcggataaacctggatcaacctcaactgcatccttcagagataatgtcaccagtcctcttccttcacttcttgttgtaattgcagccattttcattggattctttctagggaaattcatcttgtagagtgaagcatgcagagtgctgtttcnnnnnnnnnnnnnnnctcttgaccagaaaaagatttgtttacctaccatttcattggtagtatggcccacggtgaccatttttttgtgtgtacagcgtcatataggctttgcctttaatgatctcttacggttagaaaacacaataaaaacaaactgttcggctactggacaggttgtatattaccagatcatcactagcagatgtcagttgcacattgagtcctttatgaaattcataaataaagaattgttctttctttgtggttttaataagagttcaagaattgttcagagtcttgtaaatgttattttaataatccctttaaattttatctgttgctgttacctcttgaaatatgatttatttagattgctaatcccactcattcaggaaatgccaagaggtattccttggggaaatggtgcctcttacagtgtaaatttttcctcctttacctttgctaatatcatggcagaatttttcttatcccttgtgaggcagttgttgactgagtttttcatccttacaatcctgtcccatggtatttaacatnnnnnnnnnnnnnnctgttaacagattcttgctcgntnnnnnaannnnnnnnnnnnnncnnnnnnnnnnnnnnnnnnnnnnncnnccnncccnnnnnnncnnnnnnnnncnnnnnnnccttgttggcccgcctcgggcccttaaaaaatttttttaaaaccatttctttggggcgcgcggccccccgaaagggaaagggaacatggcccaatactggttccctaagaaaaccccgggcccaggacaagggcttggaatttcccccc

SEQ ID NO: 250304 - DNA, 382 bp, Homo Sapiens
actcgctccccctcccctctcgccatcgtccaccgcccccagcgagcaagccgccccctgctctgcgctgtctctccaatggcgtctgcctccggggccacggcgaagcacgagcagatcctggtcctcgacccgcccatagacctcaaattcaaaggccccttcacagatgtagtcactacaaatcttaaattgcgaaatccatcggatagaaaagtgtgtttcaaagtgaagactaccgtgcctcaccggtactgtgtgaggcccaacagtggaattattgacccagggtcaactgtgactgtttcagtaatgctacagctgctccactaaacacttcagatatggaagctgtgtggaatgaggcaaaacctcatgaatt

SEQ ID NO: 250305 - DNA, 634 bp, Homo Sapiens
aaccctcaagtgctgaaggatcctgtatttccccccacggggcagcattttaagtttcagaaaccccaaccaaaccaaaacaaaatcagaatcaggaatgtgaaagtgatggtgctctaaaaatcaatctggaagcagatctgccaacataagaatgtggttgaacagagtctaaccaggaaaaggagagatgcgaactcgctccccctcccctctcgccatcgtccaccgcccccagcgagcaagccgccccctgctctgcgctgtctctccaatggcgtctgcctccggggccacggcgaagcacgagcagatcctggtcctcgacccgcccatagacctcaaattcaaaggccccttcacagatgtagtcactacaaatcttaaattgcgaaatccatcggatagaaaagtgtgtttcaaagtgaagactaccgtgcctcaccggtactgtgtgaggcccaacagtggaattattgacccagggtcaactgtgactgtttcagtaatgctacagccctttgactatgatccgaatgaaaagagtaaacacaagtttatggtacaatttttgctccactaaacacttcagatatggaagctgtgtggaatgaggcaaaacctcatgaattgg

SEQ ID NO: 250306 - DNA, 773 bp, Homo Sapiens
taaacacctcagtgtgaagggatcctgtatttcccccaaaagatccagcagcaaagttcaagaaaacccaaacaaaacaaaacaaaatcagaatcaggaatgtgaaagtgatggtgctctaaaaatcaatctggaagcagatctgccaacataagaatgtggttgaacagagtctaaccaggaaaaggagagatgcgaactcgctccccctcccctctcgccatcgtcccccgcccccagcgagcaagccgccccctgctctgcgctgtctctccaatggcgtctgcctccggggccacggcgaagcacgagcagatcctggtcctcgacccgcccatagacctcaaattcaaaggccccttcacagatgtagtcactacaaatcttaaattgcgaaatccatcggatagaaaagtgtgtttcaaagtgaagactaccgtgcctcaccggtactgtgtgaggcccaacagtggaattattgacccagggtcaactgtgactgtttcagtaatgctacagccctttgactatgatccgaatgaaaagagtaaacacaagtttatggtacaatttttgctccactaaacacttcagatatggaagctgtgtggaatgaggcaaaacctcatgaattaatggattccaaatggagatccccaatgaaaatgataaattgaatgacatggaaccagcaaagctgtcccactgaatgcatctaagcaagacggcccacgccacaaccacacagtgcttcacttcatgctgtgccgaat

SEQ ID NO: 250307 - DNA, 917 bp, Homo Sapiens
cacaccacatttttagtctttattttttaggtaaattccattgaatcaaatataacaaaattacagtttttgtttgtaatgatctttgttcaccaccacacaatcatagtagaatcaaaagtaatatgagaacataaaatgatcaaggacatcaatgtttagtataatttcttaataaaggtaaatatccccatatttagaaaaaattgcattgctagttgcaaatcttaaacacctcagtgctgaaggatcctgtatttccccccaaagatccagcagcacggaggctttcagaacacaaactcaaaaatatagtattttcggggcagcattttaagtttcagaaaacccaaacaaaacaaaacaaaatcagaatcaggaatgtgaaagtgatggtgctctaaaaatcaatctggaagcagatctgccaacataagaatgtggttgaacagagtctaaccaggaaaaggagagatgcgaactcgctccccctcccctctcgccatcgtcccccgcccccagcgagcaagccgccccctgctctgcgctgtctctccaatggcgtctgcctccggggccacggcgaagcacgagcagatcctggtcctcgacccgcccatagacctcaaattcaaaggccccttcacagatgtagtcactacaaatcttaaattgcgaaatccatcggatagaaaagtgtgtttcaaagtgaagactaccgtgcctcaccggtactgtgtgaggcccaacagtggaattattgacccagggtcaactgtgactgtttcagtaatgctacagccctttgactatgatccgaatgaaaagagtaaacacaagtttatggtacaatttttgctccactaaacacttcagatatggaagctgtgtggaatgaggcaaaacctcatgaattc

SEQ ID NO: 250308 - DNA, 537 bp, Homo Sapiens
aattttatgtcgaaaatgcaaacttggggagggcagaaagatcacacacaaggctgtcacttcatacttgcaggattgcacagcagccgggcagaggcgctcctcacttcccagatggggcggcgggcagcagagacgcacctcacttcctagacagtgcggcagccaggcacaggcacacctcacttcccagacagttgggcggccaggcaagcgctcctcacttcccagatggggcggctcccgggaagcggggctcctcacttcccagacagggtggccaggcagaggtgctcctcacttcccagaacaattctttatgaatttgataaaggactgaagtgcaactgaaagctgctagtgatgatctggtaatatacaatttgtccagtagccagtttgtttttattgtgttttctaaccataagagatcattaaaggcaaagcctgtatgacgctgtacacacacaaaaaaatggtcaccgcaggccatactaccaatgaaatggtaggtaaacaaatcttctggtcaagaga

SEQ ID NO: 250309 - DNA, 1967 bp, Homo Sapiens
gacacacagagcagtcctttgttcttatcaacatctcacagcctgtgaagctctcagtgtgcctctgtcctttgccacaaacatgaggttcacattccctctcatggctatagtcctggaaattgccatgattgttttatttggattatttgttgagtatgaaacggaccagactgttctcgagcagctcaacatcaccaagccaacagacatgggcatattctttgagttatatcctctgttccaagatgtacatgttatgatatttgttgggtttggcttcctcatgaccttcctgaagaaatatggcttcagcagtgtgggtatcaacctactcgttgctgctttgggcctccagtggggcactattgtacagggaatcctgcaaagccagggacagaaatttaacattggaatcaaaaacatgataaatgcagacttcagtgcagccacagttctgatatcttttggagctgtcctgggaaaaacgagccccacccaaatgctgatcatgacaattttagaaattgttttctttgcccacaatgaatacctggttagtgaaatatttaaggcctctgacattggagcatcaatgacgatccatgcctttggggcctactttggcttggctgtagcaggcatcttgtatcgatctggactgagaaaggggcatgaaaatgaagagtccgcatactactcagacttgtttgcaatgattgggactctctttctgtggatgttttggcccagctttaactcggccattgctgaacctggagacaaacagtgcagggccattgtaaacacgtacttctctctcgctgcctgtgtgctcacagcctttgccttctccagcctagtggagcaccgaggcaagctcaacatggttcacattcagaatgccacccttgctggaggagttgctgtgggcacttgtgcggatatggcaattcacccatttggttctatgattattgggagcattgcaggaatggtctctgtgcttggatacaagttcctgactccactttttactactaaactgaggatccatgatacatgtggggtccataacctccacggcttacctggtgtagtgggaggccttgcaggcattgtggcagtagcaatgggcgcctccaacacgtctatggccatgcaggcagctgcactgggttcctctatcggaacagcagttgttggaggtctgatgacaggtttaattctaaagttgcctctctggggacagccatctgaccagaactgctatgatgattctgtttattggaaggtccctaagacgagataacttgacaatcagttccatggacatggtgaccacagccagctggaacctgaagtctaaacaccattcctgctctccagcttcctttcccattatccagaatcaagtccaaataaacaaaaagggagtaaccaaagagagtatggaccagagtgaatagatcctaagtcccaaatggccagtgtaaaaatgtccttatgtctgatgctgtctcttgctcttcaataattaattgaggggatgttactcataaaacagataatcaaatagatcttctccaggattcccaaaaagcttttggcagtgagtaaatacagagtaaacatgtcagtttcttaatgtagacactatgtcttcaatcccaaaaattataaaactgaaacccatgaagcaagaatagatgtgagaaatctatgtaaaaaaataattaaagaaatgcatgtgtgtaaagtagtaatatgatgattttaggtagtgctttttattttaaaaatagtctagttagtaatgttgtatccttgcatgaatattattcttaattccttttgcatgttgactatttgcaacgagctcaaatgctatctgatcaaagtctattttgcataaaatgtccaataattaaatattgttataaaataaaacatcagtctttgactct

SEQ ID NO: 250310 - DNA, 409 bp, Homo Sapiens
  misc_feature (20)..(20): n is a, c, g, or t
  misc_feature (26)..(26): n is a, c, g, or t
  misc_feature (60)..(60): n is a, c, g, or t
  misc_feature (115)..(115): n is a, c, g, or t
  misc_feature (207)..(207): n is a, c, g, or t
ctacagaacatctgctgtancttaanagtcaggaaacttgtaatccaaagcacagagacnattcctgcaatgctccccaataatcatagaacccaaatgggtgaattgccatatncccacaagtgcccacagcaactcctccagcaagggtggcattctgaatgtgaaccatgttgaacttccctcggtgctccactaggctggaanaaggcaaaggctgtgaaccacaccaggccagcgaaaaaagaagtacgtgttttacaatggccctgcactgtttgtctccaggttcagcaatggccgagttaaagctgggccaaaacatccacagaaagagagtccctgtagtgaaccaaaagaggggatattagttctgaatatggaagacagtccagaggatgcagtttgc

SEQ ID NO: 250311 - DNA, 423 bp, Homo Sapiens
  misc_feature (353)..(353): n is a, c, g, or t
  misc_feature (365)..(365): n is a, c, g, or t
  misc_feature (378)..(378): n is a, c, g, or t
  misc_feature (391)..(391): n is a, c, g, or t
gcaaactgcatcctctggactgtcttccatattcagaactaatatcccctcttttggttcactacagggactctctttctgtggatgttttggcccagctttaactcggccattgctgaacctgggagacaaacagtgcagggccattgtaaacacgtacttctctctcgctgcctgtgtgctcacagcctttgccttctccagcctagtgggagcaccgagggcaagcttcaacatgggttcacatttcaggaatgccacccttgctgggagggagttgctgtgggggcacttgtcggggatatggggcaatttcacccattttgggtctatggattatttggggagcattncaggggattggnctcttgtgctttngggttacaagttncccgacttttaaggtaccagccagatgttttt

SEQ ID NO: 250312 - DNA, 700 bp, Homo Sapiens
  misc_feature (449)..(523): n is a, c, g, or t
tctgatgacaggtcagcataaaaagtgaacacttccctgtatcttatgctctcagattatttacaatagataattaatgagcaagtcaattgctaaattcaaaaatgttctaaacttctggcagtaaagtaattatgtcatttaaaggggatgattttataatagtatataagctactatgcaagtagattttcctcttcagcgtcacaacatgactcattttccctctaccgtcacaggtttaattctaaagttgcctctctggggacagccatctgaccagaactgctatgatgattctgtttattggaaggtactgtacagtattctaaacaagaatgtaaacgatgactccattagtgaaagctttacacacttcaagcctagatatctgtgtgcataggtgtgatgaaattgagttagcctggcatggtaggtagctcacacannnnnnnnnnnnnnnnnnnnnnnnnnnnnnnnnnnnnnnnnnnnnnnnnnnnnnnnnnnnnnnnnnnnnnnnnnntctctacaaaaattataaataataaatttaaaatttttctttcaatgggatgtcaagtgtaaaagaaaaataaataaatgaaaagaaactgaatgaactacctatttatagaaagaaattgagatgatgtgcccagccagataaaatcagaagttatggtattttctaaagcaaaaa

SEQ ID NO: 250313 - DNA, 2075 bp, Homo Sapiens
  misc_feature (1021)..(1021): n is a, c, g, or t
caggattcggcacgagggcgtgcggagcggcggcggaccacctccaggggctaagtgatggatcttgtactccgtgttgcagattactatttttttacaccatacgtgtatccagccacatggccagaagatgacatcttccgacaagctattagtcttctgattgtaacaaatgttggtgcttacatcctttatttcttctgtgcaacactgagctattattttgtcttcgatcatgcattaatgaaacatccacaatttttaaagaatcaagtccgtcgagagattaagtttactgtccaggcattgccatggataagtattcttactgttgcactgttcttgctggagataagaggttacagcaaattacatgatgacctaggagagtttccatatggattgtttgaacttgtcgttagtataatatctttcctctttttcactgacatgttcatctactggattcacagaggccttcatcatagactggtatataagcgcctacataaacctcaccatatttggaagattcctactccatttgcaagtcatgcttttcaccctattgatggctttcttcagagtctaccttaccatatatacccttttatctttccattacacaaggtggtttatttaagtctgtacatcttggttaatatctggacaatttccattcatgacggtgattttcgtgtcccccaaatcttacagccatttattaatggctcagctcatcatacagaccaccatatgttctttgactataattatggacaatatttcactttgtgggataggattggcggctcattcaaaaatccttcatcctttgaggggaagggaccgctcagttatgtgaaggagatgacagagggaaagcgcagcagccattcaggaaatggctgtaagaatgaaaaattattcaatggagagtttacaaagactgaatagattattgcccagttattcttaagtaaggacaaagaaggaaatatcatcgtatttcttttttttnaataaggaaaaaataatctccatacagtcaagatacatagtaaatggtatcatttggaaatcagcatcgtgggcactgctgaggaatgatcctagtggtaggtcagaagaagatgctgtgaacaccaggactttaatcttatgcttaaaatgccagatgttgttcgggggacaacttgtatctttctagcagcagatctgtagtttgtatagcctcaacaacaattttaaataagatggagaataaattattgaggggactaggctatatgcatttgccttcatccacccatgtttattaagaatcattgtgcttaataataccaagactaagcaccataaccaagaaatactaatgtaaagattgtttcttgtttcaggaatggttaattcttcaacgttggtatgataatgataacttgttttgacttgaataaagtactacatcagtgtggaaaaaattctgatacattagcagctatgtaaatgacctaattgatagcaggtgtaataagactatcgtcttcctacacataggaggctcattctctggacacactatcacctattacattttactgattaacaaataaattggaatttaaaaatatcgatatcaccatgatttaatccagatctgggattatgtagctaaacattgtgatgattattatttaaaaccattatttaataagagtaaaaatatgtgaatctggatatatttaaaaaaagaaatttgatgcccagataatatattaggcactactgattttttagttaaattgatgcactacacttttgatgtttgaagttacaaacctgtaatttttttgtaaaggaaataattgccaaatacctaggcccattgctgacgattagttctaaaatcttattcctcctcttctcccctcacttttccctacttcctctgcaaaaagatttaacaaatacattcataaggaaatgtgtgttgtaacaaatatattgcaaaaacatagtttgtaaaggcattctataagctatttatgtaaaatcaataaaagttgatcataatt

SEQ ID NO: 250314 - DNA, 964 bp, Homo Sapiens
ggaggaggagttaagggtggctttagaggctcagtccccgcgacgccgcgctggttggtgctcctgcgccggaggagttctgcgtctcggggtggtgactgggtccagaatggcttcggattcggggaaccaggggaccctctgcacgttggagttcgcggtgcagatgacctgtcagagctgtgtggacgcggtgcgcaaatccctgcaaggggtggcaggtgtccaggatgtggaggtgcacttggaggaccagatggtcttggtacacaccactctacccagccaggaggtgcaggctctcctggaaggcacggggcggcaggcggtactcaagggcatgggcagcggccagttgcgtgagtgaccactgtggccttggcccctctcggagggaggtggctcagagctggtacaaatctaatcataggattctcaggctctgggttggagtggctttgaggaaggtgtgaaaattatgtgagactccctgcccttcccgagctgctgaagaggtgtgctgggtgaggtggcaagccagcccaagtgtctaataccttgcagagaatctgggggcagcagtggccatccggggggggcctggcaccgtgcagggggtggtgcgcttcctacagctgacccctgagcgctgcctcagcgaaggaactattgacggcctggagcctgggctgcatggactccacgtcccatcagtacggggaccttacaaacaactgcaacaactgtgggaatcactttaaaccctgatggaacatcctcaggggggcccccaagaattcttaccggcacccgcggaaaacctgaggcaatggtccggggactaaatgtttaacggtcggcgccatccctccaaaaatggggagcattggaccacccttgaaaggggtcggggaatgatgaattgggcacggcaagactgcaatttttcgcaagggagcggcga

SEQ ID NO: 250315 - DNA, 668 bp, Homo Sapiens
tgaatgaatgaatgaatgaatgaagcaaatataaatagatgagagggtagagcacctggcctgtgagctgctttcctgcccacctgtttcctttctttctaagctgtgggaatcactttaaccctgatggagcatctcatgggggccccaaggactctgaccggcaccgcggagacctgggcaatgtccgtgctgatgctgacggccgcgccatcttcagaatggaggatgagcagctgaaggtgtgggatgtgattggccgcagcctgattattgatgagggagaagatgacctgggccggggaggccatcccttatccaagatcacagggaactccggggagaggttggcctgtggcatcattgcacgctccgctggccttttccagaaccccaagcagatctgctcttgcgatggcctcaccatctgggaggagcgaggccggcccatcgctggcaagggccgaaaggagtcagcgcagccccctgcccacctttgagcaggacctcaccttggctctgttgctgtcctccagggcgagcactttccacttccagagggggccagagggactttgcctgcccagtctttggagagctcagtacagggcaggagctgctgtggtgttcccttggcaaatgaaagttttattttcgtttgggaaaaa

SEQ ID NO: 250316 - DNA, 1143 bp, Homo Sapiens
gggtggcgattctcagacgaaggcagcttggccacctggctgcacagcgacgccaccgtcagcttcgccagaaggaaagactgcagaatccggccctcctgcggggggcgcttctgaagctctggggacgtcgtcctagtggggaagagcgacagcggacgcagcagccggtggtaaaaccgctggagctcaagctcgggcttcgggggctccatcatagagccggcggccgccaccgtccaggaacagaaagccgaggggttactaaggcaaccaggagcccgacggcccgagtgcgcctgcgcggccgccacccggtggctgacgaagcaaggccttgcgtgcgcacgcactaagaagaggagttaaaggtggctttagaggctcagtccccgcgacgccgcgctggttggtgctcctgcgccggaagagttctgcgtctcggggtggtggactgggtccagaatggcttcggattcggggaaccaggggaccctctgcacgttggagttcgcggtgcagatgacctgtcagagctgtgtggacgcggtgcgcaaatccctgcaaggagtggcaggtgtccaggatgtggaggtgcacttggaggaccagatggtcttggtacacaccactctacccagccaggaggtgcaggctctcctggaaggcacggagcggcaagcggtactcaagaggcatgggcagcggccagttgcagaatctgggggcagcagtggccatcctgagggggcctggcaccgtggcagggagggggtgcgccttcctacagctgacccctgagcgctgcctcatcgaagggaactattgaacggcctggaaccctaggctgcatggactccacgtccatcagtacggggaccttacaaacaactgcaacagctgtgggaatcactttaaccctgatggagcatctcatgggggcccccaggactctgaccggcaccgcggagacctgggcaatgtccgtgctgatgctgacggcgcgccatcttcagaatggaggatgagcagctgaaggtgtgggatgtgattggcgcagctgattattgatgagggaagaagatgaccttgggccgggggaggccatcccttatccaagatcacagggaactccggggaaag

SEQ ID NO: 250317 - DNA, 1447 bp, Homo Sapiens
  misc_feature (1018)..(1018): n is a, c, g, or t
  misc_feature (1383)..(1383): n is a, c, g, or t
gctgggtggcgaattcggcacgagggcagcttggccacctggctgcacagcgacgccaccgtcagcttcgccagagggaaggactgcagaatccggccctcctgcggggggcgcttctgaggctctggggacgtcgtcctagtggggaagagcgacagcggacgcagcagccggtggtaaaaccgctggagctcaggctcgggcttcgggggctccatcatagagccggcggccgccaccgtccaggaacagaaagccgaggggttactaaggcaaccaggagcccgacggcccgagtgcgcctgcgcggccgccacccggtggctgacgaagcagggccttgcgtgcgcacgcactaggaggaggagttaagggtggctttagaggctcagtccccgcgacgccgcgctggttggtgctcctgcgccggaggagttctgcgtctcggggtggtgactgggtccagaatggcttcggattcggggaaccaggggaccctctgcacgttggagttcgcggtgcagatgacctgtcagagctgtgtggacgcggtgcgcaaatccctgcaaggggtggcaggtgtccaggatgtggaggtgcacttggaggaccagatggtcttggtacacaccactctacccagccaggaggtgcaggctctcctggaaggcacggggcggcaggcggtactcaagggcatgggcagcggccagttgcagaatctgggggcagcagtggcccatccttgggggggcctggcaccgtgcaagggggtggtgcgcttcctacagctgacccctgagcgctgcctcatcgagggaactattgacggcctggaccctgggctgcatggactccacgtccatcagtacggggacccttacaaacaactgcaacagctgggggaatccactttaaccctgatggagcatctcatgggggcccccaggactctgaccgggcacgcggaaaacctgggcaatgtccgtgctgatgctgacggccgcgccctccttcnaatggaggattaccagttgaaagtgtgggatgtgattgggcgcaccctgattattgatgagggagaaaatgaccggggcccgggaaggcatcccttatcccaaattccagggaacctcccgggaagagggttggcctttggccttaattgcacgcttcccctgggctttttccagaaccccccgccagatcttgctcttgcggatgggcgttacccttctggggaggaatttgaagcgccggccccatcccttgggctagggccccccaacgggaatcttcgccagacccccttggccccccttttttgagcagggaccttccccttttggcctctgttttgtctgtcccttccccgggcgcagnacccttttcccattttctccaaaaagggcgcccccaccaggaagtattcgcgtgtatccgcggg

SEQ ID NO: 250318 - DNA, 1118 bp, Homo Sapiens
attctgcaaattgtataagaataaagttagaattaacaattttattttgtacaacagtggaattttctgtcatggataatgtgcttgagtccctataatctatagacatgtgatagcaaaagaaacaaacaaaagccaggaaaacactcattttcgccttgaatatgtaaatgggattaattttgtcctgtgccttatgtggaaaggaacttctttggttttccttttttgttctggtggaagcatgtgcaggagacatatcatccaaacataaaccattaaaatgtttgtggtttgcttggctgtaattttcaaagtagttaattgaggacaaagggtaatgcagaagtgatagctttggtttgctgagtcttgttttaagtggccttgatatttaaaactattcctgccaccatttcttctccttggccacttcttccttgcgtctccctgcatgctgctttatttgcttctccctccccaaccacctcatggtatatttaagagtgaaagggacaaactagtaggtttgtcaagtttaatataaagcactgatgtaacttgctaggtaaacggaaagataagttctaactgcctactatccaatgtcagttaattggtgtcttcccccctcatttgctctcttccctaaaatgtgtcccagatgccttcatttgctgttttacttctatgttctgcttttcctcctctctttgttcccttcctgtctatccattgagtttatgaaatggaagagttaactgcatgcactagtgtttggagggtgttgtggtttgtctttctaattaggtgtatagcctattcactttcctagaataaatctcttaacctaaatttgagtagtctgcattttggcaactcctctagcagcttggtagcctagtacaggttgtttttttaaaaaaggaaaagcaggaaggaggagtgaattttattaacatgttctgcaaatgtattgagatttggcctctgaagaacactttttcagtgttaaagttcttttaccttaagatttcagaaatacctttagaataattattaaatttttaaaggccttggtcctttacatccttttttgggaaaacttggtatttaac

SEQ ID NO: 250319 - DNA, 341 bp, Homo Sapiens
acccgtttacctagcaagttacatcagtgctttatattaaacttgacaaacctactagtttgtccctttcactcttaaatataccatgaggtggttgggaagggagaagcaaataaagcagcatgcagaaatatcaaggccacttaaaacaagactcagcaaaccaaagctatcacttctgcattaccctttgtcctcaattaactactttgaaaattacagccaagcaaaccacaaacaaatggtttatgtttggatgatatgtctcctgcacatgcttccaccagaacaaaaaaggaaaaccaaagaagttcctttccacataaggcacaggacaaaat

SEQ ID NO: 250320 - DNA, 708 bp, Homo Sapiens
  misc_feature (652)..(652): n is a, c, g, or t
gggcacttcctaccgtacgaggcgcaggtgggagacttccgccctcgcgggactggctagggcgtttgaccgccggcggtgaaggggaggcggtgggcgtcttggagaacagagcgagatggagaagcgaggccgaggcgtgaagtcgagccccatccagaccccgaaccagacccctcagcaggctccggtgacgcctaggaaagaaaggaggcctagcatgttcgagaaggaagcagtgagtgcggagactgctaggggcccgagacggctatgtccgaccgtttaagtgaaatcgctccccagtgggccccgctcccgtcaccacccccagagccaaggaggcagcatctcccttttgtgtttcttttttccccagatgcgaaattgaagcctgagactgagttgggcagtcccctttggacttgagtgctaaagttttcttgttttttaattagggccatagaaccctacataagtcgattggaagggtggttacaagatcttcttttcaaatttactcagcttgcggatttcctgagagtactctgagtattattgctttgtactaaaacacagtatgttagtgtatttagtgccattataagcagttttgctagcgaaaaatgagtgcgttgtattaaaaaaatantttgataaaccaggcagaatagtgccatgttttcgggtttttaaaacatcagcagt

SEQ ID NO: 250321 - DNA, 1400 bp, Homo Sapiens
  misc_feature (366)..(366): n is a, c, g, or t
cgcggggatggagcccctgcgggtgctggagctatacagcggcgtgggcggcatgcaccacgcgctgaagagaaagctgtatacctgcacaagtggtggctgccattgatgtcaacactgtcgctaatgaagtatacaagtataattttcctcacacacagttacttgccaagacgattgaaggcattacactcgaagagtttgacagattatcttttgatatgattttaatgagccctccctgccagccattcacaaggattggccggcagggtgatatgactgattcaaggacgaatagcttcttacatattctagatattctcccaagattacaaaaattaccaaagtatattcttttggaanaatgtttaaaggttttgaagtatcttcttacaagagacctcttgatacaaacaatagaaaattgtggctttcagtaccaagagtttctattatctccaacctctcttggcattccaaattcaaggctacgatattttcttattgcaaagcttcagtcagagccattaccctttcaagcccctggtcaggtactgatggagttccccaaaattgaatctgtacatccacaaaaatatgcaatggatgtagaaaataaaattcaagaaaagaacgttgaaccaaatattagctttgatggcagcatacagtgttctggaaaagatgccattctttttaagcttgaaactgcagaagaaattcacaggaaaaatcaacaagatagtgatctctctgtgaaaatgctaaaagattttcttgaagatgacactgacgtgaaccagtatcttttaccaccaaagtcattgctgcgatatgctcttctgttagacattgttcagcccacttgtagaaggtccgtgtgctttaccaaaggatatggaagctacatagaagggacagggtctgtgttacagactgcagaggatgtgcaggttgagaatatctacaaatcccttaccaatttgtcacaagaagaacagataacaaagctgttaatacttaaactgcgatatttcactcctaaagaaatagcaaatctccttggatttcctccagagttcggatttccctgagaagataacagtgaaacagcgttatcgcctacttggaaatagtctcaacgtgcatgtagtagctaaactaatcaaaatcttatatgaataattttgaaataactctgaaagatggtcatatgatattccttcattttcagagagtaattctgaaattctgttttgaactaattctggtgaaatttaactaaattattttaatctgtccttattaagaaatttggattttattaaaaaaatccatgtgtttcatcaaatttatattactgtattttataaaatacgaactattgttatgcttta

SEQ ID NO: 250322 - DNA, 737 bp, Homo Sapiens
  misc_feature (44)..(44): n is a, c, g, or t
cgttcaaggtcacgggccccggggaaataggcagttactaaatnccgccacgggctgcccttacttcggaataacctccacaagtcgggacaactgttggtttctggccactccacctgtcaggctcgtgaatgttatccctaagctgtgccatgaacggggctgccagaaaagttttcttctttctttagcaaaggaagttcagctaggctgactcaaacttaattccctgattaaaatgctaacatatgtttgtctctttcctgaattccctcaacacagaacagactgtaaaaattaaatgaaaataaaacaccaactaggcatcatttaccaagagactgcaacataacatcagatctcgcaaagcaaacaatctgtaagagaatcagaaatcacatctatactgaaagggcaaaagggaaaagtagagacgacctctgagatggagatagcaggtatattcactgccacactatatggctctgtccttcatgctctaaacacataaccaagatttcttcctgaggactactcattttctgcccaagtctctcaccatcttttcctccacaagccttcatctctctacgtctgttctgaaaaaataaagatgagcctcaggattcctggtttcacaaaacggaagtggcagtgcatcatatgaacaggacggcctgtgttctagtgatggcagggccagccctctccctctggccacacgcctcattgtcccc

SEQ ID NO: 250323 - DNA, 305 bp, Homo Sapiens
  misc_feature (189)..(189): n is a, c, g, or t
  misc_feature (192)..(192): n is a, c, g, or t
  misc_feature (218)..(219): n is a, c, g, or t
  misc_feature (228)..(228): n is a, c, g, or t
  misc_feature (240)..(240): n is a, c, g, or t
  misc_feature (249)..(249): n is a, c, g, or t
  misc_feature (252)..(252): n is a, c, g, or t
  misc_feature (259)..(259): n is a, c, g, or t
  misc_feature (268)..(268): n is a, c, g, or t
  misc_feature (271)..(271): n is a, c, g, or t
aaaaaaaggtggcgatagagaaaaagagcaacaaatcaaaagagattatgattatattgcaataaagctgttttttaaaaaaaggatatggattttagaacattaggaaacattgtcctaagccatagaaaccactgtttaaaacctgggtacgactacatggcattaatgagtctagtgctgctcagntgngagacatgctagagggccagatattnntattatttnaagaaatgactnctattattnagnaaatttnttattttanatntatacttatttaagtattaaatatttaggtatat

SEQ ID NO: 250324 - DNA, 1991 bp, Homo Sapiens
  misc_feature (382)..(391): n is a, c, g, or t
  misc_feature (900)..(935): n is a, c, g, or t
  misc_feature (1686)..(1701): n is a, c, g, or t
  misc_feature (1762)..(1784): n is a, c, g, or t
ggcctgggtggcgaattcggcacgagggcctgagggaggggcgtgcgccgagagggagctcagatcgagcggggcgcgggtggagaagctgcggcggcgcggcccgtaggaaggtgctgtccgaacgatcgggataggagcggtccctgcgcttgctgctgggaagtggtacaatcatgtttgaaattaagaagatctgttgcatcggtgcaggctatgttggaggacccacatgtagtgtcattgctcatatgtgtcctgaaatcagggtaacggttgttgatgtcaatgaatcaagaatcaatgcgtggaattctcctacacttcccatttatgagccaggactaaaagaagtggtagaatcctgtcgaggaaaaaatcnnnnnnnnnnctaccaatattgatgacgccatcaaagaagctgatcttgtatttatttctgtgaatactccaacaaaaacctatggaatggggaaaggccgggcagcagatctgaagtatattgaagcttgtgctagacgcattgtgcaaaactcaaatgggtacaaaattgtgactgagaaaagcacagttccagtgcgggcagcagaaagtatccgtcgcatatttgatgcaaacacaaaacccaacttgaatttacaggtgctgtccaaccctgagtttctggcagagggaacagccatcaaggacctaaagaacccagacagagtactgatttggaggggatgaaactccagagggccagagagctgtgcaggccctgtgtgctgtatatgagcactgggttcccagagaaaagatcctcaccactaatacttggtcttcagagctttccaaactggcagcaaatgcttttcttgcccagagaataagcagcattaactccataagtgctctgtnnnnnnnnnnnnnnnnnnnnnnnnnnnnnnnnnnnncagcgattggaatggaccagagaattggaaacaagtttctaaaagccagtgttgggtttggtgggagctgtttccaaaaggatgttctgaatttggtttatctctgtgaggctctgaatttgccagaagtagctcgttattggcagcaggtcatagacatgaatgactaccagaggaggaggtttgcttcccggatcatagatagtctgtttaatacagtaactgataagaagatagctattttgggatttgcattcaaaaaggacactggtgatacaagagaatcttctagtatatatattagcaaatatttgatggatgaaggtgcacatctacatatatatgatccaaaagtacctagggaacaaatagttgtggatctttctcatccaggtgtttcagaggatgaccaagtgtcccggctcgtgaccatttccaaggatccatatgaagcatgtgatggtgcccatgctgttgttatttgcactgagtgggacatgtttaaggaattggattatgaacgcattcataaaaaaatgctaaagccagcctttatcttcgatggacggcgtgtcctggatgggctccacaatgaactacaaaccattggcttccagattgaaacaattggcaaaaaggtgtcttcaaagagaattccatatgctccttctggtgaaattccgaagtttagtcttcaagatccacctaacaagaaacctaaagtgtagagattgccatttttatttgggannnnnnnnnnnnnnnnggaccttccaggaaaccaaattcctatccggtatttaaagggaaaatggaaccacagtggnnnnnnnnnnnnnnnnnnnnnnnggaacaaaaagtcttccctggttggccccccacgttggggaattgccaatggggtggcaaatttcctgggtcttcatgtgggaaagcactttttggcttttcccacaggggtttccacgccccaccatttttctcccctttgggaggtttaaacgccctctttccccaaaaggtaaacaatttggtgggagcaatttatacggaggc

SEQ ID NO: 250325 - DNA, 930 bp, Homo Sapiens
  misc_feature (494)..(536): n is a, c, g, or t
  misc_feature (554)..(610): n is a, c, g, or t
  misc_feature (686)..(703): n is a, c, g, or t
atggttcctggtataaacatgtaaaatcttggtgggaaaagggaaagagtccacgtgtactatttcttttctacgaagacctgaaagaggatatcagaaaagaggtgataaaattgatacatttcctggaaaggaagccatcagaggagcttgtggacaggattatacatcatacttcgttccaagagatgaagaacaatccatccacaaattacacaacactgccagacgaaattatgaaccagaaattgtcgcccttcatgagaaagggaattacaggagactggaaaaatcactttacagtagccctgaatgaaaaatttgataaacattatgagcagcaaatgaaggaatctacactgaagtttcgaactgagatctaagaaggtctttctttacttaacatatctgatattaaagatttcttttcattattctccactttttcttattttagattgctagaaaagacataatcatggattatgttgacnnnnnnnnnnnnnnnnnnnnnnnnnnnnnnnnnnnnnnnnnnngagacagagtctcactcnnnnnnnnnnnnnnnnnnnnnnnnnnnnnnnnnnnnnnnnnnnnnnnnnnnnnnnnnttgactcaattgatcctcccatctcagcctcccaagtagctaggactacagacatgtgcaaccatgtttggctaannnnnnnnnnnnnnnnnngtagagatgaggtcttattatattgtccaggctggtcttgaattcctgggctcaagcttcccaagtagctgcaacaacaggcacacaccaccatgctcaactaattttatttctattttttgtatagacaggggcttgctatagtgtccagggctggtctgaaaccctttgagctcaagtgatcttcccacaccagcctcccaaaatactggggattacagggttga

SEQ ID NO: 250326 - DNA, 447 bp, Homo Sapiens
  misc_feature (429)..(429): n is a, c, g, or t
gaagacctgaaagaggatatcagaaaagaggtgataaaattgatacatttcctggaaaggaagccatcagaggagcttgtggacaggattatacatcatacttcgttccaagagatgaagaacaatccatccacaaattacacaacactgccagacgaaattatgaaccagaaattgtcgcccttcatgagaaagggaattacaggagactggaaaaatcactttacagtagccctgaatgaaaaatttgataaacattatgagcagcaaatgaaggaatctacactgaagtttcgaactgagatctaagaaggtctttctttacttaacatatctgatattaaagatttcttttcattattctccactttttcttattttagattgctagaaaagacataattcatgggattatgttgacattttctntttaaatttttgtttaac

SEQ ID NO: 250327 - DNA, 1250 bp, Homo Sapiens
  misc_feature (58)..(79): n is a, c, g, or t
tattactcaaatccaaagcattatcacacatatccttgtacattacagtttgggaacnnnnnnnnnnnnnnnnnnnnnntagtatttgaatggcggagaatgaatgtgagtcagcagtaacagatatgtcagaatttagttacaagtttgggatcttttaaaagtagcatcactaatactcccagaagaagcataataaatctaaaacaataaaaactaacagtgtaaatataaggtaatgtttaactcacattttggacacctgattaaactcagctctaaaagtacagataaaaaattatatactcgtttgtgacatttaatttccaaagcaccaaggcaaaagagagactcacctctcatttaagtacccaattgcctatggcaaacatttgcacaatatcatataaaaagtcaagcaaataaaattacataagcaaattcaaatcacagtgctttaaaaaatataatcattggtaatcttcaaagaaggcattgcctcattaacattctgatctaggcgatggtattccactgttttggaacaaaggccatcacgccatttcctgctttgaaccagaagaaaaatcttccttttgttgtgatatgtaatgtaaacaacagcaatgcaaaaagcaaaaataataagatgaaaaaagaaatggctgtcttcctcttctatatttgaggatggcatcttaaaagatttcactgactgttcaatttccatgtaacccctgttttcttccaaggtgtcatcagactcgtcgtcgtccctggggcccgtggtccagtcatagtctggttctccataatcgccattgtctagagtgtctttggctgtggatggagaactgttcagcatgagaagatcctcctcctctatactaggatcttcattgttatcagcttcctcttgagacagaggagtaggcgagggatgagggaccacagatgctcctccacttttcttggtactcgtcgtgggagggagggtggtgctgatttgggaaatagaaggtttggtttggttttcatgtgttaaagcattcacatttggggtagaaatatgtgagttgagtacggttgggctcggtgaatcagtccgtgatacaacactggatagagcggcggacacaagcaggagcgccaagaccagcggccgcgccaaccccacaagggcttggatggccgacccgggcagcagtttcgcttgtgctggccccctcatcctcttcgggacggcagct

SEQ ID NO: 250328 - DNA, 921 bp, Homo Sapiens
  misc_feature (12)..(12): n is a, c, g, or t
  misc_feature (49)..(49): n is a, c, g, or t
  misc_feature (64)..(64): n is a, c, g, or t
  misc_feature (76)..(76): n is a, c, g, or t
  misc_feature (112)..(112): n is a, c, g, or t
  misc_feature (119)..(119): n is a, c, g, or t
  misc_feature (162)..(162): n is a, c, g, or t
  misc_feature (216)..(255): n is a, c, g, or t
  misc_feature (727)..(735): n is a, c, g, or t
  misc_feature (793)..(814): n is a, c, g, or t
ggacgccctccnccggctccacaaaaagcgcaagcccacggcccacccngggtccgcctaacanatattagggctngttatcctaaaaagctgtagtgacactgtaagtcanccagggntcaaaccacatatttacataatggatcaattcttttatgcatnggaaagacagacataaatgaatccccatagtaaatactttcccagttgcccatnnnnnnnnnnnnnnnnnnnnnnnnnnnnnnnnnnnnnnnngtaattgtacacaaatatcctttatgtatacaaacaacttcattcaggtataattttaatttgaaagacctaggtacagtattatttaagtgataatgacccctaagatttattcaaatttactgtaaaataataaacgaagtaaacgaatctgatataattttaaactctgcccattgcttgaaaccttggaggaacccatgctacaatcaattgctaactaaaagcaattgtacatgtatttaacattttaccagtttctgcttctaaatttaatatagtaattccaaccaaaaaaatagtatctctgtaacattttatctatgtccactgcaagctgcagagtctctgttgccaagatttcttgacacatttaatgttttacctaaaattgtggtcagattgagcaatatcattatcctaaattatgtttaaattatctaaaaatatccaaagcagttttcttggaagnnnnnnnnntattactcaaatccaaagcattatcacacatatccttgtacattacagtttgggaacnnnnnnnnnnnnnnnnnnnnnntagtatttgaatggcggagaatgaatgtgagtcagcagtaacagatatgtcagaatttagttacaagtttgggatcttttaaaagtagcatcactaatacttccaga

SEQ ID NO: 250329 - DNA, 266 bp, Homo Sapiens
  misc_feature (215)..(215): n is a, c, g, or t
tatatataaggggagtttattaaggagtattgactcacaggatcacaaggtgaagtcccacaacagaccatctgctagctgaggagcaaggaagccagtctgagtcccaaaaccacaaaagtaaggaagccaacagtatagccttcagtctgtggccagaggcccgagaacccctggcaaaccactagcgtaagtccaataattcaaaagctaanggaacttagagtctgatgtttgagggcaggacgcatccagcatgggaggaa

SEQ ID NO: 250330 - DNA, 1559 bp, Homo Sapiens
  misc_feature (223)..(363): n is a, c, g, or t
  misc_feature (1263)..(1263): n is a, c, g, or t
  misc_feature (1269)..(1269): n is a, c, g, or t
  misc_feature (1285)..(1285): n is a, c, g, or t
  misc_feature (1311)..(1311): n is a, c, g, or t
  misc_feature (1329)..(1329): n is a, c, g, or t
  misc_feature (1332)..(1332): n is a, c, g, or t
  misc_feature (1338)..(1338): n is a, c, g, or t
  misc_feature (1344)..(1364): n is a, c, g, or t
  misc_feature (1366)..(1366): n is a, c, g, or t
  misc_feature (1368)..(1368): n is a, c, g, or t
  misc_feature (1384)..(1384): n is a, c, g, or t
  misc_feature (1415)..(1415): n is a, c, g, or t
  misc_feature (1419)..(1419): n is a, c, g, or t
  misc_feature (1422)..(1422): n is a, c, g, or t
  misc_feature (1428)..(1428): n is a, c, g, or t
  misc_feature (1443)..(1443): n is a, c, g, or t
  misc_feature (1453)..(1455): n is a, c, g, or t
  misc_feature (1458)..(1459): n is a, c, g, or t
  misc_feature (1461)..(1461): n is a, c, g, or t
  misc_feature (1505)..(1505): n is a, c, g, or t
  misc_feature (1521)..(1522): n is a, c, g, or t
agggcctttaccctagcggtgacaggcgttcatgcccggcgtggaaaaaccgccagggttctttcaagggggttggtgttctccagccactttccaaaccgttaagccactgtacgcgctggtgtacaaaacgcagcgcttctcccccgtgtggaatccgtgatcttccagcgccggcttcctcagtgcgaagaagctgcaagcggcacctggccaagggctnnnnnnnnnnnnnnnnnnnnnnnnnnnnnnnnnnnnnnnnnnnnnnnnnnnnnnnnnnnnnnnnnnnnnnnnnnnnnnnnnnnnnnnnnnnnnnnnnnnnnnnnnnnnnnnnnnnnnnnnnnnnnnnnnnnnnnnnnnnnncctcgatgacttacgagccctcaaggggaagcattttctcctggaccccttgatgccggagctgctggtgtttcccgcccagacagatctgcatgaacacccactgtaccgggccggacacctcattctgcaggacagggccagctgtctcccagccatgctgctggacccccgccaggctcccatgtcatggatgcctgtgccaccccaggcaataaagaccagtcacttggctgctcttctgaagaaccaagggaagatctttgcctttgacctggatgccaggcggctggcatccatggccacgctgctggcctgggctggcgtctcctgctgtgagctggctgaggaggacttcctggcggtctcccccttagatccgcgctatcgtgaggtccactatgtcctgctggatccttcctgcagtggctcgggtgagatggtgagaaggcgtggctgagggactcagaggtccacagcagcttagacctggagtcatctgttttggtcttagttctgacactttaatgggcttgggaccctggagcaaaagttctcctctgtgaagcgaggatttcaggagcgaggatttcaggactgaggcagcctgtgaagctgtgtaaccgagacacgcttttccttagcggctcgtctactccatgtgctccctctgccaggaggagaatgaagacatggtacaagatgcgctgcagcagaacccgggcgccttcaggctagctcccgccctgcctgcccggccccaccgaggcctgagcacgttcccgggtgccgagcactgcctacgggcttcccccaagaccacgcttagcgggggcttcttcgttgctgtaattgaacgggtcgagatgccgacgtgagtgagtgggggcatgcttgggnggcgcnggatggcactggcacntctaacatctacatttctctagctcngcctcacaggccaaagcntcngcaccngcacgnnnnnnnnnnnnnnnnnnnnngngnccgccgcgagcaaaangctgcagccggtgcttgcacaccgccttgcncatngcngaggcnccgggctcactcctncctggtgggnnnggnngntgcctgtcctctccgtggaggcccctgggccctcaccgcaggcngccgtttgcgttttgnnaggttattggtccctcggcggctgtgtctggctggtg

SEQ ID NO: 250331 - DNA, 1559 bp, Homo Sapiens
  misc_feature (198)..(198): n is a, c, g, or t
  misc_feature (300)..(300): n is a, c, g, or t
tcgaagcttttgtctaattgccaagggcgggttgcaaggccccgggttggcagctttttgctttcttcttttttctttgggggctgggctggggtgggcgttttgggtgctgatgcttggccctgggaggctgagctagagaaatttagatgttagaagtgccagtaccatcctgggcctccaaagcatgccccccanccattcacggttcgcatctggacccgttcaattacagcaacgaagaagccaccgctaagcgtgtcctcagggggaaccccggagggcagtgctcggcaaccncgggaacggtgctcaggcctcggtggggccaggcaggcagggcgggagctagcctgaaggcgcccgggttctgctgcagcgcatctcgcaccacgtcttcattctcctcctggcagagggagcacgtggagtagacgagccgctgcagggaagggaaagtgagcgcgtggcacagggctcgctgctggaaccctgccagggcatgcagacgcaccgggctaggtgtgcctgccccgggctcctccagctgtctgctcggcatacccgagccactgcaggaaggatccagcaggatgtagtggacctcatggtagcgtggatccgagggggagaccgccaggaagtcctcctcagccagttcacagcaagagacgccagcccgggccagcagcgtggccatggatgccagccgcttggcatccaggtcaaaggcaaagatcttcccttggttcttcagaagagcagccaagtgactggtcttattgcctggggcggcacaggcatcgatgacatgggagcctggcggggggtccagcagcatggctgggagacagctggccctgtcctgcagaatgaggtgtccggcccggtacagtgggtgttcatgcagatctgtctgggcaggaaacaccagcagctccggcatcaaggggtccaggagaaaatgcttccccttgagggctcgtaagtcatcgaggctggaagcccgaccctgataggagaaaccttgtctcttgaaataatcaactacatcatcggagcaggtcttgagagtgttcacacgcacaaatcgaggcagctgggaggctggaccaggcctggatcccacttccaacaggtcctcattccggctcacaccccgatgaaccttgagccgagccaactcagccttgagcctcgcctggtgccggcccaacagagccttccatcggcccccaccccctcgaaagccctttcccaacaacaactcatacactagcaccttggccaggtgcggccgcagcttcttctccgcacggaggaggccggcgctggcgatcacagcatccagcacggcggagtagcgctgcgtttcgcacaccagcgcgtacagctgcttcacgttctggaagttgctggagtacaccaaccccttgatagagccctggcggctctccacgccggccaacacgcctgcagctgcagcatacagccccatgttcccgcgcgcctttacggctctgtggcaaaaccctcgtgccgaattcgccacccaggcc

SEQ ID NO: 250332 - DNA, 911 bp, Homo Sapiens
ggactcagaggtccacagcagcttagacctggagtcatctgttttggtcttagttctgacactttaatgggcttgggaccctggagcaaaagttctcctctgtgaagcgaggatttcaggagcgaggatttcaggactgaggcagcctgtgaagctgtgtaaccgagacacgcttttccttaggtatgccgagcagacagctggaggatcccggggcagggacacctagcccggtgcgtctgcatgccctggcagggttccagcagcgagccctgtgccacgcgctcactttcccttccctgcagcggctcgtctactccatgtgctccctctgccaggaggagaatgaagacatggtaccagatgcgctgcagcagaacccgggcgccttcaggctagctcccgccctgcctgcccggccccaccgaggcctgagcacgttcccgggtgccgagcactgcctccgggcttcccccaagaccacgcttagcggtggcttcttcgttgctgtaattgaacgggtcgagatgccgacgtgagtgagtgggggcatgcttgggaggcgcaggatggtactggcacatctaacatctacatttctctagctcagcctcacaggccaaagcatcagcacccagaacgcacacccagcccagcccccaaagagaaagaagagagcaaaaagctgcagccggtgcttgcacaccgccttgcacatagcagaggctccgggctcactccttcctggtgggaaaggaagatgcctgtcctctccgtggaagaccctgggccctcaccgcaggcagcagtttgcgttttgaaaggttattgggtcccttcctcgggctgtgttcttgctggtgagcaaaagtgttgcctgcagaaataaaatgcagaacgtactctacgat

SEQ ID NO: 250333 - DNA, 856 bp, Homo Sapiens
  misc_feature (775)..(783): n is a, c, g, or t
gaatgagctcagctctcacttccccactcctcacccccctgtaaagtaacctttctccaaggttatgcttcaacaggaatagctaacatttattaaattgtggcacgtaagtatcttggatatattggctcattgaatcctcacacctactattttacagagatgccagtggggcttgagattgaatcacttgcccaggctcccactgctggtaaacagtagagggggctcctgacccataagtctggcttgacaacccattccctcaactgcggatcccggattcccttatcaccctgttgatttctccatagctgtggtaacatttgttgcatgaatggaccgttgaaatagggcctggcagggagaaattcaggaaatgatgaatgaatggttcttccctggcagcctcgatgacttacgagccctcaaggggaagcattttctcctggaccccttgatgccggagctgctggtgtttcccgccagacagatctgcatgaacaccactgtaccgggccgacactcattctgaggacagggcagctgtctccagccatgtgctggaccccgcaaagctccatgtcatgatgctgtgcacccagcaataagacagtacttgctgtctctgagaacaggagatcttcttgactgatcagcgctgacatgcactgtgctgctggttctcttactgtagagatctggttccctaccggtagagccagttggactctcagcctgtaaatgtaacgtgttgcctaagtaagtgcggacnnnnnnnnngtgaaccctccgggggggggcgctttttgagggggtctgaactctctctgtaaaaacacattcctgctggtag

SEQ ID NO: 250334 - DNA, 712 bp, Homo Sapiens
cgggggcgtgtggaacctgacggaactgccacgatgctgccactttggactctttcactgctgctgggagcagtagcaggaaaagaagtttgctacgaaagactcggctgcttcagtgatgactccccatggtcaggaattacggaaagacccctccatatattgccttggtctccaaaagatgtcaacacccgcttcctcctatatactaatgagaacccaaacaactttcaagaagttgccgcagattcatcaagcatcagtggctccaatttcaaaacaaatagaaaaactcgctttattattcatggattcatagacaagggagaagaaaactggctggccaatgtgtgcaagaatctgttcaaggtggaaagtgtgaactgtatctgtgtggactggaaaggtggctcccgaactggatacacacaagcctcgcagaacatcaggatcgtgggagcagaagtggcatattttgttgaatttcttcagtcggcgttcggttactcaccttccaacgtgcatgtcattggccacagcctgggtgcccacgctgctggggaggctggaaggagaaccaatgggaccattggacgcatcacagggttggacccagcagaaccttgctttcagggcacacctgaattagtccgattggaccccagcgatgcacaatttgtggatgtattcacacggatggtgcccccatagt

SEQ ID NO: 250335 - DNA, 1782 bp, Homo Sapiens
  misc_feature (42)..(42): n is a, c, g, or t
  misc_feature (62)..(62): n is a, c, g, or t
  misc_feature (87)..(87): n is a, c, g, or t
  misc_feature (94)..(94): n is a, c, g, or t
  misc_feature (129)..(129): n is a, c, g, or t
  misc_feature (143)..(143): n is a, c, g, or t
  misc_feature (145)..(145): n is a, c, g, or t
  misc_feature (164)..(164): n is a, c, g, or t
  misc_feature (170)..(170): n is a, c, g, or t
  misc_feature (177)..(177): n is a, c, g, or t
  misc_feature (180)..(180): n is a, c, g, or t
  misc_feature (186)..(186): n is a, c, g, or t
  misc_feature (229)..(229): n is a, c, g, or t
  misc_feature (254)..(254): n is a, c, g, or t
  misc_feature (278)..(278): n is a, c, g, or t
  misc_feature (290)..(290): n is a, c, g, or t
  misc_feature (377)..(377): n is a, c, g, or t
  misc_feature (553)..(553): n is a, c, g, or t
  misc_feature (556)..(556): n is a, c, g, or t
  misc_feature (574)..(574): n is a, c, g, or t
  misc_feature (581)..(581): n is a, c, g, or t
  misc_feature (583)..(583): n is a, c, g, or t
  misc_feature (585)..(585): n is a, c, g, or t
  misc_feature (620)..(620): n is a, c, g, or t
  misc_feature (622)..(622): n is a, c, g, or t
  misc_feature (626)..(626): n is a, c, g, or t
  misc_feature (628)..(628): n is a, c, g, or t
  misc_feature (630)..(630): n is a, c, g, or t
  misc_feature (632)..(632): n is a, c, g, or t
  misc_feature (637)..(637): n is a, c, g, or t
  misc_feature (657)..(657): n is a, c, g, or t
  misc_feature (662)..(663): n is a, c, g, or t
  misc_feature (666)..(666): n is a, c, g, or t
  misc_feature (670)..(671): n is a, c, g, or t
  misc_feature (676)..(676): n is a, c, g, or t
  misc_feature (686)..(686): n is a, c, g, or t
  misc_feature (695)..(695): n is a, c, g, or t
  misc_feature (706)..(707): n is a, c, g, or t
  misc_feature (1753)..(1753): n is a, c, g, or t
tctctaaagagatgaagcccccacatactggggaggcaaggnagtcatcaaggccccaaggngaggcaaatccctggaaggcttganccctggngttcagtctcccggggtaatcactccccagatagnagtgagaatggggnantgaggcccgggatgtaggnactggncagcagnaanccaggnatctgtgccccacaaaccagttaatgggcatcgttaagctgcngtgcaacatccaggatgtttttggntcctttgctcagcaacaagttggncagggtgatgcncaagttctgggcagccaactggggccctcgtggaatgttacgagcagtgatgcctaccaactgtgggtcatcctcagggccatcttnatgctgggcagggacatggatggtagcctgcatggtctcttgtatgctatctgagccgtctagactccagactcctccagtcaggtacagttgcccatccttcatagctgtatgcacggctactggcacactgcagcctccttccaggtgtctcaggaaggctcttttagcgatgnagngaagagagtctcgggatngtgcagnananccaccagatccaagatgtcctggtccttggctcgnantttnangncnaaggncccctgatggaaaaacatcntaggnnatnaggnntgatnttttcccaancaatggggnaaagcatgggnncacctctatctacttgctccccagcgccttttggaccggtagcatcccaaggtctgcccctccctgagaatgctattctgggggaagcagatgcagaaggttgtgagacaagcttcttggttgagaacaaagggaaggcatatgtcaccatgtggcttccctggtcaagtgtacctggcccacagcatacatgcattcctcagggtgcacgatctgcccaacccggttgtgccagcccatgcgctgcaggccagctgttgccaggatgatggcactgaactcctgctgctcgtccagcttccgaagccgggtgttgaggtttccccgaatactcctgaactccagatgcgggaactttctctgcagctgggctgctcttcgcagggagctggttcccaccacactcttctctggcagggtttctagggtcttcccaacaaattttgggtgaaagacaacagcatcatgagggttttcccgcttgcagatggctccgatggtgaagccaggaggaagcacagtgtggcaggtccttcaaggagtgaacaaccaggtccacttcattcttctccagggcatgttcaagctccttggtaaacaggcttttctctccaatcttagagagtgcagtatcaagaatcttgtcccctgtggtggacatagcaatgatttcaaactgcaggccagggtacgaggctttcaatgttgccaccacactgtccgtctgtatgcgagcaagctggctccttgcgggtaccccacgcgaaatcactcctcatctttgggctgttttccttccctgcagaaaaagtccccaggtcacagtcccctctgtttcctagtgttcctcaacaccttgtcccaagaaccagaatcactggcttggaagaaaggaacttcagaaacctggcctgtggccagctgagtctcagagtggggaaatactccaaggctggtccctttaaccttcctcagtaccttctgccctcctcagggatccagagaagcagagactagagggaggcgatagtaggacctgctgcttntgccgctgcagtaaccaggacactgagct

SEQ ID NO: 250336 - DNA, 1509 bp, Homo Sapiens
aagtgacgcgaggctctgcggagaccaggagtcagactgtaggacgacctcgggtcccacgtgtccccggtactcgccggccggagcccccggcttcccggggccgggggaccttagcggcacccacacacagcctactttccaagcggagccatgtctggtaacggcaatgcggctgcaacggcggaagaaaacagcccaaagatgagagtgattcgcgtgggtacccgcaagagccagcttgctcgcatacagacggacagtgtggtggcaacattgaaagcctcgtaccctggcctgcagtttgaaatcattgctatgtccaccacaggggacaagattcttgatactgcactctctaagattggagagaaaagcctgtttaccaaggagcttgaacatgccctggagaagaatgaagtggacctggttgttcactccttgaaggacctgcccactgtgcttcctcctggcttcaccatcggagccatctgcaagcgggaaaaccctcatgatgctgttgtctttcacccaaaatttgttgggaagaccctagaaaccctgccagagaagagtgtggtgggaaccagctccctgcgaagagcagcccagctgcagagaaagttcccgcatctggagttcaggagtattcggggaaacctcaacacccggcttcggaagctggacgagcagcaggagttcagtgccatcatcctggcaacagctggcctgcagcgcatgggctggcacaaccgggttgggcagatcctgcaccctgaggaatgcatgtatgctgtgggccagggggctttgggcgtggaagtgcgagccaaggaccaggacatcttggatctggtgggtgtgctgcacgatcccgagactctgcttcgctgcatcgctgaaagggccttcctgaggcacctggaaggaggctgcagtgtgccagtagccgtgcatacagctatgaaggatgggcaactgtacctgactggaggagtctggagtctagacggctcagatagcatacaagagaccatgcaggctaccatccatgtccctgcccagcatgaagatggccctgaggatgacccacagttggtaggcatcactgctcgtaacattccacgagggccccagttggctgcccagaacttgggcatcagcctggccaacttgttgctgagcaaaggagccaaaaacatcctggatgttgcacggcagcttaacgatgcccattaactggtttgtggggcacagatgcctgggttgctgctgtccagtgcctacatcccgggcctcagtgccccattctcactgctatctggggagtgattaccccgggagactgaactgcagggttcaagccttccagggatttgcctcaccttggggccttgatgactgccttgcctcctcagtatgtgggggcttcatctctttagagaagtccaagcaacagcctttgaatgtaaccaatcctactaataaaccagttctgaaggtaattaa

SEQ ID NO: 250337 - DNA, 476 bp, Homo Sapiens
atcatgaatcgtagcacagtgctaggctcagtaaatgctgatcaataatgagcacctgattgattgactctctcctcagttgctatgtccaccacaggggacaagattcttgatactgcactctctaaggtaacaacatcttcctccccagttcttgtccccactcttctttccttccctgaagggatttcactcaggctctttctgtccggcagattggagagaaaagcctgtttaccaaggagcttgaacatgccctgggagaagaatgagtaagtaaagatagggagagtgtggtgccctcccagtcttcttgctgggaccctagtatgctaggtctcttgctgggacccggggtgtcagataggctgctgggcttaaacccttagagaggctgaaggcagctcataggtgggttttttcaggcttcagaaaaggagagtgtctggttctgagccatctggctgcctggactg

SEQ ID NO: 250338 - DNA, 385 bp, Homo Sapiens
  misc_feature (35)..(35): n is a, c, g, or t
  misc_feature (54)..(54): n is a, c, g, or t
  misc_feature (61)..(61): n is a, c, g, or t
acccccggggtcccccaagcaaaagagacccctancaatacctagggtccccancaaaganaactggggagggccacccaacactctccctatcctttaccttacctcattccttcctcccagggcatgttccaagctcccttggtaaacaggcttttctctcccaatctgcccggacagaaagagccctgaagtgaatcccttcagggaaggaaagaagagtggggacaagaactggggaggaagatgttgttaccttagagagtgcagtatcaagaatcttgtcccctgtggtggacatagcaactgaggagagagtcaatcaatcaggtgctcattattgatcagcatttactgagcctagcactgtgctacgattcatgaa

SEQ ID NO: 250339 - DNA, 429 bp, Homo Sapiens
  misc_feature (71)..(71): n is a, c, g, or t
attgggagagaaaagcctgtttacccaaggagcttgaaacatgcccctggagaagaatgaaagtggacccnggttggttcaactccttgaagggacctgcccactgtgcttccctccctggcttcacccatcggagccatctgcaagcgggaaaaccctcatgatgctgttgtctttcacccaaaatttgttgggaagaccctagaaaccctgccagagaagagtgtggtgggaaccagctccctgcgaaagaaagcccagctgcagagaaagttcccgcatctggagttcaggagtattgatgtaaccctattgtaagtcaaggaccatctgtcttcacttcttgaccaccccacctctaacaccgtaggctgggaagattgtgaatcagaggccagactctaggctttcatggagaaaatttacaaa

SEQ ID NO: 250340 - DNA, 310 bp, Homo Sapiens
  misc_feature (45)..(45): n is a, c, g, or t
  misc_feature (58)..(58): n is a, c, g, or t
  misc_feature (224)..(224): n is a, c, g, or t
  misc_feature (228)..(228): n is a, c, g, or t
actttactctaaaagcggctggaactcagtgacatgagcgtgccntgaccccacggcntgcttgctggaaccccttccactctccggactcccagaaccctctagaccttgtctttttccttggctgctgtctccgtcactcttccaaaaggaacccgtcactcttctaaaaggatacaatactcctgaactccagatgcgggaactttctctgcagctgggcntacnttcgcagggagctggttcccaccacactgcccagagaggaagttacaatgagattttaacactagggcagtcactgttcctt

SEQ ID NO: 250341 - DNA, 449 bp, Homo Sapiens
cctgctgcctccagggggcaccaaggcacaagcctgtgcagtaggggcgggatgggggtgtggaagagcaggtccaggctcctagcacaactggcctggggccttggcacctctgtaggccctgcctgtgcctgtccgctggcctggggggcctgggcttatctgggccttctcactcagggactctcttgacgctgacttgcccccgcagtggtggccagtgctgcctctgctccaagctgcccctgcgctgggaggggtgggggcggtgccattggtctggtgcagcatagccctggccagtggcctcatccccagcaggcctcccgtgcctctgccagcaaggaggggccggccagctctgcttgcacagggggccccatgtggggtcagcgcacgctcatgtcactgagttccagccgcttttagagtaaagtcgtttatcatca

SEQ ID NO: 250342 - DNA, 925 bp, Homo Sapiens
ggcggcaagtttgaatttcgtggaggctcgggttgtgagggttcctgcttcggagtcggcggtggtcgtccagaccgagtgttctttactttttgtttggttgaggtttcacgctagaaggtggctcaggatgtcttcatcacattttgccagtcgacacaggaaggatataagtactgaaatgattagaactaaaattgctcataggaaatcactgtctcagaaagaaaatagacataaggaatacgaacgaaatagacactttggtttgaaagatgtaaacattccaaccttggaaggtagaattcttgttgaattagatgagacatctcaagggcttgttccagaaaagaccaatgttaagccaagggcaatgaaaactattctaggtgatcaacgaaaacagatgctccaaaaatacaaagaagaaaagcaacttcaaaaattgaaagagcagagagagaaagctaaacgaggaatatttaaagtgggtcgttatagacctgatatgccttgttttcttttatcaaaccagaatgctgtgaaagctgagccaaaaaaggctattccatcttctgtacggattacaaggtcaaaggccaaagaccaaatggagcagactaagattgataacgagagtgatgttcgagcaatccgacctggtccaagacaaacttctgaaaagaaagtgtcagacaaagagaaaaaagttgtgcagcctgtaatgcccacgtcgttgagaatgactcgatcagctactcaagcagcaaagcaggttcccagaacagtctcatctaccacagcaagaaagccagtcacaagagctgctaatgaaaacgaaccagaaagaaaggtgccaagtaaaggaagacctgccaaaaatgtagaaaacaaaacccgaccaagggtattttccttgtaaagt

SEQ ID NO: 250343 - DNA, 867 bp, Homo Sapiens
  misc_feature (120)..(237): n is a, c, g, or t
gacacagtgaggaaatgacagagctggagtttccgtctgttccacattgctgcatttgttctgcctgactaggaccctggaaaacctggccctcttcaatttctgacaaaagagacggannnnnnnnnnnnnnnnnnnnnnnnnnnnnnnnnnnnnnnnnnnnnnnnnnnnnnnnnnnnnnnnnnnnnnnnnnnnnnnnnnnnnnnnnnnnnnnnnnnnnnnnnnnnnnnnnnnnnnatggacatcgtggatgccgagcaggaggcaccagtggaaggctggattgcagtggcatacgtgggcaaggagcaggcggcccagttccaccaggagaataagggcagtggcccgcaggcctatcccaaggccctggtccagcagatgcggcgggccctcttcctgggtgcctctgccctgcttctcctcatcctgaaccacaacgtggtccgagagctggacatatcccagcttctgctcaggccagtgatcgtcctccattattcctccaatgtcaccaagctgttggatgcattgctgcagaggacccaggccacggctgagatcaccagcggagagtccctgtctgccaatatcgagtggaagttgaccttgtggaccacctgtggcctctccaaggatggctatggaggatggcaggacttggtctgccttggaggcagtcgtgcccaggagcagaaacccctgcagcagctgtggaacgccatcctgctggtggccatgctcctgtgcacaggcctcgtggtccaggcccagcggcaggcgtcgcggcagagccagcgggagctcggaggccaggtggacctgtttaagcgccgcgtggtgcggagactggcatccctcaagaca

SEQ ID NO: 250344 - DNA, 2295 bp, Homo Sapiens
  misc_feature (424)..(452): n is a, c, g, or t
  misc_feature (647)..(647): n is a, c, g, or t
  misc_feature (661)..(661): n is a, c, g, or t
  misc_feature (709)..(709): n is a, c, g, or t
  misc_feature (845)..(856): n is a, c, g, or t
ggggggggtgtaatttacttataatgccagaaggaaaacactattttcataccctactttttctgtacctaaattttcttaaaaaaatctagtatagcactacattcttttttaagtgatgcagaccttagtttctttagcccctttattttgaatacaatgctacatatgaatgttgaagctgatacattgcacagttctgtagacatcactacaccgatgtagtttctcaaattttagcaatatgctctacataaaatcactacagagatactagtggggaagacgattaacacacctcttacagtaatactgcctgttattggtatagcagtggtatttgcagactgggatcataaggagcccttaaatacttgttattgactggggttatttttatgctgtagcaaatgtgacaggctcnnnnnnnnnnnnnnnnnnnnnnnnnnnnnggtattactctgaaacaaaatttaagttggagtttcagggatttagggagtagttttcattctacatgaactgaggtaatattatggtaactccaatatttggttaaaaaaactatacaaatcagaatagtactaaaatactgtagaattttaagcatttttattttgcactttggtgtggattgagggtggtcnagaaataccaaccnataaaaaatgtaatcctagttggcaaagggtgtgcgccaaaacacggnaaccgaacatgcattgatttgggataacctttttgaggggtttttgtcaaatagccatgtggaagagttacatttttcttaaaagattggtggtcccaatgtcagagttcttggaacagataactgaatgatagannnnnnnnnnnnaagataaaactttacaacctgcacatttgttatgcatactaaatggtgtgttaaaattagggtttctttgcctctctacactacactaatctgcctaaaggtggttgtttcatatttataatgctaattatcatacctacctactttaaattttaggtagaaaattatctgatttaaatacaaacatatttttctcacattgagtaatatgcataatgtagttccaaatgtatttcattactatagtcacaatatccaactaaaaattacgctatctagaattgtaccaaccaaaatctcgtattggcagatcttgacaggctggacctgcaagatgtggcttgaattttaaccatttattacataatctctagtgatcatgcatctagttatcataagaaataatttaaaaggttttgttgctgaaagcagtaagtggtgcagtaaaatacttaagttattcaaagaatgttatctttcttgcaagagtaatttaagcacatgggaaagattctagactttttgtttcttgcaacaacagtgccctctgctgctagaaacctttttctacttactatcatttttattgtggcttgagctcagtcaatctggtgcagatgaggctggacaactactaaccaataaaatcaggagtttgtacaaaagttaaatggaacattataattattttaagtaatgttaattgaaaaaattttttctttttgacaatataaaaaacattttaaatttcctagaaatgtcttcagggtaatgccaatttaagatctctcttaacttgtggccaagaaattctagattttccagctgactttggtataatatatatttatcaggaacttctctcagcagagagtacccattcttcgagttcaaagcacaattttaaacatgtaaaatggatatataatttgccaaaggtaattaatttattctttttttcttaaagaagaaaaagacattggttgttgttacaaaaagtctaaattactgttggttgaaacacagcagctgtggagttcagtccaggcatgaagactaaatctgctttaccaagtaaggtgtaaggttgcatgtttcagtcctctaccatcctgcactgtgagcagcactatacctgtgcgttgtctgaaagccttccgtatattctccagctaaatggtcgtctggtagcctttgcatttaacaaactagcatgaggctttttatatctaaatgctacgtgatagacaatttcagctagccacatattgtatgtatgagattcataaagactttcaatcatttcattttcagacaactgaaattttgtttagtatgtgaattctttttttgaaatgtatagtgaataggatgttgcactggtggcaattcatcatggagcataataaaattaatttgacccaaatagaaaaataatg

SEQ ID NO: 250345 - DNA, 543 bp, Homo Sapiens
gtcattggttatttaaaatatttttggacctcaggaatatagaaatgggttaattacagtatcacaagtcttaaccctcttaattatattaacttctgaattgatttagtatttatacttgtatcagaagcctttctatcactgtctattgttaaaaattaactattatcgaaacttcaatttaaaacaagtattccatttaaaatacttcatcaaaaataaagtttctgtgaatttaaacatgcaaaagcccaatttttagataattattctttccataattgttatggcaatgagcacatctcattttaaatgtattcttttcattattttcatttttcaaggaacacatttttaatacaaatttttaaaaggaagatttaatgacagtctataaaatcacaggagacatttttaatgcatcttaatcatttcaataaagtttatcttaagtgagtttttaaagatcactgttaaactacaacagaatttaaataggaacttacagacaactagaataaatacattgcatgtgcataagat

SEQ ID NO: 250346 - DNA, 1184 bp, Homo Sapiens
gacattggacctctagagcaagatgtcagtaggatgacctccaccctccttggacatgaatcctccatggagggcctgctggctgaacatgctgaatcatctccaacaaaacccagccccaactttctctctgatgctccagcattggggcaggggcatggtggccatgtagtctcctgggcctcaccatcccagaagaggagtgggagccagctcagagaaggaactgaacccagggagatccatccacctattagccctgggcctgggacctccctgcgatttcccactcctttcttagtcttcttccagaaacagagaaggggatgtgtgcctgggagaggctctgtctccttcctgctgccagggacctgtgcctagacttagcatgcccttcactgcagtgtcaggcctttagatggggacccagcgaaaatgtgggcccttctgagtcacatcaccgacactgagcagtggaaaggggctatatgtgtatgaatagaccacattgaaggagcacaatgccctcctgtgttgatgccacttcccagggtggagacagtggaaaagaaccgaggacaggaaaggattgggtaggtgaaggggtcaggggactggtagtcacccaatcttggagaggtgcaaaaagcactgggggctacccgttagctgcatctgccctggctgtttgcccgttcatgtcacaaactgccactactatgtacctgcagtggggttgcagagatgggggagactcaagtcttactccccaggagctcccagggcccaaggaggagaatgctgcctcctttcagtctggtctacacccactttctggtagcctctctgcttcctgtaattctggctgtttttccagactcagctcaaatagtgcccctccttaagcccatccctcgcccccagcctgaggtgatctttccctcctctgaactattagagcagttactgtctgttcagttcgtttggcaggcacacacagtggcataaattctattgttttgaactctgatttaaaattaaattgcagctgggcgtggtggctcatgcttgtaatcccaacacttagggagtcaggagaatcacttgagctcaggagttctagaccaatctgggcaacagagagaccccatctcttttaaataaaaagttaaattgcttaaaaa

SEQ ID NO: 250347 - DNA, 1542 bp, Homo Sapiens
tacatttataaattggggcaacctcaacattacaaaaatacacaaaaatgcagatggaaaaatatatctcttgatgcaaagttgaatttggaaaacaaagactacaagaaaaccactaaggtcacttggcttgcagagactacacatgctcttcctattccagtaatctgtgtcacttatgagcacttgatcacaaagccagtgctaggaaaagacgaggactttaagcagtatgtcaacaagaacagtaagcatgaagagctaatgctaggggatccctgccttaaggatttgaaaaaaggagatattatacaactccagagaagaggattcttcatatgtgatcaaccttatgaacctgttagcccatatagttgcaaggaagccccgtgtgttttgatacacattcctgatgggcacacaaaggaaatgccaacatcagggtcaaaggaaaagaccaaagtagaagccacaaaaaatgagacctctgctccttttaaggaaagaccaacaccttctctgaataataattgtactacatctgaggattccttggtcctttacaatagagtggctgttcaaggagatgtggttcgtgaattaaaagccaagaaagcaccaaaggaagatgtagatgcagctgtaaaacagcttttgtctttgaaagctgaatataaggagaaaactggccaggaatataaacctggaaaccctcctgctgaaataggacagaatatttcttctaattcctcagcaagtattctggaaagtaaatctctgtatgatgaagttgctgcacaaggggaggtggttcgtaagctaaaagctgaaaaatcccctaaggctaaaataaatgaagctgtagaatgcttactgtccctgaaggctcagtataaagaaaaaactgggaaggagtacatacctggtcagcccccattatctcaaagttcggattcaagcccaaccagaaattctgaacctgctggtttagaaacaccagaagcgaaagtactttttgacaaagtagcttctcaaggggaagtagttcggaaacttaaaactgaaaaagcccctaaggatcaagtagatatagctgttcaagaactccttcagctaaaggcacagtacaagtctttgataggagtagagtataagccttgtgtcggccactggagctgaggacaaagattcgcagcagaaaggacaaaaggaaactaattctgaaaaggagattaagccttcagaaacaaatagatggcagaaggaaagaccctttttaaaaccagaggtggctctccttcaagtggaggccgccacaaggccgggcttagcaaccagaaccaggtggggttggggccaaaagacgaaaaactgggtgggttacaacgtctcacacaatccgcaagttggataccagagaaagagggggggtaaaatacagaccgagcaagtcatcagggacgacaaggcattgtattcgaccaaacacgtggagacgcacacgcgtgtcccaaatacaagaagaacgactctacgaagaag

SEQ ID NO: 250348 - DNA, 2385 bp, Homo Sapiens
  misc_feature (306)..(306): n is a, c, g, or t
accgtcccgacgatgctacgcgcgcccggctgcctcctccggacctccgtagcgcctgccgcggccctggctgcggcgctgctctcgtcgcttgcgcgctgctctcttctagagccgagggacccggtggcctcgtcgctcagcccctatttcggcaccaagactcgctacgaggatgtcaaccccgtgctattgtcgggccccgaggctccgtggcgggaccctgagctgctggaggggacctgcaccccggtgcagctggtcgccctcattcgccacggcacccgctaccccacggtcaaacanatccgcaagctgaggcagctgcacgggttgctgcaggcccgcgggtccagggatggcggggctagtagtaccggcagccgcgacctgggtgcagcgctggccgactggcctttgtggtacgcggactggatggacgggcagctagtagagaagggacggcaggatatgcgacagctggcgctgcgtctggcctcgctcttcccggcccttttcagccgtgagaactacggccgcctgcggctcatcaccagttccaagcaccgctgcatggatagcagcgccgccttcctgcaggggctgtggcagcactaccaccctggcttgccgccgccggacgtcgcagatatggagtttggacctccaacagttaatgataaactaatgagattttttgatcactgtgagaagtttttaactgaagtagaaaaaaatgctacagctctttatcacgtggaagccttcaaaactggaccagaaatgcagaacattttaaaaaaagttgcagctactttgcaagtgccagtaaatgatttaaatgcagatttaattcaagtagcctttttcacctgttcatttgacctggcaattaaaggtgttaaatctccttggtgtgatgtttttgacatagatgatgcaaaggtattagaatatttaaatgatctgaaacaatattggaaaagaggatatgggtatactattaacagtcgatccagctgcaccttgtttcaggatatctttcagcacttggacaaagcagttgaacagaaacaaaggtctcagccaatttcttctccagtcatcctccagtttggtcatgcagagactcttcttccactgctttctctcatgggctacttcaaagacaaggaacccctaacagcgtacaattacaaaaaacaaatgcatcggaaagtccgaagtggtctcattgtaccttatgcctcgaacctgatatttgtgctttaccactgtgaaaatgctaagactcctaaagaacaattccgagtgcagatgttattaaatgaaaaggtgttacctttggcttactcacaagaaactgtttcattttatgaagatctgaagaaccactacaaggacatccttcagagttgtcaaaccagtgaagaatgtgaattagcaagggctaacagtacatctgatgaactatgagtaactgaagaacatttttaattctttaggaatctgcaatgagtgataacatgcttgtaataggtaggcaattccttgattacaggaagcttttatattacttgagtatttctgtcttttcacagaaaaacattgggtttctctctgggtttggacatgaaatgtaagaaaagatttttcactggagcagctctcttaaggagaaacaaatctatttagagaaacagctggccctgcaaatgtttacagaaatgaaattcttcctacttatataagaaatctcacactgagatagaattgtgatttcataataacacttgaaaagtgctggagtaacaaaatatctcagttggaccatccttaacttgattgaactgtctaggaactttacagattgttctgcagttctctcttcttttcctcaggtaggacagctctagcattttcttaatcaggaatattgtggtaagctgggagtatcactctggaagaaagtaacatctccagatgagaatttgaaacaagaaacagagtgttgtaaaaggacaccttcactgaagcaagtcggaaagtacaatgaaaataaatatttttggtatttatttatgaaatatttgaacattttttcaataattcctttttacttctaggaagtctcaaaagaccatcttaaattattatatgtttggacaattagcaacaagtcagatagttagaatcgaagtttttcaaatccattgcttagctaactttttcattctgtcacttggcttcgatttttatattttcctattatatgaaatgtatcttttggttgtttgatttttctttctttctttgtaaatagttctgagttctgtcaaatgccgtgaaagtatttgctataataaagaaaattcttgtgacttt

SEQ ID NO: 250349 - DNA, 1076 bp, Homo Sapiens
  misc_feature (254)..(267): n is a, c, g, or t
  misc_feature (333)..(333): n is a, c, g, or t
  misc_feature (586)..(613): n is a, c, g, or t
  misc_feature (942)..(942): n is a, c, g, or t
tggtacaaatttattaatatgaagaaatgcaaaatgtattgcttttgatatttctcttccgagatgaacaagtagcatgtaatgaactgtttgacagtttaactcaagtcatgcttcaaactgttttaatgatcaaatcaagacacatttcattttacattttattattgtacagtttttgtttcggatgatgatcacagcaatctttattctatacattttatgtgaacttttttaatgtctttaatttggannnnnnnnnnnnnnagtattttaacatttattttaatcctgaagacacttttttgattgtgtttcgtaagagacaacatnggccccctaaggtgcaatcctgccgctatagtggagctaatgtcctgaatccaaaggcttcagaaaattgcttttgcctttttcatgaatgttaagcagcagcattgtgagatcgatctgtcctggcagttaacacgatgtgcaacagtgtgttagcatggaacagaacgcttttcacaaaacaaaggactgttttacaaatgattattccgacagtgtgtcgacataaacttttacaactgcacagcagccnnnnnnnnnnnnnnnnnnnnnnnnnnnnctttaactggatggacgttgttagggtgagaaataaaaggacagcctccaaaggttgagaatgagaattgttttttcctggatatcaaagggattatcacagcgcaatcattgtctacacaacatgtactctcaacgcctgggttacataggaaatgcaccctgaggttttaataaaagcccctatggctataactttaaataaactaaaccaaaaatgttattgatgttttatatatagagagtagtctcattagtttttgttactgtaatgtttgaagtctcaaatgcaccgtattacggtaaataacatggttttgaaaacttttntttattttgtcacagacctgttgtcatagttgaaatgatgtttattgtagatggtatttgaacttattcttctggaaatagttcatcaagtatgtttgttgctcattgtgatacattaaaaactgtatctacat

SEQ ID NO: 250350 - DNA, 394 bp, Homo Sapiens
ggagaaggtcgggttgtagaagctggggtggccggcagctcgctcatcggtgttcgtgggctttgtcggtccgtgcctcgtctctccctggaaagggagggaggcttcgacgtcgagagggagccgctgccgcgttagttccgagcttgaagtcactaggacttctctcaaacttgtgtgctgaggagactcagatgttggcctcagctcctaggctgaactcagcagatcggcccatgcttctgtattgagacaaaggaagggatctgtcagaaagcaacacttgttatcttgggcttggcagcaaggaagaggacaggtagtggagatcctgcaatctgtaacattccagcccctcaatctagtgttagtaagaaccaacaacagcttcagc

SEQ ID NO: 250351 - DNA, 544 bp, Homo Sapiens
  misc_feature (18)..(18): n is a, c, g, or t
acagttttttgcccgcgntctccgcgccgcggcgaaataaaaccaacccaatggggaaaaattttatttaatgttatgcttcatatcatgtacattaagtactacataaacttgtctttaggctatcaatatttaacttgggcagtacttcatcttgatttatttggagaaatacagcttaggcatctgcttacctgcttaggcatcaagaggtgccaaattagaaaatagggcattaacaatcaaaatttttaagctgacccacatacttgctactggtttcgcttatgtttaagcatttaaagttggcaaaacatgttatcaatgtattatgcaagagtttacatcttttgcataagtggtccattgggttgcacctaccccttgaccaaacaaaaacaaaacatcactggcaccatactcgaaactacctgtatcctaggttataagattgtgaaagccaacaatctataaggttggagggactctagttaatctttgggcttagaggaggaaaaaaagatagtcccatactgcatttcac

SEQ ID NO: 250352 - DNA, 2307 bp, Homo Sapiens
  misc_feature (17)..(17): n is a, c, g, or t
  misc_feature (48)..(48): n is a, c, g, or t
  misc_feature (52)..(52): n is a, c, g, or t
  misc_feature (55)..(55): n is a, c, g, or t
  misc_feature (68)..(68): n is a, c, g, or t
  misc_feature (74)..(74): n is a, c, g, or t
  misc_feature (79)..(79): n is a, c, g, or t
  misc_feature (83)..(84): n is a, c, g, or t
  misc_feature (86)..(86): n is a, c, g, or t
  misc_feature (89)..(89): n is a, c, g, or t
  misc_feature (91)..(91): n is a, c, g, or t
  misc_feature (93)..(93): n is a, c, g, or t
  misc_feature (115)..(115): n is a, c, g, or t
  misc_feature (138)..(138): n is a, c, g, or t
  misc_feature (148)..(149): n is a, c, g, or t
  misc_feature (161)..(161): n is a, c, g, or t
  misc_feature (163)..(163): n is a, c, g, or t
  misc_feature (172)..(172): n is a, c, g, or t
  misc_feature (176)..(176): n is a, c, g, or t
  misc_feature (180)..(180): n is a, c, g, or t
  misc_feature (199)..(199): n is a, c, g, or t
  misc_feature (230)..(230): n is a, c, g, or t
  misc_feature (242)..(243): n is a, c, g, or t
  misc_feature (265)..(265): n is a, c, g, or t
  misc_feature (282)..(282): n is a, c, g, or t
  misc_feature (294)..(294): n is a, c, g, or t
  misc_feature (313)..(313): n is a, c, g, or t
  misc_feature (342)..(343): n is a, c, g, or t
  misc_feature (350)..(350): n is a, c, g, or t
  misc_feature (358)..(358): n is a, c, g, or t
  misc_feature (377)..(377): n is a, c, g, or t
  misc_feature (410)..(410): n is a, c, g, or t
  misc_feature (415)..(415): n is a, c, g, or t
  misc_feature (420)..(420): n is a, c, g, or t
  misc_feature (1684)..(1684): n is a, c, g, or t
  misc_feature (1813)..(1813): n is a, c, g, or t
  misc_feature (1815)..(1815): n is a, c, g, or t
  misc_feature (1839)..(1839): n is a, c, g, or t
  misc_feature (1865)..(1865): n is a, c, g, or t
  misc_feature (1872)..(1872): n is a, c, g, or t
  misc_feature (1884)..(1885): n is a, c, g, or t
  misc_feature (1918)..(1918): n is a, c, g, or t
  misc_feature (1920)..(1920): n is a, c, g, or t
  misc_feature (1924)..(1925): n is a, c, g, or t
  misc_feature (1928)..(1930): n is a, c, g, or t
  misc_feature (1936)..(1937): n is a, c, g, or t
  misc_feature (1952)..(1952): n is a, c, g, or t
  misc_feature (1956)..(1956): n is a, c, g, or t
  misc_feature (1984)..(1984): n is a, c, g, or t
  misc_feature (2031)..(2032): n is a, c, g, or t
  misc_feature (2039)..(2039): n is a, c, g, or t
  misc_feature (2050)..(2050): n is a, c, g, or t
  misc_feature (2060)..(2060): n is a, c, g, or t
  misc_feature (2066)..(2066): n is a, c, g, or t
  misc_feature (2069)..(2069): n is a, c, g, or t
  misc_feature (2079)..(2079): n is a, c, g, or t
  misc_feature (2091)..(2091): n is a, c, g, or t
  misc_feature (2104)..(2104): n is a, c, g, or t
  misc_feature (2131)..(2131): n is a, c, g, or t
  misc_feature (2151)..(2151): n is a, c, g, or t
  misc_feature (2163)..(2164): n is a, c, g, or t
  misc_feature (2169)..(2169): n is a, c, g, or t
  misc_feature (2203)..(2203): n is a, c, g, or t
  misc_feature (2278)..(2278): n is a, c, g, or t
ggcagaaggagaaggtngggttgtagaaggtggggtgggggggaggtnggtnatnggtgttggtgggntttgtnggtgngtgnntngtntntnggtggaaagggagggagggttngaggtggagagggagggggtgcngcgttagttnngaggttgaagtnantaggacttntctnaaanttgtgtggtgaggagactnagatgttggggtcagctcctaggctgaactnaggagatggggnnatgaaaacttgtgtattgaganaaaggaagggatgtgtnagaaaggaacanttgttatcttggggttggnaggaaggaagaggacaggtagtggagatnntggaatntgaaaagnagagtgaaaggtgaaaaanaagctgaagatgggtggtggagagaggtataanattgnagggngtgaatctagaaatgttagtaagaaccaacaacagcttaacagacagaagaccaaggaacagaattcccagatgaagattgttcataagaaaaaagaaagaggagatggttataagtgatgagcaggtgcgtgggaggggatggaaaatggggggaagaacaaaaattttccaaataatcaaagttgaaattctagcttatcaggtcccagggtactttttaaatctcaagctaatcagaactatgctggtgccaaatttagtgagccgccatcaccaagtgttcttcccaaaccaccaagccactgggtccctgtttcctttaatccttcagataaggaaataatgacatttcaacttaaaaccttacttaaagtacaggtataaaataagacaaatgtttaaatttagttatgttcacgggtagttgtcaattggtctgaaacaaatttgctagggaatctatttgtgtagaactaattaatgtaaaaaaaatagaccatctcgtgttgtgtgcactgtgatataatggtagtatcagtgcaacttaaactaatgattgtacttgatattaagtgttctcaactgagtaacttttaagtggaaaccaagtttagatttggggagtggtaaaggaatcagctttttctattgttaggggaagacagtaatttatcattcatggaccagtagattgttgaaagttggtgaatcggattataagcttctagctaacacaaggattcagaattaggtaaacatctgaaggtttagtatattagaaacacccaaaccagtaatatgctaacctgatgcactgctgaaagaaaatgtgaatttttcgtaataattgcattttagtgaattgtacagtgggtggaaagggcatttggagctcattagaatgagacatagtacaccccaatggccctgtttattaaatgtagtggattaagtgtctgtcaacaaatacaccaaaaccattttttatagaaacagtatttaatggtcactcaatagctttcaaaatacatttttgtattacagcactgcacaagctattctaatagtgctctggcctcatcattcctgcaaagcttgctttggggagttggataatgtgaaaattttaagtacctaggggagaaagagccatgtaaatatctgtaataaacttgtagcatatgtaaagttttcttggcctttatcttacaaaaatggagtattttagtatgaatttgctgaatgtaagaccgtggactgtnttttataatatgccctaattttaaacgtccaaaataacttgtttttaaactttccccttctcctaaagtcccagtgtatgtatcttatacttcatttccttgtaaactatatttcaaagtaaaccctantntaataacttttataactaaaaagntttaacctcctaaaactatttttaanacatgtnaaatgcactatnncactatctttttttcctcctctaaccccaaacntnaacnncannncccccnnccttatacattcttncctntcacaatcttataacctaccatacaccnactctccactatcctcccactcatcttttctttttctttcctcaagnngtaggtncaacccaatcnaccacttatncaaaanatntaaactcttncataatacattnataacatcttttnccaactttaaatgcttaaacataagcnaaaccactaccaactatctncctcaccttaannatttncattcttaatcccctattttctaatttcccaccncttgatccctaaccacctaaccacatccctaacctctatttctccaaataaatcaacatcaactactccccaacntaaatattcataccctaaacacaacttta

SEQ ID NO: 250353 - DNA, 1040 bp, Homo Sapiens
ctgtacgcccggaattcgggatttgtcgaccacgctgtcggtaaaggagaaggtcgggttgtagaagctggggtggccggcagctcgctcatcggtgttcgtgggctttgtcggtccgtgcctcgtctctccctggaaagggagggaggcttcgacgtcgagagggagccgctgccgcgttagttccgagcttgaagtcactaggacttctctcaaacttgtgtgctgaggagactcagatgttggcctcagctcctaggctgaactcagcagatcggcccatgaaaacttctgtattgagacaaaggaagggatctgtcagaaagcaacacttgttatcttgggcttggcagcaaggaagaggacaggtagtggagatcctgcaatctgaaaagcagactgaaaggtgacaaagaagctgaagatgggtggtggagagaggtataacattccagcccctcaatctagaaatgttagtaagaaccaacaacagcttaacagacagaagaccaaggaacagaattcccagatgaagattgttcataagaaaaaagaaagaggacatggttataactcatcagcagctgcctggcaggccatgcaaaatggggggaagaacaaaaattttccaaataatcaaagtggaattctagcttatcaggtcccaggttactttttaaatctcaagctaatcagaactatgctggtgccaaatttagtgagccgcatcaccaagtgttcttcccaaacaccaagccactgggtccctgtttcctttaatccttcagatacgaataatgactttcaactaaaacctacttacgtacggtttcctagcacacgtccactcagtcaagtcccggtgtgccatgggcggacacatggtggggaccatgggtgactcttgtacacgaactcggtgcggcggggatgtgagctcgcctaccagtgcgtgaatgggccgctgcgggcgcctagggggagccacgtgcggataagcagggggacagacttggtaagcgcggttagggagagatctt

SEQ ID NO: 250354 - DNA, 366 bp, Homo Sapiens
agtggctgggattacaggatttttcatgggccgatctgctgaattcagcctaggagctgagaccaacatctgagtctcttcagcacacaagtttgaaagaagtcctagcaacttcaagctcagaactacgggtggcagcagctccctcttgacgtcgaagcctcccattccagagagagtcaaggcctggatcaaacaaagcccacaagcaccgatgactgagctgctgactacccccagcatctccaactcaacctcctctttctgcctctacccaaattttaaaacttttaaacatgggtttaaaaatggtaatgagtaaagttgcatccaagtgtatcaaataaaactaaatatccataaaaa

SEQ ID NO: 250355 - DNA, 745 bp, Homo Sapiens
  misc_feature (108)..(108): n is a, c, g, or t
ggaggaccccttcagacccaaggtactctgactgcagggccacaaagaccgcccttgcgagcgtcgttggctgatgggagtagaagccacagagagtcttcctcttgnaggtactggagtccctgacccccccccttattgattctctcaatatattgatcaatggactccatttccttaaaatgagcttcatgaagcttcttaaagtttggagtagtgattgcagttcattttttccaggtttggatgactcatctgtgtagagagatttctttccttctgaaggtacctttgaatctctgttacctgaggaaacagcattctcagcttcttggtgctcgtctggtggagaaggaacttttgcagtagctctgagatcctggctttcctgcttttcatgattctgtgagtcagggtccacacggacagtcttgcaccttctccttgttttggtgacatggccaagtggctgtctctcagcttcttcctggttgctgatctgtatctcagtctcatcacaagaggatgcagaagtttgactttcatcctgattctcatttccttttcttgcctcatgtttaatgtagcctttcaaggcttttaacaacttggttgccctcaggttggcccggagacccagactcttggctaagttctgcaggtcactgtacttgagggagtccagctcctctagagaggggatgatcatcgcgattcgaaatcccggcgatactcggaagatgga

SEQ ID NO: 250356 - DNA, 385 bp, Homo Sapiens
gcagagctctgagatcctggccctgccatgactgtgagtcagggtccacacggacagtcttgcaccttctccttgttttggtgacatggccaagtggctgtctctcagcttcttcctggttgctgatctgtatctcagtctcatcacaagaggatgcagaagtttgactttcatcctgattctcatttccttttcttgcctcatgtttaatgtagcctttcaaggcttttaacaacttggttgccctcaggttggcccggagacccagactcttggctaagttctgcaggtcactgtacttgagggagtccagctcctctagagaggggatgatcatcgcgattcgaaatcccggcgatactcggaagatggatcaccaaacttc

SEQ ID NO: 250357 - DNA, 704 bp, Homo Sapiens
  misc_feature (692)..(692): n is a, c, g, or t
gggaaagttaagagtggcgccagggatttgaaccgcgctgacgaagtttggtgatccatcttccgagtatcgccgggatttcgaatcgcgatgatcatcccctctctagaggagctggactccctcaagtacagtgacctgcagaacttagccaagagtctgggtctccgggccaacctgagggcaaccaagttgttaaaagccttgaaaggctacattaaacatgaggcaagaaaaggaaatgagaatcaggatgaaagtcaaacttctgcatcctcttgtgatgagactgagatacagatcagcaaccaggaagaagctgagagacagccacttggccatgtcaccaaaacaaggagaaggtgcaagactgtccgtgtggaccctgactcacagcagaatcattcagagataaaaataagtaatcccactgaattccagaatcatgaaaagcaggaaagccaggatctcagagctactgcaaaagttccttctccaccagacgagcaccaagaagctgagaatgctgtttcctcaggtaacagagattcaaaggtaccttcagaaagaaagaaatctctctacacagatgagtcatccaaacctggaaaaaataaaagaactgcaatcactactccaaactttaagaagcttcatgaagctcattttaaggaaatggagtccattgatcnatattattgaga

SEQ ID NO: 250358 - DNA, 2219 bp, Homo Sapiens
  misc_feature (1398)..(1426): n is a, c, g, or t
  misc_feature (2034)..(2078): n is a, c, g, or t
ggggggcgccagggatttgaaccgcgctgacgaagtttggtgatccatcttccgagtatcgccgggatttcgaatcgcgatgatcatcccctctctagaggagctggactccctcaagtacagtgacctgcagaacttagccaagagtctgggtctccgggccaacctgagggcaaccaagttgttaaaagccttgaaaggctacattaaacatgaggcaagaaaaggaaatgagaatcaggatgaaagtcaaacttctgcatcctcttgtgatgagactgagatacagatcagcaaccaggaagaagctgagagacagccacttggccatgtcaccaaaacaaggagaaggtgcaagactgtccgtgtggaccctgactcacagaatcatgaaaagcaggaaagccaggatctcagagctactgcaaaagttccttctccaccagacgagcaccaagaagctgagaatgctgtttcctcaggtaacagagattcaaaggtaccttcagaaggaaagaaatctctctacacagatgagtcatccaaacctggaaaaaataaaagaactgcaatcactactccaaactttaagaagcttcatgaagctcattttaaggaaatggagtccattgatcaatatattgagagaaaaaagaaacattttgaagaacacaattccatgaatgaactgaagcagcccatcaataagggaggggtcaggactccagtacctccaagaggaagactctctgtggcttctactcccatcagccaacgacgctcgcaaggccggtcttgtggccctgcaagtcagagtaccttgggtctgaaggggtcactcaagcgctctgctatctctgcagctaaaacgggtgtcaggttttcagctgctactaaagataatgagcataagcgttcactgaccaagactccagccagaaagtctgcacatgtgaccgtgtctgggggcaccccaaaaggcgaggctgtgcttgggacacacaaattaaagaccatcacggggaattctgctgctgttattaccccattcaagttgacaactgaggcaacgcagactccagtctccaataagaaaccagtgtttgatcttaaagcaagtttgtctcgtcccctcaactatgaaccacacaaaggaaagctaaaaccatgggggcaatctaaagaaaataattatctaaatcaacatgtcaacagaattaacttctacaagaaaacttacaaacaaccccatctccagacaaaggaagagcaacggaagaaacgcgagcaagaacgaaaggagaagaaagcaaaggttttgggaatgcgaaggggcctcattttggctgaagattaataattttttaacatcttgtaaatattcctgtattctcaacnnnnnnnnnnnnnnnnnnnnnnnnnnnnngctgtcatccccactttagtcacgagatctttttctgctaactgttcatagtctgtgtagtgtccatgggttcttcatgtgctatgatctctgaaaagacgttatcaccttaaagctcaaattctttgggatggtttttacttaagtccattaacaattcaggtttctaacgagacccatcctaaaattctgtttctagatttttaatgtcaagttcccaagttccccctgctggttctaatattaacagaactgcagtcttctgctagccaatagcatttacctgatggcagctagttatgcaagcttcaggagaatttgaacaataacaagaatagggtaagctgggatagaaaggccacctcttcactctctatagaatatagtaacctttatgaaacggggccatatagtttggttatgacatcaatattttacctaggtgaaattgtttaggcttatgtaccttcgttcaaatatcctcatgtaattgccatctgtcactcactatattcacaaaaataaaactctacaactcattctaacattgcttacttaaaagctacatagccctatcgaaatgcgaggattaatgctttaatgctttnnnnnnnnnnnnnnnnnnnnnnnnnnnnnnnnnnnnnnnnnnnnnaccaaatgtacttcttattcattttatggaaaagactaggctttgcttagtatcatgtccatgtttccttcacctcagtggagcttctgagttttatactgctcaagatcgtcataaataaaattttttctcattgtcata

SEQ ID NO: 250359 - DNA, 485 bp, Homo Sapiens
  misc_feature (26)..(26): n is a, c, g, or t
  misc_feature (48)..(48): n is a, c, g, or t
cccaaaatctgggtctccgggccaancctgagggcagacaagttgttnaaaacccttgaaaggcctacattaaacatgaggccaagaaaaggaaatgagaatcaggatgaaagtcaaacttctgcatccctcttgtgatgagactgagatacagatcagcaacccaggaagaagctgagagacagccacttggccatgtcacccaaaacaaggagaaggtgcaagactgtccgtgtggaccctgactcacagcagaatcattcagagataaaaataagtaatcccactgaattccagaatcatgaaaagcaggaaagccaggatctcagagctactgcaaaagttccttctccaccagacgagcaccaagaagcttgagaatgctgtttcctccaggtaaacgtggaataaatggtaaccggggtttcaaaagtacctttcagagggaagaattctctttacacggatgaatcatcccaaccttg

SEQ ID NO: 250360 - DNA, 1678 bp, Homo Sapiens
  misc_feature (1158)..(1448): n is a, c, g, or t
atataccagggaagacaagttgaaaatacatgacttagtaagaacgattttccccttaagtactttctaactttttttcttatttcccacttagttacaaaaagtaaataaataatcctatatttttcatttcattgatgcatgaagactcaatgtatgaagataatagtcatcagtttataattacactataggacaaagttttaaaaagttctagtgtgtgtatggctaaatgcctcaaatattttacatttactgataaataacagcattccaaaatcatggacaattatgattaaaagttgtaaaccatatcacagaatatgttaatcagcacatcttcatcagtttacataaagttatagtagtcttattagaagttgtaaaatttggtaacagaaaatttttttcaatacacagaataaaaaaaacatcattgcaaatttaaaaatcatgtaaacttgaattacccttgcagtaagttgtcttaaacattcatatttacaaggtttttaaaacaaatgtgaatagaatccatattaaaagtacattatcattaaagtttaaattaaaaggaaagatacaaaggaaagtcataacaaatagtttctcatgaacatctctaaggtcctacctagcactacttaacgtggatgataacgtgaagctctgcatggtaatctgagagtcaatgcatagatgaagaaaaaaagtaggtactgcttgcgttgcggaactatcatcttctggacctcaattgccaagacggcatcagtcaggttgcccacagttaccagatgttaacagaagtgtgactgtagaggtcaagaggaaagcacgggagacgtccacatgagactctatatggagtccctgactgaaaggaacggggaagctccagggccttctatgatgccacagattcagcagtgccaaggactttacagaacaggtcgtccctacctgaccgccatgtggacacatggaggacagggaaccccttccggaagcacgagttgccttctacccaaatacgttttccatgaaccatttaaaacattttacttgcttttcattttgcttccaaatatgagttttaaaaacttttggccaataaataatctaaaatattctatcaatctttcatgtagctttatnnnnnnnnnnnnnnnnnnnnnnnnnnnnnnnnnnnnnnnnnnnnnnnnnnnnnnnnnnnnnnnnnnnnnnnnnnnnnnnnnnnnnnnnnnnnnnnnnnnnnnnnnnnnnnnnnnnnnnnnnnnnnnnnnnnnnnnnnnnnnnnnnnnnnnnnnnnnnnnnnnnnnnnnnnnnnnnnnnnnnnnnnnnnnnnnnnnnnnnnnnnnnnnnnnnnnnnnnnnnnnnnnnnnnnnnnnnnnnnnnnnnnnnnnnnnnnnnnnnnnnnnnnnnnnnnnnnnnnnnnnnnnnnnnnncctcatttagcttttacttacataaataaataaagctctatggcatttcatattcaacagaattgcagaaactgctatttactggaatggtaagggttcctctcctgcccatacctcccacaggcaaatccatttaatcatgtgtgtacacacaggcccctgaaaagcaccatggcagtaagaccttccccacatgagttggtaacctgtaaattatctcctcgtgccga

SEQ ID NO: 250361 - DNA, 1005 bp, Homo Sapiens
  misc_feature (15)..(15): n is a, c, g, or t
  misc_feature (284)..(574): n is a, c, g, or t
  misc_feature (923)..(923): n is a, c, g, or t
ttcgtggcagtaatnctcacgaggtaatggtagcgaggcctgggtggcgaattcggcacgaggagataatttacaggttaccaactcatgtggggaaggtcttactgccatggtgcttttcaggggcctgtgtgtacacacatgattaaatggatttgcctgtgggaggtatgggcaggagaggaacccttaccattccagtaaatagcagtttctgcaattctgttgaatatgaaatgccatagagcttgatttatttatgtaacgtaaaagctaaatgaggnnnnnnnnnnnnnnnnnnnnnnnnnnnnnnnnnnnnnnnnnnnnnnnnnnnnnnnnnnnnnnnnnnnnnnnnnnnnnnnnnnnnnnnnnnnnnnnnnnnnnnnnnnnnnnnnnnnnnnnnnnnnnnnnnnnnnnnnnnnnnnnnnnnnnnnnnnnnnnnnnnnnnnnnnnnnnnnnnnnnnnnnnnnnnnnnnnnnnnnnnnnnnnnnnnnnnnnnnnnnnnnnnnnnnnnnnnnnnnnnnnnnnnnnnnnnnnnnnnnnnnnnnnnnnnnnnnnnnnnnnnnnnnnnnnnataaagctacatgaaagattgatagaatattttagattatttattggccaaaagtttttaaaactcatatttggaagcaaaatgaaaagcaagtaaaatgttttaaatggttcatggaaaacgtatttgggtagaaggcaactcgtgctttccggaaggggttccctgtcctccatgtgtccacatgccgggcaggtaggggacgactgttctgtaaagtccttggcactgctgaatctggggcatcatagaaagcccctggagcttccccgttccttttcagtcagggacttcctatagaggctccatggggacggcctcccgggttttcctcttggacccctacggntcacacttctgttaacatcctgggaaatggggggccaacctggactgatgccgccttggggaaattggggggccaaaaaaat

SEQ ID NO: 250362 - DNA, 1056 bp, Homo Sapiens
acacacaagcgggcagagtgataaggaacatagcgatcctgtagggatcccactagcacaacatgaaataatgaagccctgctgttactaagcttatataaaaaagtttggcgagggtctgagtgatctcgacatgtcagctgcaaaagcgaacctgattttttccatttctgcataaaccagagacctgtattaacaagagcactgctgttgtagagtgtaccaaggtgaggtccagaaagagacagaaaggtatgaagtttgttgaggtaatatttaaaccttggccttgtaagcactgaacgaattattaaattgcccaacgaatgtccaataaagcttatttttgagactgttagactatatatctgaatatactgtattatctcatccaaaagacgatcagtcatgctatcaaaatcagcaaaagtatcattctgatttctctcagacataagaaaatcaattcttcccccaggcaatccaagttcaatgtaagttttttactaatcggagatctgcactgtttccatgctaaaccgtgcacacagacaatcagatgtactccatcttcagaaccaccctcttcttctacactaaaataaggtactgaggatgccagcagaggaacttcactgtacatgaacccaggaagttttagtagcttcagttcttcttttgcctgaaggaaggcttgtatttgaggttttggtgaactttcataccaggaaatcgaagaagtgaagttgtaagaagtactgcttggctgctttgtaatggcatcaaatttacttttggaagaatatttaacattacaaggagactctcgtggtgcagacgggaaggacaaacaaccagaagtacagacagtaggcatgtttataccatctctcagatagtcactgtttattttttcagattttgtaagtctttcttccattagttcatctctgcttgtatagtgagcatttattgttccatccaaagctgaataatctgtttcttcatagtacccattttgaaccatttgttgatcctgctcttcctcctcatcct

SEQ ID NO: 250363 - DNA, 1109 bp, Homo Sapiens
  misc_feature (138)..(138): n is a, c, g, or t
  misc_feature (440)..(440): n is a, c, g, or t
  misc_feature (475)..(475): n is a, c, g, or t
  misc_feature (494)..(494): n is a, c, g, or t
  misc_feature (821)..(821): n is a, c, g, or t
  misc_feature (823)..(823): n is a, c, g, or t
tcgccggctcaatactccgggggtctgggtggggggctcaaacgcagggctctgggacgcaggcactgctccaggtgatagtgcgggaacatggccttgcagctgggcaggctgagctcgggcccctgctggctcgtngcgcggggcggctgcggagggccccgcgcctggtcccagtgcggcggcggagggctccgagcctggtcccagcgcacgcagccggacgcgtctgccggccccctggcccggctggcacggagcagagccgcgggctggggcacggctcgacgtcgagaggcggcccctgggtggggacagggctggccgcggcgctggcggggttggtggggctggccaccgccgccttcgggcatgtgcagcgggcggagatgttgcctaaaacctcggggacgcgggccacttcgctggggaggccggangaggaggaggatgaactggcccaccgctgcagcancttcatggccccgcctgtnaccgacctgggcgagctgcgaaggaggccgggcgacatgaagacacaagatggagctgctgattctggagacccaggcccaggtgtgccaggctctggcacaggtagacgggggcgccaacttttctgtggaccggtgggagaggaaggaaggaggtggcggcatcagctgtgtacttcaagatgggtgtgttttcgaaaaggctggggtgagcatttctgttgttcatggaaatctttcagaggaagctgcaaaacaaatgagaagcagaggaaaagttctgaagactaaagatggtaaattgccattttgtgctatgggcgtgantnctgttatccaccccaagaatcctcatgctcctactatccatttcaactacagatactttgaagtagaagaagctgatggccacaagcagtggtggtttggtggtggatgtgacctcactccaacatacttgaatcaagaagacgctgtccattttcacagaactctgaaggaggcttgtgaccagcatggtccagatctctaccccaaatttaaaaaatgggtgtgatgattacttctttatagcccatcgtggagaacggcggggcattggtggtatcttttttg

SEQ ID NO: 250364 - DNA, 631 bp, Homo Sapiens
ctggccaccgccgccttcgggcatgtgcagcgggcggagatgttgcctaagacctcggggacgcgggccacttcgctggggaggccggaggaggaggaggatgagctggcccaccgctgcagcagcttcatggccccgcctgtgaccgacctgggcgagctgcgaaggaggccgggcgacatgaagaccaagatggagctgctgattctggagacccaggcccaggtgtgccaggctctggcacaggtagacgggggcgccaacttttctgtggaccggtgggagaggaaggaaggaggtggcggcatcagctgtgtacttcaagatgggtgtgttttcgaaaaggctggggtgagcatttctgttgttcatggaaatctttcagaggaagctgcaaaacaaatgagaagcagaggctctgttatccaccccaagaatcctcatgctcctactatccatttcaactacagatactttgaagtagaagaagctgatggcaacaagcagtggtggtttggtggtggatgtgacctcactccaacatacttgaatcaagaagacgctgtccattttcacagaactctgaaggaggcttgtgaccagcatggtccagatctctaccccaaattaa

SEQ ID NO: 250365 - DNA, 1585 bp, Homo Sapiens
  misc_feature (909)..(909): n is a, c, g, or t
ggtaccggtccggaatgtcgggatatcgtcgaccacgcgtccgacagagctgtgccaggctgtagttccttcttacattcccgctgtgaaaaagcactgtgatgactcattcaccccccaggagaagctgtggcagcagctcagaagaggacggtatgtagaatttaatctgctgtatgatcggggcacaaagtttggcctcttcactccaggatccagaattgaaagtatcttgatgtctttacctctaactgcccgatgggagtacatgcattcaccctcagagaattccaaagaagctgaaattctggaagttctacgccatccaagggactgggtgcgttgatgcaggcagaatggctgtgcaggggtttggagggcacacgatgtgtgctccccatgccactggtcggcactttgccactgtgtggcagttacccgtgccttagtcttctccactctgcaccctacctcgtgggcagatgataacatgttttggatgctgtcagtgatgaatggtgagatggcagattgtcagagtcaattgattaaacctcatttatacttctagtgtcattttatatgactagtttacaaaataggacattgagtttccaagtattgagataagggaatataaatagtattatatgtatcaggaaatctctcatcttgtttttgtttcatgtattttttaaagttttcatttgtgccacaaaaatctgtcgtggaatatattttattttcattaattcagtgaagttgagacttcatagtaattttagaaagcaacttgaaggtaaaaattttactttggcaatactgaagtctctgctgtaatccttatatatctttctccagagaacataatattgtcaaatagatacacatttttctaataggtatttngaagcacttgaaatattctataatctcgccatgtgtcacaatcaagttatttctgtagtttgtaaactctaaagtgacattactattattttagagatgtctaagttgtaattttgatttttgtggaaccattgtttgttaatgttgggattctctgcacttttgaatgtgaaagcttatatccctgaattctgatacttaagagttttctatttcagacatctctgtgtggaagttgagactaagaataatcctagggatgtcatgaatttaggcaatgtttctcatttggaaaatgaaatgagaaataatttccttctttaaagcaagtatatatagtatgagaaacttggaggcatttcatacacacgtttcttaggaaaatggacacattgaaaatgtcctcttttttatattagagattctgcagctctttgctcttaagagcaaatcacaacaggattcttaatgtatgatttctttgttcatatattatgaatgtattattttatttgcttcgtaataaagtttataaggaagagcatctcatacatatcattatcgtggaacacgttgaatgtttgtgattctgtgtggcctttttggggctggaaaatgtatgaattcttcaactgtcttacaagagatctgctaataaattttattattaaataag

SEQ ID NO: 250366 - DNA, 2942 bp, Homo Sapiens
  misc_feature (1974)..(1974): n is a, c, g, or t
  misc_feature (2798)..(2798): n is a, c, g, or t
ctcgctgaagtctgttaattctactttttgagtacttatgaataaccacgtgtcttcaaaaccatctaccatgaagctaaaacataccatcaaccctattcttttatattttatacattttctaatatcactttatactattttaacatacattccgttttattttttctccgagtcaagacaagaaaaatcaaaccgaattaaagcaaagcctgtaaattcaaaacctgattctgcatacagatctgttaatagtttggatggtttggcttcagtattataccctggatgtgatactttagataaagtttttacatatgcaaaaaacaaagttaagaacaaaagactcttgggaacacgtgaagttttaaatgaggaagatgaagtacaaccaaatggaaaaatttttaaaaaggttattcttggacagtataattggctttcctatgaagatgtctttgttcgagcctttaattttggaaatggattacagatgttgggtcagaaaccaaagaccaacatcgccatcttctgtgagaccagggccgagtggatgatagctgcacaggcgtgttttatgtataattttcagcttgttacattatatgccactctaggaggtccagccattgttcatgcattaaatgaaacagaggtgaccaacatcattactagtaaagaactcttacaaacaaagttgaaggatatagtttctttggtcccacgcctgcggcacatcatcactgttgatggaaagccaccgacctggtccgagttccccaagggcatcattgtgcataccatggctgcagtggaggccctgggagccaaggccagcatggaaaaccaacctcatagcaaaccattgccctcagatattgcagtaatcatgtacacaagtggatccacaggacttccaaagggagtcatgatctcacatagtaacattattgctggtataactgggatggcagaaaagattccagaactaggagaggaagatgtctacattgggatatttgcctctgggcccatgttctaaaattaagtgctgagcttgtctgtctttctcacggatgccgcattggttactcttcaccacagactttagcagatcagtcttcaaaaattaaaaaaggaagcaaaggggatacatccatgttgaaaccaacactgatggcagcagttccggaaatcatggatcggatctacaaaaatgtcatgaataaagtcagtgaaatgagtagctttcaacgtaatctgtttattctggcctataattacaaaatggaacagatttcaaaaggacgtaatactccactgtgcgacagctttgttttccggaaagttcgaagcttgctagggggaaatattcgtctcctgttgtgtggtggcgctccactttctgcaaccacgcagcgattcatgaacatctgtttctgctgtcctgttggtcagggatacgggctcactgaatctgctggggctggaacaatttccgaagtgtgggactacaatactggcagagtgggagcaccattagtttgctgtgaaatcaaattaaaaaactgggaggaaggtggatactttaatactgataagccacaccccaggggtgaaattcttattgggggccaaagtgtgacaatggggtactacaaaaatgaagcaaaaacaaaagctgatttctttgaagatgaaaatggacaaaggtggctctgtactggggatattggagagtttgaacccgatggatgcttaaagattattgatcgtaaaaaggaccttgtaaaactacaggcaggggaatatgtttctcttgggaaagtagaggcagctttgaagaatcttccactagtagataacatttgtgcatatgcaaacagttatcattcttatgtcattggatttgttgtgccaaatcaaaaggaactaactgaactagctcgaaagaaaggacttaaagggacttgnggaggagctgtgtaacagttgtgaaatggaaaatgaggtacttaaaatgctttccgaagctgctatttcagcaagtctggaaaagtttgaaattccagtaaaaaattcgtttgaagtcctgaaccgtgggacccctgaaactggtctggtgacagatgccttcaagctgaaacgcaaagagcttaaaaacacattaccaggcggacattgagcgaatgtatggaagaaaataattattctcttctggcatcagtttgctacagtgagctcagatcaaataggaaaatacttgaaatgcatgtctcaagctgcaaggcaaactccattcctcatattaaactattacttctcatgacgtcaccatttttaactgacaggattagtaaaacattaagacagcaaacttgtgtctgtctcttctttcattttccccgccaccaacttactttaccacctatgactgtacttgtcagtatgagaatttttctgaatcatattggggaagcagtgattttaaaacctcaagtttttaaacatgatttatatgttctgtataatgttcagtttgtaactttttaaaagtttggatgtatagagggataaataggaaatataagaattggttatttgggggcttttttacttactgtatttaaaaatacaagggtattgatatgaaattatgtaaatttcaaatgcttatgaatcaaatcattgttgaacaaaagatttgttgctgtgtaattattgtcttgtatgcatttgagagaaataaatatacccatacttatgttttaccacgtcccatgcgtatttcccctaantcttccttgccggcccccctccggcccccccaaaagttttccaaaacactttcctttggggggggcgcggcccccgttagggcaaggggaacaatggggccataaccttgttccccccaagagcaaacccccggcccaagaacc

SEQ ID NO: 250367 - DNA, 605 bp, Homo Sapiens
ccctgaactgtcttgtgacaatgccttcaagctgaaacgcaaagagcttaaaacacattaccagcggacattgagcgaatgtatggaagaaaataattattctcttctggcatcagtttgctacagtgagctcagatcaaataggaaaatacttgaaatgcatgtctcaagctgcataactgacaggattagtaaaacattaagacagcaaacttgtgtctgtctcttctttcattttccccgccaccaacttactttaccacctatgactgtacttgtcagtatgagaatttttctgaatcatattggggaagcagtgattttaaaacctcaagtttttaaacatgatttatatgttctgtataatgttcagtttgtaactttttaaaagtttggatgtatagagggataaataggaaatataagaattggttatttgggggcttttttacttactgtatttaaaaatacaagggtattgatatgaaattatgtaaatttcaaatgcttatgaatcaaatcattgttgaacaaaagatttgttgctgtgtaattattgtcttgtatgcatttgagagaaataaatatacccatacttatgtttt

SEQ ID NO: 250368 - DNA, 1454 bp, Homo Sapiens
gggattgcatcagctggtccagccgaggccaagtcccgggcgctagcccacctccgacccgcctcttggctcctctcctctaggccgtcgctttcgggttctctcatcgcttcgtcgttcgccaatgtttgaggagaaggccagcagtccttcagggaagatgggaggcgaggagaagccgattggtgctggtgaagagaagcaaaaggaaggaggcaaaaagaagaacaaagaaggatctggagatggaggtcgagctgagttgaatccttggcctgaatatatttacacacgtcttgagatgtataatatactaaaagcagaacatgattccattctggcagaaaaggcagaaaaagatagcaagccaattaaagtcactttgcctgatggtaaacaggttgatgcggaatcttggaaaactacaccatatcaaattgcctgtggaattagtcaaggcctggccgacaacaccgttattgctaaagtaaataatgttgtgtgggacctggaccgccctctggaagaagattgtaccttggagcttctcaagtttgaggatgaggaagctcaggcagtgtattggcactctagtgctcacataatgggtgaagccatggaaagagtctatggtggatgtttatgctacggtccgccaatagaaaatggattctattatgacatgtacctcgaagaagggggtgtgtctagcaatgatttctcttctctggaggctttgtgtaagaaaatcattaaagaaaaacaagcttttgaaagactggaagttaagaaagaaactttactggcaatgtttaagtacaacaagttcaaatgccggatattgaatgaaaaggtgaatactccaactaccacagtctatagatgtggccctttgatagatctctgccggggtcctcatgttagacacacgggcaaaattaaggctttaaaaatacacaaaaattcctccacgtactgggaaggcaaagcagatatggagactctccagagaatttatggcatttcattcccagatcctaaaatgttgaaagagtgggagaagttccaagaggaagctaaaaaccgagatcataggaaaattggcagggaccaagaactatatttctttcatgaactcagcccctggaaagttgcttttttctgccaaaaggagcctacatttataatgcacttattgaattcattaggagcgaatataggaaaagaggaatccaggaggtagtcacccccaaacatcttcaacagccgactctggatgacctcgggccactggcagcactacagcggagacatgttcttcttttgagtgggagaaagaactgtttgcccttgaacccatgaaactgcccagaacactgcctttatggttgatcatcggccaaggtcctggcgaagaatgcctctgcggggaaacttgatttttggggaacttc

SEQ ID NO: 250369 - DNA, 1228 bp, Homo Sapiens
  misc_feature (98)..(135): n is a, c, g, or t
gaggctcaagggggcggaggcggcgttgccgggctctccggaaggagacgtggcggcggttgggccggtgatacccgggcgctttatagtcccgccgnnnnnnnnnnnnnnnnnnnnnnnnnnnnnnnnnnnnnnggagcagaggaggttgtggcggtggctggagaaagcggcggcggaggatggaggaaggaggcggcggcgtacggagtctggtcccgggcgggccggtgttactggtcctctgcggcctcctggaggcgtccggcggcggccgagcccttcctcaactcagcgatgacatccctttccgagtcaactggcccggcaccgagttctctctgcccacaactggagttttatataaagaagataattatgtcatcatgacaactgcacataaagaaaaatataaatgcatacttccccttgtgacaagtggggatgaggaagaagaaaaggattataaaggccctaatccaagagagcttttggagccactatttaaacaaagcagttgttcctacagaattgagtcttattggacttacgaagtatgtcatggaaaacacattcggcagtaccatgaagagaaagaaactggtcagaaaataaatattcacgagtactaccttgggaatatgttggccaagaaccttctatttgaaaaagaacgagaagcagaagaaaaggaaaaatcaaatgagattcccactaaaaatatcgaaggtcagatgacaccatactatcctgtgggaatgggaaatggtacaccttgtagtttgaaacagaaccggcccagatcaagtactgtgatgtacatatgtcatcctgaatctaagcatgaaattctttcagtagctgaagttacaacttgtgaatatgaagttgtcattttgacaccactcttgtgcagtcatcctaaatataggttcagagcatctcctgtgaatgacatattttgtcaatcactgccaggatctccatttaagcccctcaccctgaggcagctggagcagcaggaagaaatactaagggtgccttttaggagaaataaagaggaagatttgcaatcaactaaagaagagagatttccagcgatccacaagtcgattgctattggctctcagccagtgctcactgttgggacaacccacatatccaaattgacagatgaccaactcataaaagagtttcttagtggttcttactgctttcgtgggggtgt

SEQ ID NO: 250370 - DNA, 2074 bp, Homo Sapiens
gactgctgtgcagggcaggaaagctccacacacacagcccagcaaacagcagcacgctgctgaaaaaaagactcagaggagagagataaggaaggaaagtagtgatggatctcatcccaaacttggccgtggaaacctggcttctcctggctgtcagcctgatactcctctatctatatggaacccgtacacatggactttttaagaagcttggaattccagggcccacacctctgccttttttgggaaatgctttgtcctaccgtaagggctattggacgtttgacatggaatgttataaaaagtatagaaaagtctggggtatttatgactgtcaacagcctatgctggctatcacagatcccgacatgatcaaaacagtgctagtgaaagaatgttattctgtcttcacaaaccggaggccttttcgggccagtgggatttatgaaaaatgccatctctatagctgaggatgaagaatggaagagaatacgatcattgctgtctccaacattcaccagcggaaaactcaaggagatggtccctatcattgcccagtatggagatgtgttggtgagaaatctgaggcgggaagcagagacaggcaagcctgtcaccttgaaacacgtctttggggcctacagcatggatgtgatcactagcacatcatttggagtgagcatcgactctctcaacaatccacaagacccctttgtggaaaacaccaagaagcttttaagatttaatccattagatccattcgttctctcaataaaagtctttccattccttaccccaattcttgaagcattaaatatcactgtgtttccaagaaaagttataagttttctaacaaaatctgtaaaacagataaaagaaggtcgcctcaaagagacacaaaagcaccgagtggatttccttcagctgatgattgactctcagaattcaaaagactctgagacccacaaagctctgtctgatctggagctcatggcccaatcaattatctttatttttgctggctatgaaaccacgagcagtgttctctccttcattatgtatgaactggccactcaccctgatgtccagcagaaactgcagaaggaaattgatgcagttttacccaataaggcaccacccacctatgatactgtgctacagatggagtatcttgacatggtggtgaatgaaacgctcagattattcccaattgctatgagacttgagagggtctgcaaaaaagatgttgagatcaatgggatgttcattcccaaaggggtggtggtgatgattccaagctatgctcttcaccgtgacccaaagtactggacagagcctgagaagttcctccctgaaagattcagcaagaagaacaaggacaacatagatccttacatatacacaccctttggaagtggacccagaaactgcattggcatgaggtttgctctcatgaacatgaaacttgctctaatcagagtccttcagaacttctccttcaaaccttgtaaagaaacacagatccccctgaaattaagcttaggaggacttcttcaaccagaaaaacccgttgttctaaaggttgagtcaagggatggcaccgtaagtggagcctgaattttcctaaggacttctgctttgctcttcaagaaatctgtgcctgagaacaccagagacctcaaattactttgtgaatagaactctgaaatgaagatgggcttcatccaatggactgcataaataaccggggattctgtacatgcattgagctctctcattgtctgtgtagagtgttatacttgggaatataaaggaggtgaccaaatcagtgtgaggaggtagatttggctcctctgcttctcacgggactatttccaccacccccagttagcaccattaactcctcctgagctctgataagagaatcaacatttctcaataatttcctccacaaattattaatgaaaataagaattattttgatggctctaacaatgacatttatatcacatgttttctctggagtattctataagttttatgttaaatcaataaagacccccaatcgaaaagt

SEQ ID NO: 250371 - DNA, 1251 bp, Homo Sapiens
ggctgctgtgcagggcagggaagctccacgcaaacagccaagttaaacagcagcactcagctaaaaggaagactcacagaacacagttgaagaaggaaagtggcgatggacctcatcccaaatttggcggtggaaacctggcttctcctgactgtcagcctggtgctcctctatctatatgggacccgtacacatggactttctaagagactgggaattccaggacccacacctctgcctttgttgggaaatgttttgtcctatcgtcagggtctctggaaatccgacacagagtgctataaaaaatatggaaaaatgtgggggtgagtatgctgaaaacctccattggatacgacctgctactgtgaggaggttaccccactgcaggatagtctctgcccaggtcttcatgggatgaagctcttgtcaacctaaatacaaacagagagaggttctctgaaagaagaggataattacttgggagtagaatattgcaatgggaatctgcttgccgttataaactatgtgcaaattcagggaggtaaacaagacaaagatgctccatagaaaatatgagaagaatctcataactgttttgagataattattgttagctacaaagatcaataacaagggtgatgccacaccaaggttggacaggcagttgctggacaggtgtccttgcagaaatatttttgtgtaaagttgaaatagcctttgtgcaaagttgtggtttttgtagacacttttgtaatagttttgtttccaggaacacaagcataagaatcctctcttcatagccttcttgggatttatttgtcagggttaaaaaacaattagtgacatcactttggttctgataaagttcacactcgctattgtaaaacttttcgaggcttgtcctaccaaggatcccatgtgtcaccaggtatcgaggtcttcagtctgaactaggctaggagcattgtggttaccacttttctgcaggttttggtggcccagggactcccagcatcgccttctgtccagtgtctgcctattcccctcttctttttttcttccttaggtgcccttttatcacatgcattgtctcagacccttctaatatgtgctcataaatgcatggcatcatctccttcccacattgattcactttcaattgccagataatagagaaacagattgggaaaccacttatgctccacttttttctttctctgcaagttggttttttgttctgctttgttgttt

SEQ ID NO: 250372 - DNA, 1272 bp, Homo Sapiens
  misc_feature (1054)..(1054): n is a, c, g, or t
  misc_feature (1212)..(1212): n is a, c, g, or t
  misc_feature (1262)..(1262): n is a, c, g, or t
ggggcaggaacaacaggtgtaatctgagcctgtcctgggcagacaggggatatgtggtcactcactatagaagtttccaaatcaaattttgagagttttttttaaccaggacatcatttgtcattatattttacaaaaataattctgccatcagggcaacctcagctcaccacagctggggatagtggaattttccaaagcttgagcagggagtatagagaataaggatgatatttctaggagctcagaacagggtactgttgctttgtaaagtgctgaagaggaatcggctctgggcatagagtctgcagtcaggcaatatcacctgtcttgagccccttagaaagagtgaattattctactcttggtctgctgaagcacagtgcttacccatcttgtatcatccacaatcaatacatgctactgtagttgtctgatagtgggtctctgtcttcctatgatgggctccttgatctcagaggtaggtctaattcagttcagtgtctccatcacacccagcgtagggccagctgcatcactggcacctgataacaccttctgatggagtgtgatagaaggtgatctagtagatctgaaagtctgtggctgtttgtctgtcttgactggacatgtgggtttcctgttgcatgcatagaggaaggatggtaaaaaggtgctgattttaattttccacatctttctccactcagcgtctttggggcctacagcatggatgtgatcactagcacatcatttggagtgaacatcgactctctcaacaatccacaagacccctttgtggaaaacaccaagaagcttttaagatttgattttttggatccattctttctctcaataacagtctttccattcctcaccccaattcttgaagcattaaatatcactgtgtttccaagaaaagttataagttttctaacaaaatctgtaaaacagataaaagaaggtcgcctcaaagagacacaaaaggtaaaacgtggtggtagttataggaggatgtttagttttcataattttttagaaatatacatatgancggtgcacttccctgtatgtttttagagaaagattttaacataaagagtacttatgtttaggagcaaggataattcatttgggtagggaatgcaggaaagtgggagtttgagggaagggaggatatggaggaatgagtccagaggagagcactttaanattttgatatccaggccaccaagactttagtatgcccatgaccttaaatnttttttccag

SEQ ID NO: 250373 - DNA, 344 bp, Homo Sapiens
ggaagctccaggcaaacagcccagcaaacagcagcactcagctcccaaatttggcggtggaaacctggcttctcctggctgtcagcctggtgctcctctatctgatgagagtccccaaatcagcgaagagtccacttactaaacagacataaggaaatgaagtgtcctggaagaattcctgcctgaacctctcaggagcatttgaggacatttatcaagtattcactccaggattgggactatgaagacttcagctgctttcagctaatcattgagacttttcaggggtctcagaatagtcaggggacctgatgagtgaatgcttactgatgttgggttgctgt

SEQ ID NO: 250374 - DNA, 384 bp, Homo Sapiens
aagcaaatgattgtacaaccacacgattgtcatgtagattaagagaggcagaatatgcttgaaccagcctgggtcagggtgagctccatttccctggagacttgtacctttcagggcggaactcctcaggctctgtccagtactttgggtcatggtgaagagcataagttggaatcaccaccattgaccctttgggaatgaataccccattgatttcaacatctttcttgcaagtcctctcaagtctaatagcaactgggaataatctgagtgtttcattcaccaccatgtcaaggtactccatctgtaccagcagtttctgctggacatcagggtgagtggccagttcatataaagtgaaggaaagaacactgctggtggttt

SEQ ID NO: 250375 - DNA, 1236 bp, Homo Sapiens
  misc_feature (33)..(33): n is a, c, g, or t
  misc_feature (50)..(50): n is a, c, g, or t
aatatgtatattaatagtaatataggcaagtgnatagtttcctgtttaanaatcttatataggcgtagaaaaatgcccacagggacataattgattatctttgtcttgtcctgggactgtgaatgaatgtagtttcgttttttctagtctgtggtttgtaaagtttgataattatcacttttttgtgataaaaagacttacaagcaaatgattgtacaaccacacgattgtcatgtagattaagagaggcagaatatgcttgaaccagcctgggtcagggtgagctccatttccctggagacttgtacctttcagggcggaactcctcaggctctgtccagtactttgggtcatggtgaagagcataagttggaatcaccaccattgaccctttgggaatgaataccccattgatttcaacatctttcttgcaagtcctctcaagtctaatagcaactgggaataatctgagtgtttcattcaccaccatgtcaagatactccatctgtagcacagtatcataggtgggtggtgccttattgggtaaaactgtatcaaccttctgcactttctgctggacatcagggtgagtggccagttcatatataatgaaggagagaacactgctcgtggtttcatagccagcaaaaataaagataattgaattctgagagtcaatcatcagctgaaggaaatccactcggtgcttttgtgtatcttcgaggcgactttctttcatccgttttacagattttcttagaaaacttataacttttcttggaaacacagtgatatttaatgcttcaagaattggggtaaggaatggaaagacttttattgagagaacgaatggatctaatggattaaatcttaaaagcttcttggtgttttccacaaaggggtcttgtggattgttgagagagtcgatgctcactccaaatgatgtgctagtgatcacatccatgctgtaggccccaaagacgtgtttcaaggtgacaggcttgcctgtctctgcttcccgcctcagatttctcaccaacacatctccatactgggcaatgatagggaccatctccttgagttttccgctggtgaatgttggagacagcaatgatcgtaatctcttccattcttcatcctcagctatagagatggcacttttcataaatcccactggaccaaaaggcctccggtttgtgaagacagaataacattctttcactagcactgttttga

SEQ ID NO: 250376 - DNA, 783 bp, Homo Sapiens
cacagctctagatgtccatgggccccacaccaactgcccttgcagcatttagtccttgtgagcacttgatgatttacctgccttcaatttttcactgacctaatattctttttgataatgaagtattttaaacatatacgaatgctctactgtcatttctaaccataatctctttaaagagctcttttgtctttcagtatctcttccctgcctggaccacattacccttcatcatatgaagccttgggtggctcctgtgtgagactcttgctgtgtgtcacaccctaatgaactagaacctaaggttgctgtgtgtcgtacaactaggggtatggattacataacataatgatcaaagtctggcttcctgggtgtggctccagctgcagaatcgggctagtgaagtttaatcagctccgttgtccccacacagaacgtatgaaggtcaactccctgtgctggccatcacagatcccgacgtgatcagaacagtgctagtgaaagaatgttattctgtcttcacaaatcgaaggatttgtgcaacgaccagcaccatcaagatgcagacccattccgtcaccatgtggctccctcctgctgtcctacagtcacaacatggagtttgtctttttctctgacagtctttatgcccagtgggatttatgaaaagtgccatctctttagctgaggatgaagaatggaagagaatacggtcattgctgtctccaaccttcaccagcggaaacttgaggcgggaagcagagaaaggcaagcctgtcacct

SEQ ID NO: 250377 - DNA, 1548 bp, Homo Sapiens
  misc_feature (1488)..(1488): n is a, c, g, or t
  misc_feature (1514)..(1514): n is a, c, g, or t
taggcttaattcaagggggatctgtgtttctttacaaggtttgaaggagaagttctgaaggactctgattagagcaagtttcatgttcatgagagcaaacctcatgccaatgcagtttctgggtccacttccaaagggtgtgtatatgtaaggatctatgttgtccttgttcttcttgctgaatctttcagggaggaacttctcaggctctgtccagtactttgggtcacggtgaagagcatagcttggattgcagaccctctcaagtctcatagcaattgggaataatctgagcgtttcattcaccaccatgtcaagatactccatctgtagcacagtatcataggtgggtggtgccttattgggtaaaactgcatcaatttcctcctgcagtttctgctggacatcagggtgagtggccagttcatacataatgaaggagagaacactgctcgtggtttcatagccagcaaaaataaagataattgattgggccacgagctccagatcggacagagctttgtgggactcagtttcttttgaattctgagagtcaatcatcagctgaaggaaatccactcggtgcttttgtgtatcttcgaggcgactttctttcatcctttttacagattttcttaaaaaatttgtaacttctcttggaaacacacagatatttaatacttcaagaattgggatgaggaatggaaagactgttattgagagaaagaatggatccaaaaaatcaaatcttaaaagcttcttggtgttttccacaaaggggtcttgtggattgttgagagagtcgatgttcactccaaatgatgtgctagtgatcacatccatgctgtaggccccaaagacgtctttcaaggtgacaggcttgcctgtctctgcttcccgcctcagatttccactggtgaaggttggagacagcaatgatcgtaatctcttccattcttcatcctcagctatagagatggcacttttcataaatcccactggaccaaaaggcctccggtttgtgaagacagaataacattctttcactagcactgttttgatcatgtcaggatctgtgatagccagcacaggctgttgaccatcataaaagccccacacttttccatactttttatgacattccatgtcaaacatacaaaagcccttatggtaggacaaaatatttcccaaaaaaggcagaggtgtgggccctggaattccaagcttcttaaaaagtccatgtgaatgggttccatatagatagaggagcaccaggctgacagccaggagaagccaggtttccatggccaagtctgggatgagagccatcactactttccttacttatctctctcctctgagtcttcctttcagctctgtgttgctctttgctgggctatgtgcatggagctttcctgccctgcacagcagtgattcagtgaggctgttggattgtttatatgctagagaaggaggcagggctggagntgcagccagtagcagggccacctgtntctgcctgcagttggaagaggcttctccaccttg

SEQ ID NO: 250378 - DNA, 1341 bp, Homo Sapiens
atgggccacattctcgaagacctggggaaaacttgattaaaatgatttgccttattctggttcttgtagaatacacatcagaatgaaaccacccccaagtgtacctctgaattgcttttctattcttttcccttaaggatttgagggcttcacttagatttctcttcatctaaactgtgatgccctacattgatctgatttacctaaaatgtctttcctctcctttcagctctgtccgatctggagctcgtggcccaatcaattatctttatttttgctggctatgaaaccacgagcagtgttctctccttcattatgtatgaactggccactcaccctgatgtccagcagaaactgcaggaggaaattgatacagttttacccaataaggcaccacccacctatgatactgtgctacagatggagtatcttgacatggtggtgaatgaaacgctcagattattcccaattgctatgagacttgagagggtctgcaaaaaagatgttgagatcaatgggatgttcattcccaaaggggtggtggtgatgattccaagctatgctcttcaccgtgacccaaagtactggacagagcctgagaagttcctccctgaaagattcagcaagaagaacaaggacaacatagatccttacatatacacaccctttggaagtggacccagaaactgcattggcatgaggtttgctctcatgaacatgaaacttgctctaatcagagtccttcagaacttctccttcaaaccttgtaaagaaacacagatccccctgaaattaagcttaggaggacttcttcaaccagaaattttcctaaggacttctgctttgctcttcaagaaatctgtgcctgagaacaccagagaccccaaaggacttctggaatgctcttaaagaaagctgtgcctcaaaacaccagagacctcaaattactttacaaatagaaccctgaaatgaagacgggcttcatccaatgtgctgcataaataatcagggattctgtacgtgcattgtgctctctcatggtctgtatagagtgttatacttggtaatatagaggagatgaccaaatcagtgctggggaagtagatttggcttctctgcttctcataggactatctccaccacccccagttagcaccattaactcctcctgagctctgataacataattaacatttctcaataatttcaaccacaatcattaataaaaataggaattattttgatggctctaacagtgacatttatatcatgtgttatatctgtagtattctatagtaagctttatattaagcaaatcaataaaaacctctttacaaaagt

SEQ ID NO: 250379 - DNA, 1180 bp, Homo Sapiens
  misc_feature (825)..(825): n is a, c, g, or t
  misc_feature (974)..(974): n is a, c, g, or t
ggatagagaatacggtcattgctgtctccaaccttcaccagcggaaaactcaaggagaaaagacatcacaaaattcattacaaaatgtcacttactgctccatgctggagaaagccatatccttctgggacttgagtctgcacatttaactacagcatctttggggcctacagcatggatgtgattactggcacatcatttggagtgaacatcgactctctcaacaatccacaagacccctttgtggagagcactaagaagttcctaaaatttggtttcttagatccattatttctctcaataatactctttccattccttaccccagtttttgaagcattaaatgtctctctgtttccaaaagataccataaattttttaagtaaatctgtaaacagaatgaagaaaagtcgcctcaacgacaaacaaaagcaccgactagatttccttcagctgatgattgactcccagaattcgaaagaaactgagtcccacaaagctctgtctgatctggagctcgcagcccagtcaataatcttcatttttgctggctatgaaaccaccagcagtgttctttccttcactttatatgaactggcaactcaccctgatgtccagcagaaactgcaaaaggagattgatgcagtattgcccaataaggcaccacctacctatgatgccgtggtacagatggagtaccttgacatggtggtgaatgaaacactcagattattcccagttgctattagacttgagagaacttgcaagaaagatgttgaaatcaatggggtattcattcccaaagggtcaatggtggtgattccnacttatgctcttcaccatgacccaaagtactggacagagcctgaggagttccgccctgaaaggttcagtaagaagaaggacagcatagatccttacatatacacaccctttggaactggacccagaaactgtattggcatgaggtttgntctcatgaacatgaaacttgctctaatcagagtccttcagaacttctccttcaaaccttgtaaagaaacacagatccccttgaaattagatacgcaaggacttcttcaaccagaaaaacccattgttctaaaggtggattcaagagatggaaccctaagtggagaatgagttattctaaggatttctactttggtcttcaagaaag

SEQ ID NO: 250380 - DNA, 1709 bp, Homo Sapiens
  misc_feature (890)..(890): n is a, c, g, or t
  misc_feature (949)..(949): n is a, c, g, or t
  misc_feature (1156)..(1183): n is a, c, g, or t
  misc_feature (1194)..(1194): n is a, c, g, or t
  misc_feature (1202)..(1202): n is a, c, g, or t
  misc_feature (1205)..(1205): n is a, c, g, or t
  misc_feature (1223)..(1223): n is a, c, g, or t
  misc_feature (1235)..(1235): n is a, c, g, or t
  misc_feature (1240)..(1240): n is a, c, g, or t
  misc_feature (1253)..(1253): n is a, c, g, or t
  misc_feature (1256)..(1256): n is a, c, g, or t
  misc_feature (1261)..(1261): n is a, c, g, or t
  misc_feature (1276)..(1293): n is a, c, g, or t
  misc_feature (1296)..(1296): n is a, c, g, or t
  misc_feature (1335)..(1335): n is a, c, g, or t
  misc_feature (1337)..(1337): n is a, c, g, or t
  misc_feature (1358)..(1358): n is a, c, g, or t
  misc_feature (1363)..(1363): n is a, c, g, or t
  misc_feature (1371)..(1371): n is a, c, g, or t
  misc_feature (1373)..(1373): n is a, c, g, or t
  misc_feature (1375)..(1375): n is a, c, g, or t
  misc_feature (1380)..(1380): n is a, c, g, or t
  misc_feature (1386)..(1386): n is a, c, g, or t
  misc_feature (1409)..(1409): n is a, c, g, or t
  misc_feature (1419)..(1419): n is a, c, g, or t
  misc_feature (1426)..(1426): n is a, c, g, or t
  misc_feature (1462)..(1462): n is a, c, g, or t
  misc_feature (1474)..(1474): n is a, c, g, or t
  misc_feature (1515)..(1515): n is a, c, g, or t
  misc_feature (1517)..(1517): n is a, c, g, or t
  misc_feature (1519)..(1519): n is a, c, g, or t
  misc_feature (1531)..(1531): n is a, c, g, or t
  misc_feature (1533)..(1533): n is a, c, g, or t
  misc_feature (1546)..(1546): n is a, c, g, or t
  misc_feature (1548)..(1548): n is a, c, g, or t
  misc_feature (1552)..(1552): n is a, c, g, or t
  misc_feature (1589)..(1589): n is a, c, g, or t
  misc_feature (1603)..(1603): n is a, c, g, or t
caaggccagttggtgggggccactggactctaaaagtgggtcatctgtccactaagccatgggcccggagggcccagccaactcccaggcacttcccagtcagggctgtgattctgaggcctgaggggagaggtgaagaagtacaaagaggcaaacctttctcccacttgcttctagtgaacaaaacaaaccactgcacctcatccactgctctcaccaaacctctagcccctctgacagggaacagctgctgcaattggctgagaccaccttataaaatcacagtccatcagcccaccagggaacacaatggtttaataatattcagcatctcttcttcaaagtaagtgcaatggtataaaccaataaatatttgtatatccttctattaagaagttttggcttaaatttaaacaacaaagcagaacaaaaaattccatacttgcagagaaagtttaaaaaagtggagcataagtggtttcccaatctgtttctctattatctctcaacccttctttcaaaagcacatgttaaattcagtctaaatgaaggagttttggcttttaattgaaagtgaatcaatgtgggaaggagatgatgccatgcatttatgagcacatattagaagggtctgagacaatgcatgtgataaaagggcacctaaggaagaaaaaaagaagaggggaataggcagacactggacagaaggcgatgctgggagtccctgggccaccaaaacctgcagaaaagtggtaaccacaatgctcctagcctagttcagactgaagacctcgatacctggtgacacatgggatccttggtaggacaagcctcgaaaagttttacaatagcgagtgtgaactttatcagaaccaaagtgatgtcactanttgttttttaaccctgacaaataaatcccaagaaggctatgaagagaggattcttatgnttgtgttcctggaaacaaaactattacaaaagtgtctacaaaaaccacaactttgcacaaaggctatttcaactttacacaaaaatatttctgcaaggacacctgtccagcaactgcctgtccaaccttggtgtggcatcacccttgttattgatctttgtagctaacaataattatctcaaaacagttatgagattcttctcatannnnnnnnnnnnnnnnnnnnnnnnnnnnacctccctgantttgcacnttntttttaacggcaagcagnttcccattgcanttttntactcccaagtanttntcctnttctttcagagaacnnnnnnnnnnnnnnnnnnagnttgacaagagcttcatcccatgaagacctgggcagagantntcctgcagtggggtaacctcntcacngtagcagntntntccantggagnttttcagaatactcacccccacntttttccatnttttttntagcactttgtgtcaattttccagagaccctgacgntaggacaaaacntttcccaacaaaggcagaggtgtgggccctggaattcccantntnttaaaaagtccntntgtacgggtcccntntagntagaggagcaccaggctgacagccaggagaagccagntttccaccgccaantttgggatgaggtccatcgccactttccttcttcaactgtgttctgtgagtcttccttttagctgagtgctgctgtttgctgggctgtttgcctggagcttccctg

SEQ ID NO: 250381 - DNA, 1044 bp, Homo Sapiens
  misc_feature (34)..(34): n is a, c, g, or t
  misc_feature (49)..(49): n is a, c, g, or t
  misc_feature (65)..(65): n is a, c, g, or t
  misc_feature (67)..(67): n is a, c, g, or t
  misc_feature (81)..(81): n is a, c, g, or t
  misc_feature (85)..(85): n is a, c, g, or t
  misc_feature (90)..(90): n is a, c, g, or t
  misc_feature (100)..(100): n is a, c, g, or t
aaagcgaaaagcaattgacatgttgctagatttnttcaggaaacatccnctttccaagatttagntntattttttgttcantgtnactcngtaacacgtntcaagaagccatagggaggttgagggaggaagtcaagaagggaggttgaggactgcacttttgatttacttctgacttcacgagtcactttctgccaaagaaatctctccttttgcttctagcaccgactagatttccttcagctgatgattgactcccagaattcgaaagaaactgagtcccacaaagctctgtctgatctggagctcgcagcccagtcaataatcttcatttttgctggctatgaaaccaccagcagtgttctttccttcactttatatgaactggccactcaccctgatgtccagcagaaactgcaaaaggagattgatgcagttttgcccaataaggcaccacctacctatgatgccgtggctacagatggagtaccttgacatggtggtgaatgaaacactcagattattcccagttgctattagacttgagaggacttgcaagaaagatgttgaaatcaatggggtattcattcccaaagggtcaatggtggtgattccaacttatgctcttcaccatgacccaaagtactggacagagcctgaggagttccgccctgaaaggttcagtaagaagaaggacagcatagatccttacatatacacaccctttggaactggacccagaaactgcattggcatgaggtttgctctcatgaacatgaaacttgctctaatcagagtccttcagaacttctccttcaaaccttgtaaagaaacacagatccccttgaaattagacacgcaaggacttcttcaaccagaaaaacccattgttctaaaggtggattcaagagatggaaccctaagtggagaatgagttattctaaggatttctactttggtcttcaagaaagctgtgccccagaacaccagagatttcaacttagtcaataaaaccttgaaataaagatgggcttaatctaatgt

SEQ ID NO: 250382 - DNA, 3030 bp, Homo Sapiens
  misc_feature (1312)..(1321): n is a, c, g, or t
actcaaggagatggtccctatcattgcccagtatggagatgtgttggtgagaaatctgaggcgggaagcagagacaggcaagcctgtcaccttgaaacacgtctttggggcctacagcatggatgtgatcactagcacatcatttggagtgagcatcgactctctcaacaatccacaagacccctttgtggaaaacaccaagaagcttttaagatttaatccattagatccattcgttctctcaataagtatgtggactactatttccttttctctccctctctcttaaaaataactgctttattgacatataaatcacatatcgtataattcatccacttaaaaggtacaattcaatggtttgtagtacatatgaacatatgtacgaccatcaccattgtaaactttaaaacacttctgtcattctagaaacctcatacatgtttagctatcaaccccctgccagaaatcctgttgtcgtatataaccactagtcaactttctgcatctatagatttgcctattctggacacttcatagaaatgatattaatttttcagggtttttttaattctctagttcatgaatttgtactttagtctgtattattttctttcttctgctggcttcaggcttagtttgcccttctccgtttaccgtgttgtggcatgaatgtagattattgatttgtgggtttttttcctctaaatttagacattacaactataaatttccctctgggcacttgtttgctaaataacatgacattctggcctatcacatcttaatttttgctcagctcaaaacagtttctatttgcccttttaatttctacttcaacttattggttgcttaaaagtttattgtttaacttccacgtatgtgtgagtttcccaattttcgttaccttattgattttagctttatcctatgataggtgacagagatacactgtgttatttctatctgatttcttgaacagcatgattaatttaagcagcaaattatgatttgggttatcctaagagaccctagcccaatacataaaggcaaagagattagggcattgaattttgttcctttcatcattcaaaaaatgcagaaggggctgctgatctcactgctgtagtggtggtccctatgcacagaccttcccttgctcagccactggcctggaagaggggcaaaagtcatagaaggaatggcttccagttgagaacactgatgtatttcactcttctgattggtagagaaaattagaattgctccaggtaaattttgtatgttcacaatggtttcgttttctgttggnnnnnnnnnnctacagaagtctttccattccttaccccaattcttgaagcattaaatatcactgtgtttccaagaaaagttataagttttctaacaaaatctgtaaaacagataaaagaaggtcgcctcaaagagacacaaaaggtaaaacgtggtggtagttataggaggatgtttagttttcataattttttagaaatatacatatgatcggtgcacttccctgtatgtttttagagaaagattttaacataaagagtacttatgtttagagcaagataattcatttggtaggaatgcacaaagtggagtttgaggaaggagatatgagaatgagtcagagagagcacttaaaatttgatatcaggcacaagaattagtatgccatgacataaatattattcagataaaaccttatcacagcacttcccttcaataaattgtcaaaggataaacattactgtttggaaatacattttattggtattatgctttctctagatcatagattggtaaagagtcatttcaagtacaaggctattattttacacattctccaacaaaaggtcctatcaggccacctgctgaagtgtagtgtgtgttacatttgagccctctgacagcctcgagtgaacagaggtcttctctgagaattgaggctgcaaggctggctaactcagctttgccttcacgagccctagaggccagccaaaagatatctgcaggtcagggagacaggaccaggtaacccagctgtcactgaagattatatagagtttgagaatgttggaatatttgaaaatgctcccccaaaaaagctgctgatgagttctggaaatgtcaggagattaatctatacggacactgctgaagaaaaaggtagaagaataaaagatccagtacttcttcctgggtaagcagttatgaccagagatggaaccggcaactctttggccagaaagctgtatccaaaagacagagaagatgagaaacagggagggcaaaggcgaaaaagcaattggacatgatagctagatttgtttcaggaaaacatcctgctttccaaggatttagatgaatgtttttgttcactggtgactcaggtaacacgtcttcaagaagccatagggaggttgagggagggaagtcaagaagggaggttgaggactgcacttttgatttacttctgacttcacgagtcactttctgccaaagaaatctctccttttgcttctagcaccgactagatttccttcagctgatgattgactcccagaattcgaaagaaactgagtcccacaaagctctgtctgatctggagctcgcagcccagtcaataatcttcatttttgctggctatgaaaccaccagcagtgttctttccttcactttatatgaactggccactcaccctgatgtccagcagaaactgcaaaaggagattgatgcagttttgcccaataaggtgaggggatgacccctggagatgaagggaagaggtgaagccttagcaaaaatgcctcctcaccactccccaggagaatttttataaaaagcataatcactgattccttcactgacataatgtaggaagcctctgaggagaaaaacaaagggagaaacatagagaacggttgctactggcagaagcataagatctttgtacaatattgctggccctggttcacctgtttactgttatcacaataatgctaagta

SEQ ID NO: 250383 - DNA, 662 bp, Homo Sapiens
cctgtgccctgagaacaccccagagaccctcaaattaccttggtgaaataggaacctcctgaaaatgaaagatggggcctccatccccaatgggacctgccataaaataacccggggattcctgtaccatgcattgagctcctcctcattgtcctgtgtagagtgttataccttggggaatataaagggaggtgacccaaatcagtgtgagggaggtagatttggctcctctgcttctcacgggactatttccaccacccccagttagcaccattaactcctcctgagctctgataagagaatcaacatttctcaataatttcctccacaaattattaatgaaaataagaattattttgatggctctaacaatgacatttatatcacatgttttctctggagtattctataagttttatgttaaatcaataaagaccactttacaaaagtattatcagatgctttcctgcacattaaggagaaatctatagaactgaatgagaaccaacaagtaaatatttttggtcattgtaatcactgttggcgtggggcctttgtcagaactagaatttgattattaacataggtgaaagttaacccactatgactttgcccattgtttagaaagaatattcatagtttaattatgacatttttgatga

SEQ ID NO: 250384 - DNA, 470 bp, Homo Sapiens
gatgttgtacgttgacctgatttacctaaaatgtctttcctctcctttcagctctgtctgatctggagctcgcagcccagtcaataatcttcatttttgctggctatgaaaccaccagcagtgttctttccttcactttatatgaactggccactcaccctgatgtccagcagaaactgcaaaaggagattgatgcagttttgcccaataaggtgaggggatgacccctggagatgaagggaagaggtgaagccttagcaaaaatgcctcctcacccactcccccaggagaatttttataaaaagcataatcactgattccttcactgacataatgtaggaagcctctgaggagaaaaacaaagggagaaacatagagaacggttgctactggcagaagcataagatctttgtacaatattgctggccctggttcacctgtttactgttatcacaataatgctaagtaaa

SEQ ID NO: 250385 - DNA, 578 bp, Homo Sapiens
cggccggggagagaaagcgacctcaagatacaactggcaactgaggaaaaggcctcaattcaacaagagctaacaagcttgggagtttatttcggaatctttaaaagactcttctgcttacccacaatctgggatccactgcaggaaaacaaaaaaggaaaacttcatttaaaagaagcaagaagtaaaatgggacaaattgggaatgtttaagtctctgaaactctgcactgaaaagaaaataagattgataacttaagcttaacattctgaggcataaagaaacattaactttggagtattcatcttgactactgaaatacaagtttagaagacaagtggtttcattctggtcacagatcacagcttttctttaaatttataatcctatgggttggactcgttgactgtattttttaaaggttgctcgtcagttaactgagccttggaattcatggattttctaaagactaacaaatgaaaatattttcctgttgaagaacccagcggaaattttacagcaacaaatttcatgtttcttttgggtatttctgagaaaaaggaaatatttataaaaa

SEQ ID NO: 250386 - DNA, 372 bp, Homo Sapiens
aaaaccatgaaccaaggctcagttaactgacgagcaaccaaaaaaaacagtcaacgagtccaacccataggattataaatttaaagaaaagctgtgatctgtgaccagaatgaaaccacttgtcttctaaacttgtatttcagtagtcaagatgaatactccaaaccagtgcagagtttcagagacttaaacattcccaatttgtcccattttacttcttgcttcttttaaatgaagttttccttttttgttttcctgcagtggatcccagattgtgggtaagcagaagagtcttttaaagattccgaaataaactcccaagcttgttagctcgtgttgaattgaggccttttcctcagttgccagttgtat

SEQ ID NO: 250387 - DNA, 641 bp, Homo Sapiens
ggattaaattagtttgtgaaggattatggaaaaataaaactgtcactgttggacgtcagcaagttcacatggaggcattgatgcatgctattcacaattattccaaaccaaattttaatttttgcttttagaaaagggagtttaaaaatggtatcaaaattacatatactacagtcaagatagaaagggtgctgccacggagtggtgaggtaccgtctacatttcacattattctgggcaccacaaaatatacaaaactttatcagggaaactaagattcttttaaattagaaaatattctctatttgaattatttctgtcacagtaaaaataaaatactttgagttttgagctactggattcttattagttccccaaatacaaagttagagaactaaactagtttttcctatcatgttaacctctgcttttatctcagatgttaaaataaatggtttggtgctttttataaaaagataatctcagtgctttcctccttcactgtttcatctaagtgcctcacatttttttctacctataacactctaggatgtatattttatataaagtattctttttcttttttaaattaatatctttctgcacacaaatattatttgtgtttcctaaatccaaccatt

SEQ ID NO: 250388 - DNA, 1150 bp, Homo Sapiens
caattaaagaagatatcttggctatcgcatataagaaagagttctcctgatggcaacagcatgtccgatgtccagcacagccacttggtctgatcattgcaatttatttttatatgatgtgtgcattttgcttacctagagctaaattcatatacacaaacagcttattttattaagttgcacacattaatttgcaatagctatttcctttcccctgagtgcaagtgttaataaccttgttatgtacttaagcaatgtgcttatgtctcaaagaaaaccctgtctttgaaactctgcctctggaaagatgcaagctatgtttttgccaataacacatgaataataatagtgaggatatgctgtctcttgcaggggtgaggacctgctaaatataactgtcctcattgaagcgtgtttggactactttggcaagatgggcaagtagcaattgcttataattcagtgggtcaggatatgaagactttggttcaagctcgctgaagacacacagattgctcacagggaacttctaaactctttcttttattgtttctatcctatttactagctgttttttcgtgattctgaaaccactgtaagggacagccacagaattgcattggagggtatgcctttctacgaattgagccctctataaatagcacaggagggaatacttgctatttgtctttgaaccagtgtttacttttattaagaaaaaattactgagaaagggaccatgaaccctaactcgaacattacttttgaacatcaagcccacagttgccatctactaaaaagtgttaactcatatcaatactctatacatctaaaacaacccacttaattgactaaaaaaagagtctagctcattgctttcctgattctcctcagcatctggcagttgtagtgttcctgtgttcaagctttacttgaactttacagagcttcctgtgtcacctctggttggagcggaggggctgtaaaggtgtctctcatctagcacatgcaaattagcatgctctcttgaacatcttatctcaggactagcttacgcagctcttgaaaagcagagtattccatgttgttaaatctatgtattgagaagatgagataaaccctggtaaattatgtagtttatgaaaactcc

SEQ ID NO: 250389 - DNA, 866 bp, Homo Sapiens
  misc_feature (810)..(810): n is a, c, g, or t
ggcgaggggcggagcttgtggaggaagatggctgccgcctgggggtcgtccctaacggccgcgacgcagagagcggtcactccctggccgaggggcaggctcctcacggcctccctgggaccccaggcgcgtcgggaggcgtcgtcctccagccccgaggccggcgaagggcagatccgcctcacagacagttgcgtccagaggcttttggaaatcaccgaagggtcagaattcctcaggctgcaagtggagggaggtggatgctccggattccaatacaaattttcactggatacagttatcaaccccgacgacagggtatttgaacagggtggggcaagagtggtggttgactctgatagcttggccttcgtgaaaggggcccaggtggacttcagccaagaactgatccgaagctcatttcaagtgttgaacaatcctcaagcacagcaaggctgctcctgtgggtcatctttctctatcaaactttgatgtgatgactggtgactctgggattgtcaccagttgtaccaatttgaagaacctggaattagtagaattctagaagtttacttctaatcatgtccctctcaattttatttcccgcagtccaggagtgttatgttttgccactattattttcagaatgtgaagattttactcttggcttaatttttccctccactcagtgctaaggctgagcctccagatgctgttacctcagatttaatcactggttgaaactccgtataatctgtagagcctccatggctcataaaaatttggaattaaccttctcattgccttaangagctgcttgtacatatgtggatagctatgtataaaagcttcattttaaagaaaaa

SEQ ID NO: 250390 - DNA, 2522 bp, Homo Sapiens
  misc_feature (2006)..(2016): n is a, c, g, or t
  misc_feature (2481)..(2481): n is a, c, g, or t
  misc_feature (2489)..(2489): n is a, c, g, or t
ggcggtggagtgagcgaagcgcacgctgaggaggatcggcggccggtgagggggaagcaagtctggtctctgtgattgaagaagtcggctctgggctccagtgcgggaatcacacacatacctcagaatgccgggtctaagttgtagattttatcaacacaaatttcctgaggtggaagatgtagtgatggtgaatgtcagatccattgctgaaatgggggcttatgtcagcttgctggaatacaacaacattgaaggcatgattcttcttagtgaattatccagaaggcgtatccgttctatcaacaaactcatccgaattggcaggaatgagtgtgtggttgtcattagggtggacaaagaaaaaggatatattgatttgtcaaaaagaagagtttctccagaggaagcaatcaaatgtgaagacaaattcacaaaatccaaaactgtttatagcattcttcgtcatgttgctgaggtgttagaatacaccaaggatgagcagctggaaagcctattccagaggactgcctgggtctttgatgacaagtacaagagacctggatatggtgcctatgatgcatttaagcatgcagtctcagacccatctattttggatagtttagatttgaatgaagatgaacgggaagtactcattaataatattaataggcgcttgaccccacaggctgtcaaaattcgagcagatattgaagtggcttggttatggttatgaaggcaattgatgctgtaaaagaagcccctaagagcaggtttgaattgttctacagaaaacatgcccattaagattaatctaatagctcctcctcggtatgtaatgactacgacaaccctggagagaacagaaggcctttctgtcctcagtcaagctatggctgttatcaaagagaagattgaggaaaagaggggtgtgttcaatgttcaaatggagcccaaagtggtcacagatacagatgagactgaacttgcgaggcagatggagaggcttgaaagagaaaatgccgaagtggatggagatgatgatgcagaagaaatggaagccaaagctgaagattaactttgtgggaaacagagtccaatttaaggaacacagagcagcgcttcctggctgtaaatcctagacttgaaagttttccagtattgaaaacttcaaagctgaatattttttatttctaagtatttaaatgttctaacagatcagaacatgaaatgccctcctaaatgtcagctgttgtcacacagtagctccaacactttgagcatttttaagggagtggcctcatttcactagagacaaatctttaagaatagttctaaaattgggcttgtgatttccatttctgatgtctccagattggcacccctttctagttcaatgcctcacgagatttgccaggggcatccaaggcaaacaatcccaatctttctatataaaatgtattcaagcaaacatcaaataaatttctgggatatttaactataggcttcttccttcttgtcaccagttaaaagcattttaatactaagaccctaattcttttatctttattttagtcttgatgtggaactgtaggagcaggtgaataaaggatctctataacagatcctttcaaaagaagagttttagagaaaataaatttaactttaaccacagtgaaagttgacccttagcgggacaaagccttaaaatgcattgaaagaattagatcggttctgtgccttttatctatttgagattgatgacaacctgtgtgagagaatttatcacaccacgtccttattggaataataagctacttgccttgagtttataattcagggtggtaaagtatgtttttaaattttaaaaagcagctgcattttttatttagttggaatatcacccaattttttatttttattgctattaaaatatccactagatgccacctagagctccagttctttataacaaaacagggatctgtttgaacacttactgttgnnnnnnnnnnnacatgtttccatcatttctgtctttaagaactaattcgtacataataagtttcataggtaacacattatttgaagttacagctacagtagtcaggtgtagaaaatcttgagttgctttggtctgcttgtcttcataaatttattctcttatgatacttgaggtaccagttgtatttaattttattcattatccctagatagctattaagatacttagattagacctaacccaccatagtcaatccaagactagactactcaatattaaagggtctggaaaatagaagagtgtgttgggcaggtagtttgtaccatttatgaaggtttgttcctttgttaaatttagcagcctgtactagcttttgaaatccagaagttttaacttccagtgggctggtttctgaggagagtgccatggattgctagccagcatttccatattggggaatatgtagagggagaccnggggtgtnctttaggagtggccttttaatttttcacttctt

SEQ ID NO: 250391 - DNA, 734 bp, Homo Sapiens
  misc_feature (414)..(436): n is a, c, g, or t
  misc_feature (597)..(597): n is a, c, g, or t
  misc_feature (659)..(659): n is a, c, g, or t
  misc_feature (663)..(663): n is a, c, g, or t
  misc_feature (686)..(686): n is a, c, g, or t
  misc_feature (702)..(702): n is a, c, g, or t
  misc_feature (704)..(704): n is a, c, g, or t
gcaagtctggtctctgtgattgaagaagtcggctctgggctccagtgcgggaatcacacacatacctcagaatgccgggtctaagttgtagattttggcactatatttaattggaaggtaaaatattgtacatgtgatccagagtaaatgagaagtctctatctgagctggtcagttactggagtacatgttactaatctgggtttaaagtttacttcattatctgctagtgtcatccacagcagttcatcctcatccacactaagccatcctgttagcttttaaaggaagttaatttaattaacattaatatactctatgggctccctctcccacctgtctgcatagaaaggcagaattagacatagcatgctttggaaaagcaaataggaattgttgggaatgatttaatcnnnnnnnnnnnnnnnnnnnnnnncacttgtggttctacattcctggtgaatgatgaatgttgctgtcaaagggctgccccctaccttataagggttgctgggcatttgaaggcaggaagatttttaaagatagattgaggttggtttaaaattattcctgtaaaccaacaataaagcaaagaanaagttcatttttgttaataacactggtttcaaataatgatgttagacttaacctaatttatnaacnagaaattatatctccatgcatanttttagacaaaaaaanangtttccataaaattactgtctgttataaaa

SEQ ID NO: 250392 - DNA, 457 bp, Homo Sapiens
  misc_feature (258)..(258): n is a, c, g, or t
  misc_feature (269)..(269): n is a, c, g, or t
  misc_feature (288)..(288): n is a, c, g, or t
  misc_feature (291)..(291): n is a, c, g, or t
  misc_feature (328)..(328): n is a, c, g, or t
  misc_feature (393)..(393): n is a, c, g, or t
  misc_feature (404)..(404): n is a, c, g, or t
  misc_feature (415)..(415): n is a, c, g, or t
  misc_feature (431)..(431): n is a, c, g, or t
  misc_feature (445)..(445): n is a, c, g, or t
cggccggtgagggggaagcaagtctggtctctgtgattgaagaagtcggctctgggctccagtgcgggaatcacacacatacctcagaatgccgggtctaagttgtagattttatcaacacaaatttcctgaggtggaagatgtagtgatggtgaatgtcagatccattgctgaaatgggggcttatgtcagcttgctggaatacaacaacattgaaggcatgattcttcttagtgaattatcccagaaggccgtatnccgtttctatncaacaaactcatcccgaanttngccagggaattgagtgtgtgggttgtcattaggggtnggacaaaggaaaaaggatatattgaatttgttcaaaaagaaggagtttcttccagaggaagccantccaaatgtgnaggacaatttncaccaaattccaaaantgtttatagccttncttcgtcctgtt

SEQ ID NO: 250393 - DNA, 1051 bp, Homo Sapiens
  misc_feature (967)..(978): n is a, c, g, or t
aataaaaacaggaatcaataaaagtgaacatacaaaaaagagctcttgtcacagaaatgaaaaccttgggagcaggactgcacccacggttcccaccaacctatcctgccatcatgttttctccctactccagcttcctcccaagctcactctacgtagatggtttttcttcccttagccaacaaacgaaattctgcctataaattaagccaggacactaggatatggaggtatattatttatgtctcttttccagtgtttcctggtatataacagcaaagatggtttagcaagttaactggtcaggccagaattcttgatggttgccaagtcaggaggcagacggtgaaggaatgcattctggttatgaaaaatggcaatgacgagtaagttgcagagtaaagatgccttttagaggaaattaaggtttgcaataaatacatgctaatcctctaattttgatgaaagactaaagctcttgttttggtttgcatttcaaagagcaagagcataggctcttgtgctgggaggtggccagtttcctggaaaggaatttatggagtctgaaagaggaattagtacaaattatattttcaaataagatacttgaaagttattgatgacagggaaaagattgtctaaagagggcttgaaattggggaaataattgaggctcagtgacaaaggagaagattacaacttcaaaaatgaataaataaataacattgcatgtttattttacaacaccagggggcgatgatgtctacgtttttattctgtatcctttatcgctgacaaagatttggtctctgcaattttaccttattgtttctcagatgaccaaggggttggcttaatttgttctgtttaaacttattgcaagtccttctgtaatttcctaatgttttcataatgtgtgttgtgaccagactctccttataaccccagttaataaaagttaacaggnnnnnnnnnnnntagaaggattggaagataaagttggggaaatttctctgaaagtaaaacaaaaagatagagatgaaaagtaaga

SEQ ID NO: 250394 - DNA, 1535 bp, Homo Sapiens
gaggggactttgataaggaagctgaagggtgatattacctttgctccctcactgcaactgaacacatttcttagtttttaggtggcccccgctggctaacttgctgtggagttttcaagggcatagaatcgtcctttacacaattaaaagaagatgctgtttaatctgaggatcctgttaaacaatgcagcttttagaaatggtcacaacttcatggttcgaaattttcggtgtggacaaccactacaaaataaagtgcagctgaagggccgtgaccttctcactctaaaaaactttaccggagaagaaattaaatatatgctatggctatcagcagatctgaaatttaggataaaacagaaaggagagtatttgcctttattgcaagggaagtccttaggcatgatttttgagggacaatccttgtttcttaccacacaagatattcatttgggtgtgaatgaaagtctcacggacacggcccgtgtattgtctagcatggcagatgcagtattggctcgagtgtataaacaatcagatttggacaccctggctaaagaagcatccatcccaattatcaatgggctgtcagatttgtaccatcctatccagatcctggctgattacctcacgctccaggaacactatagctctctgaaaggtcttaccctcagctggatcggggatgggaacaatatcctgcactccatcatgatgagcgcagcgaaattcggaatgcaccttcaggcagctactccaaagggttatgagccggatgctagtgtaaccaagttggcagagcagtatgccaaagagaatggtaccaagctgttgctgacaaatgatccattggaagcagcgcatggaggcaatgtattaattacagacacttggataagcatgggacaagaagaggagaagaaaaagcggctccaggctttccaaggttaccaggttacaatgaagactgctaaagttgctgcctctgactggacatttttacactgcttgcccagaaagccagaagaagtggatgatgaagtcttttattctcctcgatcactagtgttcccagaggcagaaaacagaaagtggacaatcatggctgtcatggtgtccctgctgacagattactcacctcagctccagaagcctaaattttgatgttgtgttacttgtcaagaaagaagcaatgttcttcagtaacagaatgagttggtttatggggaaaagagaagagaatctaaaaaataaacaaatccctaacacgtggtatgggtgaaccgtatgatatgctttgccattgtgaaactttccttaagcctttaatttaagtgctgatgcactgtaatacgtgcttaactttgcttaaactctctaattcccaatttctgagttacatttagatatcatattaattatcatatacatttacttcaacataaaatactgtgttcataatgtataatgtctaagccattaagtgtaatctatgcttattacctaaataaattatcacccatgctaatttaaaa

SEQ ID NO: 250395 - DNA, 646 bp, Homo Sapiens
  misc_feature (34)..(34): n is a, c, g, or t
caagcggtgtggggccaaagcggcagcacgccancgatgaaagcccgtgccacaagcttcacagcacattctccgggggttatatcacgcatgaagacttccacagcccacacagcttcttcaacgtgctcaaaatactctgcaatcaagaagtccacatttttccaggcaaaaacttctagctgttgtcgaaaaagttttttaattctagcttcatccttctggtatttgtatattgatgtctggcagatcccccctgctaccaaagcatcacctttgccagccacttccctggcgaggtcacaggcagcagcatttacatcttcccacttgctttccatattgtcctcactggcagaaaaggtaaaagtctgcatgacatttgatcctgctctcaagaattccatgtgaagttgacgaactgcatctgggtgttctatcactgcctctggagtccagagcccagccttcacatagcctctcttctccagagtaatgagaaagctgccatctccaatcacaacctccccactctccaggcgctccaaaatccccttcttggcccccgggcgtccagcaggtgccatggtgccgcggctctgtgggcgccgggttcccgggcgcgcggccgtctaggagcccgccc

SEQ ID NO: 250396 - DNA, 589 bp, Homo Sapiens
ggaaggtaccttagaggttagccattcccctccacctcccacaatttacagataagaaaactgattggagttcattcttctatttccaaactgctctcacaatatcaagcacactttgttaaatttcgtaagcaacaactgagctgtgtatcacggtatgggtccaaattacctgccttcaccagcctcacagcacattctccgggggttatatcatgcatgtctccctctgggcctatgcacatggtaactgccacgggtctatctgattcttttaagacttccacagcccacacagcttcttcaacgtgctcaaaatactaagagaaatgtcactttttctactggtccaaacataaagcagattttgaatggtaaaggtaaatatagcaaaacagttataaaaattaccaaatagaatataaacatatgcataataaaacttgctaaggaatgtgtgtctatcagactgactaaagaatacctttctgagtaaacattttcattcctataacaataacatataagttttcattcagggatcatttgttcagtgcgatgatgtctatttagtaaaaagaagaaacaa

SEQ ID NO: 250397 - DNA, 941 bp, Homo Sapiens
  misc_feature (727)..(727): n is a, c, g, or t
  misc_feature (761)..(761): n is a, c, g, or t
  misc_feature (799)..(799): n is a, c, g, or t
gcaggaagtgactgcgggagtggagccggcgagagagtggcagcgggggctgatggaagtgcagtgggggctggagagggcaccctactgtatccagcatgctccaaggccacagctctgtgttccaggccttgctggggaccttcttcacctgggggatgacagcagctggggcagctctcgtgttcgtattctctagtggacagaggcggatcttagatggaagtcttggctttgctgcaggggtcatgttggcagcttcctattggtctcttctggccccagcagttgagatggccacgtcctctgggggcttcggtgcctttgccttcttccctgtggctgttggcttcacccttggagcggcttttgtctacttggctgacctcctgatgcctcacttgggtgcagcagaagacccccagacggccctggcactgaacttcggctctacgttgatgaagaagaagtctgatcctgagggtcccgcgctgctcttccctgagagtgaactttccatccggataggtagagctgggcttctttcagacaagagtgagaatggtgaggcatatcagagaaagaaggcggcagccactggccttccagagggtcctgctgtccctgtgccttctcgagggaatctggcacagcccggcggcagcagcttggaggaggatcgcactgctcatcttggccatcactatacacaacgttccaaagggtnctcgctgttgggagttgggatttgggggctatangaaaagacggcatcctggctacctttgagagtgccagngaatttggcccatttggaatcggggatccagaaatttccccgaaggggcctgggcttgtcagcccttccccttgtgcgaggggggcagggctttctccacctgggaggaggcttttcttgggtatggggccaggcctgaaat

SEQ ID NO: 250398 - DNA, 1219 bp, Homo Sapiens
  misc_feature (157)..(157): n is a, c, g, or t
aacattctagaatgggggagaggcttcagccagtgatggagccaggagggccggattgagaaggtgtgctgcccactctgccctgagtcactaggccacccaaaatgcttaggagacgtcttttggtagctcgcttctataggtgaccttgaggagnttgggaggcagatagaaggtcccgaagtggagatttccctgatctgaagttccttgataatcccactgaagagagagtccattcagtggccaaaacaaagaatctgtatttccatgacaccttaaaattccccattaaatcaatctccctcaaagcaaagtaaaaatggttctattataatcagagtcaatcaggataatgagatgaagaagagaggaaggaaaaaagttttaatgtgaagaaagaagcttgttgtcccatagaagccaaccactgctgtttcttcgtatggcctttcccggggtccgaagcgtctcagccctagcccaggccaacgtccagtgacatcatcactacaaatcccaggatggaggcccaggatgccagtttcccattaccactgatctgggcttcggggatgatgtcgtccatgaccacgtagaccatggcaccggcagcaaaggccagagcgtagggcaggatgggctcagccagcaccacggcaaaggcaccaaagaccccggccaggggctccaccatgccgctcagctgcccataccagaaagctctccaggtggagaagcctgcccctcgcaagggaaggctgacagccaggccctcggggaaattctggatccctgattccaatggccaaattcctggcactctcaaaggtagcagatgccgtcttttctatagccccaaatccaactccaacagcgagatcttttggaatgttgtgtatagtgatggccaagatgagcagtgcgatcctcctccagctgctgccgccgggctgtgccagattccctcgagaaggcacagggacagcaggaccctctggaaggccagtagctgccgccttctttctctgatatgcctcaccattctcactcttgtctatccggatggaaagttcactctcagggaagagcagcgcgggaccctcaggatcagacttcttcttcatcaacgtagagccgaagttcagtgccggggccgtctgggggtcttctgctgcacccaagtgaggcatcaggaggtcagccaagtagacaaaag

SEQ ID NO: 250399 - DNA, 606 bp, Homo Sapiens
atgttcaccagcaccggctccagtgggctctacaaggcgcctctgtcgaagagccttctgctggtccccagtgccctctccctcctgctcgccctcctcctgcctcactgccagaagctctttgtgtatgaccttcacgcagtcaagaacgacttccagatttggaggttgatatgtggaagaataatttgccttgatttgaaagatactttctgcagtagtctgcttatttataattttaggatatttgaaagaagatatggaagcagaaaatttgcatcctttttgctgggttcctgggttttgtcagccttatttgactttctcctcattgaagctatgcagtatttctttggcatcactgcagctagtaatttgccttctggattatgtcattaggttcttctaacgtctaaagtgctgtgagtatggaggaacattgtcagacacaagaaagagcatcaagcaagtcagctgaattctttgggccgccacctcactgtgtataaaataaagcctggcacctgtgtttgctctgtttgtaccattttactgctccataccaagagtccaagtggcacaaattctgggtccgttgtccatcac

SEQ ID NO: 250400 - DNA, 985 bp, Homo Sapiens
ctggtacggctccggaattacgggatatcgtcgacccacgcgtcggcccggcgggaccatgttcaccagcaccggctccagtgggctctacaaggcgcctctgtcgaagagccttctgctggtccccagtgccctctccctcctgctcgccctcctcctgcctcactgccagaagctctttgtgtatgaccttcacgcagtcaagaacgacttccagatttggaggttgatatgtggaagaataatttgccttgatttgaaagatactttctgcagtagtctgcttatttataattttaggatatttgaaagaagatatggaagcagaaaatttgcatcctttttgctgggttcctgggttttgtcagccttatttgactttctcctcattgaagctatgcagtatttctttggcatcactgcagctagtaatttgccttctggattcctggcacctgtgtttgctctgtttgtaccattttactgctccataccaagagtccaagtggcacaaattctgggtccgttgtccatcacaaacaagacattgatttatatattgggactgcagcttttcacctctggttcctacatctggattgtagccataagtggacttatgtccggtctgtgctacgacagcaaaaatgttcaggtgcatcaggtgctctgcatcccagctggatggcaaaatcttttcttggacacttgaacccaatcttcttttcttcagaaaccaccagcgaagccgaaatgggagtgggagccagctgagcatcccgggaacgcagagaaggggctgtggaacggcgctgatgtccttcatttgccagaggcgccataaacgagaggaggatatcattggatcttttcacattagtggaaaagaacaataagcggggagaggagaggcgctaaattgtgacggtcgcataggatcaggattaacggataaagaggcactagaaacacaatacaggggcaa

SEQ ID NO: 250401 - DNA, 1381 bp, Homo Sapiens
  misc_feature (43)..(55): n is a, c, g, or t
  misc_feature (413)..(422): n is a, c, g, or t
  misc_feature (1046)..(1046): n is a, c, g, or t
  misc_feature (1153)..(1153): n is a, c, g, or t
  misc_feature (1184)..(1184): n is a, c, g, or t
agatatactaaacttattgttgacaaatttcagcctccttaannnnnnnnnnnnnggtaattacctataggcttaaaagtcattcgttgctgttctagtataattagtagttccgtgattgaaagtttattgtaattctactatcttcaaattagatacattttcaaaaggaaaagataattttttagaaacatcttaatattcactatttcctgaaaaaatccaagcagttaacgctttctggatggtaacaaagtaccttctaaaagataagtgctatgacaccatgtatgaatgtaattctcttagtaatttacctctgactatttggtgtcttaacgctttggtttatataatctcaggggttgtctgcaaaccaaaactgacatattctgtggttagcttttattacnnnnnnnnnnaacagaatgctttgctttggttatatttcttctttcttcttttgtcttatatggattaataactagtctccatgaacttcacttgaaagagcctgtaaaagttagatgagtctaaaagtgctctttgaagtagcagcaaattgggagtatatgctctgttatatagaaataaattgtccttgctattttcttacatttagctttgctagattgtatatacattgagctaagaccttaggaaattcactttctgcatgataaaatgacccaataaatattccactttgcttaataatgtacatacagtgcattattttttctatttgtagatgaatttaatgacaaataattgtctgttccccgctgaaactgaagaaatctagtttttttgtgaacatttttgtggtcttatggataaagtacatgaagatttttgcagcagtattaggtggttcagtgggctgcactttaataatcagggtgttaatttttgacagtgattggactagaccttttcaaatagagtctgagggtatcagacagtgaaaatgtgctgtaactaagtagcatgtaaatcagttgattgtaaaacgtttcgctgggaacttattttagctatatttnacttcagacagattatgatacaataatctacctgtgcatcagttagtaggtgctgcagggtttcttactatttacagaaacattttgtgcagtctttgttataaatnttcagaagactatactctttactttgaaggnctattttttaattatacctcatttagctaactagtattctaatacctggtagaaaaacagtgagccagcctttaagcatctaacaaaatttagactctttgttttgttttgaactgaagacatcattgggaaaggtaggaaatattagtttaggatagagcatacatgtcatatccagtagcataaaaaaagtatta

SEQ ID NO: 250402 - DNA, 1004 bp, Homo Sapiens
  misc_feature (747)..(747): n is a, c, g, or t
  misc_feature (753)..(753): n is a, c, g, or t
  misc_feature (755)..(755): n is a, c, g, or t
  misc_feature (768)..(785): n is a, c, g, or t
  misc_feature (787)..(840): n is a, c, g, or t
  misc_feature (842)..(842): n is a, c, g, or t
  misc_feature (849)..(849): n is a, c, g, or t
  misc_feature (851)..(851): n is a, c, g, or t
  misc_feature (853)..(855): n is a, c, g, or t
  misc_feature (957)..(957): n is a, c, g, or t
  misc_feature (988)..(988): n is a, c, g, or t
ggcctgggtggcgaattcggcacgaggcatcaaggacgaaaacatccttatcgacctcaatcgcggcgagctcaagctcatcgacttcgggtcgggggcgctgctcaaggacaccgtctacacggacttcgatgggacccgagtgtatagccctccagagtggatccgctaccatcgctaccatggcaggtcggcggcagtctggtccctggggatcctgctgtatgatatggtgtgtggagatattcctttcgagcatgacgaagagatcatcaggggccaggttttcttcaggcagagggtctcttcagaatgtcagcatctcattagatggtgcttggccctgagaccatcagataggccaaccttcgaagaaatccagaaccatccatggatgcaagatgttctcctgccccaggaaactgctgagatccacctccacagcctgtcgccggggcccagcaaatagcagcctttctggcaggtcctcccctctcttgtcagatgcccgagggaggggaagcttctgtctccagcttcccgagtaccagtgacacgtctcgccaagcaggacagtgcttgatacaggaacaacatttacaactcattccagatcccaggcccctggaggctgcctcccaacagtggggaagagtgactctccaggggtcctaggcctcaactcctcccatagatactctcttcttctcataggtgtccagcattgctggactctgaaatatcccngggtgngngggttggggggtnnnnnnnnnnnnnnnnnngnnnnnnnnnnnnnnnnnnnnnnnnnnnnnnnnnnnnnnnnnnnnnnnnnnnnnngnccgcggngngnnnggggggttgccgggtgtttggcccttttgtttcccccctcttctttccgcctctctcttccccccgtttcgctttccccccttttccgttcctcccgtctgntgtttgccgcctcgtctctgctccgtctccnccgcttgcggttcgcc

SEQ ID NO: 250403 - DNA, 654 bp, Homo Sapiens
  misc_feature (48)..(49): n is a, c, g, or t
gcagcccccccaaaaggtccccaagtcagagaggaaaggaggaaagannaactagggcagcagctatggaagcggaataggaagggaaccaaataaaataattaatacataacatttgacctccaggttagaatgcgcatctttcaaaacaagaaacaaaaacagtatactaccatgccaactgtacacacatttacagcctgttgattgcattgtttgtgcattttttgtgtgtgtgaggtcttggctttgaaacagttaagtaaaaaccaaaaaggaagaccagttcactcggagttttactaaaggaggcagaaaaaagggcaggtggctcagcgtttggccctgtagcctcttccatggcacctttcatatgaaggagggggtgagggaggacaggagagaaaaatagcgaacaaaacccaggcagatttttggagaagcagcaggtaaaagaggcaagttcaagtatttctcccagcacagccggagtccccacagaaggcactcagaaagagtcggaagaggtgacagggacttaaaatggtgctagtcctatcccatcccaacctgtttcccccctacctgacccatcgcggcattcagcagaactcatgatgaaggaaacagttccatggcagggttctgacccac

SEQ ID NO: 250404 - DNA, 674 bp, Homo Sapiens
gccatggaactgtttccttcatcatgagttctgctgaatgccgcgatgggtcaggtaggggggaaacaggttgggatgggataggactagcaccattttaagtccctgtcacctcttccgactctttctgagtgccttctgtggggactccggctgtgctgggagaaatacttgaacttgcctcttttacctgctgcttctccaaaaatctgcctgggttttgttccctatttttctctcctgtcctccctcaccccctccttcatatgaaaggtgccatggaagaggctacagggccaaacgctgagccacctgcccttttttctgcctcctttagtaaaactccgagtgaactggtcttcctttttggtttttacttaactgtttcaaagccaagacctcacacacacaaaaaatgcacaaacaatgcaatcaacagaaaagctgtaaatgtgtgtacagttggcatggtagtatacaaaaagattgtagtggatctaatttttaagaaattttgcctttaagttattttacctgtttttgtttcttgttttgaaagatgcgcattctaaccgggaggtcaatgttatgtatttatttatttatttattgggttcccttcctattccaagcgtccatagctgctgccctagttttctttcctcctttcctcc

SEQ ID NO: 250405 - DNA, 1600 bp, Homo Sapiens
  misc_feature (812)..(822): n is a, c, g, or t
  misc_feature (879)..(935): n is a, c, g, or t
  misc_feature (1087)..(1110): n is a, c, g, or t
  misc_feature (1484)..(1484): n is a, c, g, or t
  misc_feature (1560)..(1560): n is a, c, g, or t
actggaactgcctcctttaaccgcggcttctcccaaaaatcgaccggcttttgttccctatttttccttcatgtcctccctcaccacctctttcatatgaaaggtgacatggaagagtctacagggccaaacgctgagccacctgcccctattttcgcctccctttagtaaaactccgagtgaactggctcttcctttttggtttttacttaactgtttcaaagccaagacctcacacacacaaaaaatgcacatacaatgcaatcaacagaaaagctgtaaatgtgtgtacagttggcatggtagtatacaaaaagattgtagtggatctaatttttaagaaattttgcctttaagttattttacctgtttttgtttcttgttttgaaagatgcgcattctaacctggaggtcaatgttatgtatttatttatttatttatttggttcccttcctattccaagcttccatagctgctgccctagttttctttcctcctttcctcctctgacttggggaccttttgggggagggctgcgacgcttgctctgtttgtggggtgacgggactcaggcgggacagtgctgcagctccctggcttctgtggggcccctcacctacttacccaggtgggtcccggctctgtgggtgatggggaggggcattgctgactgtgtatataggataattatgaaaagcagttctggatggtgtgccttccagatcctctctggggctgtgttttgagcagcaggtagcctgctggttttatctgagtgaaatactgtacaggggaataaaagagatcttannnnnnnnnnnatacttggcgttttttgatgaaaaaccttttgtcttaacaaagaaaacaaaaccccnnnnnnnnnnnnnnnnnnnnnnnnnnnnnnnnnnnnnnnnnnnnnnnnnnnnnnnnncatggtcggccgcctccggcccttctgaaaactttttctaaaccctttctttttggccccccgggccccacgtagggaacgggaacacatggcccttaccttggtttcccaaggaagaaccctggcccagtgactaaggcgtttggaatctnnnnnnnnnnnnnnnnnnnnnnnngcggcgggcaacccgaaggggttttctgaaacaaatttcccaaatgggacgttctccggaggggcctcttcacgtgggatacttattcaaaacggggagttctccaaggccgaggcttcccaatatatcaaattttagcgccccccggcccggtggccactctttaatcgcacacagaactgggctggcgtaactcccctttagacgcccattccttgcgccgaaaatggggaaaacccccttccacaaaacccgccaagtggattgacacccttgaactccgcccgcgcggagcattccagcccaccccttgtttgccctctctggccatacataaatattctttccgccctaggtgggggaaaaacacgggngggtcgtcaacaaaacactgctggcttccattcatggaggccccacgcgtttataaaaatccacacacttgtgggngagaacaactctcctcccaagcgattgtctggttttgaaa

SEQ ID NO: 250406 - DNA, 493 bp, Homo Sapiens
  misc_feature (446)..(446): n is a, c, g, or t
  misc_feature (453)..(453): n is a, c, g, or t
  misc_feature (459)..(459): n is a, c, g, or t
  misc_feature (472)..(472): n is a, c, g, or t
taggggggaaacaggttgggatgggataggactagcaccattttaagtccctgtcacctcttccgactctttctgagtgccttctgtggggactccggctgtgctgggagaaatacttgaacttgcctcttttacctgctgcttctccaaaaatctgcctgggttttgttccctatttttctctcctgtcctccctcaccccctccttcatatgaaaggtgccatggaagaggctacagggccaaacgctgagccacctgcccttttttctgcctcctttagtaaaactccgagtgaactggtcttcctttttggtttttacttaactgtttcaaagccaagacctcacacacacaaaaaatggcacaaacaatggcaattcaacaggaaaaggtgttaaatgtgtgttacagttgggctgggtagttttacaaaaaggattgttngtggggntctaantttttaagggaanttttggcctttaaggttaaaa

SEQ ID NO: 250407 - DNA, 1230 bp, Homo Sapiens
ttcccttagggtgctgtgatgctggagattttcatttgcagagaagcactattggttagataatccaaacctcctgtagtttagctgatggagaaaactgaatattttgaggaagctggctacaagctgggcagttttcctttctttctgcttcaaatgtgtatgtatacagcccatctacatcattaaacaccaagtaattattcaagggaatgtatgcacttgtggctattttaaaaacctcagtggcacacacagctgcaatgactgcatttgtggaagctactgcaggaatgattctttttactaccccttgagtgagcctatacgtaacacccctaatattatattgtgatgctctctctagggatttttggaaaatccattgtatatgttcaggatcatctccatctaatggaaccccttctccaaaaggctgctccttaggccactgcaacatccttacatactcaatacagtgttctggtagcctgggcatagatgcaatggtgcacatgggaaaattaacctgtggtggataaagttccagcgtgcattcgatacaagcagtcattccaggcagaatcacccgggcatttcctttaaaaccttctgtccccccatctatcaaagggacaatggagcttggatctaagacaccatcttcataatttagaagagatatcagcatgccatttatccatcttctggcgatgatagagtccagtccacatacaataatatgaaattgtcgatagaaagtgtcgttaaaatcttgaatcttgttgaaatgtggaactacattgcaattaggaactctgtcatttagaaattctgcagcaacttcagccttaggtcttccaatatctttaggcctaaataaaaactgcctatttagattggaaacatctatagtgtccatatctataacatgaatctgtctaaaaccagacaaggccagatttttcaggagctcacatcctaagccgccagctccaatgactagaactttacatgtatctaacaagaactggagagattcagtgctcggttcgaaatcagggtgtgtgaagggtccagatcgctcgaggaacttctttacatggttccagcgaccttcccagtctccagtgtccccacacccaccatcaacagccattttctcagccagcagctcctctattctccttcttttcttctccggctcctcgccatccgccatattgttcc

SEQ ID NO: 250408 - DNA, 1219 bp, Homo Sapiens
  misc_feature (1100)..(1100): n is a, c, g, or t
  misc_feature (1149)..(1149): n is a, c, g, or t
  misc_feature (1152)..(1172): n is a, c, g, or t
gttcccatttctgaagaatctgaagagctggatcagaagacattcagcatttgtaaagaaagaatgacgactgttaaagcagctttgaaacaacttgataggcctgagaaaggcctttcacaaagagaacaactagagcatactagacaatgtttaataaaaattggagaccatatcacagaatgtctaaaagagtatacaaatcctgaacaaattaagcaatgcagaaaaaacctgtggattgttgtatctaagatgactgaatttgatgcaagaaaattacataaattatataagcatgctattaaaaaacgagcaggagtctcagcaaaacagtgatcaaaacagcaacttgaatcctcacgtgattagaaatccagatgtggaaagattaaaagagaatacaaatcacgatgatagcagcagggacagttattcctctgatagacacttaactcagtaccatgatcatcataaagaccgacatcagggagattcttacaaaaaaagtgattccaggaaaagaccctattcttcttttagtaatggtaaagaccatcgcgattgggatcactacaagcaagacagcagatattacagtgacagagagaaacacagaaaactggatgatcacaggagtagagatcacaggtcaaatttggaaggaagtttaaaagatagatctcattctgatcatcgttctcactcagatcatcggttacattcagaccaccggtcaagttctgaatatacgcaccataaatcttccagggattataggtatcactcagactggcaaatggaccacagagcttccagcagtggccctaggtcaccactagatcagagatcttatggctccagatctccatttgaacattcagttgaacacaaaagtacaccggagcatacctggagtagtcggaaaacataacaaaaactgatacttcgtctttctggacttttcttttagccatatatcataaaccaacacagtaattgccttacatgacttgaaagatataaacagatcttctatcagtagcagtattgttacttctttccaggatgcaaggtctattatcccaacagaagagaanatatttttatatttaaggattatgctgcactgtactacaaaattgtagnacnnnnnnnnnnnnnnnnnnnnnaaagaaatggaaaatgtttactattacaggggactcaacactgccct

SEQ ID NO: 250409 - DNA, 546 bp, Homo Sapiens
ctttcatgtgactgtgggagcatttgttacactacagatctggctaaggcaagcccagggcaaggctcccgattatgatgcctgacaccatccttcagatctattgccttggcttcagggggataaggagggaacatatcataactgcactgtgatgaagaagctgttccccacagaggagaagctctgctttctttctctccaactttccttttttaaaatcagcatgatgtgcctgtgagcatggaagagtcctctcagaagaatgttggccatgagactatcattcagaggaggaggggatttctctcttcaaggccataacagtggaagaacagtcatatgccattggaagtcttggccagcagtcctgaatccttcctgaagagttcagaaaatagatgtggtattgctctgaggaccaggcaggaggaactctacaacctgagtttgcctttgtgaggcattagtatagaccaaataaaaagctgcagaaattggaaagtttatgttttaaataaatgactgtgataaatttcaaaaaaa

SEQ ID NO: 250410 - DNA, 449 bp, Homo Sapiens
  misc_feature (380)..(391): n is a, c, g, or t
ggaggtgagcgcggacgtcagagtggagagcggaaggtcagggaggctcggagcggaagtgagactagggagtctgcccgccattgtggacccgagaagcagagagcgaagagggggaagaaggagcgtgcaagcggaaaagacgggcctcttcctccgactcccgagcgcgaggccctcattttgggttctcagcgaacggcggcagcggcggcggctggaacaatcactcggccaagggcgacagccaactgctgtgagtgcacggggagaggcccaggcagcggcggcggcgccggctctcgggttgcggtgaagaatgtcagccactagcgtggatcagagacctaaagggcaaggaaataaaggtgagtttggannnnnnnnnnnncttattgctcaatgttgccttaatgttacttttaaactctgtgagggtattttgtttg

SEQ ID NO: 250411 - DNA, 867 bp, Homo Sapiens
  misc_feature (466)..(495): n is a, c, g, or t
  misc_feature (627)..(653): n is a, c, g, or t
agaagggtaaaattccctttcccccataatatccagtagggtataaataaggggaggtaagggtatatatattccatccattcggtcattcaggggagggttttaccccaaaaaggattagaaacggtatgggtaatagagtaaattccaggagtggtgcaggccaggctgtaggaaggcagagccagcattatagccatttttaaactgggcactgtcaaaacccagaaagctttattttaagggaaaatttatttcttattttgtatcaacaccagtatcactggtttgccattaaatagtggccctggaaaggcttgcttacgcagcctaggtccaaattctttactactaatggctacagctaaagactttgtaagtatacatttactccagttagtaaaagggtaaacttttggagttgagatttcatttcacaatggcatatttaccatttaagaatgtnnnnnnnnnnnnnnnnnnnnnnnnnnnnnncccgattttgatacatagaaatgagttctaaactttgaaaccagcccagtaacaaagcaatttttgatttcttatgtaataaatactacataattttctaggctaaatcttgccaaatactattccaagacnnnnnnnnnnnnnnnnnnnnnnnnnnngtggacaccttttactcacacttaatactagtcaattttccaggaattttttgggcagggaatatccccaaatcagagaacagaaactttaccgaaccgatgacactatccccgactcccgcttgctgccacgtctttcttcttgcttggccgctgccgtccgtcgtcctcccagcagcagcagcactagcagaaaaccaagactgccagcgtc

SEQ ID NO: 250412 - DNA, 2183 bp, Homo Sapiens
  misc_feature (1585)..(1585): n is a, c, g, or t
  misc_feature (1787)..(1788): n is a, c, g, or t
  misc_feature (1797)..(1932): n is a, c, g, or t
ggggactgggctgtacggtgcgcgtgacggctgcgtgcggcgggaatcatggctgctcgcagagctctgcacttcgtattcaaagtgggaaaccgcttccagacggcgcgtttctatcgggacgtcctggggatgaaggttctgcggcatgaggaatttgaagaaggctgcaaagctgcctgtaatgggccttatgatgggaaatggagtaaaacaatggtgggatttgggcctgaggatgatcattttgtcgcagaactgacttacaattatggcgtcggagactacaagcttggcaatgactttatgggaatcacgctcgcttctagccaggctgtcagcaacgccaggaagctggagtggccactgacggaagttgcagaaggtgtttttgaaaccgaggccccgggaggatataagttctatttgcagaatcgcagtctgcctcagtcagatcctgtattaaaagtaactctagcagtgtctgatcttcaaaagtccttgaactactggtgtaatctactgggaatgaaaatttatgaaaaagatgaagaaaagcaaagggctttgctgggctatgctgataaccagtgtaagctggagctacagggcgtcaagggtggggtggaccatgcagcagcttttggaagaattgccttctcttgcccccagaaagagttgccagacttagaagacttgatgaaaagggagaaccagaagattctgactcccctggtgagcctggacaccccagggaaagcaacagtacaggtggtcattctggccgaccctgacggacatgaaatttgctttgtcggggatgaagcatttcgagaactttctaagatggatccagagggaagcaaattgttggatgatgcaatggcagcagataaaagtgacgagtggtttgccaaacacaataaacccaaagcttcaggttaacggaagacatgatgcagagcaagcctctgtgattcctgcccagcacctgtgaggcctgacgtgtcagttcccaataaatgctcttctgatttgtttcccgtacaggcaaggaggcttgggtagtgcagatttgtgtatttcaatctttgaaagctctgatgtaatttagaaatgaaatccaatcatgagtccaggtagagaacgcctgctgtaatctacactgttgctgggactgcgcattctgtatataactgtgttggatgagtgacagatgattgtccagactaggacagcggcatgaacatgactttggttgggattgcggatagttagggttacctctgaatcgtgtagcttttatgagagcagctgtgcaagtgaatccacattaatgccttgtcgtggtgccattcccagcgccagacgatacgctcttctattgtcttattctggcaggttttgacgttttaaattttttaaagaaattttattccttggaccaaaaggtttggttaaccacccccctcttacttgctttcacattttgagtgtccagaggaaacagaaaggaatgagtgtgtgacgttgctgcacgcctgactctgtgcgagcttctttctgtgtatatattttgttttanttttttccgtgtatatttttaatcccgacagaacatcatgtgagatttctttaaaatggattaaacgatttcttcagcctgaaaaaaaaggttttgaaaatgttttcttgtagttttgtttggttctaaacaacaaataggttttaatcactcgaaatggaattatattgtgtattcattgaataaattttttttgaaagtnncaccccacnnnnnnnnnnnnnnnnnnnnnnnnnnnnnnnnnnnnnnnnnnnnnnnnnnnnnnnnnnnnnnnnnnnnnnnnnnnnnnnnnnnnnnnnnnnnnnnnnnnnnnnnnnnnnnnnnnnnnnnnnnnnnnnnnnnnnnnnacttttatatgcgtttatttccgggggtgcgccccgctccgccgccccgaaagaattttctctttacctaccctccgcggtggcgccccgcggttgcccgcgacccaaaagcagaacccgcgcgctttttatttcccttaactccggacacaccccgctgagtgatagaacacaagcgctctgactctcacttcccaaaaacaaaacaacgcgcccgccggcgggggccaaacatgtcgcccctctccacc

SEQ ID NO: 250413 - DNA, 604 bp, Homo Sapiens
ggaatcacaagatggaacctctccaggtggtgaaaattatggcctttgccggtaagggagcccacatcaggttcacgaggtggtggttttctgccttttctccctacatccccttcccgctacctgccagggcatctttgctctgatctgtcatccaactaataattcaataacagatcaaataatcaatctcaaaagcaattggccaaggaatacttacttccccggaccactccatgaacatccacagaattcctgttgagacaggtagttcacagcagttagttggtcgggcagatgcccccgggattgagcccagcattgtgatgtttgctcaggcactgattgcttctggagagggagggcatgttaatccccagcccagggtttcaggagctccccagttttatagggtgatgtctagagggcctgccttagattggcttttaacttacattcataaatatattatctactagtgtcctgcctcagtcagccacgccgatccactcacagcctcctgaagtacttgggttactctttcatcacagcctttgctcgtgctatttgctatttttttctgcctgtaatcccttcctgctcc

SEQ ID NO: 250414 - DNA, 798 bp, Homo Sapiens
  misc_feature (294)..(302): n is a, c, g, or t
cagaacctcaagtgtaagcagtcagtgtagcatgaatatgaactggctcagtttatcacttcccgaaagactgaagcaccacccagctatgcagaagtggtaacagaggaacaaaggcggaacaatcttgcaccagtgagtgcttgtgatgactttgagagagcccttcaaggaccactgtttgcatatatccaggagtttcgattcttgcctccacctctttattcagaggtaagtacctactccttaagtatgaaatgaactggctatcttgggaaatagcattgcaggcannnnnnnnncttaatgttattagatcttgattatcatgataacagaacaaataatttaaaacaacagattaaaagttaatattagggtcatcaatatttactaagtttgatgcagaggtaggactgttcacttattagggaattaagataatgatctaacctcatgttgaattactaattttttttctcttaaacttttatcttgagacacattttttgaaggaagaattttgtatatccaagcatcaataggaagaactagcattttgcaaacactgattaaatagtagaatttatcttattcatgatgcttttccaattgcatattttgacattctcagtcataagaaataatgtatttgtgataacatcttaaaacaacattcccacatggttagactattttcgttcatctcatattgatggcagctaagcacttaaatgtaaataaaacatggcccttaggagaaacccacagattactggaggaaaacaagctaagaag

SEQ ID NO: 250415 - DNA, 622 bp, Homo Sapiens
  misc_feature (65)..(65): n is a, c, g, or t
  misc_feature (100)..(292): n is a, c, g, or t
ttaagttggatagtaatggggatttacactgagtaagatattctcaggagacagagctaggatgnaaactatttccagaacaagcatggtggctcacacnnnnnnnnnnnnnnnnnnnnnnnnnnnnnnnnnnnnnnnnnnnnnnnnnnnnnnnnnnnnnnnnnnnnnnnnnnnnnnnnnnnnnnnnnnnnnnnnnnnnnnnnnnnnnnnnnnnnnnnnnnnnnnnnnnnnnnnnnnnnnnnnnnnnnnnnnnnnnnnnnnnnnnnnnnnnnnnnnnnnnnnnnnnnnnnnnacgcttcagtgcactccagcctaggtgccactgtctcaaaataaaacaaaaaactctatttccagaactcccacttcacctctgtgtgacctctgaataatcatcttattgacttgcgattctgcttctccactgggtaacatttatttttaagaagtgtttaaatctctaaaataagaaaataactttgaattattcagtaaagaaatgcctatgataaaatgagatgctctagcatatgactggagaaaatggaaggtgctgcactctgtagcacagaaacagaaatacttcttcctgactaaaagtttctcatttgcttcagcaacc

SEQ ID NO: 250416 - DNA, 827 bp, Homo Sapiens
ggggcactttgctacagtgctgcttgggatgcacgagttatcactagtgcttggtgggtgtaccatcatcaggtatctaaaacagcaccaactggagaatatttgacaacaggaagcttcatgataagaggaaaaaagaattttcttcctccctcatatctaatgatggggtttagcttcctttttaaggtagatgagtcttgtgtttggagacatcagggtgaacgaaaagtcagagtacaggatgaagacatggagacactggcaagttgtacaagtgaactcatatcagaagaaatggaacaattagatggaggtgacacgagcagtgatgaggataaagaagaacatgaaactcctgtggaagtagaactcatgactcaggttgaccaagaggatatcactcttcagagtggcagagatgaactaaatgaggagctcattcaggaagaaagctctgaagacgaaggagaatatgaagaggttagaaaagatcaggattctgttggtgaaatgaaggatgaaggggaagagacattaaattatcctgatactaccattgacttgtctcaccttcaaccccaaaggtccatccagaaattggcttcaaaagaggaatcttctaatttctagtgacaggtaaatcacagagccgggagacattttgtcagcccaagaaaagaggggaaatgaaaaaggaaaaacttcccaagtggactcaggagattttagaaaccgttaaagggaaaggcattaaggaaaaaggaaaggtccttgtacccattggaaacctcatccgaaccccaagccaaaaatgattgcgggcg

SEQ ID NO: 250417 - DNA, 2878 bp, Homo Sapiens
  misc_feature (2059)..(2059): n is a, c, g, or t
agccctgcgtgaagctacaggaccatgtgccgcgcttcccttctggctcctgggggtgaagtgcacgccgcccgccctcggcccgcagtccagaacgcaatgcatcttgtcttgttcttgcagcccggcatgccagtgcttcctccacgaatttgaaagacatattggctgacctgatacctaaggagcaggccagaattaagactttcaggcagcaacatggcaagacggtggtgggccaaatcactgtggacatgatgtatggtggcatgagaggcatgaagggattggtctatgaaacatcagttcttgatcctgatgagggcatccgtttccgaggctttagtatccctgaatgccagaaactgctacccaaggctaagggtggggaagaacccctgcctgagggcttattttggctgctggtaactggacatatcccaacagaggaacaggtatcttggctctcaaaagagtgggcaaagagggcagctctgccttcccatgtggtcaccatgctggacaactttcccaccaatctacaccccatgtctcagctcagtgcagctgttacagccctcaacagtgaaagtaactttgcccgagcatatgcacagggtatcagccgaaccaagtactgggagttgatttatgaagactctatggatctaatcgcaaagctaccttgtgttgcagcaaagatctaccgaaatctctacagagaaggcagcggtattggggccattgactctaacctggactggtctcacaatttcaccaacatgttaggctatactgatcatcagttcactgagctcacgcgcctgtacctcaccatccacagtgaccatgagggtggcaatgtaagtgcccataccagccatttggtgggcagtgccctttccgacccttacctgtcctttgcagcagccatgaacgggctggcagggcctctccatggactggcaaatcaggaagtgcttgtctggctaacacagctgcagaaggaagttggcaaagatgtgtcagatgagaagttacgagactacatctggaacacactcaactcaggacgggttgttccaggctatggccatgcagtactaaggaagactgatccgcgatatacctgtcagcgagagtttgctctgaaacacctgcctaatgaccccatgtttaagttggttgctcagctgtacaagattgtgcccaatgtcctcttagagcagggtaaagccaagaatccttggcccaatgtagatgctcacagtggggtgctgctccagtattatggcatgacggagatgaattactacacggtcctgtttggggtgtcacgagcattgggtgtactggcacagctcatctggagccgagccttaggcttccctctagaaaggcccaagtccatgagcacagagggtctgatgaagtttgtggactctaagtcagggtaaaactggagactgggtgaaagtgactaccagaaagtgaggaagcctaaataaaaagtatacttttgtttcagggggcctttaaagacttaagattaaattatatctgaggcactgataatatgtttgaggttaaaatataaattaagactttaaaagatgaaaaatggtcccttcttccctaatcagctcccttcccctgcctggtatgagttgcccatcatacgcatggtcctggaggatgaccaggactaatgcatgtggtatgagtaggtttggccccctcactatctctagagtgagaatctggctcctgtttccatgggtcaaagccggttgcagagaatctgtagtcactttggagctttagcttctctgccaagccctcaataagccagcaaaccaggactctgccccttctgtttccataggaatcatgttggatagtcagctgtaccaagccccttggccctctcccatgcacacaaacacctcctagcaagacctgttggttagctggacatgctttggcaatttttttatactaccaagtgaccataaaggcatggcatttgttgtgactggcacccaatgtttgatttttnctttaaaactatccaattaaaattaaggtctgggagtgttctgtttcccattactttaatactcacctcctcccagactttctacacctgttgcacctcaggcagaggatgttctggacctccccctcttggtccctactagagacctctcaacagatctgtgggcccagtcattgggttttatcagtgcttaatgtgaactaagttttttacttccacagaatacaagccactaccttctgacctccccaccccccaccaacccccatcttttaatatgctgtggggcatagaactccggaatgaccagcatgatattttcagagtcttgtccccggggtattagcacctctttttgaacagggaattgattcaagattggacatggtctcctctgattatcaggtactggggctgagggcattaaaaatagtaagcctccctcctcgtcccctgcctcaagaaattgcctccttatttatcaacatctttttcctccctttccctgagagctcacagtacaatgtttcagaagccccatttgcacaggttttcagcaactcagaatgctctacttctttttctttgagaaaggattaagatacactcctgctgtgcccccatctttcctccaaactcctgcctgtgtttgtgtggatacccagtcccagaaccacactgttgagttggacacactgtaaacccctgggtaactgtcaagtcatgatggagacttcaggttgttctgtataaaatgcaaaataaatgtttttattaacaatcccgagggggggagaaaagggacaaagaaaacatggt

SEQ ID NO: 250418 - DNA, 602 bp, Homo Sapiens
gggggaggaccccgggctgggcgccgccgccggttcgtctactctttccttcagccgcctcctttcaaccttgtcaacccgtcggcgcggcctctggtgcagcggcggcggctcctgttcctgccgcagctctctccctttcttacctccccaccagatcccggagatcgcccgccatggctttacttactgcggccgcccggctcttgggaaccaagaatgcatcttgtcttgttcttgcagcccggcatgccagtgcttcctccacgaatttgaaagacatattggctgacctgatacctaaggagcaggccagaattaagactttcaggcagcaacatggcaagacggtggtgggccaaatcactgtggacatgatgtatggtggcatgagaggcatgaagggattggtctatgaaacatcagttcttgatcctgatgagggcatccgtttccgaggctttagtatccctgaatgccagaaactgctacccaaggctaagggtggggaagaacccctgcctgagggcttattttggctgctggtaactggacatatcccaacagaggaacaggtatcttggctctcaaaagagtgggca

SEQ ID NO: 250419 - DNA, 1264 bp, Homo Sapiens
aaggagcgaggcctgggtggcgaattcggcacgaggaaggaagttggcaaagatgtgtcagatgagaagttacgagactacatctggaacacactcaactcaggacgggttgttccaggctatggccatgcagtactaaggaagactgatccgcgatatacctgtcagcgagagtttgctctgaaacacctgcctaatgaccccatgtttaagttggttgctcagctgtacaagattgtgcccaatgtcctcttagagcagggtaaagccaagaatccttggcccaatgtagatgctcacagtggggtgctgctccagtattatggcatgacggagatgaattactacacggtcctgtttggggtgtcacgagcattgggtgtactggcacagctcatctggagccgagccttaggcttccctctagaaaggcccaagtccatgagcacagagggtctgatgaagtttgtggactctaagtcagggtaaaactggagactgggtgaaagtgactaccagaaagtgaggaagcctaaataaaaagtatacttttgtttcagggggcctttaaagacttaagattaaattatatctgaggcactgataatatgtttgaggttaaaatataaattaagactttaaaagatgaaaaatggtcccttcttccctaatcagctcccttcccctgcctggtatgagttgcccatcatacgcatggtccctggaggatgaccaggactaatgcatgtggggaatgaagtaaggtttgggcccccctcacctatcccctaaaagggaaaaatcttgggctccctggttttccccgggggcccaaaagcccgggttggccacaaagaaatctggtaaactccccttttggggagctttttaaaccttttcccctggcccaaaagccccctccaataagagccccccgcaaaacacaggggaactccctgccccccccttttttgggttcccccttagagaaattcattggcttgggcaataaactcaagctgttaacaccaaaccccccctttgggcccccttccctcccactgcgaacataaaaccccccctccccaaaccaaagaaccccggctgggtgtaaacctcgggacatggccttttggccaaattttttctttacaccatccacacgtgggccccataaagggggtgtgcgcattttattttgtgagactgggacaccccagagggtctgatgttttcttttcttcaaactctcccccttttcaaa

SEQ ID NO: 250420 - DNA, 1265 bp, Homo Sapiens
  misc_feature (39)..(39): n is a, c, g, or t
  misc_feature (434)..(434): n is a, c, g, or t
  misc_feature (936)..(1011): n is a, c, g, or t
  misc_feature (1040)..(1041): n is a, c, g, or t
  misc_feature (1046)..(1046): n is a, c, g, or t
  misc_feature (1053)..(1053): n is a, c, g, or t
  misc_feature (1075)..(1170): n is a, c, g, or t
ggaaaggaattttggagcaggaactggaattatggcccntaacaatattgcccaactggcagaaacttccctactacgttaatccacaaaaacaataatttcacaatcacgttgtgcttaggagcccagaggaatgataaataaaaagtaacatcaagtagctcctttacatgaaccaaaggaaaaagatttaaacttaagatttaagtttaaagtctaactgttgttatgaacttcagtattgcaacagaggatgttgttttcccaattcgaagatttcagcaaattttaattcttggctcaaaattaattgtcatccattataaaatacaggaatataatgtgcctgtaagttacgactttggcattatataacttttaatcaaactctacatcattcaaatttatgaattcttatgacctgtgtaatcatnttttattatactatattttgcattaaaccataaaatcctctgcctcattttagattgtgcattaattcaaaataatgctgtaggcttcaagtaggaaatccaaagttctgattattgctacaaactaacaaattcaggaccctctaatgcttgcaactaaaatgaatctgacacatcactataaaatgtgtgaatctaggattcttcttttcagaaatcagtataaatgggaattaaaagcatggtagaaatgtccctgaataaaatgaaacttgctctgacaacatactgtttcctacacataaacaaatatgatgtgaaaactcaaattgagacatacctttaactccagacaccatgttctcaagataaaagcctttaaaacaaaaagccatggtgtatatcatcaacatgaaattggaatgcaaaattaatactgctgaggatttccctcatatcccatgctgtttatctattctacaggcctggaatcaaccttttnnnnnnnnnnnnnnnnnnnnnnnnnnnnnnnnnnnnnnnnnnnnnnnnnnnnnnnnnnnnnnnnnnnnnnnnnnnncaactctgcctcagccttcccccattctnngtaanttccaanctacggcaacatgccccagtannnnnnnnnnnnnnnnnnnnnnnnnnnnnnnnnnnnnnnnnnnnnnnnnnnnnnnnnnnnnnnnnnnnnnnnnnnnnnnnnnnnnnnnnnnnnnnntgtggggattgcaggcttgacccattgcacctggcctggaaccaacctttatggctatcaatactcccatcaatcaactgtctcaggtatcgata

SEQ ID NO: 250421 - DNA, 1250 bp, Homo Sapiens
cctttcactaagtattccagccgccacatggggtcacccattgaccctggaccactgccttcaccacttcatctcatcagaatcagtgcgggatgttgtgtgtgacaactgtacaaagattgaagccaagggaacgttgaacggggaaaaggtggaacaccagaggaccacttttgttaaacagttaaaactagggaagctccctcagtgtctctgcatccacctacagcggctgagctggtccagccacggcacgcctctgaagcggcatgagcacgtgcagttcaatgagttcctgatgatggacatttacaagtaccacctccttggacataaacctagtcaacacaaccctaaactgaacaagaacccagggcctacactggagctgcaggatgggccgggagcccccacaccagttctgaatcagccaggggcccccaaaacacagatttttatgaatgacgcctgctccccatctttattgccaacgctgtcagcgccgatgcccttccctctcccagctgttcccgactacagctcctccacatacctcttccggctgatggcagttgtcgtccaccatggagacatgcactctggacactttgtcacttaccgacggtccccaccttctgccaggaaccctctctcaactagcaatcagtggctgtgggtctccgatgacactgtccgcaaggccagcctgcaggaggtcctgtcctccagcgcctacctgctgttctacgagcgcgtcctttccaggatgcagcaccagagccaggagtgcaagtctgaagaatgactgtgccctcctgcaaggctagagctgatggcactgtctgcactgtcccaggaaaaaagtaaaactgtactgttgcgtgtgcaagcggccccactagagccttccagccttctggtgtgttctaagagcaggctccaccctgggagccagccccagttcacaccaaaccaggctccctgaacagtcctgttcatgtgtgtaggtggttctgttgtgttaagaaagcattcattatgtccggagtgtctttttactcatctgatacaggtaattaaaagaactcagattcttgaagccaccgttttcatattgtaatgttaggtgttctcagaggggaggtacctttgtctaatcaacgtttccacttagatcttttatttttaataagcaggcccataaaaattgttgacaagaattaatgaaattattaaaggcaacaatttag

SEQ ID NO: 250422 - DNA, 1799 bp, Homo Sapiens
cggggctccatcggttggatgtagaaaattctcctgaagtggaagtctctgttctcaatgccttgttttcaataactcctctcagtgaactggtgggactctgtaaaaacaatgatggcaggaaattgattccagtggaaacattaactcctgaaattgctttgtattggtgtgccctttgtgaatatttgaaatcaaaaggagatgaaggtgaagaatttttagagcagattttgccagagcctgtagtatatgcagactatttattgagtcacatccagagcattccagttttttatgaagaacacaaaggtgatttttcccatatgggaaatttgatgacaaaagaattcataggtcaacaattgattctaattattaagtctttggataccagtgaagaaggaggaagaaaaaaactgctggctgtcttacaggagattcttattttacccacaatcccaatatccctggtttcttttcttgttgaaagactactccacatcattatagatgataataagagaacacaaattgttacagaaattatctcagagattcgggcgcccattgttactgttggtgttaataacgatccagctgatgtaagaaagaaagaactcaagatggctgaaataaaagttaagcttatcgaagccaaagaagctttggaaaattgcattaccttacaggattttaattcgggcatcagaattaaaagaagaaataaaagcattagaagatgccagaataaaccttttgaaagagacagagcaacttgaaattaaagaagtccacatagagaagaatgatgctgaaacattgcagaaatgtcttattttatgctatgaactgttgaagcagatgtccatttcaacaggcttaagtgcaaccatgaatggaatcatcgaatctttgattcttcctggaataataagtattcatcctgttgtaagaaacctggctgttttatgcttgggatgctgtggactacagaatcaggattttgcaaggaaacacttcgtattactattgcaggttttgcaaattgatgatgtcacaataaaaataagtgctttaaaggcaatctttgaccaactgatgacgttcgggattgaaccatttaaaactaaaaaaatcaaaacacttcattgtgaaggtacagaaataaacagtgatgatgagcaagaatcaaaagaagttgaagagactgctacagctaagaatgttctgaaactcctttctgatttcttagatagtgaggtatctgaacttaggactggagctgcagaaggactagccaagctgatgttctctgggcttttggtcagcagcaggattctttctcgtcttattttgttatggtacaatcctgtgactgaagaggatgttcaacttcgacattgcctaagcgtgttcttccccgtgtttgcttatgcaagcaggactaatcaggaatgctttgaagaagcttttcttccaaccctgcaaacactggccaatgcccctgcatcttctcctttagctgaaattgatatcacaaatgttgctgagttacttgtagatttgacaagaccaagtggattaaatcctcaggccaagacttcccaagattatcaggccttaacagtacatgacaatttggctatgaaaatttgcaatgagatcttaacaagtccgtgctcgccagaaattcgagtctatacaaaagccttgagttctttagaactcagtagccatcttgcaaaagatcttctggttctattgaatgagattctggagcaagtaaaagataggac

SEQ ID NO: 250423 - DNA, 1087 bp, Homo Sapiens
  misc_feature (904)..(904): n is a, c, g, or t
  misc_feature (965)..(965): n is a, c, g, or t
  misc_feature (968)..(968): n is a, c, g, or t
  misc_feature (992)..(992): n is a, c, g, or t
  misc_feature (1005)..(1005): n is a, c, g, or t
  misc_feature (1017)..(1017): n is a, c, g, or t
  misc_feature (1026)..(1026): n is a, c, g, or t
  misc_feature (1042)..(1042): n is a, c, g, or t
  misc_feature (1062)..(1062): n is a, c, g, or t
  misc_feature (1064)..(1064): n is a, c, g, or t
  misc_feature (1067)..(1067): n is a, c, g, or t
  misc_feature (1072)..(1072): n is a, c, g, or t
ggcacgagagaaaagatgtattcccttatacctggcccgtcaccttccagtatggattttttcctgtagctgttcacagagtgggaaaggatagtagctttaatgatgaagtattgaaaaaaattgagggagtgattgaccaatcaccaagagatgggctcttgagaagtttcaaactagcaaatgttgttagatgttcaggtccttagttctcattgctgcaggtaaagagcttgctggcaaggggtataatattttctaaaatggcctttcctggttctcccttcttttccactgtagacatatgaattttttatgctccctctccctccttagtccaccaaggccaaccttcatgctgagtgtccctgtggaagaccagcatggccttcctttgggagagaggtacccttgggaggtcagtcgggctaggagtgggtatgttccttgaggcccctcagctggtgcttgagagtctctgccactggcattgtagtaggtggaggaagcctctctgttccctcatgtggcccgtgggcggggggctgtctgcaggatgatgtccacagaaagtgccaacagcttcactctgattggggaggcatctgatggcggcaccatggagaacctcagccgaagactgaaggtcactggggacctttttgacatcatgtcgggccagacagatgtggatcacccactctgtgaggaatgcacagatactcttttagaccagctggacactcagctcaacgtcactgaaaatgagtgtcagaactacaaacgctgtttggagatcttagagcaaatgaatgaggatgacagtgaacagttacagatggagctaaaggagctggcactagaggaggagaggctgatccaggagctggaagacgtggaaaanaaccgcaagatagtggcagaaatctcgagaaggtccaggctgaggctgagagactggatcnggnggagctcagtatcagagaaaatanagtgaatttaaangaaacagctggngctggatgntgagctgaagagtgtngaaaacagatgcgttatgcncnaangcgcngggtaagtggagaaa

SEQ ID NO: 250424 - DNA, 2086 bp, Homo Sapiens
  misc_feature (1581)..(1593): n is a, c, g, or t
  misc_feature (1613)..(1613): n is a, c, g, or t
  misc_feature (1748)..(1760): n is a, c, g, or t
  misc_feature (2072)..(2075): n is a, c, g, or t
  misc_feature (2080)..(2080): n is a, c, g, or t
  misc_feature (2082)..(2082): n is a, c, g, or t
ggaagtcgctgaagacagagcgatggtagttctggaggcctcgctccggggccgacccgaggccacagtgcctccgcggtagaccggacttgggtgacgggctccgggctcccgagggatggaagggtctaagacgtccaacaacagcaccatgcaggtgagcttcgtgtgccagcgctgcagccagcccctgaaactggacacgagtttcaagatcctggaccgtgtcaccatccaggaactcacagctccattacttaccacagcccaggcgaaaccaggagagacccaggaggaagagactaactcaggagaggagccatttattgaaactcctcgccaggatggtgtctctcgcagattcatccccccagccaggatgatgtccacaggtgcccagcttcactctgattggggaggcatctgatggcggcaccatggagaacctcagccgaagactgaaggtcactggggacctttttgacatcatgtcgggccagacagatgtggatcacccactctgtgaggaatgcacagatactcttttagaccagctggacactcagctcaacgtcactgaaaatgagtgtcagaactacaaacgctgtttggagatcttagagcaaatgaatgaggatgacagtgaacagttacagatggagctaaaggagctggcactagaggaggagaggctgatccaggagctggaagacgtggaaaagaaccgcaagatagtggcagaaaatctcgagaaggtccaggctgaggctgagagactggatcaggaggaagctcagtatcagagagaatacagtgaatttaaacgacagcagctggagctggatgatgagctgaagagtgttgaaaaccagatgcgttatgcccagacgcagctggataagctgaagaaaaccaacgtctttaatgcaacctttccacatctggcacagtggacagtttggcacaatcaataacttcaggctgggtcgccctgcccagtgtttccccgtggaatggaatgagattaatgctgcttggggccagactgtgttgctgctccatgctctggccaataagatgggtctgaaatttcagagataccgacttgttccttacggaaaccattcatatctggagtctctgacagacaaatctaaggagctgccgttatactgttctggggggttgcggtttttctgggacaacaagtttgaccatgcaatggtggctttcctggactgtgtgcagcagttcaaagaagaggttgagaaaggcgagacacgtttttgtcttccctacaggatggatgtggagaaaggcaagattgaagacacaggaggcagtggcggctcctattccatcaaaacccagtttaactctgaggagcagtggacaaaagctctcaagttcatgctgacgaatcttaagtggggtcttgcttgggtgtcctcacaattttataacaaatgacttttttccttagggggaggtttgccttaaaggcttttaattttgttttgtttgcaaacatgttttaaattaaattcgggtaatattaaacagtacatgtttacaataccnnnnnnnnnnnnntccacaaaagccactttatnataaaatatcatgtgacagatactttccagagctacaacatgccatctatagttgccagccctggtcagttttgattcttaaccccatggactcctttccctttcttctctgaaaaaaactaattaaaatttgcnnnnnnnnnnnnnaactgagttgaattgagattgatgtgttttcactggatttttatctctctcaacttcctgcacttaacaatatgaaatagaaacttttgtctttactgagatgaggatatgtttgagatgcacagttggataatgtgggaaaatgacatctaagctttacctggtcaccatgtgatgtgatcagatgcttgaaatttaacacttttcacttggttcttatactgaatgccgactctgctctgtgttagagatatgaaatggtgtttgatactgtttgagacattatggagagatttaattatttgtaataannnntttgntncagt

SEQ ID NO: 250425 - DNA, 477 bp, Homo Sapiens
  misc_feature (397)..(397): n is a, c, g, or t
gggaagtcgctgaagacagagcgatggtagttctggaggcctcgctccggggccgacccgaggccacagtgcctccgcggtagaccggacttgggtgacgggctccgggctcccgaggtgaagagcatcgggggctgagggatggaagggtctaagacgtccaacaacagcaccatgcaggtgagcttcgtgtgccagcgctgcagccagcccctgaaactggacacgagtttcaagatcctggaccgtgtcaccatccaggaactcacagctccattacttaccacagcccaggcgaaaccaggagagacccaggaggaagagactaactcaggagaggagccatttattgaaactcctcgccaggatggtgtctctcgcagattcatccccccanccaggatgatgtccacagaaagtgccaacagcttcactctgattgtggaggcatctgatggcggcaccatggagaacctc

SEQ ID NO: 250426 - DNA, 443 bp, Homo Sapiens
caggtgtccctgtcgcacgtgtaggagcgctgcgccgaggtactcggccggagagctgaggggaggggggcgttttgtttggtagttttgccaaggtcactcccgtttaccttcatggtgctgttgccccctcccgcggcgacttggagagagggaagaggggcgttttcgaggaagaacctgtcccaggtcttctccaaggggcccagctcacgtgtattctattttgcgtttcttactgccttctttatgggaaccctctttttaatttatatgtatttttcttaatttgtaactttgttgcattttggcaacaatttacctttgctttgggggctttacaatcctaaggttggcgttgtaatgaagttccacttggttcaggtttctttgaactgtgtggtctcaattgggaaaatatatttcctatacgtgtgtcttta

SEQ ID NO: 250427 - DNA, 677 bp, Homo Sapiens
gacagccgcgcgacgccgccgccttagaacgcctttccagtactgctagcagcagcccgaccacgcgttaccgcacgctcgcgcctttcccttgacacggcggacgccggaggattggggcggcaatttgtcttttccttttttattaaaattatttttcctgcctgttgttggatttggggaaatcttatgtttgttttatatgatttgtatttgactgagagaaacccactgaagacgtctgcgtgagaatagagaccaccgaggccgactcgcgggccgctgcacccaccgccaaggacaaaaggagcccagcgctactagctgcacccgattcctcccagtgcttagcatgaagaaggccgaaatgggacgattcagtatttccccggatgaagacagcagcagctacagttccaacagcgacttcaactactcctaccccaccaagcaagctgctctgaaaagccattatgcagatgtagatcctgaaaaccagaactttttacttgaatcgaatttggggaagaagaagtatgaaacagaatttcatccaggtactacttcctttggaatgtcagtatttaatctgcagcaatgcgattgtgggcagtggaatcttgggctttcttatgccatggctaatactggaattgctctttttataattctcttga

SEQ ID NO: 250428 - DNA, 664 bp, Homo Sapiens
tctcgactgtggaagtactgccctttgaacttctcaattccagggaagctttccagaggtagatgagcattggtgtgatggccagtgcaaaccatgactccatcaaagacattcatctcctttttcccttcagattcagtgaccacttcccattggcctgaagtggcaaaatcaggctgcttcttcacactgcacacagtggtcttaaatcgaatatactttagaaggtcaaattctttggcatacatcctgaaatactccaggacctgggcattatgcatgaagttgggataatgatctgggattggatagtcactgaagcacatcatctctttagaagtattgatgatcactgatttgtaaatactggcccttccttcttcaggattttcctggaacctccagagccctccgatgtcatcagtcctttcaaagcagacaggttccaagccttcttctacgcagcacttgatggaagagagcccgctcactcctcccccaatcacagcaattcttttcttagtcatggtctcccgagatcttcacctgttagtgtcgcctgtccgcctttcctgaagcgctcaacagatccttcagctgcgatctggaggagactcaacaggcggctgttgtcaaattagtataaaccaacaacggacaaacc

SEQ ID NO: 250429 - DNA, 798 bp, Homo Sapiens
  misc_feature (14)..(14): n is a, c, g, or t
  misc_feature (487)..(487): n is a, c, g, or t
ccctgaagtggcanaatcaggctgcttcttcacactgcacacagtggtcttaaatcgaatatactatagaaggtcaaattctttggcatacatcctgaaatactccaggacctgggcattatgcatgaagttgggataatgatctgggattggatagtcactgaagcacatcatctctttagcctggaacctcacagagccctccgatgtcatcagtcctttcaaagcagacaggttccaagccttcttctacgcagcacttgatggaagagagcccgctcactcctcccacaatcacagcaattcttctcttagtcatggtctcccgagatcttcacctgttagtgtcgcctgtcttaaagaaaggatgccaaaagccaaaaagcacacatcggttaccatcaaggaagcccttggccgtggcattcgaataaattctgtaaaagaggtgtcttgaggagcacagattcgacggtcctcttccacnagaggaaatctttctgctggcatgggggagccctgcgcctgcaagacacagagctgagagtgctctgctgcggtaccggatctcaccgcctttcctgaagcgctcaacagatccttcagctgcgatctggaggagactcaacaggcggctgttgtcaaattagtataaaccaacaacggacaaacagcgagagccaacggggaggggctgtagcactccacctctttcagggaccactcccccgcccactcagcggcacccattctccctccctcgatgggaataaaacgtgggctgaagctgctttgggc

SEQ ID NO: 250430 - DNA, 684 bp, Homo Sapiens
ggagttggcagttaataagacccagctgcaaaacatacagaatactggccaagagatgattgagggtggtcactatgcctctgacaatgtgaccactcgtctgagtgaagttgccagcctctgggaggagttgctggaggctacaaaacagaaagggacccagttgcatgaggccaaccagccagctgcaatttgaaaataatgcagaagatttgcagcgctggctggaggatgttgagtggcaagtcacctctgaggattatgggaaaggcctggccgaggtacagaatcgactcaggaaacacggcctcctggagtcggctgtggctgctcgtcaggatcaggtggatatccttacagacctggctgcatattttgaagaaataggccatcctgattctaaggatataagggcaaggcaagagtccttggtatgccgatttgaagctctgaaagagccactggccaccagaaagaagaagctcttagaacttctccatctgcagctgatttgtagagacacagaggatgaggaagcctggatccaagagactgaaccctcagctacttccacctaccttggaaaggacctgattgcttccaaaaagcttctgaataggcatagagtcatcctggacaacattgccagccatgaaccacgccgagccctatgcagtctcaaaa

SEQ ID NO: 250431 - DNA, 836 bp, Homo Sapiens
  misc_feature (297)..(306): n is a, c, g, or t
  misc_feature (455)..(465): n is a, c, g, or t
  misc_feature (565)..(573): n is a, c, g, or t
atacaaatacaagttaattagctctattaagttgcaattttatctttataaagctttgtaaagttatgaacatggaaaccctaagaatcacctaagctttttacataagtaaatttcaagttgacagtctgtccattttgaactatttataattaacaggacacttaacacagtaatatcttagacaaggaagagggcattaattctgcaggcaggtagcaatgaaaatgccaaacctgaacaatcagtcactatttccttatacagtttgagtaaaagaggtagactacagaaagnnnnnnnnnngtgaatataaaatgtatcttccccaaatacaactctacttcaataagtcttgaagattaccgatgacatcaacaaaaatgaatgaactcagggaatgagttctttctccccatcaaagaaaaaaacagcatgtgtaattttaaatttgnnnnnnnnnnngaatggcaatttgcaagcaaaagaaaaccagattcacattctactatttacatttgttctattcacaggtcaaaaataaaatatttcattagataatttnnnnnnnnncacttttttaaaacaaatgtattttactccatcaatactgcaaggaagataactgaatttagaaatgctctctctctacagcaaagttaacttaacttttcggggcccaactggcctatcatttagatctttaatagcagccatagcttcattatagtttatcatagcaacaatggcttcccctgtaggtaagccttgctcattatactgtatcgaaactgaaacaggtatgattctgtaaccatggaaaaagtctaaaattt

SEQ ID NO: 250432 - DNA, 631 bp, Homo Sapiens
gaggaggaagagaaaggcagagagagtcgggttacaagatggcggatctgtagtagttaccgcggcggcgggagagcaagcgagccctggggggcaaagagacgggagagtgggtgtatgcgcgggtgaagtgagaggtaacggggcctccgggcggagaggcctcagtggctcttgtcaccccttctcgcggctgaacctttggagccatggtgaattcgggcctctccgaagccgccgccgccgccaccgccactactgcctttaccgtctcctaagagtgaggagcgcggacgaggtaagcgaggaggcggcggctggagcggtggagacagcagccaccatgtcggatacgcggcggcgagtgaaggtctataccctgaacgaagaccggcaatgggacgaccgaggcaccgggcacgtctcctccacttacgtggaggagctcaaggggatgtcgctgctggttcgggcagagtccgacggatcactactcttggaatcaaagataaatccaaatactgcatatcagaaacaacaggatacattaattgtttggtcagaagcagagaactatgatttggctctgagttttcaggagaaagctggctgtgatgagatctgggaaaaa

SEQ ID NO: 250433 - DNA, 898 bp, Homo Sapiens
  misc_feature (487)..(487): n is a, c, g, or t
  misc_feature (641)..(671): n is a, c, g, or t
ttgaactcgactaaaagcaggctggtacaggtccggaatcctcgggatatcgtcgaccacgcgtcgccacgcgtccgtcacaatgaagaatccgtttcttacctattcagccaggtccctttataatacagtaacttctgaggctttttaagaataaaatccaccccaccccttgtttccccttggtatttgatgacaaattcagcagaagacccagcttgctccacagtagctggctacatcccacatcaggtatatcagagcttatccgaaatgaagaaagaaggattgagattaactgctgggacctcctacctgcattatctcattctggcttccttgataattctgtgagcctcgcagctttaactatagctcagctgctacaagatttcagacttttgaggatgttgtgtgagggtgtttgactgtgactggagaagctcagactactctgcatgtgaatgcttcaggggttttctttgtntgagaacaaccagcaacaaagccaacccatgtgtgaccagttctccccaaggtctatgctaaattatagcaagagccctgggcaacccaaacctagtcctggtagctgagcaccctgtaaggcaggagcaggcagctcagcttgagcagacatnnnnnnnnnnnnnnnnnnnnnnnnnnnnnnnaggcagcacagtgcagcaaatgtttcttgggaggaagaagcctgatccatcaccatctgttgactatgtagcttggattctccttggtacctatccctttcgatttggttttacttcatctatctgatcctttcctggcaaatatctctgggccaaatgaacttgtccactaggtcttctggaaggcaacatgtttcctgctatgtaattggtacctctttgattgt

SEQ ID NO: 250434 - DNA, 610 bp, Homo Sapiens
cccaagaggattcaacgtatgaacagcaccttttcagtaaattcttttgaaaaaactgatgtcgcaacaggatttgatcccctctctcttttggttgctgagactgaacagcagcaaaaagaagaagaggaggaggatgaagatgatagcaaaagcatttcaacaccatctgctaggcgtgatttagctgaagaaattgtgatgtatatgaataacatgagcagtcctttgacaagtcgtacaccaagcattgatgtacaacgggcatgtgatgataaattaaataagaaaagtccaccattggtaaaggcatgcagaagatctagtctgcctcctaattctcctaagccagtgagacttaccaaatctaaaagttacacaaaaagtgaggagaaaccaagggatagactttggtcttctccagccttctcacctacttgcccatttagggaagaatctcaggatacattaacccactcatcaccttcatttaacttagatacactactagtacctaaactagatgttctaagaaacagtatgttcactgctggaaaaggagttgcagagaaagcaagcaaatggtattcaagattcaccatgtacacca

SEQ ID NO: 250435 - DNA, 1181 bp, Homo Sapiens
gaccagtcgcctgtgtacctttgtactttctacagtgaaagttgctacaggatctccctttctcaataaattcatctgcggtggagaaaatcagcatgagtactacaggccaagtcatcagatgcaaagcagccatactctggaagcctggtgcaccattttctattgaagaggtagaagtggccccaccaaaggcaaaggaagttcgcataaaggttgtggccaccggactgtgtggtacagagatgaaagtgttggggagtaaacacttggacctcttgtatcccaccatcttgggccatgaaggggctggaatcgttgagagtattggagaaggagtaagcacagtgaaaccaggtgacaaagttatcacactctttctgtcacagtgtggagaatgtacctcttgcctgaattctgagggcaatttttgtatacaattcaaacagtcaaaaacccaactgatgtctgatggtaccagcaggtttacctgcaagggaaaatcaatatatcactttggtaataccagcaccttctgtgaatacacagtgataaaggaaatctcagttgccaagattgatgcagtcgctcctctagagaaagtatgcctaattagctgtggcttttccactgggtttggtgctgcaatcaatactgccaaggtgactccaggttctacctgtgctgtgtttggcctgggaggagtcggcttgtctgttgtcatgggttgtaaagcagcaggagcagccaggatcattggagtggatgtcaacaaggagaaatttaagaaggcacaggaattgggtgctactgagtgcctcaaccctcaggacttaaagaaaccccattcaagaagttttatttgatatgacagatgctggtatagacttctgctttgaggccattggaaatctggacgttctggtatgtaatcctctggagtgaaaattaccaatacttttaccagtcatcgtttagattatagttgaatgagctttctaaaattccctccactttgctctatttaattttccttgtgttccatgacatctcagctggtgccatctgtgtactcttacaaatttgttcactatcccagatactaaatctagaactttcatataatttcaaagccagaagttttaagcaagataagattaaaatttgattaatgaccttaa

SEQ ID NO: 250436 - DNA, 350 bp, Homo Sapiens
ggagtggaggagtgattcaagccaaccttaatctagatgaaatggttaggtcagaagccagatataggtccactgcgaagtgaatcagaagtcagaatatagaaatgggattgggtgaataattcttctaaatcatgaaaattacatcaaatgccattgagttggtgaaatatccgggtcttgcatgtattacattgtacttaaagtacacaggatacagcggatacaccagttttcattaattcaactgcttcattgattttatcaagattcagagtatgagtaattagtggatctagattcaacttctctgccatataatcagcaaccagtttaggtatgtgctgtct

SEQ ID NO: 250437 - DNA, 1067 bp, Homo Sapiens
gtatcattgaagtggatgtcaacaaggagaaagttaagaaggcacaggaattgggtgctactgagagcctcaaccctcaggacttaaagatacccattcaagaagatatattcgatatgacagatgctggtatagacttctgctttgaggccattggaaatctggacgttctggcagctgccctcgcctcctgcaatgagagctatggggtctgtgtggttgttggggtgttgcctgccagtgttcaactcaaaatcagtggccagttgttcttctcaggacgttctttgaagggttctgtttttggaggctggaagagcagacagcacatccctaaactggttgctgattatatggcagagaagttgaatctagatccactaattactcatactctgaatcttgataaaatcaatgaagcagttgaattaatgaaaactggaaaatgtatccgctgtatcctgttactttaagtacaatgtaatacatgcaagacccaaaggatatttcaccaactcaatggcatttgatgtaattttcatgatttagaagaattattcacccaatcccatttctatattctgacttctgattcactccgcagtggacctatatctggcttctgacctaaccatttcatcaaaattgttcttacgtaacccagtgtcaccaaggatcagcctccttttcagagctagattaaggttggcttgaatcactcaactccacatccttcagacataaaaggtcaatgcaagatgctcccattttcatagttcctctacctgtggacctttatattcttgtacactatatgtctctctcacaggcctagacatgaaactctgccattttactctaaagaaacaaaactccgcattaatgagtttattgaagattcaggttaacctggaatcaagttaacccagtctcaaatgctcacttatcctatctccttggcacaaatctctcctctcctgggattgccaaagaaaattcaaaattattcttcaattagtcaggatgatttgactatcagcaggttcatagtacccatcttcataact

SEQ ID NO: 250438 - DNA, 964 bp, Homo Sapiens
  misc_feature (57)..(89): n is a, c, g, or t
gacgaggtttcaccgtgttagccaggatcgtgtcgatatcctgacctcctgatccannnnnnnnnnnnnnnnnnnnnnnnnnnnnnnnngcatgagccaccacgcccggccaatatattggtttctttatgaaaattatactggatctgttacagcttttgtctggtcctctgagccccagtgagagtttcctgaggtacctcacccttccacaagacaacaggcttgccattgatctgcaacaaacggcggttgttgtcatggcccatttagaccgtctggctacaccctgtagatgcctcctctgtgtagctctccgacgtctcataagagtcattttttacaggtcagaactgtagaaataatgagaaagtgacatttgtacgcatagctgatttggagaaccataataacgatggaggcttctggactgtgattgacgggaaagtgtatgatataaaggacttccagacacagtcgttaacagaaaatagtattcttgctcagtttgcaggggaagacccagtggtagctttggaagctgctttgcagtttgaagacacccgggaatccatgcacgcattttgtgttggccagtatttggagcctgaccaagaaggcgtcaccataccagatctggggagtctctcctcacctctgatagacacagagaggaatctgggcctgcttctcggattacacgcttcctatttagcaatgagcacaccgctgtctcctgtcgagattgaatgtgccaaatggcttcagtcatccatcttctctggaggcctgcagaccagccagatccactacagctacaacgaggagaaagacgaggaccactgcagctccccagggggcacacctgccagcaaatctcgactctgctcccacagacgggccctgggggaccattcccaggcatttctgcaagccattgcagacaacaacattcaggatcaca

SEQ ID NO: 250439 - DNA, 639 bp, Homo Sapiens
caaattaaatcatagttctaattcttctacaggcagaagagccctttttgtaatccgagaagcaggcccagattcctctctgtgtctatcagaggtgaagagagacttcccggatctggtatggtgacaacttgcttggtcaggctccaaatattggccaacacaaaatgcgtgcatggattcccggctgacttcaaacacgaaagcagcttccaaagctaccactgggttttcccctgcaaactgagcaagaatactatttcctgttaacgactgtgtctggaagtcctttatatcatgacactttctcatcaatcacaatccagaagcctccatctttattatggttctccaaatcagctttgcatataagtgtcacttcctcattatttctacagttctgaactgtaaaaaatgactctcttatgagacgtcagacagctacacggcagaggcatctacagggtgtagccagatcttctaaatgggccatgacaacaaccgccgtttgttgcagatcaatggcaagctcgttgacgtgtggagggtgaggtacctcagaaaactctcactggggctcagagggccagacaaaaggtgcatgttgccctcggagggaggcgtatccttaccgcaaaa

SEQ ID NO: 250440 - DNA, 463 bp, Homo Sapiens
  misc_feature (57)..(57): n is a, c, g, or t
  misc_feature (299)..(352): n is a, c, g, or t
  misc_feature (391)..(391): n is a, c, g, or t
cgtgttggcccccaggctggcctcaaaatccctggatccccccgtgatgtgcccccngctcggccctcccccaaagtgctggggatgaacaaagcatgaagcccaccctcgccccgacccacgtgtcatttttccttccttgcattccacaagagatgggctctgtggtcctgtggaatgaaatggttaaagatggagaaattgtatacactggaacagaatcaacccagaacggatagctccctcctgggaaaagtagagacgaggtttcaccgtgttagccaggatggtgtcgatannnnnnnnnnnnnnnnnnnnnnnnnnnnnnnnnnnnnnnnnnnnnnnnnnnnnnatgagccaccacgcccggccaatatattggtttctttantgaaaattatactggatctgtaacagatcatagtgtcgaaccaagtgggacaaagaaagatctgaatgacaa

SEQ ID NO: 250441 - DNA, 611 bp, Homo Sapiens
ggtcgctcttccaagatggcggcgcgtccgtcgcgagcgaccgggccgaggggaggccagcgaagccgagtaaaaccgccgcccgggagaagactgaaggagcagttgccgccgttggcggcggcccgagcagttttcgctgctgctacggctgttgccatgaggcgaggctagggaggacctcacttccccggggtgtaataatgttaactgaggccagtctatccatatggggatggggaagccttggcattgtcctttttctgataacctttggaccctttgtaatattttatttgacattttatatcctctgctttgtgggtgggggtttagtggttactctcctgtttggaaaaacaaactcagagaagtacctagaacagtgtgaacactcatttcttcctccaacatcacctggggttcctaagtgcttagaagaaatgaaacgggaagccaggactattaagattgatagaagattgacgggtgccaatataattgatgaacctctccagcaagttatccagttttccttgagggattatgtccagtattggtattatacactaagcgatgatgaatcttttcttcttgaaattaggcagact

SEQ ID NO: 250442 - DNA, 590 bp, Homo Sapiens
aagagcaccatgtgtatgagccacacaataaatatctactgtataatatgtctcttcttgtttttaaccttcatagataagactctattgaattgggacattagtccagcaagccattcggtctctgtctcttctatggagggaaaggtttaaccatcaaagactaggtgcatctcccaaacaacctgaatttaatattcaaatatgtatctaaattcatttgttacatttttgtgttcagcttacatattactttttgagcgacatctattcaaggcctactacttgctgctctacaaaatattgccatgctctatttgcccattaactatttcttaaccttcaagggacatgctcagttctgatataccaagatttggtatttaccctcccagcctacatacttccaatcttaagagaacaatttttagactacattcaaatatagacctctccaccccatcaactattttatctctcctctcctatctttcttgacaaagagtgattagaaatatgcaatgtattttcattcttaaaagttctatgctaggtggctcatatattaagtcttaaataattacaacttg

SEQ ID NO: 250443 - DNA, 1574 bp, Homo Sapiens
gaatactttaaaacaaaatgaagcaagaagagcaacaacttcaggggaacataaatgagctaaagcaatcaagtgaacagaagaaaaaacaaatagaagcactccaagggagagcttaaaatagctcgtgttacagacagacagagcttgcagaataaactacagacagcagttaacacaggcagcccaggaacttgcagcagagaaagagaaaatatcagtattacaaaacaactatgaaaaaagtcaggaaactttcaaacagcttcaatctgatttctatgggagggaatctgaacttctagccaccaggcaagatcttaagtctgtagaagagaagctttctctagcacaggaggacttgatttcaaacagaaatcaaattggaaatcaaaataaattgattcaagaactgaagactgccaaggctacattggagcaggattcagcaaagaaagaacagcaattgcaggagcgatgtaaagcactacaagacattcagaaagaaaagtcactgaaagaaaaagaactggtaaatgagaagtctaaattggcagagatagaagaaattaaatgtagacaagaaaaagaaatcactaaactaaacgaagaactcaagtcccacaaactagaaagcataaaggagataacaaatcttaaagatgctaaacagcttctaattcagcagaaattagaacttcaaggaaaagcggactccctgaaggcagctgttgaacaggagaagagaaatcagcagatactaaaagaccaggtgaaaaaggaagaagaggagctgaagaaagaatttattgagaaagaagctaagttgcattccgaaataaaagaaaaggaagtaggaatgaagaagcatgaagaaaatgaggctaaacttaccatgcagattacagcattaaatgaaaacttaggcactgtgaagaaggagtggcaatctagtcaacggagagttagtgagcttgagaaacaaacggatgacttacggggtgaaattgcagtattagaagcaacggttcagaataatcaagatgaaaggagagcactactggaaagatgtcttaaaggagaaggttgaaatagaaaagcttcaaaccaaagtattagaattgcaaagaaagctggataatacaactgcagcagtgcaggagctgggcagagaaaaccaatcacttcagatcaaacatacacaagcgttgaatagaaagtgggccgaagacaatgaagtacaaaactgtatggcctgtgggaaaggcttttcagtaacagtgagacggcatcactgccgacagtgtggaaatatcttctgtgctgaatgttcagccaaaaatgccttaactccttcctccaagaagcctgttcgtgtctgtgatgcatgtttcaatgacttgcaaggataatgggttatcacaacttcagagtaatattacactaacattagatttttaataaatgtacttaatagaggtcttggactactatttggtttggacactggttgcaatactagaccaaataggaattagtatattttggaatggtatggatatcaagtaaaactc

SEQ ID NO: 250444 - DNA, 537 bp, Homo Sapiens
ttttcgtatctgttaataggcatgttaaaggattatgaaaggcattatactaagagagaaaagctgactattttctcaaaatataattataaaaaaataaaactatattttttaaacaagattatatcaaggtttccaaatgaatgaaaccaaaagtcactattgtttaataaaatttcaactgcaaaaacaaagaataaaagaatgaggctactctagaaaatatgctcttaagaatggaactgaaccatcaatttacaaaagctaagaattaccaatttgatttgatgaatgatgctatgtttaattcacatccctcaaatttctgagtaataaaaacatatcaatctccagtcttctaaatgatgttccattatgattaatggtcatgatattggtgtttttcaataaaataaaattattccttactaggaaggtcaggctaaaagtgaatttaaaaagctcttaaaattcaaaatcatcaataaaatatttgtcttccccaaattaacaaatccagcaaaaacccatatgtac

SEQ ID NO: 250445 - DNA, 1186 bp, Homo Sapiens
  misc_feature (322)..(368): n is a, c, g, or t
aacaactaatgaattttatttcaggtaaataaattcccacatacagtaggacgtttataccatgaaacaattagcattttattgctagtgcatataatgtcacatttgatacaattttagtacaagtgaaaaaatacactgtggctaacattgaaaagctgcaatcacatttatatatcatatatatttctttacaaattgccagtagtttgagataatagagaagtataaactactgacattcatatggctccacttcaaatatatgaattgttcgactataaatatattttgaaatacatttgttttctaaagaaacgtnnnnnnnnnnnnnnnnnnnnnnnnnnnnnnnnnnnnnnnnnnnnnnnagttacaaataccaccaggaccttctgtggatcgcatttatgcatggaaatgtcaccttgccaacagttctgattggaacctgaaaccctgctgtggcttcaggggggggtagtggcaagatgatggtttattcactgattttttcgcttctgatttcggaaacctcagagtttgttagtgcctccatggcatacataggcttcagaggcaatcacaaaacccagtcactcaaagcgagctctcagatttaaaattgcatttgattctgtaaagacttgtcttttgcgggtaagcagggggaccattacacatccccaggagagggccagctccattctggaggaggcccaaagacggatctcacagagggcccgagctgtggggcaggccctgggaggagagggatgcagggcacgagccccagcaatcaccctcttcccggctggtgcggcgctgatcaggctacagaaatgagaagcagaagcaagattaagcatgctctcggagtcggggagagagtaggaatagctgggagaggggtctctgagcacagtcccagtaatagtggcttctacatggagcccacagagccaatcactgaggttgaaagaggaggtgaaggcagtggcggcgcccagccccagtcggtatctgagtgccacagaggccttcctcttgggaggggcgctgctgcgggagcctcagtgtctgaagaaaggacactttttccagctccctgttaagccaccacctgactgtgcccagtactccccaggggagcagaggagatgctccaaacaagccaaattcagatctt

SEQ ID NO: 250446 - DNA, 743 bp, Homo Sapiens
gtagtggaggtctagtgtggcaggctcaaattgaatatacacaggcaagccactggggtactggaagaaagtatcagaacttcaatttatatttatttttagcacattcttccaaaaatctatttgtatgttttatattaagcataacacagtacagaacttgtgcatataattttaaaatgtgcatacatcgatgatacatgcttgaatactttctactgactagggtgggatggtcgggggagttggtgaccacctttcagtaagaactcactacctcacaatgccacgtcagcattccatcctgcaatgattcagaccagttaagacatgggcttccacatcagcccagcagttaactctcagatggaaaaaatgatggggaaacaattggagaagttagacaaaatcagaatactggtctgtggtggccagtgtttgtgaaggaacttttgtcttaaagtttttagaaggaagcttagggatttttgtctttttacagaaaacagagctgtatcctcaggacctagtttactaactgtcttcctgggagtggtgtgcattgcagccctgatgctgcctacactgggggatgtggaatcgctggtgcctctctacctccacttaagtgtgaatcaaaaattagtggctgcttatatcttaggtcttatcacaatggccatacttagaacatgagcaaggatttcaattgacttctgaagtaaatctgtcttgaaaatatg

SEQ ID NO: 250447 - DNA, 732 bp, Homo Sapiens
gggagagacgctgacaaaggagcggaggagcagtcgcagctgctttccgaggaagccggtgttgccgagattgccaaaatgctttggagtttttaactgaatctaagaaaagtccaaaatagatttgagactgtaaaaacagaaactgcagcaagggggattcagtgccaatgcatcaacaaaaaagacaaccagagttagtggaaggaaatcttcctgttttcgtgttccccacggagctcatattttatgcagatgatcagtcaacacataagcaagtgttgacactgtacaatccctatgagtttgccttaaagttcaaagttttgtgtactactccaaataagtatgttgtcgttgatgctgcaggtgcagtaaagcctcagtgttgtgtggatattgtgattcgtcatccagatgtttcgatcctgtcactatggtgtaatagacaaattccgtctccaagtttccgagcaaagccaaaggaaggctttgggaagaaaagaggttgttgctactcttctcccatcagcaaaagaacaacaaaaggaagaagaggaaaaaagattaaaggaacatttaactgaaagtttattttttgagcagtcgtttcaaccagaaaacagagctgtatcctcaggacctagtttactaactgtcttcctgggagtggtgtgcattgcagccctgatgctgcctacactgggggatgtggaatcgctggtgcctctc

SEQ ID NO: 250448 - DNA, 694 bp, Homo Sapiens
aaggctgttttaaaggataccttggaaaaaaagggggtattagggcatttaaaagcaaggatccgacctgaagttttcaatgccctagatgatgaccgtgaaccccgaccatcattgtctcatgaaaaccttctaattaatgaattaattcgagagtatttagaattcaacaaatataagtatacagcatctgtcctcatagcagaatctggtcaacctgtagttccgttggacagacagtttctcatccatgaactaaatgcatttgaagaatcaaaggataatacaatacctcttttatatgggattttagcccatttcatgcgtggaactaaggatggcatccagaatgcatttctgaaagggccttcacttcagccttcagacccaagtcttggcagacaacctagtagaagaaagccaatggatgaccacctaagaaaggaggaacagaaaagtactaacattgaagatcttcatgtttctcaggcagtcaacagataatgctttgtttggggtatcttttgtcttaaaattgtattattaattaaataacttatttattgtcccaatgttaccaaaatgcaccactaatgtttgtagaaattggagtttctacaaaacacccctcatgtttaactacatttgtgaataaaagctaactcttgtcatctagcttattggatttgacttg

SEQ ID NO: 250449 - DNA, 1241 bp, Homo Sapiens
agggaagtaactgaagagtttattatactttcaacttttctgcagatgtaacattttttaaataaaaagttgagaataaaaaaatcacaaaaatagttttgctgaagaaaataccacacattcctttttactataatatttaatataataatatacacttatacattggtattatttacacttcattaaaaaaaaccccattcaacctgaaattaactaccttaaacacactatttaactttcagtgctaatgtattaatttcttaaatataaatcaaaatagctcaatatctaaattactgataactagatgcagatgtaaggatcatgaatcaatacttccattaagttaaaaatatcaataattttttgcaacatttcttctttgtttttcttctttgtctagaatagtctgttttaagctcaaagtagcatcttgaaatccaggatttaagtctaagaccttcttgaaatcttccaaagcatcatcaaaatatcccagcctatacagtatcaaccctctgttgtaatatggaacttcaaaattgggttggacttctatggcagatgtgtagtcatccatggcttcataaaaatcaaccctgaagtacttgatttgccccctgttgttatatgcagtagccaaatcctcagggctgcatttgcgtcgcggcagctggctcctcacgggtgggcttctccccgcgttctccgccgccctcgtcctaggcctcgcctaggcctttctagaaagacgaacgtccgcccgctcagtcctagtgctgggttataacaagcgccgaccgtgagctccagaggcaaagataggagcccaaacaaccccaacgtcgcctccacccggggtcgccgcggccccaggtctcgcgatagttacctcccgggactctcgtcgctggaggccgcgcaagcgcaccggcgaatgtaagcggagtacagtgcctcggcctccgcgtactctccattgttgaaatgagcctgggcgagtgttagggttgcgtggctttcttgccgctgtccttccatagcagccgaggcctagttttcggtgtagaatgggggttgacctccgagcggttagaggtggcaccacaaagccacttccacaccctggaatctaccttgacagccaaccttggcgctaggtttgtgccttatggggatccgtcatctcgcgagataacggttccgctgctggcggggcgtttgcagtggcccttgtc

SEQ ID NO: 250450 - DNA, 825 bp, Homo Sapiens
atacaaacctagcgccaaggttggccgtcaaagtagattccagggtgtggaagtggctttgtggtgccacctctaaccgctcggaggtcaacccccattctacaccgaaaactacgccttggctgctatggaaggacagcggcaagaaagccacgcaaccctaacactcgcccaggctcatttcaacaatggagagtacgcggaggccgaggcactgtactccgcttacattcgccggtgcgcttgcgcggcctccagcgacgagagtcccgggagcaaatgcagccctgaggatttggctactgcatataacaacagggggcaaatcaagtacttcagggttgatttttatgaagccatggatgactacacatctgccatagaagtccaacccaattttgaagttccatattacaacagagggttgatactgtataggctgggatattttgatgatgctttggaagatttcaagaaggtcttagacttaaatcctggatttcaagatgctactttgagcttaaaacagactattctagacaaagaagaaaaacaaagaagaaatgttgcaaaaaattattgatatttttaacttaatggaagtattgattcatgatccttacatctgcatctagttatcagtaatttagatattgagctattttgatttatatttaagaaattaatacattagcactgaaagttaaatagtgtgtttaaagtagttaatttcaggttgaatgggttttttttaatgaagtgtaaataataccaatgtataagtggatattattaaaataaatattattgaaaccaaacaacagg

SEQ ID NO: 250451 - DNA, 820 bp, Homo Sapiens
  misc_feature (14)..(14): n is a, c, g, or t
  misc_feature (32)..(32): n is a, c, g, or t
  misc_feature (460)..(460): n is a, c, g, or t
aaaaatatcaatanttttttgcaccatttctncttggttttcttctttgtctagaatggtctgttttaagctcaaagtagcatcttgaaatccaggatttaagtctaagaccttcttgaaatcttccaaagcatcatcaaaatatcctgtaccagaacccaaaaaatggaaaagagaaaagaaaccgagtatttatatatattattcatggaaaagctttgatacatgtacttttgcttttatatttatgagctttcagtcacttctagtaaaggaatctttttatcttaataatatagagatgtgtatatcaaagtaattttgtgtgcccttagggaataatacacctaaaattagctatgggtttatttattgagatttaacagataaatattatcaatcatcttaaaattttaataaaactgtatcacctgttttacataattgcagtaaaattaangaaacgggaactaattttcctttttgacactttaaatgaagaaacactacctatggtccctttaatccaagaatctaaacttcactttctattgtcttgtgtgtcttcaaagattttaactcagaaaagtttcacaggtgaacatctgaattgccctcatttcacagctgggaatgcacaagcacaaagtaatggggtcacccctgctcctgcgcccaggtccaattcccaccccagtgctctgctgtgatctataacgcctatcaaaagcctaaaataaactcagggacacttcctttgttccaagctctaaacctaaatttcacagaactttaaaatttgattaccacgttagtttta

SEQ ID NO: 250452 - DNA, 809 bp, Homo Sapiens
ggaggtgtccccttgttccaagatggcacccacatacagcacggactcaacagacagttcaactgcatccccttcgtaaggattcgtgtagttctggtcttggaagagggccatcctgacaatgaactctccattcccgtccacactgacgttcagggaacttacaatgggctgcaaggcagcttggaggctgactttcatgtccagtgggtaggcacattggaagttgatgttgaggatggtgtctctgatgatgaaatcattgaccaaggagagggtgtttttgtagatggcatgggtttgatttctctccagaatgttcctgcaggcactagcctggacggggctggtcacagatacccagttcctctcctctgtctgcaagatgctgctgcagtttgggtctcgcaggtaggcaatgacctcctcccccaaacccaggcctcccagcaaacatttgtccaccttcaccttgatctccctgggcccacagtctagctgaggctgcaaactgtggacatcagaactattgaggtcctgtctgcagaaacagccccaggtgctgttgagggcaaggcactcctcctcggggcggcaggccttctcacacttgtcctccacagtggatgggtctcgctgcactgcagatgcctgggtcagaatgcaggagaccaaggccagccacaggaggccagagcccaccatcctttccataaggtgaggcatgcaggtcactttgctgtatgcagacttcccatgcagctccgatgagaacacaaagcgttcctcctctggccagccatgggaat

SEQ ID NO: 250453 - DNA, 1293 bp, Homo Sapiens
  misc_feature (901)..(1089): n is a, c, g, or t
gtgtggttggtgatgccatccccaagggcagggtgggtcccattcagccacatgggagcgtctgtctggcatcggtgcacctggacacaggtctccgacatccttactcctccttcccctacaaagcggtaccagccgctcatgtttttatcgcacccctgggaccctgctgagttctctgtgcttcggaagggttcatccaggagggtgtaattctgacaggggtcaaaacagacatgagcctctggggtgccaggagctccgcagtccaggtccagcccatacgaactggcttcaatggggtttccataacctgggaaagtgacagagtgcagttgggtttactgagcaatgccagaacctacaggattttttcccctccatgctctattttggctgtgctaaggactccaatgaggacaatacacacacggtccattaattaaacatcaacttcatcaccttgggggcagaataatcagtgaggaccttctgtggtattttacaggcattgaggacatcagggctaccgtcctgcacagcctccctccctgcctcagagtaacaaagttctttcctgtgcatcatgcacacagcagccttgtttgaccaatatttgtttttctcattataaatgtaatacaggctcactgaaaaagaacctcaaacatcattaaaattaataaagcagaaatgaaagttgtcataagcccatctcatccccagaagtaacaataaatttgtaatatagccttcttcttaggcaagtttaaaatatattgctttcttaaaaataaaaataagtttaattctgtgcaacatctttttttccacttgcattttttacttaatataacatagacatttttccataccagtagcacagtctattgcaagaacnnnnnnnnnnnnnnnnnnnnnnnnnnnnnnnnnnnnnnnnnnnnnnnnnnnnnnnnnnnnnnnnnnnnnnnnnnnnnnnnnnnnnnnnnnnnnnnnnnnnnnnnnnnnnnnnnnnnnnnnnnnnnnnnnnnnnnnnnnnnnnnnnnnnnnnnnnnnnnnnnnnnnnnnnnnnnnnnnnnnnnnnnnnnnatctaacaagaccatttctgattgttgatctaccatttttaaaaacagttttagaaactgtgatgtatgaagaggcagagaagtgaaggaggaagaccccccggctggtcaggctccgtttaaatccaattctacacctgatgaatgggtgaccttggcaggtgacttaagtcccctgagactcattggcaaacccacacctgt

SEQ ID NO: 250454 - DNA, 619 bp, Homo Sapiens
  misc_feature (522)..(522): n is a, c, g, or t
  misc_feature (562)..(562): n is a, c, g, or t
tacagcaaaaataacagctaatacataatgctcacaatgtccttgttgctatcctaagtacttcaaatgtattaactcatttgatcctctccccagttccacgaggtaagtgctacctaattaccccaattaggggcacagagagattaaggggctctcctagtatcacagagctggagcatggtacagctgggatttgaacttggcattctagctccagcatccatggccttaaccaccatgctgtcctttctcattttgattgaataggctaatacattccttgtccttagaatagagtcttgcctgtagtaagtgttcaggtggcagctttaaggctctcacttatcccattggactgggagtcaagcttgatgcttccactaagtatcacacaaccttggcaagattcttgtgccccggtgaaatgaaaggggtggactttgggggccctcaagtccaacccgcactgcatcctgatcttctctctccatgccccatcacctagacccatccactggnggaggacaagtgtggagaaggcctgccgccccgagggaangagtgccttgccctcaacagcacctgggggctgtttctgcagacaggacctcaataa

SEQ ID NO: 250455 - DNA, 743 bp, Homo Sapiens
gattcccatggctggccagaggaggaacgctttgtgttctcatcggagctgcatgggaagtctgcatacagcaaagtgacctgcatgcctcaccttatggaaaggatggtgggctctggcctcctgtggctggccttggtctcctgcattctgacccaggcatctgcagtgcagcgaggttatggaaaccccattgaagccagttcgtatgggctggacctggactgcggagctcctggcaccccagaggctcatgtctgttttgacccctgtcagaattacaccctcctggatgaacccttccgaagcacagagaactcagcagggtcccaggggtgcgataaaaacatgagcggctggtaccgctttgtaggggaaggaggagtaaggatgtcggagacctgtgtccaggtgcaccgatgccagacagacgctcccatgtggctgaatgggacccaccctgcccttggggatggcatcaccaaccacactgcctgtgcccattggagtggcaactgctgtttctggaaaacagaggtgctggtgaaggcctgcccaggcgggtaccatgtgtaccggttggaaggcactccctggtgtaatctgagatactgcacagacccatccactgtggaggacaagtgtgagaaggcctgccgccccgaggaggagtgccttgccctcaacagcacctggggctgtttctgcagacaggacctcaatagttctgatgtccacagttt

SEQ ID NO: 250456 - DNA, 683 bp, Homo Sapiens
gcccgcgccggctgtgctgcacagggggaggagagggaaccccaggcgcgagcgggaagaggggacctgcagccacaacttctctggtcctctgcatcccttctgtccctccacccgtccccttccccaccctctggcccccaccttcttggaggcgacaacccccgggaggcattagaagggatttttcccgcaggttgcgaagggaagcaaacttggtggcaacttgcctcccggtgcgggcgtctctcccccaccgtctcaacatgcttaggggtccggggcccgggctgctgctgctggccgtccagtgcctggggacagcggtgccctccacgggagcctcgaagagcaagaggcaggctcagcaaatggttcagccccagtccccggtggctgtcagtcaaagcaagcccggttgttatgacaatggaaaacactatcagataaatcaacagtgggagcggacctacctaggcaatgcgttggtttgtacttgttatggaggaagccgaggttttaactgcgagagtaaacctgaagctgaagagacttgctttgacaagtacactgggaacacttaccgagtgggtgacacttatgagcgtcctaaagactccatgatctgggactgtacctgcatcggggctgggcgaaggagaataagctgtaccatcgcaagt

SEQ ID NO: 250457 - DNA, 2087 bp, Homo Sapiens
ctgcaggaattcggcacctcaggttctctatcgacgagtctggtagctgagcgttgggctgtaggtcgctgtgctgtgtgatcccccagagccatgcccgagatagtggatacctgttcgttggcctctccggcttccgtctgccggaccaagcacctgcacctgcgctgcagcgtcgactttactcgccggacgctgaccgggactgctgctctcacggtccagtctcaggaggacaatctgcgcagcctggttttggatacaaaggaccttacaatagaaaaagtagtgatcaatggacaagaagtcaaatatgctcttggagaaagacaaagttacaagggatcgccaatggaaatctctcttcctatcgctttgagcaaaaatcaagaaattgttatagaaatttcttttgagacctctccaaaatcttctgctctccagtggctcactcctgaacagacttctgggaaggaacacccatatctctttagtcagtgccaggccatccactgcagagcaatccttccttgtcaggacactccttctgtgaaattaacctatactgcagaggtgtctgtccctaaagaactggtggcacttatgagtgctattcgtgatggagaaacacctgacccagaagacccaagcaggaaaatatacaaattcatccaaaaagttccaataccctgctacctgattgctttagttgttggagctttagaaagcaggcaaattggcccaagaactttggtgtggtctgagaaagagcaggtggaaaagtctgcttatgagttttctgagactgaatctatgcttaaaatagcagaagatctgggaggaccgtatgtatggggacagtatgacctattggtcctgccaccatccttcccttatggtggcatggagaatccttgccttacttttgtaactcctactctactggcaggcgacaagtcactctccaatgtcattgcacatgaaatatctcatagctggacagggaatctagtgaccaacaaaacttgggatcacttttggttaaatgagggacatactgtgtacttggaacgccacatttgcggacgattgtttggtgaaaagttcagacattttaatgctctgggaggatggggagaactacagaattcggtaaagacatttggggagacacatcctttcaccaaacttgtggttgatctgacagatatagaccctgatgtagcttattcttcagttccctatgagaagggctttgctttacttttttaccttgaacaactgcttggaggaccagagattttcctaggattcttaaaagcttatgttgagaagttttcctataagagcataactactgatgactggaaggatttcctgtattcctattttaaagataaggttgatgttctcaatcaagttgattggaatgcctggctctactctcctggactgcctcccataaagcccaattatgatatgactctgacaaatgcttgtattgccttaagtcaaagatggattactgccaaagaagatgatttaaattcattcaatgccacagacctgaaggatctctcttctcatcaattgaatgagtttttagcacagacgctccagagggcacctcttccattggggcacataaagcgaatgcaagaggtgtacaacttcaatgccattaacaattctgaaatacgattcagatggctgcggctctgcattcaatccaagtgggaggacgcaattcctttggcgctaaagatggcaactgaacaaggaagaatgaagtttacccggcccttattcaaggatcttgctgcctttgacaaatcccatgatcaagctgtccgaacctaccaagagcacaaagcaagcatgcatcccgtgactgcaatgctggtggggaaagacttaaaagtggattaaagacctgcgtattgatgattttagagatttctcttttttaaatggaattcgtaaagaaatataaaacttcagctcacaattaaaactgtctttttagttttggctttttattgttttgttggtgattttactgaaataaagttgagctacttcttctt

SEQ ID NO: 250458 - DNA, 707 bp, Homo Sapiens
gggggcttgggctcaggttctggtctctggtaagctacagagcagctgtgagtctctccagctggaagcatcatacaattttttcccatgacccctgcaccttccacatgttccccctgccctggcccccattcaccatagctggggaggctcaagggctccacgttcccaggaatgggccagggtgtccttgctccgtcctgcctgaacaacactatcggtccccatgagtagcattctacggttgaagtacctttgagaatacttgataccatttgatcctcacagagtctcagggatgagatttttaggcccagtgtactgatgaggaaactgctgttgagacttgcccaaggttcttggccggagcgcttcagcactgaaaccaaagttgtctctacccttggtctaggattctagactcatgttcttgcttctgtattgctaaggaatggttgggcagcggcctggcctcagctccttgaggtcctgagctgagtgtctgctcccatggtgtccccccacacataccatgtacacaccttgtcctgacctagagagtcctgagtggtggtggggggaggggactggctcaggggttagggcactgactcaaacctggctgggtggggagagaaagattgattaaagctagggagagagtgtgacaaaggcatcctactggttctctgggatctgcctgggcc

SEQ ID NO: 250459 - DNA, 1657 bp, Homo Sapiens
  misc_feature (1274)..(1290): n is a, c, g, or t
cccaggggcagggtaatgggttgcgatatgggctaagcagcatgcaaggctggcgtgttgaaatggaggatgcacatacggctgtgatcggtttgccaagtggacttgaatcgtggtcattctttgctgtgtatgatgggcatgctggttctcaggttgccaaatactgctgtgagcatttgttagatcacatcaccaataaccaggattttaaagtgtctgcaggagcaccttctgtggaaaatgtaaagaatggaatcagaacaggttttctggagattgatgaacacatgagagttatgtcagagaagaaacatggtgcagatagaagtgggtcaacagctgtaggtgtcttaatttctccccaacatacttatttcattaactgtggagactcaagaggtttactttgtaggaacaggaaagttcatttcttcacacaagatcacaaaccaagtaatccgctggagaaagaacgaattcagaatgcaggtggctctgtaatgattcagcgtgtgaatggctctctggctgtatcgagggcccttggggattttgattacaaatgtgtccatggaaaaggtcctactgagcagcttgtctcaccagagcctgaagtccatgatattgaaagatctgaagaagatgatcagttcattatccttgcatgtgatggtatctgggatgttatgggaaatgaagagctctgtgattttgtaagatccagacttgaagtcactgatgaccttgagaaagtttgcaatgaagtagtcgacacctgtttgtataagggaagtcgagacaacatgagtgtgattttgatctgttttccaaatgcacccaaagtatcgccagaagcagtgaagaaggaggcagagttggacaagtacctggaatgcagagtagaagaaatcataaagaagcagggggaaggcgtccccgacttagtccatgtgatgcgcacattagcgagtgagaacatccccagcctcccaccagggggtgaattggcaagcaagaggaatgttattgaagccgtttacaatagactgaatccttacaaaaatgacgacactgactctacatcaacagatgatatgtggtaaaactgctcatctagccatggagtttaccttcacctccaaaggagagtacagctcaactttgttgaaacttttaacatccatcctcaactttaaggaaggggatatgacatgggtgagaatgattacatcagagaacttcagcagtacaacagctagcccagaactgannnnnnnnnnnnnnnnngtaaatttgagacttatgtaagcgtgatttcaaaccataattcgtgttgtaaatcagactccagcaatttttgttgtatgattttgtttttttgtaaagtgtaattgtccttgtacaaaatgctcatatttaattatgaactgctttaatcactatcaaagttacaagaaatgttttgccttattgtgtgatgcaacagatatatagccctttccagtccatggtgtgttttgggaacttggggtttgggaacagggaagaagcagcaagccatggtcaggctacacgcctcaaaatgtggcagaatgaattatgggaaaaataaccctcaaaaatttttaccaaagctgtaaccattcccagagga

SEQ ID NO: 250460 - DNA, 478 bp, Homo Sapiens
gaaatgtatccagttacaattgtacttgcttaaagcacatcagatttgttttggacaacacccttgaccattttaaaactggaaaagtgatactgtatccttccatgggatggatgctttacagtagtcttattattaaagggtgattaatttggtcggggtaaaatgttaatttttaggtgatttttaagaattctgtgccattatgtcttctgtgtggatggttaattgtttaattagtacgtgttaattgtgtgatacagtcttctttgtggaacccaaaatcctctttttagctttatattttataaactgccagattgtacaacttttatgtgcatttttaaagcttgaagacatgagggtcattatctaagttaaacagcctatttttgtgcctcctgtacagttttataattctgctgatggcggcatcttatgtcgagccaaccacaataaagggaagtttaagttttgg

SEQ ID NO: 250461 - DNA, 570 bp, Homo Sapiens
tacggccgggcatctgaaatgagaggtggccgtgggtcgtaatccatcacttctggtgctccaacttggttacacatttccagaaaccagcacctccctgttgtccatgtctggtcatcagaggcctctctcctcaggtgggataaccagagaccaagaaagaaacatgtttctctcccttggaatttctcttccttagtcattttcagaaagttagcagtcggcaaccttaaggaggagtttcctatcatctctcctccacttcctcccctcatttcccccccgtcttctccttggatttcttcatcaatgtcactatgtgctgtccaggataaacaaagagtccctcttacctgcacaggcctcacctgccttccccccctgtcatttctgcagccagcctgtctcctgagcctggcctggcattctccaaagactccttaaggccacttggcttccggtctggctctaggcttcactgtctgcaccagagtggaaattgtcatgtgccctcagcaacattttacccctcccttccagaacagacacaggcatttcttccacaagcag

SEQ ID NO: 250462 - DNA, 948 bp, Homo Sapiens
  misc_feature (134)..(134): n is a, c, g, or t
  misc_feature (462)..(472): n is a, c, g, or t
ttacctttaattgatctggaaaactgaacttcacatgtatattaagtagtgcttataacagaagatactaaaacagaaatataagggaaatactttgccaataaataagcccaaaaaagcagttgtaaaaactnaaaatcacctaataatagaaactgaggtaatggtaaagtttttgtagcattctcacgtaatatctaagttaaaaatttttttccaggccatgtgaaaaacaaacatacactgtgttcaggactgttaaagaaaatttaaaaccaaaaaaacccagccctctttctgcatgaatatctaaaactcattaaataaggtcttttcgatcaagtgacttgaacacaggaattctgattcttgtcactaaaatagtttatctgccacaaatactttaactgaaaaatgaaggacacttagagaaaacacccccaaaacaatcagtaataattnnnnnnnnnnncaactaagaaactgaagtggggaatgttttgaagcactgggaaaagcaaagaaacagagacttggagtttttaatagcttagaatctttaagtctcttatcctctatgggcctcagtttcccggtctgcaaaataaaaagtctgtatttacatgggtgctaagggttttctggttattacaaagattctattttcagatactagaccaagccataataactaaacaagtatctcaacaaacatggagttgttcttaaaataaattccttgtttacacagcgcttttctcgaaaataactccaaatgctttacaaagacaaaattccaccattaacgctttgatatatagcagtgagaatatgtcacacctccttacccctcccactgaagggaataagaaataaaataactttggaacaagggaccaaaattctcttttggatgtaatcttttattttccaggatgaaacccccga

SEQ ID NO: 250463 - DNA, 340 bp, Homo Sapiens
cgtgtgggccacataccacagggtcttcgataaagtggagctgatgctgtccgagaaattgaggccgcggtgcacaccatacagaaagtgccagaacaggtttcttctgggctccaattatgaaaagggggttggtgtgtgctggattggctgatatggccagacctggagaaaaacttagacacagctcaatctggtgttttgatggctacaggggttatttgggcaagatactcacttgtgattattccaaagatttttcggatttggagatattacccagaacttaaagcttaagcacacaaattgaggtcctgagcacccggacaatcttgtgtgg

SEQ ID NO: 250464 - DNA, 1125 bp, Homo Sapiens
ggggcggggcgcgggccgcagcttttcggttcacagcgggcagggaaagccgcgggaagggtactccaggcgagaggcggacgcgagtcgtcgtggcaggaaaagtgactagctccccttcgttgtcagccagggacgagaacacagccacgctcccacccggctgccaacgatccctcggcggcgatgtcggccgccggtgcccgaggcctgcgggccacctaccaccggctcctcgataaagtggagctgatgctgcccgagaaattgaggccgttgtacaaccatccagcaggtcccagaacagtttttttctgggctccaattatgaaatgggggttggtgtgtgctggattggctgatatggccagacctgcagaaaaacttagcacagctcaatctgctgttttgatggctacagggtttatttggtcaagatactcacttgtaattattccaaaaaattggagtctgtttgctgttaatttctttgtgggggcagcaggagcctctcagctttttcgtatttggagatataaccaagaactaaaagctaaagcacacaaataaaagagttcctgatcacctgaacaatctagatgtggacaaaaccattgggacctagtttattatttggttattgataaagcaaagctaactgtgtgtttagaaggcactgtaactggtagctagttcttgattcaatagaaaaatgcagcaaacttttaataacagtctctctacatgacttaaggaacttatctatggatattagtaacatttttctaccatttgtccgtaataaaccatacttgctcgtatataccccctgcctccttctgttccagtcagccaacatatgtacataaaagaacacacaaattcaagaagtggaagattaaattatctgcttatttagtgtaggatggtcaggtagctagctataagtgaaaggaaattttgctgaagagactgagaaatgggtagtggaatgactatcaagatgacctcaaactatttaaaaacattttaacttgccatgaagatcttgatgattttgtcttaatgttgttacaattcttttacagctacgattttaaatacgatctcgtacgattatgcgac

SEQ ID NO: 250465 - DNA, 821 bp, Homo Sapiens
  misc_feature (44)..(44): n is a, c, g, or t
  misc_feature (402)..(412): n is a, c, g, or t
catcactggttattagggaagtgaaaatcaaaacccactgtganatatcacttcatatccaataggatggctataataaaaagacatacaataacaaaagtgtgggtgaggaggcagaaccactagaaccctcatacactgctggtgggaatgtaaaacggtacagccgctgtggaaaacaacctggcagttcctcaaaatgttaaccggggagttaccataggatacggtaattctactcttaggaatatgtacaagagaaatgaaaacatacacccacacaaaaacttgcacgcaaatattcataatggcattattcacaagagtcacaacgtagaagcaacccaaaaaaataccaactgatgaatgcataaaatgtggtatatccattcaatggaagannnnnnnnnnnctgccataaaaaaggaacaaagcactgatacgtgctacatcaatgaaccctgaaaacattatgctaagtgaaagaatccagtcacaaaggaccagatagtgtatgattctatctacacaatatgaaaaagccacaacaggcaaatctatcacagaggcagaaaggagattcgtggttgcctggggcaggggagagtgggagagaatgggaggcactgtgagctggcacagggtttctttctgggggtagtaaaaatgtgctaaaattagattgtggctgtggttacacaagtctgtgaatacactaaaaaacctttaaactgtgtacttaaaatgggtaaattgtgtcatatgtgaattggttctcaataaagctttttaaaataaagaaatcaatacatatttgccat

SEQ ID NO: 250466 - DNA, 119 bp, Homo Sapiens
tgcacgagtactaccgtatggcccaccataattacccccatattccttacactattcctcatcacccaactaaaaatattaaacacaaactaccacctacccccctcaccaaagcccat

SEQ ID NO: 250467 - DNA, 1337 bp, Homo Sapiens
aaagtgtacaaagtcagtgtaggagaaaaaaatccatatttttatattagcatgcacactaaaaaccaaaatattattcatacttaaaacattcatacaaaacaatatgtaagcagaaatagtactaaaatactttgcctaatttctaagttgaagaataacactgggacacagttttttcatatgagagaatattccgctatttcaaatttaagggattttcttcctaacattgaaattttaaaaacagagttacttctaaataattatacagattttttcttctattaaatattattatttagaattgtttttgtattacatattcatgttaagaaccccgtcttcccttaaaatacattaaaattatgacatttttgctttgtgattgaatttcaaatagcagtatggtatccttttatctagttaatatatgaaagtggcttgaatatagtcaaatccattttaggtactctactgactttttccttcacttgccaagcccttttattgttcactgttagaaaaatagagaaggtgagacagctgggggaaaatgtggagtaaatgataatcaaatgttgaattctaaaagtctctacatttacctaggttggctttctcccccagttcagaagtttccagcttggccaatcatcagaatcacttgaggaacttagaaagaactccctgggctgtagctcctatgtaggtttaggttgagactctggattccacaatttttaaaggttaccatctgaggtttctgatcatagtctacttttgaagcagctgctgctgtttctttattccattgaacaccctggaattgacataattttatctatcagcatttctccccttttagtttatttaataattaacccggtctccaagggcagttttcatatgaccatgtgtatattcactgctcacgaaaaagtttaatgttagattaccaaatttaatatagttacagaattactgcataagggcttcccttcttggagactcttacccagcatgggaacagtgatctgcccacatgacagggtggtatgccaggcatagttaactgcttttggttgtgaggtactcatcttcctttagttaccctttagttatgtggcacacatgtcccttattgcctagttcgtcatccacactttggatcttgtgaaaatgctgttaagtatcccaaccttaaaatatattagtatatgggtttttattaaaagaattactttgaattttctatttaattcatatgtaaataaaggaacatttcatttcacttaaaaaattatatcagttattaggctgggtgcagtgctcat

SEQ ID NO: 250468 - DNA, 242 bp, Homo Sapiens
gcctctcacataacaagtaatcagtagacattaactcttatttagttgaataatgctggcagtagtacattagttatcattatgtgatcagagtaaatggtggagattttgccatgtgtttgtatttggctatagtatttcagccatctcttctataacttaaaattgaaaattgagtctaacaaacagacttagataacttattactttttttccttttctacagatggatcctgagcttg

SEQ ID NO: 250469 - DNA, 1049 bp, Homo Sapiens
  misc_feature (14)..(15): n is a, c, g, or t
  misc_feature (24)..(24): n is a, c, g, or t
  misc_feature (29)..(29): n is a, c, g, or t
  misc_feature (31)..(32): n is a, c, g, or t
  misc_feature (40)..(40): n is a, c, g, or t
  misc_feature (46)..(46): n is a, c, g, or t
  misc_feature (48)..(48): n is a, c, g, or t
  misc_feature (52)..(52): n is a, c, g, or t
  misc_feature (58)..(58): n is a, c, g, or t
  misc_feature (62)..(62): n is a, c, g, or t
  misc_feature (69)..(69): n is a, c, g, or t
  misc_feature (73)..(73): n is a, c, g, or t
  misc_feature (75)..(76): n is a, c, g, or t
  misc_feature (80)..(81): n is a, c, g, or t
  misc_feature (84)..(85): n is a, c, g, or t
  misc_feature (89)..(90): n is a, c, g, or t
  misc_feature (96)..(96): n is a, c, g, or t
  misc_feature (104)..(104): n is a, c, g, or t
  misc_feature (115)..(115): n is a, c, g, or t
  misc_feature (120)..(120): n is a, c, g, or t
  misc_feature (122)..(122): n is a, c, g, or t
  misc_feature (130)..(131): n is a, c, g, or t
  misc_feature (135)..(135): n is a, c, g, or t
  misc_feature (139)..(147): n is a, c, g, or t
  misc_feature (167)..(167): n is a, c, g, or t
  misc_feature (171)..(171): n is a, c, g, or t
  misc_feature (192)..(192): n is a, c, g, or t
  misc_feature (195)..(272): n is a, c, g, or t
  misc_feature (274)..(274): n is a, c, g, or t
  misc_feature (299)..(299): n is a, c, g, or t
  misc_feature (309)..(309): n is a, c, g, or t
  misc_feature (324)..(324): n is a, c, g, or t
  misc_feature (328)..(328): n is a, c, g, or t
  misc_feature (331)..(331): n is a, c, g, or t
  misc_feature (352)..(352): n is a, c, g, or t
  misc_feature (356)..(356): n is a, c, g, or t
  misc_feature (359)..(359): n is a, c, g, or t
  misc_feature (376)..(376): n is a, c, g, or t
  misc_feature (382)..(382): n is a, c, g, or t
  misc_feature (416)..(416): n is a, c, g, or t
  misc_feature (428)..(428): n is a, c, g, or t
  misc_feature (434)..(764): n is a, c, g, or t
caaaaaaacgttanngcaaacctntccangnncaaggganggggtnanaaangaaaantttnttttaanttcntnnccannttnnaggnnaagggnggggaaanaggaaatccanttaananaaggagannccanccgnnnnnnnnngagttgggctcttcaccaancaangccttttcttgaatttccccnttnnnnnnnnnnnnnnnnnnnnnnnnnnnnnnnnnnnnnnnnnnnnnnnnnnnnnnnnnnnnnnnnnnnnnnnnnnnnnngngaagtggtgaaaggtgggtttcagnttttaggganaggagagcctcccanggantgnggtagcctgggagggaaaaanaatnttnctttatgttggggtggnaccccnctaaaaaaacaagttgaggatgtggacccacaanggtgatgtttcnttccgnnnnnnnnnnnnnnnnnnnnnnnnnnnnnnnnnnnnnnnnnnnnnnnnnnnnnnnnnnnnnnnnnnnnnnnnnnnnnnnnnnnnnnnnnnnnnnnnnnnnnnnnnnnnnnnnnnnnnnnnnnnnnnnnnnnnnnnnnnnnnnnnnnnnnnnnnnnnnnnnnnnnnnnnnnnnnnnnnnnnnnnnnnnnnnnnnnnnnnnnnnnnnnnnnnnnnnnnnnnnnnnnnnnnnnnnnnnnnnnnnnnnnnnnnnnnnnnnnnnnnnnnnnnnnnnnnnnnnnnnnnnnnnnnnnnnnnnnnnnnnnnnnnnnnnnnnnnnnnnnnnnnnnnnnnnctaccacttcctgattctgtttcctccatctctcaccactttcacgtctttcaactctttttatctttttgttttataaaaaaataaatttgcccatgttcttggagagcctgctgtctcctaccccaattggtcagatctgggttctccccaagattcagtttagatggagttgaggataatggctctcaaatgaggggcctgaagttgtgtgtgaagccaaactatgttgaaaactcttagaaaatacgcaattaataaattacaaaccccctcactctcccg

SEQ ID NO: 250470 - DNA, 947 bp, Homo Sapiens
  misc_feature (379)..(437): n is a, c, g, or t
ggccccgaggaatatgggccgacgtttatttgtgtttgtttgtcctagaggctaaaaaaagagggtgaaccactgtaaaatgtgttggaacagtgcaagggaaccacactcggtgagttggtaagaaaaagaggccaacggaatgggggggcaataggctccccgttggtaatttccaagcaccattgaaagggccaagtttcggcggaccattttaggggcagacggttttaaaacgagcctggccaaacttggttggacccaccggttgtccttaaaagatcaaaagagtaactggggtattccttgtggcagggcatccgggtatcccagtgtgcttaggaagggtaagggcaagacagtcccccttaacccatannnnnnnnnnnnnnnnnnnnnnnnnnnnnnnnnnnnnnnnnnnnnnnnnnnnnnnnnnngagaacctgtctcaaaatagaaccaattatcctcaactccatataaaacggaaggaaacatcagccttgggggccacagactcaacatgtgtgtgtggtggggttccagcccaacatagagtaacattatttgtacctcccaggctagctcagtccatgggaggctctcctgtccctgaaagctgacacccacctttcaccacttcgcccatgctacagttcagtttcctcgtctgtaaaatggggatgataatggtacctaccttgcagtgttgttataaggattaaaggagacagtgcaagaaaaggccttggttggtgaagagcccaacctcggaggggagctgctgggatcctccttatcttgactgggatgtccctgtctccccctccccttgctccttgaacatggccaaggaaagtgaaaaacaaaaattattcactctgctagcacccttccccttgatgcctgggaataggttttgccaataaacgtatctgtgttggaaa

SEQ ID NO: 250471 - DNA, 1108 bp, Homo Sapiens
caccaaaaaagtgaaagagaaattgaaagcgaaaaaagacaaatagcataaggctccaaaacgaaagcaagcatttcactggcagcctccactagaatttggtgaagaggaggaggaggagattgatgacaagcaagttactcaggaatcaaaagagaaaaaagtttctgaaaacaatgaaaccataaaagataatattctaaaaactgagaaatccagtgaagaggacctttcaggtaaacatgatacagtgactgtttcatcagatcttgatcagtttactaaagatgatagtaaactcagtatttctcccacagctttaaatactgaggaaaatgtggcctgtttacaaaacattcagcacgttgaagaaagtgttcccaatggagtggaagatgtgcttcaaacagatgacaacatggagatctgcactcctgataggagttccccagcaaaagtagaggagacttcccctctaggaaatgcacggcttgataccccagatataaacattgttttgaagcaggatatggcaacggaacatcctcaagcagaggtagtaaaacaggaaagcagcatgtccgaaagtaaagtgttgggtgaagtggggaaacaggacagcagctctgctagcttggctagtgctggagaaagtaccgggaagaaggaggtggctgagaagagccagatcaacctcattgataagaaatggaagcccctgcaaggtgtggggaacctggcagcacctaatgctgccacatccagtgctgtggaagttaaggtgttgaccactgtgcctgaaatgaaaccacaaggcttgagaatagaaattaaaagcaaaaataaagttcggcctgggtctctctttgatgaagtaagaaagacagcacgcttaaaccgtagaccaagaaatcaggagagttcaagtgatgagcagacgcctagtcgggatgatgatagccagtccaggagtccaagtagatctcgaagtaaatctgaaaccaaatcaagacacagaacaaggtctgtctcctatagtcactcaagaagtcgatcgagaagttccacatcatcttatcgatcaagaagctactctagaagtcggagc

SEQ ID NO: 250472 - DNA, 1191 bp, Homo Sapiens
  misc_feature (453)..(481): n is a, c, g, or t
  misc_feature (602)..(602): n is a, c, g, or t
  misc_feature (889)..(889): n is a, c, g, or t
ggtggtcatcagcataatgacttatgctaatttttagctctttgataacttccccacccttaaaattgatgtcattgaatatcttaccattttgttaactcttgaaatttttattgcgtgactacttttgtttcattgtgattatgtggacagtcctaacagaattgtaaagaaataaaagcagaatataagtagtgtaatatttgtttcttgcttttatctcaggactattaccagttagtgtttttgattatcacgggagagtccatgtcagcagaaaatatgtttatgggcaaacaatttgcttatgtgaaattacaattttataaaatcgttctgagaccaataaaaatgtaaaatggccccctcaacacgccgcggcatcgccgtcgttccgatgcggcgcctgccgcgccgaacgcccccccgggcgggcgcactaccttgcttgannnnnnnnnnnnnnnnnnnnnnnnnnnnnaccacaacaccgcatgcttgggggcagggacctgtctgcgcgccccctacgggaaaaaacatttgttacaaacaaccacaatggggattttgtggaggcgcgggcgcgggcgcccaccgantagcgagcctaaatcacgggcacctgtcgaggcgagggacagtagcagaggtgggaggtgcttcccgcgcgacaggggagccgcacgcgtcccctacgggggttgatgtcgcttggctccccaatcataaagtgcccgctctggcgtagcatataagtatctcccccacactatctcctgggtacgctcccactgctcgcctctccggcccctcggtggccattactctacgtggcgtggggcggagtgagtgggcgcgaaggatgacgacaccgaattccctcctncatcatatatgttcgtataaattatcccttagagggtggcgagatcactcctaatagccgcgcgagaccctatcgtcaccagacaacgcacagggagtgtgcgcacaaagaccggccccccccgtagagcgaatcctcataaacacaaatggtagggactcaactggacgattctcggcacttcacgaatggtaggcgatagcgacgcctggcttctataaccccggcactcactttagcatgagtacactcggcccacagcgtagagagagagcctaatctccaagacggtcgtcacggcg

SEQ ID NO: 250473 - DNA, 924 bp, Homo Sapiens
tacggccgggggtcgttgcagtagctgtaggaaggggaggccattttccgtttctgggaggagtgaggggcaacgggtcggagaaaaaggaaaaaagaagggctcagcgcctccccgccgggccgtggacagaggggcacagtttcggcaggcgggtgaggtcgctgagggcccgccggagatgttttccttgtcgagcacggtgcaaccccaggttacagttcctctgagtcatctcatcaatgccttccatacaccaaaaaacacttctgtttctctcagtggagtgtcagtttctcaaaaccagcatcgagatgtagttcctgagcatgaggctcccagcagtgagccttcacttaacttaagggaccttggattatctgaactaaaaattggacagattgatcagctggtagaaaatctacttcctggattttgtaaaggcaaaaacatttcttcccattggcatacatcccatgtctctgcacaatccttctttgaaaataaatatggtaacttagatatatttagtacattacgttcctcttgcttgtatcgacatcattcaagagctcttcaaagcatttgttcagatcttcagtactggccagttttcatacagtctcggggttttaaaactttgaaatcaagacacgacgtctcccagtctaactcccgagagattagctgaaaacacagaatatagcgccatcattcgtgaaggggttcttttgcgggacagaggatccgatgtttgcgagttgggccaactccttgaaaccaaaaaatacggaaggtccccaaagatgctttaaaccggttgcgggaaggtttttgaagccagcacccacaaaaaccagattcctagggaccgtgatactccgcgggggatcgggctttgggtttaaaccctttttgctcgaa

SEQ ID NO: 250474 - DNA, 1378 bp, Homo Sapiens
  misc_feature (14)..(14): n is a, c, g, or t
  misc_feature (71)..(71): n is a, c, g, or t
  misc_feature (143)..(143): n is a, c, g, or t
  misc_feature (902)..(902): n is a, c, g, or t
  misc_feature (986)..(986): n is a, c, g, or t
  misc_feature (1079)..(1079): n is a, c, g, or t
  misc_feature (1085)..(1085): n is a, c, g, or t
  misc_feature (1143)..(1143): n is a, c, g, or t
aatcccacaatatntctgtcgaccttacatatctgtccttggatctgtaacttgcatgtcaagcgatcagnacgtatagctcattatctaatgcctctggagagtttgtggctcctattatgatagccatacattgggttaangtccatccatttcagcaagcagttgatgaatggtgtgcctagaatatgcatgcattgtagattcaattctcttccctgcatcagtatctaattcatcattaaatattgctcaatgagcattcgcatgtgcttccttataaggatgtctgatccgtttggctccctcacctacaacagtctcatcacattgggatccagaagcataataaaaggcaccatcagcttctcccgccacagcggaagtttacctccaagaatagtaaattattgtgcatttttcaagaattcaacaacttcctgtaattcttgtttagcttcctccacccctttaacatgttcaaaggtgacatttttcatctggacaggatctactgcagaatcaagccctgttgttgtccggaagcggacagataaaaatgggttttttagaagtccataaatgccgaatagcagcagaacgaagagaatcagacgggttcgccttagggaatcattggttttttgtgtgagtgcttgagctttcagaaaaccttccgcaaaaccagtctcaaatgcatcttggtgagcttcaggtatatttttggttttcatgagtttgtccaaactctcaacatctgatcctctgtcccgcaaaagaaaccccttcacgaatgatggcgctatattctgtgtttcagctaatctctcggaggtagactggagacgtcgtgtccttgatttcaaagttttaaaaccccgagactgtatgaaaacatattnattttcaaagaaggattgtgcagagacatgggatgtatgccaatgggaagaaatgtttttgcctttacaaaatccaggaagtanattttctaccagctgatcaatctgtccaatttttaattcagataatccaaggtcccttaagttaagtgaaggctcactgctgggagcctcatnctcagnaactacatctcgatgctggttttgagaaactgacactccactgagagaaacagaagtnttttttggtgtatggaaggcattgatgagatgactcagaggaaccgtaacctggggttgcaccgtgctcgacaaggaaaacatctccggcgggccctcagcgacctcacccgcctgccgaaactgtgcccctctgtccacggcccggcggggaggcgctgagcccttcttttttcctttttctccgacccgttgcccctcactcctcccagaaacggaaaatggcctccccatcc

SEQ ID NO: 250475 - DNA, 657 bp, Homo Sapiens
ggcagcagagcaatcaccacccaagcctggaataactgcaagggctctgctgacatcttcctgaggtgccaaggaaatgaggatggaggaaggaatgaatgttctccatgactttgggatccagtcaacacattacctccaggtgaattaccaagactcccaggactggttcatcttggtgtccgtgatcgcagacctcaggaatgccttctacgtcctcttccccatctggttccatcttcaggaagctgtgggcattaaactcctttgggtagctgtgattggagactggctcaacctcgtctttaagtggattctctttggacagcgtccatactggtgggttttggatactgactactacagcaacacttccgtgcccctgataaagcagttccctgtaacctgtgagactggaccagggagcccctctggccatgccatgggcacagcaggtgtatactacgtgatggtcacatctactctttccatctttcagggaaagataaagccgacctacagatttcggtgcttgaatgtcattttgtggttgggattctgggctgtgcagctgaatgtctgtctgtcacgaatctaccttgctgctcatttccctcatcaagttgttgctggagtcctgtcaggcattgctgttgc

SEQ ID NO: 250476 - DNA, 642 bp, Homo Sapiens
caaggtatactttgtagatgctaagcacccgattggccctccatagaatgacaatatccctttgatacctcactcctgatcaatctcattcattaacctcagcttctcaggaatccttgtagcttgtatgctagaagtagctatggtatatggtatccactatatgtccagtcctatggtttggctcaaaggttggctaattgcagctagagctctcaactgctagctcagcaccttgacatttgaagtttcttgtcttgaggagaaggaaaatgttctttctgccattgccactttaacagttggacatgcttaagcaacaaatacagcccagtatagggaggactgtcagtagcatcaaatggccacatacctcaatggcaaaagactagatggtttgtgatttaaaaattaatgagtcgagatgagactattttggtattaaatgagaaaattgcctaacacaagggaagggtttacaaaagaatgccaattagtgtttcaacagagttaggattttccaagtaagagtagctggtagccatccagccataaaaggaacgagagtctatagatctgtaaaagtaaaactgctatattttgtatcttcaaatcttcaatataaagaatttaaagaacctg

SEQ ID NO: 250477 - DNA, 1288 bp, Homo Sapiens
  misc_feature (302)..(302): n is a, c, g, or t
  misc_feature (895)..(904): n is a, c, g, or t
ttaaagaaagtacagaacaaaacataccaacataatgtgtggtgtattagcataatttaaaaacaaatgcagagaggtgatctttaaatttaatatcaaaatatgctgaccattagaactgcattataattttgaagaaatgattgacaacctttgtcaccaattgtgtttgcttcatagaaaaaacaagacttgctaatgttttcatatacacaatctgaagaagttatgttgttcataagaaagtgatatttaattctaagcacagagtattcacaaaaacaagtttcagtaaaaaaaanagctaaaacaaacactgaagtagagttttgtaaatacaactgattttgtccttgtagataattagtgaacgtacaaatagaaattttgctagactgcttccaagaaagctaggtagactcggcgactgtgaattcaagtcagcaatgcaggtaggaggcgaacttgggctcttttgtgagcagcactgtagaaaggatttttcaagggggtacagcctgcataaaagcagttatcttggcatgtgcaaacaagaagggggaaagttgtattgaaggaggggtgaattaaagtccctaaaattcaagtcccttctttagggaggtgagaacctccttggcatatgccctaccttaatctgagctgtgttatagaaaagtacagactctggtgtttgggactgacatctccaaaccaagaaaattaaataaataaaaaaggcaagggaagtttaaaaaatggttctttcactagtggaatagagtctgaataccagaattcactgagaatctatttacaccacagtttgattgcgcgcacacacacacacccatacatatgcatactctcacatacattcccaatctttaatttnnnnnnnnnngtcaaacaatcaagaatgactgcttgaaaaataatttgtaaaatgcctagagctgggctaaatttcaaccttatagcagatcctgaaaataaatttcataataatatttccatgcctaaatatgccactgttaaaactgaaaaaaatttaagcatgtaacattaaacactaaaattagtttaagcattcagtagcaaatggtttttcttgtaaaactaagtttctttcaccggaaatggcctgaaatattagtcatagccctaaaccatagtacaaaatataactgaagaattctcattttattctaagttaaaccacctaacaataccacttgtatattgccatcatgttattctgtaaagatgtgatatataaaatgctgta

SEQ ID NO: 250478 - DNA, 449 bp, Homo Sapiens
  misc_feature (25)..(25): n is a, c, g, or t
  misc_feature (31)..(31): n is a, c, g, or t
  misc_feature (46)..(46): n is a, c, g, or t
  misc_feature (63)..(63): n is a, c, g, or t
  misc_feature (122)..(122): n is a, c, g, or t
  misc_feature (300)..(309): n is a, c, g, or t
ttaggggaggtgagaaccctccctnggctanggcccctaccctaanctggagctgtgttatangaaaggtaccagactcctggtgttgggggactggacatctcccaaacccaagaaaattnaaataaataaaaaaggcaaggggaagtttaaaaaaagggttcctttccactagtggaatagagtctgaatacccagaattccactgagaatcctatttacacccacagtttgattgcgcgcacacacacacacccatacatatgcatactctcacatacattcccaatctttaatttnnnnnnnnnngtcaaacaatcaagaatgactgcttgaaaaataatttgtaaaatgcctagagctgggctaaatttcaaccttatagcagatcctgaaaataaatttcataataatatttccatgcctaaatatgccactgttaaaactga

SEQ ID NO: 250479 - DNA, 661 bp, Homo Sapiens
  misc_feature (513)..(513): n is a, c, g, or t
  misc_feature (541)..(541): n is a, c, g, or t
cgggggaggagaaggaggagcttcgcagggtcgttttttcccaggtaggccgactccgccgagtcggtggcggctgcaggctgggagggagaagtgctacgcctttgcaggttggcgaagtggttccaggctacccggctagtctggcacggccccgtcttctgcctcctcctccgtcgcgtggcggcgggaactgttggccgcgcggcctcgggaacggcccaggtccccgcccgcaggtcccgggcagataacatagatcatcagtagaaaacttcttgaagttgttcaagaaaaatttgaaagtagcaaaatagaaaataaagaattaacagcagatacagaggacagcatggaagtgttgtcttaggaaacagaacacagcagtgaaaaaacagacaaaatccgctcagatacaactgcagctgataatgttttccggcttcaatgtctttagagttgggatctcttttgtcataatgtgcattttttacatgccaacagtaaactctntaccagaactgagtcctcagaaatattntagtacattgcaaccaggtcttgaagaactgaatgaggctgttagacctctgcaggactatggaatttcagttgccaaggttaattgtgtcaaagaagaaatatcaagatactgtggaaa

SEQ ID NO: 250480 - DNA, 880 bp, Homo Sapiens
ggaggaaaggagggggctggaagagagtaaagggctgttgttaaacagtttcttaccgtaagagggagttcagacctagatctttccagttaatcacacaacaaacttagctcatcgcaataaaaagcagctcagagccgactggctcttttaggcactgactccgaacaggattctttcacccaggcatctcctccagagggatccgccagcccgtccagcagcaccatgtgggtgaccaaactcctgccagccctgctgctgcagcatgtcctcctgcatctcctcctgctccccatcgccatcccctatgcagagggacaaaggaaaagaagaaatacaattcatgaattcaaaaaatcagcaaagactaccctaatcaaaatagatccagcactgaagataaaaaccaaaaaagtgaatactgcagaccaatgtgctaatagatgtactaggaataaaggacttccattcacttgcaaggcttttgtttttgataaagcaagaaaacaatgccctctggttccccttccatagcatggtcaagtggagcgaaaaaagaatttggccatgaatttgaccctctatgaaaaccaagactaccttagaaactgcatcattgggtaaaggacccagctacaagggaacagtatctatcacctaagagtggcatcacatgtccagcccttggagttccatggatacccccccgaaacaacgcctttttttggccttccaagcttatcggggggtaaagaacctaaccgggtaaaactaacttgtccgaaaactccctcccaggggggaagaaagggggggacacccgttggtggttttcccgaaaccccaattcctaggagggcaacgcccttaaccaatc

SEQ ID NO: 250481 - DNA, 911 bp, Homo Sapiens
taaccataagaagtaagtacgtaatataaaacaagtgggcaggaagtgtgtatgtgtacttggcttaagtggagaaggtagccataatcaggggacacagaagctattaatgtattcattgccttcagatttggcatgggcagatccaaaaattaattattttttgtttcctttagtaaacaatgcacagttctgtggatttttacttttggaccaatcagcattacttacaagtacttactagtaatgttattacttactaataagtgaattacaaaggaccactaaaatttgtttccacaaatgaaaatcagtgttttattagagtttgcttaggattctacttataagatgcctggtccctgtacaaggtttgtaattttgcaagaatgcacaaaagtgtatatacagatactgtcacacagcaggtcagacaactgacagaaactatcctacggtcagtactcaagcattttcttatgaatgtattatcttgttgggaggtgttcatggtttttctgctatttttgcatttcagatatgtattattttagcttgatagccattgagattgctatagattatttgattcgtatataatgatgtatgtatgcatatttcactatatttttctatttttctataactgggttttaaatatttttggtagaaaaataattatactttcattgctaaaaataaatatgcataacctacccctctatattgcttataacattttgatgatgtagccagtgaatatgtgctaatttaaataacttttatataaaattaagccaactgccatattataactggtttctttttaacttaataggatattgttttataatattaaatcatatgtttaagctcattctctttaaaaataaacaataagcaatttctat

SEQ ID NO: 250482 - DNA, 543 bp, Homo Sapiens
gaggacccgaagggggtgcaggtaaaagagtgtttggggcagaagttgaaggtgggaagtgagatacaggaggattaccgaaggcagcagcagttgatggagaaacaggaggtggcatagaagtaacaagtggtgggacagaaggaactgcaggaggaggcacaaaaggtaatggtgctgaaggcctcacaggaggaaggggcggctgaggagtagagtatgcgagtggtgggaaggactccatggaggatacatttggagaagaaaaagaactggttgccgctaatggaacaggggtagaagacatagcagtagcagccagccctgcaggatttggtggaggagtcccaggtggtgttgtctctattccactctcttccatcatttttcttcaattatggtatactggggaccgggaaagtgcctgcgtggtcgctgaagagtgtggtatgatagggaggtcgggacgtagaactacagcttggagaagacaacgaaggcgcaccctggaagttacctcggcgtgtccccgcctacaagatc

SEQ ID NO: 250483 - DNA, 522 bp, Homo Sapiens
taccttcttctcatctatcacataactcacaatacagagtgagaatattttctgtgccttggagaattgtcatattccatattcctttctaagtttagatcagtttccaatgttttcacataagctttgcaccttcaacattatgaaatgtctccaagaggaagttttgtgacagtgtcactccctctggaatatcttcattctttttctcacaaccactctcctcatttatgtcaaaaaattcagcttcactagactcctctggcttcatatctggagtctattgcaccatgacagtgttagcattcccacggttagctgtttcttccataactccatttactttgacttcaatttcacttccagcattattacctcctttcttttctttactttcattcttcatcagttcattcactttttcaattatccactttttgaaaacgtcatataggtttacctctgagaggcaaagcaacaacacaactacatgcttgtgctgtctgtgcatgaactgactac

SEQ ID NO: 250484 - DNA, 475 bp, Homo Sapiens
ggaagcggctaactatggcgaccgccacggagcagtgggttctggtggagatggtacaggcgctttacgaggtgggctccgcgccattagcggtccgcgaccacacccgggcccggggagggtgggaggacgcgtgtggatttgtggcctgagacctcggcgggactggctcggtcacgcccagactcggtgcctcttgctggaaggactgccgggagcttctagtcccagcggttgagtgtagggaggaacgggcgggggcgggggctgggactgagggtctcggtttgaattcttatgctccgggtcccctggaagctccggaaaggaacacgtgtaaggggacgcaggagacaggtctgcaaaaaccagagtttagacggacgataaaacggagtggtgaaaatgagtggaacaccttcgtctgggaaggtcctaaggaagtcagctctttggaactacggctcctgcttac

SEQ ID NO: 250485 - DNA, 628 bp, Homo Sapiens
cggccggggggaaggaagcggcctaactactggcgaccgccacggagcagctgggcttctggtggagatggtacaggcgctttacgaggctcctgcttaccatcttattttggaagggattctgatcctctggataatcagacttcttttctctaagacttacaaattacaagaacgatctgatcttacagtcaaggaaaaagaagaactgattgaagagtggcaaccagaacctcttgttcctcctgtcccaaaagaccatcctgctctcaactacaacatcgtttcaggccctccaagccacaaaactgtggtgaatggaaaagaatgtataaacttcgcctcatttaattttcttggattgttggataaccctagggttaaggcagcagctttagcatctctaaagaagtatggcgtggggacttgtggacccagaggattttatggcacatttgaatgaagatgaaggatcattgatttccttgtgtatggataatccgggaacaggccaactaaatatttgatgaatgtatgatttcaaatacagtgaattccctgggagtcatcaaagaagaccggcattttatggttgtttttattaagtgtatattctttgctcctgaaa

SEQ ID NO: 250486 - DNA, 2451 bp, Homo Sapiens
ggcattcagaatagtccctcttgagaaagaattgtaaccagattccctttaaaaatgagttcccctccctttccccccaaaggactcatcctgaagcagaaggtgtggggggaaggagaaatgtaaaggcttttactttgcataaggatgggggactggggaaaaaggtgaagcgaagcccaaggacaccatgctaagggcaaaagtaagagacagtctcagaactgagagaattgtgtcttctgctttttgaagtagactgtcacactcaggcagcctgtcaatgctgaatgttaggacttctgtctccgctggagacacggcctggtgcaagtcagcgtttagtgtttgacagctttctcagcactccctgactccgtttacctttactccgcatcccattctcttactgcctatctgaaggattggatgggcagagtataggtggcggtggttggtcctccccgtatgttgtccatttaattccagagcactgatttttccgaagtgtgctctgccctgggaaaatggacacatgttcctcacaatgggaataactaattacttcttttcttacagaaaaagttggtgattcaaggaaagcacattgcaatgcattatagcaatcccagacctaagtttgaagattggctttgtaacaagactctgaacaggaagtgcctcctggaaccacagagtcggttcagtctgtggattactactgtgatacgatcattcttcggaacatagctccgcacactgtggtggattccatcatgacagcactgtctccttacgcgtctttagctgtcaataacatccgcctcataaaagacaaacagacccagcagaacagagcttcgcatttgtgcagctgtcctctgcaatggatgcttctcagctgcttcagatattacagagtctccatcctcctttgaaaattgatggcaaaactattggggttgattttgcaaaaagtgccagaaaagacttggtcctctcagatggtaaccgcgtcagcgccttctctgtagctagtacggctattgctgctgctcagtggtcatccacccagtctcaaagtggtgaaggaggcagtgttgactacagttatctgcaaccaggtcaagatggctatgcccaatatgctcagtattcacaggattatcagcagttttatcaacaacaagctggaggattggaatctgatgcatcatctgcatcaggcacagcagtgaccaccacctcagcggctgtagtgtcccagagtcctcagctgtataatcaaacctccaatccacctggctctccgactgaggaagcacagcctagcactagcacaagtacacaggccccagccgcttcccctactggtgtagttcctggtaccaaatatgcagtacctgacacgtccacttaccagtatgatgaatcttcaggatattactatgatccgacaacagggctctattatgaccccaactcgcaatactactataattccttgacccagcagtacctttactgggatggggaaaaagagacctacgtgccagctgcagagtctagctcccaccagcagtcgggcctgcctcctgcaaaagaggggaaagagaagaaggagaaacccaagagcaaaacagcccagcagattgccaaagacatggaacgctgggctaagaagtttgaataagcagaaagaaaactttaaaaatagctttcagcctgtcaattccttgagggaagaagaaaggagagaatctgctgcagcagacgctggctttgctctctttgagaagaagggagccttagctgaaaggcagcagctcatcccagaattggtgcgaaatggagatgaggagaatcccctcaaaaggggtctggttgctgcttacagtggtgacagtgacaatgaggaggagctggtggagagacttgagagtgaggaagagaagctagctgactggaagaagatggcctgtctgctctgccggcgccagttcccgaacaaagatgccctagtcaggcaccagcaactctcagaccttcacaagcaaaacatggacatctaccgacgatccaggctgagcgagcaggagctggaagccttggagctaagggagagagagatgaaataccgagaccgagctgcagaaagacgggagaagtacggcattccagaacctccagagcccaagcgcaagaagcagtttgatgccggcactgtgaattacgagcaacccaccaaagatggcattgaccacagtaacattggcaacaagatgctgcaggccatgggctggcgggaaggctctggcttgggacgaaagtgtcaaggcattacggctcccattgaggctcaagttcggctaaagggagctggcctaggagccaaaggcagcgcatatggtttgtcgggcgccgattcctacaaagatgctgtccggaaag

SEQ ID NO: 250487 - DNA, 495 bp, Homo Sapiens
  misc_feature (11)..(11): n is a, c, g, or t
  misc_feature (42)..(42): n is a, c, g, or t
  misc_feature (164)..(164): n is a, c, g, or t
  misc_feature (177)..(177): n is a, c, g, or t
  misc_feature (191)..(300): n is a, c, g, or t
  misc_feature (415)..(423): n is a, c, g, or t
ccttgttttgnttgcccccagggcttggaagtgccaagtggntatgacccatagcttcaactgcagcccttccaaactcctgggactccaaagcaaatcctctcacctaaaccctcctggagtagctaggacttacaggtgtgtgccacccacacccagataantttaaaatttctnttttttatacaggnnnnnnnnnnnnnnnnnnnnnnnnnnnnnnnnnnnnnnnnnnnnnnnnnnnnnnnnnnnnnnnnnnnnnnnnnnnnnnnnnnnnnnnnnnnnnnnnnnnnnnnnnnnnnnccagttagtaggttttaatgcatattgcaaacagctgaatccagtcttaccaaacttgtctgctccacatcggaagcattttagtcttttcctgaaattgttaaggcagcactgnnnnnnnnngttttatctgtaattatttctcacattaggccaggctttctagtaacaataacagtggggccacgggtaggt

SEQ ID NO: 250488 - DNA, 592 bp, Homo Sapiens
ggatgcagtggctgaagacacaaggaaataagcaaatgctttgcacgtgcctgggcaacggagtcagctgccaagagacagctgtaacccagacttacggtggcaactcaaatggagagccatgtgtcttaccattcacctacaatggcaggacgttctactcctgcaccacagaagggcgacaggacggacatctttggtgcagcacaacttcgaattatgagcaggaccagaaatactctttctgcacagaccacactgttttggttcagactcgaggaggaaattccaatggtgccttgtgccacttccccttcctatacaacaaccacaattacactgattgcacttctgagggcagaagagacaacatgaagtggtgtgggaccacacagaactatgatgccgaccagaagtttgggttctgccccatggctgcccacgaggaaatctgcacaaccaatgaaggggtcatgtaccgcattggagatcagtgggataagcagcatgacatgggtcacatgatgaggtgcacgtgtgttgggaatggtcgtggggaatggacatgcattgcctactcgcagcttcgaga

SEQ ID NO: 250489 - DNA, 551 bp, Homo Sapiens
cggccggggggagacgttggcggcagaggcggaggcggacggggtcagcccaaagcagaggctcggccatgaacttacccgggacagcggcggcggcggaccttttggccatcttctcgcagagtgctccctgctaacggggacagattttaacattatggcagggaggcatcagaatcgtagttttcctcttccaggagttcagtcaagtggtcaagtacatgcatttggaaattgttcagacagtgatattttggaggaggatgctgaagtgtatgaacttcgatccagaggaaaagagaaagtccgaagaagtacatcaagagatagacttgacgacattatagtattaacaaaagatatacaagaaggagatacattaaatgcaatagcccttcagtactgttgtacggtagcagatatcaagagagttaacaatctcatcagtgatcaagacttttttgcccttaggtctatcaaaattccagtaaaaaagttcagttccttgaccgaaacactttgtcctccaaaaggaagacagacttcacgtc

SEQ ID NO: 250490 - DNA, 497 bp, Homo Sapiens
ggagaacagctactctccttacccacagaatgtgtgtttatgttgctgatagaggccaaacaccgggctgagggcctctcatgtcaccttgtgtggctaaggagagtgaattctcctcgcagcccacagtgtcatttttaggaaaattactcttaccaaactcttctttttggtaaagtggaaattaactttacctacttgaaagagacttgacataatttaatttatacttctctgaagtgtttagattatgaacatcccttatagctaagatattttagttacttgataaatattcacctagggggtatgttcttattaggaaacttctaatttgtaaagtacctgcagcctttgggctaatgatggggacaggagttaaggagtgattgcaaggttgtgaaagtaaaaattagctgattttagtgactgcgtatggtctaaattaagggatttcaaaggtacactgtaagcgatgattgcaaaaagtgttgatg

SEQ ID NO: 250491 - DNA, 1184 bp, Homo Sapiens
  misc_feature (59)..(84): n is a, c, g, or t
  misc_feature (182)..(301): n is a, c, g, or t
  misc_feature (314)..(448): n is a, c, g, or t
cggcagtaactataagggttataaggtagcgaggcctgggtggcgaattcggcacgagnnnnnnnnnnnnnnnnnnnnnnnnnngtgtggagccaccacgcctggccccagtccaaaatatttaaagattgtttccttagtgtcttgaagttttgcacaaaattcttttttttgagatggannnnnnnnnnnnnnnnnnnnnnnnnnnnnnnnnnnnnnnnnnnnnnnnnnnnnnnnnnnnnnnnnnnnnnnnnnnnnnnnnnnnnnnnnnnnnnnnnnnnnnnnnnnnnnnnnnnnnnnntgtgccaccatannnnnnnnnnnnnnnnnnnnnnnnnnnnnnnnnnnnnnnnnnnnnnnnnnnnnnnnnnnnnnnnnnnnnnnnnnnnnnnnnnnnnnnnnnnnnnnnnnnnnnnnnnnnnnnnnnnnnnnnnnnnnnnnnnnnnnnatcagccgcaaaattctttatgaattttacacttggcaaatgttaatgacggaagccatagtctgctcctaatacatgtccaaagcattgactgttgtgtcattagctgcctggttacattagctccctggcttcttgtttagaccactgctaatcccttaaaaacaagaggtctggcactagtagcacaacctaaggtggcattacagatctttgagcgagccacagcaacttttctgccaagtcagcttagtttagacttcagtgaatcaggctattgctatcctaatgtatgtctctatgagtgtatttagccacacatctgcccttggttgactttctgactcattgcttgcttgcttgtttccttgctttggaaaactattgaagattgctaaaaaataccactgcaaagtgatggaaaagggtggagaacaggggagtagccaggctggatggctcaaatataaatgaatgaggaattctttatgaagtatcagtcagattttatgattaagtgatgtaatataggaattatgtaaaagggaagaatgtctgatactgatctattagagaggtactttagaggcttcttgattggcataaagttcctaaggttatagattttccccccttttggctgtatagcaaagtgttttaatccacggttgtgccttattgttccattaaaattgtatcttcgatccatcaataaatacttgtggttgaaacaaaa

SEQ ID NO: 250492 - DNA, 428 bp, Homo Sapiens
ttaaaaggaacaaaatgaaggttaatggacatgtgctttaagcatgccaacagacaacacaccactagagacacacatcaaaagcaatcacagtgctatgatcaaatgatgggtacatgtgaacacatccctcgcaaccccaccccccacgttgcttctctttagcgattagtccagagtgctttagtggctgggcacacccgagatacttaaatcaggaggtgaacatgaatgcaacgtgacaactagtagcacagaaaacacctgattggtattcaaagtgcacgaagcaatgctattttcaagttcattgagtctctgcgtcatcactcaaaacaataaaaatactttttcttctcatacaagccaattgtaattaaaattttgttatgacaagctacatttaaaaatctagataaaaataggca

SEQ ID NO: 250493 - DNA, 613 bp, Homo Sapiens
cttgtgttctatgtgagagtttatgtggaggattatcttctggtgttgtgtccatcataagatgtaaaaagagaaatcatagtttaatatttaagttcctcctacaatgggtatgttaaataactatatctatacttagatatagtgcattgtctgtgtcccttaaagtgttacaaagagtttctctcaaaaggtccttaaggagagtgagagatgagagaggtgccttctctgtattagactcacacacatcagtccagttgaagaattggtttaaacttttaaatgagaacagaaattataattagtacctgaccaattgtgcctagatattaaagtatgttctctttagtactttccgttcaattaaatatcagtatattagggatttttttctacaggtgtatattttgttgaagagtcactttcctcaaccatttttttgtactgggcctttaaaaaaataaatccatccaactttaacacaacatttctcagtgtagaaatcatgtcttcttaattgctgaaccttactgcaaaaacttgtgatgtaagaaatttgtatggtgtggcagtggtctattcctaaggaactaaatatcatatagttaat

SEQ ID NO: 250494 - DNA, 1146 bp, Homo Sapiens
  misc_feature (1127)..(1127): n is a, c, g, or t
aagttggtgggacaaagaaactggtaaaagtacagcttctggaagatcgagagtaggagggaaaacttactcttcactgtatatgccctcttataagctactataatttttcatcatgtgatgcattttcaaataaatttaataaaaaattgttagggcaataaagtaaaagcatgttccagtttaagatcaatgccaaatttctgaactggggcataatacttactctgcatcttttacaacacttctaagagttaatcacatgaacatgaatacaaacaaatgtaggattcatcacaaaatacaaatgtattgggtcacaattatgtagaaaaaagataaggctgtaatatctgttttccaatgtaaggctcacagtatctgtactccaaagtttctctaaaattaaaacaagtccactaacaatataattgaaaagaatacttctgcattatgaaacagaagatatggggttcagaggggagcccatctgagtaaggactttatccagccactgaagaggcccatgaagatgaatctcaatccaacatggggtgctggttacatcctgccggtgatattctgctccccaacccttgacaaaactcatccgaatggtacacattttggtgagctcatatactgcctcaaacccatggttgacagattgagccagaagctgagcaaactcctgattgttaaaaattttgaggctgcagctgctgggaatcttacagacagtggtgggatgaaagccatgatgaaagttgcagttcctactctgtacaaaatatgctgctgtcactgaggcattccgcataacaccctctcccacccaacatagtacagatgaacaaccttttccaaatatgtcgcctagtgttttcaattgtcgaattacgattaacatttgacaacaaacccaagcagaatctacttttgttatttgaaggatctgtgaatcccatctactaacacactagtagaagatgcatgaaaagcttctccaacacgattgtttaattcatagtagactattgaacaccaatgtttaggctcttcataggcaacaggctgaacatccctgctggatatactgggcataatctgaggaatcatattattgncttgtatccataggctggg

SEQ ID NO: 250495 - DNA, 1060 bp, Homo Sapiens
ttatataatacaaccgatactttgtagaacacatctataaacttgcacaggaacaacaaaagtataatacttatataagatcagaaatgtccatgtgttcctatgctatatggtatcatttttttcagtcacttttaaaatgaattcactgaactgtatcatgatatccccattattaggttttaatctagcagcccaacttacccggacaagtgcatcatctatgatatggtcacgtctaactttgagtctcaaatatggattcaactgctgtccttgaactaagctgtagagaacagtgattcttcgttcactgtacatgcgaattctattgtcataatataatcccaaattctttgtgacagcattcaatataaagggacatgtcataaaagagaatttgttctctgtttctactttgaaaaaagtataatctttatccatttctagaacctcattcagtggttcattaataaactcttcaaaagggataagtggttttcgacaatccagggttttaacaccaagttcagtttccagggggtccactcgaggacctttcttgtttcttctttcttctcccaaaagttcctgaagtgtcagctcgctggactcagggatgggctcttcatcatcttcttcattgtgatttgtgtccacttcccctcccactacatttgcatagtaaaccattttcaagcacttcgaagcagcaacaatggcatcatcatcattcactagatttcgactgttaaattcattgcttatgactttataagtaataagttgctgaaatgtctccatcattctccgaatctggtctgcattgtatttagaccacagtctgatcagttttccttgggctgcaaggggtagcttgctcatcgctttgcaaaataatggcaaagccatttccagatattcaggactgtggagatttctattctccattacgataatgaacaaattcagataattaggatctcgagagtatacattgtgatacgtcaagtcacattccacgttaggtgacaaatatacaagtgcccgtccgtaatgc

SEQ ID NO: 250496 - DNA, 536 bp, Homo Sapiens
cggccggggagagcgtcgggatatcgggtggcggctcgggacggaggacgcgctagtgttcttctgtgtggcagttcagaatgatggatcaagctagatcagcattctctaacttgtttggtggagaaccattgtcatatacccggttcagcctggctcggcaagtagatggcgataacagtcatgtggagatgaaacttgctgtagatgaagaagaaaatgctgacaataacacaaaggccaatgtcacaaaaccaaaaaggtgtagtggaagtatctgctatgggactattgctgtgatcgtctttttcttgattggatttatgattggctacttgggctattgtaaaggggtagaaccaaaaactgagtgtgagagactggcaggaaccgagtctccagtgagggaggagccaggagaggacttccctgcagcacgtcgcttatattgggatgacctgaagagaaagttgtcggagaaactggacagcacagacttcaccagcaccatcaagctgctgaatgaaaattcataa

SEQ ID NO: 250497 - DNA, 509 bp, Homo Sapiens
ggccgggggtcagacacaatgttggcactcttggttctggtgactgtggccctggcatctgctcatcatggtggtgagcactttgaaggcgagaaggtgttccgtgttaacgttgaagatgaaaatcacattaacataatccgcgagttggccagcacgacccagattgacttctggaagccagattctgtcacacaaatcaaacctcacagtacagttgacttccgtgttaaagcagaagatactgtcactgtggagaatgttctaaagcagaatgaactacaatacaaggtactgataagcaacctgagaaatgtggtggaggctcagtttgatagccgggttcgtgcaacaggacacagttatgagaagtacaacaagtgggaaacgatagaggcttggactcaacaagtcgccactgagaatccagccctcatctctcgcagtgttatcggaaccacatttgagggacgcgctatttacctcctgaaggttggcaaagctggaca

SEQ ID NO: 250498 - DNA, 496 bp, Homo Sapiens
  misc_feature (79)..(79): n is a, c, g, or t
ctcacagggcgaggggtgtatgatagaacagagggccttcaagggctgttaagagacagaaggtagagaatgttggggntccccagggaggtcatagtgctggtgtggggaggctttggagaatcaaaatgtgacccccatggaaaagtgatagggccaccacgggcagctgcccaggtcccaggttgtatgctgcatatttcagtgggtgctctcgttttccatgtgaatggcgccctctagagttgcacagtgcacaacctatacaaccattggtggcaactctcatggtggggcccagcccactgaggccctttcctcctgggccaccaggtttccctgcagtatgagaaaagtggaagcttctaccacacgtgtggcggtagcctcatcgcccccgactgggttgtgactgccggccactgcatctcgtgagttctctaccctgtccctgcctgtggccccgggcagcgggggagagtggtgatgatgggga

SEQ ID NO: 250499 - DNA, 655 bp, Homo Sapiens
tcctatcatcacaaaactcatgatgctccggctgctcagttccctcctccttgtggccgttgcctcaggctatggcccaccttcctctcacccttccagccgcgttgtcaatggtgagagatgcggtcccctacagctggccctggcaggtttccctgcagtatgagaaaagtggaagcttctaccacacgtgtggcggtagcctcatcgcccccgattgggttgtgactgccggccactgcatctcgagggatctgacctaccaggtggtgttgggtgagtacaaccttgctgtgaaggagggccccgagcaggtgatccccatcaactctgaggagctgtttgtgcatccactctggaaccgctcgtgtgtggcctgtgggtgagtgaatgctccggtctggaacccaggggctcctctacttgtccctccatgacccacagccaagtctgagtaggctccaactctgagtagggacgtagggacatagggacatagggacaggggagctgagtccagcagcctgtgcccaggtcccacacactgaggattgaagccagcagagcctttaaggaccatcaccacaaaacctgtctccctacagaggggatggcagtgttcagggaggggcaaggaactctgccaaggccactt

SEQ ID NO: 250500 - DNA, 798 bp, Homo Sapiens
  misc_feature (37)..(37): n is a, c, g, or t
  misc_feature (53)..(53): n is a, c, g, or t
acctgcatttccaccacctgttctgggagtggggttnccccagccccctttgnttaccttctgccctatattagagccccaggttctgtgcccttttcctatcatcacaaaactcatgatgctccggctgctcagttccctcctccttgtggccgttgcctcaggctatggcccaccttcctctcactcttccagccgcgttgtccatggtgaggatgcggtcccctacagctggccctggcaggtttccctgcagtatgagaaaagtggaagcttctaccacacgtgtggcggtagcctcatcgcccccgattgggttgtgactgccggccactgcatctcgagcgatctggacctaccaggtggtgttgggcgagtacaaccttgctgtgaaggagggccccgagcaggtgatccccatcaactctgaggacctctttgtgcatccactctggaaccgctcgtgtgtggcctgtggcaatgacatcgccctcatcaagctctcacgcagcgcccagctgggagacgccgtccagctcgcctcactccctcccgctggtgacatccttcccaacgagacaccctgctacatcaccggctggggccgtctctataccaacgggccactcccagacaagctgcaggaggccctgctgcccgtggtggactatgaacactgctccaggtggaactggtggggttccaccgtggagaaaaccatggtgtgtgctggagggtacatccgctccggctgcaacggtgactctggaggacccctcactgccccacagaggatgg

SEQ ID NO: 250501 - DNA, 802 bp, Homo Sapiens
ctgttacaatgccaccaagacccttctttctttgcaacctgaaattcaaaattcaggtttccagcatcagatttgcaaatatccttgttatcatgacttgtgggttcttttacaattctgacagcctgatttgacgccatggctacatttgttcctggggcttttaaaatgctctgggcttcttcaaacttgcatttaaaaggtgctgcttcctcaggagttttgaacctaatagcaagttgttctggttttggcaactcatctgcataatcaagggcatgccatacaaaagatctgtctgatccagcatttggtgtcaatttcatatctggactgatgtaatgatttgcacagattttcaatacttgctctcgtctcattagaaggcgaattttaccagatgttttatgcctcagtatttttacattgccaatcccacgttctttccattctttggattctacatcgaaacgaaacaatttcgcgcggttgcaaaagaattcttcttcatcttcctcaccagtttttacttcaatcttatcaggaagaggtactacaggctcaaagtgaggaccgtcatcatcatcatccccatgggcacttcctccatctgtctcatgattcttgtttgctgtctctaaagtgggtgttccaaatactgatttccctggaccatggaaagtaaacatatcatcacttcgccgaaaaccagaattcttttgctgactcgaccccatgttttctgtaagagtgaaattccagacacatttttgcttccaaaattgaatgtatttcgaggccc

SEQ ID NO: 250502 - DNA, 921 bp, Homo Sapiens
  misc_feature (601)..(612): n is a, c, g, or t
ctggtcagcatattaaattattaacttaaatccagcagttttatcatatttcagtgattcgagtaaaatttatagttaccaaaatgcgaatcaagtagcagtacattgggaacaaactaattataaaatacgccttagaaaattttacaaaatggtattaaaatttcttgtcacagtggctttttagatccaaaaaacctgctcatttttttctgtcaaattactttaacagcctaaaatgtaaaaagagagaaaatgtagttaacaaatggttacaccaggaaaacacttggggcacttgagtgcttgctggcctttagttaatgtctagaatcccctgtagctgcagaggacccactgtttttcaggcatctggaagggttttgcatttgccttctccactataaaaatcacacacacaaataacagagagaagaatttattatttagagatattctagaaatatagcaagaatgaacaagaaaatctggcataaaataaaacacccagtgcccatttggcacctaagctacaggaaatcttgaactttcacgaaaaccaaaatcactgcaacccttggtatactgaaattcaatgtgnnnnnnnnnnnnccagattatcaatgtgaggaagctttaagaaaataaaatcaacctactcatttatttaaaacagaaataacatcatgcatttatttgaaggctctgtaagcatacatggagtgaatcatttaccttcagggctttttcataaaacttaacattaaattaactaagtagatgtatctcagggagttacaataagggacatggttttaaacaacttaaaaatgttttaaaagaaaacaaaaggtaaataccttataataacagacctaatttctaatttttagaattaaaaaaaatctgcacccggccgaa

SEQ ID NO: 250503 - DNA, 794 bp, Homo Sapiens
  misc_feature (563)..(563): n is a, c, g, or t
cggccgggggacgtccgtggtccttgtcgcacgtcgcagcgcctggcgcccgggaagaggtggttgtgaggcagacgaactcgcggctctccggcttccgaggcttccgagttgtcggaggaagggggcggcgagcaataagaacccgccgcacccggtcctcagcgactcttctgacctccgcgcgacgtacccgccgccgccgttggctggagcatttgacattgtgcagcaaagaaatggttatggagaagcccagtccgctgcttgtagggcgggagtttgtgaggcaatattatactttgctgaataaagctccggaatatttacacaggttttatggcaggaattcttcctatgttcatggtggagtagatgctagtggaaagccccaggaagctgtttatggccaaaatgatatacaccacaaagtattatctctgaacttcagtgaatgtcatactaaaattcgtcatgtggatgctcatgcaaccttgagtgatggagtagttgtccaggtcatgggtttgctgtctaacagtggacaaccagaaagaaagttntatgcaaacctttgttctggctcctgaaggatctgttccaaataaattttatgttcacaatgatatgtttcgttatgaagatgaagtgtttggtgattctgagcctgaacttgatgaagaatcagaagatgaagtagaagaggaacaagaagaaagacaaccatctcctgaacctgtgcaagaaaatgctaacagtggttactatgaagctcaccctgtgactaatggcat

SEQ ID NO: 250504 - DNA, 531 bp, Homo Sapiens
gttatcagaacttattaacattagtgtcactaaaattggtatacaactccccactgctaaatttggctaaaaagaaaatttatttcatggtggttgatgacaaagatgactttttaatagttattcttgtgtttgctccctcagcatttgacattgtgcagcaaagaaatggttatggagaagcccagtccgctgcttgtaggccgggagtttgtgaggcaatattatactttgctgaataaagctccggaatatttacacaggtaaattttaaacaaataatttggtatttttatctactttttttcttgggtatgactatatatattttgcatttcctgtctcctcattatctgacagtatctttgtaaacatgtctaaactgtattcaatattttattcatttgatggcaaaaagtgtttttaactgcaactcacagtaataaaaacattttatgtcatattctggtacataacacattcatatctatatatgcacacgcttattcttatatgtactctagtatttta

SEQ ID NO: 250505 - DNA, 1386 bp, Homo Sapiens
ggcacgagcaaaataatgaaataaaacacatctatgccatctcttctgctgccttatcagcaagctataaagcagacactgttgctaaggttcagggtgtggagtttagccatcggctcaacacagacatcgctgggctggcttcagccattgacatgagcacaaactataattcagactcactgcatttcagcaatgtcttccgttctgtaatggccccgtttaccatgaccatcgatgcacatacaaatggcaatgggaaactcgctctctggggagaacatactgggcagctgtatagcaaattcctgttgaaagcagaacctctggcatttactttctctcatgattacaaaggctccacaagtcatcatctcgtgtctaggaaaagcatcagtgcagctcttgaacacaaagtcagtgccctgcttactccagctgagcagacaggcacctggaaactcaagacccaatttaacaacaatgaatacagccaggacttggatgcttacaacactaaagataaaattggcgtggagcttactggacgaactctggctgacctaactctactagactccccaattaaagtgccacttttactcagtgagcccatcaatatcattgatgctttagagatgagagatgccgttgagaagccccaagaatttacaattgttgcttttgtaaagtatgataaaaaccaagatgttcactccattaacctcccattttttgagaccttgcaagaatattttgagagggaatcgacaaaccacttatagttgtaccgggaaaacgtaccagagaaaccctgaagcaccatcaatattgatcaatttgtaagaaaatacagagcagcccctgggaaaactccccacagcaagctaatgattatctgaattcattcaattgggagagacaagtttcacatgccaaggagaaactgactgctctcacaaaaaagtatagaattacagaaaatgatatacaaattgcattagatgatgccaaaatcaactttaatgaaaaactatctcaactgcagacatatatgatacaatttgatcagtatattaaagatagttatgatttacatgatttgaaaatagctattgctaatattattgatgaaatcattgaaaaattaaaaagtcttgatgagcactatcatatccgtgtaaatttagtaaaaacaatccatgatctacatttgtttattgaaaatattgattttaacaaaagtggaagtagtactgcatcctggatttaaaatgtggatactaagtaccaaatcagaatccagatacaagaaaaactgcagcagcttaagagacacatacagaatatagacatccagcacctagctggaaagttaaaacaaca

SEQ ID NO: 250506 - DNA, 1538 bp, Homo Sapiens
gaattataactataaggtccatcttttatatgttctgcctgaagtgttagaagattcacctctggttcccccaaaaaggcagttttcagatggttcactgcaattgcagtgttcatgaatgttgtgaatgtcttgtgcctgtgccaacagccaaactcaacgacactctccttatgtgtttgaaaatcacatctggtggagtaattttccggtcacctctaatgtcagttcagcccataaatatggtgaagcctgatccaccattaggtttgcatatggaaatcacagatgatggtaatttaaagatttcttggtccagcccaccattggtaccatttccacttcaatatcaagtgaaatattcagagaattctacaacagttatcagagaagctgacaagattgtctcagctacatccctgctagtagacagtatacttcctgggtcttcgtatgaggttcaggtgaggggcaagagactggatggcccaggaatctggagtgactggagtactcctcgtgtctttaccacacaagatgtcatatactttccacctaaaattctgacaagtgttgggtctaatgtttcttttcactgcatctataagaaggaaaacaagattgttccctcaaaagagattgtttggtggatgaatttagctgagaaaattcctcaaagccagtatgatgttgtgagtgatcatgttagcaaagttacttttttcaatctgaatgaaaccaaacctcgaggaaagtttacctatgatgcagtgtactgctgcaatgaacatgaatgccatcatcgctatgctgaattatatgtgattgatgtcaatatcaatatctcatgtgaaactgatgggtacttaactaaaatgacttgcagatggtcaaccagtacaatccagtcacttgcggaaagcactttgcaattgaggtatcataggagcagcctttactgttctgatattccatctattcatcccatatctgagcccaaagattgctatttgcagagtgatggtttttatgaatgcattttccagccaatcttcctattatctggctacacaatgtggattaggatcaatcactctctaggttcacttgactctccaccaacatgtgtccttcctgattctgtggtgaagccactgcctccatccagtgtgaaagcagaaattactataaacattggattattgaaaatatcttgggaaaagccagtctttccagagaataaccttcaattccagattcgctatggtttaagtggaaaagaagtacaatggaagatgtatgaggtttatgatgcaaaatcaaaatctgtcagtctcccagttccagacttgtgtgcagtctatgctgttcaggtgcgctgtaagaggctagatggactgggatattggagtaattggagcaatccagcctacacagttgtcatggatataaaagttcctatgagaggacctgaattttggagaataattaatggagatactatgaaggagatgtcactttactttgggcccctgtgg

SEQ ID NO: 250507 - DNA, 865 bp, Homo Sapiens
  misc_feature (48)..(48): n is a, c, g, or t
  misc_feature (65)..(65): n is a, c, g, or t
  misc_feature (112)..(112): n is a, c, g, or t
  misc_feature (189)..(189): n is a, c, g, or t
  misc_feature (192)..(192): n is a, c, g, or t
  misc_feature (556)..(622): n is a, c, g, or t
agaatttatttaaagcgtatgtttcctgcgatcctcactttgatctanaaaatcacataatctgncttttttttacacaaacatgctgcagtgaatctactgccatacatgncgcaatatcatctgcctcctttcttcctttcagaatatggcccagagcttctgttttattaccaaggcattaaagtngcntggctgcccaggagaaaagaagacattctaattccagtcattttgggaattcctgcttaacttgaaaaaaatatgggaaagacatgcagctttcatgcccttgcctatcaaagagtatgttgtaagaaagacaagacattgtgtgtattagagactcctgaatgatttagacaacttcaaaatacagaagaaaagcaaatgactagtaaacatgtgggaaaaaatattacattttaagggggaaaaaaaacccaccattctcttctccccctattaaatttgcaacaataaagggtggagggtaatctctactttcctatactgccaaagaatgtgaggaagaaatgggactctttggttattnnnnnnnnnnnnnnnnnnnnnnnnnnnnnnnnnnnnnnnnnnnnnnnnnnnnnnnnnnnnnnnnnnntaaaaatacggacgtactttgtgctgggaactctacatctagcaatttctctttaaaaccatatcagagatgcatacaaagaattatatataaagaagggtgtttaataatgatagttataataataaataattgaaacaatctgaatcccttgcaattggaggtaaattatgtcttagttataattagattgtgaatcagccaactgaaaatcctttttgcatatttcaatgtcctaaaaag

SEQ ID NO: 250508 - DNA, 738 bp, Homo Sapiens
cttgagcctatgagtgcatgaccagcctaggcaatgtagtgacacctcatttatatttattctagaacaaagagagagtactactgaagaactctaaaaaataaaatataagcttaccttggattcttggcttagagtagaggttttttttaagttatggaggaaacatttttgtaaaagtttaatgacccactttagatgctccaagaacaagcatcccttccatgtatgtcttgagaaagaaatcacagaagcatttctcaccaatactctttggcttaaaatgttcagcagaattgggcagtgggggtgacttttcttatattaataatatttacatccaatacactgaatcttcctttagaggtaagactttaatatctatactgtaaatatttggtttatttggcactactgtaagttttgtttttcacaaagctcttattatgaagcaaaataaaaattctagtttcttgtatgattttttgtactcattcattcctgttaagctgccaaaaattaaagtgcaatattgtatatttttaagaacaaatttaaaatagaattttgatgtttctcagatcacaagaaatacaaatctatatagtataataaaatcagcaaaaagatcaaataaatgaaaaataaagcttcgaggggggggccccgggtacccatttcgccctattagtggagtcgtgttacattactggcccggcgttttaccgccgggctggg

SEQ ID NO: 250509 - DNA, 646 bp, Homo Sapiens
tctgaaccctgcaacaccaatgtcaatgagatggttcatatattcggcaatcttagaacgcacgtaatccttctccagtgcaagatcaagaagaccagtcagacgacaatctctgacctgagtagcatcattgtagttctcgatatctccacttccagttttacatttaccatcattgaaatcccatccagaatatgggactgctggaaagtccctacttccagggttgaagtaacttccacaggtactgcttgttcctgcactcacagcgttaccacacatatgattaattacagcatccacataaatacgaaccccaacattgttacatctagtcaccatgtttctaaattcatcttcatttccagatcttgtgcataatttatagctaactggttggtatctttcccaccaaggtctgaaagggttgtaaattgcaacattttcatttggtggagagacctgaacccctccaaatcccttcggagctaaatatcgctcacattcaagagcaatatcaacccatcgccattcaaacagatgaacaatagatgtccgtccttgttgtgtatttggggaatactgagcccagcagaacccaagtggtgaaaagcaacagaaagaacttcattttgctttgaagttc

SEQ ID NO: 250510 - DNA, 1080 bp, Homo Sapiens
ctcttagcatttaaataaagagcggtcttattcagacattctttggaacacatggcttatcagaaaccgatttgttcagaatctgtaagacacaactaaggtggttctgctactggaagtgagcgtctacacatcaggtcgagagagagacagaaatatcttcaaaatgaacaaactctttcacctcaaaataccacttccaggcatctaagggggaaaaaagtaagaaatcagaagattttaaagatattcatcacagcattatttaaatagtggaaaaatcagaaaccgtcttaagtattttacagtagggaaatggtcagataaattatagtaaatggacaatgactaaatagtacaattgttaaaaacatgtttctgagaaactcatgacatgggaaaatgcttaaaatatcaagggagaagacgatgcaaacggtgtgtgtcggatgttcctatgtttagtttaaaaagtgaacaaatggcagggcaggatatacggcaaaatgctcacagtggtcttctctggccggtgagcctacagctgatcttgtcagagacaaacgttagttttactgagtcacccagagccctgtgctggtgcctgagggtttgttccatgggacagtctccacaattcctctggggaagggccacaaatccgcacagtgtgtcccaagagggctggagtaggcggagtccccagcagctgtggcatgaccagccatctctctcaaaacaattgttaacaagccttctgcaagttaaggttccacatggtagccgtggtacagaggcatttctctagggtggagaggcttgtgctctacaccaggactgcaaaacgccctggctggggccacacaaagaggggagaaaggaatccctcagaagccagcccccaactgtgtcccagagaaaggcggggcacctgggacacctaggcgcgcagcgaccacagcctccctccgctttgtgccgagaatccgcacagtgtggtcccgacattccacctatccttgcccatgtgtggggatggcaccgacgcgtggtcacatatccatacgcgggccgtaccaa

SEQ ID NO: 250511 - DNA, 527 bp, Homo Sapiens
  misc_feature (443)..(452): n is a, c, g, or t
gggaattcggcccttaaggccaattgactccgtcaccaaagaaagcaccagaaaacgtgagtcccgtttgacagacttctttccgtttcagaactgtgtcctacaaaccaaacaaatctcccccaattgttaaagccatatgcattttgaaggaaatgtaatccatatgttcctgagtcacttatgcctaagtcattaaaaagttattttttaaatgtgatttcatgtttgaagtcattttagagtatttttagtagactctcattcttcataatgctaaatttttcttggtttgttttcttgttttatttaaacacactgtatatcatcttaacacatcctgtggcgaggcacaaagggaatcttgaactcagaaggagggtctggggtactgggaataacacatttgaggcagtttctattttcagaagtttacaactgtnnnnnnnnnnttaattttttattttatgtcctgggctgcttttaacctggtcacatcgtcatcccagccctctccccccgcattc

SEQ ID NO: 250512 - DNA, 533 bp, Homo Sapiens
cggccggggaagtaactgacattcttctctaaacaactatttctcttgggggataacttgcttttaaattactccccaaatagcatctacctttaaaatggtatctgtatctagttctatgcctctatagcgataactaacttttcgtctttttaaaaaaacatctttaaacatgtttgataacttgtggaaattaatgtcaagaactggatattattatatggtaatatttggttgctttatgttttaattttttgtatgaaaaataggagttgatttggttcttagatctatttaataagtaaataatatagattatgttagctttatgagagcaataattgtgttattctgtccttgtgttaatattacttagtacatgcttggtacgtggtttttctatgtgctgaattcatttttgtcaatagttaatttttataagattttgctttgtcatctaagaagtagataagcaaatacacttttaagcaagtataatatgtggtgctttttaatattttgtattgatgaat

SEQ ID NO: 250513 - DNA, 1381 bp, Homo Sapiens
  misc_feature (1322)..(1322): n is a, c, g, or t
  misc_feature (1352)..(1352): n is a, c, g, or t
  misc_feature (1361)..(1361): n is a, c, g, or t
cctccaaggcctctgaaaacctctccccttcttccagggtttccagacccaaacacgctacctctgaaagagaatgattgctggccaaagactattcccacagtactggctgcttgaccaaacacagacccagtattactagacccaaaacctgaagcttggcaaaagctgaacccaaaggttgctgctgttgtggtgccagctaaggtaccaccaaagacagagcctccctgtccaaagccaggactctgcccaaaaccagaagcgttgctttggccaacacagcccccctccgtgtgttgggagaagactgtccaaatgagaaggaatctggagctactggtacttgaggcggcaccaaagacacttccactggtggatgtgggagtggaggaagcaggctgaccgaaggcaggcacggaactgaacccaggctgactgaaggaaaagacacttgcagcactgctcgccgactgcccaaagactgaggcctgcccgaaggttgtctgtccaaagacccctggggctgtggtaccaaaagctgggctgctaaaccctgagctgctgacctgtggtgtggcagctgctgtgctggctgtgctaccagtctgctgcccaaacagacttggtgcggtgctggctgccacttgcccaaacacgggcgtggcagagggggcagtggctgtgttgttggtgagctggttgaaagctgagctagaactggcagcaggaggctgagcaaagacggatgagccagaagtgacggtaccaaatgctgctgcctctgcagatgggccgggagcaacaatggacgtggtgctggaggctatgggggtacttgatgtttcgacggccacagggcctgcacttgagatagcagctgctgtgacagcagtctgcccaggcacagaaaaggaggaagcaggtggtactgcctccgtcctggcatcagggacccccgtggtggctggggtagcctctgcagaaagtgctacaagactagtactagatgctgcagtgccagagttgctgactgcaggctgggcaagaacaggttcttttttaacagagtcagaagtttgcggaggagcctggggaagctgggctgactgttgctcctctagaagtgaggctgctgatgctgagacctcactgtcacctggcttctcaggcaaagctgatgaagtggcctcttctgtgcttctgccagcggacataggcagggagggggtagttgctgaactcaggaggctaccaaatgacaatgtggggaatgatgttggaaggggagtggcagctgtagttggtggtggggcagatgnggggcactgtgctattggttctgatcccgnggaattccnggaccggtacccaagccttc

SEQ ID NO: 250514 - DNA, 598 bp, Homo Sapiens
aaaaagaagcaaaaaagttagcacaagaaagaatggaggaggacttaagagaaagtaatccacccaaaaatgaagagcagaaagaaactgtagacaatgttcagcgttgtcagttccttgatgacagaattctacagtgtataaagcagtatgctgacaagattaaatccggcatacagaatacagccatgcttctcaaagaattgctttcttggaaagttttgagcacagaagactatacaacctgtttttctagcagaaattttctaaatgaagcagtggactatgttattcgccacttgattcaagaaaagaacagagtaaagacaagaatatttctgcatgttttgagtgagcttaaagaagtggagcccaaattagccgcctggatccgaaaacttaatagctttggcttagatgccacaggacctttcttttctcggtatgaagcatctcttaaacagcttgattttagcatcatgactttcctctggaatgagaaatatggtcacaaactagactctatagaaggaaagcaacttgattatttctttgagccaacatcatcgaaggaagcccgctgtttaatatggctgct

SEQ ID NO: 250515 - DNA, 838 bp, Homo Sapiens
  misc_feature (784)..(784): n is a, c, g, or t
tggtgtcggtgtcggcagttccccggcgccctgctgcggtcgccgcgagcctcggcctctgtctcctccccctcccgcccttacctccacgcgggaccgcccgcgccagtcaactcctcgcactttgcccctgcttggcagcggataaaagggggctgaggaaataccggacacggtcacccgttgccagctctagcctttaaattcccggctcggggacctccacgcaccgcggctagcgccgacaaccagctagcgtgcaagagcgccgcggctcagcgcgtaccggcgggcttcgaaaccgcagtcctccggcgaccccgaactccgctccggagcctcagccccctggaaagtgatcccggcatccgaaagccaagatgccggcccacttgctgcaggacgatatctctagctcctataccaccaccaccaccattacagcgcctccctccagggtcctgcagaatgggaggagataagttggagacgatgcccctctactgggaagacgacattcgccctgatataaaagatgatatatatgaccccacctacaaggataaggaaggcccaagccccaaggttgaatatgtctggagaaacatcatccttatgtctctgctacacttgggagccctgtatgggatcactttgattcctacctgcaagttctacacctgggctttggggggtattctactattttgtcagtgcccggggcattaacagcaggagcttcatcgtctgtgggagccaccgctctttacaaaggttcggcttncccctacggcttcttttctggattcatttgccaacacaatgggcatttccagga

SEQ ID NO: 250516 - DNA, 851 bp, Homo Sapiens
  misc_feature (820)..(820): n is a, c, g, or t
  misc_feature (837)..(837): n is a, c, g, or t
gatctcacagaatatttaaaggttagatcacatgatccagaagaagctattcgtcatgatgtcattgttactataataacagctgccaagagggacctggccttagtaaatgatcagctgcttggctttgtaagggaaagaacactggataaacggtggcgagtaagaaaagaagctatgatgggtctggctcagctttataagaaatactgtcttcatggtgaagcaggaaaggaagctgcagagaaagtcagctggataaaggacaaacttctgcatatttattatcagaacagcattgacgacaaactgttggtagagaaaatctttgctcagtatcttgtcccccacaacctggaaacagaagagagaatgaaatgcttatattacttatatgctagtttggatccaaatgctgtaaaagctctcaacgaaatgtggaagtgtcagaacatgcttcggagccatgtacgcgaactattggatttgcacaagcagcctacatcagaggctaactgttctgccatgtttggaaaactgatgaccatagcaaagaatttgcctgaccccgggaaagcacaagattttgtgaagaaatttaaccaggttctcggcgatgatgagaaacttcggtctcagttggagttattaattagcccaacctgttcttgcaaacaagcagatatttgtgtggttagtaaatcatacttcacactttttctctagctttacttacagaaatatgtattttattaaagcctgttttacatacagtgatttgtgtaaatgtaacaatattgtgagctctgattactttggnagtatatctattgtcanttaattctctatta

SEQ ID NO: 250517 - DNA, 624 bp, Homo Sapiens
  misc_feature (35)..(35): n is a, c, g, or t
  misc_feature (47)..(47): n is a, c, g, or t
  misc_feature (52)..(52): n is a, c, g, or t
  misc_feature (63)..(63): n is a, c, g, or t
  misc_feature (73)..(73): n is a, c, g, or t
  misc_feature (88)..(88): n is a, c, g, or t
  misc_feature (93)..(93): n is a, c, g, or t
  misc_feature (103)..(103): n is a, c, g, or t
  misc_feature (610)..(610): n is a, c, g, or t
aaatttaaccgggttctcggcgatgatgggaaacntcgggtctccgntgggngttattaattngccccaaccnggttcttgccaaacnagccngattatttgnggtgggttagtaaatcatacttcacactttttcctctagccttacttaccagaaatatgtattttattaaagcctgttttaccataccagtgatttgtgtaaatgtaaccaatattgtgagctctgaattactttggagtatatctattgtcaagttaattctctatttaccattcactctcagccacattccaggaaaataactaaagaactaagccagggagattggtcttaggaattttacaagataaagtactttgaacttagtagacattcattgagtaatgataagtattttctgaatgcttgtgtacatgtgcattttcttctttcatgtattagaatggaaataatcgtcaataaattagtagtagtaacattgccatatatctggtttcatttacagataaagtaaattcctatctaggacttttgtcttcattcttctcttgaactcatttaaaaccaatattcttaaagctatcagggaggggaaaacttatggcntcctttatttcagc

SEQ ID NO: 250518 - DNA, 2381 bp, Homo Sapiens
  misc_feature (1477)..(1504): n is a, c, g, or t
  misc_feature (1510)..(1510): n is a, c, g, or t
  misc_feature (1717)..(1717): n is a, c, g, or t
  misc_feature (1866)..(1866): n is a, c, g, or t
  misc_feature (1939)..(1939): n is a, c, g, or t
  misc_feature (1962)..(1962): n is a, c, g, or t
  misc_feature (2003)..(2003): n is a, c, g, or t
  misc_feature (2158)..(2158): n is a, c, g, or t
  misc_feature (2172)..(2172): n is a, c, g, or t
  misc_feature (2198)..(2198): n is a, c, g, or t
  misc_feature (2318)..(2318): n is a, c, g, or t
  misc_feature (2334)..(2334): n is a, c, g, or t
atgagattaaggttaggagaaaacctcagtcattgcatgctttttagtatgggccaataaaatctcaacacctgtgggagagtaagaactaagggaatgagtttgggcggcccctcataaaggaccttagaggcagggaacagcaatgccaaatttccctctctcgtgagatgggggatcctgtgcaggctgatgaggcacccatgagaaaagccgaaaaagcatgcatcttagaaatagcccctcaattccaggagtcaacatgccaaagaatgaggctggagacaggtagctccgagggaggacttctggcatgagatctcggcacggcaagcccagcatcgcctcagcccagacaggctccaccaggagatcaagcaagggctgcctttcaggagtcacctcctgagccacttcagagttctggaagtgaccacggaccagggtggaggaatagacttctagttcattctgggacacttgagccagagagttgaaagcttggaaagaccagataagaaacctgccctttgtctccctagggacatgagacaccacattccatttgtgctagaaaaacctatccactgatgagtctaactgttccaaacgcctcccacctggtgtgcacagctgcctgggtccattgtcacttgggtgcatcaggttgtcctccgatttttagatgagtttcctgtctagagatgtcctagtctgctcactggctggtggcagtagggtaccctgcgtcctcgaaaagccagagggttcacctagtcagacgaaactccagaacagtgcttgtggagggcctgactgtcctgctcacccacagccgatctgctgcaggtcagcaactgtgtcgtgagcagctgccaaccaccagcctttctggtgctgttctccagttcacgtctgccagctggtgagggcagaggcagacctggtcagacccagcgcccctcctccctgagggagcatggcacagcctcacacttgaaagacggtgtttggtttcccatctaatcaacttaagggaagccggcatgtacccttcaaggccctgtcaccacctatttcctgatcagttggtataaactgagggtggcttttagagacccagacttggttggcagcgctgccatggaacaccccagcaagcacctcccagcctgcctttcggagcagcacccaggaggggatgccgcgctccagcaacaccaggtcaggcctgtgcagacccctgccctgccgctgcagaaatccagaagcatccttaatgcttctcagtcttcagccagagggagggctgttatttccagaggtgcgctttttatgtacttttagctagatgtggcatgcatctgtgagctttagatcattaaatccaaaatgtttgcctaaatgagtttatcagttgttaacttcaagaatattaaatgatttataataaagctcctgcatttctctccgaaannnnnnnnnnnnnnnnnnnnnnnnnnnntgtgtnggacgactgtcgggcctggacaacttggcccaaaccaattcttttgcgagccccgtttctgatgagggcaaggggaccatgaaccctaatctggtttgcggaccaagagcccctgtacccaagaaaatgaccgtgggggcaatgccttcacccacctatgaaaaaaccccccgcggggaaaaaccgaagccgggttggggcaacccnaatcccagaattggaaatcccccggcgcggaacgtggaacggggtttcttattcaaaccagggggtcctcaaaggccaagcggggagggcctcaaagttaagcgtccccccaactccaaggaaaacctcccctgggcccttgggctggnttgaattcttaacatttaagggggcgtttcctgccgcgataaaggcgaatatccccgttcccagaaatggggnaaattcaattaagaacgtttggnactgggggcgggaaaggcctatcaacacaccccccgggggngggccttagtggcccctataatgttccctcccgccccggaagagaaaaaaataagcgcgcggcccggggaacgagaaaattggtggacacaatattatggagaccacccggtctccaaaaaaatttggccgccccgggcggggtgaaaaaaggtnccacctctcggggnggagtagagcgcctctcccccacganagaaaaaatatcgcggtgtgtgtgggcaccacaaaaaacacccgccccttctttctggggcgaaaataaacagccgccctcaaagagagggaataataatagctgggaatcagaacgccntcccccttgcccgctngaagagcagaagaagaaaaacagggccgtgggagaaaacacaatgcc

SEQ ID NO: 250519 - DNA, 1480 bp, Homo Sapiens
  misc_feature (116)..(116): n is a, c, g, or t
acacaccgaaatagtggactttcccacaccaattttttcggtgggggggccccacccaggcaagctttccgacacattggttcattccgggaaaaaggggcaaggttttccttatngtggttctttcccaaggcttttcaacttctttggggttcaaagtgtccccaaaatgaaactaagaagttctaatcctcccaccctggtcccggtggtcaacttcccagaactctgaagtggcttcaggagggtgactcctgaaaaggcagccccttgcttgatctcctggtggagcctgtctgggctgaggcgatgctgggcttgccgtgccgagatctcatgccagaagtcctccctcggagctacctgtctccagcctcattctttggcatgttgactcctggaattgaggggctatttctaagatgcatgctttttcggcttttctcatgggtgcctcatcagcctgcacaggatcccccatctcacgagagagggaaatttggcattgctgttccctgcctctaaggtcctttatgaggggccgcccaaactcattcccttagttcttactctcccacaggtgttgagattttattggcccatactaaaaagcatgcaatgactgaggttttctcctaaccttaatctcatcttctcaaatgtgtgccttcttgtttttaagaccatagacaaggacgtcaggtgactgctgaaatagaactaaagctaaaatttttctcggatcttggcaaattctgctaatggcacctctaggggcacaatgatcctcaaatgacatccaaccagactccccataaacaaggtttgggctggagctgtttctagttttaaatatggaaatgtaaggcaaaggacagagcacttggttttgccttagatttcccagcagagtaggatttgggcgaaactgctggttctctctgtcagggaaataccaagtgcagcagagccggggccatggggcaggctggtggactccaggctcacttgcgtggctgctggatgtgctgggttcttggggaaggatgcttgtccatggaggcatgcggcttctggtgagccacctgcgcagccgccggggggaaatctttgtcaccccgggcgatgaccccagagatgaacacagtgggtttaggtggactggggctttcccattcctggtcatccttgtctttctcttctttggtgtctcctgtatgtgggtgtttctgcacaattcgcattccaccagctttcacggcgggcgggtgtccagctttagtctctagtttcccttcgggaggcgaagacatggcgcggcggggcttccgcggggccgaggcggcggcgcggttctcgggccgggcggggcgtgcgcgagtgagctcaggtgtgagcgccggcgagcgagcgggcgggagaacacgcgcgcgcgacgcgtgggtcgacgatatccccggaaaattttcccggaggcccg

SEQ ID NO: 250520 - DNA, 420 bp, Homo Sapiens
accctatttccctgaatcaagtgggtaataaaacctgagggtggccttttaagaagaccccaagacttggttgggcaatgcgctgcccatggaaacaccccccagcaagcaccctccccagccctgccctttcggagcagcaccccaggaggggatgcccgcgctcccagcaacaccccaggtcaggcctgtgcagaccccctgccccgccgctgcagaaatcccagaagcatccttaatgcttcctcagtcttcagccagagggagggctgttatttccagaggtgcgctttttatgtacttttagctagatgtggcatgcatctgtgagctttagatcattaaatccaaaatgtttgcctaaatgagtttatcagttgttaacttcaagaatattaaatgatttataataaagctcct

SEQ ID NO: 250521 - DNA, 508 bp, Homo Sapiens
acctcgtctaggactcctagagtgccttctattccagacaggtctataaccacctcgatgatatctacctcctcctccttgataataccctataccccttcctctgtacccataaggtcgtctcattcctctattatttctgtaatcgcgacgataatctctagaatacatacgatctctactacgagaccttgaatatgttctggaacgagacctagaactgtatcgcttctttctagaatgagatcttgatcttgatcgagaactagactgtgatctagactttgaccttgaagaatgtgatctagaattggagcgacccatttcttttctccttggttttatgcaggatcaagaagtcaagtgaagtctttgagatactgtaaaaattcttcctggagagaatgctctgagaaattaaactctaaattcgaattcctgacacgccgaatcgcggttccgggaatttatctccgttgcaaccacacagcggccatttcccgactcc

SEQ ID NO: 250522 - DNA, 625 bp, Homo Sapiens
  misc_feature (14)..(14): n is a, c, g, or t
  misc_feature (23)..(23): n is a, c, g, or t
  misc_feature (48)..(48): n is a, c, g, or t
  misc_feature (68)..(68): n is a, c, g, or t
  misc_feature (108)..(223): n is a, c, g, or t
gggttaaatccacntgaggtccngaaaactaaccctggcccaacatgncgaaacccctgtcctcctanttaaaaatacaaaaattggcccgggtgtggttgtgggtgnnnnnnnnnnnnnnnnnnnnnnnnnnnnnnnnnnnnnnnnnnnnnnnnnnnnnnnnnnnnnnnnnnnnnnnnnnnnnnnnnnnnnnnnnnnnnnnnnnnnnnnnnnnnnnnnnnnngagtgaaactctgtctcaaaaaatgaattaaatgaataaacagaacaaaatttcaatagctgttaggcctcagtacatgagtagagaggtatgctactgctttcaaatagattgcttagggactatgatccaccttatcactctggatccaccacactaagcactagggctcagtaactccactgtctcaaagaaactggtgatttctagcacagttaagacactttatggaaagctgtttcaaaggaaaaggcagctacaacaaaagacaatctgccttgtatttaagaactagagtctagcatgagaaccacaggaatgcaggcaaagtgagcaaagcacagtataacatctagaactgtatgcagtgcaccaatattcaaaagaatcaaaatttgtact

SEQ ID NO: 250523 - DNA, 591 bp, Homo Sapiens
gggacgcagaacttcagccactgaaggtaacaggcatctttcttctcagtgccttggccctgttgagtctatctggtaagtgttgcatatttttcaaatttaaataaaactgttttgacctgttgctttgtgaagcacattatcttctagacttttgatgtagtctagtcttcgagagatgtgggggacctaatgagatgaaataaaatcaacaggtaagaattattttttaagaggaatttttaacctactataaggaaaacaattctactagtaagaaattcccagaaataaaatggttttcctctattgatgtggctgaccctttgtcgggatatggtagagaaaaaagggtaaaaatattttaactttaagtatacttctcattctgtaaatgtgtaaggccaaattacaaattttaaattctcatgggattgcataaaatagataaatggcttccagttattcagtataaaaggcataatttgactgattaaaaatttatttttttattgtataggtttcagtgtacttgaatcatgtatagtttgtcagatttatccctgaatagctaatatatgtgatataaag

SEQ ID NO: 250524 - DNA, 1028 bp, Homo Sapiens
cggccgggggaccggcgcggcgctagcctcggggcttgacgggattgtggcggtcctctctcccaattcggaagctacagctacctccggacgctctcaagatggcgacctctctgggttccaacacctacaacaggcagaactgggaggatgcggacttccccattctgtgccagacattgtcttggagaaaacccatatatccgaatgaccaaagaaaagtatgggaaggaatgcaaaatctgtgccaggccattcacagtgtttcgctggtgccctggagtccgcatgcgtttcaagaagactgaagtgtgccaaacctgcagtaaattgaagaatgtctgtcagacctgcctcttagacctagagtatggcctgcccatccaggttcgtgacgcaggattgtcttttaaagatgacatgccaaagtcagatgtcaacaaagagtactatacacagaatatggagagagagatttctaactctgatggaacacggccagttggcatgctggggaaagccacatctaccagtgacatgctgctcaaactggcccggaccacaccctactacaaaaggaatcgaccccacatttgctccttctgggtgaaaggagagtgtaagagaggagaggaatgtccatacagacatgagaagccctacagatcccagatgacccccttgctgatcagaatattaaagaccgttattacggaatcaatgatcctgtagctgacaagcttctaaagcgggcttcaacaatgcctcggctggacccaccagaggataaaactatcaccacactatatgttggtggtctaggtgataccattactgagacagatttaagaaatcatttctaccagttcggagagatccggacgatcactgttgtgcagagacagcagtgtgctttcatccagtttgccacacggcaggctgcagaagtggctgctgagaagtcctttaataagttgattgtaaatggccgcagactgaatgtgaaatggggaagatcccaggcagcc

SEQ ID NO: 250525 - DNA, 1684 bp, Homo Sapiens
ggggtgacacagcgaagatggcgtcgcccggctgcctgtggctcttggctgtggctctcctgccatggacctgcgcttctcgggcgctgcagcatctggacccgccggcgccgctgccgttggtgatctggcatgggatgggagacagctgttgcaatcccttaagcatgggtgctattaaaaaaatggtggagaagaaaatacctggaatttacgtcttatctttagagattgggaagaccctgatggaggacgtggagaacagcttcttcttgaatgtcaattcccaagtaacaacagtgtgtcaggcacttgctaaggatcctaaattgcagcaaggctacaatgctatgggattctcccagggaggccaatttctgagggcagtggctcagagatgcccttcacctcccatgatcaatctgatctcggttgggggacaacatcaaggtgtttttggactccctcgatgcccaggagagagctctcacatctgtgacttcatccgaaaaacactgaatgctggggcgtactccaaagttgttcaggaacgcctcgtgcaagccgaatactggcatgaccccataaaggaggatgtgtatcgcaaccacagcatcttcttggcagatataaatcaggagcggggtatcaatgagtcctacaagaaaaacctgatggccctgaagaagtttgtgatggtgaaattcctcaatgattccattgtggaccctgtagattcggagtggtttggattttacagaagtggccaagccaaggaaaccattcccttacaggagacctccctgtacacacaggaccgcctggggctaaaggaaatggacaatgcaggacagctagtgtttctggctacagaaggggaccatcttcagttgtctgaagaatggttttatgcccacatcataccattccttggatgaaacccgtatagttcacaatagagctcagggagcccctaactcttccaaaccacatgggagacagtttccttcatgcccaagcctgagctcagatccagcttgcaactaatccttctatcatctaacatgccctacttggaaagatctaagatctgaatcttatcctttgccatcttctgttaccatatggtgttgaatgcaagtttaattaccatggagattgttttacaaacttttgatgtggtcaagttcagttttagaaaagggagtctgttccagatcagggccagaactgtgcccaggcccaaaggagacaactaactaaagtagtgagatagattctaagggcaaacatttttccaagtcttgccatatttcaagcaaagaggtgcccaggcctgaggtactcacataaatgctttgttttgctggtgatttaaccagtgcttggaaaaatcttgcttggctatttctgcatcatttcttaaggctgccttcctctctcagtacgttgccctctgtgctatcaatcatcttatcatcaattattagacaaatccccactggcctacagtcttgccttctgcagcacccacttttgtcttcctccgggtagtgatggaatttagttggctggtcccaaaaagggaggggaaagtagccacccccaaaatttaaagtttgcctttaaaagaaaggggaaaagggacccctccttggggaataaaactttaagggggagcccg

SEQ ID NO: 250526 - DNA, 1538 bp, Homo Sapiens
agtcgacggtaccggacatatgcccgggaattcggccattagggccgggggcgaggaatacagagggcagcagacatcgaacagcaggctgtgtttgctgtgtttgatgagaacaaaagctggtaccttgaggacaacatcaacaagttttgtgaaaatcctgatgaggtgaaacgtgatgaccccaagttttatgaatcaaacatcatgagcactatcaatggctatgtgcctgagagcactactcttggattctgctttgatgacactgtccagtggcacttctgtagtgtggggacccagaatgaaattttgaccatccacttcactgggcactcattcatctatggaaagaggcatgaggacaccttgaccctcttccccatgcgtggagaatctgtgacggtcacaatggataatgttggaacttggatgttaacttccatgaattctagtccaagaagcaaaaagctgaggctgaaattcagggatgttaaatgtatcccagatgatgatgaagactcatatgagatttttgaacctccagaatctacagtcatggctacacggaaaatgcatgatcgtttagaacctgaagatgaagagagtgatgcttgactatgattaccagaacagactggctgcagcattaggaatcaggtcattccgaaactcatcattgaaccaggaagaagaagagttcaatcttactgccctagctctggagaatggcactgaattcgtttcttcaaacacagatataattgttggttcaaattattcttccccaagtaatattagtaagttcactgtcaataaccttgcagaacctcagaaagccccttctcaccaacaagccaccacagctggttccccactgagacacctcattggcaagaactcagttctcaattcttccacagcagagcattccagcccatattctgaagaccctatagaggatcctctacagccagatgtcacagggatacgtctactttcacttggtgctggagaattcaaaagtcaagaacatgctaagcataagggacccaaggtagaaagagatcaagcagcaaagcacaggttctcctggatgaaattactagcacataaagttgggagacacctaagccaagacactggttctcttccggaatgaggccctgggaggaccttcctagccaagacactggttctccttccagaatgaggccctggaaggaccctcctagtgatctgttactcttaaaacaaagtaactcatctaagattttggttgggagatggcatttggcttctgagaaaggtagctatgaaataatccaagatactgatgaagacacagctgttaacaattggctgatcagcccccagaatgcctcacgtgcttggggagaaagcacccctcttgccaacaagcctggaaagcagagtggccacccaaagtttcctagagttagacataaatctctacaagtaagacaggatggaggaaagagtagactgaagaaaagccagtttctcattaagacacg

SEQ ID NO: 250527 - DNA, 1724 bp, Homo Sapiens
ctgagtcagggagtgcagcgtgtgcagcagtgccaccacctcctccaccagtgtgctgctgtgggtggcagtcagcgaggcctgcgggcacaccctgcgccacctcagcatggactctctgagtaacggcacgtcagaggagcacatagtgagcaagctccccaagaagtcaaacagcttctccacgaggcatttcatgtccctcgccctttcggtcttgtcccatgacggaaggactgcttgcaacaaatgcacagctaagatctgcctctgcagcgaggtggcagtgaagagtgcgtgcccttccacgaccttcatgagcagcgtgatccactgcagggagctgagggcgccgcacacctgcagcgtgagagcgatgctctgcacaaaccccagcgtgcaccagctccggtgttgctcccaatacaccagcctgtttggagaagatttgcagtcagtccgcataaagtcttggtggcttcactctgcatgatctcagcatgaactccagcagacagacaaagagtctgcagtaagttaatagtgctggtaaacatcattgcagtggggtgaatgttcctttcagtttgttcggcttcagagtcgtcctctgtgtccgaatcctctgctgagggctgtgcaggggctggcagctctgccagcttgaggtcgtattttccttctttccccatcctgtaggagttggtgctgcctgtgtcccactggactcttatccacccgtcctctcccagctcaccaatcactcggcctaggcctggaggaggcccatcctgatcgccccatttccagtccacacctctcatgacccttgttccaatcttcatcatggcagccagttctggccctgaaacagggagctgcacaggagccgtttccttccttgtttcttccaaaactgtggcagaagcaccttgagcagaagcattcatatcttcctcaacgctgtcacaactggggccaatcaggcgcagtgccgtctgagcgagggccagcgtgccggaattgagcaggaggtcaaggttgtttgcgctgtgctgcagggtgagcatgctgagcatcaccaggaggaagtgggcttgcgggatggtccccaggctcggtcccgatgggttctcattggtgatggtttgcaggggaaccggctggataccaagctctttaaatttggcactggcatccaccaaaacatttcgaatgttctgaacagcccaagcgtacagcttgccaaaggtgacttccagcagcatccgattaaaaggcgggatcaaatcaacatcctttaaacaatcagtaagaggttcccctatatcgattccctcaggaataagtctttgccatccacaaaacatcgcatacggcacagatggaagtaagaaattcttgctcaccagatacaattttaaaattgtatctatcccttccaggcgaacctctgctctctccaactgttttagtaggcactttctcttttccacatccactggctcttctttaagggcaaattcagcaattgtactgaggagtggagactgcggataaagaccctgcacattctgcttcaaccacttgtatttgtgaacatctgtaacagtactcaacagcggctgccatttgtccttgggtgatttaattgcaatgggtctcttgtccacatttattggactatgaggcaaaatgcaagcttcttctaaatcactctcttc

SEQ ID NO: 250528 - DNA, 512 bp, Homo Sapiens
ggccttttacatgttgtctaattatcatttttccccaaattttgcgttgtaggactactgttcgaagatttttggaagaatactgagaacggcataaagtgaagatcgacatttaaaaaatgaggtgaaagaaagctatagtggcatagaaaaagtataaagctcagttagtttttttattattattattattaaaagttaattcaggactgatgtgacctaccagatttcagaacatgtgttaatagtatatatgccactgaaaacttaggtcctgtatcatacttttttctttaagactttttaagaaatattacttaaacatgtggcttgctcagtgtttaattgcaagttttcaatcttggactttgaaaacaggattaaacgttagtattcgtgtgaatcagactaagtgggatttcatttttacaactctgctctacttagcctttggatttagaagtaaaaaataaagtatctctgactttctgttacaaagttgattgtctctg

SEQ ID NO: 250529 - DNA, 1079 bp, Homo Sapiens
  misc_feature (848)..(848): n is a, c, g, or t
gccaggtactcctttctctacccacatccatgtttgaatgctattgcctgtgatctttacgcttaactgttgtgtatcttttttgttctttacaagaagtgcagaggggttttttgtgtattgcgtgaaaacttataaaacaaatgttaacagaatggaattttttttcaactgtatgtagggctgcagtggtggccagaattagatatctttaaagaattttaaatacaataaacacttcatattattcgccttgttacactcaatgcaattctcaagtctataagaggtatgtgcttaatatttcctactgtgtaggagaatttgcagtcagccataggtatgtaggaatagtcactcactggctgatacatttaaagcagcagtgtgaatagcaaggacagacaccttcaatttgtgaaatcaaagaactgatgcactatatagaacgaatttgggtttttaaagaaatattaaaagttaggtactgtaagtgttcttaaaacctgtaaacttcattctgtgggctagtggtgtgggacaaaatattcctaatgaaaggaagtaccaattagttgatttgttggtggcattccccttttgggaaagcaatgtaaggttatgtctgtgtatgtcattcacacttaggcaagcatacacaggcacatggctttaagaaccacactgatgccttgataattaaaaagaatacaagcattccatgtacacatgttaattagcagttagtgactgggccaacactttctcataaaaattggccttttacatgttgtctaattatcattgttccccaaattttgcgttgtaggactactgttcgaagattnttggaagaatactgagaacggcatatagtgaagatcgacatttaaaaaatgaggtgaaagaaagctatagtggcatagaaaaagtataaagctcaagtagtgtttttattattattattattaaaagttaattcaggactgatgtgacctaccagatttcagaacatgtgttaatagtatatatgccactgattatacatgtggctggctcaatgttaattgcaagtttta

SEQ ID NO: 250530 - DNA, 1138 bp, Homo Sapiens
  misc_feature (837)..(972): n is a, c, g, or t
  misc_feature (978)..(978): n is a, c, g, or t
  misc_feature (1050)..(1050): n is a, c, g, or t
  misc_feature (1058)..(1058): n is a, c, g, or t
  misc_feature (1088)..(1089): n is a, c, g, or t
  misc_feature (1095)..(1095): n is a, c, g, or t
  misc_feature (1111)..(1111): n is a, c, g, or t
  misc_feature (1116)..(1116): n is a, c, g, or t
  misc_feature (1124)..(1124): n is a, c, g, or t
  misc_feature (1126)..(1126): n is a, c, g, or t
  misc_feature (1131)..(1131): n is a, c, g, or t
ttgtaaaaatgaaatcccacttagtctgattcacacgaatactaacgtttaatcctgttttcaaagtccaagattgaaaacttgcaattaaacactgagcaagccacatgtttaagtaatatttcttaaaaagtcttaaagaaaaaagtatgatacaggacctaagtattcagtggcatatatactattaacacatgttctgaaatctggtaggtcacatcagtcctgaattaacttttaataataataataataaaaaaactaactgagctttatactttttctatgccactatagctttctttcacctcattttttaaatgtcgatcttcactttatgccgttctcagtattcttccaaaaatcttcgaacagtagtcctctgtctgatctgaggtcttatcagatcagttttaattggactgagtgtcaccttcagatttaatgtcttcactggtcccattgacctcattcttagtatcactttccttcgattcagtgtttgtgtcttcactctgcttttctcgactaccggacttcacactactttttttatcatcagatcccctcttttctttctccttggattttctatcttgttctctgtcccgacttttgctcctgtgcttatatgactttcgatcccggctttttgatcttcttcgatcccgacttcgagatctgtgttttctttctgatcgatcatggcttctgcttcttcgtcgatctctacttctgctccgccttctttctctacttcgtgaccttttgtggtcccgagacctgctgcatcttctgtctgatgttcggcttgagtgtctacttcgtgaacgactnnnnnnnnnnnnnnnnnnnnnnnnnnnnnnnnnnnnnnnnnnnnnnnnnnnnnnnnnnnnnnnnnnnnnnnnnnnnnnnnnnnnnnnnnnnnnnnnnnnnnnnnnnnnnnnnnnnnnnnnnnnnnnnnnnnnnnnnagacgncatcacgatcaggttcttcggttctttccttaacttttcttttaattctctacaggagctttaatttggganagccatgngttgtttcccacaaatggcaactaccgggnnggggantctaataataaaaggnccaanattaaaantncattnttttctt

SEQ ID NO: 250531 - DNA, 834 bp, Homo Sapiens; identical to SEQ ID NO: 97790

SEQ ID NO: 250532 - DNA, 1211 bp, Homo Sapiens
gggagttgtagccatgccctagctgctcatgtttcccacctggagaatgtgtcagaggaagaaatgaacagactcctgggaatagtattggatgtggaatatctctttacctgtgtccacaaggaagaagatgcagataccaaacaagtttatttctatctatttaagctcttgagaaagtctattttacaaagaggaaaacctgtggttgaaggctctttggaaaagaaacccccatttgaaaaacctagcattgaacagggtgtgaataactttgtgcagtacaaatttagtcacctgccagcaaaagaaaggcaaacaatagttgagttggcaaaaatgttcctaaaccgcatcaactattggcatctggaggcaccatctcaacgaagactgcgatctcccaatgatgatatttctggatacaaagagaactacacaaggtggctgtgttactgcaacgtgccacagttctgcgacagtctacctcggtacgaaaccacacaggtgtttgggagaacattgcttcgctcggtcttcactgttatgaggcgacaactcctggaacaagcaagacaggaaaaagataaactgcctcttgaaaaacgaactctaatcctcactcatttcccaaaatttctgtccatgctagaagaagaagtatatagtcaaaactctcccatctgggatcaggattttctctcagcctcttccagaaccagccagctaggcatccaaacagttatcaatccacctcctgtggctgggaacaatttcatacaattcaacctcatcttccccttgagcaacccaaacgcagggagcaagcagtcctgcctgcaaagcctcttctggacttgaggcaaaccccaggagaaaagaggaaaatgactgattctcatgttctggaggaggccaagaaaccccgagttatgggggatattccgatggaattaatcaacgaggttatgtctaccatcacggaccctgcagcaatgcttggaccagagaccaattttctgtcagcacactcggccagggatgaggcggcaaggttggaagagcgcaggggtgtaattgaatttcacgtggttggcaattccctcaaccagaaaccaaacaagaagatcctgatgtggctggttggcctacagaacgttttctcccaccagctgccccgaatgccaaaagaatacatcacacggctcgtc

SEQ ID NO: 250533 - DNA, 478 bp, Homo Sapiens
  misc_feature (16)..(16): n is a, c, g, or t
  misc_feature (25)..(25): n is a, c, g, or t
  misc_feature (158)..(158): n is a, c, g, or t
  misc_feature (311)..(311): n is a, c, g, or t
aactcctgtttgggtntcctggttnaaagggaaaatgcccaaacccaacgtgaaaaatcaaaataacaccccctgcgcctccttcccaaccttgcccgccctcaatcccctggcccgaatgtgcctgaacagaaaaattggtcctcctggtcccaaancattgcctgccagggtcccgtgatggtaagacataacctcgttgaattaaattcccatcggaatatcccccataactcggggtttcttggcctcctcccagaacatgagaatcagtcattttcctcttttactccctgggtttgcctcaagtnccagaagaggctttgcaggcaggactgctgctccctgcgtttggctgctcaagggaagatgaggttgaattgtatgaaattgtcccagccacaggaggtggattgataactgtttggaagcctagctggctggttctggaagaggctgagagaaaatcctgatccca

SEQ ID NO: 250534 - DNA, 1751 bp, Homo Sapiens
  misc_feature (1461)..(1559): n is a, c, g, or t
  misc_feature (1622)..(1631): n is a, c, g, or t
ggggttgggcagggcaatacgcctgcgtgttgccggatgcgcatgcgcaggcgccgtgtggcactcggcggtcgaaaggggagttcaaggagacgggggcgacgcggctgagggcttctcgtcggggtcggggctgcagccgtcatgccggggatagtggagctgcccactctagaggagctgaaagtagatgaggtgaaaattagttctgctgtgcttaaagctgcggcccatcactatggagctcaatgtgataagcccaacaaggagtttatgctctgccgctgggaagagaaagatccgaggcggtgtttagaggaaggcaaactggtcaacaagtgtgctttggacttctttaggcagataaaacgtcactgtgcagagccttttacagaatattggacttgcattgattatactggccagcagttatttcgtcactgtcgcaaacagcaggcaaagtttgacgagtgtgtgctggacaaactgggctgggtgcggcctgacctgggagaactgtcaaaggtcaccaaagtgaaaacagatcgacctttaccggagaatccctatcactcaagaccaagaccggatcccagccctgagatcgagggagatctgcagcctgccacacatggcagccgcttttatttctggaccaagtaaagatgggtccgtggcccacactcggtcatgtgctcagacaacgactgatgaaaacgcccatgcggtttgcatcgactgatagtgtgttctttccgggatcacaaacattaacaaaaaagttaacttatgtgacttggcagttattctataccatttcctgtccattaaaatttttaaaggaaatagcaaaaacaatgaccccgcactacagctcccatgtcggccgcctcggcctctagaatccttcataaagaattaccctgataacatatgcgtaatgctttatgaagctttagaaatgagctcatgactcattaaaaaatactaaacatgatgctacttttactatctccacctaaataatctgaggacgggttccatactttagcctcaacgctgagtcgcgccttgtagaaattggcctctgtctatacttgccaaaagactatccggttaggatgaactacattccctaacttacagtgcaaattccgatcttgggaaaaaggccacaccacctcccttgtatttttaaaggggcgctctccgccacctttttaaccatatcgcctagggggggttggcccttgtggcccttattcgggaaccaaaactgggccttttgggctcattacagagcggaaaaaagggcccccggaaatctaaggccctcccccaagggccggaacaggcacacacctccggcctgtttacgccccgtaggagagcccctgatagccccctatatgttataccgtctgcacagtgatagtaacccctccccctatttatttttcnnnnnnnnnnnnnnnnnnnnnnnnnnnnnnnnnnnnnnnnnnnnnnnnnnnnnnnnnnnnnnnnnnnnnnnnnnnnnnnnnnnnnnnnnnnnnnnnnnngaaaagcacggccttttattgagaaaaccatttgttacctctgtgggagggcgcgggggaggnnnnnnnnnnggcgggggtcgggggggcgaccaaagtggggcctcccccatgctgatttattcctctcgcagagagccgcacccgcgaggggccactgaaaaaacaagggcccctggcgggtatacgcga

SEQ ID NO: 250535 - DNA, 742 bp, Homo Sapiens
  misc_feature (257)..(257): n is a, c, g, or t
aggttatatcaatttacttcacataagagcataattcaggccttttccatttaataacaaaaacaatctgtacagaaaacccaaaggcaaccacatagcatatgtaaaatgtgcaaatacactttaaaatgcaagttattctatagcatttgcaagatagaatttcactgtaattagggaatctagttcatcctaacttaatagtcttttgcatgtatagacaatgcaattctacaaggcacaactcagcgttgatngctaaagtatgaaacacatcctcagatttatttatttgaaaatattaaaatagcatcatgtttattattttttaatgagtcatgagctcatttctaaagcttcataaagcattacactgataacatatgtgtggtcaggacaaactgttccctgaacttaaaaggtgaaggacaagaccccatattattatcctgtattaaaaaaggaaatatacatatatgtacacagacaccccatatcacagacaagaaacttcccataattcaaagggagaccatttccttattagcaaaggtgcgcattacagtatttcatgacagttaaaaattacacacctaccacctgttttggtcaatcttgctaaaaaagacactgaaatagacaattttcttctttaaggtaaagacaatgtctaatttagaaaatcttcctcttgagattgcacagtgaaaggtatcagttaattaaatataaaagcttaccg

SEQ ID NO: 250536 - DNA, 669 bp, Homo Sapiens
ggggacctggtgacaggagccatgaggggccaggcctcaggtcccacagcccccaggaccactggctgcccatgagagatgaaggatggcatccaagggggccggcatgtctttctcccgcaagagctataggctgacctcagatgctgagaaatccagggtcacaggcattgtgcaggagaagctgctgaatgactacctgaaccgcatcttttcctcttctgaacatgcacccccagcagccaccagcaggaaacccctgaacttccagaacctgccagaacatttggaccagttgctacaggtggacaatgaggaggaggaaagccagggacaggttgaagggcggcttggcccatccactgtggtcctggaccacacaggcggctttgaggggcttctcctggtggatgatgacctgctgggggtgattggacacagcaactttggcaccatccgctctaccacatgcgtgtacaaagggaaatggctctacgaggtcctcatctcctcccaggggctcatgcagatcggctggtgcaccatcagctgccgcttcaaccaggaggagggggttggagatacacacaactcctatgcctatgatggcaaccgcgtgcgcaagtggaatgtgaccacaacgaattatggcaaggcgtgggcagcggg

SEQ ID NO: 250537 - DNA, 530 bp, Homo Sapiens
caagcaagcaagaactgagatgtgtctcgagcatattttgcattatttggttccagaatagcaacaagagctgggtgtagctactgtttctcaggctgggttttacgtgcttttgttagcttcataagccccaaatcctttcctgggttcaatttctataacatggacgtcttctagactcctcgctactactgcaagtttggtccacggacaacatggacctcatggaatcagattctgcatttaataagactgccaggtgatttgcatgcacactaatgtttgggcaggattgatccgcatgacacgaacatcacttttaatacctcaggagcagctcggctagaaactctgttttcctgttagaggccagaaaagaaagaaaatagctcctgcatgaagaaccaaaaagagactttttatgattggagaggagagaaaaaagctaaattaagtttcagtgttggtgatcgtatgcaactcattgccacagttaaactgcagtggagaaaggttttattttgtgtgtc

SEQ ID NO: 250538 - DNA, 838 bp, Homo Sapiens
gggggtcttgatgacagtggagagcacttttttgatgcccgtgaagcacatagtgatgagaatccatcagaaggtgatggagcagttaacaaggaagagaaggatgttaatttacgcatctcaggaaactatttgatccttgatggctatgacccagtgcaggagagttccacagatgaggaggttgcttcctcacttaccctgcagcccatgacaggcatccctgctgtggaatccacccaccagcagcaacattctcctcagaatactcactccgatggggcaatttcaccattcacccccgaatttctggtccagcagcgctggggagctatggagtattcctgttttgagatccagagtccctcctcttgtgcagattcacagagccagatcatggagtacattcataagatagaggctgaccttgaacacttaaagaaggtggaggaaagttacaccattctttgccaaaggctggctggatcagcccttcacagacaagcactcagataaaagttagagccgcatgtcctggaggtgactgcaggttgttggatttggagtatcggccgtgtctcaccacatcctggctccagtgtggatgcagagagagtgtgacagaggatctgcctgtgaaccacctgggattagtcaagtcccaaggtgcccagagtgggactagttcttcacagtgtggcagctgcactaatctgtttgtgagggaatatccattccctcactctactctcctcactatcggaaattcattttgattcagaataaaaaccaaatgtatagagctttgggtgtaggatatgaaactgtacttagattt

SEQ ID NO: 250539 - DNA, 654 bp, Homo Sapiens
cctccccccacaaccggagtgaagtcattaaatgaggtgctttgagtgatgttatcaaaaatggtttcagcttcagtagaatgtgaaacagaactctttccacatggaaatggcactgctggttcacaggacttctggctgcaagtcgatatccctcagtacaggagcaaaccaccttgttatcagcactatttttacaaaactgctcgcatctgccattcttaatgttacatgttacatctaattcacagttctttccttcaaatccaaagggacaccaacattcataggaattaatgtcatccttgcaactgccgccatttaaacatggattggactcacactgatctccatcaacatactgcttccaaaattcagttgttctttcagtgttttcaaaaacttctcgtgcttcttcaaaactacacttttcttccatacattctctctcaaggttcccttgaacaaactcttccaatttacctgaattatacctctttggccgattcagaattttgttggcgttttcatgatcaagaaaaactgtacattcagcactgagtagatatcctaaaaggcagatggtgatgaggcctggtgattctgccatgatcatgttcacgcgctgcataacctttctcgtgccgaattcct

SEQ ID NO: 250540 - DNA, 630 bp, Homo Sapiens
cgtgaaaggttatgcagcgcgtgaacatgatcatggcagaatcaccaggcctcatcaccatctgccttttaggatatctactcagtgctgaatgtacagtttttcttgatcatgaaaacgccaacaaaattctgaatcggccaaagaggtataattcaggtaaattggaagagtttgttcaagggaaccttgagagagaatgtatggaagaaaagtgtagttttgaagaagcacgagaagtttttgaaaacactgaaagaacaactgaattttggaagcagtatgttgatggagatcagtgtgagtccaatccatgtttaaatggcggcagttgcaaggatgacattaattcctatgaatgttggtgtccctttggatttgaaggaaagaactgtgaattagatgtaacatgtaacattaagaatggcagatgcgagcagttttgtatagtgctgataacaaggtggtttgctcctgtactgaaggatatcgacttgcaatttcacaaacttctaagctcacccgtgctgagactgtttttcctgatgtggactatgtaaattctactgaagctgaaaccattttgggatacatcactcgcacccaatcattttgacttccttcggttgg

SEQ ID NO: 250541 - DNA, 934 bp, Homo Sapiens
  misc_feature (445)..(445): n is a, c, g, or t
  misc_feature (554)..(554): n is a, c, g, or t
  misc_feature (767)..(767): n is a, c, g, or t
  misc_feature (781)..(781): n is a, c, g, or t
  misc_feature (788)..(788): n is a, c, g, or t
  misc_feature (794)..(794): n is a, c, g, or t
  misc_feature (841)..(841): n is a, c, g, or t
  misc_feature (887)..(888): n is a, c, g, or t
  misc_feature (896)..(896): n is a, c, g, or t
  misc_feature (904)..(904): n is a, c, g, or t
  misc_feature (917)..(919): n is a, c, g, or t
  misc_feature (922)..(922): n is a, c, g, or t
  misc_feature (927)..(927): n is a, c, g, or t
  misc_feature (933)..(933): n is a, c, g, or t
aaaggttatgcagcgcgtgaacatgatcatggcagaatcaccaggcctcatcaccatctgccttttaggatatctactcagtgctgaatgtacagtttttcttgatcatgaaaacgccaacaaaattctgaatcggccaaagaggtataattcaggtaaattggaagagtttgttcaagggaaccttgagagagaatgtatggaagaaaagtgtagttttgaagaagcacgagaagtttttgcactgaaagaacaactgaattttggaagcagtatgttgatggagatcagtgtgagtccaatccatgtttaaatggcggcagttgcaaggatgacattaattcctatgaatgttggtgtccctttggatttgaaggaaagaactgtgaattagatgtaacatgtaacattaagaatggcagatgcgagcagttttgtacagaanaccagaagtcctgtgaaccagcagtgccatttccatgtggaagagtttctgtttcacaaacttctaagctcacccgtgctgagactgtttttcctgatgtggactatgntaaattctactgaagctgaaaccattttggataacatcactcaaagcacccaatcatttaatgacttcactcgggttgttggtggagaagatgccaaaccagggctttcacctcagcttgccaggctggagccaagggccaacgcagccgcgccttgttcgcgatggtagcttcccaggagccccctatggttccggaacggcgctgccggcnccatcctgtttgcnacctccnaaagcnaaaggcactggcgggccgggccagcttctaaagtcgcgcaaggttanaaggttccggacaggaacgagcgagaggccaatggaaggaggaaannattagaanaggaaaantatgaagcaatannnaangaggnacaaang

SEQ ID NO: 250542 - DNA, 373 bp, Homo Sapiens
caaaggttatgcagcgcgtgaacatgatcatggcagaatcaccaggcctcatcaccatctgccttttaggatatctactcagtgctgaatgtacagtttttcttgatcatgaaaacgccaacaaaattctgaatcggccaaagaggtataattcaggtaaattggaagagtttgttcaagggaaccttgagagagaatgtatggaaggtgtagttttgaagaagcacgagaagtttttggtgagtccaatccatgtttaaatggcggcagttgcaaggatgacattaatgcctatgaatgttggtgtccctttggatttgaagggaactgtgaattagatgtaacatgtaacattaagtggcagatgcgagcg

SEQ ID NO: 250543 - DNA, 731 bp, Homo Sapiens
gcatcttagaaaagtcatcaaacaaaacaatgattacatgcaaagacgtgataaataaagatcatggaaattacaaagattcccaaatactattttagtctctaatataagtattctcattaaatgtggttctttgtgatttagagttgtaaatattcttttaactcctcttgcagctttacatgaatgaaaagtaaaagccagtttgaatggaacctttaggggaatctaaagatacaaaacaaggatccagaactgacaaagctgaatatatcagtggcactttgaaaataaggaactctgaaaataggatataaaaacaagatggaattagagaaacctgattaagattagggatttttccagccaaagctaataaatttcagttcaggaggagaaactggcataaactttccacctcttgactgcagaagtggtgggggaatgaagcttgtgtttaaatggcatattcattatttgagaataatttaatttttaatgatacgcaatttagattgataattttatcacatacagaggtattaaatatgtcattaaacagttatagctttgaaatgaattttttaaattaagtatgattaaactgcaatatagtatataagataaaagtttgcatatcaaaattctttttacctggatttttcccattagaagagattgcttacagagataattttggttcctgcttattataataagtgtcatttttg

SEQ ID NO: 250544 - DNA, 1228 bp, Homo Sapiens
  misc_feature (1127)..(1127): n is a, c, g, or t
gtcggggaggagggatgcggttcggcggaggcggccgccacagggacttgccgccatcacccctgctgccaccaccgcagcctcgggctcccagggcggacacggccaccgcctcagcgggagaggagtctccaccaggactgaccgctgccgcccagcacgtccaggtaaggtactcaactgtgtggggtactacataaatcctgaaagactacaataaagtggtgatgtctcgggaacccaccccacctctacctggagatatgtctactggtcccatagcagaaagctggtgttacacacaggttaaagtagtaaaattttcctatatgtggaccattaataacttcagtttttgtcgagaggaaatgggtgaagtgttaaaaagttcgacattttcatctggcccaagtgacaaaatgaaatggtgcctgagggtaaacccaaagggattagatgatgaaagtaaagactacttgtccttatatttgcttttagtcagctgccccaaaagtgaagttcgagcaaaattcaaattttcccttctgaatgctaaaagggaagaaacaaaagcaatggaaagccaaagagcatatcgatttgtgcaagggaaggactggggttttaaaaaattcattagaagggactttttgcttgatgaagctaatggtcttttaccagattgacaagcttacattattttgtgaggtgagtgtggtccaagattcagtaaacatatcaggacatactaatacaaatactttgaaggtgcctgagtgtcgtctagcagaagatttaggtaatctctgggaaaacacaagatttacagactgcagttttttcgtgagaggacaagaatttaaagctcataaatctgtgcttgcagctcgatctccagtttttaacgccatgtttgaacatgaaatggaagaaagcaaaaagaatcgagtggaaataaatgatttagaccctgaagtttttaaagaaatgatgagattcatttacacagggagagcaccaaaccttgacaaaatggctgacaacttgttggcagctgcagacaaatatgcactggaacggctgaaggtcatgtgcgaagaagctttgtgtagtaacctctccagtangagaatgttgcagatacccttgtccttgcagattttgcaccagtggcagaaccagtttgaaaagcacaagccatagactttattaataggtgccagtgtac

SEQ ID NO: 250545 - DNA, 2974 bp, Homo Sapiens
  misc_feature (2006)..(2082): n is a, c, g, or t
  misc_feature (2089)..(2090): n is a, c, g, or t
  misc_feature (2092)..(2093): n is a, c, g, or t
  misc_feature (2095)..(2096): n is a, c, g, or t
  misc_feature (2125)..(2125): n is a, c, g, or t
aaggagcgaggcctgggtggcgaattcggcacgaggaaagcggagccgggagtttttgctacagttttcgccaccatgagtcgcagctataatgatgagctgcagttcttggagaagatcaataaaaactgctggaggatcaagaagggcttcgtgcccaacatgcaggttgaaggtgttttctatgtgaatgatgctctggagaaattgatgtttgaggaattaaggaatgcctgtcgaggtggtggtgttggtggcttcctgccagccatgaaacagattggcaatgtggcagccctgcctggaattgttcatcgatctattgggcttcctgatgtccattcaggatatgggtttgctattgggaacatggcagcctttgatatgaatgaccctgaagcagtagtatccccaggtggtgtcgggtttgacatcaactgtggtgtccgcttgctaagaaccaatttagatgaaagtgatgtccagcctgtgaaggagcaacttgcccaagctatgtttgaccacattcctgttggggtggggtcaaaaggtgtcatcccaatgaatgccaaagacttggaggaggccttggagatgggggtggactggtccttaagagaagggtatgcctgggctgaagacaaggagcactgcgaggagtacggaaggatgctgcaagctgaccccaataaagtttctgcaagggcgaagaaaagaggccttcctcagttggggaccctgggagcaggcaaccattatgcagaaatccaggttgtggatgagattttcaatgagtatgctgctaaaaaaatgggcatcgaccataagggacaggtgtgtgtgatgatccacagtggaagcagaggcttgggccaccaagtagccacagatgcgctggtagctatggagaaggccatgaagagagacaagattatagtcaatgatcggcagttggcttgtgctcgaatcgcttccccagagggtcaagactatctgaagggaatggcagctgctgggaactatgcctgggtcaaccgctcttccatgaccttcttaacccgtcaggctttcgccaaggtcttcaacacaacccctgatgacttggacctacatgtgatctatgatgtttctcacaacattgccaaagtggagcagcatgtggtggacggaaaggaacggacactgttagtacacaggaagggatccacccgcgctttccctcctcaccatcccctcattgctgttgattaccaactcactggacagccagtgctcattggtggcaccatgggaacctgtagttatgttcttactggcactgaacagggcatgactgagacctttggaacaacctgtcatggagcgggccgtgcattgtcccgagcaaaatctcgacgtaatttagatttccaggatgtcttagacaaattggcagatatgggaattgcgatccgtgttgcctcacccaaactggttatggaagaggctcctgagtcctataagaatgtgacagatgtggtaaatacctgccatgatgctggaatcagcaagaaagccattaaactgagaccaattgctgtgatcaaaggatagaacccttggacagcagggctgcctgacaccaccaaccctctctgaagtggaagtggactgacatgctcttctgacatcagactcaaggcgggacaagttgcaaagtgtgcagctgtaactgctcacgccaaaatggctgatggggaggctgctgctttcaggggcccgtgcttgtaaaataaccttccaggaagaggcacattgcccacctttggaaagggaggaatatgccttctccttggttgttccacagagttttaggaaaatctgttagggatgggtagatgtcaaactgccttacgcagtcatactgatctttagccatcagattgatcttcttcacaccaagctctgtttacattccgagaggtgtcatgaagaaagttctgttcaataaggttttggaatgttannnnnnnnnnnnnnnnnnnnnnnnnnnnnnnnnnnnnnnnnnnnnnnnnnnnnnnnnnnnnnnnnnnnnnnnnnnnncaaacannannanncccaccgcccccgacccccaagaacacanccaaaacccaccccccaggcgcccccacccaaaagggcaaccgagccgggaccaaaggcgactgccccggaagaaacgggaacgaccaaggcgctgtgggtcctgcaccacattaaaggcgctgcggggatcagcgccaaattcccttgtaaaaacctcaacgggggtgcctgatggagactcttcggaaattctgtcccccccgatgtgcaagcgggggccattaaattgacatgaaaggccagcacccttaagaaaatcaatggcgctaccctggaggagaaaaatccattaagtggtacttgctgtgccaccgcggcgaagacccattgtggggaatgggcccatttcggggaagcccttaaaaagggacaattgcggcccattaaagacccctttgaagtgggcactccacgcgagaaaaacactttttggcctgcctaaggggaaaacacacgggggggattcccaaataaatgataatatgcaccttggcggtggcactggggccttataaaacttcgggaacagacaagcgggccaaatactccatgcgcccactgggcggatatttgccctggtaaaataaaacgcattacccccactcttgttgctccccccctcttgacatacctcgcttattattagtgggaagccctacgaggggcgaggagaggtttcttttacacctccgttgaaacacacagccctctcgccaacatctgggttgctggaaacaaccacactatttgtgttgagagcaaaacaatagtcggcgcgcggggcaaaaaacacgcctcgctcagctgggcgagtgctctatatgactactacacatacagaaacaat

SEQ ID NO: 250546 - DNA, 849 bp, Homo Sapiens
ggggttcttggaaggcggtgctctgagaagccggactacgcggcagcggctcttcaaagcggagccgggagtttttgctacagttttcgccaccatgagtcgcagctataatgatgagctgcagttcttggagaagatcaataaaaactgctggaggatcaagaagggcttcgtgcccaacatgcaggttgaaggtgttttctatgtgaatgatgctctggagaaattgatgtttgaggaattaaggaatgcctgtcgaggtggtggtgttggtggcttcctgccagccatgaaacagattggcaatgtggcagccctgcctggaattgttcatcgatctattgggcttcctgatgtccattcaggatatgggtttgctattgggaacatggcagcctttgatatgaatgaccctgaagcagtagtatccccaggtggtgtcgggtttgacatcaactgtggtgtccgcttgctaagaaccaatttagatgaaagtgatgtccagcctgtgaaggagcaacttgcccaagctatgtttgaccacattcctgttggggtggggtcaaaaggtgtcatcccaatgaatgccaaagacttggaggaggccttggagatgggggtggactggtccttaagagaagggtatgccctgggctgaagacaaggagcactgcgagggagtacggaaagatgctgcaagctgaccccaataaagtttctgcaaagggcgaagaaaagaagcctttcctcagttgggggaccctggggagcaggcaaccaattaaggcaaaaaatcccgggttgggggaatgaaaatttttcaatgggggatgggtggctaaaaaaacg

SEQ ID NO: 250547 - DNA, 555 bp, Homo Sapiens
  misc_feature (417)..(417): n is a, c, g, or t
  misc_feature (462)..(462): n is a, c, g, or t
ggaggagggacctacaaagactggaaactattcttagctccgtcactgactccaagttcatcccctctgtctttcagtttggttgagatataggctactcttcccaactcagtcttgaagagtatcaccaactgcctcatgcgtggtgaccttcactgtcatatgccagtgactcatctggagtaatctcaacaacgagttaccaatacttgctcttgattgataaacagaatggggttttggatcttagcaattctcacaattctcatgtattccacagcagcaaagtttagtaaacaatcatggggcctgggaaaatgaggctttaattgtaagatgtcctagacaaggaaaacctagttacaccgtgggattggtattacttcacaaacaaacaaaagtatttcccactcaggnaaaggaaatcatgtgttttgcctcaggccaacttctgaagtttcntaccagctgaagttgctgattctggtatttatacctgtattgtcagaagtcccacattcaataggactggatatgcgaatgtcaccatatata

SEQ ID NO: 250548 - DNA, 819 bp, Homo Sapiens
tcatcttaggaaaacacagagaagaaactccccactaaacaaaccattgcaaaactacagcaatctgatatttggaaaatggagaatgagttctatgaatttgcactagagcagttccaattcatcagagcccatgccgttcgagaaaaagatggagacctctacatcctcgcacaaaactttttctatgaaaagatttaccctaagtcgaactgagtataaggtgtgactattagattcttgaactaaaatttgaccctgtcttcacctttgttctcagctccacagtctggattgctgacagtaggtgtatatgacaatttgtattgagccaaattaggaaacagacagtaacgtcaaggaagtagatactggctggcattgtcagtgttctaagtttcaggcatttttatttttcctggctaaacgttggtgaaagttataacctcctgcctgggagaaaatatacatcacctaaaatgaacttatggcaggtctaatcaaaaggctaaatacaatttcagaaaaggttctgatactcttgtttttgataaagcattttttcaactaaccatgaattaagatgagtccatttgcctcttctgccttcactgagggtttgggttatacacctctactgaattgtgttaataactgtttggcagtgtgtactttggttttgtgagtcatgtctcatgaaatttattggaatgtttaatcatatttgctaagaaatgtttctgctgtagttggattttgcccatattttatgtaggtgggtttttattttttaaaatgggtgattaaggggtaaaaaat

SEQ ID NO: 250549 - DNA, 530 bp, Homo Sapiens
  misc_feature (52)..(82): n is a, c, g, or t
cggccggggacagggcggtcgagtgagggagctgctggcgggtgggtctggnnnnnnnnnnnnnnnnnnnnnnnnnnnnnnnggcgggtgctgggaaccgagcctcggcttgcggccggcagtttccgtgggtctgtgaagaggtcggcggcccctgcgggcgccagtcagctttaagaaaaagtagagatcacttctgactgtactgaacagcaaaaattaagtgacttgctgccctgcacatcatggcactgccattccgtaaggacttagaaaagtacaaagaccttgatgaagatgagctccttgggaatctgtcagaaacagaactgaaacaactggaaactgttttggacgatcttgaccccgagaatgcccttctgcctgcagggttccggcagaagaaccagacatcaaagtccaccacagggccatttgatagagagcatctcctttcatatctggagaaagaagcattggagcataaagacagggaagactatgtgccctacactggagaaaaaaaggga

SEQ ID NO: 250550 - DNA, 532 bp, Homo Sapiens
cggccggggtggaacaaagacttctgctagcaaaactggaataccaggttcatcgggattaggcagccctcttggccgaagtcgacatagtagtagtcagtcagacctgaccagttccagcagtagttcatctggcttgagcttcactgcatgcatgtctgacttttccctttatgtatttcatccatatggagcagggaaacaaaaaactgctgtttctggcctcacacctggatcaggaggattagggaatgtggatgaggagcccacttcagtcactggtcgaaaagattcactcagtataaaccttgagtttgtaaaagtgagtttgtcacggatcaggcgttcaggaggtgcctcattttttgaaagtcagtctgtaagcaagtctgcaagcaaaatggatactacgttaataaatatatctgctgtttgtgatatagggtctgcctcctttaaatatgatatgcgccgactcagtgaaattctggcatttccaagagcatggtatagaagaagtattgcaagacgt

SEQ ID NO: 250551 - DNA, 1317 bp, Homo Sapiens
gggaaccaaagtaagagtttaaagtgcaacagaagagagtctgctgaactttagacatgagggatccagggaggaagagcctggcccaactagagaatctgtgcaaacagctgtatgaaaccacagacacaaccactcgactccaggcagagaaagccttggttgaatttaccaacagccctgattgcctgagcaagtgccagctactcctcgaaagaggaagttcctcttactcccagttactggcagctacatgccttaccaagcttgtatcacgcacaaacaaccccctaccattggaacagcgaatagatattcggaactatgtgctcaactaccttgccactcggccgaagttggctactttcgtgacacaagcacttattcagttatatgccagaatcacaaaactgggctggtttgactgtcagaaggatgactatgtcttcagaaatgcaatcacagacgtcacaaggtttttacaggatagtgttgaatactgcatcattggtgtcacaattttatctcagctaaccaatgaaattaatcaagcagacaccacccatcctttaaccaagcacagaaaaatagcctcttcttttcgcgattcatcattatttgatatcttcacactttcctgcaatttactaaaacaggcttcaggaaagaatctaaacttgaatgatgaaagtcagcatggcttgctcatgcaactgctcaagctcactcataactgcctcaactttgacttcatcggcacttccactgatgagtcctcagacgacctgtgtacagtgcagattcccaccagctggagatcagccttcttagattcttcaaccttgcagctgttttttgacctgtatcattccatccctccttcattttcacctctggtattatcctgcttggtacagatctcttcagtcagaagatccctgtttaacaatgcagagagggccaagtttctctctcatcttgttgatggtgttaaacgaatactggaaaacccacagagtttatcagacccaaacaattaccatgagttttgcagactactggcccgattgaagagtaactatcaactgggagaattggtaaaggtggaaaactaccctgaggtcatccgattgatagccaacttcacagtgaccagcctacagcactgggaatttgctccaaatagtgtgcactatcttcctgagcctgtggcagccggctgggcagcctctgtggccgtatgtcaaagccacagagccccacatgctggaaacttacactccctgaggtcaccaaaagccctaacatcacatcccg

SEQ ID NO: 250552 - DNA, 930 bp, Homo Sapiens
cggccggggaaaaaccagcccttggtttaccttatgctcacaactcatcccagtttgtatagagttgacaatctctcagatgagggagcactcaacatcagtgatagaaccatacctcagccccccattcttcagctttcagtggagaagctgagcagagatggagctttcctcatggatgcaggctctgtactgatgctttgggttggaaaaaattgtacacagaactttctcagccaagttctaggagttcaaaactatgcatcaattccacagcctatgacagaccttccagaacttgatacaccagaatctgccagaataatagctttcatctcttggcttagagagcagagaccatttttcccaatactttatgtaataagggatgagagtcccaatgaaagcaaacttcccttcaaaacatgatagaagacagaacagaatctgcattatcatattatgaattcctgttgcatatacagcaacaagtgaataaatgaatgaatgaagaaatttgacttatttttaaggaatgtcacgatagtgcagaatacctggaaatgtgtaataccttctttttctattatgtttgtggactaatgtgatgattgagatgttctcactgtgatttcaacaacctatagcaaataaaagaccacagcagagaatcaaacatgcaactctgaaatactgtatttttcaaatcagaatatagctacgtatgattggatacttttttcttgccaattatgtttgagttgttatggattaaaataagaatattgcagaggcaaagtacattttgtaaaataaagatttctgtgttctacatgtatatttctcatttttaatttttctgaatctttggctgctacatttaaaacctcacaaacctaagtgttgcagggaagttacaaattgattggt

SEQ ID NO: 250553 - DNA, 1016 bp, Homo Sapiens
gatgatgtcagcactgcttccggtcggtggcgcttctctctggcccgagccaggtcagtccggcagtgcagatggcccatcccgggctctgggctcctagaccggggtgggccctgccaggagtgggcctgagcctcgcacgtcctctgaaactacgctatgctctgcttttgcggcgcgatgggcgtgggagcgggggctgcccaaagatgggctggggttggaggaagtggcccggtagccgctgtgtgtcctgaggccgtaaggcgcctgaccccacccctgaagctggcgacggagcagggcctgttttctctacactatagtcatgatccgctgggcccccagcgcatctcctggaagagcccactcaccctggacgagctcttcggtagcctcagaccgtccttgaagaggatgactgagacattatgggccacgcgctgtgtgtctgctctcggggaactgtcatcattgacaataagcgctacctcttcatccagaaactgggggagggtgggttcagctatgtggacctagtggaagggttacatgatggacacttctacgccctgaagcgaatcctgtgtcacgagcagcaggaccgggaggaggcccagcgagaagccgacatgcatcgcctcttcaatcaccccaacatccttcgcctcgtggcttactgtctgagggaacggggtgctaagcatgaggcctggctgctgctaccattcttcaagagaggtacgctgtggaatgagatagaaaggctgaaggacaaaggcaacttcctgaccgaggatcaaatcctttggctgctgctggggatctgcagaggccttgaggccattcatgccaagggttatgcccacagagacttgaagcccaccaatatattgcttggagatgaggggcagccagttttaatggacttgggttccatgaatcaagcatgcatccatgtggagggctcccgccaggctctgaccctgcaggactgggcagcccagcggtgcacc

SEQ ID NO: 250554 - DNA, 794 bp, Homo Sapiens
  misc_feature (637)..(638): n is a, c, g, or t
  misc_feature (712)..(712): n is a, c, g, or t
gggatcattaccccttatctgatggagattggtcccctttagagaccacctatccccagacagcgtgtcctaagagtgattcagagctggaggtgaaacctgcggagagcctgctcagatcagagtatcacatggagtggacgtggggcggattcccagagtccaccaaggtcagcaaaagagaacgatctgaccatcatcctaggacagctacaattacaccatcagaaaatactcattttcgggtaattcccagtgaggacaacctcatcagtgaagttgagaaggatgcttccatggaagacactgtctgtaccatagtgaagcccaaacccagagccctgggtacacagatgagcgacccaacatctgtggcagagcttctcgaacctcctcttgagagtactcagatttcatctatgttagatgctgaccaccttcccaacgcagccttagcggaggcggccctcagaatccaaaaccggcagctaaagtagactcgccgtcaaagaagaaaggtgttcacaaaagaatccaacaccagggacctgatgatatttaccttgatgacttaaagggtctagaacctgaagttgcagctctttatttccctaaaagtgaatcggagcccggttcnnaggcagtggcccgagtctgacacactctctggctcccagtccccacagtccgtgggaagcgcagctgcagatangcgcaccgagtgcctctcagattctgccatggacttgcctgacgttaccctcgtccctttgcgggggcctcagtgaaaatgg

SEQ ID NO: 250555 - DNA, 1003 bp, Homo Sapiens
aaaatcctcggcctcggtggcggtggtggacacgtcgagccgggtagaagtggaggggccgttcgaagagtcgtgagggggtgacgggttaagattcggagagagaggtgctagtggctggacttgacctggaaagaatcttctgctgactctcaacttttcctggaaaaaatggatcattcccaccatatggggatgagctatatggactccaacagtaccatgcaaccttctcaccatcacccaaccacttcagcctcacactcccatggtggaggagacagcagcatgatgatgatgcctatgaccttctactttggctttaagaatgtggaactactgttttccggtttggtgatcaatacagctggagaaatggctggagcttttgtggcagtgtttttactagcaatgttctatgaaggactcaagatagcccgagagagcctgctgcgtaagtcacaagtcagcattcgctacaattccatgcctgtcccaggaccaaatggaaccatccttatggagacacacaaaactgttgggcaacagatgctgagctttcctcacctcctgcaaacagtgctgcacatcatccaggtggtcataagctacttcctcatgctcatcttcatgacctacaacgggtacctctgcattgcagtagcccccaggggccgggaacaggatacttcctcttcacctggaagaaggcaccggcgagtggatatcacagagcattgcccttggacatcaaaactcctatggcggtggcccttatccattgcaatgggaaaatgccgaagacttgaagacgggaatccctgatccaaccatcccctccttggtcccttttcgggggccggtccactctaaataaaacacccccgcaaccaccacgagtcccaccccccgggtaaacagagggttcaattttaaagccccctgggatcaaagccacaaacacccccaaagttggtttctttcaacagagctggcaaattcc

SEQ ID NO: 250556 - DNA, 796 bp, Homo Sapiens
ctttgtactgtagcatttggaggagagagacatccagttgaactgctacttatctgcttatggccattctcacgtggtggctttttctgcaaaatcaaaaggtagctacagaaacctagccaaagaccacatctgatgtacctttgttcctgagctattccacaacactgagtatccttcacctatatatgacatttataggacactaactttaactcaagccaacactttccaaatgacacaaattactggcatacttccatctccactcaatgatgagacaactacgcctacacaattagcctaggtaagaaaaagctcagttttaacaatttgaaaaacatgttgcaaatcaagacctcagcagaagaaaaaaccaatctataattatttttatattaagtatagaatcttttaaaagaatgctataaatttaaaatagtgtgaattaacagagaatacatttaacccactattttcatgaaattgtcaaacctaactaaatcatatgtacaggtatccttcatacaatgccagcaaaacgtaagcagatatagattcatccagtttctctgaaagtacttgacaggaaaaaagtggcaattacaagaaacacttaaagaatatttctttaggattaccttataggtattatagagtggttttctagacaaaattacatcaaaacacagagaaaatagtaatcagaagagtgaaacagttactaaaaacaaccaaatattcacaaaagtagaatatacaggaatactaaagagggagaaatgaaccccggccg

SEQ ID NO: 250557 - DNA, 586 bp, Homo Sapiens
caccaacctttccaaattaaaccaaaaaagtatgaccagcatgtttaatagtatgcaatatgcaaaagctttgtgttcctgttagccaacatccaaacccacccaccctctttattcacaagtgtacctctactaaccataattacatcactaagcctgttagtttgagagggtcttaaatttgttaaaactggaaaatctttgtataggggctccattcatttgactcaaggttatagacttccaccgtattcagaaattcattgccatcgaatcctcccactgcataaatggtgttccctacagttgcaatcccagcattgctccttggtgaagtcatatttcccatcatcttccattcatttctagttggatcatacattccattaagaacagccactccagctcctcgcctagccacattcatgggtgcaattaaagtccaggtattacaggattgtatcgttctactgtgttcagacaattccaagattctgcacctccgattatgtacaaataaccaccaagctcacagactgcagactggtgtctccgaatgttaagaggggcacagcttgtccacaac

SEQ ID NO: 250558 - DNA, 591 bp, Homo Sapiens
ggaacaggaatccagtcatctatgtttgaatcatacatctctccacaactcaggtcatctgagtggccatttgatccacctaccacatagagctggccctatgccaaaagtgagagatgagaatttctaacatcctgaagttacgaggaaaaagctaaataggggttgctcctgcaacataatgcgcttaccatgagtacagccatttgaaatcgggctcttggtgttctcatgggagcaagaaaggaccagtgatctgtatgtggattatagcattcgactgttcgaagacattcctctctgttatagccacctgcagctatgagtttgccattcatctctgctgttcccagaccagatcgtgcgtactgcataggagacatgggcttttcgattagctcatcttgttgcatctcaaagcttaaactcttacttagttttggagtacttgttggtgagctctgtgggctgtttctcccatgaagaaaaatgacacagaatataccatccagcacagccaggcacaagtaagtgttatctgtaagcacaagagttccatgtttaagatgtaattattacttttggtttgtg

SEQ ID NO: 250559 - DNA, 1613 bp, Homo Sapiens
ggaaatataaaacctgcgtacaaagcaggctggtcggtccggaatcccgggatatcgtcgacccacgcgtcggacccacgcgtccgaaaaaagctgaagatggatcgagtaaagcaggtttgtggtgattatttactgtctagaatggatgttaccagctgcatctcttaccgaaattttgcaagttgtatgggagactcccgtttgttgaataaggttgatgcttatattcaggagcatttgttacaaatttctgaagaggaggagtttcttaagcttccaaggctaaagttggaggtaatgcttgaagataatgtttgcttgcccagcaatggcaaattatatacaaaggtaatcaactgggtgcagcgtagcatctgggagaatggagacagtctggaagagctgatggaagaggttcaaaccttgtactactcagctgatcacaagctgcttgatgggaacctactagatggacaggctgaggtgtttggcagtgatgatgaccacattcagtttgtgcagaaaaagccaccacgtgagaatggccataagcagataagtagcagttcaactggatgtctctcttctccaaatgctacagtacaaagccctaagcatgagtggaaaatcgttgcttcagaaaagacttcaaataacacttacttgtgcctggctgtgctggatggtatattctgtgtcatttttcttcatgggagaaaacagcccacagagctcaccaacaagtactccaaaactaagtaaagagtttaaagcttggagatgcaacaagatgagcttaatcgaaaaacccatgtctcctatgcagtacgcacgatctggtctgggaacagcagagatgaatggcaaactcatagctgcaggtggctataacagagaggaatgtcttcgaacagtcgaatgctataatccacatacagatcactggtcctttcttgctcccatgagaacaccaagagcccgatgtcaagatggctgtactcatgggccagctctatgtggtaggtggatcaaatggccactcagatgacctgagttgtggagagatgtatgattcaaacatagatgactggattcctgttccagaatttgagaactaaccgttgtcaatgcaggagtgtgtgctctgaatggaaagttattacatcgttggtggctctgatccaatatgggtcaacaaaggactgaaaaattgtgatgtatttgatcctggaacaaagttgtggaaaagctgtgcccctcttaagcattcggagacaccagtctgcagtctgtgagcttggtggttatttgtacagtaatcggaggtgcagaatcttggaattgtctgaacacagtagaacgatacaatcctgaaaataatacctggactttaattgcacccatgaatgtggctaggcgaggagctggagtggctgttcttaatggaaaactgtttgtatgtggtggctttgatggttctcatgccatcagttgtgtggaaatgtatgatccaactagaaatgaatggaagatgatgggaaatatgacttcaccaaggagcaagtgctgggattgcaactgtagggaacaccatttatgcagtgggagga

SEQ ID NO: 250560 - DNA, 927 bp, Homo Sapiens
  misc_feature (473)..(481): n is a, c, g, or t
gtcaggtactctgttttgtaaaagtacttttaaattgcctcagtgatacagtactaaagataaacagaaatgctgagataagcttagcacttgagttgtacaacagaacacttgtacaaaatagattttaaggctaacttcttttcactgttgtgctcctttgcaaaatgtatgttacaatagatagtgtcatgttgcaggttcaacgttatttacatgtaaatagacaaaaggaaacatttgccaaaagcggcagatctttactgaaagagagagcagccgttatgcaacatatagaaaaatgtatagatgcttggacagacccggtaatgggtggccattggtaaatgttaggaacacaccaggtcacctgacatcccaagaatgctcacaaacctgcaggcactatcacttggcgtatggcactcattaaaaaggatcagagaccattaaaagaggaccactacctattnnnnnnnnntgtggagttggagggctaacatatttaattaaataaataaataaatctgggtctgcatctcttattaaataaaaatataaaaatatgtacattacattttgcttattttcatataaaaggtaagacagagtttgcaaagcatttgtggctttttgtagtttacttaagccaaaatgtgtttttttccccttgatagcttcgctaatattttaaacagtcctgtaaaaaaccaaaaaggactttttgtatagaaagcactaccctaagccatgaagaactccatgctttgctaaccaagataactgttttctctttgtagaagttttgtttttgaaatgtgtatttctaattatataaaatattaagaatcttttaaaaaaatctgtgaaattaacatgcttgtgtatagctttctaatatatataatattatggtaatagcagaag

SEQ ID NO: 250561 - DNA, 1318 bp, Homo Sapiens
acatagtttactttcatttttgactctgaggctctttccaacgctgtaaaaaaggacagaggctgttccctatggcagaaggcaaccacagaaaaaagccacttaaggtgttggaatccctgggcaaagatttcctcactggtgttttggataacttggtggaacaaaatgtactgaactggaaggaagaggaaaaaaagaaatattacgatgctaaaactgaagacaaagttcgggtcatggcagactctatgcaagagaagcaacgtatggcaggacaaatgcttcttcaaaccttttttaacatagaccaaatatcccccaataaaaaagctcatccgaatatggaggctggaccacctgagtcaggagaatctacagatgccctcaagctttgtcctcatgaagaattcctgagactatgtaaagaaagagctgaagagatctatccaataaaggagagaaacaaccgcacacgcctggctctcatcatatgcaatacagagtttgaccatctgcctccgaggaatggagctgactttgacatcacagggatgaaggagctacttgagggtctggactatagtgtagatgtagaagagaatctgacagccagggatatggagtcagcgctgagggcatttgctaccagaccagagcacaagtcctctgacagcacattcttggtactcatgtctcatggcatcctggagggaatctgcggaactgtgcatgatgagaaaaaaccagatgtgctgctttatgacaccatcttccagatattcaacaaccgcaactgcctcagtctgaaggacaaacccaaggtcatcattgtccaggcctgcagaggtgcaaaccgtggggaactgtgggtcagagactctccagcatccttggaagtggcctcttcacagtcatctgagaacctggaggaagatgctgtttacaagacccacgtggagaaggacttcattgctttctgctcttcaacgccacacaacgtgtcctggagagacagcacaatgggctctatcttcatcacacaactcatcacatgcttccagaaatattcttggtgctgccacctagaggaagtatttcggaaggtacagcaatcatttgaaactccaagggccaaagctcaaatgcccaccatagaacgactgtccatgacaagatatttctacctctttcctggcaattgaaaatggaagccacaagcagcccagccctccttaatcaacttcaaggagcaccttcattagtacagcttgcatatttaacattttgtatttcaataaaagtgaagacaaacaaa

SEQ ID NO: 250562 - DNA, 719 bp, Homo Sapiens
ctgcctcgtctcatgattaagatatatactttccagcatttagaaatcattgttttatatggtaatgtagtgattacgtatattttaagttaaagaatttcttctggcactgattctttggtatttttaagccttgctcagtgaaaggatgctgctgctgattgcttcatatgttcatatttaagatatacaattattatccaagtgatatttgtcaattgaaatgggatatgagcatgttacaacatgctcatttcaacagaaacttttaaaaaacccagtctgctcaacaaatcacgtaggacaaaagagaaggtcattttttaaaaggtagatatttttttctatctgttaaatgtcttttaccccttaaatgtctatgaaaattttcactgatatttgaaacagaacataattacataagaatattcttaatccgtatatatttcttacattttaacgaaattattgaattgagacttcttgatttgtggctcccttaaaatcacctctgcatttgatgtattatacggacaagaaaatgatgcaattatagaaagatgtagagagtgatggagaatagaagataagattaatattaattgaatggattcatatgattgtggttcagaaggataaatgaggacttcttccttttgagaaattacacatttccccctctagggaaatacagaaaatacctctataggcaatttact

SEQ ID NO: 250563 - DNA, 1107 bp, Homo Sapiens
ttggggattgcagtaggaagaaactggttttcaaaaggtccttttgaggtcactgagctcaggcctatcttacacaggtcagacaactttaacacagggaggtcctgcctggctcctctcactgtcttggataaatggacaggacaacaggacaggtatcaggacatgacaccattttctgcggtggatgtcaaccatccaagccctcacgagagctaaacgagcgactccagctggacaagatcagctgggctgaaattggaagtgtcctaagaacagtgtgcattttccttctcgggtgggagatgtgctggacacttttattccaattctctttcttctattgcaatgctacaagctaatccccccccacattccaaagtgagtaataaatatatttaaacaaaggatgtttataatcaacaatcaaaaaatattggcagcaaagaggattatttttaatagtgtacatttattcaaaagtatataaaacaacactgtaaattatataatctcacataaaaacactagaacttgatttgaataacaaaacaatctactaagaagtattgctcatgaagatttttgtgcccacctttcctaactcagaggccctcatttatgtcgcaacagcaaggtggcagggaatcaaaactggcacacattctatatccttcacagcactgcagggcaggacaagactccgtggcaatggttttggcctggctgttcttggcccaccacaccttgtctgggttgtgattttttacagccacagcttcaggttcctttgcagcttttagcgcgttgtgtattttgaagtaaagacagagcacgacaactatcagcaggagcaaggccgccaggataccaccagcgatgacaggcataatcactgcataaataatggctcctctgctccaggaagggcaagaaacatttcaaaaagagctccaatcatgtgtcagacatccccttgtcaggcatcctccagggtcttccaactgcagcttcccatctcaccacttctaaggcaactgaccatagacgctccccatccgcccagcaaccgtggtccatgctgcctgcgtccaccgccagcgtccc

SEQ ID NO: 250564 - DNA, 1250 bp, Homo Sapiens
cggccgggatcgcagccaaattcacaaattcggcaaaatatcagacgctccttaaaagagattttgtggaaaagagtcaatgacagcgatgacttaatcatgacagaaaacgaagtaggaaaaattgccctccatattgagaaggagatgtttaacttgtttcaagttacagataatcggcttacaagagtaaatatcgcagcatcatgttcaacctgaaggaccctaaaaatcagggactcttccatcgtgttctgcgtgaggaaatctctttggcgaaacttgtgagactgaagccagaagaacttgtatctaaagagctttccacgtggaaagagaggccagcgagatctgtgatggagtccagaactaaactgcacaatgaaagcaagaagacggcccccaggcaggaggccatccccgatctggaggactctccgccagtgtcggattcagaggaacagcaagagtcagcacgtgctgtccctgagaagagcacagcgccgcttctcgacgtcttcagcagcatgttgaaagacaccaccagtcagcaccgcgcacacctcttcgatctcaactgtaaaatttgcacaggccaggttccctccgcagaagatgagccagctccgaaaaaacaaaaattgtcagcttctgttaagaaagaagacttaaaatcaaagcatgacagctctgcacctgacccagctccggattcagctgatgaggtgatgccggaggctgtgcctgaagttgcctctgagccaggcctagaaagtgcttctcatccaaatgtggacagaacgtatttccctgggcctccaggagatggccatcccgagccctccccgctggaagacctgtccccctgcccagcctcctgtgggagcggggtggtcaccaccgtcacagtgtccggccgggaccccaggaccgctccaagcagttcatgcacagccgtggcctccgcagcatcccgcccagacagcacccacatggtggaagccagacaggatgtgccgaagcctgtcttgacttctgtgatggtgcccaagtccatactagctaagccatcctcatctcctgacccaagatacctgtcagttcctccgtcaccaaatatcagcacttcagaatcacgttcccctccagagggagacacgaccctctttttgtctcgactcagcaccatttggaaaggatttattaacatgcagagtgtggcaaaatttgtcactaaggcgtatcctgtc

SEQ ID NO: 250565 - DNA, 670 bp, Homo Sapiens
  misc_feature (18)..(18): n is a, c, g, or t
ttcggccgggtattagtnatactactgtctggattattttaaaatcttggtacaatttgtataaaacaacactaacacttgttaacttgccagtcctctaggaacttgtttcctttccttactctgaatagactagtggtagctgtccattatcttttaccttaattacgattgtttgaaccacatttaaattccaaaatctatattattggtttaaaagcttcaacttgacaagatattattaacagtctacatggagatcctcaaattatatatgaattttcaaacattgatatcagctccttgatttactttttaatatatatttttacgtaaaatactaattaaaatgttgttttatcatttattatttggaaaagagcttgaatttaagaattcatataaccagcataattttgaagaccattaagcctttatgaagtcaattcagttaaagttttcgtatatcatcgagcctcaacttaacggtatgaatggaataggaaatttacttgagatgattttcatgataacatttgtggtgattccattctcttggctaagattctagttagaataataattctggaaaggttcttgctggtcatctgctccgtatggcttatctggtatagccttaggaggaactatgatggggtagccaaagggg

SEQ ID NO: 250566 - DNA, 1224 bp, Homo Sapiens
agcaggctggtaccggtccggaatgctcgggatatcgtcgaccacgcgtccgatcatctggacccttttccagcacaccctgcagaatgaggtatgaactcatgagagacaggcattggaccaaattatgatgtgttccatgtatggcatatgcaaagtgaagaatatagaccttaaattcaaaatcatgtaacagcatacaaggatcttcctcatgctgttcaggagacattcaaacgtgtttgatcaaagaagaggagtatgattctattatagtattctataactcggtcttcatgcagagactgaaaacaaatatttgcagtatgcttccaccaggccccctaccttgtcaccaatacctcacattcctcgaagcccttacaagtttcctagttcacccttacggattcctggagggaacatctatatttcacccctgaagagtccatataaaatttcagaaggtctgccaacaccaacaaaaatgactccaagatcaagaatcttagtatcaattggtgaatcattcgggacttctgagaagttccagaaaataaatcagatggtatgtaacagcgaccgtgtgctcaaaagaagtgctgaaggaagcaaccctcctaaaacactgaaaaaactacgctttgatattgaaggatcagatgaagcagaatggaagtaaacatcctcccaggagagtccaaatctcaggcagaaactggcagaaatgacttctactcgaacacgaatgcaaaagcagaaaatgaatgatagcatggatacctcaaacaaggaagagaaatgaggatctcagagaccttggtggacactgtgtacacctctggattcattgtctctcacagatgtgactgtataactttcccaggttctgtttatggccacatttaatatcttcagctctttttgtggatataaaatgtgcagatgcaattgtttgggtgattcctaagccacttgaaatgttagtcattgttatttatacaagattgaacaatcttgtgtaaatcctgccatttaaaaagttgtagcagattgtttcctcttccaaagtaaaatcgctgtgctttatggatagtaagaatggccctagagtgggagtcctgataacccaggcctgtctgactactttgccttcttttgtagcatataggtgatgtttgctcttgtttttattaatttatatgtatatttttttaatttaac

SEQ ID NO: 250567 - DNA, 899 bp, Homo Sapiens
  misc_feature (820)..(820): n is a, c, g, or t
acaaatgtgcattctgccccatggccttcaagactgccagcagcactgcagaccacagtgccacccagcaccccacccagccccacagaccctcccagctcatttataagtgctcctgtgaaatggtcttcaacaagaagaggcacattcagcagcatttttaccagaatgtcagcaagacgcaggtgggcgtcttcaagtgccctgagtgcccactcttgttcgtgcagaagccggagttgatgcaacacgtcaagagcacccacggtgttccccgaaatgtggacgagctgtcaagcctccagtcttcagcggacacatcctcaagccgccctggctctcgagttcccactgagccaccagccactagtgtggctgctcggagcagctccctgccttctggccgctggggtaggcctgaagcccaccgcagggtggaagccaggccgcggctgaggaacactggctggacctgccaggagtgccaggagtgggttccagatcgggagagctacgtgtcccacatgaaaaagagccacggtcggacattgaagcggtacccatgccggcagtgtgaacagtccttccacacccccaacagcctgcgcaaacacatccgcaacaaccatgacacagtaaagaagttctacacctgcgggtactgcacagaggacagccccagctttcctcggccctcccttctggagagccacatcagccttatgcatggcatcagaaaacctgatttgagccagacgtccaaagtgaaaactccggggtggacattcccctcagggtgaccatctgaaaagacagtcantggaagtgggggacgcctcaggcaccagcaatggcgcaactgtctcttccaccaaaagcaccagtcccctttttcagtg

SEQ ID NO: 250568 - DNA, 752 bp, Homo Sapiens
ctggatgagtgtagtagacaaagaacaggacgatagcaactaaagacagcagataattcagagctgtagctgataacaaggctgcataccaacatctcgagttcccttcttccattttttcaacccacgattcattccatgaatgtgcaaaatcaataagtaagactagttgtatgaggatgaaacaaaaggcacctgccatgcctacataaaaccacacagttgtaaaagttccttctggaatgaagaatgccccaataataattgcaattgctgcagcaaatttaaagaaccaaaatccattgtgcactgcagctctaggatcactgctactcttcactttgatcattagtaaagagagaagaagatagaacatagccaaaccaaagcacaaacgatatacagctttatagccaaccaaaatgttacaagggacaacacctttctcattctcacaaaatccaggaatcttattcagttgttcttccattcctggtatcaacattacacaagctacacatactccaacaagcaagaaaagtgcatagatcaatctagttacagtggagttgtttccactaggacagcatcggcatagcaaacacggggcacttccacacaaacatggtatccagctcgccatggagcacagccccaggacgctccccatctccacaacgtcacaagagcagcggatacagacaagatggagacagcttctttctcgcctttccgagattatttactatctc

SEQ ID NO: 250569 - DNA, 708 bp, Homo Sapiens
  misc_feature (249)..(275): n is a, c, g, or t
  misc_feature (676)..(676): n is a, c, g, or t
gagcaggaccgcggccggtgccccagccgaagccggagtcgcgcggccgggagcacgggcgccggcatagtacaatgaggcagccagcggatcttggagcctgagcccttgtgaagccggcaatgacaagtctgtatggtcgccatgccgagaaaaccactgacatgccaaaaccatcagcccctaaagtgcacgtgcagaggtccgtgtcccgagataccatcgccattcacttctcggcatccggcnnnnnnnnnnnnnnnnnnnnnnnnnnnttcagggagtactttgaggaggggctggatgaccaaagcattgtaacagggctggaagccaaggaagacctctatcttgaaccccaagttggccatgaccccgccggccctgctgcctcgcctgtcctggcagatggactgtccgtgtcccaggcccctgccattttgcccgtctccaagaacactgtaaagctgttggagtcccctgttccagcagcacaagtattaagtacagtgccattggctgtgtccccagggtcgtcttcgtcggggcccttagctagctctcccagtgtgtcatccctttctgagcagaaaaccagttcttcctccccattgtcctctccttctaagtctcccatcctctcatccagtgcctcaacctccaccctttccagtgncaaacccttcatgagccttgtgaagtcccagt

SEQ ID NO: 250570 - DNA, 582 bp, Homo Sapiens
gggaggaagagagggatgagtgaaggtactacacacttttaaataaccaggtctcacaagaattcactgtcacaatgacagcaccaagggggatggtgtgaaaccatgagaaactgctcccatgatccaatcacctcccaccagtccctgcctctgacactggggattccaatttgacatgtgatttggtggggacacagatccaaactatatcactggtaattaaaattagcattatactacatgctacttcaatctaaacaccagaatatgcctacagatttttggggttagagctagggggaagtattccatcattaggctggggtaggaactctttaaagaaaaaagtcagattatcgactgagacctgcaatatactaacctgttgagaaagaatatgagtttataaattcccccaaaagctataatggggtaccatgacgtgttggcaattcttgtatcctggaggtgaaaaagaactcctgataagggttttgaactctcgatgagatattacaaagcaaagatggacctgaactcacccctttcctatctgaaatctgggtttatttaggagaa

SEQ ID NO: 250571 - DNA, 683 bp, Homo Sapiens
  misc_feature (29)..(29): n is a, c, g, or t
cttgccggttcccttgggcaggggaggantaaagtacataaaggacaacaggttgtttttcttcatccagaaaactgttaagttgatctgcataattatttttattttccaataatcacagtttaacttttgcaggaaagacaaaggaaagaattacgaaaaacagggaagaaagttacagaaacagagacattaagcttaacgtgacagtcacttatcttatgacacacactaaatcctcatgtgccttattcatattacaaggcgagaaaccaaaagcagaataatgaggtcacaatgcaccactaccgccactcagccattgtttccaaacacccggaccttcttctttcacacggtctgctgagcacttcagaggcagacattgttcaccatggcccaagcctgttgacaaggctaaaggacatctggtcttatttgtaaaaatgatgtcgatgggatctgttttgtcacagagtatctcagcacttctactgaactgattaacagaagtaactatgacacatcaaaaataaaaatagaatataagctcaaggagggggagacatttattcactgcactcggaactgtgccacgtccacaaggacgctcaataaaaatgtgttgaacaaacacatgaatgaatggatgggtgaatgaatgaaaatcacttctaaaaacc

SEQ ID NO: 250572 - DNA, 905 bp, Homo Sapiens
  misc_feature (206)..(338): n is a, c, g, or t
  misc_feature (892)..(892): n is a, c, g, or t
catgactcgtcactgtgcagtggccgtgtaattgcctctccatctcctctagacggtgaactccatgaagaagggacacagtctgtcttagtgctattgccccagtgcccaggctggccctggcacatagtagagcctcagggaactttgttggatggttgaaggatggacaataacatgttggagtccttcaagaatcctgaggnnnnnnnnnnnnnnnnnnnnnnnnnnnnnnnnnnnnnnnnnnnnnnnnnnnnnnnnnnnnnnnnnnnnnnnnnnnnnnnnnnnnnnnnnnnnnnnnnnnnnnnnnnnnnnnnnnnnnnnnnnnnnnnnnnnnnggagacctgaggagggccttgagcagatacatctcctctctcatccactcaggtggccactaacacggacaccagccgaaatgccggaaatgcggtcctgtttgagacagtactcaccatcatggatatccgctctgcagctggcctacgggtatcaccccttatgcctctcccactacggccccgcccaccacctcacccacacaggtcctgcttgctggtttctccctcctagccccatcatcttgcgccaatgtgttcccagtcctcaatggctgagcaggttgctcctttccgactgaccccaacttctgcctctcataggttctagctgtcaacattcttggtcgcctcctactcaacagtgacaggaacattaggacaggacggggagtgggggctgatggccatggtatgatagaacctcccccatcctgaccaggtatgtagccctgacatcactgcttcgactggtgcagtctgatcacagtgctgtgcagcggcatcggcccactgtggtggaatgtctacgggaaactgatgcctccctcagncggtgagcagtga

SEQ ID NO: 250573 - DNA, 742 bp, Homo Sapiens
  misc_feature (61)..(61): n is a, c, g, or t
  misc_feature (124)..(124): n is a, c, g, or t
  misc_feature (296)..(328): n is a, c, g, or t
  misc_feature (534)..(569): n is a, c, g, or t
ctcttgtcatggctattcaggtttttagttcagctgctgaggcggtgagaagtttcatgtnagacgtacaggtagctttttaccccactttcctctgtccaaagcgatatacaagtaacaggcntgcttcgtgctgccattcagaacaggcataaaaagcaaatcatttactttccggaaacagagtccagctgcacagagcattcgcggttattcccttgttctatcattttttaccacccaacaacattcagcaaaacgagttaataatagttactggtgtttgaggaagggtnnnnnnnnnnnnnnnnnnnnnnnnnnnnnnnnngaacacacatggcagagatacgatattactgcaaaagcaggtgaatgcgggaacatccttggcttgccaggctttatgtgaagcttgcatttttcttatccttgtctttcttggtttgctgggccccagattgctgggcctgggactgtagtaactgagccgctgctttcttcttctggaagttgttcacctcctcctcaagctcnnnnnnnnnnnnnnnnnnnnnnnnnnnnnnnnnnnngtgtgtccgctttagaaggtcaaacttctcgtgaaaaaaattctctgcctccttaagttcagcttctttctccttcactctcataacaaacatttgtctcatttcttcttctttcttctgcagttctcccaggaattcattcctttttgcttcatatgtctcctgaagactga

SEQ ID NO: 250574 - DNA, 865 bp, Homo Sapiens
aaaacctatcttagatagaccatctccctacgataagatggcagaacagaatgtcaggaggagaggtttggtctgaagagggttatctgtccaggagacgctttatccccaaagcaatgcgcttcagtttgctgtgcgcagcagagcacctgttggggggagaaaagtagagcacctagaaagtccatgaacaaattccagcagcaaaaaaacttcctattttgttcatattttcagcaatggacaattctttcaagcacattatatttataaaataattggataaatatccaaaagctctttcaccatttattggcataattactatcgttcatggagcttccactggcagacaagcatgcgcgcattgtgcattgcgggcgcagattaaaatgctgtgcgacctgcaaagaaacaatgtgaagtgtatacctagagccgctgcgcttcgcaggcgcgggggggattggcagcatctccttcagaaattactgtgaaagaggaggaaaatttgatttaaaaatccagctatgtaactaaattgaatttgggactagaaagccttcggcagaccaatccttccagccatctgatgcgcaacataaggtttctcataaaacaaagaaaatgtcaattcagttgtgaattcatattgatacctggaactctcctgctagaccacctctaaaggcccagggttcttggtctccaattaagaattgtgctgaagaatgactacgacaccctgttgagatcagatccaagcggagaacgttacgagaaaggggatttcctggggtctcaaatgtccaacaaactgacaaacacttcgtggaaataactctctaacaataatcagggtttc

SEQ ID NO: 250575 - DNA, 1161 bp, Homo Sapiens
  misc_feature (507)..(570): n is a, c, g, or t
  misc_feature (1145)..(1145): n is a, c, g, or t
gcacgagctcgtgccgaatacggcacgagatccagagtggttgcgtttctcacctgagagtaatcaagataacatctgtcatcttccttgtgttatatgagtgaaatgcctctcagtcttaggggacatggcagagatgaaagagagagagagtgggtttcagaagtgtcagggtggagtgattccaagtgggatggttgtggcattagtttaagctgaataaataatttcaatttggggcagttattctgctttttgtaaagccgcggccaattgtctcctgtaatgactgttggttcaggcatgttgtactttgtagggacaaatgtgcatttgtttgtggcaaaagcctacaattgacaaacttgtaaatttctttgtatataaactagctgtaacctgactatcctctgtgtttactgtttttgtaaatttttttcctctataaatgaaagggtgttggttcagaatggcactttgaataatgtaaaccagtgaaaagtggannnnnnnnnnnnnnnnnnnnnnnnnnnnnnnnnnnnnnnnnnnnnnnnnnnnnnnnnnnnnnnnaaagtgcctcccacctaggcgtaggccatgaccatttggggtacgagagcctaattttgtaggacttaatctgttgaaaagtgcagctacttctggaaattaacctcaatattaggtcaccatgtgaaatgttggatttgacatgtcaggtagggttcagggactgattggtcccatttgccctcaggtcagttgtttaatctcaagacctgttactactgattttattaaatcagagtctttaattcttgcatgtttgtatctaatttctgaacgaatgagcacactttaaccccgtaatttacagcttaccctttttcctttcaacgggattgtgcaagccttcctgtattttttaatttacaatccggtggtttttaaggggtccctgagccatgaaactgggcacataagccgggcaagggactcattttttttcacccatgggctgggctggaatttcctcccctaagaattggataaacccggaacttttggggcaatccttggccttccccctgggaaattttggccatccaagcttgggcttacacccttttcaaacccctgaaaancgaaacgggggcaaaa

SEQ ID NO: 250576 - DNA, 1404 bp, Homo Sapiens
ggcctgggtggcgaattcggcacgaggctctgaaaaaattgaagaatggcggtcacgagcagccaagtttgaagagatgtgtggactagtgatgggaatgttcactcggctctccaattgtgccaacaggacaattctttatgacatgtactcctatgtttgggatatcaagagtataatgtctatggtgaagtcttttgtacagtggttagggtgtcgtagtcattcttcagcacaattcttaattggagaccaagaaccctgggcctttagaggtggtctagcaggagagttccagcgtttgctgccaattgatggggcaaatgatctcttttttcagccacctccactgactcctacctccaaagtttatactatcagaccttattttcctaaggatgaggcatccgtgtacaagatttgcagagaaatgtatgacgatggagtgggtttaccctttcaaagtcagcctgatcttattggagacaagttagtaggagggctgctttccctcagcctggattactgctttgtcctagaagatgaagatggcatatgtggttatgccttgggcactgtagatgtgaccccctttattaaaaaatgtaaaatttcctggatccccttcatgcaggagaagtataccaagccaaatggtgacaaggaactctctgaggctgagaaaataatgttgagtttccatgaagaacaggaagtactgccagaaactttccttgctaatttcccttctctgataaagatggacattcacaaaaaagtaactgacccaagtgtggccaaaagcatgatggcttgcctcctgtcttcactgaaggctaatggctcccggggacttttctgtgaagtgagacccagatgataaaagaattctggaattttacagcaagttaggatgttttgaaattggcaaaaatgggaaggatttccaaaggatgtggttatacttggtcggagcctgtgacatttgttgacactgtgaactgtccaaaagtctcttaactgcaccttgtgaatggtagttgaggtcttcatacagttcagcctctagaatggtaacaaatcagccaattggattcgaaacaaagaagactatgtaaaactcacccatcacactttgagactactcactggttggaagaatatagtattgcagcaaatcctgtatgaaagagagatgtgggcttcctttttgagtcttgtgttaggtgctgagaccttttacatgggcttatacagggagagagtcttcaataaatgtagtcagcactattttctgcatccagtgtggttgcgtttctcacctgagagtaatcaagataacatctgtcatcttccttggtttattgaatgaaatgcctctcactcttcggggacatggcagcg

SEQ ID NO: 250577 - DNA, 1679 bp, Homo Sapiens
  misc_feature (222)..(278): n is a, c, g, or t
  misc_feature (390)..(390): n is a, c, g, or t
  misc_feature (460)..(460): n is a, c, g, or t
cagtagggcaaagggaatcccttaatctcaacaacgtacacatcactcatattcactcataatggaaacaggtcacatttgcactggactctggttaggcaatttaagtatacaaaatgataaattcaaaataataaattaccaacatttccaaaatagcagaagacacactgatagttaagagatcaagatgaaaaggtttctttataaagcataacaggnnnnnnnnnnnnnnnnnnnnnnnnnnnnnnnnnnnnnnnnnnnnnnnnnnnnnnnnntagaaaagttgaaattaagattaagaggaaatgtgaaacacagtatctaaaaactgagaaaaattgtttaattaagaagtacttactgaaacggtgaatggttaagcaaagnaatataaacgaaagtaccaatggccattgcttttctttcctgttgtccactgttacagcaataagtgcanccaaaaattttaatcaaagccagaacaaaggagattccaaaatatccagtgagggaaaaaaggaacgcataaccataggtccgaactggattctttgcacaaaatgttactgcagggcctaatccactagtgcatgtcaatcccaagtaaaatgtatacaaaaccaattgaatacgaatacaataccatttcagaattagaagcattatgaagtttcatagctttctcttgaacatttccaatgacggcatctgcacatagtgccagggaaataagcaccacacccgtcaggttgaaatttggtgcagttgtgctgtcagcgagggtaaaccatatcaggccaaggctcatacatatggcagcagacacatctgcaacattataacgctttccttgaataaaaactcctcctagcataacaggaatcaatttgcagcacttgaagatgacttgggtagggtaattcaggtagcccaaggaagtgtttgataaccccatagtacccacagttagaaaagctattatcatgtaggtttttcctggtattctcctccttttgtcctgaataagctgaagttctattaggccaaatatggagtaaaaggcaaactgcactaaggtaaggtaccagccacaggacttaaaaccctccactgaaaatattaattccggtaaatacccataaattaggtaaaatacaaaaactccagcaacacatatgaaaaactgagtaagtttgttaaacttgctgagattcatgccaagtaccacaacgtcgtcaactgacttgatgtgtggtgacattgtttgggttttggatggcacagtgatagaaatatatttcctggaattgttgaacttgagatccattgttattttgctgcattcaatgctttcagagttatttttgttggtttcctggactgttatgttctgtatgtcttttgcttgctgtgtcaagtccatgccattatgccttgattaactgcgctccggaatcaatcatggccccaaggccggtatgtcacccggaagggtgacggcagcctgcgtggcgtctgagctagacggagcatctccccctcccctggtccgtcgccatcacctcctcttcctcctcctcctcgcccactcctgcactttccaccgcggcggtcgcctccccggaaagcactctcaactccggcgcccgcaggccacttccgcctatgtgtccctc

SEQ ID NO: 250578 - DNA, 943 bp, Homo Sapiens
cgcaccgcgtctcccgccttctccgcagccccgcagccccgggccctgtcattcccagcgctgccctgtcttgcgttccagtgttccagcttctgcgagatgaccctcaaggcgagcgagggcgagagtgggggcagcatgcacacggcgctctccgacctctacctggagcatttgctgcagaagcgtagtcggccagaggctgtatcgcatccattgaatactgtgaccgaggacatgtacaccaacgggtctcctgccccaggtagccctgcccaggtcaagggacaggaggtgcggaaagtgcgactcatacagtttgagaaggtcacagaagagcccatgggaatcactctgaagctgaatgaaaaacagtcctgtacggtggccagaattcttcatggtggcatgatccatagacaaggctcccttcacgtgggggatgagatcctagaaatcaatggcacaaatgtgacaaatcattcagtggatcagctgcagaaggcgatgaaagaaaccaaaggaatgatctcattaaaagtaattcccaaccagcaaagccgtcttcctgcactacagatgttcatgagagcgcagtttgactatgatcccaaaaaggacaatctgatcccttgcaaggaggcgggactgaagtttgctactggggacattatccagattatcaacaaggatgacagcaattggtggcagggacgggtggaaggctcctccaaggagtcagcaggattgatcccttcccctgagctgcaggaatggcgagtggcaagtatggctcagtcagctcctagcgaaccccgagctgcagtccctttgggaaggaagaagaagtacaaagacaaatatctgggccaagcacagttcgattttttgatccagttgggatgtttttttcctacgagggaagttcgtttcggcttccctg

SEQ ID NO: 250579 - DNA, 1501 bp, Homo Sapiens
  misc_feature (30)..(30): n is a, c, g, or t
  misc_feature (44)..(44): n is a, c, g, or t
ctatagggaatttggccctcgaggccaagnaattcggcacgagncggcacgagcagcaaagccgtcttcctgcactacagatgttcatgagagcgcagtttgactatgatcccaaaaaggacaatctgatcccttgcaaggaggcgggactgaagtttgctactggggacattatccagattatcaacaaggatgacagcaattggtggcagggacgggtggaaggctcctccaaggagtcagcaggattgatcccttcccctgagctgcaggaatggcgagtggcaagtatggctcagtcagctcctagcgaagccccgagctgcagtccctttgggaagaagaagaagtacaaagacaaatatctggccaagcacagctcgatttttgatcagttggatgttgtttcctacgaggaagtcgttcggctccctgcattcaagaggaagaccctggtgctgatcggagccagtggggtgggtcgcagccacattaagaatgccctgctcagccagaatccgggagaagtttgtgtaccctgtcccatatacaacacggccgccaaggaagagtgaggaagatgggaaggagtaccactttatctcaacggaggagatgacgaggaacatctctgccaatgagttcttggagtttggcagctaccaaggcaacatgtttggcaccaaatttgaaacagtgcaccagatccataagcagaacaagattgccatccttgacattgagccccagaccctgaaaattgttcggacagcagaactttcgcctttcattgtgttcattgcacctactgaccagggcactcagacagaagccctgcagcagctgcagaaggactctgaggccatccgcagccagtacgctcactactttgacctctcactggtcaataatggtgttgatgaaacccttaagaaattacaagaagccttcgaccaagcgtgcagttctccacagtgggtgcctgtctcctgggtttactaagcttgtagaatgggggaacccactgtatgcccctctccagcatttggaattccacccgccttgctttaagacaaacagggctgctccaactagttttgtgtcagcttccagctctctgcagctatcctaattcagccagtaaggttcagtcttcttgctcaggctcctgaagggttgattctcctgatagatggggccccactgatctggatttgaaaaggatttctagaaattgggggtaagaagtactaccaaaatgtaactgctaatcaagggtgatgcacagcaaaagcaatggaccccatccctctaaagcctgccctcctttgccttcaactgtatatgctgggtatttcatttgtctttttattttggagaaagcgtttttaactgcaactttctataatgccaaaatgacacatctgtgcaatagaatgatgtctgctctagggaaaccttcaaaagcaataaaaatgctgtgttgaaatgccaaaaaaaa

SEQ ID NO: 250580 - DNA, 1118 bp, Homo Sapiens
aatacggcccttctgaagcgaagggggctgctcaggaaggtccttcacttctgtctcctctttcagcaagtcaaacatgttctccatgtcaatgaagttggtctggatcatcctgtagtaggtgccaaaccaattgaggggcatgtacagctggataatgtaggtgccaaagagcacatagtccccaacctgtagcttctgctcagtgacaaagtatgcgcaaagcagggagccggcgaggagcccgagcccaatcaccaggttctgggtctgatttagtaaaaccagtgaagcgctcgacttccactccaaaccctgatatttgatgatggcctctcgatagcgttccacttcgtaactctcggcgttgtaatacttcaccgtctcgaagtttagcagagagtccactgctcgtgcccgggtagcgttctcctgtgtgttcatagcacgacgaaacttggttctccactcagtgaccacaatggtcagggtgaggtaaagactcatgcacaggaacacaatgaggccaaaccaggcgttgaagaacatgctgaagtagatgatgccaatgatgatgtcggccagcgtggggatgacattgaacaccaggtagctgaacagccctgtgacactggatgtgccccgatccgcgatccgcaacaactcccctgtgcggcgccccaggtgccagcgcagtgagagctcgtgcaggtgggaaaaagataagcagctccacccgccgagacgtgaactgctgaacccggatccacaggaaggtgcgcaggttgctcacgaagcctgtactgccagtgccacccccctggaggaacttgaggaagacgtaactggtaacagtccaggccagagagttccaaggtgccttctcagtcagcaagttcactgtggaggaaacgagtcagaacccacttatggcgcccaggactctcttcaggcaaaatggccccaggtaccagccacagtctctttctgaccacccagctctgtcccacctccctaggtaaggaccatcccagccacctggctgatgaaggaccagcacactgagctggtgctcctcctgctcaccaatgttcctatagaatataggcaccaacaca

SEQ ID NO: 250581 - DNA, 490 bp, Homo Sapiens
  misc_feature (15)..(15): n is a, c, g, or t
  misc_feature (474)..(474): n is a, c, g, or t
ttcggcacagccatngagcttcaataccctgatatttgatgatggcctctcgatagcgttccacttcgtaactctcggcgtggtaatacttcacctgatgaattcaaaccaaatttatttggcatgggcacagcacatggcactcgggtcattccccccaactctcaatcctccttcctgagttcaaacatcacacacaaacatcacaaccccagctctctgtcagccccagtggtcctggttacactcctccacatctccacgcctcacaccactgccaccgggccctctgttaccgtctcgaagtttaggcagagagtccactgcttcgtgcccgggtagcgttctcctgtgtgttcataggcacgacgaaacttgggttcttccactcagtggaccacaatgggtcagggctgggagagtgaacagggtggggggaggcaggattagggacattcattccccaaaggcagnggaccaattgttcatt

SEQ ID NO: 250582 - DNA, 3010 bp, Homo Sapiens
gggggggccactggtgtgacgtgtcccgcgcttggcgcagcaggaagcggcggcgaacgcggcctgaattcccggcgccggccccagctcctctgccgctgccgccatgctcgacttcttcaccattttctccaagggcgggcttgtgctctggtgcttccagggcgttagcgactcatgcaccggacccgttaacgcgttgattcgttccgtgctgctgcaggaacggggaggtaacaactccttcacccatgaggcactcacactcaagtataaactggacaaccagtttgagctggtgtttgtggttggttttcagaagatcctgacactgacatatgtagacaaattgatagatgacgtgcatcggctgtttcgggacaagtaccgcacagagatccaacagcaaagtgctttaagtttattaaatggcacttttgatttccaaaatgacttcctgcggctccttcgtgaagcagaggagagcagtaagatccgtgctcccactaccatgaagaaatttgaagattctgaaaaggccaagaaacctgtgaggtccatgattgagacacggggggaaaagcccaaggaaaaagcaaagaatagcaaaaaaaagggggccaagaaggaaggttctgatggtcctttggctaccagcaaaccagtccctgcagaaaagtcaggtcttccagtgggtcctgagaacggagtagaactttccaaagaggagctgatccgcaggaagcgcgaggagttcattcagaagcatgggaggggtatggagaagtccaacaagtccacgaagtcagatgctccaaaggagaagggcaaaaaagcaccccgggtgtgggaactgggtggctgtgctaacaaagaagtgttggattacagtactcccaccaccaatggaacccctgaggctgccttgtctgaggacatcaacctgattcgagggactgggtctggggggcagcttcaggatctggactgcagcagctctgatgacgaaggggctgctcaaaactctaccaaacctagtgcgaccaagggaacactgggtggcatgtttggtatgctgaagggccttgtgggttcaaagagcttgagtcgtgaagacatggaatctgtgctggacaagatgcgtgatcatctcattgctaagaacgtggctgcagacattgccgtccagctctgtgaatctgttgccaacaagttggaagggaaggtgatggggacgttcagcacggtgacttccacagtaaagcaagccctacaggagtccctggtgcagattctgcagccacagcgtcgtgtagacatgctccgggacatcatggatgcccagcgtcgccagcgcccttatgtcgtcaccttctgcggcgttaatggagtggggaaatctactaatcttgccaagatttccttctggttgttagagaatggcttcagtgtcctcattgctgcctgtgatacatttcgtgctggggccgtggagcagctgcgtacacacacccggcgtttgagtgccctacaccctccagagaagcatggtggccgcaccatggtgcagttgtttgaaaagggctatggcaaggatgctgctggcattgccatggaagccattgcttttgcacgtaaccaaggctttgacgtggtgctggtggacacggcaggccgcatgcaagacaatgcccctctgatgactgccctggccaaactcattactgtcaatacacctgatttggtgctgtttgtaggagaagccttagtaggcaatgaagccgtggaccagctggtcaagttcaacagagccttggctgaccattctatggctcagacacctcggctcattgatggcattgttcttaccaaatttgataccattgatgacaaggtgggagctgctatttctatgacgtacatcacaagcaaacccatcgtctttgtgggcaccggccagacctactgtgacctacgcagcctcaatgccaaggctgtggtggctgccctcatgaaggcttaacgtggctcttgcccaataccaaatcgccgctttccccacaagcccttcttcctgtatcaagaatgtgctttagagtatgtgagcaacctgtcttcagtgtagtacaaaggcagagtgagggggcttgtggctccttccaaccccactccccgttcagcacagccgccatctgcaaggaaggcctaatcatgttacaatcactgcccactgaccctctcccagcgggcctcccccttcctactcaggcacccccttcactctgcctacagactcagtcttattacagctttgaccaatggttggaacccaacaccagagctttgctaataattagtgtggtcaagagccgtctgagcctaatgagtcccagctgcattaggttaagagactcttccagagccagcgccaggtcttgaatggcacctctccctaggatacacagcctgcaggtccccaggacctggatgacacccgcctcactgtggcagtgtattgcctgttaattgctgctaattctaattctgatgatgactcctactccattgtttaccccaaagcatcagctaggctggagtgatttgttacaaatgagcaaaagatgagtccttgcttccctcagaaataaaaggagctcagctgcagcgttgcattgggcttcttggcctcccaactcttcccactcccagaatccagaagtaagctctgcatgttccccttcctgggaggaaaccaattgtcagaaggatgtatgatgaccccctcccctcccatccttcacctcctaagcagtcctggcttttcctcatcactcccctctacagtgcctggtagacaagtgctacattgaagaacacaaacctcttgttaagacttgtcctgtagcttgatattacagatgtgctattagtgcaataaggtgaaggctgtctgcccagagaaataagtaatttatataagaaaataaatttcataaataaattgcctttt

SEQ ID NO: 250583 - DNA, 1016 bp, Homo Sapiens
  misc_feature (384)..(384): n is a, c, g, or t
gtcagatcagtaaaactgataaacccctacccaacctgattaggaaagtgagaacagaaattaccagtatcataatgaaaaggaaattatcaacacagctcctaaagacattaaaagggtaagaagggaccattataaataaccttatgtctacaaatttgataacctgggtcaaaggatagatttcttggatagattcattacctaaatgacaccaagatcaaaccaaaaaatgtgaatagccctatatttattaaatacactatagaaaaccagacaaagaaaattaaaggcccagatggtttcagacattaattctaccagcccggacaaggaaaaaggggatagttagaattgggttactaaaaagttagctttaatatncaacaggaatactggtcaagagtccacattatgcaggttgtagatggtagacactataaacaaataggaatcagctctgatgatactcattttttcttccctttcaaaggcttggcaaataaagccgggtcaatttgctcctttgccagtcctctgacagagaagagtcttgctgcccgctcctgcagagtgcccccacatttcagtccaagggccatcagttcacatttgagcttctccaaacccagcaactccagttctgcaacagaggtgaacgccaataaatctatagtttccttatcaataactgcgtttcctggctggctttcctgcagtttggcaacggcaacgttttccctttcttcaggtgctacctcagcaactctttccccatcagtcctttcttctgtctctttatccttattcagtccagccccagtgggctcctcttctatgggttctttactctctgccttcttctcctgggtctcttctgtttctgtaaccatcctgctttccatgtgctctttggactcccccagctcagcacatgagtcttctaaaatatgcctcccagagtcagtcaccgggatctgcagttgttctggtgatccatggtctgtattcactac

SEQ ID NO: 250584 - DNA, 1059 bp, Homo Sapiens
  misc_feature (1023)..(1023): n is a, c, g, or t
ggggagaaaagaaaagggccggaggactggaggggttgctgcctggtcccctggaggagccctgcagtgcatcgggccacagcctgttttctttctacccaggagagtttggggaagtgtatcgagggaccctgaggctccccagccaggactgcaagactgtggccattaagaccttaaaagacacatccccaggtggccagtggtggaacttccttcgagaggcaactatcatgggccagtttagccacccgcatattctgcatctggaaggcgtcgtcacaaagcgaaagccgatcatgatcatcacagaatttatggagaatggagccctggatgccttcctgagggagcgggaggaccagctggtccctgggcagctagtggccatgctgcagggcatagcatctggcatgaactacctcagtaatcacaattatgtccaccgggacctggctgccagaaacatcttcggtgaatcaaaacctgtgctgcaaggtgtctgactttggcctgactcgcctcctggatgactttgatggcacatacgaaacccagggaggaaagatccctatccgctggacagcccctgaagccattgcccatcggatcttcaccacagccagcgatgtgtgggagctttgggattgtgatgtgggaggtgctgagctttgggggacaagccttatggggagatgagcaatcaggaggttatgaagagcattgaggatgggtaccggttgccccctcctgtggactgccctgcccctctgtatgagctcatgaagaactgctgggcatatgaccgtgcccgccggccacacttccagaagcttcaggcacatctggagcaactgcttgccaacccccactccctgcggaccattgccaactttgaccccagggtgactcttcgcctgcccagcctgagtggctcagatgggatcccgtatcgaaccgtcttttgagtgggttcgagtccattacggcatggaaacggttacatcctggcattttccattngggttgggcttgggacaccatgggagtgttgttgtt

SEQ ID NO: 250585 - DNA, 711 bp, Homo Sapiens
aaaacaacatactgtgaactttgtaaggaaatatttatttgtatttttatgttttgaatagggcaaataatcgaatgaggaatggaagttttaacatagtatatctatatgcttttccccataggaagaaattgactctcgcagtttttggatgctctgacttgtgcaatttcaatacacaggagattatgtaatgtaatatttttcataagcggttactatcaattgaaagttcaagccatgctttaggcaagagcaggcagcctcacatctttatttttgttacatccaaggtgaagagggcaacacatctgtgtaagctgctttttagtgtgtttatctgaaggccgttttccattttgcttaatgtaactacagacattatccagaaaatgcaaaattttctatcaaatggagccacattcggggaattcgtggtatttttaagaattgagttgttcctgctgttttttatttgatccaaacaatgttttgttttgttcttctctgtatgctgttgacctaatgatttatgcaatctctgtaatttcttatgcagtaaaattactacacaaactagcatgaaaatgtcatattgccttcttaatcaattattttcaagtagtgaactttgtatcctcctttaccttaaaatgaaatcaaactgaccaactcaaacaacaataaaaaacaagacgaaaaacaccttgt

SEQ ID NO: 250586 - DNA, 831 bp, Homo Sapiens
tcattctaaaactggcagagctgttctgtcctcattctctgccttttctgcttcagaatccactgttggcttggtctctaaatcctcagcatcttcgtgatcttccctggcagcctcagcagcatctgcttggctagactctctctcctcttggttcatgatttctggggtcacgtggtccaaatctgcttctagaagttcagtttgtacttccactggcatttgattgacccgttcaacatgcagctcctctacatgtacttcagtaccttcttcagtctgaattcggcccacttctagataactcacttggacctgctctggaagctcactcatgtgtgaatcgtgcacctggctgtcctggagcagatctggatggacttgttccacagtcacttgtgctgaatccacctgaacctgaagcaatggtagcacatgcaccttcccaacttgttctataatagtcattgatgttacaggttcagtttgcacacgtgtttctactgaaagaacttcttccgttactagacgctctgaaatattgtgagcatcactgagatgcctccttaattcatttccttgcataaaccacaaatcacataaagtacaatggttgggtttatctccagtgtgtattaccaagtgatctttgaactggtcccagctgttaaacacactgttgcagacctggcattcgtagagcttcttccttcctttttttgcccctactccagtttggcatgcagtgaggtgacatttcagagtgctatttctagcaaatcgttcatgacaatttggacattcaaaaggtttttcacctgtatgttttcg

SEQ ID NO: 250587 - DNA, 714 bp, Homo Sapiens
cttaggatcaactgctttttctgctgtagaatgctcctttttctcatgtaggcgggcacttcgaccgtcttctgagtaggcatgttgttttaaagcattgaaaacatggtttgatagttttaaatccattccaattccatctcctacctgaaactcaggtgcaaaattttccattcttgctgtgttctttctcccacatactacttcatcatgtttggtggtgatatcttttccttttccaataaagccctttttaggagtgggaaccggttttgctggtctgtagggatcatcacgagtatcctgccagtcaacctcatcttcagagctatcgctgtcttcataaggatgcacttttcgataattttcaaaggaaatggaaacttaagaagcaaaaatagttgaagatttacttagaagcacattatgagtgttttctaccactcaatgaagttgtcacaataaggttataatacctttgctatctccattgaattttttttcttcacgcctaagctgtgcatcatattctctgtcatattacatctgtagcatctgagccagcataaggtcactggaagtatcaatgttttctccagtaataaatggtccttcagcaacagcaacttcaggaaaaacggcagcttcttcttctaactgcaattctttggccagctgttcactcattacatcagccaaagaacaagatattgt

SEQ ID NO: 250588 - DNA, 1007 bp, Homo Sapiens
ggctacctaactgaattgcacagttctagaacataattgtcatggtgtgaacatagtctgctataacaacccactctccacaaataattacaaaattgtatttctttggtaagatttggtgtagccttcacagttcaatattgtgtcctttggctaaaagcaaggtacaatgcacatgccgaaagaccttagttttggatgtgatgaaatgttttctatgcctggaataaatgccttcctttgggttgtaattacttaaatagtattgctcctctttctgtgagttatttaatttttttctctgtagtagctatgatttctggttttctagtgtgatcatctattgagtaagaaagactaatctcatttggttgtgtttgtttttgtttttaactgtccctattttaaaatatttagatgctaattcttccttttggcagtttgcacctgagtttcaggtaggagatggaattggaatggatttaaaactatcaaaccatgttttcaatgctttaaaacaacatgcctactcagaagaacgtcgaagtgcccgcctacatgagaaaaaggagcattctacagcagtaaggatttatagatgtctttgggtcgttgtgactagaaggatcatattagagaacttgggtaaagaaaaaacctcatgttggatatgttcatgaaatggctttaaatcaagatgtaataaaccagccacgtgggcctgctgaatccacacttgtgatgcggtgggcacgggatctgagcgagatccagactcctgcgactatgtcgtgcctcaaaattcggcgcttgcacctgtgccacacgggggtaggggagatttatcaaagtaacgtggtccaagttgtcctgaccgggaggaccgcttataagaacctttcgcgcgctcttgggttatccgcgttcaggtgactagcttccgccctcgggaaccgtgctaccgtgtcctaaggtgcggacacgcctccctgggtccaggcgttgcc

SEQ ID NO: 250589 - DNA, 668 bp, Homo Sapiens
  misc_feature (627)..(627): n is a, c, g, or t
gaagagtggaacatcagagagcctcccctcctcagccacttgactctaaactgccccctctgaggtcaaggaacacaagatggttttggaaatgctgaacccgatacattataacatcaccagcatcgtgcctgaagccatgcctgctgccaccatgccagtcctgctcctcactggcctttttctcttggtgtggaattatgagggcacatcctcaataccaggtcctggctactgcatgggaattggacccctcatctcccacggcagattcctgtggatggggatcggcagtgcctgcaactactacaaccgggtgtatggagaattcatgcgagtctggatctctggagaggaaacactcattatcagcaagtcctcaagtatgttccacataatgaagcacaatcattacagctctcgattcggcagcaaacttgggctgcggtgcatcggtatgcatgagaaaggcatcatatttaacaacaatccagagctctggaaaacaactcgacccttctttatgaaagctctgtcaagccccggccttgttcgtatggtcacagtctgtgctgaatcccctcaaaacacatctggacaggttggaggaggtgaccaatgaatcgngctatgtggacgtgttgacccttctgcgtcgtgtcatgctg

SEQ ID NO: 250590 - DNA, 460 bp, Homo Sapiens
tgctgtatctctggtgatcacagaccctgctctccaagggggttgtgaactctggagcactaccaagattggctaagagctgaaggagagtcccaaaggagcttcaattctgcagaactatacagccttctttaccttacctcgaccaggtgcttagagtttggaaagtcagggataagaattgaaattcctccaggtaagaagacccccctcttaggaaatggactcctccaattttctcacatgatttttcaggcactttcgcttttccatatataggagtcgctcaggagcaagctgtggcaagctggagggagggacacatcccgtgttccatccactccctcccttctcagcagtcctcgcctgttctcacgtgctcacaggcagttaggcagaagtgatccccgtggctctgccaaagacaagcctgttgggttgaaagaagaagaagaagaag

SEQ ID NO: 250591 - DNA, 1872 bp, Homo Sapiens
  misc_feature (1783)..(1783): n is a, c, g, or t
  misc_feature (1845)..(1845): n is a, c, g, or t
  misc_feature (1862)..(1862): n is a, c, g, or t
ctcaggcaaagtcacagcctcaaaattgttcactgaaagaagcgtcagtggagaagtgtgagaagatgaatggaccggtggatggcttgtgtgaccactctctaagtgaaggagtcttcatgttcacatcggagtctgtgggagagggacacccggataagatctgtgaccagatcagtgatgcagtgctggatgcccatctcaagcaagaccccaatgccaaggtggcctgtgagacagtgtgcaagaccggcatggtgctgctgtgtggtgagatcacctcaatggccatggtggactaccagcgggtggtgagggacaccatcaagcacatcggctacgatgactcagccaagggctttgacttcaagacttgcaacgtgctggtggctttggagcagcaatccccagatattgcccagtgcgtccatctggacagaaatgaggaggatgtgggggcaggagatcagggtttgatgttcggctatgccaccgacgagacagaggagtgcatgcccctcaccatcatccttgctcacaggctcaacgcccggatggcagacctcaggcgctccggcctcctcccctggctgcggcctgactctaagactcaggtgacagttcagtacatgcaggacaatggcgcagtcatccctgtgcgcatccacaccatcgtcatctctgtgcagcacaacgaagacatcacgctggaggagatgcgcagggccctgaaggagcaagtcatcagggccgtggtgccggccaagtacctggacgaagacaccgtctaccacctgcagcccagtgggcggtttgtcatcggaggtccccagtgggatgcgggtgtcactggccgtaagattattgtggacacctatggcggctggggggctcatggtggtggggccttctctgggaaggactacaccaaggtggaacgctcagccgcatatgctgcccgctgggtggccaagtctctggtgaaagcagggctctgccggagagtgcttgtccaggaaaccccctccacccaccaccgtcctgttgcagtggaggacccctgcccagttctgccctgagtgaggggatgttggcccggtgggaaagctgcacgctttgccaaaggttgtgattgtgtgattgtgttgggcactgtggccagggctctgaaaacctaggggagggaaaaccagaatcttcagggagagaggcgtgtagaagaactgccctcggtgaagatagcaggaaaattgcaggggagcatgtggggcaagaggcatgtggtccccgctggtcccttcagaagaagggcaaagcttctgaaaggggcagggcccacacagagagcttcaatccctgacgctgcaccttgctggaaggtttcctatgccattggtgtggccgagccgctgtccatttccatcttcacctacggaacctctcagaagacagagcgagagctgctggatgtggtgcataagaacttcgacctccggccgggcgtcattgtcaggtaaagtgccatgtgctgctattacacaggaccttgctccttccttgcccagatgctcacctcacctgaaagggaggcagaaaggaggatgtttctgcctctcagaagtgggagggtctgtgagctcttggtacagcacagtgcatccccagtgcagaaagcctggttgtcaggttaaaggaggctgccccaggttcctgctggcccagtcaacaccaactccagtggggccatctctgagcaaactggagggcagcggggatctttagnaataattattaatataggccaaatagctcaatggctggaatcaagtcagcagtctattccgnttctagagcttagtggntgcaacattg

SEQ ID NO: 250592 - DNA, 450 bp, Homo Sapiens
aaaaccccaacaagaagttaggttcccttacctttatccatgattccacctttaataccccacggacctgcctataccagcccaaaagcccagtctggctggaactcctctccactgatgcctgatttggcacctctgcctgaattcctgccctagctgtgcctcactgctgtgctgcggtggaaacaggcttactctgacttccccgggagtgtacttttcctgcctcacagttacattggtaattctggcatgtcctcaaaaatgactcatgactgtggatatgaagaactattgacttcttaagaaaaaagggagaaatattaatcagaaagttgattcttatgataatatggaaaagttaaccattatagaaaagcaaagcttgagtttcctaaatgtaagcttttaaagtaatgaacattaaaaaaaacccattatttcactgtc

SEQ ID NO: 250593 - DNA, 1129 bp, Homo Sapiens
  misc_feature (29)..(29): n is a, c, g, or t
  misc_feature (48)..(48): n is a, c, g, or t
  misc_feature (67)..(67): n is a, c, g, or t
  misc_feature (515)..(523): n is a, c, g, or t
ttttactgaccttgctagaagtttacagncaaggaagtgcaggaacanctcacaaatctacaatctncgagtatcacatcctgtatagctgtaaacactggaataaggaagggctgatgactttcagaagatgaaggtaagtagaaaccgttgatgggactgagaaaccagagttaaaacctctttggagcttctgaggactcagctggaaccaacgggcacagttggcaacaccatcatgacatcacaacctgttcccaatgagaccatcatagtgctcccatcaaatgtcatcaacttctcccaagcagagaaacccgaacccaccaaccaggggcaggatagcctgaagaaacatctacacgcagaaatcaaagttattgggactatccagatcttgtgtggcatgatggtattgagcttggggatcattttggcatctgcttccttctctccaaattttacccaagtgacttctacactgttgaactctgcttacccattcataggacccnnnnnnnnnatcatctctggctctctatcaatcgccacagagaaaaggttaaccaagcttttggtgcatagcagcctggttggaagcattctgagtgctctgtctgccctggtgggtttcattatcctgtctgtcaaacaggccaccttaaatcctgcctcactgcagtgtgagttggacaaaaataatataccaacaagaagttatgtttcttacttttatcatgattcactttataccacggactgctatacagccaaagccagtctggctggaactctctctctgatgctgatttgcactctgctggaattctgcctagctgtgctcactgctgtgctgcggtggaaacaggcttactctgacttccctgggagtgtacttttcctgcctcacagttacattggtaattctggcatgtcctcaaaaatgactcatgactgtggatatgaagaactattgacttcttaagaaaaaagggagaaatattaatcagaaagttgattcttatgataatatggaaaagttaaccattatagaaaagcaaagcttgagtttcctaaatgtaagcttttaaagtaatgaacattaaaaaaaaccattatttcactgtca

SEQ ID NO: 250594 - DNA, 929 bp, Homo Sapiens
ggggcccaggggacgggtccgactcagaaatggcggcctccatgttctacggcaggctagtggccgtggccacccttcggaaccaccggcctcggacggcccagcgggctgctgctcaggttctgggaagttctggattgtttaataaccatggactccaagtacagcagcaacagcaaaggaatctctcactacatgaatacatgagtatggaattattgcaagaagctggtgtctccgttcccaaaggatatgtggcaaagtcaccagatgaagcttatgcaattgccaaaaaattaggttcaaaagatgtcgtgataaaggcacaggttttagctggtggtagaggaaaaggaacatttgaaagtggcctcaaaggaggagtgaagatagttttctctccagaagaagcaaaagctgtttcttcacaaatgattgggaaaaaattgtttaccaagcaaacgggagaaaagggcagaatatgcaatcaagtattggtctgtgagcgaaaatatcccaggagagaatactactttgcaataacaatggaaaggtcatttcaaggtcctgtattaataggaagttcacatggtggtgtcaacattgaagatgttgctgctgagactcctgaagcaataattaaagaacctattgatattgaagaaggcatcaaaaaggaacaagctctccaggcttgcacagaagatgggatttccacctaatattgtggaatcagcagcagaaaacatggtcaagctttacaggcctttttctgaaatacgatgcaaccatgatagaaataaatccaatgggtggaagattcagatgggagctgtattgtgtatgggatggcaaagatcaattttgattctaattcaggctatcggcaaaagaaatcttgatctacagggatggaccaggagaataag

SEQ ID NO: 250595 - DNA, 828 bp, Homo Sapiens
  misc_feature (27)..(27): n is a, c, g, or t
  misc_feature (35)..(35): n is a, c, g, or t
  misc_feature (367)..(407): n is a, c, g, or t
  misc_feature (660)..(660): n is a, c, g, or t
  misc_feature (692)..(692): n is a, c, g, or t
ggggcttctggaaggcgctgctcttcncggttctnctgtcccaggttcctgggggttgcacagacagaccctgtaaacatgtcagggttcagtccggaactcatcgactacttggaagggaaaatctcctttgaggagttcgaacggcggagagaagagagaaaaacccgcgagaagaaaagtcttcaggaaaaaggcaagttatcagctgaagaaaatcccgatgactctgaagttccatcatcatcaggaattaactctaccaaatcccaagacaaagatgtcaatgaaggagaaacatcagatggagtgaggaagtcagttcacaaggtctttgcttccatgcttggagagaatgaagatgatnnnnnnnnnnnnnnnnnnnnnnnnnnnnnnnnnnnnnnnnnagaaacacctgagcaacccactgcgggcgatgtatttgtattggagatggttctcaatcgtgaaaccaagaaaatgatgaaagagaaaaggcctcggagtaaacttcccagagctctgagaggtctcatgggtgaagccaacattcgttttgctcgaggagaacgtgaagaggcgatattgatgtgcatggaaatcataagacaagctcctctggcttatgagccattctctactctagccatgatatatganggacaaggtgacatggaaaaatcatttgcagntttgagttgatttgctgcgcatttaaatcccagtgacacagaaaaaaatgggttaaaacgggcaagaaatgtctcctggaacagacaatattaagccaaggctatttttttgctatacaaaagctcttaatatgaa

SEQ ID NO: 250596 - DNA, 853 bp, Homo Sapiens
ttatgggaactctggggggaacctcaggtttgtcttcatcggagttaggagaagctctgtgtatacaacagttggatatccttatggctggcttgttaaaggagccagctggtcccgaatgagaccttcttaggtcagacacatagctgagatctgctgcagaaacagctggggtatcaaaatatgcatagttgatttgtccacacccacggaagcttcgcctgccaggaacatcatatttgaaatcagaaagtgtagagtcttctaaaaggaagtctgtatctgagctagttaggaattccacctcacagtctgtgtcatccagagagagggcttcagagattggcaacggtggaagaggcctagaaccccgttcacaaagaggggcacaggggaaaagggaaggggagttttttatgggtgtcagtggaggggtggaagcacaaaccccattcactgtgagtttcttaaaaccacatacaacttgatcctcttcatgtggtcccaagttttcacttgggggaataagaagagggggcaagctggacttttgagatggaccattttctgcaaagcagtggccattcatcggagcagatttggaagcatgcccaagtggtattaggcgctcctgagcagaagagttcagactgtaggccatggttatcgggtcaatatttaaaaagttgtttttaaactcactgcgactgctccagtaggtcttcctcatattccccatggctcggccattatgtagaaatccagtttttaatgggactctgatctcctgagcagcaactcctgctattgacattgtgccttactttctgggacatctccaaacctgtgagcc

SEQ ID NO: 250597 - DNA, 607 bp, Homo Sapiens
attccacctcacagtctgtgtcatccagagagagggcttcagagattggcaacggtggaagaggcctagaaccccgttcacaaagaggggcacaggggaaaagggaaggggagttttttatgggtgtcagtggaggggtggaagcacaaaccccattcactgtgagtttcttaaaaccacatacaacttgatcctcttcatgtggtcccaagttttcacttgggggaataagaagagggggcaagctggacttttgagatggaccattttctgcaaagcagtggccattcatcggagcagatttggaagcatgccctggaatgaacgagagatattaataaaagatcaacaatcctctctccacctgtgtgagggagagagcaccccagctacctatgcttccacagctttcttcctgagtgaaacacttgactgctgtcaccccgagaacacccatgcaaccaccacaggtgtaattagagagcagaagattcttaacgcacagtggtgtggttcaaagaacaaactatctcctctatctcccttggacatgtgcacagcgcacacccacacatcacaggcaagttttgtgacgtgtgtaaaattc

SEQ ID NO: 250598 - DNA, 1561 bp, Homo Sapiens
ttcaatcaaactggaaaattgagaaccatttgctcctatgtaacctctgctgaaccatgaccccaaggtctaaggtgtttttgagtctggcttttctgtggctgaagatataccgcagtcagcaggtaatggctgaatttgggcgcctccatgtgtttcttctgcttccctaaaaaatttttcatatttgtccaggtatggtggtcgttcaggtagtaggtaataatgtgttgaactaaccttcttcccattttcaataatgggcagaatgcaaggaaccttactggcagatccttcgctgttctgtctttgcagtgctttgctgctgacatacttgggatcaggggcaaagctctgtgtcgggggcatgaccccattgaggtaagacggaaggcttttgggactcggtgtgcgcgagttactcggtgacaaaggttctcttggcggtactttgggaggcctgtcttcatcactataggtgctcgaagtaacttctgctgaccatcttctataatctggctttactggtctagaaggtatgggaactctggggggaacctcaggtttgtcttcatcggagttaggagaagctctgtgtataccacagttggatatccttaatggctggcttgttaaaggagccagctggtcccgaatgagaccctcttaatcttcggtgggtctgaggtggaggaggatttggatctgggacacctccattttggtcagacacatagctgagatctgctgcagaaacagctggggtatcaaaatatgcatagttgatttgtccacacccacggaagcttcgcctgccaggaacatcatatttgaaatcagaaagtgtagagtcttctaaaaggaagtctgtatctgagctagttaggaattccacctcacagtctgtgtcatccagagagagggcttcagagattggcaacggtggaagagttatgggtgtcagtgaaggggtgaaagcacaaaccccattcactgtgagtttcttaaaaccacatacaacttgatcctcttcatgtggtcccaagttttcacttgggggaataagaagagggggcaagctggacttttgagatggaccattttctgcaaagcagtggccattcatcggagcagatttggaagcatgcccaagtggtattaggcgctcctgagcagaagagttcagactgtaggccatggttatcgggtcaatatttaaaaagttgtttttaaactcactgcgactgctccagtaggtcttcctcatattccccatggctcggccattatgtagaaatccagtttttaatgggactctgatctcctgagcagcaactcctgctattgacattgtgccttattctgggacatctccaaacctgtgaggcccaggcactttaaaatcaaccagtagctttcattcccccggaggagcggcggctgccccgcggcgccctcccgcgcatgtccgtcccggctggctcagcgccgcgggctcaggggcccggacatcgcgcaggcgcctcttgctggctcgcgctcccgctagcactctgcctcg

SEQ ID NO: 250599 - DNA, 1346 bp, Homo Sapiens
  misc_feature (48)..(48): n is a, c, g, or t
  misc_feature (780)..(780): n is a, c, g, or t
  misc_feature (906)..(934): n is a, c, g, or t
acaccactagacccaccaggggccccactggggcaggagcacttgttntgaagagatccagagggttgggctgcagggctgtaggttgtcctgtgggtgacgcctggcctgaaggttctgagacgggaggagcaaagatgtctgatgcaagccagtcattggctgaagacttagcagtccttctgcctcttcctggggtactttgtggaggtgggataatggctatggagtcatgtggtgaggactggacagagcccaagtcctgctacgccattctgtatggacagtcctttgggagggcttcccacaaaagggtgagttctcactgctggctgggtttgcgaacttgaaaagggccatgggcctgcctgagcttcctgtttgccagtccggttagagatctggtcaaattgctgaccaaagtagtcaacatcaccattcaggggcccattactcagcggagtagacgagctactcgaattctctttcttctgatctggagatttgagagaatcaaacgaagaaggtgtcgattggtctggctgtgtgaaaggatcgtcacggaaaggatcaggattaggggtgggaaagaagttgagattggcagaaaagacattttcaggcaagaaggatgcctgaggcgttggtcgaggaagagaacaggaggtgatgccgtttgttaagaatggattttctcttaaagaattctgattggtgtcgatttcagagtttagatccactaacaggatatcttggctttctgttggactatttaggtcnaggaggtgtagacatgtccccaaacaaatccatctggtcaacacccgatttcagtttgttagtttggtcatctagaatcattagggcctcactcccattctcaactgctttgctggcttcctctannnnnnnnnnnnnnnnnnnnnnnnnnnnnacattatagataacttgaaaaaggtctttaagatcaacaactaatggttcagcctgttgcccggtttttatggcaaaaaactgatgctggccctctcctccacacacgtaaccaaatgcccggttgtctgtcacatcacgggcaatgaaagaaatcttatctactggatgttcatgctctattaccccagttttctcatcaattatttttatcccagaaagggaaatgttgacccagatcctttgtttgtgttgtccctgagaccgaccagctgccgccattccctttagtttcatcatagagtcttggctcattttatcccctcttgcatctagcacatcatcaatgccaatcagcttggccttatattttacaccatcgcctttgaaccttgctaagagatattcatctg

SEQ ID NO: 250600 - DNA, 526 bp, Homo Sapiens
acattatagataacttgaaaaaggtctttaagatcaacaactaatggttcagcctgcagtaagggaaagcactgttatcagtattttaattttagtattttatttcctttgtctgctatcaattataattcatactgggattttttttaatcttaaaacgccttactaccctctgctggcttataggggatcaccaccaacccaatcctcacccttaggtatataaaagacagcagggttaataagtatttagacaaaacaagaggtatcatgatcatatttgaagtcctttaaggttcctgagaataattcaccactgttgtgaagtcagtattcactttataagaaggtccattctcacaatcctgtgggcacacagcagtgcatagctatcaatggacatttttaaaagattccataggccaaaaaaatagtcattctcggaattattaattagccctcttacatccaattatttccagtaaatcttttagttgagtgacagacactccaatgtccacagagg

SEQ ID NO: 250601 - DNA, 639 bp, Homo Sapiens
tataaaataattgaaaaagaaccaaaaatgaattcagaagttccatagatggatttttgccccttcttaattttctcccacaatgaaaacattttagaagacattttgaatcaaaatgtattatgaccattgaaagttctctattttctaagaagctgagcagctccaagggcctcgtttcaggtggtactctatgtattgtctgtgggcttgtttctacctgtacagtggaaccatgtgaccatgtcttgtgcttgcaatatagaaaccatgcagtgctgttttgtgaattggcagtttctgtataaactcttatttatatacattggcctctctgtatgattttccatttgctacatgaattgtaaaattaattataaaattatagtacctgctaaatacaattctgaggcttcatgtcattgtctttagttgaataccatgctgtgtgtcttgaagatgtccacgcttgcatgatgctaggtggcaatgccactttaaattaagcctcaatcagatgttaaatctgtgagtttcagagtatgcaaaaatattaggcagagtgagtgtaaactgttcagatcaagatgctgtatcataattcaagttatttttttctggagttaaagggaagcattc

SEQ ID NO: 250602 - DNA, 765 bp, Homo Sapiens
taaagttatattcagtaagatatcatccaattaagtaatatatgagatgggcatatttagaatctcacatttgatgactcattattttctgaaaatgctgaaaagatcaggatcaggatctggaatccgtaggagatgaagaacaggcaggagtaggctagattagaattgtcaccctgtaagagtgtccggatcagagtctgaaattggaaagtgccacagagtatcgagagaatccagaatagggacaggaaccaggagtttttctgtacacaccattgtctgctgtattggatcagcaaaaccaggagccatgtgcctaggtagaggcttggattggtatatcgaacagcagggactgtggcttgtccagagtcttctgtgagtacaagggccagctctatggctgctagaataagaaggaaaaccaacgaatacctgcttagcaagatagagtttggtggtagaggatctcttggtccctggatttatacacgtggagaagctgccagggggccaggagccataggaagcccaagggaatccacaccagaacagtttgctcaaaacaaagtggcaggtctgctccggactgtccaggaatgaggaattccaaaaagtagagttgcagaacttctccagcatgattcctggactgcgtctggaacgaagactcttctattaatatgattgtgttgtttcttctttacttgtttcatcaaagaaagtggaacaggaattatctaccattctgctgtgccgaac

SEQ ID NO: 250603 - DNA, 616 bp, Homo Sapiens
  misc_feature (29)..(29): n is a, c, g, or t
  misc_feature (34)..(34): n is a, c, g, or t
  misc_feature (83)..(83): n is a, c, g, or t
gactctggacaagccacagtccctgctgntcganataccaatccaagcctctacctaggcacatggctcctggttttgctganccaatacagcagacaatggtgtgtacagaaaaactcctggttcctgtccctattctggattctctcgatactctgtggcactttccaatttcagactctgatccggacactcttacagggtgacaattctaatctagcctactcctgcctgttcttcatctcctacggattccagatcctgatcctgatcttttcagcattttcagaaaataatgagtcatcaaataatccatcatccatagcttcattcctgagtagcattacctacagctggtatgacagcatcattctgaaaggctacaagcgtcctctgacactcgaggatgtctgggaagttgatgaagagatgaaaaccaagacattagtgagcaagtttgaaacgcacatgaagagagagctgcagaaagccaggcgggcactccagagacggcaggagaagagctcccagcagaactctggatccaggctgcctggcttgaacaagaatcagagtcaaagccaagatgcccttgtcctggaagatgttgaaaaga

SEQ ID NO: 250604 - DNA, 580 bp, Homo Sapiens
gggagggaagtgtggggagagcagaggcgcagccctgctggagagacctgaggcttgcagcgctgggcccggccgggtcgctgcggctgggctggaggtgaggcgaaagaagggcatcctctgatgggagtggaccggagtccgctaaagcgaagcattccagggttcgttgcgggaaatacagtctggttttgccccccgtatgaattgagggaaggtcaaggatgcattccaggaaagttctataaaaatataccatcaactccaacctgatatttgacctagccatggaaaacctcattggctcctcactggatcagaccataaaaatgatccaggaatgaaaatctaagataaattcccaccacttcaagatgttcttatacaagtcaacagtctagcagatcagccagtctctttcatcatcaagcagacatactcaagaaagaggaatagtgaagtgaaatatacagaagcatgttcaagttcatctgttgaatctggaattgtgaatagtgacaatattgagaaaaatactgactccaatctgcaaacttcaacttcatttgaaccacatttc

SEQ ID NO: 250605 - DNA, 512 bp, Homo Sapiens
ggtcgctgcggctgggctggaggtgaggcgaaagaagggcatcctctgatgggagtggaccggagtccgctaaagcgaagcattccagggttcgttgcgggaaatacagtctggttttgccccccgtatgaattgagggaaggtcaaggatgcattccaggaaagttctataaaaatataccatcaactccaacctgatatttgacctagccatggaaaacctcattggctcctcactggatcagaccataaaaatgatccaggaatgaaaatctaagataaattcccaccacttcaagatgttcttatacaagtcaacagtctagcagatcagccagtctctttcatcatcaagcagacatactcaaggtaccaacacagcaaaggcacaaaatgtctctatatcagtatttttcatggtatatgtgagacccattagtgaggcatgaaatcaattctgtgagtcacaatgaacatttgtctaaaaaacaaaataaaatgtaaaataccga

SEQ ID NO: 250606 - DNA, 1236 bp, Homo Sapiens
ttttcttcagataaatgtaattcagtgatagcagagctctgaaaaatttgaaagctcacctctctgtgtagtagggaatggaagaaattaactagtatataatccagaaatgacacagggcatttaaagtaaaattaaaggacacatttacaaaatagaaaacactaatataattaaccaacaaaaatatactgcagttccgatgaaatgaggtcaacatgacatgatccttttggaatgactttctaatttgaattacaatgtgagtgaagtattttagaagacattctatcaaataatgatagacctgcataaggaggctgtcacagaagatctgtctctggtggacagacaaaccagattaacatgaaattgtaaaggaaaaagcttttttatacttattattatggctttttgcaacatggcaaaacattacagcttaaagcagacatcatctcctcttagaggaggaaaaagttttgcagtcaaatcaaattataattaagaggtcatcgctatacaattctattcagtttaacaaaaacgatattacaccttcatgaaatccagagataataggttacttaaaaacataaccaaaaaactggtggatacactggctgaattaataaaggatatgataaggaatttaggtccacctatacctatgataataaacataaaagactgcaaaacaatttaagaacttaatcacagacctactaatcaaagttcatcatgtgcctgatcaccagaaaaggaattattaaggtatacagtgaagggaatggagcagaataaaatataaaatgtctttttattcctctctgatttcaacttcctttttatctttagggaggatagggagaagatgtgcctcgctattgaagatccaatgctccagtggaagaagatcgtcgtcagaaaatattaggtacaaatatttcaatgtctctgccaggaagaaactctgctgcacatcatcataactctcatgaagaaggtaaacatcccttaggcctgaatagcctccattcactctgcaatggttttccaaggcctctacggcttcccaggcccatttcctgtactttggatcatgagtcagtctccacatatacatgtaagtctccataacttctggccgtaagatgtagtatttttcattttgtcttgtagcgatggcttcaacaccaccatcaaatctgaaagcttctggtcccagtttcataaatg

SEQ ID NO: 250607 - DNA, 911 bp, Homo Sapiens
  misc_feature (738)..(801): n is a, c, g, or t
ggaggctccaacatcctccccctgtcaagatgtggcacctcaaactttgtgcagtcctcatgatcttcctgttgctgttgggccagatagatggctccccaataccagaagtgagttcggcaaagagaaggccacggagaatgaccccattttggagaggggtttccctcaggcctattggagcctcctgccgggatgattctgagtgtatcacaaggctatgcagaaaaagacgctgttccttaagtgtggcccaggaatgatgtacataccagggaaagaaaggacagcagtcacctccgacaatgctccgttctatggaatattgattaactgcattttggctggagacacccaagtgaagcaatcttgtatttttaatatttaaaggcagatgtacgctttaaattggtctccatttcttcttagaatgttgatatatggataagcataactaaacttgtcaatttagagtttatttttctatggatactattaaatgtctcaaattgaaattttagcagtctggaattcaagcttttgagggaaagaaggattcactttgtatactaaagaaaaaaacagcattgcccaataatgtgttaacttctcaatctggaaagtgtagtgagagctacataatcaatagctacgtaatcaacttcagcaagttcctaagctgtggccctggatcccttcactccatactcttcagggaggtgtcaaaggtggtcaagnnnnnnnnnnnnnnnnnnnnnnnnnnnnnnnnnnnnnnnnnnnnnnnnnnnnnnnnnnnnnnnnttcactgcaccctggttcctggttcagcggtctgctgctcagccaatataaatacactctgacttggtatcactcgcttgcttccgagtgtgaattcaagtggagcacaa

SEQ ID NO: 250608 - DNA, 884 bp, Homo Sapiens
  misc_feature (103)..(104): n is a, c, g, or t
gaatgacaagggacaacctatgctgcatttccttcctacttacatagtacccacatagagctgttcttggctcctaactcctaagggattttccatgagctcnncagtctcagtctagaactcctccatcccagctttattcttaggttcatgtgtccccttgtcactcctctgcccagcttcccagggctctctggcccaaccctgctcccaggttcagggagtacctgcatagccttgtgatacactcagaatcatcccggcaggaggctccaataggcctgagggaaacccctctccaaaatgggggtcattctccgtgggccttctctttgccgaactcacttctggtattggggagccatctatctgtaagggcaaagacattcagatatgaaagtgttgacaccctgctgcacaccttggaagagtgatcattccattccgcagatgctgtagactcagaacagaggaaccattcctcaggactgaatctagctttcaagttccaccaccactatcatctccacactccacacacacacataagtatcccttccctcccttaccctggccccaacagcaacaggaagatccatgaggactgccacaaagtttgaaggtgcccacatcttgacagggggaggatgttggagcctgaaagcccagggacagttcctacttccttttatagactgacatcaactcttgcattgttactgggtgagatgggggcaaagtttatatttgtaatcagaatcaatttaataagttaatgtctaccggaggaatgtgctcaagggccacctttcaggcacgttgtatttactgatccctcatctggactttgagtgattgtgttgctggcatggaccctttcgcct

SEQ ID NO: 250609 - DNA, 663 bp, Homo Sapiens
  misc_feature (589)..(589): n is a, c, g, or t
cttgaccacctttgacacctccctgaagagtatggagtgaagggatccagggccacagcttaggaacttgctgaagttgattacgtagctattgattatgtagcttttctttagtatacaaagtgaatccttctttccctcaaaagcttgaattccagactgctaaaatttcaatttgagacatttaatagtatccatagaaaaataaactctaaattgacaagtttagttatgcttatccatatatcaacattctaagaagaaatggagaccaatttaaagcgtacatctgcctttaaatattaaaaatacaagattgcttcacttgggtgtctccagccaaaatgcagttaatcaatattccatagaacggagcattgtcggaggtgactgctgtcctttctttccctgggtatgtacatcattcctggggccacacttaaggaacagcgtctttttctgcatagccttgtgatacactaaggaatcatcccggcaggaggctccaataggcctgagggaaaacccctctccaaaatgggggtcattctccgtgggccttctctttgcccgaactcacttctgggtntttgggggagccatctatctgtaaggggcaaaggcattcagatatgaaaaggttttgacacccctgcttggaca

SEQ ID NO: 250610 - DNA, 222 bp, Homo Sapiens
ctgcgtgctgatgaaaacttactacaaggtaagtacaacttagctaatattcagagcagcaggtggtaaaaaatgcaagataaatgtacgttttctttattttattattggtatggtttcaaaaagcagttttgctactgaaaaataactatgtaagatatgttcttataatctttgattttactgtttaaaaaattaaaataatatcacaccttgagattt

SEQ ID NO: 250611 - DNA, 1600 bp, Homo Sapiens
  misc_feature (1540)..(1540): n is a, c, g, or t
ctacacctggatgtacactgtttaataggtgaaatagatacgtaaaagcaattaaaatatgataaatgctatgagagagatgtaaaaagtgttataggtgatctgagaatggactgattgattacctagcagttttaaggaagcctttaaaaataatatatttgaactgggttttaaagaatgatataaatgttgctaatacaccaaaaaaatgtcatctgcaaatatggtttgttcacaaaatggagagaaggggaggatgataggacatgaggctaggaaatgtaggttgcagctcaatgatgtgtatgtagggccttattttccattctgaaacatagttagtggatttatatcaaaggatttcaaatagaagaacatcatgatgagaataattttaggatttatatactctactttggggggtggagagttctttttacctaggcttagggaatagaaagtggtgtagagaatataacttcaattacttctttcatcatttttcttcctttagtccacaagccctagccatgccgtggtagccaatgttcagcttgtcttgcatctaatgaagcaacacagtaaagctttgtgcaatgatcgagtcatcaacagtattcctttggcaaagcaagtatcttcacgaggtggtaaaagtaagaagttgtcagtaacacctccctcctccaacggtattaatgaggagttgtcagaagtcttacagactttacaggatgaatttgggcaaatgagcttgatcaccagcagcttgcaaaacttatccaggagtcgccaaccgttgaactgaaagacaagttggagtgtgaatggaggcattagtgggaaggatggaagcaaaagccaaccaaataactaaagttcgaaaataccaagcccagctggagaaacagaagttagagaagcagaagaaggaattaaaagctaccaaaaagactcttgatgaagaaagaaacagcagcagccgttctggaatcacagggaccacaaataagaaagattttatgaaactgagacctggagaaaaaaggagaaaaaatcttcagttattgaaggacatgcaaagcatacagaattcattacaaagcagtagtttgtgttgggattactgactcataaccaggtcagaaatttaattcagataatctgtaactcatcaatcagatgatgacaatttacttcccaggtctcatactcacttatgttggaattaattaatagcaggtgttaaaggacccaggcttcattacacaggcttttcatgtatgcaggatgactcaatgttaaagcatttaaatggaaaccaggggagtttaaagcccgagaaccacacataatcttttgttgagatgagtttgctgtactgacgctgcactttgtaaacagattaccagttttttacttgtgggtgtgattttttaaaatagttctttatatataattaaaattaggtttaaattttcaaaatatgagactatgctataggcagtgcttgcttgaaaagtctcatttttaaatntccctggcatgaggtgcccacttcccctttccaaagcaaccattaaacatactttgttcc

SEQ ID NO: 250612 - DNA, 637 bp, Homo Sapiens
ggcggtcactgcgccggggtagtgggccccagagttgcgctctctggccgttccttacactttgcttcaggctccagtgcaggggcgtagtgggatatggccaactcgggctgcaaggacgtcacgggtccagatgaggagagttttctgtactttgcctacggcagcaacctgctgacagagaggatccaccttcgaaacccctcggcggcgttcttctgtgtggcccgcctgcaggtgagtgcccccttccgcgctacccacgccggggccgggatgcccagaaggcgcttcctcgggggcacacgtggccgatcgggccaggaatgcagttcttcttgatgagggtactaggacgcggcttccgcctcctgggcgggtccaccttctccgctgcgcccactggccgggcctgtccgggccacggtgccctctcgggctgtctggagctttccccctcctggcctttgcaccggctgctcggtctgcaccgatttggcctctcgtgcactaacttaacagattgcatacagatggtacttctggagagacttctctgacccgtgtctgggaattgggtgccgttctgtgctgtacataaacctttgttacagcactttttcaacctggcattgtg

SEQ ID NO: 250613 - DNA, 1077 bp, Homo Sapiens
  misc_feature (641)..(658): n is a, c, g, or t
  misc_feature (667)..(705): n is a, c, g, or t
  misc_feature (752)..(808): n is a, c, g, or t
tgtctgttttgttttaaccatttccagattatttgcatgggtgcaaaagaaaatggtttgccgctggagtatcaagagaagttaaaagcaatagaaccaaatgactatacaggaaaggtctcagaagaaattgaagacatcatcaaaaagggggaaacacaaactctttagaacataacagaatatatctaagggtattctatgtgctaatataaaatatttttaacacttgagaacagggatctgggggatctccacgtttgatccattttcagcagtgctctgaaggagtatcttacttgggtgattccttgtttttagactataaaaagaaactgggataggagttagacaatttaaaaggggtgtatgagggcctgaaatatgtgacaaatgaatgtgagtaccccttctgtgaacactgaaagctattctcttgaattgatcttaagtgtctccttgctctggtaaaagatagatttgtagctcacttgatgatggtgctggtgaattgctctgctctgtctgagatttttaaaaatcagcttaatgagagtaatctgcagacaattgataataacattttgaaaattggaaagatggtatactgtttttagaggaataaacgtatttgtggtttnnnnnnnnnnnnnnnnnnctcgaggcnnnnnnnnnnnnnnnnnnnnnnnnnnnnnnnnnnnnnnncatggtcatagctgtttcctgacccagctttcttgtacaaagtgggnnnnnnnnnnnnnnnnnnnnnnnnnnnnnnnnnnnnnnnnnnnnnnnnnnnnnnnnngggattaaagaaatcgggtgccggcaccccgggaaatttaacccccgcctaagggagcggggcttctgtgtttggtgaccgcagaggaccgcttcttgggcgatcccttttgtttgtggcgggagaaagccgcgcccgctgcggaacgaaggaagaaccggccggttaacacaaggcggggtgtatgttgtccgctgttaggataacgaccggcacgcctagatccttgttgtacccggcgcgggtaggcgcgccgcgccacgcgccca

SEQ ID NO: 250614 - DNA, 809 bp, Homo Sapiens
aaccctgacgctgccgcgcggcggtcactgcgccggggtagtgggccccagtgttgcgctctctggccgttccttacactttgcttcaggctccagtgcaggggcgtaatgggatatggccaactcgggctgcaaggacgtcacgggtccagatgaggagagttttctgtactttgcctacggcagcaacctgctgacagagaggatccacctccgaaacccctcggcggcgttcttctgtgtggcccgcctgcaggcaagaaggggttaaaagtggaatgtatgttgtaatagaagttaaagttgcaactcaagaacgaaaagaaataacctgtcgaagttatctgatgacaaattacgaaagtgctcccccatcccccacagcataaaaagattatttgcatgggtgcaaaagaaaatggtttgccgctggagtatcaagagaagttaaaagcaatagaaccaaatgactatacaggaaaggtctcagaagatattgaagacatcatcaaaaagggggaaacacaaactctttagaacataacagaatatatctaacggtattctatgtgctaatataaaatatttttaacacttgagaacagggatctgggggatctccacgtttgatccgctttcagcagtgctctggaaggagtatcttaacttgggtgattcctttagtttttagactataaaaaagaaactggggataagaagttaagacaaatttaaaaagggggtgttattgaaggggcctgtaaaataatgtggaccaaattggaatggttgaattaacccccctttca

SEQ ID NO: 250615 - DNA, 1083 bp, Homo Sapiens
gggccctaaccctgaggctgccgcgcggcggtcactgcgccggggtagtgggccccagtgttgcgctctctggccgttccttacactttgcttcaggctccagtgcaggggcgtagtgggatatggccaactcgggctgcaaggacgtcacgggtccagatgaggagagttttctgtactttgcctacggcagcaacctgctgacagagaggatccacctccgaaacccctcggcggcgttcttctgtgtggcccgcctgcaggattttaagcttgactttggcaattcccaaggcaaaacaagtcaaacttggcatggagggatagccaccatttttcagagtcctggcgatgaagtgtggggagtagtatggaaaatgaacaaaagcaatttaaattctctggatgagcaagaaggggttaaaagtggaatgtatgttgtaatagaagttaaagttgcaactcaagaaggaaaagaaataacctgtcgaagttatctgatgacaaattacgaaagtgctcccccatccccacagtataaaaagattatttgcatgggtgcaaaagaaaatggtttgccgctggagtatcaagagaagttaaaagcaatagaaccaaatgactatacaggaaaggtctcagaagaaattgaagacatcatcaaaaagggggaaacacaaactctttagaacataacagaatatatctaagggtattctatgtgctaatataaaatatttttaacacttgagaacagggatctgggggatctccacgtttgatccattttcagcagtgctctgaaggagtatcttacttgggtgattccttgtttttagactataaaaagaaactgggaataggagttagacaatttaaaaggggtgtatgagggcctgaaatatgtgacaaatgaatgtgagtaccccttctgtgaacactgaaagctattctcttgaattgatcttaagtgtctccttgctctggtaaaagatagatttgtagctcacttgatgatggtgctggtgaattgctctgctctgtctgagatttttaaaaatcagcttaatgagagtaatctgc

SEQ ID NO: 250616 - DNA, 764 bp, Homo Sapiens
gggactgcgccggggtagtgggccccagtgttgcgctctctggccgttccttacactctgcttcaggctccagtgcaggggcgtagtgggatatggccaactcgggctgcaaggacgtcacgggtccagatgaggagagttttctgtactttgcctacggcagcaacctgctgacagagaggatccacctccgaaacccctcggcggcgttcttctgtgtggcccgcctgcaggattttaagcttgactttggcaattcccaaggcaaaacaagtcaaacttggcatggagggatagccaccatttttcagagtcctggcgatgaagtgtggggagtagtatggaaaatgaacaaaagcaatttaaattctctggatgagcaagaaggggttaaaagtggaatgtatgttgtaatagaagttaaagttgcaactcaagaaggaaaagaaataacctgtcgaagttatctgatgacaaattacgaaagtgctcccccatccccacagtataaaaagattatttgcatgggtgcaaaaagaaaatggtttgccgctggagtatcaaagagaagttaaaagcaatagaaccaaatgactatacaggaaaaagtctcagaaagaaattgaagacatcatcaaaaaagggggaaaacacaaactcttttagaacattaacagaattatatctaaaggggtatttctatgtggctaatataaaaatattttttaacacttggaagaacaggggatcttggggggatctcc

SEQ ID NO: 250617 - DNA, 634 bp, Homo Sapiens
gctcctcctctgcgagcgttatttcaaaagaagttgagaaccagagaaaccgacctaaggggattctcccatttggcccgtcctaccctaaggtcaccacctgctgcttttctggagcgcttaccagtgaccaagaggaacagaacacagagcagcctggcagtgtccaggcaacaagcctccgctcctccttcctgcaccctggggctcctgaaactcacatgagaaggagggctgtctgagattcgagggaaacaagctctcaggacttccggtcgccatgatggctgtgggcggtaaacgcggttagtgcaagcatctgggccatcttcaatggtaaaaaagatacagtaaagacataaataccacatttgacaaatggaaaaaaaggagtgtccagaaaagagtagcagcagtgaggaagagctgccgagacgggacagtggatccagtaggaacatagatgcatccaaactcattagactacaaggatcacggaaactgttggttgacaatagcatacgggaactgcaatacacaaaaactggaattttttttcaagctgaagcctgtgtgacaaatgatacgtaagggacatctatttgttgggaaaaaattaaagatttggaatttt

SEQ ID NO: 250618 - DNA, 872 bp, Homo Sapiens
  misc_feature (815)..(815): n is a, c, g, or t
  misc_feature (852)..(852): n is a, c, g, or t
ggggcttcccattgggtagggccgggaaacacgataaaggggacatgccgggagttgcagtaccctcaggaaggtagcgtcttgatctgcgtggcgtggttctgtgccttgggaagagatgaatgggaagcggccagcggagcccggcccagcccgggtgggaaaaaagggaaagaaggaggtgatggcggagttttcggacgctgttacggaagaaaccttgaaaaagcaggtggctgaggcctggagccgcaggacgccgttcagtcacgaagtcattgtcatggacatggacccttttcttcactgtgtgatcccaaacttcatccaaagccaagacttcttagaagggcttcagaaggaactgatgaacttggacttccatgagaagtataatgatttatataagttccagcagtctgatgatttgaagaagagaagagagcctcacatctccactttaaggaaaattctgtttgaagatttccggtcctggctttctgatatttctaaaattgacctggaatcaaccattgacatgtcctgtgctaaatatgaattcactgatgccctgctgtgccatgatgatgagctggaagggcgccggattgccttcatcctgtacctggttcctccctgggacaggagcatgggtggtaccctggacctgtacagcattgatgaacactttcagccgaagcagattgtcaagtctcttatcccttcgtggaaacaactggttttctttgaagtatctcctgtgtcctttcaccaggtgtctgaagtgctgtctgaagaaaagtcacgtttgtctnataagtggctggtttcatggtccatcattgactcggncctcccaactactttgaacc

SEQ ID NO: 250619 - DNA, 1358 bp, Homo Sapiens
  misc_feature (591)..(658): n is a, c, g, or t
  misc_feature (800)..(820): n is a, c, g, or t
tctagacagaattctagaaatttggcagacagtggaagcctttaattgaacttactccctcgttgactgaaaggagttttaaattctgagctcctgagatactgactagcaaccatggaatgaatgtgtgaccagaaagtggctttgacaccaagtgctactgtccctttgtaattggcttctaacagattcaaccagaaataattgataatgtgaatttttgttaattgttcacttgtaggaaaatagaacatgtatcaccctttgttaggtagacatgaacttttcctgcacaaagccttgcttttagagaatgcccaataaggcaagaaaaagcatagtaacttgtgctttgagagctcaatatttgtatcttatcagtacagaagaaatatttctgtgtaacttgatcttctgtctagtacttgtcttataggtaaccaacactgaaaactttgtagtgatgactaccaaagaaatacatagtaaaacaaccttttatttccaaattgttaaagagccagccattgatgctgctacatggagttccatgcttcaagagccattgtaagagattaaggggtttctagnnnnnnnnnnnnnnnnnnnnnnnnnnnnnnnnnnnnnnnnnnnnnnnnnnnnnnnnnnnnnnnnnnnngattaaaacatacacacagctgttagcataaagtcgtggggggcattttctggaatgctcagcagttctgattaactgccaagcccaggttgcctctcatgaggcaactgaaaaaatcctgtgtcttgatagcatgggtgcnnnnnnnnnnnnnnnnnnnnnctgcattcatgccttaactcgggttactgcacaactttagttcttgacttagtctgcaccgtcatctagattgtattgtacatctcggtctgaacttcatcctggcaaaaacaaagttgcaggcacaacagtttaagaatgcattcctccagaagagtatctggtcaggttgaccctgagccttctttggacttgatttggaacttagcctggaaagcgaaagtggactgtccaacagaaagatgtcaacaaggaaaagaggagagccaagcgctagcatgccttttgcctctgcatatctgtgcacactgtatgttgttcatgatagcttgtctacaacttgactaggttggagttctggtaatagtggcaatcttgacattcttggtcagagtttagagagatgtaagactttcaattaatgtcttatttactcctttatgttgattagtctttgatacatgtgctgaatcagaaacctaaataaagataattttttaaaatgcaaacaaaccccacaaaataaaaataaaacatg

SEQ ID NO: 250620 - DNA, 684 bp, Homo Sapiens
  misc_feature (102)..(102): n is a, c, g, or t
atcagcatatacagagacacacatagctatctcaatactaccatgctgccggaaaactgcaacatctaaatttccacgtaaataaaagataaaaggaaaaanactctgtattctttcaatctcttcattcagaaaaagtgtcccattgtgacatgaaagagctgaagtcaaaaattcctaaaactttcaataaaggtaaaaataaactgccatgaaacttcagcaatactcagtcatttgaaactgctgaaactactcagtacacaaatcaacgtctctcagtttcggctgaagaaccccaacaacggggtgggggaaggggaggcaaaaattaccaccagctgaaatactgtaaccagttatataatccgtttgaaccaaaatactgaagaaatgctgcctgggtctctttttaagtagcttgctgaattgttcactactatcaattcacttcacagacgattcttgccaattttaataaacttctggggcaaaattatccaaaaacactgtaaatccaaaatggccacttaaaatatccagggccttttacacaaaacctagatgatgatcttcatatctgagtaattcaatcacctactgggcgggacaccaggaagagcgcctccaccagagaaccttctggcccaagcaaccgctcacgccgcggtcaaagaagctccc

SEQ ID NO: 250621 - DNA, 908 bp, Homo Sapiens
gggatcgggtcggcgccattttgggactgagactggttgtgggggagggaaaagcggcaaaaggggattattcaaagtaccgaaaaccttctcccgggatcaggcgcggcggcacccccaggccaggggcacctctggtggggcagaaggtgattgaattactcagatatgaagatcatcatctaggttttgtgtaaaaggccctggatattttaagtggccattttggatttacagtgtttttggataattttgccccagaagtttattaaaattggcaagaatcgtctgtgaagtgaattgatagtagtgaacaattcagcaagctacttaaaaagagacccaggcagcatttcttcagtattttggttcaaacggattatataactggttacagtatttcagctggtggtaatttttgcctccccttcccccaccccgttgttggggttcttcagccgaaactgagagacgttgatttgtgtactgagtagtttcagcagtttcaaatgactgagtattgctgaagtttcatggcagtttatttttacctttattgaaagttttaggaatttttgacttcagctctttcatgtcacaatgggacactttttctgaatgaagagattgaaagaatacagagtttttttccttttatcttttatttacgtggaaatttaagatgttgcagttttccggcagcatggtagtattgagatagctatgtgtgtctctgtatatgctgatgtttaggaatggctctcagatgtgaaattttctttttgttttggcttttgggctcgtaaattggaatttcatctggagtggaacagtacaacagtgggcaagtacatgggataataaagaagaactttgatcttaaatctaaagaaacttggctaaattcg

SEQ ID NO: 250622 - DNA, 2438 bp, Homo Sapiens
  misc_feature (35)..(35): n is a, c, g, or t
  misc_feature (54)..(54): n is a, c, g, or t
  misc_feature (1825)..(1825): n is a, c, g, or t
ggcaaacccgccagtagtgagcctttgggtacttngcattttacctttaaaagnaaaacaaatggtggtggagctccaagagcatttcccatccatttccgttttgttgtgcctatgaagatgaacagatcaggaaaaaatggtaactatttcacacttgcctataaattagattcccttgtgctaaccacacaataaaatagcctcccccaaaccatacttttctaggtctaaaacatgcttgaagaacaatattgatagacagacttaattgagatgttttaaattacatttaccataatttaaacattactatttaaatcccagaaatattagtgctgaagaagcacagttgtttggaaaaatacaggacccaaattacagcatcaaattttcctattccaatattgtaacccacttccccactgtgaaaatcctatttctcaagcttgtagatgcatgggaaatgttcttcataatattatagctggaaataagtggtttacttgctccactgtatgtttccataattggtgaaaatagacttctcattatgactaaaaatatagattttttaaaactacagaacccagcagccagttttctgctttgctaatcccccccaaaaaagtcaagcaaagactacaaaaatagcaattattaataactttaaaaaatattttgcttctttgagcaaatttaagttacattcagatgtggtagaagagaatgatgctccaggtacttctgctcatcctaggggcagagttgatgtacagctgtcaccatcagtagcgggtttggtattcatgatgccaccggttaaagtcgttgtaaaatagcacaatgcttcctgaagccatgccagaaatgatgcacctctggtcgtaagacagcgccatggcccggattccagcgtcacatcctggataggcaaagagctgcttgaggtccgacacctgccggaccacgaccaattcctctgtctcctcctgtgagcaggtactgcccatctcggctcagctggatggctcttatgttatcatctgtttccatcgtggcctggagttttccattcacactgaatgtacagaagaggccgttttcatagaatatgacacaatgaccctctcttgaagcctgaatgagttttggtttcaggcagttttcaggaccctccaaggtcctcaacaagtctccattcatggaatgtatgagacatggtccttcttgtgaaccactcaacaccaggccctagctccgcacacaccgcagcacatgtgacctcatagtcatggccggtcaaaatggcccgaggagcagcagtctcactgcctgggttatctccaatcccactgcattttccattccaataccacagcaaaagagttgcatcacgtgaccctgagagaatgtagcaatttcccccaatatatgactcagaacgagcaaggcaagtgacgacatcccaatggccaaacaccacttggatcaatcttcctgtgtctgtagaatagactctgaaacttttatcccagaagccacagacgagaatatagcggttgtctgaagtgatgacaaagcactgggaatgcacttgaatactttggtctaaaaggtcagtgatttgcctcctgtgcattcctgtattgctggctatgagaggatcgatttccactggcagctggtatggctggtcttgtacagcaccttgatgagcaggaaggttgtgccatttgttcaccgcaaataacctgttagcagtgactgtgatcacagcgggagttgccaaaccaggctgggtgttggctgccacgtgagtaancaggggagttggagggaaactcgaggaccatgataacatcctgctgggcttagtctgtgaacatcaatggactcacttgcatggcagaacctctgggaggatggggctctatgagtagttgagaaggagtctgtccaaaacttcggatttgagcttcaacagcctctctcaacacaggatcagttattgaattcagattgacagctccttcataggtcaagtaatagaacacattgagggctcggacagcttctggtccttgctgtttatagccaaaaatgagatcaatccattggtgaagctggcaggaaacaaattcactctccagggccaatctgtttatgtgaacaaattcttctgaggttttggcccaaggaggaagttcgacatcagacactactgtcccatcatccatcactccaagattataattattgaagttgacatacatctgcagggagataataaaattcagggatcaactccttaatatcagaggtatcacgccgactgtttcgccaagctctggaaattgatgaaaaagttcgatctgcgtgatcaaatttgcctccttgcaaatttaggaaataagttgtaaagggttctattctta

SEQ ID NO: 250623 - DNA, 692 bp, Homo Sapiens
agtatggttgggggagactaatttattgtgtggttagcacaaggaatctaatttatagcaagtgtgaaatagttaccattttttcctgatctgtcatcttcatagcacaacaaaacgaaatgatggaaatgctcttgagctcacaacatttgtttttccttttaaagtaaatgcaagtacccaaagctcacctactgcggtttgcctgtgcccgggacaatggaggcggagcccactgttggggcacccccttccctccccgggtttgcaaatagaggctaccgggtgctgtattcagcaacacctgttttactatttgttattaaactatcatctccaccttccttttgattagcaatttgtactaagaaacgaaacaatgttatttggtggtgtataattctacttttctagtagattactgtgtggaattctgtgaaaaatatttgagaaaaggcctgtattgcataaataaattctttgtatgttgtgaactttgatctctatttctcttgcaacagacttcaagtggtccctctttttttcctacacactcagctcttctctaaaagcaaggatttggaatgaacaattcagtttgacagaaaaagctgaataaaatggcatctgtaattgaattgttggaaatgccttttttgctcctaaattttaaacatcattaataaaataat

SEQ ID NO: 250624 - DNA, 1813 bp, Homo Sapiens
  misc_feature (1172)..(1219): n is a, c, g, or t
  misc_feature (1606)..(1714): n is a, c, g, or t
tgtggcagagtctgtgcctgtggcggtgacggcggcgggagcaagcgctgccctcgcagagcagccttggggtcgccggccgctcgcagcgttgtggaggggcgggccggacgctgagcggagcagctgcgccacgggtggcattgtgtgtcccagagtgccggagcgagtcccagaagagaggcgaggctaagcccagagcgctgggttgcttcagcagggaagactcccttccccctgcttcaggctgctgagcactgagcagcgctcagaatggaagccatcgccaaatatgacttcaaagctactgcagacgacgagctgagcttcaaaaggggggacatcctcaaggttttgaacgaagaatgtgatcagaactggtacaaggcagagcttaatggaaaagacggcttcattcccaagaactacatagaaatgaaaccacatccgtggttttttggcaaaatccccagagccaaggcagaagaaatgcttagcaaacagcggcacgatggggcctttcttatccgagagagtgagagcgctcctggggacttctccctctctgtcaagtttggaaacgatgtgcagcacttcaaggtgctccgagatggtgccgggaagtacttcctctgggtggtgaagttcaattctttgaatgagctggtggattatcacagatctacatctgtctccagaaaccagcagatattcctgcgggacatagaacaggtgccacagcagccgacatacgtccaggccctctttgactttgatccccaggaggatggagagctgggcttccgccggggagattttatccatgtcatggataactcagaccccaactggtggaaaggagcttgccacgggcagaccggcatgtttccccgcaattatgtcacccccgtgaaccggaacgtctaagagtcaagaagcaattatttaaagaaagtgaaaaatgtaaaacacatacaaaagaattaaacccacaagctgcctctgacagcagcctgtgagggagtgcagaacacctggccgggtcaccctgtgaccctctcactttggttggaactttagggggtgggagggggcgttggatttaaaaatgccaaaacttacctataaattaagaagcagcttctcttatctacaacattttcactgctgcnnnnnnnnnnnnnnnnnnnnnnnnnnnnnnnnnnnnnnnnnnnnnnnntactgtccatcagtgcatgcacgtccaaggccacgtatacgctcctagcctgacgccaactaataacccaaccaacgaaaccaagctggcgctgctatcctcctctatgcaaccacgtccgcccccactcgcgaactgactgcacagaccgaacagcccgctccctgccgctcataccgtatatacaacaccacacaaggagccggcgcaaggggcccgctcgcacgccctccgcctgcccacccctccacctcccagcaacgcaccgggcaccccgaaccgaaatctgacacacacagcccaaaaaaccccccagcagccactgccagtccacacacgtcacaccacacacaaactcacccgcacaaccgcgcccacgctactcgnnnnnnnnnnnnnnnnnnnnnnnnnnnnnnnnnnnnnnnnnnnnnnnnnnnnnnnnnnnnnnnnnnnnnnnnnnnnnnnnnnnnnnnnnnnnnnnnnnnnnnnnnnnnntcagccccaaacgacccaacgcagcacaacagcgcaaccacaccacaggcgccccaccggccaagcaacgcacagcaacccacacccatgcagccccaa

SEQ ID NO: 250625 - DNA, 772 bp, Homo Sapiens
  misc_feature (220)..(298): n is a, c, g, or t
aataataattcccggaaatcatcacacaactttgattagtttaaatttttataccataaatgttctaagctcaaaatattgacaatgaaaattaaaattaaacaagttgtaatggggatagaaacaacatttttttaaatgtaaatttttctaattgtgggcattttttcttgttattgcttgaggatttcatacctagacaatgggaataggaaataannnnnnnnnnnnnnnnnnnnnnnnnnnnnnnnnnnnnnnnnnnnnnnnnnnnnnnnnnnnnnnnnnnnnnnnnnnnnnntttgaggctttacgtgggctttgaaggcacaggtctgtttcttgcataaaacaaaaactacataagtaaaaaaatacatttgattataaaaacatcaattttgtaaatatgattgtccatattggatagataatcctgccatggcaatgtgtgttcttaaaaatcgaggtaaattttccaggtgtaaaacagtcttctcttttcccatttcacccttcttttactattttgttgagatcctgttctgctaaaacattagtcacaactgcattctctttatgaaatgacacatctgtggctgatggaggtggtttatacaaaaagattgcaaatccattgaagaacatggtgataactttacaagtaacacttatggctactagcatatgggccatcttgatgttatcataaatccagcaagctcctttaattccacaatcatttatatcccaaaggaatacatgtgctgtctat

SEQ ID NO: 250626 - DNA, 1132 bp, Homo Sapiens
ggatcaccctccactgaccatgtacctccctcgttcttgtagaagcgctggatggtggagctgagtgcgcagcccacaaagccttggagagacagggtctgcacaatctcatggcgctgccagtcccatacatataagtggctcccgtacagtccagcttccacatcagcggggttgaagccatctcgtaagacattgggagctgcccactcagtgctgatcatgacattgtgtcgaggctggtaccagaagtcatagcccaacggtgcagcacccccaggtctctcccatgtccccttcacctcgaacgtctccccatccagcagcacaaaaccccctttgccattgcccttgacgtctcccagggagctgatcatcacttccccgctggccaggcagtggctggtgtggagaaaggccagttcgcacttggcatggatgtccttgggctcaatgaccttgtgcagctttggggcccggggctcagagcccacgtccaccacatagatgcgagaggagatgagactgggcagcaccagcttggtgcgcgacttggtgctatcaccgaagcagctgctgcaggtgttccatcctgagtgatgcagctcgtccttcaggttgggcatgggcagccggtggatgacctaggatgcggggagaggtggtgctcccccaggccacgcctctgtccacttttggaagaggcgccctgtggactcattttggtttggaagcacggcacaggctggatttcagcactccccttgtcccaggttgagcgtgcacaagcatccccagggagggccaagaaggatggagctgggaagggggggcccagggccagggatgagggcagctatggtctcaaagtagctggcgcccaagccccgcctaacctggcaatactggggagacttggggtcaacatccacagtggccagataatctggggcctcagtgcctgtgtttcggtaaatgcagggcaggtagacgatctcttccctgggtcctttcatggcctccagaggggtggagtagccgggtccacaattcccacatttcgtagccatgctgccgactggtacactttgatcccggcgggtttgctgtgctggtgtcagaggccgctgtt

SEQ ID NO: 250627 - DNA, 616 bp, Homo Sapiens
  misc_feature (25)..(25): n is a, c, g, or t
  misc_feature (27)..(27): n is a, c, g, or t
  misc_feature (54)..(54): n is a, c, g, or t
atggtgaagctgagtgcgcagcccncnaagccttggagagacagggtctgcacnatctcatggcgctgccagtcccatacatataagtggctcccgtacagtccagcctccacatcagcggggttgaagccatctcgtaagacattgggagctgcccactcagtgctgatcatgacattgtgtcgaggctggtaccagaagtcatagcccaacggtgcagcacccacaggtctctcccatgtccccttcacctcgaacgtctccccatccagcagcacaaaacccccgccattgcccttgacgtctcccagggagctgatcatcacttccccgctggccaggcagtggctggtgtggagaaaggccagttcgcacttggcatggatgtccttgggctcaatgacctggcaatactggggagacttggggtcaacatccacagtggccagataatctggggcctcagtgcctgtgtttcggtaaatgcagggcaggtagacgatctcttccctgggtcctttcatggcctccagaggggtggagtagccgggtccacaattcccacatttcgtagccatgctgccgactggtacactttgatcccggcgggtttgct

SEQ ID NO: 250628 - DNA, 1401 bp, Homo Sapiens
ccgggatagcaaacccgccgggatcaaagtgtaccagtcggcagcatggctacgaaatgtgggaattgtggacccggctactccacccctctggaggccatgaaaggacccagggaagagatcgtctacctgccctgcatttaccgaaacacaggcactgaggccccagattatctggccactgtggatgttgaccccaagtctccccagtattgccaggtcatccaccggctgcccatgcccaacctgaaggacgagctgcatcactcaggatggaacacctgcagcagctgcttcggtgatagcaccaagtcgcgcaccaagctggtgctgcccagtctcatctcctctcgcatctatgtggtggacgtgggctctgagccccgggccccaaagctgcacaaggtcattgagcccaaggacatccatgccaagtgcgaactggcctttctccacaccagccactgcctggccagcggggaagtgatgatcagctccctgggagacgtcaagggcaatggcaaagggggttttgtgctgctggatggggagacgttcgaggtgaaggggacatgggagagacctgggggtgctgcaccgttgggctatgacttctggtaccagcctcgacacaatgtcatgatcagcactgagtgggcagctcccaatgtcttacgagatggcttcaaccccgctgatgtggaggctggactgtacgggagccacttatatgtatgggactggcagcgccatgagattgtgcagaccctgtctctaaaagatgggcttattcccttggagatccgcttcctgcacaacccagacgctgcccaaggctttgtgggctgcgcactcagctccaccatccagcgcttctacaagaacgagggaggtacatggtcagtggagaaggtgatccaggtgccccccaagaaagtgaagggctggctgctgcccgaaatgccaggcctgatcaccgacatcctgctctccctggacgaccgcttcctctacttcagcaactggctgcatggggacctgaggcagtatgacatctctgacccacagagaccccgcctcacaggacagctcttcctcggaggcagcattgttaagggaggccctgtgcaagtgctggaggacgaggaactaaagtcccagacagagcccctagtggtcaagggaaaacgggtggctggaggccctcagatgatccagctcaaactggatgggaagcgcctctacatcaccacgtcgctgtacagtgcctgggacaagcaggtttaccctgatctcatcagggaaggctctgtgatgctgcaagttgatgtagacacagtccttggcccagaccttgcccatgagctccgctaccctgtgggcgaatgtagctctgacata

SEQ ID NO: 250629 - DNA, 1142 bp, Homo Sapiens
  misc_feature (7)..(7): n is a, c, g, or t
  misc_feature (20)..(20): n is a, c, g, or t
  misc_feature (40)..(40): n is a, c, g, or t
  misc_feature (43)..(43): n is a, c, g, or t
  misc_feature (51)..(51): n is a, c, g, or t
  misc_feature (57)..(57): n is a, c, g, or t
  misc_feature (77)..(77): n is a, c, g, or t
  misc_feature (87)..(87): n is a, c, g, or t
  misc_feature (96)..(96): n is a, c, g, or t
  misc_feature (108)..(109): n is a, c, g, or t
gggtttntctctgatggaangtcgagtgaaggacatgganagnctggggtntgcacnttggctatactctgttccanctcacacatntcatatcanactgagtggcgnnccaatgtctacgagatgcttaaccccgctgatgtggagctggactgtacggagccacttatatgtatgggactgcagcgccatgagattgtgcagaccctgtctctaaaagatgggcttattcccttggagatccgcttcctgcacaacccagacgctgcccaaggctttgtgggctgcgcactcagctccaccatccagcgcttctacaagaacgagggaggtacatggtcagtggagaaggtgatccaggtgccccccaagaaagtgaagggctggctgctgcccgaaatgccaggcctgatcaccgacatcctgctctccctggacgaccgcttcctctacttcagcaactggctgcatggggacctgaggcagtatgacatctctgacccacagagaccccgcctcacaggacagctcttcctcggaggcagcattgttaagggaggccctgtgcaagtgctggaggacgaggaactaaagtcccagccagagcccctagtggtcaagggaaaacgggtggctggaggccctcagatgatccagctcagcctggatgggaagcgcctctacatcaccacgtcgctgtacagtgcctgggacaagcagttttaccctgatctcatcagggaaggctctgtgatgctgcaggttgatgtagacacagtaaaaggagggctgaagttgaaccccaacttcctggtggacttcgggaaggagccccttggcccagcccttgcccatgagtccgctaccctgggggcgattgtagctctgacatctggatttgaactccaccctcatcacccacactccctattttgggccctcacttccttggggacctggcttcattctgctctctcttggcacccgacccttggcagcatgtaccacacagccaagctgagactgtggcaatgtgttgagtcatatacatttactgaccactgttgcttgttgctcactgtgctgcttttccatgagctcttggaggcaccaagaaataaactcgtaaccctgtccttcaa

SEQ ID NO: 250630 - DNA, 1094 bp, Homo Sapiens
  misc_feature (1042)..(1042): n is a, c, g, or t
  misc_feature (1047)..(1047): n is a, c, g, or t
  misc_feature (1055)..(1055): n is a, c, g, or t
  misc_feature (1064)..(1065): n is a, c, g, or t
  misc_feature (1084)..(1085): n is a, c, g, or t
  misc_feature (1087)..(1087): n is a, c, g, or t
ataaattccctcccttccctccttccccggaacagcggcctctgacaccagcacagcaaacccgccgggatcaaagtgtaccagtcggcagcatggctacgaaatgtgggaattgtggacccggctactccacccctctggaggccatgaaaggacccagggaagagatcgtctacctgccctgcatttaccgaaacacaggcactgaggccccagattatctggccactgtggatgttgaccccaagtctccccagtattgccaggtcatccaccggctgcccatgcccaacctgaaggacgagctgcatcactcaggatggaacacctgcagcagctgcttcggtgatagcaccaagtcgcgcaccaagctggtgctgcccagtctcatctcctctcgcatctatgtggtggacgtgggctctgagccccgggccccaaagctgcacaaggtcattgagcccaaggacatccatgccaagtgcgaactggcctttctccacaccagccactgcctggccagcggggaagtgatgatcagctccctgggagacgtcaagggcaatggcaaagggggttttgtgctgctggatggggagacgttcgaggtgaaggggacatgggagagacctgggggtgctgcaccgttgggctatgacttctggtaccagcctcgacacaatgtcatgatcagcactgagtgggcagctcccaatgtcttacgagatggcttcaaccccgctgatgtggaggctggactgtacgggagccacttatatgtatgggactggcagcgcatggagattgtgcagaccctgtctctaaaagatgggcttattcccttggagatccgcttcctgcacaacccagacgctgcccaaggctttgtgggctgcgcactcagctccaccatccagcgcttctacaagaacgagggaggtacatggtcagtggagaaggtgatccaggtgcccccaagaaagtgaagggctggctgctgccgaaatgcaagcctgatcacgacatctgctctcctggacgncgctnctctattnagcactggnncatgggactgaggagtttnnantctgacc

SEQ ID NO: 250631 - DNA, 931 bp, Homo Sapiens
  misc_feature (19)..(19): n is a, c, g, or t
  misc_feature (218)..(218): n is a, c, g, or t
  misc_feature (830)..(830): n is a, c, g, or t
  misc_feature (838)..(838): n is a, c, g, or t
  misc_feature (847)..(847): n is a, c, g, or t
  misc_feature (850)..(850): n is a, c, g, or t
  misc_feature (860)..(860): n is a, c, g, or t
  misc_feature (880)..(880): n is a, c, g, or t
  misc_feature (884)..(884): n is a, c, g, or t
  misc_feature (889)..(889): n is a, c, g, or t
  misc_feature (892)..(892): n is a, c, g, or t
gagctcatggaaaagcagnacagtgagcaacaagcaacagtggtcagtaaatgtatatgactcaacacattgccacagtctcagcttggctgtgtggtacatgctgccaagggtcgggtgccaagagagagcagaatgaagccaggaccccaaggaagtgagggcccaaaatagggagtgtgggtgatgagggtggagttcaaatccagatgtcaganctacaatcgcccccagggtagcggagtcatgggcaagggctgggccaaggggctccttcccgaagtccaccaggaagttggggttcaacttcagccctccttttactgtgtctacatcaacctgcagcatcacagagccttccctgatgagatcagggtaaaactgcttgtcccaggcactgtacagcgacgtggtgatgtagaggcgcttcccatccaggctgagctggatcatctgagggcctccagccacccgttttcccttgaccactaggggctctggctgggactttagttcctcgtcctccagcacttgcacagggcctcccttaacaatgctgcctccgaggaagagctgtcctgtgaggcggggtctctgtgggtcagagatgtcatactgcctcaggtccccatgcagccagttgctgaagtagaggaagcggtcgtccagggagagcaggatgtcggtgatcaggcctggcatttcgggcagcagcagcccttcactttcttggggggcactggatcaccttctccactgaacatgtacctcctcgttcttgtagaagcgctggatggtggagtgagtgcgcgccacaaagcttgggcagntctgggtntgcaggaanagntctccaaggnataagccatcttttagaganaggntgcanatntatggggtgcaatccatacatataatggtccgtacagtc

SEQ ID NO: 250632 - DNA, 2313 bp, Homo Sapiens
gggaggacttgcaacactccgaggccaggaacgctccgtctggaacggcgcaggtcccagcagctggggttccccctcagcccgtgagcagccatgtccaaccccagcgccccaccaccatatgaagaccgcaaccccctgtacccaggccctccgccccctgggggctatgggcagccatctgtcctgccaggagggtatcctgcctaccctggctacccgcagcctggctacggtcaccctgctggctacccacagcccatgccccccacccacccgatgcccatgaactacggcccaggccatggctatgatggggaggagagagcggtgagtgatagcttcgggcctggagagtgggatgaccggaaagtgcgacacacttttatccgaaaggtttactccatcatctccgtgcagctgctcatcactgtggccatcattgctatcttcacctttgtggaacctgtcagcgcctttgtgaggagaaatgtggctgtctactacgtgtcctatgctgtcttcgttgtcacctacctgatccttgcctgctgccagggacccagacgccgtttcccatggaacatcattctgctgaccctttttacttttgccatgggcttcatgacgggcaccatttccagtatgtaccaaaccaaagccgtcatcattgcaatgatcatcactgcggtggtatccatttcagtcaccatcttctgctttcagaccaaggtggacttcacctcgtgcacaggcctcttctgtgtcctgggaattgtgctcctggtgactgggattgtcactagcattgtgctctacttccaatacgtttactggctccacatgctctatgctgctctgggggccatttgtttcaccctgttcctggcttacgacacacagctggtcctggggaaccggaagcacaccatcagcccggaggactacatcactggcgccctgcagatttacacagacatcatctacatcttcacctttgtgctgcagctgatgggggatcgcaattaaggagcaagcccccattttcacccgatcctgggctctcccttccaagctagagggctgggccctatgactgtggtctgggctttaggcccctttccttccccttgagtaacatgcccagtttcctttctgtcctggagacaggtggcctctctggctatggatgtgtgggtacttggtggggacggaggagctagggactaactgttgctcttggtgggcttggcagggactaggctgaagatgtgtcttctccccgccacctactgtatgacaccacattcttcctaacagctggggttgtgaggaatatgaaaagagcctattcgatagctagaagggaatatgaaaggtagaagtgacttcaaggtcacgaggttcccctcccacctctgtcacaggcttcttgactacgtagttggagctatttcttcccccagcaaagccagagagctttgtccccggcctcctggacacataggccattatcctgtattcctttggcttggcatcttttagctcaggaaggtagaagagatctgtgcccatgggtctccttgcttcaatcccttcttgtttcagtgacatatgtattgtttatctgggttagggatgggggacagataatagaacgagcaaagtaacctatacaggccagcatggaacagcatctcccctgggcttgctcctggcttgtgacgctataagacagagcaggccacatgtggccatctgctccccattcttgaaagctgctggggcctccttgcaggcttctggatctctggtcagagtgaactcttgcttcctgtattcaggcagctcagagcagaaagtaaggggcagagtcatacgtgtggccaggaagtagccagggtgaagagagactcggtgcgggcagggagaatgcctgggggtccctcacctggctagggagataccgaagcctactgtggtactgaagacttctgggttctttccttctgctaacccagggagggtcctaagaggaaggtgacttctctctgtttgtcttaagttgcactgggggatttctgacttgaggcccatctctccagccagccactgccttctttgtaatattaagtgccttgagctggaatggggaagggggacaagggtcagtctgtcgggtgggggcagaaatcaaatcagcccaaggatatagttaggattaattacttaatagagaaatcctaactatatcacacaaagggatacaactataaatgtaataaaatttatgtctagaagttaaaacccgaa

SEQ ID NO: 250633 - DNA, 630 bp, Homo Sapiens
ggggggaagtgacgagagccgggtggacccagggtggggaactacctcttcctctccacgcggttgagaagaccggtcggcctgggcaacctgcgctgaagatgccgggaaaactccgtagtgacgctggtttggaatcagacaccgcaatgaaaaaaggggagacactgcgaaagcaaaccgaggagaaagagaaaaaagagaagccaaaatctgataagactgaagagatagcagaagaggaagaaactgttttccccaaagctaaacaagttaaaaagaaagcagagccttctgaagttgacatgaattctcctaaatccaaaaaggcaaaaaagaaagaggagccatctcaaaatgacatttctcctaaaaccaaaagtttgagaaagaaaaaggagcccattgaaaagaaagtggtttcttctaaaaccaaaaaagtgacaaaaaatgaggagccttctgaggaagaaatagatgctcctaagcccaagaagatgaagaaagaaaaggaaatgaatggagaaactagagagaaaagccccaaactgaagaatggatctcctcatcctgaaccggactgtaaccccagtgaagctgccagtgaagaaagtaacagtgagatagagc

SEQ ID NO: 250634 - DNA, 627 bp, Homo Sapiens
gggaacttgagaacatagaagaacaccagtctgtagatattgcaactttggaagatgaagctcaggaaaataaaagcaaaatgaaaatggttgaggaacatatggagcaacaaaaagaaaatatggagcatcttaaaagtctgaaaatagaagcagaaaataagtatgatgcaattaaattcaaaattaatcaactatcggagctagcagacccacttaaggatgaattaaaccttgctgattctgaagtggataaccaaaaacgagggaaacgacattatgaagaaaaacaaaaagaacacttggataccttaaataaaaagaaacgagaactggatatgaaagagaaagaactagaggagaaaatgtcacaagcaagacaaatctgcccagagcgtatagaagtagaaaaatctgcatcaatactggacaaagaaattaatcgattaaggcagaagatacaggcagaacatgctagtcatggagatcgagaggaaataatgaggcagtaccaagaagcaagagagacctatcttgatctggatagtaaagtgaggactttaaaaaagtttattaaattactgggagaaatcatggagcacagattcaagacatatcaacaattta

SEQ ID NO: 250635 - DNA, 674 bp, Homo Sapiens
caagacaagagatctgtattcaaaaagataaaacaatctcatctcagtaactacctcctatgaaacctaagagagaaaacctgtaatagctctcttaaccaacagccccatctgcacatcaccaagcaccagttccctttgggtagcagtaatgcttgtttttcattctttgcaaattaaggactgtttgttaacaggatttatggggtcatttgtagcttactttgcaaatacctttcacttcttatgaaacacaatatgcccccaaacatggaccattattcaagtagacaaaatcactcactgacagcactttaacaacccgcctccactccatcttcccattctctcaccctatgccttccaatgaacctagcctttgctagtgatgagtccatctggggacaaatactgctttaaagatgatgtaattttcaatgccaaccacagtgactttcccataatagatattaataaacacttgttgacatagttataataagctaaaaatagttaacattaattttgctctttatcttttattcttatggcacagaatttactttaaaagactgaaaaactgattccaatgtaataatcacttactgggccacacgctagatgacagacatgcctccctgcctaaaaagggctcaaaggactctcagttatac

SEQ ID NO: 250636 - DNA, 716 bp, Homo Sapiens
caaacaaacaacaactttgaaacctaggaacaattttggacctgttggagcagaaatgtgtagttgtcattgaaggtgtgaacataccctacctctactctacatgtggaagacctgacccacagaggacatgaacccatgaagaagagtgatgtgacatgttttgcattttattagtaccatgatctaaccaactgagctaactggccacaccattttatcctttataatgatcactataagggctgagtgcaaaatggagtgtatgtggtcaaaagtggaagctgtgaggctattgcagtaatccagaaagaaaggtgacaatggcttagacttcagtggtagtgttggaaatggacataaatagacatattcaggaaatatattgatcttagatctaataagacacgtaatagattagaagtagggaaattaatgaaaaagcagaattaaggatgacttctcactggcttgaaatgctaaatggatgacggtgctgtttagtgagttggggaaaactgggcgtggtgatgggtgtataaattgagaaaggaaaatcaagaatttccagaactttcagagcaatgttaaatactttccttgatagtgggtcagtcatcatttataactgcatttctaaaaatattgcttaattttgtttttgagctttgtattagtggaattttgtgtgtactgattattttgctcaatactat

SEQ ID NO: 250637 - DNA, 313 bp, Homo Sapiens
aaatctgctgatttgtatactgtggcacaagtatctttgaactttgatagtgaaaggagaccttcaacaatttttagtctaggcgagaggaatattaggaatgtgacttctaaattttacaatagagcagttattttaagagtcatggttaacatttcttaagagttcaactaaaattcagttaaaatttcagagctacgaggaacttaaatcttagctaaaaattacctgttgtagatagtattaattagattgtttgcagctattaatccatcataaagataaaatgaagaaactctccctttttttaaac

SEQ ID NO: 250638 - DNA, 432 bp, Homo Sapiens
tctggccctaaaatataataggcatgtttcaaaaaaatgaaagaggaataataaatttatataaatgttcaatctcattccaaaaatgtcttacaaaaatgtttcagtaagtacttcctaaaaacatttagcaggttttaggacctgaaaaataattttcagttggaaaaacactttttctgagaagagaatatgttctagttttcaagacagtttatatagtaacagggaaaattaaatcattcaaaaataaaaatttgggtccaagattaagttttagaaacagagcatttcatttaatccctaacaacaagtctggaaaggataaatgtattcctaacatgcagactattaacagctcttccaaggccagaacagaagctccacttaggagctaggatcaccaccacaaaatattacctcgtgggctcc

SEQ ID NO: 250639 - DNA, 870 bp, Homo Sapiens
ggcagatcagaaaggaggggttcctggtcatacaccagtactaccaaggacagcttttttcctgcaagatctgttacctaaagcaataaaaaatggccagaggatcagtgtccgatgaggaaatgatggagctcagagaagcttttgccaaagttgacactgatggcaatggatacatcagcttcaatgagttgaatgacttgttcaaggctgcttgcttgcctttgcctgggtatagagtacgagaaattacagaaaacctgatggctacaggtgatctggaccaagatggaaggatcagctttgatgagtttatcaagattttccatggcctaaaaagcacagatgttgccaagacctttagaaaagcaatcaataagaaggaagggatttgtgcaatcggtggtacttcagagcagtctagcgttggcacccaacactcctattcagaggaagaaaagtatgcctttgtcaactggataaacaaagccctggaaaatgatcctgattgtcggcatggcatcccaatgaaccccaaacacgaatggatctctttaatgctgtcggagatgggattgtcctttgtaacatgatcaacctgtcagtgccagacccaattgatgaaagaccatccaccaaaggaagctaacccctttccccattcaggaaaatctgaacttggctctgaactctgcctcccccatcggggtgccatgtggggccacctaagggggttgagggacctggaagggagggccaaccccttttctcgggcccgggggaacttccgggggccaggtcattcacaactgggggtgcctttggcctgccctctgagaggcccgcgaaaaagggcggacctttggctct

SEQ ID NO: 250640 - DNA, 1632 bp, Homo Sapiens
tgggcgacgtgcccgcttccaaaatggcggcggcggcggtatctggtgcgcttggccgggcgggctggaggctcctgcagctgcgatgcctgcccgtggcccgttgccgacaagccctggtgccgcgtgccttccatgcttcagctgtggggctaaggtcttcagatgagcagaagcagcagcctcccaactcattttctcagcagcattctgagacacagggggcagaaaaacctgatccagagtcttctcattcaccccccaggtatacagaccagggcggcgaggaggaggaggactatgaaagtgaggagcagttgcagcaccgcatcctgacggcagcccttgagtttgtgcccgcccacgggtggacagcagaggcgattgcagaaggagcccagtctctgggtctctccagtgcagcagccagcatgttcgggaaggatggcagtgagctaatactgcattttgtgacccagtgcaatacccggctcacacgtgtgctagaagaggagcagaagctggtacagttgggccaggcggagaagaggaagacagaccagttcctgagggatgcagtggaaaccagactgagaatgctgatcccatacattgagcactggccccgggccctcagcatcctcatgctccctcacaacatcccgtccagcctgagcctgctcaccagcatggtggatgacatgtggcattacgctggggaccagtccactgattttaactggtacacccgccgagccatgctggctgccatctacaacacaacagaagctggtgatgatgcaggactcctctccagactttgaggacacttggcgcttcctggaaaaccgggttaatgatgcaatgaacatgggccacactgccaagcaggtaaagtccacaggagaggcactggtgcaaggactcatgggtgcagcagtgacgctcaagaacttgacaggtctaaaccagcgtcggtgagaggaaggggtataagctacaatgcctagaagagaatgagcggacagattgaaagagctttgaaaagtataaggtgccatccacataacctggtgttcacgagaacacactaaaggactcctgagtcactaccacagccacctggaaaccacaaggcatttgatgctaccgttctggtcagggattgggctgcttcttcagttcctaataccagaccaagcctcctgatgcctttctgcactgcaactgtgtgattgaaaaatgagatgttcatccaagcagtcaagccacagaaacccagcatgtccctgtcacaatctcatgggcaccttgatcatgtcttaaccttcccttaaccttggggctcccaagccagagtcaaggtctgacgccacctcaaggtgacagctcatctccagcacagcacaggcgtgtgcacacagaggtgttccttgcagccccctccctctcaggtgtcctgagatgctgctcctgggagccccctcagaaaactgcctcacctgagacaagtgcctgctggacagaggtgtgattccaggcctggtgtcacatgacaccagcatgcattgcaggattattagtgtattttgagtctgtaaaaataataaatatgtttgaagtagtcaaaaa

SEQ ID NO: 250641 - DNA, 524 bp, Homo Sapiens
  misc_feature (27)..(27): n is a, c, g, or t
  misc_feature (41)..(41): n is a, c, g, or t
  misc_feature (59)..(59): n is a, c, g, or t
  misc_feature (69)..(69): n is a, c, g, or t
  misc_feature (162)..(162): n is a, c, g, or t
aaattggaaggctaaccggtctgggtnaagggaattggggnctgcttcctttaaaggtncctaaaatanccaagaccaaagcctccctgaatgcctttcctgaactgcaaactgtgtgaattggaaaaaatgaagatgttcatccaaaagaagtcaaagccnacagaaacccaagcatgtcccctgtcaaaaatctcatgggcaccttgatcatgtcttaaccttcccttaaccttgggctccccaagccagagtcaaggtctgacggccacctcaaggtgacagctcatctccagcacagcacaggcgtgtgcacacagaggtgttccttgcagccccctccctctcaggtgtcctgagatgctgctcctgggagccccctcagaaaactgcctcacctgagacaagtgcctgctggacagaggtgtgattccaggcctgtgtcacatgacaccagcatgcattgcaggattattagtgtattttgagtctgtaaaaataataaatatgtttgaagaagttaa

SEQ ID NO: 250642 - DNA, 977 bp, Homo Sapiens
  misc_feature (166)..(166): n is a, c, g, or t
  misc_feature (225)..(225): n is a, c, g, or t
tgacccccaagggcaaccctttcaatggcgaattcaaaagccccctttttattgttccccgggctcatcagtgacaatcatgcctccctccaaggggctcatcagagaatgttttgtaactgatgccgcaagggaacctcatgggacattcaaaaaaggcccaacnccatgtccagtcccgtgcaagtaatctaggcttgaatcccataaagctgaacgggcaanggagtcaagaaggtgaccttggttcccagtcgggaaaacggctgcactcacagctatgtggccctgagggacatatgtgaagcattccttctcgtaggctgtaggggtccccaaaatgcattgtccgcgtcacatctgtggtgccatccttgtattgagcacccgagtcaataaggtacacctcatccagggacaaggtcctattcgtctcagggactggcgcgtagtgaatgatggcgccgttgggtcccgtactggaaattgttgggaagctcaggtccacaaagtctgcctgttgcctgcgaaactcctcagctttgtcagcagctgagatctctgtcacaccacctttgggaacctctttctccagccagttaaagagttcacagagagcaacagcatctttaatgtgagcccgcctcatgccttctgactcagctgaattcttcacagctttggcgatgcagatgggggtgtaaggcatacagcagcggtggtccttggggatggtctcgctcacagcatagctggccttgtcactgacccacaccttctcccttggggagaggtcagcacacagggccttgagctcgctcaggatggacttgtagggatgcacctggatcctgtattcggcttccagacccaagtcaagaagcaggtgctccttcacactgggggcgtctatgcggtcaccatcaatgaagagcatgatcgtctctagtcctatgattgcgtaggagaaaaatact

SEQ ID NO: 250643 - DNA, 755 bp, Homo Sapiens
gggggccgaggatggtggggatgccccttcacccagcaaacggccctgggccaggaagaggaggaaggagggcgagcgaggaggatggcggagtcggggctcctgacggaactctaatgaatcattgattgaccagcactattttaccagttggaatgaatgatcagaaatgggcatagtgcttttagatccaacatgtaacagatggatgttactccatgctgattacttcttcaagccagtacttttttgattgtgtaggatctttgtctcttcatctttgaattcaattactggaaaataaaaggagttcatgtagtttttgtccaggcttgagtcaccatgagtagtagtttaggaaaagaaaaagactctaaagaaaaagatcccaaagtaccatcagccaaggaaagagaaaaggaggcaaaagcctctggaggttttgggaaagagagcaaagaaaaagaacctaagaccaaagggaaagatgccaaagatggaaagaaggactccagtgctgcccaaccaggggtggcattttcagttgacaatacgatcaaacggccaaacccagcacctgggactagaaaaaaatccagcaatgcagaggtgattaaagagctcaacaaatgccgggaagagaattcaatgcgtttggacttatccaagagatctatacacatattgccatcatcaatcaaagagttgactcaattaacagaactttatttatacagtaacaaattgcagtccct

SEQ ID NO: 250644 - DNA, 2490 bp, Homo Sapiens
  misc_feature (1407)..(1407): n is a, c, g, or t
  misc_feature (2328)..(2342): n is a, c, g, or t
ggggcggggtatggcgcgctgtgcggcgcagggcggctggcacaaacggcggcgccggggccggaggaaaaagctcgccaccctgaagggtcccttcccaagcccttagggaccgcagaggacttggggaccagcaagcaacccccagggcacgagaagagctcttgctgtctgccctgcctcaccctgccccacgccaggcccggtggcccccagctgcatcaagtggaggcggaggaggaggcggaggagggtggcaccatgggcccgggcggtgccctccatgcccgggggatgaagacactgctgccatggacagcccgtgccagccgcagcccctaagtcaggctctccctcagttaccagggtcttcgtcagagcccttggagcctgagcctggccgggccaggatgggagtggagagttacctgccctgtcccctgctcccctcctaccactgtccaggagtgcctagtgaggcctcggcagggagtgggacccccagagccacagccacctctaccactgccagccctcttcgggacggttttggcgggcaggatggtggtgagctgcggccgctgcagagtgaaggcgctgcagcgctggtcaccaaggggtgccagcgattggcagcccagggcgcacggcctgaagcccccaaacggaaatgggccgaggatggtggggatgccccttcacccagcaaacggccctgggccaggcaagaaaaacaggaggcaaaccgggagggtggcatgagcctgcagctgcagcagtggcagtggtgaggccagtgctgggctgatggaggaggcgctgccctctgcgcccgagcgcctggccctggactatatcgtgccctgcatgcggtactacggcatctgcgtcaaggacagcttcctgggggcagcactgggcggtcgcgtgctggccgaggtggaggccctcaaacggggtgggcgcctgcgagacgggcagctagtgagccagagggcgatcccgccgcgcagcatccgtggggaccagattgcctgggtggaaggccatgaaccaggctgtcgaagcattggtgccctcatggcccatgtggacgccgtcatccgccactgcgcagggcggctgggcagctatgtcatcaacgggcgcaccaaggccatggtggcgtgttacccaggcaacgggctcgggtacgtaaggcacgttgacaatccccacggcgatgggcgctgcatcacctgtatctattacctgaatcagaactggggacgttaaggtgcatggcggcctgctgcagatcttcccctgagggccgggcccgtggtagccaacatcgagccactcttttgaccggttgctcattttcctggtctgaaccggcggaaaccccacgaggtgaagccagcntatgccaccaggtacgccatcactgtctggtattttgatgccaaggagcgggcagcagccaaagacaagtatcagctagcatcaggacagaaaggtgtccaagtacctgtatcacagccgcctacgcccacctagtggccagtcccagagccgcatggaagacagcttaaatgacttcaggagagccctgggcctgtgctggctgctccttccctgccaccgctgctgcttctgactttgcctctgtcctgcctggtgtggagggctctgtctgttgctgaggaccaaggaggagaagagacctttgctgccccatcatgggggctggggttgtcacctggacagggggcagccgtggaggccaccgttaccaactgaagctgggggcctgggtcctaccctgtctggtcatgaccccattaggtatggagagctgggaggaggcattgtcacttcccaccaggatgcaggacttggggttgaggtgagtcatggcctcttgctggcaatggggtgggaggagtacccccaagtcctctcactcctccagcctggaatgtgaagtgactccccaacccctttggccatggcaggcaccttttggactgggctgccactgcttgggcagagtaaaaggtgccaggaggagcatgggtgtggaagtcctgtcagccaagaaataaaagtttacctcagagctgcacaaaaaccacacacccatcctatcccctccccctccccgcctcccctttctccagatacagccattccgtactccgctttcgccacttacatcctttccattccctcccccctgccttctctcgtccacgtcttgttacccctgcgcgcccgccccccttttcctacttcccaccccctcttccccacctcgtaaattcccttttttgggcgggcgannnnnnnnnnnnnnnaacaaatccttttccaacatcctttccccgttgttgccccggcgccttccctttccgccgcacgtcgcgccagacccgggcgtataccacccgtctcccctccccaagaaaaacaacctgccgccgcagaacaagccgaggtgcctgt

SEQ ID NO: 250645 - DNA, 1166 bp, Homo Sapiens
caacttcagaaaaccctttcaaggataaaaaaacttgcatcatcttatagtggaatagagaaacagctcctcgcctcttcccaacaacgcaaattatgagcagctccttgaagagatttaccttcagcttatttggtaaccactgctaataactaaaatgttctcagcttggaataatggactctgaagtctctattttccaagttgtcctttctcttaaaataccctttactgatttaatacagaataacaatcttattttccacttggtaactatggctttatgttgggttactgtttaaggaaagttgatctgggcctttttaaaaacataattatatactttagaaatacaagggattccgatatgtcaggacctaaatggcctaagcacctgtcaaattaaaattccaaaattcattgaaatcctaaagccttgatattatattctttataaggcgtgtgccagcctgtatagtatataagagagaggggtgtttgtgtgtatatatatatgcctttgtgtatacacttatcaaagctattttcttatgaaaacgtccctctctccataccatcagtttctcagttccagaagttatacctttattttgagctgtgtataggtagaataaaaaattcctttcatatcgttattgtacaaaaagtaaagagtatcctaaagattgtattcattgtaatcaagtaatgcaatcatctctcctctcttgaaatcttgctggacctcttaggctacaataaactgtaccaaactaaactgacagtccttcgataatatgaaacattaatttacaaggacccgttagggcttcaatgatgctgagtctggaaaaggggaggagacccttgggaggactccaggcagctgtgctcccagggctcatgttctctactggattagggatagtcacctctgaaatctccaccctgatgattggaatgaaacggagtgaacatgagcccagctgagagaggagcaggaatgtgtgaaaaacagctgctctccttgtcccagctttgtgattgagccctctgtcttgctctctctgccttccctgtgtctttcttctcttaccagagcatctgtttgcagaggtaacattaccttccccagccacaggtatgtggaatacggtgaggaaaaa

SEQ ID NO: 250646 - DNA, 430 bp, Homo Sapiens
ggtcgtttaagtcttttaatgtttgccactctccctctgcttcatgctctttcttttttacattttcctaggcttttctccccaagtgtttttcacagcctgtgttttgctgattacattcttgtggtggtatttcacatgtctcgctattcataatgtttcctatacattgacatttggatctaggtggttgattagattcaggtttgatattgtttttgtttgcttgttttgggcagtactgttgcataggtggtgatgtgtttttctgtcaggagataatgtctgtctttctgtgttatcagctattgatataaatttcatgtgtcataaaatgttattttggattaaaaataccatttaaaaacgtgaattcttaattattcttagctttcaggccataccaaaacaaaaactgtgggcaggattt

SEQ ID NO: 250647 - DNA, 1335 bp, Homo Sapiens
  misc_feature (598)..(598): n is a, c, g, or t
cgacaggggagcggaagaggcccaggaggctgggtgaggcgctgagacggtttggcggtgagtcctgggccaggcgcagctgaaaggcccgcaacccgggaaacgtcaaaacaaacagaaggacttgggattccggagcagtcgcccctatcgctgctcctgcagttgcggacgccaccgaccccgccgccggaggactgggcactgaaaggcctctaggcctaggcgcggcccgcggagccagacgtgttgctgccgtgagtaaaacgagcgccctctccgcactcgtttacaaattaaaatggaggaaatttcgttggccaacctggatactaacaagctagaggccatcgctcaggagatttacgtagacctgatagaggattcttgtttgggattctgctttgaggtgcaccgggcagtcaagtgtggctacttctacctggagttcgcagagactggtagcgtgaaggattttggcattcagccagtggaagacaaaggagcgtgccgcctcccgctttgctcccttcccggagaacctgggaatgggcctgatcagcagctccagcgctcacctccgggaattccagtagcntgcaaacatgagagtctgaaagtggccaggacaataacatagactggtcctgtggcttcgaggagtaagctaagtagaaaaaagtagaaacaatcagacaaaagttttaattcccccttgaagatcctagcatttaaaaacccacaagtggataatttaggaatcctttttttaaagtgtattacctggagcaaggctctgacagccctggcgcaggaggagctgcacagcctgcgggacatgcagtgcctgttgatctctaaacacaccaggatgtgcgcccagatcctgtagtgcccccagtgcacaggtgagcagttgtgtgcccagatataacattctggtctcagccttcctgtctgctgatgtcacagggcttcctggacagtttgcacgtcacaggcttcgtcagggccggatcagtgggcctgaggggactggtcccttgattctgaacctcggtatggggtttcactgaacaacagtacacgtccgtcgacgatccgtgttctcaggtctcgggtgggaatccatgcaaccgaattcacagctgcaagggaaagccgtcactgccagcacgaccacgctcccccggctccccgaccccactcacgatcccctggcaagcacattcgtcgacctcccaccaccggagcgcagctgtcgacccggcccccatccacgcacccggccacaccacggacacgcccacaccgaccaaccccacacatcccccg

SEQ ID NO: 250648 - DNA, 982 bp, Homo Sapiens
  misc_feature (25)..(25): n is a, c, g, or t
  misc_feature (57)..(57): n is a, c, g, or t
ggtgggggtgcaccatttggggaangatgccccccacggtggctctggaagctcttnctggggggagggctgctctcagctgcctgctcctttcggggaattcaaaccccaggcaaaaagcagctgaccccaggcaaaggcagctggccccaggccagagaggtcctggcttcccaaccttgagctgtgcagtcattacctaggtgcaggctgggctacagggacagccaagctgagcaaggacaggtccccgcagcctagactggggcaccgcttcgttctcggtctcactccccgctgtgccgtgctttgcctgtgagacggcggcgctgggccttgctggtacgaggggcccttgggggctttttggagtcctgggcccgtcggggatgtttcctcttgacctttttgcggctgtgtgcatgtagtgatgctgtgagggaggagatccgctgagagagcagggggtctctggacttcctgggcaaggctttggttggtttctccgtggatgacgcctcctcctcagacctgtctccagcccctccctcaggtggggtcagcccgagcagccgggcccccgagaggtccaggtcactgatggtggtcacggtgactgtgtggttggggtggtcatactgcaccgactccgtctttgctgtcaccaaccggtccagctcatctgcctcctccagagcctcttctctctctgccagcatcttcaagtattcctggtggcgctcctcccgaagcttcctctgctcctctttcagccgctgcttaatctcctcaatggctgccttctttcgctcgaccttccgcttgtggaagcctgtcaggtactcccgcctcttctcctcgtcgaagctaagaacgagcctcggccgccggtcgtcaccatctcgcttcttcttcttgttgcggcccatagcagtgaggccgccggcttcctctccctgaagacacttccgggtgtagcccc

SEQ ID NO: 250649 - DNA, 458 bp, Homo Sapiens
  misc_feature (330)..(330): n is a, c, g, or t
gagtggctgagaatttaatactggtaaacactataaattgtaaatgtaagttgtaaatgaccttgtcactggagaggggagaaggaactggagtcagacgtcccagcagaaacagcagcggcaacatgcggtaggcacacctaggtgcaggctgggctacagggacagccaagctgagcaaggacaggtccccgcagcctagactggggcaccgcttcgttctcggtctcactccccgctgtgccgtgctttgcctgtgagacggcggcgctgggccttgctggtacgaggggcccttgagcgctttttggagtcctgggcccgtcgggnatgtttcctcttgacctttttgcggctgtgtgcatgtagtgatgctgtgagggaggagatccgctgagagagcagggggtctctggacttactgggcaaggctttggttggtttctccgtggatgacg

SEQ ID NO: 250650 - DNA, 338 bp, Homo Sapiens
ctacccggggtcctccttccagcaccagcagagcagtgggccgccctccttgctggaggggacccggctccaccacacacacatcgcgcccctagagagcgcagccatctggagcaaagagaaggataaacagaaaggacaccctctctagggtccccaggggggccgggctggggctgcgtaggtgaaaaggcagaacactccgcgcttcttagaagaggagtgagaggaaggcggggggcgcagcaacgcatcgtgtggccctcccctcccacctccctgtgtataaatatttacatgtgatgtctggtctgaatgcacaagctaagagagcttgc

SEQ ID NO: 250651 - DNA, 1001 bp, Homo Sapiens
gggacagcctgcggcgcagcggaggcggaccgcagtcgagtctgcagagtgttgggtctgtagccagcaaattacttcatcatctagattatccattcagttgatcctaattagcaaggataacaagaatcgtccgcactaaagtcccctgcagcgtgaccatgtcgagaccccggaagaggctggctgggacttctggttcagacaagggactatcaggaaaacgcaccaaaactgagaactcaggtgaggcattagctaaagtggaggactccaaccctcagaagacttcagccactaaaaactgtttgaagaatctaagcagccactggctgatgaagtcagagccagagagccgcctagagaaaggtgtagatgtgaagttcagcattgaggatctcaaagcacagcccaaacagacaacatgctgggatggtgttcgtaactaccaggctcggaacttccttagagccatgaagctgggagaagaagccttcttctaccatagcaactgcaaagagccaggcatcgcaggactcatgaagatcgtgaaagaggcttacccagaccacacacagtttgagaaaaacaatccccattatgacccatctagcaaagaggacaaccctaagtggtccatggtggatgtacagtttgttcggatgatgaaacgtttcattcccctggctgagctcaaatcctatcatcaagctcacaaagctactggtggccccttaaaaaatatggttctcttcactcgccagagattatcaatccagcccctgacccaggaagagtttgattttgttttgagcctggaggaaaaggaaccaagttaactgagatactgctgctggaatgggcgagacattgctgcaaagaagtcaagcttttttcagacaaaaggtgtgagggggcttgcttggtatgcttacctgggcttgtgtacctcagtggtttttgtgtacttttttcaataaaatatcaaagttggaggaaaa

SEQ ID NO: 250652 - DNA, 870 bp, Homo Sapiens
ggggcagcggaggcggaccgcagtcgagtctgcagagtgttgggtctgtagccagcaaattacttcatcatctagattatccattcagttgatcctaattagcaaggataacaagaatcgtccgcactaaagtcccctgcagcgtgaccatgtcgagaccccggaagaggctggctgggacttctggttcagacaagggactatcaggaaaacgcaccaaaactgagaactcaggtgaggcattagctaaagtggaggactccaaccctcagaagacttcagccactaaaaactgtttgaagaatctaagcagccactggctgatgaagtcagagccagagagccgcctagagaaaggtgtagatgtgaagttcagcattgaggatctcaaagcacagcccaaacagacaacatgctgggatggtgttcgtaactaccaggctcggaacttccttagagccatgaagctgggagaagaagccttcttctaccatagcaactgcaaagagccaggcatcgcaggactcatgaagatcgtggaaagaggcttacccagaccacacacagttttgagaaaaacaatcccccattatgacccatctagcaaagaagacaacccctaagtgggtccatggtgggaggtacagttttggttccggatgaaggaaacggttttcatttccccctgggctggaagctcaaaatccttatcattcaaaggctcaccaaagcctacctggtggggccccctttaaaaaaataattgggtcctcctttcaaattcgcccaagaagaatttattcatttcccagcccccctgggaccccacgggaaagaagagtttggagaattttgggtttttttgaggcc

SEQ ID NO: 250653 - DNA, 444 bp, Homo Sapiens
  misc_feature (27)..(27): n is a, c, g, or t
  misc_feature (96)..(96): n is a, c, g, or t
  misc_feature (269)..(269): n is a, c, g, or t
cccacacacagtttgagaaaaaacaancccccccattatgacccccatcctagcaaagaggacaacccctaagtggccccataggtggatggtaanagtttggttcgggatgatgaaacgtttcaattcccccctggctgagcctcaaacccctatcatcaagctcacaaagctactggtggcccccttaaaaaatatggttctcttcactcgccagagattatcaatcccagcccctgaccccaggaagagtttgattttgttttganccctggaggaaaaggaaccaagttaactgagatactgctgctggaatgggcgagacattgctgcaaagaagtcaagcttttttcagacaaaaggtgtgagggggcttgcttggtatgcttacctgggcttgtgtacctcagtggtttttgtgtacttttttcaataaaatatcaa

SEQ ID NO: 250654 - DNA, 921 bp, Homo Sapiens
  misc_feature (235)..(249): n is a, c, g, or t
  misc_feature (468)..(478): n is a, c, g, or t
ctgggtccagccttgatcagtgacagcgaaggaagttatctgctgggaacacttgcatttgatttaggaccttggatcagtggtcacctcccagaagaggcacggcacaaggaagcattgaattcctaaagctgcttagaatctgatgcctttattttcagggataagtaactcttacctaaactgagctgaatgtttgtttcagtgccatatggaataacaactttcagtggcnnnnnnnnnnnnnnnctggaaacatatgtgagacactcagagtaatgtctactgtatccagctatctttcttggatccttttggtcattatttcagtgtgcataagttcttaatgtcaaccatctttaaggtattgtgcatcgacactaaaaactgatcagtgtaaaaaggaaaacccagttgcaagtttaaacgtgttcgaaagtctgaaaatagaacttgccttttaagttnnnnnnnnnnngctatcttgaaaatgttttggaactgcgataactgagaaactcttaccagtccacatgcaattagacatattcagcatatttgttattttaaaagggagggttgggaggtttcttattggtgattgtcacacggtataccatactcctctccttcaaagaatgaaaggccttgttaaggagttttttgtgagctttacttctttggaatggaatatacttatgcaaaaccttgtgaactgactccttgcactaacgcgagtttgccccacctactctgtaatttgcttgtttgttttgaatatacagagccttgatccagaagccagaggatggactaagtgggagaaattagaaaacaaaacgaactctggttgggggtactacgatcacagacacagacatacttttcctaaagttgaagcatttgttcccaggatttatt

SEQ ID NO: 250655 - DNA, 696 bp, Homo Sapiens
gttggtgacaaatatgggcatcatcattccggacttcgctaggagtggggtccagatgaacaccaacttcttccacgagtcgggtctggaggctcatgttgccctaaaagctgggaagctgaaagtttatcattccttccccaaagagaccagtcaagctgctcagtggaggcaacacattacatttggtctctaccaccaaaacggaggtgatcccacctctcattgagaacaggcagtcctggtcagtttgcaagcaagtctttcctggcctgaattactgcacctcaggcgcttactccaacgccagctccacagactccgcctcctactatccgctgaccggggacacccagattagagctggaactgaggccctacaggagagattgagcagtattctgtcagcgcaacctatgagctccagagagaggacagagccttggtggataccctgaagtttgtaactcaagcagaaggtgcgaagcagactgaggctaccatgacattcaaatataatcggcagagtatgaccttgtccagtgaagtccaaattccggattttgatgttgacctcggaacaatcctcagagttaatgatgaatctactgagggcaaaacgtcttacagactcaccctggacattcagaacaagaaaattactgaggttcccctcatgggccacctaagttgtga

SEQ ID NO: 250656 - DNA, 501 bp, Homo Sapiens
cggaacctttttttccctcaatataacctgtaaaatgagaggagctaacttcgcatagtgaggtggggattaggctggttggtatacatgcatcttagccctgggtctttttacttacagctaatgcacaagctgagtgtggaagccccacccaaaatcctggtggagagatacctgattgaaattgcaaagaatcacaacgtaccctatgaacctgactctgtggtcatggcagaagctcctcctggggtagagacagatcttattgatgttggattcacagatgatgtgaagaaaggaggccctggaagaggagggagtggtggcttcacagcaccagttggtggacctgatggaacggtgccaatgcccatgcccatgcctatgccatctgcaaatacgcctttctcatatccactgccaaagggaccagtaagtataagtgtggatgtaagctttagaaaatgttatagataacaagttggctctgtgaacacactc

SEQ ID NO: 250657 - DNA, 2374 bp, Homo Sapiens
ggggagggagtcgccattttggatggtgaaccctgaagtcggtgtctgctgcgttcacggcaggattcggttaggaggaacagcacagcatgctgggctctggatttaaagctgagcgcttaagagtgaatttgagattagtcataaatcgccttaaactattggagaaaaagaaaacggaactggcccagaaagcaaggaaggagattgctgactatctggctgctgggaaagatgaacgagctcggatccgtgtggagcacattatccgggaagactacctcgtggaggccatggagatcctggagctgtactgtgacctgctgctggctcggtttggccttatccagtctatgaaggaactagattctggtctggctgaatctgtgtctacattgatctgggctgctcctcgactccagtcagaagtggctgagttgaaaatagttgctgatcagctctgtgccaagtatagcaaggaatatggcaagctatgtaggaccaaccagattggaactgtgaatgacaggctaatgcacaagctgagtgtggaagccccacccaaaatcctggtggagagatacctgattgaaattgcaaagaattacaacgtaccctatgaacctgactctgtggtcatggcagaagctcctcctggggtagagacagatcttattgatgttggattcacagatgatgtgaagaaaggaggccctggaagaggagggagtggtggcttcacagcaccagttggtggacctgatggaacggtgccaatgcccatgcccatgcctatgccatctgcaaatacgcctttctcatatccactgccaaagggaccatcagatttcaatggactgccaatggggacttatcaggcctttcccaatattcatccacctcagataccagcaactcccccatcgtatgaatctgtagatgacattaatgctgataagaatatctcttctgcacagattgttggtcctggacccaagccagaagcctctgcaaagcttccttccagacctgcagataactatgacaactttgtcctaccagagttgccatctgtgccagacacactaccaactgcatctgctggtgccagcacctcagcatctgaagacattgactttgatgatctttcccggaggtttgaagagctgaaaaagaaaacataggtctcttaaaccaggcaactttcacgttttgggagttgagactgagcaatttctccttgtaacaaagaatctccatgaaattctgtttcatctgttaaccgtcactcagcacaacactccctctgggctctcttcctgctcctccagattctgctgctttccagttctctgttgatcctgagactaacaattggagactgaggccagagcaactggctcctggcagctgtgcttgtccgtttcctgtcagagtgatcccaggtttcctcctggcccgtcccatggtccctccacaggagtgtgagaggatgggggaagcactgtgggaagaccaccaaagatggctggacagtgggagagagcacgttgtgaagcatcccagcctcgtgttgaggttccagacttagaaacagacccctctgtacagggggattgtggtgagtgagaatcaaggccaccttgtgtgttttctcactctcgaatgcaagtgggagagggaaaatgactcgggacgccattgtaacggttcctggaagctgggccctctcattggcatatacagtactcctcgctgcagggcactgtcccaccgggatccagttgcaaagtttgtcttgacagttgaaggcctcgcttagttgtactggattctcagggagccctctgtggccttttgctttgcgtgctgtttcccttgtaccagagggcggcaccgtggaaattctgttttccctgtagcatattgtgttggattgcattactggcagagaaaggacaaggtgccattcaagtcctagggtgggcttccagctgccttaatagaagtactcaagtcttttgggtagtgagctggaaagcctacaggaaaagaggggtacctgttttcatttgaaaactttgattcatggaacctttaaaactaatctcagaaaaatttttggtgcccatgcagctgtagttgttcactgctttcctggatggatgggactcttatgtcataacttctgttactcctttggcccatagctaaggtcatccttccccacaggggtggctttgggattggatgatacagcttttgcttctgtgtagtatacctgtacatacttgtttcaggcagcctttctttaatgttttcagttggtttgtattctgtagctcagtagctgctaataaagttaaagatcctg

SEQ ID NO: 250658 - DNA, 427 bp, Homo Sapiens
  misc_feature (394)..(394): n is a, c, g, or t
acaggatctttaactttattagcagctactgagctacagaatacaaaccaactgaaaacattaaagaaaggctgcctgaaacaagtatgtacaggtatactacacagaagcaaaagctgtatcatccaatcccaaagccacccctgtgggaaaggatgaccttagctatgggccaaaggagtaacagaagttatgacataagagtcccatccatccagggaaagcagtgaacaactacagctgcatggggcaccaaaaatttttctgaggattaggttttaaagggttcccatggaatcaaagttttttcaaatggaaaacagggtaccccctcttttcctgtaggggcttttccaggcttcacttaccccaaagggctttgaggtactttctntttaggggcagctggggaggcccaccctggggc

SEQ ID NO: 250659 - DNA, 637 bp, Homo Sapiens
agagttagagagtgttctctctgatgtcatggccacacagaagaagaaggcaaaccagttgtccagccgcagcaaagcacatacggagtggaagttagagcagtccatgcgggaccaggcactactgaaagtgcagctgacacagttgaaggagtcatttcaacaactccaattagaaagagatgagtgttctgaacatctaaaaggagagagggcccggtggcatcagaggatgagaaaaatgtcgcaggagatttgcacattaaagaaagagaagcagcaagatatgcatcgggtagaggagctggagaggagcttgtccaaactcaaaaaccagatggctgaaccactgcccccggagcccccagcagtgccctctgaggtggagctgcaacacctgaggaaggaactagagagagtggcaggagagctccaggcccaggtcaaaaacaatcagcgcataagtctcctgaaccagcgacaaaaagagaggattcacgagcaggaagagaggcttcagaagcaggaggagaggattcaggagcagcacaagagccttcagcagctggccaagccacagagcgtcttcgaggagccgaacaatgagaacaagaccgcactgcagttggagcagcaa

SEQ ID NO: 250660 - DNA, 960 bp, Homo Sapiens
  misc_feature (451)..(451): n is a, c, g, or t
  misc_feature (808)..(822): n is a, c, g, or t
ctaatcgaggattgattctaatgacagagtctttcaacactttgcacatgatgtatcacgaagctacagcttgccatgtgactggagatttagtagaacttctgtcaatatttctttcggttttgaagtctacacgcccttatcttcagagaaaagatgtgaaacaagcattaatccagtggcaggagcgaattgaatttgcccataaactgttaactcttcttaattcctatagtcctccagaacttagaaatgcctgtatagatgtcctcaaggaacttgtacttttgagtccccatgattttcttcatactctggttccctttctacaacacaaccattgtacttaccatcacagtaatataccaatgtctcttggaccttatttcccttgtcgagaaaatatcaagctaataggagggaaaagcaatattcggcctccgcgccctgnaactcaatatgtggcctcttgcccacaatggtggaaaccagtaaggtatgttgggatgccaggaaaatccatgttgctatagtacaaagtaatttgaaatttttcccctggcagttatgaataggttagacttaagtgaccaattttgtggatcctaagaagattagattcatttggactttttccttttagtgctctgaaatgttggttgaacatttgcaaaaatcaacaataagcgcaagtagtaagttttttttccccctcaaaaattaccttaatagtaagtcttaatatttgtcactaagctaaattataactgggtcatatatctaaatttgaaaagtcattaggtactgnnnnnnnnnnnnnnnaatttggccatataatcaatgacttcttctacttcccttaaattatattcctttgacctaagcataatattgattgatagatttgtcatcattttttagtctggttcctttcttctaactcatattctaaaataatgc

SEQ ID NO: 250661 - DNA, 926 bp, Homo Sapiens
ggacagaagcggcacagctaaggcagttctacgtggctgctcagggcatcagttggagctaccgacctgagcccacaaactcaagtttgaatctttctgtaacttcctttaagaaaagtgtctacagagagtatgaaccatattttaagaaaggaaaaccacaatctaccatttcaggacttcttgggcctactttatatgctgaagtcggagacatcataaaagttcactttaaaaataaggcacataagcccttgagcatccatcctcaaggaattaggtacagtaaattgtcagaaggtgcttcttaccttgaccacacattccctgcagagaagatggacgacgctgtggctccaggccgagaatacacctatgaatggagtatcagtgaggacagtggacccacccatgatgaccctccaggcctcacacacatctattactcccatgaaaatctgatcgaggatttcaactctgggctgattgggcccctgcttatctgtaaaaaagggaccctaactgagggtgggacacagaagacgtttgacaagcaaatcgtgctactatttgctgtgtttgatgaaagcaagagctggagccagtcatcatccctaatctacacagtaaatggatatgtgaatgggacaatgcaagatataacagttgctgcccatgaccacatcagctggcatctcctgggaatgagctcggggccagaattattctccatctcatttcaacgcccaggtcctgcagcagaaccatcataaggtctcagccatcaccctcgtcagtgctacatccactaccgcaaatatgactgtggccccagaggcaaagtcgaccataccttctcccaccccaaaacatttccaagccccgatgcaggcttacattgacattaaaaactcgcgccaaagcaa

SEQ ID NO: 250662 - DNA, 1916 bp, Homo Sapiens
  misc_feature (424)..(424): n is a, c, g, or t
ggtcagagtacctcagagcaccccactgctcaggggctccttctggctgcagtaagctccctggatggtcacagtgccgccccatccccaggctgtgtgctcaaagcggacaaaactcaggccagagccacagctgggagacctgcactgtccctgcgaaatactaagaacacctagggtgtgctcactgtgggggccagtttctcctcggaacatgacaatgaagctcttttagagaaaagacctttgtagattcaacaattatgataggatttttacagacacctattttgggctcagttttcatcattaccattaaatgcattggatagaaggggactgttcttcacacatcatattataggaagacataattccagtgcctttatggtggagcagaattcgacaacacatgtccattcanccctctgaatggatctgagacgaagacctttttaaagatatgtctgtattgaagagaaagccagttttgagttttttacacttgcacatcattatctgtgccgtcctgactagaaggttgtctgggcccccaaattccaagtcccagtatagccagggctcccattttgtttttccagagttcgtggaggtggactgcagagcccagagcccttcatctctctgagggtcaaggataccaggggtcccaagtcacagatagacattccagtttgtattcttaggaatcattcttaggcagtgcggcagaagcaggcctctgtgaagtgtctgccgggtagtaggccttgaagtcctggggctctccaggcagtggggttatgtgtcgactgaagggtgatgtgcagaagagcttggagagtggatcagagagactaggacagttactgcagagctcctaagtcaccactcaaccagtggctgtttcacaaggatttgagggcacttgcctgtcttgtgaggtctgtgccacaaggtgagtctgaactgactgctccagctaagtgatcaggcacgttgagagtatacggtgtcctcagcacatacacctgtgggaaaacggaccgctcttggctcctgactcccagggtacagcgcccagtaactcatccttcattcagaggtttgctggccttcccggtttcccaaggagcaagacctctgtccgccctttggcccggcctctgctctgactcctttttttacataagaaccaatctgtgtttcacattgggctaagtggattccttatccctttgttatatatattttttgcaacttggatttccagtttgtttacagagtagtcttaggtagtagcaaaagagccaaagaagagatttgtattgctgagctcaaagccaagcagaggccggcagtggaggctgagcagggactctccaggcttctctgcccataaacacccgggtcccaggccctccttcctttccctttggtgctccctcctccccatgtaccattgcgcgtgcagctggagcagaataccctcatttttaggaatctagtgatgcctcttgcctcagggaaacgtttctttgatggggagtttgagatttcttttccttgtttatgctttatttgtggtaatgaaagagcgaatgactgaacagccatggcaaggcagacctacaggcgaggccgcagcagagggtggggcagagcagcctcggggtctgggggctgcaggggttttccctggcgcagcgaaagtctctgagcacttaccgggcgtgaccgtttcttaggtgtgagaggggctgtggcttttgtgcagcgactatgttggtgttaggggtggtgtggagattgttaatcttgtataaagcaattcaataaattgtttcaaggtttccaaaacattttttatcactcttttctttctaccatgtggaagtaagtagttcttcacccca

SEQ ID NO: 250663 - DNA, 414 bp, Homo Sapiens
  misc_feature (19)..(19): n is a, c, g, or t
  misc_feature (27)..(27): n is a, c, g, or t
  misc_feature (40)..(40): n is a, c, g, or t
ccattgccccgtgcaaccnggaaccanaaaaccccctcanttttaggaacccaagtgaatgcccccctgccctcaggaaaaccgtttcctttgatggggagtttgagatttcctttccccttgtttatgcctttatttgtggtaatgaaagagccgaatgactgaaccagcccatggcaaggcagacctaacaggcgaggccgcagcagagggtggggcagagcagcctcggggtctgggggctgcaggggtttccctggcgcagcgaaagtctctgagcacttaccgggcgtgaccgtttcttaggtgtgagaggggctgtggcttttgtgcagcgactatgttggtgttaggggtggtgtggagattgttaatcttgtataaagcaattcaataaattgtttcaaggtttcc

SEQ ID NO: 250664 - DNA, 817 bp, Homo Sapiens
  misc_feature (664)..(688): n is a, c, g, or t
  misc_feature (774)..(774): n is a, c, g, or t
  misc_feature (780)..(780): n is a, c, g, or t
  misc_feature (800)..(800): n is a, c, g, or t
ggggcagaaagtcttgggggacattatagtaaacttttagaataaatttgaggggtatgtctgaacagtaaatctggaagtggaaggtattattcccaggagtgtaccttttttgttcattcacctacttccaaaatgagatggagaaaaaacgtatggagtagagaatttataaatatctcacaaatatactctctatgctcttctatgtcatcctgttgcaagtcctagcaaaatgctacatgacactaaaaaagtgacttccttctctgagctataattttctcaccattaaattgagagaagttagaagaattatttataatagacctcaaaggcaaaagttctgtaattctaagaaatctaactgtagggaccagccccacagggttggtgggtctctccctgtgtccagagatgagagcatgtagaaataaagacacaagacaaagagataaaagaaaaggcagctgggcccaagagaccactaccaccaatgcgcagagaccggtagtggccccgaatgtctggctgcactgttatttattggatacaaagcaaaaggggcagggtaaagagtgtgagtcatctccaatgataggtaaggtcacgtggatcacgtgtccactggacagggtgcccttccctgcctggcagccgaggnnnnnnnnnnnnnnnnnnnnnnnnnaagacagcttatgccattacttctgcatatcagagacttttagtactttcactaatttactactgctatctaggaagggcagagcnggggtntacagggatggggaacctgnaagggccggacttgggg

SEQ ID NO: 250665 - DNA, 1364 bp, Homo Sapiens
  misc_feature (1160)..(1160): n is a, c, g, or t
  misc_feature (1292)..(1292): n is a, c, g, or t
gaccgttcgagggtttgatcgccagcgcagcctcgccctgcccagacagctgggccctaaggggatagccagcgcctttagacttatcttaaatcgggcatctgcatcaacacttatttctggggtcctccatggaaagcagctcccgaaacaacacccgcccggtccgccctccgctgcactggaaaaccgcccctggacgtttctgccgcagtgtccccctcacggagttctcgtttgtccgcttggtcggttgttctctggagccccaggacccaggccgcttgtatgtgcctgcggccgcacggccccaacacgcggacttcgagcggtaccgggagacccgcgcggcctcctcggagtggacagtgaagcagcagctgggctaggcagtggggctgggcctgcccatggggacccgtccacgtctccaggacatcagcctgagcctcttcgcagcctcgttttctgttgaccgagttctgcaaggggacgtagaggaaccacagcgttcttgcgcttgagaccgctgtgattttctgacattttggaggcagaaatgcctggggaaaggcccacagatgcaactgtcatccctagtgccaaaagggaacggaaagcgattacccttgacctcaaattggaagtgttacgacgatttgaagcgggtgagaagctcagtcagatcgcaaaggccttagatcttgctatctctacagtggcgaccattcgagatagtaaagaaaaaatcaaagcgagttcacaaatagctactcctctgagagcctctcggttgactcgccatcgaagtgcagtgatggagagcatggagcagctgctgagcttgtggctggaagaccagagccagccaaatgcgaccttgagcgccgccatcgttcaggagaaggctgagtttgatgacttacagcgtgaacatggcgaaggttctcaaacggagaggtttcatgcaagtcaagggtggcttgtgagattcaaggagtgccactgtttgccccacttcaagatgaaaagcgcagctcccagcaacaaggacatgtacacagaaatgctgaaaagcatcatccgaaaaaggtgaatacacccccccaggtgtcttttaacgtagatgaaaacagacttgatttggaagagatgcccanaggaacgtttatttccgaggaagagatgctgagcccaggggttagtcatccaaagatcgcttgatgctgcttgcttgggggcagtgccacttggggacttttaagtgaagcccttactggtgtacccctcanaaaccgcaagggttctgaaaggttcttgaaccccacttggcccggaattgccgctccaccaaaaagcttggg

SEQ ID NO: 250666 - DNA, 809 bp, Homo Sapiens; identical to SEQ ID NO: 170332

SEQ ID NO: 250667 - DNA, 840 bp, Homo Sapiens; identical to SEQ ID NO: 170333

SEQ ID NO: 250668 - DNA, 1153 bp, Homo Sapiens
ggagtcacgtggcagccggaaagcgtggcggctgctgctagagcctttccctttaccgcacccaaggagctggagcgacaacaacgacgtcgtttccgtttccaccacctcttcctgttcccgtccttgaggacgccgtgccgggtcagtgttagcctccagccctggttgtggaaggcgacagaagtcatggcgatgtttgagcagatgagagccaacgtgggcaagttgctcaagggtatcgacaggtacaatcctgagaacctggccaccctggagcgctatgtagagacgcaggccaaggaaaatgcctatgatctggaagccaacctggctgtcctgaagctgtaccagttcaacccagccttctttcagaccacggtcaccgcccagatcctgctgaaggccctcaccaacttgccgcacacagacttcaccctgtgcaagtgcatgatcgaccaggcacatcaagaagaacggccaatccgacagattttgtacctcggggacctgctggagacctgccatttccaggccttctggcaagccctggatgaaaacatggacctcttggaaggtataactggctttgaagactctgtccgaaagtttatctgccatgttgtgggtatcacttaccagcacattgaccgctggctgctggccgagatgctcggggatctgtcggacagccagctaaaggtgtggatgagcaaatacggctggagtgccgacgagtcggggcagatcttcatctgtagccaagaagagagcattaaacccaagaacattgtggagaagattgactttgacagtgtgtccagcatcatggcctcctcccagtaacttcaggtgtttaataaagatgtgttggctccgaacacaaaaacaaaaggggggccgacaaagtactgcgaggggccaagctcagcggaccagctctgggacaagggccttaagggcgataaacaaggaggacgggttaaacaccggaggggaacgtacggaacctggagacctctcccggggacagggccacacacacgaagccggcatcactagctagcacacactcgccccaggacgctgacacacgaccccaacctcaaacgcagtccctgaagacatacccaacctcacgtcccaccacata

SEQ ID NO: 250669 - DNA, 661 bp, Homo Sapiens
gtaaagtatctagaagatttgaataaatattaacagattggattcactgaccttgttacaagaaagaattatacatgatgataggagagaggaagccacagcacaggcacttactgattaactaaattttgaagctgtgaaatgcaccttatcctttagtgaaagatgatataaatagcttagttgccttcaaactggcagagactttttgaatggatggatgctgattttttaaaaaggagcccatttctgaggcatcttttaaagcaggggtcctcaacccctgggccatagactgatactgtccagtggcctgttaggaaatgggcagaacagtaggaggtgagcagccaagcattactgcctgagctcccacctcctgtcagattagtggcagcattagattctcataggagcagaaaccctattgtgaactgtgcatacgagggatctaggttgcatgctccctatgagaatctaatgactgatgatctgagtggaacagttccatctcaaaaccatttccctgcaccctccattcacggaaaaattgtcttccacaaaaccagtcccaggtgctaaaaagggactactgttgtaaaggaataagtccctttgctattattatttttattaagatggagccagtctccgtctatta

SEQ ID NO: 250670 - DNA, 878 bp, Homo Sapiens
gcagtactcctacggtttaggtagcgaggcctgggtggcgaattcggcacgatgcatcactgtaagcgataccgctcccctgaaccagacccgtacctgagctaccgatggaagaggaggaggtcctacagtcgggaacatgaagggagactgcgatacccgtcccgaagggagcctcccccacgaagatctcggtccagaagccatgaccgcctgccctaccagaggaggtaccgggagcgccgtgacagcgatacataccggtgtgaagagcggagcccatcctttggagaggactactatggaccttcacgttctcgtcatcgtcggcgatcgcgggagagggggccataccggacccgcaagcatgcccaccactgccacaaacgccgcaccaggtcttgtagcagcgcctcctcgagaagccaacagagcagtaagcgcagcagccggagtgtggaagatgacaaggagggtcacctggtgtgccggatcggcgattggctccaagagcgatatgagattgtggggaacctgggtgaaggcacctttggcaaggtggtggagtgcttggaccatgccagagggaagtctcaggttgccctgaagatcatccgcaacgtgggcaagtaccgggaggctgcccggctagaaatcaacgtgctcaaaaaaatcaaggagaaggacaaagaaaacaagttcctgtgtgtcttgatgtctgactggttcaacttccacggtcacatgtgcatcgcctttgagctcctgggcaagaacacctttgagttcctgaaggagaataacttccagccttaccccctaccacatgtcccgcacatggcctacacagtctgccacgccgagccctatgcagtctg

SEQ ID NO: 250671 - DNA, 990 bp, Homo Sapiens
aggtgtgtcttcacctgacttctcctccacagcttctggtgctccatggtagagggttttcaaacctcaggaattcacaaccagggaggtctctggtttccaagtctgtaggggtcagctgattctcatgcagaaatctaagggcctggcagagctggtaggccatgtgccggacatgtggtagggggtaaggctggaagttattctccttcaggaactcaaaggtgttcttgcccaggagctcaaaggcgatgcacatgtgaccgtggaagttgaaccagtcagacatcaagacacacaggaacttgttttctttgtccttctccttgatttttttgagcacgttgatttctagccgggcagcctcccggtacttgcccacgttgcggatgatcttcagggcaacctgagacttccctctggcatggtccaagcactccaccaccttgccaaaggtgccttcacccaggttccccacaatctcatatcgctcttggagccaatcgccgatccggcacaccaggtgaccctccttgtcatcttccacactccggctgctgcgcttactgctctgttggcttctcgaggaggcgctgctacaagacctggtgcggcgtttgtggcagtggtgggcatgcttgcgggtccggtatggccccctctcccgcgatcgccgacgatgacgagaacgtgaaggtccatagtagtcctctccaaaggatgggctccgctcttcacaccggtatgtatcgctgtcacggcgctcccggtacctcctctggtagggcaggcggtcatggcttctggaccgagatcttcgtgggggaggctcccttcgggacgggtatcgcagtctcccttcatgttcccgactgtaggacctcctcctcttccatcggtagctcaggtacgggtctggttcaggggagcggtatcgcttacagtgatgcctcgtctcccaggctccggctgcagctaggccccactccc

SEQ ID NO: 250672 - DNA, 936 bp, Homo Sapiens
gtagcgaggcctgggtggcgaattcggcacgagggcggcgacagcggcggcggcggccggggatgcatcactgtaagcgataccgctcccctgaaccagacccgtacctgagctaccgatggaagaggaggaggtcctacagtcgggaacatgaagggagactgcgatacccgtcccgaagggagcctcccccacgaagatctcggtccagaagccatgaccgcctgccctaccagaggaggtaccgggagcgccgtgacagcgatacataccggtgtgaagagcggagcccatcctttggagaggactactatggaccttcacgttctcgtcatcgtcggcgatcgcgggagagggggccataccggacccgcaagcatgcccaccactgccacaaacgccgcaccaggtcttgtagcagcgcctcctcgagaagccaacagagcagtaagcgcagcagccggagtgtggaagatgacaaggagggtcacctggtgtgccggatcggcgattggctccaagagcgatatgagattgtggggggaacctgggtgaaggcacctttggcaagggtggtggagtgcttggaacatgccagagggaagtctcaggttgcccctgaagatcatccgcaacgtgggcaagtaccgggaagctgcccggctagaaatcaacgtgctcaaaaaaaccaaggagaaggacaaagaaaacaagttcctggggtgtcttgatggctgactggttcaacttccacggtcacatgggcatcgcctttgagctcctgggcaagaacacctttgagtttcctgaaggagaataacttccagccttaccccctaccacatgtcccggcacatgggcctacccagctctgccaccgcccctttagattttcctgcctgaagaaattcagctggaccccatacaggactttga

SEQ ID NO: 250673 - DNA, 622 bp, Homo Sapiens
tggcggtcccttgtgtggggaagctgttgctgttgctagacgacgggaactagctctcgtcacttcctcagcccgccgtctgcccactcctctagccggaacctgggggcccggagccggggtaggcacagagttgtcctcggaggtccaggacagcggccagcccggcggcgggagtcagggccacgccacctgcagggaagaacccgagtcgaagcgggaagatggctgcagacaagcctgcagatcagggagcagagaaacatgaaggcacaggtcagtcctctgggatcactgatcaagagaaggagttatccaccaatgctttccaagctttcacatctggaaattatgatgcctgtctacaacaccttgcctgtctacaagatataaacaaagatgattataaaataattttgaatacagcagtagctgagttttttaaaagtaaccaaacaacaacagataatttgagacaaacacttaaccagctgaagaatcaggtccactcagctgttgaagaaatggatggattagatgatgttgaaaacagcatgttgtactataatcaagcagtcattctttatcatctgcggcagtatacagaagccatatcagttgg

SEQ ID NO: 250674 - DNA, 890 bp, Homo Sapiens
  misc_feature (740)..(740): n is a, c, g, or t
  misc_feature (808)..(808): n is a, c, g, or t
ctcacgtggattatccgtaagattagcctttccctgcaggggctgtgtggaaggattatatgcccaactactacataaaggcagaacactgctgatgtgactagaaggatccttaagtgtgacttttgttttttaatctgttgaggctgtatttctttttccctccaggagcacacatctctgaaataattttagaaacaaaagggggaaatggcttgatggcaaattcttcctttacacacaacttttcaggaacgcgccaaatgcatcaagggaggctgggctgtactcagaggctctctctctggcatggattctgtgatgcagagtgagggtggagctgcgggtgaaggccttgccacacttagtgcacttgtagggcttttctcgagtgtgaattctccgatgcaaaatcaggtatgagtttcggttgaaagcttttccacattcactacattcatagggtttctcccccgtgtgaattctctgatgcttggtgaggtccgagctctggctgaaggccttcccgcactcattacattcataaggtttctctccagagtggatgcgctgatggaggatgagattggaactgtggctgaaggccttgccacactcgttacattcatgaggtttctctcctgtgtgggatcctctgatgcaggacaaggttgggagttaagacttgaaggctttcccacacttcacttacatttcataggggcttttcttccagtgtngggattattttatgggcgggataaggctttgaactttcttcgtggaagcattttacccacatttcatncacatcttgttgaggacttttgtttcccgtgggggacctttctttcaagggggtgggtgaagttggggagcttcaagacttt

SEQ ID NO: 250675 - DNA, 804 bp, Homo Sapiens
  misc_feature (40)..(40): n is a, c, g, or t
  misc_feature (55)..(55): n is a, c, g, or t
  misc_feature (67)..(67): n is a, c, g, or t
  misc_feature (82)..(82): n is a, c, g, or t
tcccagctgcctaaatttttagttttatgttaatgcccanccaaaatagaacccntagcccaaaaanggaagtgccatgccnagaactcctaaaacacactcaagccaaattaagtgttagcccattgtggaaaggcagtgccagagattcctcccaaagattaaaaatagaactaccctgcgatccagccaaccccattaccgggtataactgacaggaaatgaactcatctgccgacgagacatctgcagcccgcgttcaccacagcgccattccccaaaagcacagctgtggaatcagcctgagcgcgcaccgatggatgagtggatagagaaaatgcggtgcacacacagtggagaactatgcagccttaggaaagaaggaaattctgccatttgcaacaatacggatgaacctacatgaacatcttaaagggaaataagccaggcagagaaagacaaataccgcatggtctgattcgtctgtggaatcttgaaaaggtgatcttgtggaagcagagagtgcgatggtgactaccaggggctggtgggtggggagattgttggtcaaaggccacaaaagaagtaagttcaacagctccagtgcatgacatggtgactgtagttaatataggaaaattgctaagagagtagattttaagtgctcttaccacacacaaataataggcgtgtggggtaaggcacgcacatgtgaatagcttgacttagccattccactgtgacacacatatcgaaatgtcatgttggacaccatcagtatatagaatttttatttgtcaacac

SEQ ID NO: 250676 - DNA, 1265 bp, Homo Sapiens
  misc_feature (147)..(147): n is a, c, g, or t
  misc_feature (157)..(157): n is a, c, g, or t
  misc_feature (184)..(184): n is a, c, g, or t
  misc_feature (952)..(978): n is a, c, g, or t
aaaattatggtaatgttagctttctctgaaagtactgagagcaattaagtaaatttataacttacttatgtagtactaaaaggatccaactgacagcctagcatagtatatttctaacattattcaaagtaaaatgggataaaattntgagatattntagatcataattctacagtttgctganatttattcttaccaaattttgtctagttttctagttcaaattaaaatgagggagggttttgacaattagaatttgtgatattcagctatatttagcgagccaaaagtcagctgaatgacagtaaagatctttgtgactggactatccagatattaagagattcttatggccagtcctgcttcaacatttccagcttcattcaatttctgaaagtcaattatatggcagggaagtgctcaaagagtccaaggaccgggtgtgaaaagcagtttggcagagaaaagggagacatatgcaggaaaacatggagcacaaaaatatctaaaaccttcttttcaaaaccatttctatgcattactattttcctttaaatcccaagttgacatttctgttttagcttcacaagtttggtatccagaggttctgaagttatctgtttggttcagatatcagccttctcatgtggcaaatgaagcactggaatttctaaggcctgttccaactctaatattccacaagtttgggaaagattcacttttattttactgcaacttctcacctgggtagtaagtataaattctgaaagctttcctggagactcagaagttaaaattaatttagaatacctgatcaacttgagaatattcaatgaaaacatcccactaacttcagattcataagcatactaagtgattaactgattttaaagcactctatgatctaggttcttcttaagaaaacatcctctgcacacatatacaaatacannnnnnnnnnnnnnnnnnnnnnnnnnnatccattcacctttactgtaatataaaaacttgagaagaggaataagtcgctagaataaagctgcacagaccttgattgagttaatcattaaaatatatgtcctacctcaaaactgttttgcttattctaatttattcttcttaaccagaaatccaggaaggagaatgagagaagaggaaaagcaaagaagagctctctttttctattctgtcaataagaaaggtgagggaatagtttcttaagaaaaaagtattggaatagagacccaggaagttctgattcaaga

SEQ ID NO: 250677 - DNA, 741 bp, Homo Sapiens
  misc_feature (73)..(73): n is a, c, g, or t
  misc_feature (124)..(124): n is a, c, g, or t
  misc_feature (168)..(168): n is a, c, g, or t
ccatgtcacatcacacaagtagtgatcccctaccaacatagaagcaggagcagtgattgtatgggaagtgcanttggtgactgagctgagagagtctgtattacaaccaaagaactttacagtnggattcacagctcctgcctttggatatggaacccgtacggtctntgggtactgcagtgactcatcagagtagaaggagtattcaataagtgggacttctgtgtcgttaaattgggcatatgctaaaaaagtgccgtttggagaccaccacagagcagagtaggcactgaagacttcctcttcataaacccagtcagttattccattatatattatatcttctttccccgtccatgtgattctgtaacttggtaaatttggttcaattttaacataaatgtcattgttccaaacatatgccaatttatgacccactggtgaccatgtgacccactgtgtgttgtttggaatcctctcttctgtaatcagctgccttttatttaaatcataaatgtcatatgaagctgtgtaggaatgcctccattgcttcacgtagttgtattctaagacaataaactgcccatcaggagatattgaataatcattgatagaatgtccaaactcatcaaatgtactgttctccaagaaaactgagctgtttccatattcagcattgataccaagatattattttcttgtttgtagagatattcatgatctgaaatccatcttaaggag

SEQ ID NO: 250678 - DNA, 743 bp, Homo Sapiens
  misc_feature (634)..(634): n is a, c, g, or t
  misc_feature (638)..(679): n is a, c, g, or t
gggattaacttggaagtggcactgccatgtaacaatagcataattccagtttgttctacttaccaggcttgccctccatgaaaatatacaattgtagataatcttttttaattggagagatttcctcttatgtccaattttatacataaagtaagacttttttattgtgtgcctaaatttgtgtaaatatgactgcatcgtattagtaaactgaattaggtagtgcgttcacataaaatttaacatcaccaagaaggctttaccttaagaatgtaatgatgaatcaccattttagatagactgataggtaatttattaactgatttaaaagagaaaagacctatatcatctcagtgagtaccaaaaagcatttaataaaattcaatactcattcctaaagttccaagcaaactagaaagataaggaaaattcccacaaaactacagcaaacatcattcttgatggtgaagcattggctgcatttgcattaatgctcagaacaggaagaaaatacccaacaccacaaccatcagtaatctactagagttcttagtaattcagtaaaacgagaaaaagaaatgtgagatagaaaagaaagagacaaaactgtcattagagaagcaggcactggctncatnnnnnnnnnnnnnnnnnnnnnnnnnnnnnnnnnnnnnnnnnnggctgaactcctaaacctcctgtgctcagaggtccttccactcagccttccgagcagctaggac

SEQ ID NO: 250679 - DNA, 964 bp, Homo Sapiens
  misc_feature (469)..(477): n is a, c, g, or t
  misc_feature (503)..(515): n is a, c, g, or t
caccccaaagccctggtaaccactattctactttctgtctctgtgaatctgtctattctagatacctcatagaagtggaatcgtacattatttgtccttttgtgtctggcttattttactcagcatattttcaagattcatttgtgttgtgggatgtagcagaatgtcattcctttctaaggctgagtagcattgtatgtattatccatttatctgttacggacatttgactattgtgaataatgctgttgtgaacattggtggacaaggaactgaaagtccctgcttttcattctttttggcataaacctacaagaggaattgctgggtcttaacggtaattctgtgtttaatttttggacgaactgccagactgtttccacagcagttgtactattttacatccccaccagcgttacacaaggattccaatttctctacatccttgccaacatttgctattttctannnnnnnnnaataatatccatcctaatgggtgtcnnnnnnnnnnnnnaaaggaatggtttaaacaggttaccttcttactcctcattcatgctttagttgactacataaggacccctctccctattggcaccattgaaattgttcaggcaaaaataactgccagcgacacactgctttaagtaatggacttttcccaagttttgtattaatatttcagtatttggtagtgcatcctactgctagtttttaaactcttcccttgtcatctatcatctcattctctcttgacaaatgtgaaaatggaagctcagaaataaaacaagaattaaaacgaatagtgatccttcaggtaacaagcttcatttatcatgaaaacatatatgtatgaaacattctgttttctgatgttattggataaattaggtgataaccaaattctaagttccaaaaattaaatatactctatctaaggactttaacatggcagacaatggt

SEQ ID NO: 250680 - DNA, 537 bp, Homo Sapiens
gacatagagagcgagaggtatatgcagtcctttgacgtggaacggctcaccaacatccttgatggaggtgcccagaacactgcactccgcaggaaagttgagagcatcatccacagttacccggagtttagctgtaaggacaattatttcatgacccagaatgagcgttataaggctgccatgcggagggcattccacatccggttgatagctcggcgcctgggttggttagaagatggtcgtgaattaggctacgcttacagagccctttctggagacgtggccttaaatatacacagagtcttcgtgagagccctcaggagcctgggctcagaggagcagattgccaaatgggacccactctgcaaaaacatccagatcatcgcaacgtatgcacagacagagttgggacatgggacatatcttcagggcctggagactgaagccacctatgacgcacccccccaggagtttgtgatacacagccccacgcttgctgccacaattattttttgacccggcgggcctccctctttt

SEQ ID NO: 250681 - DNA, 1232 bp, Homo Sapiens
  misc_feature (1066)..(1066): n is a, c, g, or t
  misc_feature (1096)..(1096): n is a, c, g, or t
  misc_feature (1108)..(1108): n is a, c, g, or t
  misc_feature (1191)..(1191): n is a, c, g, or t
ccggggagaggccagcccggcctacagtgcggacacaggacagaggggagccaggttctttgcactgaccaatgctgagagcagaccctcggagcagccgggttggaagtgtctctccacagtcaccagacagatccacgataggatgggcagcccagtgcaccgagtgtcattgggggatacctggagcaggcaaatgcaccccgacatagagagcgagaggtatatgcagtcctttgacgtggaacggctcaccaacatccttgatggaagtgcccagaacactgcactccgcaggaaagttgatccatgaagcaagtgggtgagaagatttgaagagccctttctggagacatggccttaaatatacacagagtcttcgtgagagccctcaggagcctgggctcagaggagcagattgccaaatgggacccactctgcaatcttcagggcctggagactgaagccacctatgacgcagccacccaggagtttgtgatacacagacccacgctgactggcaccaaatggtggcctggagacttgggacggtcagccacccatgccctggtccaggcccagctgatctgctcaggagccaggcggggcatgcacgcttttattgtgccaatccggagtcttcaggaccacaccccactgccaggaatcatcattggggacatcggacccaagatggactttgatcaaacagacaatggcttcctgcagctgaaccatgtgcagggccccagggagaacatgctgagtcgctttgcacaggtcttgccagatggcacctacgtcaaactcggtacagcacagagcaactaccttcccatggtggtggtgcgggtggagctgctgtcaggggagatcctccctatactgcagaaggcctgtgtcatcgccatgccctactcggtcatccgccgccaatcccggctccggcccagtgacccagaggcaaaggtcctgggactaccagacacaacagcagaaactctttcctcagctggccatcagttatgccttccatttcctggcagtcagcctcttggagttcttncagcactcctacactggcattctgaaccangacttcagcttnctgcctgagctccacgcgctgagcacgggcattgaagccatgatgtcagaattctgcacccagggagctgagatgtggcgcanggccttgtgcggaccatgctacttaaggtgagtggcctgcc

SEQ ID NO: 250682 - DNA, 939 bp, Homo Sapiens
  misc_feature (915)..(915): n is a, c, g, or t
  misc_feature (922)..(922): n is a, c, g, or t
tggaattctataagcctcccttaacaaggggcagtacccaccaacaaatgtgtcagtattcctgcagtgaaatgtgtggatgttcatgttagatgggatttttaaaggattatcaatggcctcatgtcagttcaagttttgcaatgagttctaaggaactgtctgtttttaaggtttttatggtgtcggggataggggaaggtggacacaacaggtagtgatctaaatcttctggttcttttcccttcagtgacccagaggcaaaggtcctggactaccagacacaacagcagaaactctttcctcagctggccatcagttatgccttccatttcctgggcagtcagcctcttggagttcttccagcactcctacactgccattctgaaccaagacttcagcttcctgcctgagctccacgcgctgagcacgggcatgaaggccatgatgtcagaattctgcacccagggagctgagatgtgccgcagggcctgtggcggacatggctactcaaagctgagtggcctgccatcactggtcaccaaattgtcggcctcctgcacctacgagggtgagaacacagtgctctacctgcaggtggccaggttcctggtgaagagctacctgcagactcagatgtcccctggctccacgccacagagatctctctctccatctgtcgcatatctcaccgcacctgacctggccaggtgtccagcccagagggggcgcgacttcctctgaccggagctctacaccacggcctgggcacatgtggcagtaaggctcatgaaaggactcagtgcagcatttacagaccctgacgcaatccggagctgaccagcacgaggcttggaaccagaccactgtcatacacctccaggctgctaaggtgcactgctactatgtcactgngaagggntttacagaagctctgga

SEQ ID NO: 250683 - DNA, 1414 bp, Homo Sapiens
  misc_feature (1066)..(1134): n is a, c, g, or t
  misc_feature (1138)..(1138): n is a, c, g, or t
  misc_feature (1150)..(1228): n is a, c, g, or t
  misc_feature (1230)..(1231): n is a, c, g, or t
  misc_feature (1236)..(1236): n is a, c, g, or t
  misc_feature (1238)..(1238): n is a, c, g, or t
  misc_feature (1244)..(1281): n is a, c, g, or t
  misc_feature (1307)..(1349): n is a, c, g, or t
gggagatgctcagtaagtggtgcacagggttggtccctatggtggaggccccctaacaccgcccaacccccctccatgttctcacagctccacgcactgagcacgggcatgaaggccatgatgtcagaattctgcacccagggagctgagatgtgccgcagggcctgtggcggacatggctactcaaagctgagtggcctgccatcactggtcaccaaattgtcggcctcctgtacctacgagggtgagaacacagtgctctacctgcaggtggccaggttcctggtgaagagctacctgcagactcagatgtcccctggctccacgccacagagatctctctctccatctgtcgcatatctcaccgcacctgacctggccaggtgtccagcccagagggcagccgacttcctctgcccggagctctacaccacggcctgggcacatgtggcagtaaggctcataaaggactcagtgcagcatttacagaccctgacgcaatccggagctgaccagcacgaggcttggaaccagaccactgtcatacacctccaggctgctaaggtgcactgctactatgtcactgtgaagggttttacagaagctctggagaaactagaaaatgaaccagcgattcagcaggtgctcaagcgcctctgtgacctccatgccatacatggaatcttgactaactcgggtgactttctccatgacgccttcctgtctggtgcccaagtggacatggcaagaacagcctacctggacctgctccgcctgatccggaaggatgccatcctgttaactgatgcttttgacttcaccgatcagtgtttaaattcagcacttggctgttatgatggaaacgtctacgaacgcctgttccagtgggctcagaagtcaccaaccaatactcaggagaaccctgcctatgaggaatatataagaccacttttacaaagttggagatccaagctatgaaataaccaacagtattcaagaagcaaccagcaccatcatgtgataatggtactatggcatatatgcaacattaaaattttaaattagnnnnnnnnnnnnnnnnnnnnnnnnnnnnnnnnnnnnnnnnnnnnnnnnnnnnnnnnnnnnnnnnnnnnnaaanaacaacaccaannnnnnnnnnnnnnnnnnnnnnnnnnnnnnnnnnnnnnnnnnnnnnnnnnnnnnnnnnnnnnnnnnnnnnnnnnnnnnnanncccananacaaannnnnnnnnnnnnnnnnnnnnnnnnnnnnnnnnnnnnnaaaaaactttttttaacccctctctnnnnnnnnnnnnnnnnnnnnnnnnnnnnnnnnnnnnnnnnnnncatctttgtcgtttctccaaaaaacaacgcggccacaaaaagaaggggtggtttttttcccccac

SEQ ID NO: 250684 - DNA, 439 bp, Homo Sapiens
  misc_feature (13)..(13): n is a, c, g, or t
cgccctctgtgancctcccatgcccataccatggaaccttgacctaaactcgggtgaactttcctccccatgacgcccttccctgtctggtgcccccaagtggacatggcaagaacagccctaccctggaaccctgtccgccctgatcccggaaggatgcccatccctgttaactgatgccttttgacttcaccgatcagtgtttaaattcagcacttggctgttatgatggaaacgtctacgaacgcctgttccagtgggctcagaagtcaccaaccaatactcaggagaaccctgcctatgaggaatatataagaccacttttacaaagttggagatccaagctatgaaataaccaacagtattcaagaagcaaccagcaccatcatgtgataatggtactatggcatatatgcaacattaaaattttaaattagaa

SEQ ID NO: 250685 - DNA, 1172 bp, Homo Sapiens
  misc_feature (398)..(406): n is a, c, g, or t
  misc_feature (1159)..(1159): n is a, c, g, or t
ggacttttgggtggtggtagatttttaaacaaatgaaattaaagcaacaataattttgaagcatttgaaaaagccaaagtgtacggtagaaatttctacaaaatgaatattatcaagagtttcatgtgatcactgcagtgttgtcacagctcataaatagcaacagtgtttcatgatttaatggctcagaaatagttattcattagtttttaatttttaatttctaaggtacagagatctataaaaccttgattatttgttagttttgcaattcaaaacagctaatgtctggttatttctcaaagtaagtattttaaacagcctgttaattataagaaactcagaataatgagtgtaaatgtgttatgttatccacccaagtgtacatatgtacctannnnnnnnnaaaaagcagaaatagaaatacaagactggtaaacatgcctttaaaaatatatatattttcaactagtattgtctataatgctgaaatattacttattggtgatttttctgtttcacacactctaaaatataagtaaagccaaccttttttttaaggctgagattcccaaaatgagaatactactttataccatttgtttataagtaagaactgttcttataaatattaatatttacatattcactaatttaacataaatgaaaattaggattaaaaattgcaccaaagcatcggcaaaaacaatactatattctttaaaagtgctcaggtagccaaggcccttgcttttggtatcaaccctcatgaacccataggagctgaatatttgtttcactgcttaataatcctcaatttacactattcataactcttaaaattattctctttttttctaagagcccctcccttccaaaagtgtatttttttcaaagattttcacttctcaattgttgcctttgtacatactatagagtgttgcttgtaagaaaggctaatatggaaccaaactcttgtaagtaatgtaaatagaaaggtgggtggataaagttttcaatactttctactacctcagtttacttgagtactacattatagtttattctttgcttatctggtctaagagacttttaatgctagtagtaaagttgggttctgctttcattgactattttcatcataatttcatcattgatnaaaaaagaaaacc

SEQ ID NO: 250686 - DNA, 1369 bp, Homo Sapiens
  misc_feature (9)..(9): n is a, c, g, or t
  misc_feature (12)..(12): n is a, c, g, or t
  misc_feature (20)..(20): n is a, c, g, or t
  misc_feature (23)..(23): n is a, c, g, or t
  misc_feature (28)..(28): n is a, c, g, or t
  misc_feature (41)..(41): n is a, c, g, or t
  misc_feature (80)..(80): n is a, c, g, or t
  misc_feature (129)..(129): n is a, c, g, or t
  misc_feature (196)..(196): n is a, c, g, or t
  misc_feature (1257)..(1265): n is a, c, g, or t
gggcacatntcngacccgtnacnacaancaaaacgaaaacnacaaaggagtgggctagatgaatgctttgcacaaaatangcacatgtgttgaacaatggaattgttttctgtgaattctaacttctanaggcatgctttagaggtcaaggaccttcctgtgtagtgggtgcaaaagcaaatctccacaggacagnactgcttccatgcttcatacatcaggaaatgaggccagaacttgagtatttactaacacgtttttcaaaagatgtcagtgttatacctaaagctaaaaaaaagcaagggtttgtcatagagggaacctctaaataatttcaggggtaggggagatgttgtcaataggaaatgggataaaatatcaagagacaatgaaaacactgccttgacatgaggaccagcaagtttattcttttcattttcagtgatgttgggaatggactgggttttaaaagggagcttgaagagggaatgtttgacagtcacagaaggttcctgcagcagatgcctcttttagccatttctcatttttttcctcaaattttacctactgaggctcaagccttcacagtgagctgatggtctctacaggggaggggagtctagggaatttatttggtatttgtaaggcaagaggtgatttctctctaatatatctgagttattgctcatttaaaactgttaagtccagtataattttccctgatatgaaaaaatgtgcatttttttcacttagcaacaaagtaccttctaatttccaatagtccgtgaaagttggggctgaagtacctaagtgtgaatgtctctcccgttaaactgagtgtagaaatctgaatttttaaaagagctgtaactagttgtaagtgcttaggaagaaactttgcaaacatttaatgaggatacactgttcatttttaaaattccttcacactgtaatttaatgtgttttatattcttttgtagtaaaacaacataactcagatttctacaggagacagtggttttatttggattgtcttctgtaataggtttcaataaagctggatgaacttattcggcaaacaccgagcggcacccgtctatcactatgtcgggccgcctccggccctcgcggaaggtttcctaaacacatttcgtttgggcggcggcggcccccaggcgggtaaagtggaacctgcggccataggcgtgttctccacaaggagaaccctgggccctggaactaagggcctgggaaatnnnnnnnnnaataaagaataaccgcccgggggtgtgcaacacccgacgccgtgttctcggagaaacaaacccgccccacaaggggagttcgcctcggagaggtgcgtatttac

SEQ ID NO: 250687 - DNA, 1157 bp, Homo Sapiens
ggatccggtgggagggaacatctggaacattagacaggatgctgatcttctggacaatcacacttttcctgctggaagcagccaaaggaaaagaagtttgctatgaggacctcgggtgcttttctgacactgagccctggggcgggacagcaatcaggcccctgaaaattctcccctggagccctgagaagatcggcacccgcttcctgctgtacaccaatgaaaacccaaacaactttcaaattctcctcctctctgatccatcaacaattgaggcatcaaattttcaaatggacagaaagacccggttcatcatccatggcttcatagacaaaggagatgagagctgggtgacagacatgtgcaagaaactgttcgaggtggaggaggtgaactgcatctgcgtggactggaagaagggctcccaagccacctacacacaggctgccaacaacgtgcgagtggtgggcgcccaggtggcccagatgctcgacatcctcttggtgagtcagctggctggcctatgtgaggagggaagcagtgcctgctggtctctgtttggtagagatgcagctgagagttatggattaaagaaggacaaagaattgatatccagaccttacttctaaaactctgaaatttgccttcataatgacacgccagtggaagcaaaaataagaatcgctaacacttagaaagtggttttttaaaaatcatcttcaatttacagataaagaaactgaggcccagaaagtttaactagtttgctcccaaagtcataaagcaaatgaatagaagacctgccttttgatccagaccatctagcttcagaattcacccacaacaccaggtgggctctgtttcgcgtgaaacacagcatggccagagagagccacagagagccaacggacagtacgtgcaattggcatgtaccagctctactggcctggtggtatgggtcctattgatgttggggaattccttctgccacaatcatttcacttatttcttcctatactgtttcattatagctaactccttcagtctttaattctttaagttgctaatcctttgtgactattttctataccaggtaatgactacagccatttctgtcttatagttaaagggtctacaaaagaatcaacttctgcact

SEQ ID NO: 250688 - DNA, 554 bp, Homo Sapiens
ctctctggtttccttcaaccaaattcagtaaggttggttagtaagggaaaaacaattgcatcatgaaaagagtcctgttttgaaaaggaaaagtcttaggtgcaatctccggtggccagtgtctaaatgaccttgtggatttgactgtaaggggtcctttcaggctcttggcgatgccccaggctgcttgcacatgtctgtcacccagctctcatctcctttgtctatgaagccatggatgatgaaccgggtctttctgtccatttgaaaatttgatgcctcaattgttgatggatcagagaggaggagaatttgaaagttgtttgggttttcattggtgtacagcaggaagcgggtgccgatcttctcagggctccaggggagaattttcaggggcctgattgctgtcccgccccagggctcagtgtcagaaaagcacccgaggtcctcatagcaaacttcttttcctttggctgctcccagcaggaaaagtgtgattgtccagaagatcagcatcctgtctaatgttccagatgttccctcccaccggatcc

SEQ ID NO: 250689 - DNA, 725 bp, Homo Sapiens
tccccaatggaggagagagcatgccgggatgcaagaagaatgccctgtctcagatcgtggatctagatggcatctgggcgggaacccgggactttgtggcttgcaatcacctaagaagctacaagtattacttggaaagcatcctcaatcccgatgggtttgctgcatatccctgcacttcctacaagtcctttgagtctgacaagtgcttcccgtgtccagatcaaggatgcccacagatgggtcactatgctgataaatttgctggcaggacaagtgaagagcagcagaaattcttcttgaacacaggagaggctagcaatttcgctcgctggagatatggggtttccatcacactgtctggaagaacagccactggtcagatcaaagttgctttgtttggaaataagggaaacactcaccagtacagcatcttcagggggattctcaaaccaggctcaacccattcctatgagtttgatgcaaagctggatgttggaacaattgagaaagtcaagtttctttggaataacaatgtgataaatccaaccctccccaaagtgggtgccaccaagatcactgtgcaaaagggagaagagaagacagtgtacaacttctgtagcgaagacacagtgcgggaagacacgctgctcaccctcacgccctgataagcttcccggggcgacgaggctgctgcgttcacactaataaaatccactggtgcc

SEQ ID NO: 250690 - DNA, 577 bp, Homo Sapiens
ggtcacagggacagaccaacgtgttaacacaaagggagaacacgggagcatcctgcaccgtgcatttcagccacagatcacatggcccctccgcgggcccagcccacgccctgaccgcccggcctggccaggtctccgtatctctctgccccgccgccccttcccaactgcggacatgctgggtggatccggatcgcatggaagacgcagcctggccgcgctctcccaaatcgcctaccagaggaatgacgatgatgaagaggaggcagcccgggaacggcgccgccgagcccgacaggaacggctgcggcagaagcaggaggaagaatccttgggacaggtgaccgaccaggtggaggtgaatgcccagaacagtgtgcctgacgaggaggccaagacaaccaccacaaacactcaagtggaaggggatgatgaggccgcattcctggagcgcctggctcggcgtgaggaaagacgccaaaaacgccttcaggaggctctggagcggcagaaggagttcgacccaacaataacagatgcaagtctgtcgctcccaagcagaagaatgcaaaatgac

SEQ ID NO: 250691 - DNA, 841 bp, Homo Sapiens
  misc_feature (828)..(828): n is a, c, g, or t
attcggctgcctgcctgcccgcctgcttgctctctggctgtgctcctgcttaaagaaatcagtccttcctttccgacttagtcctcgggaagaagtttcagactacaaggtatcattggaacatttcaagatcatcaaatcaaattccacagggattggtgaccaaccagaaggctcagacatctgattgctgacctgtccagacatcatctggtctccctgaacctgaaatcacaccatggatgattttgagcgtcgcagagaacttagaaggcaaaagagggaggagatgcgactcgaagcagaaagaatcgcctaccagaggaatgacgatgatgaagaggaggcagcccgggaacggcgccgccgagcccgacaggaacggctgcggcagaagcaggaggaagaatccttgggacaggtgaccgaccaggtggaggtgaatgcccagaacagtgtgcctgacgaggaggccaagacaaccaccacaaacactcaagtggaaggggatgatgaggccgcattcctagagcgcctggctcggcgtgaggaaagacgccaaaaacgccttcaggaggctctggagcggcagaaggagttcgacccaacaataacagatgcaagtctgtcgctcccaagcagaagaatgcaaaatgacacagcagaaaatgaaactaccgagaaggaagaaaaaagtgaaagtcgccaagaaagatacgagatagaggaaacagaaacagtcaccaagtcctaccagaagattgattggagggatgctgaagaaaacaagaaagaagacaaggaaaaggaggaggaggaagaggagangccaaagcgaggg

SEQ ID NO: 250692 - DNA, 660 bp, Homo Sapiens
ttctcttttctaaggtttaaaaaaaatgacactgaaatcctgaataacaattataattaagaaaggtacacaagaacatgccaagaattcatcctatcagcagatatgctgggtagtaatgaagtttgcttatcggtagcactcttttaatcaagttttccattctgaagactatttttggctttctcttgtctgatgtgagagatgactttgatgcaaccttttgaaattttgatcatccacatgacattcatcacatccaaaacaacacaactaatgacccaggataactggattaaaactccaagccttatgtagggttctgttccatacacggaatacatgaagccataatgaggaagcattgaggcaatccgcacgatgaagaatactactgtcatgagtattccattgataacgatagctttagaaaacttgggatacttcagagcttcaaagaaccaccgctgattcacaaacgggctggaaagctctgcaagcaggcgaaaattcccaatgtatgccagcactccatttttcagtacaaggtagtatgcatacagggacgcacaatgatgcattataaaaaatttgtcaccaatcactttcaaatacaaaattataatggacaaatcagaaatgaggtacctgaggcaatag

SEQ ID NO: 250693 - DNA, 370 bp, Homo Sapiens
  misc_feature (177)..(177): n is a, c, g, or t
  misc_feature (341)..(341): n is a, c, g, or t
ctgaatattgaaaattgcctcaggtacctcatttctgacttgtccattataattttgtattggaaagtgattggtgacaaattttttataatgcatcattgtgcgtccctgtatgcatactaccttgtactgaaaaatggagtgctggcatacattgggaattttcgcctgcttgcngagctttccagcccgtttgtgaatcagcgaccaaaggctgtagtcactgggaaacatgggacttgttttcatctctaactctccacctctccacactcagcctgcagagcccggccaacaatcaagacagatgggaccgtgtttcagaattcacacaaaagctngaagggattttatgggatgcgggattata

SEQ ID NO: 250694 - DNA, 507 bp, Homo Sapiens
actggttccacaattttttaaatgaaaataaaacacaaatcagtacacgaatgaaagattaatacccctgagatagatctatgccactaaatttagacatgcatgtgaatatatacttatgatatacatgaatatgcatttaaataaatttgcaaagagtacaaataacaaaagaacaattatttaaataatcttctaacactcaatatatctatctaatttacaatgaccattcccttctcctgtcttcctctatctttctaaggataaaatatccagggggttttgtttgtttcatattagtataagatgcacaaaaaccccacaatggttatttttcttatacaagagacctgaatgtttaaaagatatggaggcgatctattgctctgtctcaaaacatacaaacaccaaaacgttacagtcagtcccaagaggccaattatcgattacctattgtactactgaacacttgaaggagtcaatttatgatattttacaagaaat

SEQ ID NO: 250695 - DNA, 379 bp, Homo Sapiens
gttaatacaaatggaaaacaggtttcattgtaggaaaaaggaaagtgaattaatgctttcgaaagagacattaaagtagatttctgggcaatatgaaactgagagtcaatctcgtcagattctgaaggcatctgtagataagcttcccaatgaaaaacaggccagtgacaataggacaactagaagtaagctataattatagcaaagaaggcaagagctagcataaacttgcctattgtcattgttgaagtcatagaactactcctttcaactcgagccccatcccactttccagggccctgtacacgatagtggattggagtgcagggtcccagtaataagtgtaatgccagcttggggtcagtgaaggccagagaca

SEQ ID NO: 250696 - DNA, 1142 bp, Homo Sapiens
  misc_feature (1098)..(1098): n is a, c, g, or t
atatttggaaaaaaagataaccaaaggtttgaccatgaaatgtttggcctgaagcctaaacacagagctctgagtcagcatccaaccttaaatgatgacctgccaaatcgtatcatttctggcttggtgaaagtgaaaggaaatgtgaaggaattcacggagacagctgccatatttgaggatggctccagggaggatgacattgatgctgttatctttgccacaggctatagctttgactttccatttctggaagattccgtcaaagtggtcaaaaacaagatatccctgtataaaaaggtcttccctcctaacctggaaaggccaactcttgcaatcataggcttgattcagcccttaggagccattatgcccatttcagagctccaaggacgctgggccactcaggtatttaaaggtctaaagacattgccctcacagagtgaaatgatggcagaaatatctaaagctcaagaggaaattgacaaaaggtatgtggagagccaacgccataccattcagggagactacatagataccatggaagagcttgctgatttggtgggggtcaggcccaatctgctgtctctggccttcactgaccccaagctggcattacacttattactgggaccctgcactccaatccactatcgtgtacagggccctggaaagtgggatggggctcgaaaagctatcctcaccacagatgatcgcatcaggaagcctctgatggacaagagtagttgaaaggagtagttctatgacttcaacaatgacaataggcaagtttatgctagctcttgccttctttgctataattatagcttacttctaattgtcctattgtcactgccctgtttttcattgggaagcttatctacagatgccttcagaatctgacgagattgactctcagtttcatattgcccagaaatctactttaatgtctctttcgaaagcattaattcactttcctttttccctacatgaaacctgttttccatttgtataaactcatctcccttccactcatgatccgtcactcttcccttgtgggaaatccctagactggggagctcaggtactccttttagnccatctttggatgccctttagcaggagttccttgaacatttggg

SEQ ID NO: 250697 - DNA, 1138 bp, Homo Sapiens
  misc_feature (125)..(144): n is a, c, g, or t
attatggccgggggagtaggaaagtggattttgaatttctattttgctcaaaagttcagttcctgagatactgatgactgagagtgctgctgggaaattttcaggattgtgtggtcttttggggnnnnnnnnnnnnnnnnnnnnaagacaaagttgaccgctgttcactgtccacgtgatcagttgtaagattacaatgctgcatgctagttggttacataagatacaattccagtgatggaaggcggttataatggatggtggtgtgtacaagatggcactgccatctttgagcagagcccagctctgcagcgccacttcatctttttaaacaccctagaggtctgtttgttgttgctgttgtcctttattttgaaagagttgcaagagaagttacagtccaggtgaacttggagattgtgggattggttttgtttctgttttgttttgtttatcatttacctgtagtgctattgctgttgatactatcacctataccctgtttctagtgagtgctgaatacagtatggtacaatgacagtaacagccgcgtggtgctgccaggactgcccttgggcatatcagtgacagcccaaatgtgggtggaggaaacctgtaatttccttcttaacatgtgtttgaaataccaagtgaataatactgttctggaaaaaaatgataaactagtggaaattaaagaaattaagggttttatataatagacaggccccacctctcaaaatatttttagaagtctttttgtaaactaatttcttttgatcactattttgcatcagtaaaatgatttttttaaaaccaataaatcatcaattattagaaatagttgtctcacagtgatactggtttttcttttgtgctgttatgatttaacattgacaggaacactattttaaatccttacgttcaggtgtttgtaacttggccttataattaggctgaattatggcttcaaggtctacaatttatgtgtatggttcacagcctagcttctatttacatttgaaaatacagatttttaccaactttggattcttttttagttatatgtttgtctttcctttttaaattgttcaaaactattttttaatggtcaagttactaacacttgaaaatcaga

SEQ ID NO: 250698 - DNA, 1024 bp, Homo Sapiens
  misc_feature (898)..(913): n is a, c, g, or t
gagcgaggcctgggtggcgaattcggcacgaggcggacctactgggctccatcctgagctccatggagaagccacccagcctcggtgaccaggagactcggcgcaaggcccgagaacaggccgcccgcctgaagaaactacaagagcaagagaaacaacagaaagtggagtttcgtaaaaggatggagaaggaggtgtcagatttcattcaagacagtgggcagatcaagaaaaagtttcagccaatgaacaagatcgagaggagcatactacatgatgtggtggaagtggctggcctgacatccttctcctttggggaagatgatgactgtcgctatgtcatgatcttcaaaaaggagtttgcaccctcagatgaagagctagactcttaccgtcgtggagaggaatgggacccccagaaggctgaggagaagcggaagctgaaggagctggcccagaggcaagaggaggaggcagcccagcaggggcctgtggtggtgagccctgccagcgactacaaggacaagtacagccacctcatcggcaagggagcagccaaagacgcagcccacatgctacaggccaataagacctacggctgtgtgcccgtggccaataagagggacacacgctccattgaagaggctatgaatgagatcagagccaagaagcgtctgcggcagagtggggaagagttgccgccaacctcctaggcgccccgcccagctccctttgacccctggggcagggcagggggcagggagagacaaggctgctgctattagagcccatcctgggagccccacctctgaaccacctcctaccagctgtcccctcaggctgggggaaaacaggtgtttgatttgtcaccgttggagcttggatatgtgcgtggcannnnnnnnnnnnnnnnagagtgtgaatgcacaggtgggtatttaatctgtattattccccgttcttggaattttcctccccatggggctggggtactttacattcaataaatactgtttaacccaaa

SEQ ID NO: 250699 - DNA, 920 bp, Homo Sapiens
ggggcattaaaaaagaagccactgaagacaggcttaagcatggccaagaagcttgagagaagaaaaatttcagaaaaattgtctcaatttgactagaatatcaatgaaccaggaaaactgaagcaccttccctaaagaaaacttgggtatacaattactccacagacagagctgagggttttttacccaaatcagtcactggattttgctgcctgatacgtgaatcttcttggaatttttctcatgtggatctaaggggaatgctttattatggctgctgttgtccaacagaacgacctagtatttgaatttgctagtaacgtcatggaggatgaacgacagcttggtgatccagctatttttcctgccgtaattgtggaacatgttcctggtgctgatattctcaatagttatgccggtctagcctgtgtggaagagcccaatgacatgattactgagagttcactggatgttgctgaagaagaaatcatagacgatgatgatgatgacatcacccttacagttgaagcttcttgtcatgacggggatgaaacaattgaaactattgaggctgctgaggcactcctcaatatggattcccctggccctatgctggatgaaaaacgaataaataataatatatttagttcacctgaagatgacatggttgttgccccagtcacccatgtgtccgtcacattagatgggattcctgaagtgatggaaacacagcaggtgcaagaaaaatatgcagactcaccgggagcctcatcaccagaacagcctaataggaaaaaaggaagaaaaactaaaccaccacgagcagattccccagccactacgccaaatatatctgtgaagaataaaaataaagacggaaagggaaacacaatttatctttgggagtttttactggcact

SEQ ID NO: 250700 - DNA, 1107 bp, Homo Sapiens
atacctgtggtctctgcacctgctccagcccctattcacaaccagtttccagctgccagcctgccaatcagaatgctgctcctcaagtggttgttaatcctggagccaatctaaatcgagattggttggattggacctattcagcagctacattttctgtttttctcagtatcctctacttctactcctccctgagcagattcctcatggtcatgggggccaccgttgttatgtacctgcatcacgttgggtggtttccatttagaccgaggccggttcagaacttcccaaatgatggtcctcctcctgacgttgtaaatcaggaccccaacaataacttacaggaaggcactgatccgaaaactgaagaccccaaccaccctccctccagacaaggatgtactagatggcgagcagaccagcccctccttttatgagcacagcatggcctgttcttcaagactttctttgcctctctctcttccaagaaggccccccagccatcgcaaactgatggtgtttgtgctgtagctgttggaggctttgacaggaatggactggatcacctgactccagctagattgcctctcctggacatggcaatgatgagtttttaaaaaacagtgtggatgatgatatgcttttgtgagcaagcaaaagcagaaacgtgaagccgtgatacaaattggtgaacaaaaaatgcccaaggcttctcatgtctttattctgaagagctttaatatatactctatgtagtttaataagcactgtacgtagaaggccttaggtgttgcatgtctatgcttgaggaacttttccaaatgtgtgtgtctgcatgtgtgtttgtacatagaagtcatagatgcagaagtggttctgctggtacgatttgattcctgttggaatgtttaaattacactaagtgtactactttatataatcaatgaaattgctagacatgttttagcaggacttttctaggaaagacttatgtataattgctttttaaaatgcagtgctttactttaaactaaggggaactttgcggaggtgaaaacctttgctgggttttctgttcaataaagttttactatgaatgaccctgaa

SEQ ID NO: 250701 - DNA, 1666 bp, Homo Sapiens
  misc_feature (1513)..(1513): n is a, c, g, or t
  misc_feature (1580)..(1580): n is a, c, g, or t
  misc_feature (1619)..(1619): n is a, c, g, or t
ggggccccagagacgtgaactgtcgttgcagagattgcgggcggctgagacgccgcctgcctggcacctaggagcgcagcggagccccgacaccgccgccgccgccatggagtccgagaccgaacccgagcccgtcacgctcctggtgaagagccccaaccagcgccaccgcgacttggagctgagtggcgaccgcggctggagtgtgggccacctcaaggcccacctgagccgcgtctaccccgagcgtccgcgtccagaggaccagaggttaatttattctgggaagctgttgttggatcaccaatgtctcagggacttgcttccaaagcaggaaaaacggcatgttttgcatctggtgtgcaatgtgaagagtccttcaaaaatgccagaaatcaacgccaaggtggctgaatccacagaggagcctgctggttctaatcggggacagtatcctgaggattcctcaagtgatggtttaaggcaaagggaagttcttcggaacctttcttcccctggatgggaaaacatctcaaggcctgaagctgcccagcaggcattccaaggcctgggtcctggtttctccggttacacaccctatgggtggcttcagctttcctggttccagcagatatatgcacgacagtactacatgcaatatttagcagccactgctgcatcaggggcttttgttccaccaccaagtgcacaagagatacctgtggtctctgcacctgctccagcccctattcacaaccagtttccagctgaaaaccagcctgccaatcagaatgctgctcctcaagtggttgttaatcctggagccaatcaaaatttgcggatgaatgcacaaggtggccctattgtggaagaagatgatgaaataaatcgagattggttggattggacctattcagcagctacattttctgtttttctcagtatcctctacttctactcctccctgagcagattcctcatggtcatgggggccaccgttgttatgtacctgcatcacgttgggtggtttccatttagaccgaggccggttcagaacttcccaaatgatggtcctcctcctgacgttgtaaatcaggaccccaacaataacttacaggaaggcactgatcctgaaactgaagaccccaaccacctccctccagacagggatgtactagatggcgagcagaccagcccctcctttatgagcacagcatggcttgtcttcaagactttctttgcctctcttcttccagaaggccccccagccatcgcaaactgatggtgtttgtgctgtagctgttggaggctttgacaggaatggactggatcacctgactccagctagattgcctctcctggacatggcaatgatgagtttttaaaaaacagtgtgggatgatgatatgcttttgtgagcaagcaaaagcagaaacgtgaagccgtgatacaaattggtgaacaaaaaatgcccaaggctttctcatgtctttattctggaaggagctttaantatattactctatgtagtttaaataaggcactgtaacgtaggaaggccttaggtgtttgccatgtcntatggcttggagggaactttttccaaatgtgttgtgtcnggcatgtgtgtttgtactagaagtcctaggtgcagaagtggttctgc

SEQ ID NO: 250702 - DNA, 549 bp, Homo Sapiens
  misc_feature (18)..(18): n is a, c, g, or t
  misc_feature (78)..(78): n is a, c, g, or t
  misc_feature (87)..(87): n is a, c, g, or t
  misc_feature (118)..(118): n is a, c, g, or t
  misc_feature (172)..(172): n is a, c, g, or t
aggccaaggaggagtttnaaaaaaaccagtggggatgatgatatgcctttggtgaagcaagcaaaaagcagaaaccgngaagcccgngataccaaaatgggtgaaccaaaaaaaatcncccaaggcctcctcatgcccttaaatcctgaaagagcctttaaatataataccncctatgtaggtttaaataaaccacctgtaccgtagaaggcccttaggtgttgccatgtcctaagccttgaggaaacttttcccaaatgtgtgtgtcctgcatgtgtgtttgtacatagaagtcatagatgcagaagtggttctgctggtacgatttgaatcctgttggaatgtttaaattacactaagtgtactactttatataatcaatgaaattgctagacatgttttagcaggacttttctaggaaagacttatgtataattgctttttaaaatgcagtgctttactttaaactaaggggaactttgcggaggtgaaaacctttgctgggttttctgttcaataaagttttactatgaatgaccctgaaataat

SEQ ID NO: 250703 - DNA, 539 bp, Homo Sapiens
  misc_feature (428)..(428): n is a, c, g, or t
  misc_feature (497)..(497): n is a, c, g, or t
  misc_feature (506)..(506): n is a, c, g, or t
atgcacaaggtggccctattgtggaagaagatgatgaaataaatcgagattggttggattggacctattcagcagctacattttctgtttttctcagtatcctctacttctactcctccctgagcagattcctcatggtcatgggggccaccgttgttatgtacctgcatcacgttgggtggtttccatttagaccgaggccggttcagaacttcccaaatgatggtcctcctcctgacgttgtaaatcaggaccccaacaataacttacaggaaggcactgatcctggaaactgaaggaccccaaccacctccctccagacagggatgttactaggatgggcgagcagaccagcccctccttttattgaggcacagcatggctttgtctttcaaggacttttctttggcctcttctttctttccagnaagggccccccagccattcggcaaattgatgggtgttttgtggctgttagctgtttgggagggtttggnacagggatnggattgggatcaactgaattccaggcttaggga

SEQ ID NO: 250704 - DNA, 2387 bp, Homo Sapiens
taaccaataattccaagagtcccccgggggggtaaaattcaattatccaaattatttttatttcccaatccatttctgtaaaagttaaaaggcggtttcttcccccctttaccattattaaccttttttccagtaaatttaaaaacccaaatccattggtgggacggtcattttcttttaaagggaacaatttaagaaaacctccacaaggagtctgcacttgggaaagatccgatcagagtacacagtagagacaaaacaggcatcttcattgtaattttttttaataaataaaagcacattaacaaaaaaggaaggtaagcagcaccggaagcctttgacgtttgtaactaaatgctggtactcaaatggtctagctggttaagtttcactaggaggcgcaaaaaaggagccgtttttgacttaacattttaattctagtagagataagaagagcttgtgtgggcttacagtccttcacctgactgtccttcaccagtgagtagcataccagttcttcaaatgtcctatactttggaaagcagacccgactctggagcactcgccttaattagattctgaatttccttgaattttggatggtccttatcagctaccagctgaagcagaacagcctcactcgtggtcactatgatcccggttcgagcgagacgctcgagggcaaacatcctgtccatcatgcttcttgatgaggtggcatcagcaacaatgtgaacctcgactcctcggccaactagcatccagggcagtttgttggatgcacacatgagtttctactccaaataatacaacactcctgactccgggaatctctgctaatgccgcttctacttctggtaataccattgaaaacttggtctttggaagtaccagttttacacctgttaaatcaatttcttgaaccgtgctcccaagacctttagggtattgttctgttacaataacaggaattcctaaaatccgggccccttgcaacaatctctgtcccacgctaataatatccccaaaatacttgatggctggtctgaacctttcctgcatatcacagcagaaaaacacaatgcttgaaagtgttaagatttccccagggtagtgaagctggatctgcaacggcacgaggcgcaccttgcaagcgctcgctcaccgcgaaacccttgggcaaagtccacgtactggccccactcctcggcgaacagctgcaccacgaatttgcggtgcatgtcgatctggtcgccgtacaggctgaggaacttctggatgagcagctcgtagcccgccccgtgtggcaccgacgagggtcgcgcgaagactgagaaacagaagagcaccgggactgtgcccgacggcgcccccgcgcccccggcgccgctgttggggagcgcaaggaccgccggctccgcagccgccatgcctccgagcgtctgcgagctccgagcacgcccagtcgcacccaaggcatattagtctttctcaatagcttcattagccaaaaacattacccaatatgattaggattgtaaaagaggaccacctgagctgacagcacctctggcctcaaaatgggctggcagaagaccattcaaagataaaatgggctgttccagtgggagtgagctccctacttgtgagagtattcaagtagagagaggaggacctcctggcgggaaacttgcatatggtgtacgtgatatggcacctccatctgaaagagtatgtgctgagggcaggctggagtcacacatgggaataagccaggcgaccctccaatctgccatccgtgatttaattccacgacggcagaatggatggcatgtcacttgctccaaataccagtgcccattgcttcaaatactagtcctcctcaatccctggcatggttgttgactttaaacaccgaagactccacatctcttacaacgacttcttgtgcggctggcccaggacctgggcgaggcagtaggggatgacactgacggatgccaggggcactaccgcaactcttgcagaaggacaagacgtagaagaccagctcgacttgggatgggggtttcaaggagtcaaagacgtgcaggaggacgagggaggctacaatagagctgaggcggaatgggagccacttgctgagtttccccttgcagctctccctgtacatgctggagttgagagccagccccaggccaaagagcgtgcccaggttcttgaggaggctggcaaagggtgtggtgtcaatgtggacccattctggctgctcgcaccacctctgggctttctccagagtccacaggaggtctacacccagtcccttgagcagcagataaaatccgatggcgaagctgaacaggaagaaggtaatgagaaaatatttc

SEQ ID NO: 250705 - DNA, 350 bp, Homo Sapiens
  misc_feature (16)..(16): n is a, c, g, or t
  misc_feature (123)..(123): n is a, c, g, or t
  misc_feature (161)..(161): n is a, c, g, or t
  misc_feature (314)..(314): n is a, c, g, or t
gttggggttggtcccngggatttcccccccctgaagaccttaccttattcctcccgtcaccatatacaaaagcaagacctcccccagtagggcccagctcacaagcccccccaggctggaganccccaactgagaattttccctccctgtgttcatttttncccgagaaaaggagaaaggagctctgaatctgataggaaaagaaggctgccctaaggaggagtttttagtatgtggcgtatcatgcaagtgctatgccaagccatgtctaaatggctttaattatatagtaatgcactctcagtaatgggggnccagcttaagtataattaatagatggttagtggggt

SEQ ID NO: 250706 - DNA, 1211 bp, Homo Sapiens
ggggtgcagatctattatgtattgaaacaatgaaatgtagtctatgctattgattcttaaagcaaaatggacttaggaggagaaactaaattgcctggagaaatagaacaagatatcatgaaggaagtagttattgaactaaactagttttggtgggaggagaggggaggatggatggaacattcatggagggtttatcatgcatggtctacaggcatttattagcaggaaagaaggtgaagatgcactttttcagcagcagaaaatacaatttgggatgtttctgaagtcttatttgaggattattaaagccatgtttttgcctataacatttttgaggttttcctagtagaaaagtgatgttacaacagcaggttttataagacattcttttaggatctacttcaagtgagctctgtcatttggaggctgtgtagtcaatttatcaattagtaactgaatttggttgataacagttgaaagggaaatgtagaataaggataaagcaagaatccaaaaaattgaatgaaagaaacaacgaaatctaggagacagattgaatataagtgtattagtttcctgtggttgccataacaaattgccacaaactgcgtggctttaaacaacataaatttattctcacagttttggaatccagaagttagaaatctggtagactgtgctcactctaaaggtcctgccttgccgcttctagtttctggtggctcaagcattccttggcttgtggcagcaaaactctgatgtctgtctccatattcacatggcggccccttcttctctgtgtgtttttgtgcctccagtctttcccttctttctcttaataaggatttagggcccaccctaaatccagggatgatctcatgagatccctaatttaattttatctgcaaaaactatttccaaatagcatcacattcccaggtatcaggagttaggacttggacatctttttaaaggaccacagttgaaccccaccgtagtgcgtaataaaggagatagacggtaaaaatccataatggtgaatttttaaggtccgtggaatactaatatcaagtaacagataagttgggaaggggaaccagttttagggagaggatggcataaaccctaaacaatgattttgaagcagtcatgaaaaattcaagtggagataataattaaagaagtagattaattccctaaagcagaga

SEQ ID NO: 250707 - DNA, 468 bp, Homo Sapiens
  misc_feature (74)..(83): n is a, c, g, or t
taaaattaaaatttggtttatggcataatctctgtcctttgtatcatctgtacttttatacctccttgccttcnnnnnnnnnnctgacccttttgttgttgttgttatttagcaattcttaacaggatggattagaggacacagtggagattaaaactccaatagttaattgtcctgatgaaatgttggcattgcattgtctggattaaatgtatttatctctggccttgttactcactgataaactaatacagttgtatgaaatgggatattctgtatgctttaaacaacctttaaattaaaaactagtgcttttgattactttctttctggatttcaactttaaaatgaatttttataattgaatataaaatagctgctctgaaaagctcatcagtatatttgtcttatatatttgaattgagcagcattcttaactttgttttccccatttttttaggaggaaga

SEQ ID NO: 250708 - DNA, 887 bp, Homo Sapiens
  misc_feature (379)..(498): n is a, c, g, or t
gggcttgaaaaaagaagggaaacttttaactaaatcccagagagaagccagagccagagccgaagctactcttaaactgctacaagctcagggtgttgaagtgccatcaaaagactctttgccaaagaagaggccaatttatgaagataaaaagaggaaaaaaataccacagcagctagaaagtaaagaagtgtctgaatcaatggaattatgtgctgctgtagaagttatggaacaaggagtaccagaaaaggaagagacaccacctcctgttgaaccagaagaagaagaagatactgaggatgctggattggatgattgggaagctatggccagtgatgaggagacagaaaaagtagaaggaaacacagttcatatnnnnnnnnnnnnnnnnnnnnnnnnnnnnnnnnnnnnnnnnnnnnnnnnnnnnnnnnnnnnnnnnnnnnnnnnnnnnnnnnnnnnnnnnnnnnnnnnnnnnnnnnnnnnnnnnnnnnnnnnagatgaaaaggtgtcagatgagaaggattcagggaagacattagataaaaagccaagtaaagaaatgagctcagattctgaatatgactctgatgatgatcggactaaagaagaaagggcttatgacaaagcaaaacggaggattgagaaacggcgacttgaacatagtaaaaatgtaaacaccgaaaagctaagagcccctattatctgcgtacttgggcatgtggacacagggaagacaaaaattctagataagctccgtcacacacatgtacaagacggtgaagcaggtggtatcacacaacaaattggggccaccaatgttcctcttgaagctattaatgaacagactaagatgattaaaaattttgatagagagaatgtacgga

SEQ ID NO: 250709 - DNA, 663 bp, Homo Sapiens
gatctagcctcttgacctgagagccgagagtggatcgctgggctgggctaacggcgacggagagcagcgccctcgctgactccgggcagcgcccagcagtagcaccgcccgcgcccgcccctggacactagtaagtttcgatttccgatttccgcggaaccgagtcccgcgccgcggcagagccagcacagccagcgcgccatggcggacccggaggtgtgctgcttcatcaccaaaaatcctgtgcgccccacgggggccgcatggccctggtacgcgctgctccaggagatcgcgctgtctgacccgcagctctgtgaggtgctgcaggtggccgggcccgaccgctttgtggtgttggagacctggcggcgaggccgggatcacccgatcggtggtggccaccactcgagcccgggtctgccgtcgcaagtactgccagagaccctgcgataacctgcatctctgcaaactcaacttgctgggccggtgcaactattcgcagtccgagcggaatttatgcaaatattctcatgaggttctctcagaagagaacttcaaagtcctgaaaaatcacgaactctctggactgaacaaagaggaattagcagtgctcctcctccaaagtgatcctttttttatgcccgagccctatgcagtctc

SEQ ID NO: 250710 - DNA, 1051 bp, Homo Sapiens
  misc_feature (325)..(418): n is a, c, g, or t
tagaggagcatcagaagggaactgatttgtaaaggaagaaccatcaggaagacggaattgaattcttgcaacagtgcttctttctcttgcataagattccctcttgacttccatttctgcctgttttgctagcaaggcagcagctttggcagcctctacttcttcctctgtctttgcaaaacgagcagctctctctgcacggtccaatgcaatctgctgttttatacgttctcgagctgccctatcttctgctttctctctgtttctttcctccagcattctttttgttaattcttcttcttgttttcttttataatccaacatnnnnnnnnnnnnnnnnnnnnnnnnnnnnnnnnnnnnnnnnnnnnnnnnnnnnnnnnnnnnnnnnnnnnnnnnnnnnnnnnnnnnnnnnnnnnnngttagtctttccactcggatgttgaggtcctctgcaggtctctgatctgagcatccactaggctcctgagaggaagtggcatggcctgcactttctcctcctgttgcagtatctgactttgtatcagaagtgggtggtatctcacaaagctctgcatttctggactgagagttttcacaagtgttgttaggttcaaatgacgcagatggagtagacactgaactttctgactgactgccatttgctactgatgtttcactttttagcaaatgcatctgtcggaccttgtgaattcttgtaacaagttcatctgcagaaacacttcctgctattacttccaagggaattccactgtctccaataaagaaactggatggaacacacactacaggatctgtacagtttaatgaagtctaacaattcatgtgaaacgaaaggatagttttacgaaacactattggtaacaaaggaaaacaaatgatctttgtgattttcacaatataatctaacatttattaaataatttcaagtactgcatcattatacctgtagtattaatacatgtgacatgttaatttatgaggtatattctagtgaagaatctactacattctcctctatcataacttcctt

SEQ ID NO: 250711 - DNA, 749 bp, Homo Sapiens
agagaaattaagaaggaaattgagaggagaaaaactggaaaagaaatgttggattataaaagaaaacaagaagaagaattaacaaaaagaatgctggaggaaagaaacagagagaaagcagaagatagggcagctcgagaacgtataaaacagcagattgcattggaccgtgcagagagagctgctcgttttgcaaagacaaaggaagaagtagaggctgccaaagctgctgccttgctagcaaaacaggcagaaatggaagtcaagagggaatcttatgcaagagaaagaagcactgttgcaagaattcaattccgtcttcctgatggttcttcctttacaaatcagttcccttctgatgctcctctagaagaggcaaggcagtttgctgcacagactgttggcaacacttacggtaatttttcgttagcaaccatgtttcccaggagggaatttaccaaagaagattataaaaagaagttactggatttggaacttgccccaagcgcttcggtggtactgttgccagcaggaagaccaactgcatccattgtacacatcttccagcggagacatttggaccttgttgggaacagtgctttatccattccttgccatctggagattaattagcaatttcttgtttagtaatccgccttccacacagactttagtgagagtaacatcgtcagaacccccaaaccctgcatcatctagcacatcagaaagggccagtgagagagtgctgg

SEQ ID NO: 250712 - DNA, 816 bp, Homo Sapiens
ggggcttgtgcggagccggaggtgggggccgaaccagccaaggttgcgggggccgcagagccggacgaagacggagggcggagccggcttcgggactgcggagactacacaccgagcgagcgcctgggcccgaagggagcgatgctgtggttccagggcgccattccggccgccatcgcgacggccaaaaggagcggcgcggtcttcgtggtgttcgtggcaggtgatgatgaacagtctacacagatggctgcaagttgggaagatgataaagttacagaagcatcttcaaacagttttgttgctattaaaatcgataccaaaagtgaagcctgcctacagttttcacaaatctatcctgtagtgtgtgttccatccagtttctttattggagacagtggaattcccttggaagtaatagcaggaagtgtttctgcagatgaacttgttacaagaattcacaaggtccgacagatgcatttgctaaaaagtgaaacatcagtagcaaatggcagtcagtcagaaagttcagtgtctactccatctgcgtcatttgaacctaacaacactcggtgaaaactctcagtccagaaatgcagagctttgtgagataccacccacttctgatacaaagtcagatactgcaacaggaagagaaagtgcaggccatgccacttcctctcaggagcctagtggatgctcagatcagagacctgcagaggaccctcacatcccgatggaaagacctacaaaaaaacttggagaaagggggggaagaggaaaggaaagggggaggacccggagggaatttagaag

SEQ ID NO: 250713 - DNA, 864 bp, Homo Sapiens
  misc_feature (787)..(787): n is a, c, g, or t
gaataagccactgtgcccggccctttttctcttctgtaacagagtttattactgcctagctagcaggttatttggccctcacatgtgttgaggcaaactctatactatattcttactctccagagttccaaaatcctttatttttaaagaaaaataaacaaacatacttcattctgcccagtatattctcttgatctgtacaagctacgattttaattctctttggagaggaggcatctgttaagttcgaatgggggatatttcctcataacggtcatggctgagaggccaggacaattatcacttaacgaaggtcctttggtgctccctgtgcatcagcttcattcactggggtcaggttcttaaggggtctcttccaccagtgtgctagggaagggctgccatcacctctgtttaacacatagctactttcttaaacacaataagcttaaaaagatgactatggatttacaatggagggcactataagcctctcatacttaaaacagatcaatataaaacaagtaaacatgaaaacaccaaaacacagcagcaaaaagatttagcaatcaatgtttctttctgcaaaatgcaaaattaacttatttagcagtagaggactaaaaaggaaatcagttataccaaggggagacacgtgcccttggtactatgaccactaggacagcattcatattacaccacagtgactgctttcaaagctcaaatgattgtcaagccacttctcaaatgacagataatttctgttggtcttttttatacaaaatgntaagacaacaggcttgaatatacagcctaagcaccaattatgataaatgcatattggtaaaatgtgacttctggctt

SEQ ID NO: 250714 - DNA, 1084 bp, Homo Sapiens
agttttcgcgccggggtggagtcatcctgggaacctccacgcgactttggtggaggtagttctttggcagcgggcatggcgggtaccgtggtgctggacgatgtggagctgcgggaggctcagagagattacctggacttcctggacgacgaggaagaccagggaatttatcagagcaaagttcgggagctgatcagtgacaaccaataccggctgattgtcaatgtgaatgacctgcgcaggaaaaacgagaagagggctaaccggcttctgaacaatgcctttgaggagctggttgccttccagcgggccttaaaggattttgtggcctccattgatgctacctatgccaagcagtatgaggagttctacgtaggactggaaggcagctttggctccaagcacgtctccccgcggactcttacctcctgcttcctcagctgtgtggtctgtgtggagggcattgtcactaaatgttctctagttcgtcccaaagtcgtccgcagtgtccactactgtcctgctactaagaagaccatagagcgacgttattctgatctcaccaccctggtggcctttccctccagctctgtctatcctaccaaggatgaggagaacaatccccttgagacagaatatggcctttctgtctacaaggatcaccagaccatcaccatccaggagatgccggagaaggccccagccggccagctcccccgctctgtggacgtcattctggatgatgacttggtggataaagcgaagcctggtgaccgggttcaggtggggggaacctaccgttgccttcctggaaagaagggaggctacacctctgggacctccaggactggcctgattgcctggaatggtaaacagatgagcaaggatgctcacccctctttctctggctgaggatatagcccaagatccagaaggtcactaaaaccccatccagggatatctttgaccccctggccaagtccttggcccccaatatccatgggcatgactatgtccaaaaaagcaatcctctgctgggctcttggggagggggggaaccaaaccctaaaaaagggagccccct

SEQ ID NO: 250715 - DNA, 1956 bp, Homo Sapiens
ggagagtacctggatgctacaggtggaaccctgcacccctatcaaatggagggcctgaattggttgcgcttctcctgggctcagggcactgacaccatcttggctgatgagatgggccttgggaaaactgtacagacagcagtcttcctgtattccctttacaaggagggtcattccaaaggccccttcctagtgagcgcccctctttctaccatcatcaactgggagcgggagtttgaaatgtgggctccagacatgtatgtcgtaacctatgtgggtgacaaggacagccgtgccatcatccgagagaatgagttctcctttgaagacaatgccattcgtggtggcaagaaggcctcccgcatgaagaaagaggcatctgtgaaattccatgtgctgctgacatcctatgaattgatcaccattgacatggctattttgggctctattgattgggcctgcctcatcgtggatgaagcccatcggctgaagaacaatcagtctaagttcttccgggtattgaatggttactcactccagcacaagctgttgctgactgggacaccattacaaaacaatctggaagagttgtttcatctgctcaactttctcacccccgagaggttccacaatttggaaggtttttttggaggagtttgctgacattgccaaggaagacccagataaaaaaactgcatgacatgctgggggccgcacatgtttgcggcgggctcaaaagccgatgtggttcaagaacatgccctccaagacagaactaattgtgcgtgtggagctgagccctatgcagaagaaatactacaagtacatcctcactcgaaattttgaagcactcaatgcccgaggtggtggcaaccaggtgtctctgctgaatgtggtgatggatcttaagaagtgctgcaaccatccatacctcttccctgtggctgcaatggtatgtagtgccatctcctgttcctccctgggttgggtcttctccatgtgggctttcttttaatacttttttctttgcatttgttctcaggaagctcctaagatgcctaatggcatgtatgatggcagtgccctaatcagagcatctgggaaattattgctgctgcagaaaatgctcaagaaccttaaggagggtgggcatcgtgtactcatcttttcccagatgaccaagatgctagaccagctagaggatttcttggaacatgaaggttataaatacgaacgcatcgatggtggaatcactgggaacatgcggcaagaggccattgaccgcttcaatgcaccgggtgctcagcagttctgcttcttgctttccactcgagctgggggccttggaatcaatctggccactgctgacacagttattatccatgactctgactggaacccccataatgacattcaggcctttagcagagctcaccggattgggcaaaataaaaaggtaatgatctaccggtttgtgacccgtgcgtcagtggaggagcgcatcacgcaggtggcaaagaagaaaatgatgctgacgcatctagtggtgcggcctgggctgggctccaagactggatctatgtccaaacaggagcttgatgatatcctcaaatttggcactgaggaactattcaaggatgaagccactgatggaggaggagacaacaaagagggagaagatagcagtgttatccactacgatgataaggccattgaacggctgctagaccgtaaccaggatgagactgaagacacagaattgcagggcatgaatgaatatttgagctcattcaaagtggcccagtatgtggtacgggaagaagaaatgggggaggaagaggaggtagaacgggaaatcattaaacaggaagaaagtgtggatcctgactactgggagaaattgctgcggcaccattatgagcagcagcaagaagatctagcccgaaatctgggcaa

SEQ ID NO: 250716 - DNA, 993 bp, Homo Sapiens
ggaacatgagattttatgctgctcttcctggtcagcagcactgctatttcctcaacaaggatgctcctcttccagatggccgaagtctacagggaacccttgttagcaaaatcacctttcagcaccctggccgagttcctcttatcctaaatctgatcagacaccaagtggcctataacaccctcattggaagctgtgtcaaaagaactattctgaaagaagattctcctgggcttctccaatttgaagtgtgtcctctctcagagtctcgtttcagcgtatcttttcagcaccctgtgaatgactccctggtgtgtgtggtaatggatgtgcaggactcaacacatgtgagctgtaaactctacaaagggctgtcggatgcactgatctgcacagatgacttcattgccaaagttgttcaaagatgtatgtccatccctgtgacgatgagggctattcggaggaaagctgaaaccattcaagccgacaccccagcactgtccctcattgcagagacagttgaagacatggtgaaaaagaacctgcccccggctagcagcccagggtatggcatgaccacaggcaacaacccaatgagtggtaccactacaccaaccaacacctttccggggggtcccattaccaccttgtttaatatgagcatgagcatcaaagatcggcatgagtcggtgggccatggggaggacttcagcaaggtgtctcagaacccaattcttaccagtttgttgcaaatcacagggaacggggggtctaccattggctcgagtccaacccctcctcatcacaacgccgccacctgtctcttcgatggccggcaacaacaagaaccaccccgatgctcatgaaccttcctaaagaaaatcccgcccaagaatttctcaaccctttatgaaaccagccctttagaaagggcagaactcctctttccggctccccccgcatggaaaatatgctcgggaagcaacaaaacca

SEQ ID NO: 250717 - DNA, 1247 bp, Homo Sapiens
gaaacattcacctctcagccccgtgcatctactcggaggtgatggaagccctagatctgcagcctggactctcgtttctgaacctgggcagtggcactgggtatctcagctccatggtgggcctcattctaggtccttttggtgtgaaccatggggtggaacttcactcagatgtgatagagtatgcaaagcagaaactggacttcttcatcagaacaagtgatagttttgacaagtttgacttctgtgaaccttcctttgttactgggaattgcctggagatttctccggattgttctcagtatgatcgtgtatactgtggggctggcgtgcagaaagagcatgaagagtacatgaagaatcttctcaaagtgggagggatccttgtcatgccactggaagagaagttgactaagacaacacgcacaggtccttcagcttgggaaaccaaaaagattcttgctgcttcttttgctcctctgatccagccctgccattcagagtcaggaaaatcaagacttgtccagttacgtaagtataccaatctttacttattttatcttttagatcttttctctctggttagattttaaaaggaaacaaaatttacaacaaaccttttgatattaaaaagcaccactcccatgctgaaactgtaaaattctacaagcaatttcaggcattataaaaattataatctatttttaacctatttcaggtaattttagccgtcttttaaatctacaaagagctgttgccggtcacaccattgaaagccgaggacgcacataaaagggagctcattttgccatgtgggagacttagcctatttgcccgcctccactgggaggggcttacagaaagagccatcagccagagggctcctacagagtcatggggcttctgctccccagggcgccaagcgcctgctgcctcatgggtagacaaggttagagaacacattccagctaatctgctggggtgtggataggagactttccgtggaaccttacacagccgagcctttgtgtttcactatttcaggatgcaaactgagcaaggaactgataccagggccagcacgacagcaaaacctcctaatgttttaaaatttaaacggctcacacagaaatgagagttccaattgattttatttaaaataaaactatcaggatgctctctgatcatttagaaaatttggaaaatgcaaaaaataataggaagggaaaagttttgcatagtcttac

SEQ ID NO: 250718 - DNA, 2175 bp, Homo Sapiens
  misc_feature (1748)..(1748): n is a, c, g, or t
  misc_feature (1751)..(1752): n is a, c, g, or t
  misc_feature (1759)..(1759): n is a, c, g, or t
  misc_feature (1766)..(1766): n is a, c, g, or t
  misc_feature (1769)..(1769): n is a, c, g, or t
  misc_feature (1790)..(1790): n is a, c, g, or t
  misc_feature (1793)..(1793): n is a, c, g, or t
  misc_feature (1808)..(1808): n is a, c, g, or t
  misc_feature (1835)..(1835): n is a, c, g, or t
  misc_feature (1890)..(1890): n is a, c, g, or t
  misc_feature (1905)..(1906): n is a, c, g, or t
  misc_feature (1908)..(1909): n is a, c, g, or t
  misc_feature (1911)..(1911): n is a, c, g, or t
  misc_feature (1942)..(1942): n is a, c, g, or t
  misc_feature (1957)..(1957): n is a, c, g, or t
  misc_feature (2044)..(2044): n is a, c, g, or t
  misc_feature (2094)..(2094): n is a, c, g, or t
  misc_feature (2128)..(2128): n is a, c, g, or t
  misc_feature (2172)..(2172): n is a, c, g, or t
cgggatctgcgaccccctggcccctgctggggtcccttgcgccttctccccgcacagccaggcctacttcgctttggcctctaccgacggtcacttacgagtatgggagacggccaacaaccggctgcaccaggagtacgtgccttccgcgcacctcagtggtacctgcacctgtctggcctgggcgccacgcggctgcaggccaaggaaagtccccagaggaaaaaaaggaaatcagaagctgtaggaatgagtaaccagactgacttattggctcttggcacagcagttggtagcattttattatacagcacagtaaaaggagagttacacagtaaattaataagtggtggacatgacaacagagtcaactgcatacagtggcatcaagacagtggctgtttatatagttgttcagatgataaacatattgtggaatggaacgtacagacatgcaaagtaaagtgcaaatggaaaggggacaatagcagtgtcagttccctatgtatcagcccagatggaaagatgttgctttcagctggtcgaacaatcaaactatgggttttggagaccaaagaagtctacaggcatttcacaggacatgcaacgccagtttcgtcactgatgttcactaccatcagacctcctaatgagagccagccctttgatggaattacaggtctttatttcttatctggagcagtacatgaccggttacttaatgtctggcaggtccgatcagaaaacaaagaaaagagtgcagtgatgtcatttacagttaccgatgaacctgtctatattgacttaactttgtcagaaaacaaagaagagcctgtcaagttggctgttgtttgcagagatggtcaagtccatctttttgaacacatattaaatgggtactgcaaaaagcctttgacttcaaactgcacaattcagatagcaacacctgggaaaggcaagaagtcaacaccaaaacccatccctattctagctgctggtttttgctcagacaaaatgtcattgttgcttgtatatggcagttggtttcagcctactattgagcgagtggctttaaactccagagaacctcatatgtgtttagtaagagatatttcaaactgctgggcccccaaagtagaaacagctataacaaaggtgaggacaccagtgatgaattctgaagcaaaagttctggtgcctgggattcctggtcatcatgcagctatcaagcccgctcctccacaaaccgagcaagtagagagcaagaggaagtcagggggaaatgaggttagcattgaggaacgtctgggagcaatggatatagacacacacaaaaaaaggaaaggaagacctccagacgaatagctttccagttcttcttacccagggcttagaaagtaacgattttgaaatgctaaataaagtacttcaaactaggaatgtaaaccttataaagaagactgtattaaggatgcccctgcatactattattccgttgttacaagagcttacaaagaggttacaaggacatcctaatagtgctgtgctaatggttcagtggctaaaatgtgtgttaacagttcatgcatcatacctgtccacgttgcctgacctggtaccccagctggggacactctaccagttaatggaaagcagaggtcaaaacttttcagaaactttcacaccttcatggaaagcttattcttctaattacacaagtaacagcatcagagaagacaaagggagcnacnncccctgnaccgaangcnaagttggtgtatgaagaagantcntctgaagaggagtcngatgatgaaatagcagataaggagtcngaagataattgggatgaagatgaggaggagagtgaaagtgaaaaagatgaggacnttcgcacacgcaccnncnngnggatgccgaaggaaaagatgaagaaaatggngaggacagagatacngcaagtgaaaaagaattaaatggagattctgatttagatcctgcacaaatgaaagtgaagaagaatgaagactgcaatgcaagctgntcaaactatataaattctggctctccttgtccagtggtgagggctgcttntgtgccaggatgccaaggactgatgcacatttcnaaattcacagcagtggatcccatgctgactttgctgtcctgagntct

SEQ ID NO: 250719 - DNA, 1000 bp, Homo Sapiens
caaacaccgctttgaccctgtggaaaccaagggagaaggtccaagaaggctcaagaatctttactttttatacttgattgagcttcgaccttagtcaaaggtggctccatattttgaccgctcaattgtcgatctttacactggaaatgcagaagaagatgctgacacaaaaactcttctactgaatatctttcaagatacaaagtcctttcccatgcactttgatgagaaatccatgtttgcaggtgacaaaaaaggggccaagtcactaaaggaggaattccgattacatttcaagaatatctcccgtataatggactgtgttggatgtgacaaatgcagattatggggaaaattacagactcagtggtttaggaacttgccctgaagatattattctctgaaaaagaaatccaaaagctcccagagaatagtccatctaaaggcttccaactcacccgacaggaaatagttgctcttttaaatgcttttggaaggctttctacaagtataagagacttacagaattttaaagtcttattacaacagagtaggtaataaaggcttttatgtgtctaactagagacataaagtgactgtggaaagccttttaattatggacattcatcagaaagacactaatctgacttcaagaattctgaactattaaatagaaaatttaaatgctcacttgaatatttatgattcttaatagattattatcaactagagatatttataaatgaagtatatacttttaaaacatgtaagttatactaattttgtgtttaatttcatatgttttcatgtaatgaaaattctattttttttagaattggttttggttttattctattatcctttatttccaggtgtcaaactttaaatggctatgtctgcattctaataacactgttcagtctgttatggaaaaggagaactagggaacaaatgttgctcaaggctggtgtcagtgagatcactttctataatataaaga

SEQ ID NO: 250720 - DNA, 2354 bp, Homo Sapiens
  misc_feature (1774)..(1791): n is a, c, g, or t
  misc_feature (1816)..(1883): n is a, c, g, or t
  misc_feature (2145)..(2165): n is a, c, g, or t
gggatggcagggtggtggatctgttggtcccgttttcccgtcgcacgtggtggccactgttggcttctgaatggtttgcaaggcggatatccacgccaaggcctttggatcggccgtgggtacatccgtctgagccgttcctttccatcgcagagcggcggcctccggcggcgctctccagtcatggactaccggcggcttctcatgagccgggtggtccccgggcaattcgacgacgcggactcctctgacagtgaaaacagagacttgaagacagtaaaagagaaggatgaaattctgtttgaagaccttcaagacaatgtgaatgagaatggtgaaggtgaaatagaagatgaggaggaggagggttatgacgatgatgatgatgactgggactgggatgaaggagttggaaaactcgccaagggttatgtctggaatggaggaagcaacccacaggcaaatcgacagacctccgacagcagttcagccaaaatgtctactccagcagacaaggtcttacggaaatttgagaataaaattaatttagataagctaaatgttactgattccgtcataaataaagtcaccgaaaagtctagacaaaaggaagcagatatgtatcgcatcaaagataaggcagacagagcaactgtagaacaggtgttggatcccagaacaagaatgattttattcaagatgttgactagaggaatcataacagagataaatggctgcattagcacaggaaaagaagctaatgtataccatgctagcacagcaaatggagagagcagagcaatcaaaatttataaaacttctattttggtgttcaaagatcgggataaatatgtaagtggagaattcagatttcgtcatggctattgtaaaggaaaccctaggaaaatggtgaaaacttgggcagaaaaagaaatgaggaacttaatcaggctaaacacagcagagataccatgtccagaaccaataatgctaagaagtcatgttcttgtcatgagtttcatcggtaaagatgacatgcctgcaccactcttgaaaaatgtccagttatcagaatccaaggctcgggagttgtacctgcaggtcattcagtacatgagaagaatgtatcaggatgccagacttgtccatgcagatctcagtgaatttaacatgctgtaccacggtggaggcgtgtatatcattgacgtgtctcagtccgtggagcacgaccacccacatgccttggagttcttgagaaaggattgcgccaacgtcaatgatttctttatgaggcacagtgttgctgtcatgactgtgcgggagctctttgaatttgtcacagatccatccattacacatgagaacatggatgcttatctctcaaaggccatggaaatagcatctcaaaggaccaaggaagaacggtctagccaagatcatgtggatgaagaggtgtttaagcgagcatatattcctagaaccttgaatgaagtgaaaaattatgagagggatatggacataattatgaaattgaaggaagaggacatggccatgaatgcccaacaagataatattctataccagactgttacaggattgaagaaagatttgtcaggagttcagaaggtccctgcactcctagaaaatcaagtggaggaaaggacttgttctgattcagaagatattggaagctctgagtgctctgacacagactctgaagagcagggagaccatgcccgccccaagaaacacaccacggaccctgacattgatnnnnnnnnnnnnnnnnnnatggtcaaggaagcccagagagagnnnnnnnnnnnnnnnnnnnnnnnnnnnnnnnnnnnnnnnnnnnnnnnnnnnnnnnnnnnnnnnnnnnncaaatagaatgagaaccatattatgtacagtcattttcctcagttccttttctcgcctgaactcttaagctgcatctggaagatggcttattggttttaaccagattgtcatcgtggcactgtctgtgaagacggattcaaatgttttcatgtaactatgtaaaaagctctaagctctagagtctagatccagtcactgactctgtctggtgttgacagaggatttatttaagctattattttaataaagaactttgtacannnnnnnnnnnnnnnnnnnnnctcttacaaatatgtttttggaagcatgataaatgtttaaatgtagtcaacatctgtaactcttacatgagtgtccagaggcactcatgggaaaattggttttgctttctttgtacacaccagagacccatctgaggtcatctgattataaggccatgtttatataaagggaatttcacccacagttaa

SEQ ID NO: 250721 - DNA, 2182 bp, Homo Sapiens
  misc_feature (173)..(173): n is a, c, g, or t
tcttcccggtcatggaggcgccagccgccggcttgtttctgctcctgttgcttgggacttgggccccggcgccgggcagcgcctcctccgaggcaccgccgctgatcaatgaggacgtgaagcgcacagtggacctaagcagccacctggctaaggtgacggccgaggtggtncctggcgcacctgggcggcggctccacgtcccgagctacctctttcctgctggctttggagcctgagctcgaggcccggctggcgcacctgggcgtgcaggtaaagggagaagatgaggaagagaacaatttggaagtacgcgaaaccaaaattaagggtaaaagtgggagattcttcacagtcaagctcccagctgctcttgatcctggggccaagatttcagtcattgtggaaacagtctacacccatgtgcttcatccgtatccaacccagatcacccagtcagagaaacagtttgtggtgtttgaggggaaccattatttctactctccctatccaacgaagacacaaaccatgcgtgtgaagcttgcctctcgaaatgtggagagctacaccaagctggggaaccccacgcgctctgaggacctactggattatgggcctttcagagatgtgcctgcctatagtcaggatacttttaaagtacattatgagaacaacagccctttcctgaccatcaccagcatgacccgagtcattgaagtctctcactggggtaatattgctgtggaagaaaatgtggacttaaagcacacaggagctgtgcttaaggggcctttctcacgctatgattaccagagacagccagatagtggaatatcctccatccgttcttttaagaccatccttcctgctgctgcccaggatgtttattaccgggatgagattggcaatgtttctaccagccacctccttattttggatgactctgtagagatggaaatccggcctcgcttccctctctttggcgggtggaagacccattacatcgttggctacaacctcccaagctatgagtacctctataatttgggtgaccagtatgcactgaagatgaggtttgtggaccatgtgtttgatgaacaagtgatagattctctgactgtgaagatcatcctgcctgaaggagccaagaacattgaaattgatagtccctatgaaatcagccgtgccccagatgagctgcactacacctatctggacacatttggccgccctgtgattgttgcctacaagaaaaatctggtagaacagcacattcaggacattgtggtccactacacgttcaacaaggtgctcatgctgcaggagcccctgctggtggtggcggccttctacatcctgttcttcaccgttatcatctatgttcggctggacttctccatcaccaaggatccagccgcagaagccaggatgaaggtagcctgcatcacagagcaggtcttgaccctggtcaacaagagaataggcctttaccgtcactttgacgagaccgtcaataggtacaagcaatcccgggacatctccaccctcaacagtggcaagaagagcctggagactgaacacaaggccttgaccagtgagattgcactgctgcagtccaggctgaagacagagggctctgatctgtgcgacagagtgagcgaaatgcagaagctggatgcacaggtcaaggagctggtgctgaagtcggcggtggaggctgagcgcctggtggctggcaagctcaagaaagacacgtacattgagaatgagaagctcatctcaggaaagcgccaggagctggtcaccaagatcgaccacatcctggatgccctgtagcccctgcccgcatcctccagggggcccagggtgcctgcactttgctgtggcaggcagattgggtggtagtgggaggttgtgcatggaggccagtgaaagctgacatctgtaaaaggccttcaaggaagagaaaccaggccctgcgtcaggcagtgtgagtttgccgtttgtccttaactttctttgtgactagttgtttaagaacaagaagaatttaagaaaacctcccattaagaacaaaacatcttggggtttggaacaagggaattctcagtattggatgggtattctgttctgaagtctaagatattttgcagcctataaaggccccctggttttatgccct

SEQ ID NO: 250722 - DNA, 879 bp, Homo Sapiens
  misc_feature (211)..(424): n is a, c, g, or t
  misc_feature (456)..(470): n is a, c, g, or t
  misc_feature (513)..(542): n is a, c, g, or t
  misc_feature (546)..(718): n is a, c, g, or t
  misc_feature (735)..(796): n is a, c, g, or t
gggatggagcgcgcgggcgctactagccgcgggggccaagcccctggcttcttactgcggcttcatactgagaggccgagccgaggcggcgcgggtgcaggagcaggacttacggcagtgggggctgacagggattcacctacgctcttaccagctgggaggggaagttaaaaaactggggcttcgcccccgcccgggggcgcaaccattnnnnnnnnnnnnnnnnnnnnnnnnnnnnnnnnnnnnnnnnnnnnnnnnnnnnnnnnnnnnnnnnnnnnnnnnnnnnnnnnnnnnnnnnnnnnnnnnnnnnnnnnnnnnnnnnnnnnnnnnnnnnnnnnnnnnnnnnnnnnnnnnnnnnnnnnnnnnnnnnnnnnnnnnnnnnnnnnnnnnnnnnnnnnnnnnnnnnnnnnnnnnnnnnnnnnnntgagttatttcccgccccgcgcccgttccttnnnnnnnnnnnnnnngttatggtccccccaccctcccgctcccttttccacgtttttnnnnnnnnnnnnnnnnnnnnnnnnnnnnnntcannnnnnnnnnnnnnnnnnnnnnnnnnnnnnnnnnnnnnnnnnnnnnnnnnnnnnnnnnnnnnnnnnnnnnnnnnnnnnnnnnnnnnnnnnnnnnnnnnnnnnnnnnnnnnnnnnnnnnnnnnnnnnnnnnnnnnnnnnnnnnnnnnnnnnnnnnnnnnnnnnnnnnnnnnnnnttcctttgttacttctnnnnnnnnnnnnnnnnnnnnnnnnnnnnnnnnnnnnnnnnnnnnnnnnnnnnnnnnnnnnnnatgtgggcgtcccgcccagtatttatgccccccgcggctctttcccgcccctgtatatatttttcttttcccacccttttact

SEQ ID NO: 250723 - DNA, 811 bp, Homo Sapiens
  misc_feature (630)..(630): n is a, c, g, or t
  misc_feature (765)..(765): n is a, c, g, or t
ggggagcatcatgaagaactgcattggaaaagaactctctaagatccccatgccggtaaactttaatgagcccttgtccatgcttcagcgccttactgaagatctggaataccatgagctgttagaccgagctgcaaaatgtgagaattctctagaacagctctgttatgttgcagctttcaccgtgtcctcctactccactactgtcttccgcaccagtaagccattcaacccactgcttggggagacctttgagctggaccgattagaggagaatgggtaccgatccctctgtgaacaggtgagtcatcatccccctgctgctgcgcaccatgctgagtccaaaaatggctggacattgcgtcaggaaatcaaaatcaccagcaagtttcgaggcaaatacctctccattatgcccctcggtaccattcattgtattttccatgcaactgggcaccactacacttggaagaaagttaccacaactgtacacaacattattgtgggcaagttgtggatagatcagtctggcgaaattgatattgtgaatcacaagacaggagacaagtgtaatcttaaatttgttccttatagctacttctctcgggatgtagcaagaaaggtgacggngggaagtgacagatccatcaggaaaagtccactttgctcttctggggacgtgggatgagaaaatggaatgtttcaaagtacagccagtcattggggaaaatgggggtgatgctccacagagaagccatgaagcanaggaaagcagggtcatgctgtggaaaaggaatcctttacgaagaag

SEQ ID NO: 250724 - DNA, 792 bp, Homo Sapiens
aacttgaaaaaaaataataattagaacatatttgcataagatagctatttactctggaaaccaacaacttttgagatttcccttgccctgtggacgcccagctcctgtcatccttccttaggtcctgcagtacagtcttcccctgaatgccaccggggacccagggggactccacccccctaagcaagcacacacatactcacagttgatgagttgctggtctttgagtcccagctctcttaccctccctttactccaccagcccgacgacccatgactgaggaggggatttctacagtctcaggatttagaaagtctgtaagccatccatgctccagaaagcaccgatctgttgtagttgcaaaaacaactctgtaatttgttgaggttctcaaactgacagccagcgagactgggtgggaggccctggatctgttctccctgactgcgggaggagcagccactaggactttagcaggaagcccacatggaggctccgccaggctgtggcccagctggtgatggcccttttgctcctggcagcctgaggcacagctgcctgtattgtcctcatctgttctgactgaaggatggaggtgctgaataaattaggcctcaggcctctaccaccagagagctggagaatgggtccacgtcattcaaggacctgaattttttatgctcaggagcattggaatcctcttcttccagggaggaattagcctgcaaggttaggacttgaagagggaaggtatttaataactgggcgaggatgggtgtggtggctcacac

SEQ ID NO: 250725 - DNA, 1445 bp, Homo Sapiens
  misc_feature (843)..(871): n is a, c, g, or t
ttcagtgtggtactttgaaatatacatacatataatatgtacacaaatatattctaaatgtcccgcttacaaagaataattgcctttgcatcctgaaaaaaattgcatgagagtactgttacactgtactctgcagctctgcaatcccattacattttatagatgtgtaaatgggctattaatactcctatgaattttatattgcatgttagagctattatatcaattataatgactgatacctgggaaataaactatatttaccctcattttcatatggacagacttcttggacccttaatggattttttcatatgtggtttgggttttatgaaaactggcataagagattcaatgactttgccctctgcctaccatcactcttttgccttctaacattgcacatatatacaccagccatggcacagagcacatacacaaacacacaaatatttcaaaatgagaaaatgtctaacaatactgcataggacattgacgtggtaatacaaccagcatctgtacctagatgctactattatcagaacatcggttattctcatgacataggagtttgtctcttctccctcaatctccttcatagaacagttaagtttcttttaaagaaagggaaaaatggatgcttagaaacatggtgtttttaatctgatcttgccttctggcttaccctagagattgtgtatttgtgtgtgtatgtatgtgtaaaaatcacattatatacaatacaatttttacagaaagcctggcagctacaaataagaggtagaactactcaaaactatgtttcctgctgcaggaaaaaattcattttctttacagtaattnnnnnnnnnnnnnnnnnnnnnnnnnnnnntaagtggcaggttaggccccataatttaaacaacaaaatctaggaagaaaaatattcttcaatgtactcaacagataagttcattaaagggttaaaaaaagttgcataggaaaaaagggacattccagcacttgctacaatgatggcaatggtttctctatagggagtaaagtaccttcagttttttcttcttttgataactctaagattaggatttacaagcaagagcaagttaaaatagcagcactttttccagtcctggagagctctataagtgagaagggactctgtctggaggtcaaggtttgttctaccagacaaagacaagccagtaagcacagctccaaagctaaagttttaagttccttcaacattttcataaaaggtgttacaaaatccttaatacttccatcctctgcttaatagaggcaaaggacagggtctgtgggtgtctgtgtcttgagcgacagaatttggttatcaaaggacacatctgaaagtttaagaacaaaagggggattcctcagatgctgtttttaaggaacggtgcactattgtcttgattgtatctatg

SEQ ID NO: 250726 - DNA, 1179 bp, Homo Sapiens
ggagcctgtgagaaagagaagcagagcagagatttccaggggcggatattgagtgtcgacccagaggaagaaagggaggagggcccgcctaggattcctcaggccgaccagtggaagtcttcaaacaagagcctggtggaggctctggggctggaagccgagggtgcagttcctgagacacagactttgaccggatggagtaaggggttcattggcatgcacagggaaatgcaagtcaaccccatttcaaagcggatggggcccatgactgtggtcaggatggacgcttcagtccagccaggcccttttcggaccctgctccagtttctttatacgggacaactggatgaaaaggaaaaggatttggtgggcctggctcagatcgcagaggtcctcgagatgttcgatttgaggatgatggtggaaaacatcatgaacaaggaagccttcatgaaccaggagattacgaaagcctttcacgtaaggaaagccaatcggataaaagagtgtctcagcaagggaacgttctcggacgtgacatttaaattggacgatggagccatcagtgcccacaagccgctgctgatctgtagctgtgagtggatggcagccatgttcggggggtcatttgtggaaagtgccaacagcgaggtgtatctcccgaacataaacaagatatcaatgcaagcagtattggattatctctataccaagcagttgtctcctaacttggatctggacccgctggaattaattgccttggaaaacagattttgcctgccacacttggttgcacttgcagaacagcatgccgttcaggagttgaccaaagccgccacgagtggcgtgggcattgacggagaagtgctctcttacttggaattggctcagtttcacaatgcccaccagttggccgcctggtgtttgcaccacatctgcaccaactacaacagtgtatgctccaagttccgtaagaaaatcaaatcaaaatctgcagacaaccagggaatacttcgaagcggcaccgtgggccccctgtgtggtacctgaaggaagaagatcactaccagcgtgtgaaaagggaacgagagaaggaagatattgcactaaataagcatcgtcaagacgaaagtgggtgcttctggaattcatctccagcagtggcctgaagaggaagag

SEQ ID NO: 250727 - DNA, 456 bp, Homo Sapiens
gggcacactgctgtatttagagatgacgtcttgggcttgtctattcttctggctctagcaatgccctcagagagctttggccatttcttcccggctggcttaggcaacacctggattttgtggaatgccaaccctgggactgtgataagcccataatatggtccattgagccaggagtccaccacttgccttcactgtagagtagccctgcccctcacagtgggaattgggacacttgtcctgccaacttggttcctccctctccatctctttttcccagaagtccttggtccagaaataaggggtattttcctatacgaatatgtcttctccaggtatcagcctcacagtaagccttaggctagctggggcatttcctcttcacatagagaaaattccgggatctgaatccttcagggcttgatatgctaaacatgagctaaaacaattgaaaaa

SEQ ID NO: 250728 - DNA, 848 bp, Homo Sapiens
gagtcattagaagcgcaagatggcgactgcggccgaaacctcggcttcagaacccgaggctgagtccaaggctgggcccaaggctgacggagaggaggatgagagttaagagcggctaggacaaggagaaaggtgttatcgcgggctgtggccgctgcgacatacaagaccatggggccagcgtgggatcagcaggaggaaggcgtgagcgagagcgatggggatgagtacgccatggcttcctccgcggagagctcccccggggagtacgagtgggaatatgacgaagaggaggagaaaaaccagctggagattgagagactggaggagcagttgtctatcaacgtctatgactacaactgccatgtggacttgatcagactgctcaggctggaaggggagcttaccaaggtgaggatggcccgccagaagatgagtgaaatctttcccttgactgaagagctctggctggagtggctgcatgacgagatcagcatggcccaggatggcctggacagagagcacgtgtatgacctctttgagaaagccgtgaaggattacatttgtcctaacacttggctagagtatggccagtactcagttggtgggattggtcagaaaggtggccttgagaaagttcgctccgtgtttgaaagggctctctcgtctgttggtttacatatgaaccaaaggacttcgccctctgggaggctttaccgaagagtttggaacaagttgccgattcgttggggaaaaggcctgtggccttccggggccttttgacagaaaaaagttcccacagctcctttttccggcgacagttggagatccactctatgatatggagg

SEQ ID NO: 250729 - DNA, 893 bp, Homo Sapiens
ccccaaggtgagggagaggaggatgaggttaaggcggctaggacaaggagaaaaggtgttatcgcgggctgtggccgctgcgacatacaagaccatggggccagcgtgggatcagcaggaggaaggcgtgagcgagagcgatggggatgagtacgccatggcttcctccgcggagagctcccccggggagtacgagtgggaatatgactatacgagggcccccaaggtgagggttctgcctgaaagaattagcctccagagccaggaagaagctgagaaaaagaaaggcaagattccacctcccgtaccaaaaaaacccagcgtgctgtacctgcctctcacttctcccacagctcaaatggaggcctatgtggcagaaccaaggctgcctctcagccccatcatcaccctggaggaagacaccaagtgtcccgccaccggcgatgacctgcaatcacttggtcaaagggtgacttcaactcctcaggctgacagtgaaagggaggcaagccctctggggagttctgtggaaccaggcaccgaagaaaaaagtttaatcagtgataaaacagctgaatggattgcagaggatgatgatgacgtgtttgtggcttcacgcacaactgaagatttatttactgtgatacacaggtccaaaaggaagctgctcgggctggaaggagatataaagccgtgaaggattacatttgtcctaacatttggctagagtatggccagtactcagttggtgggattggtcagaaaggtggccttgagaaagttcgctccgtgtttgaaagggctctctcgtctgttggtttacatatgaccaaaggactcgccctctgggaggcttaccgagagtttgaaagtgcgattgtggaagctgctcg

SEQ ID NO: 250730 - DNA, 442 bp, Homo Sapiens
actcagaaattataaaaatagcagacatcaataaaatacattctacacagaatacgccaaccatacactactcttttttgataataaaaaatgtatttactgagccaccacacccagcccctgttttgtttttgttttgcttgcttcttagggttgtttttctatttatggtaaaggcattggctttccatttgtagcatcaatagaatatttcccatttacaataaccttatgtcatagtaaatggtaaagggatttaaagcagtggttttcagccgccagaggcctgagagagtttgggcacactctgtgtgatcgggcagaaggcctgtgggaagtttagcagaggacagggccagggaaaggtgatgggacagtgggggtccgtcctggtcaccaggcccctggggtcctggcccacctggcttggaagctccccaac

SEQ ID NO: 250731 - DNA, 942 bp, Homo Sapiens
gacagcagacagaaatgggaacagatcgagggcaactccaagctgaggcacgtgggcagcaacctgtgcctggacagtcgcacggccaagagcgggggcctaagcgtggagagtgtgtggcccggccctttcgcagcagtggaagttcacgctcaacctgcagcagtaggagggtccgggaggccctgccgtcctgtctcctgcaccattgggtggagtctggtgatcacattattgattatgtttcttaaactttccgcgaaactaatatacctcagtattccatcatggtctgaaagtcaaacttcggcaaggcacggacgactgtgcagacacagcagcggcaagaagcgagaactgccctccccctcctctcggtgcagcccagccgggcccccttccccaggccggagcgcccctcttccttccagctttcacttctgccggctccgcaactgagtgacacccagcgacaaccgactggggagtggtagaagcaactgaacggatgcgtgcgagctgaggacagggcgggaggagggggcacacatgccccaggggagcgaggagaactcttgaaatctccattttcaatcccttcgaaatcacgtatggtttccacaaagccgagtcgtgtcacgtggcaggtttacgtcaatagtccctctctctgctcctccattcgcaagtgtcttcctgggccagactcccctccacctcatgtacttgctatattgaggatgaagttttctatggtgggacactaaatataaagctatatagagaaaagaatgtacgggtcatttccctatgggtttctggaaaatcatcgccatcttggtatattcccccacaaaagccggttccccagcctttccggggagaagggggcccagagccccgtttgtggagccaactttcttccccagagagggagggagc

SEQ ID NO: 250732 - DNA, 631 bp, Homo Sapiens
  misc_feature (29)..(29): n is a, c, g, or t
  misc_feature (396)..(404): n is a, c, g, or t
agataaatattgtcccttcattcataagnggacattaaactggcccaggaggtaaatgaaatagggattctggctgagacacctgagcccccattcaagagtactattctcattttgacttctgtgcacttgcatatcatgcgtggtaattagcaatcccctcatgcccaccacacctggcacctacaaagcctgtgtttgctggaccagctaaggggctcagccatgtacttacccaatcatatccaccatcaccaaggctgcttcttaggagtgatgtgtggctcaattccctagatgattggcaaaatgtaaaggagcctgtaaaaagtaagccctttgctgggtctgctgtcccattcgcctctgtagaggtctaaattatacatgttgggnnnnnnnnnaatggattgatgttgtatcaaagtgacatttgacaccacttcactgctctaatgttgcagaaaataaagttatcagatgagcctgtagaagcaaaagaagattacactaagtttaatactaaagatttgaagactgaaaagaaaaatagcaaaatgactgcagctcagaaggctttggctaaagttgacaagagtggaatgaaaagtattgataccttttttggggt

SEQ ID NO: 250733 - DNA, 749 bp, Homo Sapiens
  misc_feature (496)..(496): n is a, c, g, or t
  misc_feature (631)..(644): n is a, c, g, or t
agaatgcttagtactgcaagactgttgaatacctgttgaatattcctattgaggttttttcctaaacatacttcagtaacatcttaggacaattcactggagaaatgttgatccctggctggaatgtcataccattgacccatttgaagagttaaagctggatttgactgctctattctaccaggaatattgttagggtagccttttaccagtttctaaacaattgtaatcatttattgactcagcaattcctcagataacaggtcaaaagatgtacagatacattctgaagttttcttgctattaaaggcacaagagtttccttgtattttgactgacaatgtagcatgtttccattttagtttgttagtgatggtggttttccctttgaaagccatttggtatattcaccataacaattagtttaatatgattacataagaaaactatgataaaacccagcaattttagtagttgtggaaaatacggttttttnaaatcatgtttaagaagaattgcaagacttgaaaccaaatcctgatgggggaattctgtttaatcctgtttaatctgtttaatttctgtttaatccttagtttcttaacctgcatagcttatcctgtattgtacnnnnnnnnnnnnnnaaactcccaaacaagaagcttgaaacttttcctgtattttaaaattgaaatttggtcacagggtatagtcagatttttattaaggtttggtttgacaacctttaa

SEQ ID NO: 250734 - DNA, 958 bp, Homo Sapiens
cagaatcagctgtcctctcagactgtgtgggtggtttccccggccgcagctccgtacgggcttggattgctgggcctcggtgcaccccagcctcccccactcgggttctagagcttgagctggcaggctctttaactctgcttcactgttgctcttggcaacatccacttccgggagcgagtgccgtttcccccgctcaccgcgggctagggagcgtgggattccggactgtgagcggctgttagtgcgtcgcagctgctggcgatccggcgaccctcggccggcaggacccgcgggccacgcagccggggccttctcaacgcctcagtacctcggcgggaccgccatggttctgctgcacgtgaagcggggcgacgagagccagttcctgctgcaggcgcctgggagtaccgagctggaggagctcacggtgcaggtggcccgggtctataatgggcggctcaaggtgcagcgcctctgctcagaaatggaagaattagccgaacatggcatatttctccctcctaatatgcaaggactgaccgatgatcagattgaagaattgaaattgaaggatgaatggggtgaaaaatgcgtacccagcggaggtgcagtgtttaaaaaggatgatattggacgaaggaatgggcaagctccaaatgagaagatgaagcaagtgttaaagaagactatagaagaagccaaagcaataatatctaagaaacaagtggaagccggtgtctgtgttaccatggagatggtgaaagatgccttggaccagcttcgaggcgcggtgatgattgtttaccccatggggttgccaccgtatgatcccatccgcatggagtttgaaaataaggaagacttggtcggggaacacaggcaaggggctcaacggtcatttaaaagagggcaaaagccgccagcctgttggttggggccaagcccaagggagccc

SEQ ID NO: 250735 - DNA, 597 bp, Homo Sapiens
  misc_feature (133)..(141): n is a, c, g, or t
actctgggtgaagtcagaactttgtagaacacagaacataaagggtgagagaaatctgttaatataatgataactgagaacacctttgccctgaagtcagttctcacagtatagaagagaacttaaagagggnnnnnnnnncaatatgaagatagggaatgcaggaaaacattattctggaatttggaccatacactatgttacaaaactaaaagtggaaaaaacttattggtgaatgaatataggaaacattttgcccaatgccgctcttcattaaacatcagagaattcacacggggtgaaacctgggtcagcatccctaggttgagaagggatgcatttttctgctactactacagtttcacagaatacctgagaagacacacttggagaaaccttttgggtgtaatgaatgtgggaaaacctttcatcagaagtcagctctaattgttcaccacagaactcatataagacagaaaccctatgggtgtaatgaatgtggaaaatcattctgtgtgaagtcaagaggccagagaaaatgcacaaactgtaggaaactataggaaagcatttactatgaggttatattttatggag

SEQ ID NO: 250736 - DNA, 939 bp, Homo Sapiens
  misc_feature (404)..(404): n is a, c, g, or t
tcctatagcaagtccctaagataaaaacatctgagcagcaaatattccccacaagagaatgaccactatgccagagggctgtctttttgtttggatctgtagggagaggggagatgtaattgtcaagctcaaggtcccctacccgccttccttacaggaccctataccctaaagctattagacgttcacagtaaaatataaatgactagaaataatgtaaaccttattctatgctcctcaatagcacaaagtcttaacccaagaaagaataccataacagcagattttaggcatctcttggtatatgggggaatttatgttttggatagtcggatttctcagcccattactcccttgccaaaagcataccacaaggaggatcacctacctggcctctcacatancgtgaagacctatacaaccccattgtaaaatggcctctgtttaaaagataaactttgaagaactagtgtttcctggtgtttgttctggataatgatagaaagaaacattcccacagatgtaggctctggggaaaaatctaaatgtcagagggcaatgagagcagctgattgactctagtgctcacagctcaggggaatcaggtgtgacacagcatttaatcttcatttaccacacttttcatcaaattgttcaaattatttccatagagaagggaaatctacattattttacatattgataaatacataggaacatgctgatctgatttcagagaaagaggatttctacttgaaaatgacacaggagaaagttttgtcttttcttctcagagctggagagaagagaggtattcagggggacagaatataagtaaataccaaattatcagtgggtcaggagtctgcatcttcaaatctcctatgtttggagcaatttaagacttaattaggttggacctttagagatagaaaagag

SEQ ID NO: 250737 - DNA, 1696 bp, Homo Sapiens
ttgaaatcctgttattatgtggaatatatgtaaatacatatacacatatgtgtgtatatcattctgaatagtactgcatacatttgagtcccaggaatttggacctcaaacctcctatttgcacacagttataccactttgcaccaccaagaaaagaaaacctaacgggctcagggcaccgtccctcgtgtgcccggggtccagagcccagggcaggcacctcatacgtggctcgtcttctcggccagggcgtggtctgtgggcagcgtgaacttgatggtgctctccctctcccagcctctccggatcctggcgagtctgcggctgatgcagggcaggagaaacagggctttggccaggatgacgacgcagggcaccagcagcgtgagcgtgaaggtgggaggcaggtagaacttgtagcggctctcctcgaaggcgcgggtccagccgtaggtgagcgtgtgcagtgtgctcagcacgagggccacaaagcccagtgaggactgaacgaaggctgaactccctccagttgagcgagtttgcaatggacggcagtgaggtcacgcccagcagggacaacgtgccgagggccagcactcccaggggagaggtagatctccatccggccagacctccttcctcccacccagaggtggctcttgttggccaagacctgcttgactgccaggttgaccaggtcgtagcggtgggcgcggcgcagcggcaagcagaagctgtagagggcgtgcagggcggcgcagaagaagctgagcagcccgatctgcttgcggtgctgtagccagtggtccagccagtcggggaagcgctggtacttggtgccgcgccgcagctgcagggcagccgccagcacgccgggcaagtacacgagtgacagcagcacgtaggccacgcacggcagtgtggtgttgaccacggacacgggcagcttgaagaacttgttctggctttcctgcacatagggctgcagaacgtcccggacgaagttgtaggcatagaagcagacgaagagccccagggccagcagggtgggcaccttccaggccgggaggaggcgcaggggcatggcctccacctcccaggctgacgccagggatcccatgtccacgggcatgaagcccatggcgagcgccatctccgagacagcacgcttggcttctggctggtcaccgcagatgggcacctgcctgttaccatcccttgggccagcctgcagggtccaggcagagatgacattgaaggccttgaccactgtgcaagtggggaagagggaggccaggtactcagcattggactcacgatgctgaaggtgctcttgctctgtagggttgctcacatccaccaggatcttgcccgccagctggtcactgagactgcacagtgaagagtagtgctcccggaacacagccacaaagatgacctccggggagctcactgcctcctcttggaaagtcacttgggccgctgagggaaacagcctggctgtgcgtttggggttgcggctccccaccaccactttgaagccagagcccaccaggcgtgtggccagggagcgggcaaagtccccgctacccaggatgcccactttgggggcctcatcggggaccttggcaaggctactatcgctgtccaccaggtggaggctgatcagtggcttgtccatctcttctggcatttt

SEQ ID NO: 250738 - DNA, 979 bp, Homo Sapiens
tcatagtagttggtggctgtgcaaagttctgtgggtaaagaaaggattaccctgcataccaaaagcagattgtcctatcacgttcatctgtgtccccattactgaactgcccatagttggagaaccttgaggaggtacaaactgattaagccactgatttggtttctgttgtgataactggttcatgctaactttgggtttctgagggccaaagagattattaagggcagacatatctgtgggtctttgttgggtctgctttgcaccagcaggaggaacactcaaagcattgaagtttggcaaagtgggaggtgttcccagagtcatcttggtcactccaactgtgcttggactactgtagaagttctggtttgtattaacgggcatgttgaatcctgaagtctgaaagcccatattggcatttaggccatttgtcaaatttctctttgtattatcagttggtgtagaaaacatcataccaatgcccatggaaggaacagaagtgaaagtacttgaagcagaagatttaggggtactaacagaaaggctggtcaaggatgacatattatccatcagtgtgtctgtcaagtccttagtctgtttaacagtagcaacaggtgtgtgcacttggggtttaagaggctgctggcttttcagcttctgtgcctgctcttgttcttttgctaatttttgtttttcttcaagtgtaagtgatgctcttttatgtttattctgtaacccgtcctctttattttcggactcactgccagtcagaaggtctgctccaatgttgttaaaaactttgtcaatttgctgattcccaatatttgtaactttcatctcctcagaaacattcatttgatttcctatatccaaagatttctgctgttcttgcattatatgaagttgctccagtttagtcttatgttcagactccaatctattaagcatttcttttatgacggaaatgaaagaattg

SEQ ID NO: 250739 - DNA, 1017 bp, Homo Sapiens
agtatgttgtgccaggtgtgagtaacacttgaaagccttgtcacaaaccttacatttgtatggtttctctccagtgtgaactctctgatgttgtgcaaggtatgaatcacgcccaaaagccttgtcgcaaaccctacatttgtatggtttctctccagtatgaactctcctatgtatttcaaggtgtgatttgatattgaaaactttgtcacattcttcacatttgtaaggtttctctccagtatgaagtctatgatgacatgccaagttgtgactgtgtcctaaaaacctcgccacattcattacacttgcaagcgttctctccagtatgaagtctatgatgacgtgcaaggtttgctttgcgattaaaaaccttgccacattcattacacttgtaaagtttctctccagtatgaatggccttatgaattacaagggatgaattttgaacgaaggtcttgccacactcattacacttgtaaggtttctctccactatgaagtctacgatgacatacaagctttgacatctgaatctgaaagccttaccacactcatcacacttgtaaggtttctctccagtatgaagtctacgatggtatacaagggatgacatctgactgaaggtcttgccacaatcattacacttgtaaggtttctctccagtatgaactctccgatgtctgtgcaaggtgcgattggaaactaaaaacctcaccacattcatcacacttgtaaggtttctctccactatgaagcctacgatggtatacaagggatgacatctgactgaaggtcttgccacaatcattacacctataaggtttctctccagtatgaagcctacgatggagtataagcgatgacgtccgacgaaaggtcccgccacactcattacacttgtaagatttctctccagtatgaactctctgatgttgtgccaggtgtgatccctccggaaagccttgtcacaaaccttacatttgtacggtttctctcccagtatgaatcctcctat

SEQ ID NO: 250740 - DNA, 914 bp, Homo Sapiens
  misc_feature (278)..(322): n is a, c, g, or t
accctgtgggatggtttcaagtttagccccccacccttcaaggtgggggtcccgggggaagcccaaggtggcaaaagccatggccggggattggggacaaatacatattttttacttgccatggaacatatcctaaaagggccagcagcttttttctgctggagccacttctcagaaagaagagcaagggggaggctgccttggagcatccacaacctcctgtaaagtcactgtgatcatagtttgttcatattgtctaccctccccacaaagacagnnnnnnnnnnnnnnnnnnnnnnnnnnnnnnnnnnnnnnnnnnnnncccccttccaccatggaggaaatctctgcaacaagaggcacttgaataatatttggagagttcccatgaaaaggccttcccctcacagtgaagtgggatcaacagaacagaaaccaggtgctcaggactccatctcttcttggtcaaggggtggtggcacaaagctgatgacttcatcataggtcaggcttttccactcatctataagcaggtccctgctttcaaaggactgatcataaggatcggccactggttcatcatcaggatcgtggtactgagcaaagtaggcatgtgcaagggcttgggccgctgtaattctcttatctgagtccaatacaagcatcttctccagcaagtcgacagccaggggattggcaccaataaatacattcgcaaagttcatcttcggcatctgagtcaaagactgaatatagtttcttgcagactctgaggagattttcttcaaaagctcagccctggggttccaacgagtcttaaaatgagcttcaactgatcatatggtctgtaccaggaaacatgttcttccagtcaacagctcggccattatgcatcccactgaccaaatatcaac

SEQ ID NO: 250741 - DNA, 548 bp, Homo Sapiens
ctcccctgattgaaccgtagcgccttgtgatggcaatgaagaggcccatgaaggagcaactggaaccagctgaaggaacattgggatcatctgcttgagagaacaaatgacaaagggaagaagctcaatgaggccagtcgtcaacagaggttcaacacaagcatccgggactttgagttctggctctcagaggcagagacattgctggccatgaaagatcaggccagggacttggcttcagcaggaaacctactcaagaagcatcagctattggagagagagatgttggctcgagaggatgcactcaaggacctgaatacattggctgaagatttgctctccagcgggactttcaacgttgatcagattgtgaagaaaaaagataatgtcaacaagcgtttcctgaatgtccaagaattggcagctgcacaccacgaaaaattgaaagaggcctatgccttgttccagttcttccaggatctagatgatgaggaatcctgaatagagggagaagttgatacgagtgagctcccaggactatggggaga

SEQ ID NO: 250742 - DNA, 1543 bp, Homo Sapiens
  misc_feature (62)..(62): n is a, c, g, or t
  misc_feature (87)..(87): n is a, c, g, or t
  misc_feature (1175)..(1231): n is a, c, g, or t
  misc_feature (1472)..(1472): n is a, c, g, or t
ccataaagatcagcccaggacttggcttcagcagaaacctactcaagaagcatcagctatgnaagagagagatgttggctcgagagnatgcactcaaggacctgaatacattggctgaagatttgctctccagcgggactttcaacgttgatcagattgtgaagaaaaaagataatgtcaaccagcgtttcttgaatgtccaagaattggcagctgcacaccacgaaaaattgaaagaggcctatgccttgttccagttcttccttcttttaaatttcatatcctcactccctatccaatttccttcttatcgtgcattcatactctgtaagcccatctgtaacacaacctagatcaaggctttaagagacttcactgtgatgcctctatggaaagagaggcattcctagagaaagattgttccaatttgtcatttaatatcaagtttgtatactgcacatgacttacacacaacatagttcctgctcttttaaggttacctaagggttgaaactctaccttctttcataagcacatgtccgtctctgactcaggatcaaaaaccaaaggatggttttaaacacctttgtgaaattgtctttttgccagaagttaaaggctgtctccaagtccctgaactcagcagaaatagaccatgtgaaaactccatgcttggttagcatctccaactccctatgtaaatcaacaacctgcataataaataaaaggcaatcatgttaaaaacccaaaaccactcctatcgcttccgttttgcctttctataatcacgtaaccacctctaacaaacctacccaccctttcacccctcttttccactcccgccatgccctgttccactcgtccgtttgtcccccctccccacctttccccttctctctccacccccatgaaaacccttccgacccccgattcttcctgtcggcacctgtatctcacaccccttacaagtaaccacgtctcccacagtttttgcgtccttcccacccatcccctgttcaccttcatcctcgcccctctgatccgtgattcgctgccacccgtccacccccctgggcgcatcccgctcgccttccttttcccctcacctcccttacatagctatgtcccctttacccgatttttccatctatctttcatttctccctcctctcttnnnnnnnnnnnnnnnnnnnnnnnnnnnnnnnnnnnnnnnnnnnnnnnnnnnnnnnnnattctttccgttctgcgcgccccatccccctctttgtgagccatcttcctcccattcttgtcccgcgccacccctccccgctctctactcctcgcttcactgccatccgccattcgcctcacttaatgcttgccctctcccacacatcggaccggcactcgtcacaacctcatgtgcaccccttctctaccctcccccacccctccgccgctttttatacatgtagtgagccctggcatgngaccgctttatggcgtgcgatactctcagagcgacactcgttcgtgattgccgacgtcacttacgctaccg

SEQ ID NO: 250743 - DNA, 877 bp, Homo Sapiens
atgagcaccgcaccttgctggttttcttttttagtgggggagagaaggcaaatactgaaaatatcagaaggagaaacaggacacaggctaaatgtacagtttgagtaatgtagtcatgctacctctatcgctcccacatatggcccttctccaacctgaacatatgctaacatgtataacacataatcaaactccatgtctttaaaagcaatccatttggcccagtctttgagccagaccagctgttgttaaagtgtgggatctgagtaatgcctatactatactattcactgagtatcccgagactttctaggatgcactcaaggacctgaatacattggctgaagatttgctctccagcgggactttcaacgttgatcagattgtgaagaaaaaagataatgtcaaccagcgtttcctgaatgtccaagaattggcagctgcacaccacgaaaaattgaaagaggcctatgccttgttccagttcttccaggatctagatgatgaggaatcctggatagagtatgtgccaccagctcaaaaatgtgtggataatccaagcgagtagataatccaccaaacttgttccaatttatgctgaaatgaaatttgtacttgtttcttgaagatagcactacttcatgtttgcctcagcttaaggttaacattggttttatttttcccaaattcccttactggatgcaagccagagaaagacaggtgtggaggaagtgaagagcagttaacatacatgacaggaacaaaactaagaagccatctgcatttgctctgtagttcattgaataatatgcaatactcacagagacacctggacatttacacagctgatcagaaccttgtcattctatatccagtt

SEQ ID NO: 250744 - DNA, 718 bp, Homo Sapiens
  misc_feature (94)..(94): n is a, c, g, or t
tgaaacaccagacctttgcacatgaagtcgatggccgatctgagcaggtgcatggcgtcatcaacctggggaactccctgattgagcgtagatntcgtgatggcaatgaagaggccatgaaggagcaactggaacagctgaaggaacattgggatcatctgcttgagagaacaaatgacaaagggaagaagctcaatgaggccagtcgtcaacagaggttcaacacaagcatccgggactttgagttctggctctcagaggcagagacattgctggccatgaaagatcaggccagggacttggcttcagcaggaaacctactcaagaagcatcagctattggagagagagatgttggctcgagaggtaagtagtgttggcatccctctcctctgggcagaatagaaatatttctggctcttctccctcccatgttaggagaccatttgaaaacatagccttgcaaaattgttcttagtgttctcaaccagcagtcattttaattaggtaaaattaacgggctgtgaagacattaaaactgtcactgataatcaattatccctaaactatagactttaagattccagaaagtggacctgggaaactatcttttttatcttttactgatgcatacatataagccaattgtctttaagctatatatttgatctggtatttgaaagaaagtggaagtttactttatagaattacaaacaaaa

SEQ ID NO: 250745 - DNA, 510 bp, Homo Sapiens
  misc_feature (262)..(276): n is a, c, g, or t
gtagctgggactacatacgtgtaccagcacacccagctattttttaaaaaaactttgtagaattttgaatgagccacagtgcctggctgaggatggtttcgagttaaaagttttcacgctgttacaatttatagtttcacaagaatgtttaaacatcagataagtttgatcataagactgtttcctagtatttattttataacgctctagaatttctccaaatatattagagggtggcatagcagtctaaaaaaatattaannnnnnnnnnnnnnnaatgccatagaacatttttgctcaaatcaaataatgatggtattgcaattctgaaaatgtttggagttactggcctaaaggtaaggggagcaagattagttgataagttgaatgaatagacagggcagagccagtatacctttggtgaactagtaagtttatttgcgtgggacattttttttctcttttgcagtactggcatagcctgggtgcagtggctcatgcctgtagtcc

SEQ ID NO: 250746 - DNA, 741 bp, Homo Sapiens
  misc_feature (60)..(60): n is a, c, g, or t
  misc_feature (84)..(84): n is a, c, g, or t
aacggccagtcagcccaccaacacttccctcccctaggctgggttgtgtcttgcttccgnctactgatgttgtgtctaaaatgncaaataattcccaaagaaactaagtaagtatgattatcaattttctccttcttaaattcctccatgatttcagagaggacattatataaggtataaaatatacgcagacatggaaaaatatttttttcaggctagtccactagaagcagtgggaatagagccaacaattttaaatggtcactagtttcttttttcaaaaacccagatttaggaattctataaagaatatgattgttaaaaaatatcgctgactttagaggaaaattatgtgacagttttcattaagggtgtcatttaaagagcttattattctctaggtcagtaagaataggctaaaagttgatttctagatatatgccacagttctgtctacaagctattattaagatctgataacactatgttccaattttacagtacctctcacacattttgtattaaggagtcacttatttgcaccaatatttgagttcctattatatacccaatcacacggtgacaaatgctatgaggaaaaatacaagagagtaaaggggaggagagtgatgaaaagtgcatgtacgtacatgtctgtgagccattttatatgatgtgatgacagaaggcctctttgataaggtaatacttgtagagacaaatgaagtaaaacagtgagtc

SEQ ID NO: 250747 - DNA, 663 bp, Homo Sapiens
  misc_feature (429)..(470): n is a, c, g, or t
  misc_feature (553)..(588): n is a, c, g, or t
ggcacgagggcctggtatcctggagcactcggtcatgtacccggtggactcggtgaagacacgaatgcagagtttgagtccagatcccaaagcccagtacacaagtatctacggagccctcaagaaaatcatgcggaccgaagcttctggaggcccttgcgaggcgtcaacgtcatgatcatgggtgcagggccggcccatgccatgtattttgcctgctatgaaaacatgaaaaggactttaaatgacgttttccaccaccaaggaaacagccacctagccaacggtattttgaaagcgtttgtctggagttagaaagttctcttcttcaacacgtccctccccagggtgttcctccctgtgacccagccgcctcgacttcggcccgcttgctcacgaataaagaactcagagttgtgtgtgcaatgnnnnnnnnnnnnnnnnnnnnnnnnnnnnnnnnnnnnnnnnnntgcttttttctgttcccctccgctttctgaagcctggggagaaatcagtgacagaggtgttttggttttattgttatgtgggnnnnnnnnnnnnnnnnnnnnnnnnnnnnnnnnnnnnaaacattcaaaagcaattaatgatcagacataggagaaaccctgaatagaaacaaaacttttgaatgctggattc

SEQ ID NO: 250748 - DNA, 1025 bp, Homo Sapiens
ggcctgggtggcgaattcggcacgagggctcgttttagctggcaaggatgcagcagcagagtacgatgagttggcagaacctcaagactttcaggacgatcctgacattatagccttcagaaaggccaacaaagtgggtattttcatcaaagttacaccacagcgtgaggagggtgaagtgaccgtgtgcttcaagatgaagcatgattttaaaaacctggcagcccccattcgccccattgaagaaagtgaccagggaacagaagtcatctggctcacccagcatgtggaacttagcttgggcccacttcttccttaaaaggttccactggagggcagatcccaaaggacagtatcaccgtaaacctgcgttaaaatgtggaagctgctgcttcattaggccttgtttataacgatgtacccatgcactacggaattctattgctaagaaagtgggagcataggcaaggcattgggaacacagggtagctgctgttgctcttgctctcacccctgttgacaccagtaagtctgtgtctccctcactgaaccctgcacgttgagtaacagcagcataattccatcctaggaaaggggatgggtgttccttggaatggcattgtatttaccacctgagaaactctgtactgtctcttgatctgatctcactaaggatcacaatgtcacagatgaaacttaaatgataacccaaaggtagacctgctgttaatgatccagcattggtcacaatgtaccaactgctttctgcattccgttaaatatcatctaacagtctaaaacatatcccttcattgccataatggctgccattttgccatagatttccatataactgaaaaaactggaattgtcacttttatctttaaaaatcatgatgattggaaaaaaacctgggaaaagttggttaagggaactctccatttgcccctcttttttctaggggaaatccgggagacccgaaattaattgggttcctaaattttttttcccccgttaaaaatatt

SEQ ID NO: 250749 - DNA, 201 bp, Homo Sapiens
gggactgattctttccatagtacaatgttttcaaggtctccagctattttttttagggagaaaggaaagcgtattactttgtatattatgcctctgcaacaattccaaggtccttgagaaaatacactaggattttgctttttacaagagagcttgaaatcaagggacatttgagagtagtaaactgggcctgggcatggt

SEQ ID NO: 250750 - DNA, 998 bp, Homo Sapiens
  misc_feature (144)..(152): n is a, c, g, or t
  misc_feature (815)..(815): n is a, c, g, or t
  misc_feature (941)..(941): n is a, c, g, or t
tataaaataagattgcaataatttctaaaataaagatatttctatcacaaggactagacaaattagtttacagtttacaagctaaagcaaatttagaatgctaaggatgactagtttttcattattctttgccctcagatgaannnnnnnnnctctgtcttggtttctaaaatttccagggttcaccaccaaccctctccttactgcccccaacatatacaaattttgcctacatttatcctctatgtatgtgaatacattcatgtagggctaggaaatgccttatactctgccgctggcctggaaagtagtcttcctacaaggggcctttgcacatctctgatttcttccattatgacttggtgctaatttttaaatccaactctcagagtttatggggatccttggtggcaactttaccaccaacaccacccacacacatccccgactcctggtctgtgcctgtgccattttctcagtctttaaacccttttctgtcccctccacctttgaaatccttacttggcaatcacatcctttttcaaatgcctactacctcaattaaacttttattatctccctaagtgaaactttccaatgtatatgatacatattagaaatgaaatcaaagttccccttttctagtcagttccccaaatggctgagccaattctgtactcttaaattatcttgttttgcaggatttttaatgcttggagtatcaatttcaactgttttactctagaaagttagatactgatgacctgggagctgatcagagcattgaaattgtaggattgaaagccccactccangtggaccggagtcgaagctaaggcttgtagtgcctagaggatgtccgccggtaaaaacaccctcttggacaaagatacggctttctgggggggagccccgttaacagccctgggggataaaacccnggggggggttctccctaaccgtagggtataacgctgggcggcgcggccctgagacgg

SEQ ID NO: 250751 - DNA, 757 bp, Homo Sapiens
  misc_feature (34)..(34): n is a, c, g, or t
  misc_feature (82)..(82): n is a, c, g, or t
  misc_feature (111)..(111): n is a, c, g, or t
  misc_feature (115)..(115): n is a, c, g, or t
  misc_feature (187)..(187): n is a, c, g, or t
  misc_feature (434)..(434): n is a, c, g, or t
  misc_feature (578)..(578): n is a, c, g, or t
ggagaatgttccttcacgattgcctggatgttgntggagatgccaccagtcagtgccacgtgcaaaacgaccaggggctccncaggggtcgaacagtgagaaaagaagtancacnttctgtagggcccaacgcggcgcttcatgtccatccagttttttacaggatgcacagcctcagcctcagtgnttttgtgaagcacttcacacggtgaatgccaggtaacccgttctaggttcaggaacccggaggaaaaccattctgagtagcattcctttcagcaccccattcatttcccggacgtccggcccctccaccagcttgagggcctgcgcctccagcaggtcggcccgcagatgcaccaggaagcgcacgccgccgtccagcttgctgatgtggtggaagaggccgcgataccggcaccagcgcgtacagnccggtcctcggcctgcagcagcaccgccgcctcccgctgctgctggcgcagatggagcacgccggcgctctgctccgccacctggccgtggtccacgccgaagccccgcgccaggcggcccagcagttcggcccgctgggcgtnctcggccagcccaccgtagaagctcacgaagtccgcgcactgaccctcggcgggcgccggtgtcttctcgcgcactcgtaggccggcgtcggcggcaccgcgcggcgcacagctcgtccatggcccgctccagggcgccggccgcctgcccgctcgccaaccggggcccgggcggccgc

SEQ ID NO: 250752 - DNA, 782 bp, Homo Sapiens
atgcctggctgggctcccccttagccgggctgccatcctccaagctctgctggggctcaggttccagggaccgcaaggtgccatcctctgacacctgggacttctcggtcagcttgtcaatgcctggagtagccaccagactggtcttgagggtgcctggctctgcaggggcagcggggcgggagccctccatggaggtgccctcctgggagccggtgcgagacaagggctcaggtgtccgccggcgccgctgcagggccttgtgaatggtgggcgggtccgtgggcaggttggccagctggtggaagatgctgcgcttgcggatgatggcgtagaccaggttggagttgccatcaaactggtactggatgatgttgttgaagacctccaggaggaagaagaccaggtggtggttctgggcggcagagaagaggaaccaggtggtggagaaggcctccagcaggtgcagcaacttgttggcagtcaccatggacaggctcttgaggtagggggacacgttgaccacgatggtgagcaggcagtcgaagaggggctgcaaccgctggtgcccgctggtgatgatcttgtggaacaccacaatgagcaggtcggcgtgggtccctgtgaagactgggatgtccatgggcacgcggattgagtagggtttgttcagccgcaccccgaagttccgctccccgctcagaagcagcaagatgaagacaccaatgtgcatcaggcccacccgagactgatcggcccgggcatcgttgaggaagaagagg

SEQ ID NO: 250753 - DNA, 658 bp, Homo Sapiens
  misc_feature (58)..(58): n is a, c, g, or t
  misc_feature (90)..(90): n is a, c, g, or t
  misc_feature (128)..(128): n is a, c, g, or t
  misc_feature (486)..(580): n is a, c, g, or t
gggtgtctcatcaaagtctcgcacagccatagcattcactgttctcattctttccatntggatatcttcctcctctccttcaggctcctntgggtttggaacaatagcgttgcttcttggagaaattntgaacacaggatcctttctcattagtttcttcctgcagttcatttctaggcatcgcagaatgaaaagaaaaatgagaaaatgaaggtaaggctagggaaaaagaaagacaatcacaattagtatcactataaatgcaatgatttcaatattggaattgatttaaagagtttgattatataaaaattcgatttgatagcattcatttttacaaggctgaaagacaacctgtaatattctttgaaactgtcaaagttagcctcactgctattcagagagagcctaacagaaatataatagtagcaagtgaaaccagtactacccatgacagataattattgtaaagataggagtccaggnnnnnnnnnnnnnnnnnnnnnnnnnnnnnnnnnnnnnnnnnnnnnnnnnnnnnnnnnnnnnnnnnnnnnnnnnnnnnnnnnnnnnnnnnnnnnnnaacatggagaaacaaacatctctactaaaaatacaaaattagccacacatggtggtgcatgcctccaatcccagctac

SEQ ID NO: 250754 - DNA, 718 bp, Homo Sapiens
  misc_feature (507)..(532): n is a, c, g, or t
tacgcccagtgttctcccagatattctgcctaacaggtttaagtaggagattaaatagtcagtttatctaaaccctctatttttccaaactagcttgagaggtcttttcatctatttttactccatgggcctctgatatgctgagatgtggcacggttatgattatggtatcaccgttacagaggcaaagggataaaggtctaccagggccaacgtaaccagaatgtgaggagagtgaagagtcggtctccgctttgcacagtaccagaatgtgaggttgccactggagagtggagagtcggtctccactttgcacagttggagctgttctcctctaactcctttgctgggttttctgtttgaaattggcccctactcctctccagccctttactgggttttctgtttgaaattggcccctactcctctccagccctttattgggttttctgtttgaaattggcccctactcctctccagtgtctgctttttgaaaccttctgttcnnnnnnnnnnnnnnnnnnnnnnnnnntccctatgatactggcagtggcaataattttccacccagagagaagcttgtggtccacaatgctcgaagaatgaatttccaagtatttgccagtggaaacggagcagaggctatgacaagagtgatttagtgttgcactttcagagcaattatctactgcagtaataaattgaaaatatcagcaag

SEQ ID NO: 250755 - DNA, 1011 bp, Homo Sapiens
  misc_feature (884)..(884): n is a, c, g, or t
  misc_feature (964)..(964): n is a, c, g, or t
  misc_feature (982)..(982): n is a, c, g, or t
  misc_feature (994)..(994): n is a, c, g, or t
  misc_feature (998)..(998): n is a, c, g, or t
  misc_feature (1000)..(1000): n is a, c, g, or t
  misc_feature (1002)..(1002): n is a, c, g, or t
ggggcatgcgcgagggcagcgaccgcgactcagtctccgcagagcccgggcgggagtagctggtggaccccgttgagctgccgaacttccgggactcccccgcgaccccttcccagcttcccgtccgctccgccgcagcgattgtctcggtgggttgattcggcacaaaccgcccgacccaggggccggtgcgcgtgtggaaggggaagcactcccctcgtggtcgcctggaggtgcgctggaggagggggtgacataaccagggactcgaggtccgccgtgggaatgatccacgaactgctcttggctctgagcgggtaccctgggtccattttcaccctggaacaagcggagtggcctgcacgtatcgcaggacttccctttcctccacccccagtgagaccagtgtcctgaatcgactctgccggctcggcacagactatattcgcttcactgagttcattgaacagtacacgggccatggtgcaacagcagggatcaccatccatctcaacagggccacaggggggttacatgggaatctaccctgcaggccttctgcacagggctggattctgttttgcagccttatcgccaagcactgcttgatttggaacaagagttcctgggtgatccccatctctccatatcacatgtcaactacttcctagaccagttccagcttctttttccctctgtgatggttgtagtagaacaaattaaaagtcaaaagattcatggttgtcaaatcctggaaacagtctacaaacacagctgtgggggggttgcctcctgttcgaagtgcactggaaaaaatcctggccgtttgtcatggggtcatgtataaacagctctcagcctggatgctccatggactcctcttnggaccaccatgaagaattctttatcaaacaggggccatcttctggtaatgtcagtgcccagccagaagaggacgaggagntctgggcattgggggatnacaggaaaaaantgananantgcaggact

SEQ ID NO: 250756 - DNA, 684 bp, Homo Sapiens
  misc_feature (631)..(631): n is a, c, g, or t
  misc_feature (661)..(661): n is a, c, g, or t
ttgttgcttctagacctataattagactaaagtcctggcaggaccctggaagtgaagttgagagtgtgatccatgaggaggtgcactacaactgaaaagaactgtttgagttctctaattaatataaacagaaatctagagaccaagcatgggaatggatattaaaggtatggataatggtggaaggaacataagagttgtatcaggctgaatttattgatttgggcccagtaagtagggactctgcttttaatgttgcagctcaaggagttaaaaaaggttctaataggttatttccttggttagctgaaatatggattaaaaaatggcccactgtgagagagctggaaatacctgatctcccttggtttaatgtagaggaagggatccaaaagcttagggagattcagaagggggagtggattagtcactttagacctactcatcccagctgggagggtccagaagatatacccttgaccaatgccttgcaaaacagatttacaagggcagcacccacatctttgaagaaccctataattgcacttctctgtatgtcagatctaacaatgagaaccacagtcactcaactacaaaatttaaatacaaaatggggaataactgggatccngagttaggcaggggccaagttgacgggcantcaacttttcaaaggttaaggtt

SEQ ID NO: 250757 - DNA, 812 bp, Homo Sapiens
ggggactggcggctgcactggcggcagctggaggtgtaatagtgcgggtagtgggtttggagaagttccgaggcggcggtggcgccggtcaggacaaggatagcggaaccgggccctgggcttgtcgctcaccatgccgacagtagaggagctttaccgcaattatggcatcctggccgatgccacggagcaagtgggccagcataaagatgcctatcaagtgatattggatggtgtgaaaggtggtactaaggaaaagcgattagcagctcaatttattccgaaattctttaagcattttccacaattggctgattctgctatcaatgcacagttagacctctgtgagaatgaagatgtatctattcgacgtcaagcaattaaagaactgcctcaatttgccactggagaaaatcttcctcgagtggcagatatactaacgcaacttttgcagacagatgactctgcagaatttaacctagtgaacaatgccctattaagtatatttaaaatggatgcaaaagggactttaagtgggttgttcagccaaatacttcaaggagaggacattgttagagaacgagcaattaaattcctttctacaaaacttaagactttaccagatgaagtcttaacaaaggaagtggaagagcttatactaactgaatccaaaaaggtcctaaaagatgtgactggtggaaaatttgttctatttatgaaaaatactgtctgggggttaaaaagccttacggaaagggaagtggaagaacgcaacttggtaaaaattggggggctgaacagggcccgactta

SEQ ID NO: 250758 - DNA, 825 bp, Homo Sapiens
ggtagagagggcgggtccccggcctcgggagcacggcggtggaggggacataggaggcggccatggcgacccccggcaacctagggtcctctgtcctggcgagcaagaccaagaccaagaagaagcacttcgtagcgcagaaagtgaagctgtttcgggccagcgacccgctgctcagcgtcctcatgtggggggtaaaccactcgatcaatgaactgagccatgttcaaatccctgttatgttgatgccagatgacttcaaagcctattcaaaaataaaggtggacaatcacctttttaacaaagaaaacatgccgagccatttcaagtttaaggaatactgcccgatggtcttccgtaacctgcgggagaggtttggaattgatgatcaagatttccagaattccctgaccaggagcgcacccctccccaacgactcccaggccccgcagtggagcttcgttttcacacttcctacgacaaaagatacatcatcaagactattaccagtggaagacgtggcccgaaatgcacaacatcctgaagaaataccaccagtacatagtgggaatgtcatgggatcacccttcttccccagttcttgggcatgtaccggcttaatgttgatggagttgaaatatatgtgatagttacaagaaatgtattcagccaccgtttgtctgtgtataggaaatacgacttaaagggctctacagtggctagagaagctagtgacaaagaaaaggccaaagaactgccaactctgaaagataatgatttcattaatgagggccaaaagatttatattgatgacaacaacaagaa

SEQ ID NO: 250759 - DNA, 778 bp, Homo Sapiens
aaacaaacccaggcagaaagctttgtcctcacaagttctgatggtaaatttcatctgatttccaagttaggaagagtggaaaaaagtgtataagctcactgtggagcagtacttgcaggaagatggaattatgaaggaacagcattagttacagttggagaagatggacaaataaaaatttggtcaaagactgggatgcttagatcaactttagctcagcaagtggaaagctcatgatggcattattttaaaagtagattggaactcggtcaatgatcttattttatctgctggtgaagactgtaaatataaggtatgggatagttacggccgcccactgtacaattcacaacctcatgagcatcccattacttcagctgcctgggctccagatggagaattatttgctgttggatcgtttcatactttacgcttgtgtgataaaactgggtggtcacatgcattagaaaaacccaacactggcagcatatttaatattgcatggtctatcgatggcactcagattgctggagcctgtggaaatggacatgtcgtttttgcacatgtggtggaacaacattgggagtggaaaaattttcaagtaacattaacgaaaagaagagccatgcaggttcgtaatgttcttaatggatgcagtggatttactggaattccgtgatagagtcattaaagcatctttgaactatgcacacttagttgtttcaacgtctcttcaatgttacgtgttctccacgaagaactggaacacaccaattat

SEQ ID NO: 250760 - DNA, 1242 bp, Homo Sapiens
tatttggaaatactgtatatctgaacacttaaatgtgtgtgagtgcaagcagttttacctttagctcttgttttcctgtttagataacaaatctcactttccttgtgtgcttgcactataggtttgggactgacaatagctgactaacatgtcctgagctgtgagagggcatagcaagaaggccttcatgcggtaatgacccttttcagagacaatggtcatcatggattatgcgtttccaattatttgttcatttatttattttctacataactaaattagaaacctcactgcttcatggcagttggtttgctattgcttccagttttattagggcttcattttatattagagctgttaaaagataacctttagacaggaattatctaaagtagatcatatgtagctaggttatggtgcaaggtatatgatgtgtgcaaatatgtccacagaaataaatacatagtaggtatgtggaatgtaaatttaagtcaatcgttccgcatagtttagaaatgtaaggggctttttcatattgttaactgagtgagatcagttccctttatgcctgtgaggctgcagggtttgttctcacttgcatgcacacactaagcccaaatatttctgttcattcattgtcagatcaggatatgaaaataaaatttttctgttagttttttttgtattgagattccaaagatggtaatatttttataatattcatgtatatatggaaatactttttttgacggctagggtatcttttgtgtttctgtaggacctatatgtgaaggctggtggaggctgtgtaatgaccattggagaaatgctacgatcttttctcacaaaactggagtggttttctaccttgtttccaagaattccagttccagttcaacagaatattgatcaacagattaagacccgacctagaaaaatcaagatagatggggaaggaacgtgctgaggaaatagacagacatgctgaaacgcagacgttccaggtcttccagggagatctcttgagtccccagatgaccccaggaaggccgagaagtagaagtcatcttcctggagggacatgaggcatctagttttggaccacaatttgaaagagagaaaggacgccctcggataataccgtgaagccaaacgaaagggagtagagaaccgccgaccatcccctaaggattttaccggggggttagaaaccctagaccccgcaaaaaatatgcgaaaggc

SEQ ID NO: 250761 - DNA, 3145 bp, Homo Sapiens
  misc_feature (1427)..(1427): n is a, c, g, or t
  misc_feature (2424)..(2456): n is a, c, g, or t
  misc_feature (2458)..(2506): n is a, c, g, or t
  misc_feature (2562)..(2571): n is a, c, g, or t
  misc_feature (2611)..(2626): n is a, c, g, or t
  misc_feature (2668)..(2676): n is a, c, g, or t
  misc_feature (2717)..(2728): n is a, c, g, or t
  misc_feature (2919)..(2919): n is a, c, g, or t
  misc_feature (3113)..(3113): n is a, c, g, or t
atgatcaacatgggagactcccacgtggacaccagctccaccgtgtccgaggcggtggccgaagaagtatctcttttcagcatgacggacatgattctgttttcgctcatcgtgggtctcctaacctactggttcctcttcagaaagaaaaaagaagaagtccccgagttcaccaaaattcagacattgacctcctctgtcagagagagcagctttgtggaaaagatgaagaaaacggggaggaacatcatcgtgttctacggctcccagacggggactgcagaggagtttgccaaccgcctgtccaaggacgcccaccgctacgggatgcgaggcatgtcagcggaccctgaggagtatgacctggccgacctgagcagcctgccggagatcgacaacgccctggtggttttctgcatggccacctacggtgagggagaccccaccgacaatgcccaggacttctacgactggctgcaggagacagacgtggatctctctggggtcaagttcgcggtgtttggtcttgggaacaagacctacgagcacttcaatgccatgggcaagtacgtggacaagcggctggagcagctcggcgcccagcgcatctttgagctggggttgggcgacgacgatgggaacttggaggaggacttcatcacctggcgagagcagttctggccggccgtgtgtgaacactttggggtggaagccactggcgaggagtccagcattcgccagtacgagcttgtggtccacaccgacatagatgcggccaaggtgtacatgggggagatgggccggctgaagagctacgagaaccagaagcccccctttgatgccaagaatccgttcctggctgcagtcaccaccaaccggaagctgaaccagggaaccgagcgccacctcatgcacctggaattggacatctcggactccaaaatcaggtatgaatctggggaccacgtggctgtgtacccagccaacgactctgctctcgtcaaccagctgggcaaaatcctgggtgccgacctggacgtcgtcatgtccctgaacaacctggatgaggagtccaacaagaagcacccattcccgtgccctacgtcctaccgcacggccctcacctactacctggacatcaccaacccgccgcgtaccaacgtgctgtacgagctggcgcagtacgcctcggagccctcggagcaggagctgctgcgcaagatggcctcctcctccggcgagggcaaggagctgtacctgagctgggttggtggaggcccggaggcacatcctggccatcctgcaggactgcccgtccctgcggccccccatcgaaccacctgtgttgagctgctgccggcgcctgcaggccccgctactactccatcgcctcatcctccaaggtccaccccaactctgtgcacatnctgtgcggtggttgtggagtacgagaccaaggccggccgcatcaacaagggcgtggccaccaactggctgcgggccaaggagcctgccggggagaacggcggccgtgcgctggtgcccatgttcgtgcgcaagtcccagttccgcctgcccttcaaggccaccacgcctgtcatcatggtgggccccggcaccggggtggcacccttcataggcttcatccaggagcgggcctggctgcgacagcagggcaaggaggtgggggagacgctgctgtacttacggctgccgccgctcggatgaggactacctgtaccgggaggagctggcgcagttccacagggacggtgcgctcacccagctcaacgtggccttctcccgggagcagtcccacaaggtctacgtccagcacctgctaaagcaagaccgagagcacctgtggaagttgatcgaaggcggtgcccacatctacgtctgtggggatgcacggaacatggccagggatgtgcagaacaccttctacgacatcgtggctgagctcggggccatggagcacgcgcaggcggtggactacatcaagaaactgatgaccaagggccgctactccctggacgtgtggagctaggggcctgcctgccccacccaccccacagactccggcctgtaatcagctctcctggctccctcccgtagtctcctgggtgtgtttggcttggccttggcatgggcgcaggcccagtgacaaagactcctctgggcctggggtgcatcctcctcagcccccaggccaggtgaggtccaccggcccctggcagcacagcccagggcctgcatgggggcaccgggctccatgcctctggaggcctctggccctcggtggctgcacagaagggctctttctctctgctgagctgggcccagcccctccacgtgatttccagtgagtgtaaataattttaaataacctctggcccttggaataaagttctgttttctgtnnnnnnnnnnnnnnnnnnnnnnnnnnnnnnnnncnnnnnnnnnnnnnnnnnnnnnnnnnnnnnnnnnnnnnnnnnnnnnnnnnccccatgtgatatccgaaattcgcaaaaaaactaactaaacctaccctttgggcgnnnnnnnnnngccctcaaaaaacgtttctttaaaacatttccgggttggnnnnnnnnnnnnnnnngtgtaggtaaagggaaactggggccccacatcccgtctcccnnnnnnnnncccggggcacaagaacaaaggggcttgtggatccccccccnnnnnnnnnnnncccccccgccgcgggaaacacccgacgccttttctagacacaaaacccccagaagggggagtctcccgagaagggacttcttcacgggaaccccctaccacacgagagggactccccaacaggcgaaatccccgcatatacacacaaaatttaaaagccccccctggcgccgcgggcccatcttttttctnataagtgctcggtggcggcggtaatattcccctttatagcacgctattccttcgccctggaccagcgggtataatgcccctcttccgagaaaagccgcgcggctgcgacgtagacaacccctcaatatattcgccgccctcgtgggaggcaacacccacccaccaccctgttgatccacagcaatcgtcttggnacgaatatataacactatactgtcgcccgccc

SEQ ID NO: 250762 - DNA, 901 bp, Homo Sapiens
  misc_feature (658)..(658): n is a, c, g, or t
  misc_feature (807)..(807): n is a, c, g, or t
aggctggaccggtccggattcccgggatgccgggctgccagcgtttcatgatcaacatgggagactcccacgtggacaccagctccaccgtgtccgaggcggtggccgaagaagtatctcttttcagcatgacggacatgattctgttttcgctcatcgtgggtctcctaacctactggttcctcttcagaaagaaaaaagaagaagtccccgagttcaccaaaattcagacattgacctcctctgtcagagagagcagctttgtggaaaagatgaagaaaacggggaggaacatcatcgtgttctacggctcccagacggggactgcagaggagtttgccaaccgcctgtccaaggacgcccaccgctacgggatgcgaggcatgtcagcggaccctgaggagtatgacctggccgacctgagcagcctgccagagatcgacaacgccctggtggttttctgcatggccacctacggtgagggagaccccaccgacaatgcccaggacttctacgactggctgcaggagacagacgtggatctctctggggtcaagttcgcggtgtttggtcttgggaacaagacctacgagcacttcaatgccatgggcaagtacgtggacaagcggctggagcagctcggcgcccagcgcatctnttgaagctggggttgggcgacgacgatgggaacttggaggaggacttcatcacctggcgagagcagttctggcccggccgtgtgtgaacactttgggggtggaagccactgggcgagggagtccagcattccgccagtaacgagcttgntgggtccacacccgacatagatggcgggccaaggtggttcaatggggggggaatatggggcccggcctgaactaagcttcccaaaaaccccgaa

SEQ ID NO: 250763 - DNA, 959 bp, Homo Sapiens
  misc_feature (792)..(792): n is a, c, g, or t
aaggtagcgaggcctgggtggcgaattcggcacgaggcttgggaacaagacctacgagcacttcaatgccatgggcaagtacgtggacaagcggctggagcagctcggcgcccagcgcatctttgagctggggttgggcgacgacgatgggaacttggaggaggacttcatcacctggcgagagcagttctggccggccgtgtgtgaacactttggggtggaagccactggcgaggagtccagcattcgccagtacgagcttgtggtccacaccgacatagatgcggccaaggtgtacatgggggagatgggccggctgaagagctacgagaaccagaagcccccctttgatgccaagaatccgttcctggctgcagtcaccaccaaccggaagctgaaccagggaaccgagcgccacctcatgcacctggaattggacatctcggactccaaaatcaggtatgaatctggggaccacgtggctgtgtacccagccaacgactctgctctcgtcaaccagctgggcaaaatcctgggtgccgacctggacgtcgtcatgtccctgaacaacctggatgaggagtccaacaagaagcacccattcccgtgccctacgtcctaccgcacggccctcacctactacctggacatcaccaacccgccgcgtaccaacgtgctgtacgagctggcgcagtacgcctcggagccctcggagcaggagctgctgcgcaagatggcctcctcctccggcgagggcaaggagctgtacctgagctgggtgggggagggccngaaggccatcctggccactccgcccgacctgcccgccccgggggcccccatcgaccacctgcggggaccgcccgccccgtcccgccagcccgctaacactccatcgcccttatccgcacggggtccccccccatctgccgctcctccggccgggtgggcatccgcaa

SEQ ID NO: 250764 - DNA, 1324 bp, Homo Sapiens
  misc_feature (1296)..(1296): n is a, c, g, or t
  misc_feature (1312)..(1312): n is a, c, g, or t
acagatggggctgccacggccttggtaactgtctccaacagatatttcttgtccttaggcccatttgaaggggaagagggtaagagagggcataacctttccacgggcctttgggatctttggaacccgcaagccaccagaaagttgacatggtcaggaccagtgggcaccactgtgtgctcggtgctgacctgcaggcttcccactgctggtcagaagcacatactcagtggaagatcatctggaaagctttgctgagcccacccttgcgcttacccagaattcacagcaaggccaaacaagccccacacccatccctatttaactgttcatgcctctccaggtattcccaacgccagcccagcagccagtggccacaccactaatgacccctagctactcctacacgaccccaagccagcccatcaccacccctcagtaccaccagctccaggccagcaccaccccacagtcggcccaggcccagccccagccctcttccagctcccggcaacggcagcagcagccaaagtccaacagccatgcagccatcgactggggaaaaatggcggagcagtggctgcaggaaaaggaggcagaacggcggaaacagaagcagcggctgacacctcggccctcccccagccccatgatcgaaagcacccccatgtccattgctggcgatgccaccccactcctggacgagatggatcggtagggggcctgctcctcggactctggttacctctgaggctgggaaaggcctggctgcccactgcctccctccctgcccctccttttatgtccataaagtggcgtgaagtgagacgttctctttggtggtcaacccggatgggtgacaggctggatggccttgtgaacttgagctcagtgtatgctaggcaacaattctcccgctccagaccctcaccgaccacctgtcctgggaccaggctgggaggggagtgtggcagggaggaggaagaggaaggtgagaatgagtagaacagttttgtattctactccctacaagccattttgaacttctgccctcaccggactctgggctgtgactggggcaccaaactcagcacatgagtctcccctagctctcgtggggagagggatggctatttattcagtttggggcaagagggaaaagagggaaagtatttctgaccctgatgccaacaaccgggtggctgtccaaccagaatggcaggggacacagggaagcactggcccagcccctgcctggctgccctttcccccctgctgctccaccgcttcctgccntgtcatttgaataaanagtgtttctatt

SEQ ID NO: 250765 - DNA, 971 bp, Homo Sapiens
  misc_feature (67)..(67): n is a, c, g, or t
  misc_feature (79)..(79): n is a, c, g, or t
  misc_feature (733)..(733): n is a, c, g, or t
  misc_feature (797)..(797): n is a, c, g, or t
  misc_feature (803)..(803): n is a, c, g, or t
  misc_feature (828)..(828): n is a, c, g, or t
  misc_feature (836)..(836): n is a, c, g, or t
  misc_feature (850)..(850): n is a, c, g, or t
  misc_feature (877)..(877): n is a, c, g, or t
  misc_feature (886)..(886): n is a, c, g, or t
  misc_feature (902)..(902): n is a, c, g, or t
  misc_feature (913)..(913): n is a, c, g, or t
  misc_feature (921)..(921): n is a, c, g, or t
  misc_feature (941)..(941): n is a, c, g, or t
  misc_feature (947)..(947): n is a, c, g, or t
  misc_feature (957)..(957): n is a, c, g, or t
tctttaagcaaatgcatgtgcgttttgatatcaggctgattcgagtcattgaggtcttcagcctgcntctggatcctanattcccatggtcttgagttaaatgctgacatcttaggcactgacaaaattaatagtggtgctcacaaggcgacactaaggattggccaagatggaatatctaccagtgcaacgaccaacttgaagtgtagtctcctggtgctggagaatgagctgaatgcagagcttggcctctctggggcatctatgaaattaacaacaaatggccgcttcagggaacacaatgcaaaattcagtctggatgggaaagccgccctcacagagctatcactgggaagtgcttatcaggccatgattctgggtgtcgacagcaaaaacattttcaacttcaaggtcagtcaagaaggacttaagctctcaaatgacatgatgggctcatatgctgaaatgaaatttgaccacacaaacagtctgaacattgcaggcttatcactggacttctcttcaaaacttgacaacatttacagctctgacaagttttataagcaaactgttaatttacagctacagccctattctctggtaactactttaaacagtgacctgaaatacaatgctctggatctcaccaacaatgggaaactacggctagaacccctgaaggctgcatgtgggctgggtaacctaaaagggaggcctaccaaaataatgaaantaaaacacatctatggccatctccttttgctggccttattcggccaggtttttaaggcggacangttggntagggttcgggtgtggggttttggncttggttncaacacggacttcnttggggtgggtttcgccttttgactgnggccccaantttatttcgggttcanggctttcggcntgttttcnttctgtattggccccgtttncctggnccttggtggncttccatgggctgg

SEQ ID NO: 250766 - DNA, 165 bp, Homo Sapiens
agcagctttacaaacatctgagaagaaaacgttccattatcaggtaaagctgctttggcaatgtgatttttataatgctgggcagtaggggaggttgcttaatacagacaaggcatagatattttttctctgtgtgttgctttggaacattctgttgctgttatc

SEQ ID NO: 250767 - DNA, 1962 bp, Homo Sapiens
  misc_feature (1849)..(1862): n is a, c, g, or t
  misc_feature (1897)..(1897): n is a, c, g, or t
  misc_feature (1920)..(1920): n is a, c, g, or t
  misc_feature (1930)..(1930): n is a, c, g, or t
ggggcacgaggcagccccgcagccgcaggtggccccggcgagtacttccaccttcccttcccgtgatgccctggggctgacctccgacctcgctggcccgcccctcccctcggccgcttcccttactgagcttgctgagctccggggcccgcggagctcgcgccaggctcctgggaaaggacggggagtgttaccggggagcagctgctccattgtgcctcgaggccccgatcgggctaggccgacggctccctcccttcacctttcctctcctggcggggttcggcggcgggcgagtgactgcggccacgcctgaaaggaaactctcctgattcaagatgaccaacgaagaacctcttcccaagaaggttcgattgagtgaaacagacttcaaagttatggcaagagatgagttaattctaagatggaaacaatatgaagcatatgtacaagctttggagggcaagtacacagatcttaactctaatgatgtaactggcctaagagagtctgaagaaaaactaaagcaacaacagcaggagtctgcacgcagggaaaacatccttgtaatgcgactagcaaccaaggaacaagagatgcaagagtgtactactcaaatccagtacctcaagcaagtccagcagccgagcgttgcccaactgagatcaacaatggtagacccagcgatcaacttgtttttcctaaaaatgaaaggtgaactggaacagactaaagacaaactggaacaagcccaaaatgaactgagtgcctggaagtttacgcctgataggtaaacaaatcatactccccagtcaagacttccctgacagtcccactacgagaaagctgtggtgggacagccaagtactcgtttccacaccaagactcagactttttgagccaaaaaaaagccacattcttacactgtccagcttgtaatggttaatgtaaaacttaccagatgaaccttgtgtttcagcttttttcttttccccttccccttgcttcagaggcctgatggcgtcggactattccgaagaagtggccacctccgaaaaattccccttctagaacatgtagacacttgagaaatgtttctgtttgaagaaaatagagggagaaacagaagtcttaagtctgtggcacactgtgtcttcagacagtttgaaggaatgaaaacctagagattttaaatcatgaattgaacatgtaaaattccagtaaaatgtaaaaacggaatatgcatcgctcttaaccttgagcatagtgacttagagacactgtgtatcagttttgccaataagactgtggacttcatgattgttgttgaacttctgggtcaaaactcaaatgaggtgaattttgcctttaaagggtttatttgctgagaaccaactttcaatagtcatgagagaatcaaataatagatgtccgtacaagtagcgcatatatttaaccatttagtttggggctctatattacttgcttgagccttaatcaatgtggttttattcaatggtttgttctttgaatggttgcaaaaactgtagataatcttactgaggactgtacaaacatgaaggtgtggtatcaaacttcaggttgaaactgtttgaagcattataaacattcatttcacaactagattgtataaggatattagctgtgatgagactcactgcattatttttttttagtgaattttatgaaatccccgttccattcaacaggcacatgtttaaaagagctttgtcgttggtgttaatgggggaatgtgttccttcattgtatttgggccttttgtattgcactcttgatattaaattaaatgtgccttgaaatagttggnnnnnnnnnnnnnnaagttcaaagaatattatgatgattttgttgtacnctttaacattttaatttggggcngggagggccngttgagagcagattcattttgggaatactgtt

SEQ ID NO: 250768 - DNA, 848 bp, Homo Sapiens
gagcgaaggctgcggcggcgtcgggtacgcgcacacgttgcatcttcttcctttcgcggggtcctccgtagttctggcacgagccaggcgtactgacaggtggaccagcggactggtggagatggcgacgctctctctgaccgtgaattcaggagaccctccgctaggagctttgctggcagtagaacacgtgaaagacgatgtcagcatttccgttgaagaagggaaagagaatattcttcatgtttctgaaaatgtgatattcacagatgtgaattctatacttcgctacttggctagagttgcaactacagctgggttatatggctctaatctgatggaacatactgagattgatcactggttggagttcagtgctacaaaattatcttcatgtgattcctttacttctacaattaatgaactcaatcattgcctgtctctgagaacatacttagttggaaactccttgagtttagcagatttatgtgtttgggccaccctaaaaggaaatgctgcctggcaagaacagttgaaacagaagaaagctccagttcatgtaaaacgttggtttggctttcttgaagcccagcaggccttccagtcagtaggtaccaagtgggatgtttcaacaaccaaagctcgagtggcacctgagaaaaagcaagatgttgggaaatttgttgagcttccaggtgcggagatgggaaaggttaccgtcagatttcctccagaggccagtggttacttacacattgggcatgcaaaagctgctcttctgaaccagcactaccaggttaactttaaagggaaactgatcatgagatttgatgacacaaaaaaatgaa

SEQ ID NO: 250769 - DNA, 1057 bp, Homo Sapiens
  misc_feature (985)..(1015): n is a, c, g, or t
  misc_feature (1029)..(1029): n is a, c, g, or t
agaaggaagctaaatataaaccagcctgagagaaaactttgctttcagtcaaggccaaacatggtcagcctttattaatccttagctatgaattttcacatcttatgcatgttctcttttgtcatctgtttcctcaaaatgaggccttgctcctagagcaaaagacagagagagtctaaaatgtcacatctagctcgtagcccaagagacaaagtaaaagcttagtgtaatgtttctccaggcattgagttccaaggacctggtgagatgaataaggagaggatattcttttccactgacctgcattcccatcgaatatacgataaagaaactcccctttcgtgactgtgcacatagcccttgttccaatctcttgtacacagccagcatcatgacagggggctgcctcttctaatctaccagtgacccagtattacagcataagaaaacaaaagctccaaaccaactataaggtataaaacaatttaaagaaaattttctgtagaactttgtttctaactgaaagttctgagtttagccatccctatgggtgaatatttgtgataagagaaacatcaaaataatccttaactgcagtttccttccttctgtcctgcgataatgggtaaattacaccaagggaccaataagaaacttaacttttataattttggtgcaaaagaagaagcccttacggtctataagcaggaaccaaggagaaagcatttgagacctgaaaaagcaaatatgttttgagaaaaaggaggccctgagattagagaagggcaaggagttaggaaaaagtttggcttaggagaaccaggcctgccgatttccacagagcccacggggagtgtgggaacgctttcactgatgaaaaccaaactttttatttggctgatctgcatacatatttttaagctctttgaaattcaagggaaatgtgaagtgtgagtcagctgaaattgcaaagtctagagaatgnnnnnnnnnnnnnnnnnnnnnnnnnnnnnnnccccgaggccgtanatggccgaattgcccgggtaccctgcat

SEQ ID NO: 250770 - DNA, 712 bp, Homo Sapiens
  misc_feature (16)..(16): n is a, c, g, or t
  misc_feature (28)..(28): n is a, c, g, or t
  misc_feature (99)..(99): n is a, c, g, or t
  misc_feature (186)..(186): n is a, c, g, or t
  misc_feature (298)..(360): n is a, c, g, or t
cccaccagcacgtccnctacatgtccantctgtatccacagcacagtaacaagtattaggaaaacgggactcccacaaagatgtaccagagtgcacacnattctggcagagagagccatgatcaaagagtggtttctttagagagcaattctactaaaaagcaacatggtaatagaagtaatgtanaatgttcaagacattatatgcaggactgactccatattgccatttaatatgctctgtattataggatatacaaactaaccccccatctgtggaatgttaactggttgtaccnnnnnnnnnnnnnnnnnnnnnnnnnnnnnnnnnnnnnnnnnnnnnnnnnnnnnnnnnnnnnnnggatgaggtgggattccctccttcttaaaaatgtttctagagctactaaaaaacttgcatttacaaaatagttgataaaaatattcctctggattgtacaagaagggagacagggaccactgataagacatggtatatggttattaatcagacttggcttctttctctcctgcttcatcagaggctggactctcctcagtcttcgtttccccgccgcaggtaagtcttctttagtttcttggttagccacttcggcctgttttccctttgctccccttttcccttttgtttgcacttttctgtctgaagatctatccccaaaaaaagcaccatgccgtacggtcaggttgac

SEQ ID NO: 250771 - DNA, 1481 bp, Homo Sapiens
aggaggaggcgggctcccaatccggttccatccggttctcccaccgcccccgctgtgggtctcagcagctcgggcggcgggaggagtggcagcggcaaggcagcccagtttcgcgaaggctgtcggcgcgccgcggcccgcaggcacccggcacgcgccttccccgcaggcacccggcacgcgccttccccgccgccacgatgcccaagaggaaggtcagctccgccgaaggcgccgccaaggaagagcccaagaggagatcggcgcggttgtcagctaaacctcctgcaaaagtggaagcgaagccgaaaaaggcagcagcgaaggataaatcttcagacaaaaaagtgcaaacaaaagggaaaaggggagcaaagggaaaacaggccgaagtggctaaccaagaaactaaagaagacttacctgcggaaaacggggaaacgaagactgaggagagtccagcctctgatgaagcaggagagaaagaagccaagtctgattaataaccatataccatgtcttatcagtggtccctgtctcccttcttgtacaatccagaggaatatttttatcaactattttgtaaatgcaagttttttagtagctctagaaacatttttaagaaggagggaatcccacctcatcccattttttaagtgtaaatgcttttttttaagaggtgaaatcatttgctggttgtttattttttggtacaaccagaaaatagtgtgggatattgaattatgggaggctctgactgtctcgggtgtcagcttaacattccacagatggggggttagtttttatatcctataatacaaagcatattaaatggcaatatggagtcagtcctgcatttaatgtcttgaacattttaaattacttctattaccatgttgttttttagtagaattgtttcctaaagaaaaccactctttgatcatggctctctctgccagaattgtgtgcactctgtaacatctttgtggtagtcctgttttcctaataactttgttactgtgctgtgaaagattacagatttgaacatgtagtgtacgtgctgttgagttgtgaactggtgggccgtatgtaacagctgaccaacgtgaagatactggtacttgatagcctcttaaggaaaatttgcttccaaattttaagctggaaagtcactggaataactttaaaaaagaattacaatacatggctttttagaatttcgttacgtatgttaagatttgtgtacaaattgaaatgtctgtactgatcctcaaccaataaaatctcagtttatgacacggcacggcattccgacgcacgtagggccttggtcggccgccctcggccccctcagaagcttttctagaaccctttcgtttggcgccccgggcccccaataggtaaatggaccttggcccaaagcctggttccctaggaaaatcctgggtcattggaactagggggcttgggaatcttccccc

SEQ ID NO: 250772 - DNA, 1014 bp, Homo Sapiens
caagcattgtccatcttgccaaagactgctgtttgtgattccagttttcagtggcttttcagcatcccatcaggcagaaaaccacatttgtcttcactactcccctcaggctggaccgttaggttgttgtttacagtcccttctccatacgggttggatggcctaaagcagccagttcttgacaacattgtgctgacacaagagtgaccatgaaaatctcttgtgctatctgcactgcatcttgtagcaaaatagtcaaggggcttgtggagctcaaagaggtatagattcttcatttacagaaaagcaagtatttctaaaattttctctgttgataagtgactaccagttttaggcccctaagaagatactagaaaaaaaagatcaacacactttattatccatcatggcaaatgtgatgcttgaacaaagggtgaaagagtaactactttctaaaaaatttctactatggagagaacattttgaaaacagatgtttttgtttccattgttatgtgatttttgttgccaaaaatgatctgtcacctattaaaatcttgaatatcttcacccttaacctgggaacagtgtttttctaatctgttttaaaaccctttaagtgaaaatttcagtggattttgagctgggtggttacaaatatgataatgcaattattaacctgattagttgcaggagccattacttgacattagggaaatggggctttactagcaaaatgttcacaaaatcctttgcttccatggtggataaaagtggaaaatgtccgggcagcccagctttgcaaaggctctcgtggctctgcaggcacctggcatgcaccctccccattgccaggatacccaagaggaaggttcagctctgctgaaggggccaccaaggaagagcccaagaggagactggtgcagttgtcagctaaacctgctcctgcaaaagtggaattgaagctgaaaaaggcagcagcgaaggataaatcttcagacaaaaaagtgcaaaa

SEQ ID NO: 250773 - DNA, 933 bp, Homo Sapiens
  misc_feature (105)..(220): n is a, c, g, or t
  misc_feature (486)..(619): n is a, c, g, or t
  misc_feature (678)..(746): n is a, c, g, or t
  misc_feature (767)..(832): n is a, c, g, or t
gttgaagcgattctccttgcctcaacctcccctcaaggctcttaggaataaccctagctacttaactgtgtgagtagctgggactgcaggcacgtgccaccatgnnnnnnnnnnnnnnnnnnnnnnnnnnnnnnnnnnnnnnnnnnnnnnnnnnnnnnnnnnnnnnnnnnnnnnnnnnnnnnnnnnnnnnnnnnnnnnnnnnnnnnnnnnnnnnnnnnnntttattataaataaataagtaaataaattctgaaattttttgttacatggtaggaagtaggagcttaactttgtgagttgttgaacattgactcatagcatgatataatgaaaagacttaggaattttagaaaactttgctattattaagactgtcacttacaagctatgtaacctaatgtgttcattttgtttctaaaaattctgtttttctcatacttttgagtatgttggccagcctctaaatggccttcaagcattcatacnnnnnnnnnnnnnnnnnnnnnnnnnnnnnnnnnnnnnnnnnnnnnnnnnnnnnnnnnnnnnnnnnnnnnnnnnnnnnnnnnnnnnnnnnnnnnnnnnnnnnnnnnnnnnnnnnnnnnnnnnnnnnnnnnnnnnncttgttctcttggagtactcaccatgggaaatcagcaaccattgagaagactctcacannnnnnnnnnnnnnnnnnnnnnnnnnnnnnnnnnnnnnnnnnnnnnnnnnnnnnnnnnnnnnnnnnnnncctcttgagttctcggcaatnnnnnnnnnnnnnnnnnnnnnnnnnnnnnnnnnnnnnnnnnnnnnnnnnnnnnnnnnnnnnnnnnnttacattgtttgagcagtttttaaaaacggcttcaatgtggctctgagctaaatagaagtctgtgaaacatgttttcaacaaatcccatgatttatagaac

SEQ ID NO: 250774 - DNA, 1823 bp, Homo Sapiens
  misc_feature (1163)..(1163): n is a, c, g, or t
  misc_feature (1192)..(1192): n is a, c, g, or t
caagatgtttgacatggtttgatgatttcatgtgcgatgatgaggaggactacgacctggaatactctgaagatagtaactccgagccaaatgtggatttggaaaatcagtactataattccaaagcattaaaagaagatgacccaaaagcggcattaagcagtttccaaaaggttttggaacttgaaggtgaaaaaggagaatggggatttaaagcactgaaacaaatgattaagattaacttcaagttgacaaactttccagaaatgatgaatagatataagcagctattgacctatattcggagtgcagtcacaagaaattattctgaaaaatccattaattctattcttgattatatctctacttctaaacagatggatttactgcaggaattctatgaaacaacactggaagctttgaaagatgctaagaatgatagactgtggtttaagacaaacacaaagcttggaaaattatatttagaacgagaggaatatggaaagcttcaaaaaattttacgccagttacatcagtcgtgccagactgatgatggagaagatgatctgaaaaaaggtacacagttattagaaatatatgctttggaaattcaaatgtacacagcacagaaaaataacaaaaaacttaaagcactctatgaacagtcacttcacatcaagtctgccatccctcatccactgattatgggagttatcagagaatgtggtggtaaaatgcacttgagggaaggtgaatttgaaaaggcacacactgatttttttgaagccttcaagaattatgatgaatctggaagtccaagacgaaccacttgcttaaaatatttggtcttagcaaatatgcttatgaaatcgggaataaatccatttgactcacaggaggccaagccgtacaaaaatgatccagaaattttagcaatgacgaatttagtaagtgcctatcagaataatgacatcactgaatttgaaaagattctaaaaacaaatcacagcaacatcatggatgatcctttcataagagaacacattgaagagcttttgcgaaacatcagaacacaagtgcttataaaattaattaagccttacacaagaatacatattccttttatttctaagggagttaaacatagatgtagctgatgtggnagagcttgctggttgcagtgcatattggnataacactattcatggccgaattgatcaagtcaaccaactccttgaactggatcatcagaagaggggtggtgcacgatatactgcactagataaatggaccaaccaactaaattctctcaaccaggctgtagtcagtaaactggcttaacagagaacaagcttttacagacgtccttaaggcaacagtgcagagatgtaatccttaaaagaactgggaatggcaaaactactgtcggttgatgtgtcctgaaaattattggagttatggcagaagtgcttttttgatcaactggtttgtgttttgctgctgcatttatcccaagaaaaacagctttaatctccagaagaaaaccaaaataccatgggatttatgctgtattgacatcttgccctaaacgtacaacatcatagtaatttgtcatgggcaacatgaccagagagaagatttttgtcatgattttaaatacactgacacgctactgttggttaaatttaaacatgttttacctgcagaaattctctcacaaataacctgcaataacttgaaatgcatacccttttgaacacttccttttctcatgtataaattaaaatgtttgctgcattttgcaaaatgtcaattctctaaaa

SEQ ID NO: 250775 - DNA, 676 bp, Homo Sapiens
  misc_feature (597)..(597): n is a, c, g, or t
agaaaccatggcatttatgatgaattcagggtaattcagaatggaagtagagtaggagtaggagactggtgagagaagctagagtgataaacagggtgtagagcaagacgttctctcaccccaagatgtgaaatttggactttatcttggagataatagggttaattaagcacaatatgtattagctagggtaaagattagtttgttgtaacaaagacatccaaagatacagtagctgaataagatagagaatttttctctcaaagaaagtctaagtaggcagctcagaagtagtatggctggaagcaacctgatgatattgggacccccaactttcttcagtcttgtacccatcatcccctagttgttgatctcactcacatagttgaaaatcatcatacttcctgggttcatatcccagttatcaagaaagggtcaagagaagtcaggctcattcctttcaaagactctaattggaagttaaacacatcaatccccctcatattccattgactagaatttaatcacatggccacaccaagtgcaaggaaaatctggaaaatataatctttattccaggtagccatatgactcttntaaaattcagaaataatatatttttaaaatatcaatctggctttggtataaagaattgatggtgtggggtgagggagac

SEQ ID NO: 250776 - DNA, 377 bp, Homo Sapiens; identical to SEQ ID NO: 4147

SEQ ID NO: 250777 - DNA, 1049 bp, Homo Sapiens
tccgacccctggctagagggtacgcggcgtggagcagcgcgcgcaagcgaggccaggggaaggtgggcgcaggtgaggggccgaggtgtgcgcaggactttagccggttgagaaggatcaagcaggcatttggagcacaggtgtctagaaacttttaaggggccggttcaagaaggaaaagttcccttctgctgtgaaactatttggcaagaggctggagggcccaatggctgcaaaatcgcaacccaacattcccaaagccaagagtctagatggcgtcaccaatgacagaaccgcatctcaagggcagtggggccgtgcctgggaggtggactggttttcactggcgagcgtcatcttcctactgctgttcgcccccttcatcgtctactacttcatcatggcttgtgaccaatacagctgcgccctgaccggccctgtggtggacatcgtcaccggacatgctcggctctcggacatctgggccaagactccacctataacgaggaaagccgcccagctctataccttgtgggtcaccttccaggtgcttctgtacacgtctctccctgacttctgccataagtttctacccggctacgtaggaggcatccaggagggggccgtgactccctgcaggggttgtgaacaagtatcagatcaacggcctgcaagcctggctcctcacgcacctgctctggtttgcaaacgctcatctcctgtcctggttctcgcccaccatcatcttcgacaactggatcccactgctgtggtgcgccaacatccttgggctatgccgtctccaccttcgccatggtcaagggctacttcttccccaccagcgccagagactgcaaattcacaggcaatttcttttacaactacatgaatgggcatcgagtttaaccctcggatcgggaagtggtttgacttcaagctgttcttcaatgggcgccccgggatcgtcgcctggaccctcatcaacctgtccttcgcagcgaagcagcgggagctccacagccatgtgaccaatgccatggtcctggtca

SEQ ID NO: 250778 - DNA, 1426 bp, Homo Sapiens
  misc_feature (1314)..(1315): n is a, c, g, or t
ggcggaggaggagcagcagcgggaggaggagccgtgtgccctggcactgagcggccgcggccatggcgtacgcctatctcttcaagtacatcataatcggcgacacaggtgttggtaaatcatgcttattgctacagtttacagacaagaggtttcagccagtgcatgaccttactattggtgtagagttcggtgctcgaatgataactattgatgggaaacagataaaacttcagatatgggatacggcagggcaagaatcctttcgttccatcacaaggtcgtattacagaggtgcagcaggagctttactagtttacgatattacacggagagatacattcaaccacttgacaacctggttagaagatgcccgccagcattccaattccaacatggtcattatgcttattggaaataaaagtgatttagaatctagaagagaagtaaaaaaagaagaaggtgaagcttttgcacgagaacatggactcatcttcatggaaacgtctgctaagactgcttccaatgtagaagaggcatttattaatacagcaaaagaaatttatgaaaaaattcaagaaggagtctttgacattaataatgaggcaaatggcattaaaattggccctcagcatgctgctaccaatgcaacacatgcaggcaatcagggaggacagcaggctgggggcggctgctgttgagtctgtttttactgtctagctgcccaacggggcctactcacttattctttcaccccctctcctcctgctcagctgagacatgaaactatttgaaatggctttatgtcacagaagactttaatccgtcaaattcttgtataactttgaataaatggttaatgttcacttaaaagacagattttggagattgtattcatatctatttgcatttgatttctaggtcaattgatgtgattatttttgttaaatgttgtcttgtgcccttaactacgaactgaattgtattaaacactacaaagtcatcttgagtattttaaatcggtttgtgtagttaggtttcccaacatctgtggttacctaatgtttaatattatagaactgtcctcagaaactttgtcaattttcacggctataaggaaacagaaggactcttttaattctgtatttatcatttactttctgtatatatagtttaataacctgcttgggtgtaatttgccaagcttgaattctttaatgcatttgcataaattctatactgtttagagcttaaagctacagaagcattgttaggaattgcttggacactgaattttaaactttttgacattgnntaacagcatgttcatctttttctgtcactagtcccagaaaaatatgctttatgtatattacaaaggctttgtatatgtttacctgtttttatgcccaaagtttgctttgtc

SEQ ID NO: 250779 - DNA, 821 bp, Homo Sapiens
ggggcggaggcggggcggaggcgccgcggcggctgttattgttcggctgggctcggtcgggcgctgtctccctcggctctgcgggtgtcagttcgtccggcttcctcacagcccctcactcccggcggctgacagcagcagcggcggcggcgggcggcgcctggcgtttcgaggctgagcggcaccggggttggggcgcggaggaggagcagcagcgggaggaggagccgtgtgccctggcactgagcggccgcggccatggcgtacgcctatctcttcaagtacatcataatcggcgacacaggtgttggtaaatcatgcttattgctacagtttacagacaagaggtttcagccagtgcatgaccttactattggtgtagagttcggtgctcgaatgataactattgatgggaaacagataaaacttcagatatgggatacggcagggcaagaatcctttcgttccatcacaaggtcgtattacagaggtgcagcaggagctttactagtttacgatattacacggagagatacattcaaccacttgacaacctggttagaagatgcccgccagcattccaattccaacatggtcattatgcttattggaaataaaagtgatttagaatctagaagagaagtaaaaaaagaagaaggtgaagcttttgcacgagaacatggactcatcttcatgggaaacgtcttgctaagactgcttccaatgtaagaaggagggcattttatttaataccagccaaaagaaattttattgaaaaaatttccaaggaagggagtcttttggaccatttaataatggag

SEQ ID NO: 250780 - DNA, 530 bp, Homo Sapiens
  misc_feature (447)..(447): n is a, c, g, or t
  misc_feature (510)..(510): n is a, c, g, or t
ttttaagtgaacattaaccatttattcaaagttatacaagaatttgacggattaaagtcttctgtgacataaagccatttcaaatagtttcatgtctcagctgagcaggaggagagggggtgaaagaataagtgagtaggccccgttgggcagctagacagtaaaaacagactcaacagcagccgcccccagcctgctgtcctcccctgattgcctgcaatgtgttgcaattggtagcaacactgctgagggccaattttaatgccatttgcctgaaataaaagagaacagaacaataaatatgaccagacaatatagtttaactaattcttaaaaaactcatttaattctttatgatacaattttatcaaacaactgagaaaaatacagcaagtagattttagcaacaattaaaacaatatctcctaagggatgttccttcctttnaaaaacactgtggaaatgtttctgaaaataattctttatcataccaggtacggggtaaacagntattggataatgctgctttt

SEQ ID NO: 250781 - DNA, 356 bp, Homo Sapiens
ggcgtgtatccgcggccgtagcagccgggctggtcctgctgcgagccggcggcccggagtgggagcaggcagggtaagtgggcacagaacagcaggtagagacgctgtacagtcgccttcgtcggtaggagaactgctggcaggcctaggggtcgtcctgagagggaaaagcgggctccggctgcatctgcggcgccctgcgtggccgtaagagccaagtggcctcagaggctcgccccctacgcaaatcctcgttgtcttgccagggtactgacgtgacgtgcggccgcgagaaggaaggggcgggttgggggaggcgctgaggtggtagcagcggcggcttttgctgagttttc

SEQ ID NO: 250782 - DNA, 544 bp, Homo Sapiens
attgcttaaaatactgtaaaatagatggcaatattgctagagctgggactctggtgagcatccgtcatttttagtccttcttgagagacattgctgcaaatgtgtataagagagtcgaatgtttctctctctttcctttctcagtctaaaagtagagttatatgctctttgacttactatgattcaagcaatagattttgaagtcagtaatcgttaagctgggacataggatgcattctccaaaaacattaatctaattagacattagccaccctatatattttacatagattaatataaaacatatcctcattaaaaaatgtttttcttgaatgtaaaagatagccttccaaaggatagaaatattttagttccaagagaaaagccatcatattacttgggatctgtagttttcatgcctatgaaatatttataatcctccctcaccccaaataaaaaatctcctacatgtgaacatagcctgtcactcatttgccatgaggtatgtgccatctccctgcagtgctatagttctcccattgtc

SEQ ID NO: 250783 - DNA, 1820 bp, Homo Sapiens
  misc_feature (50)..(251): n is a, c, g, or t
  misc_feature (279)..(279): n is a, c, g, or t
ttcttggagggcttcccagacatttgattggtttagaattcatttgggtnnnnnnnnnnnnnnnnnnnnnnnnnnnnnnnnnnnnnnnnnnnnnnnnnnnnnnnnnnnnnnnnnnnnnnnnnnnnnnnnnnnnnnnnnnnnnnnnnnnnnnnnnnnnnnnnnnnnnnnnnnnnnnnnnnnnnnnnnnnnnnnnnnnnnnnnnnnnnnnnnnnnnnnnnnnnnnnnnnnnnnnnnnnnnnnnnnnnnnnnnncccctgtttggattaaatgctgagggtnaccctgtttggattaaatgctgaggtacttatgtacaatttcctctctgttgcttcatttcaccttgggacagtgttggtgaagacaagtactgtaaatatttgaaatggtatattcttcattgcctaggtggttgagagtaatgaccttaatgattgatagcattaatcttgaaggagacccttgcttgttgggattagaatctccacacaccttcctcgggcttcagtgcctccatgtcatagcacggatgggcggggttctcacctgcagtgccatttgcctcctctttcctaggggatctggtagcattactctccgaaggtctggctcagtccctcaattgccctgtgcattccaatatcctacaggtgcagagccagccatcctatgtatgtgtggacacacatgctggcttgcctttacagtaaagagcttcaacatgtttgaaagcttggtttcaaacaggtgagctctgtgtgttagcaacagagatgctgggcttcacatatttcattgagttgaaaattaatgactgttctaaatcactcctttatgggttttaaaacgagaataatatatagtgagggtaggtaaagaaacttaccaacactgagaaattcaggcttgtggctacaaacagatgtacataattaaaatgagggctaggattggatttcttcaggaaaagaggcctctggtactagatggaaccagccagggaaggaagagatttgaaataaagctttggtttctgaggaatgttgccgtttgagagattcaaaaagaaagaagatccaaatttcgggactggtgtttaaattgtagtgacagattttgggggccattaaaggtatgggagtgaaaaagcggggaacagggctccccagatatgcccacgggaagacagtctcctcctacggggcagcaagcctcgggaggctcaggccatctgagcagcctccgcaaagccagtgaatccaggacgatcccaaaggctctagcccggcgtctccctccacccagggcagtctgacagacacgactttccccaaacaattcattttcctacgcagaatatgacttgaaatagtattttctctcacaagtgcagcctctccgccctagatgcatgtagctcgaagctggcctgggcacaggttgttggccctgctgtgtcttggcacttgggtggcggcacacctgtcctgtctgctcacctgcagaccccacacagcaggggctgtgctctctgcttctggggactggaaaaagacaccctggtgcgcgaaaccccgtgcttagcacagggtcagagcacgctccttccccaggctgtggcgtgttttatctatttctctctgaaaatttagactaatcgtttggagaaggggattctaggaagcgacaggtgagggaatctcagccagcggtctggggaaacatctaggaaggtagcagttctggatgctcccaatgcagccctgcctctaaaaataaaaatcttttcaaaagcaaatcaaaccccaatcaaccaactc

SEQ ID NO: 250784 - DNA, 426 bp, Homo Sapiens
  misc_feature (304)..(304): n is a, c, g, or t
  misc_feature (388)..(388): n is a, c, g, or t
cttctcttcataagtcttactaggcccacagatagaagttaggagtcccctctatcaagtccttaggcccgacagctgcggggcctggtgttgggagagctggaggcttgaggattggaatgtggctcggtgccaccagcactctgggggagtttaccacctgcggggtgaagcctgctctcccgtgggattgattttccattgctcgcagtcatgtggcaggatggagcagactgacctttttccttttcaggctcagcacaaacactgggaactggcggggaccaaactgggagatataatngggcgtcaagaaggaaggaagagccagataaagctgttgacggaggatgggaaggttggactacaggtgggcagcctcagccancagcacatcagccttgctccaaagatgggggggcccat

SEQ ID NO: 250785 - DNA, 2925 bp, Homo Sapiens
tttatgagagacacggcctctctttaatggaaggcatgaggtgctttgacacaaggaaccagcttagtcaaggaggtacagcctcagcagcaggtcaggatgtcgtcctcctcctctgccttggccccgggggaggacaggcgtgctggccagagggctcagaagatgtcggggacgatataatcagtgtaggcaccatcgatgagtccagccccattgttgtgaatgaaccagcaggacacctcggccccatgccacgggtccttgctgtagtctttttgcaaacccctggtgaccgtgagccggcggttcctcaccaccatcgtggcatctggctttgtggggtcagagcctgggtggatgtcagacacttcaaaaccgatggggtggaaaaattgccccagcagcccgtgcgtccgggctgacatccgatgactgtccagcacatagaagcccaggaagtcctggtggaccgagctccccttccacactcggtgcaaaacaacctcaaaggtgccaccgtcgtccacagacaccaccaggttcctcttcttgttgatggtcaccaccaccccgtcctgccgcagcacagcttggtccctccaggaaaacacaggcccaccaaagccggggttcagcgtaatgttctgaggagtcacttccaactgaaagtccgtggcagggtttgcgattcccagccgcccgaagtacgtgccgtcatgctgcccagggctcctggccttgttgccaatgagctgtccattcactgagaagcctgtgttggggtcctgtaccaggctcaggataacaccaggctcctcattgatgttgaagcacagggtgtcctctttctggggcacgtggatgatgaagtgagggtctgtgtccacgccggtcactcggtctggcagccgctgggtattggagctggaatgagtaggagaaggctgcaaggctgacagcacgaacgtccttctgggtcccagcatctccaaaggcggagaatcctctgagggcttgtcgatggtgggcttcaggccgtcctggtccgccatgcccctgatgctcatggaggtcagtggggtcacaaacccatagtccagcgacatccgcagggcctgggatgacaggttggccctcacctccctgtccaccttcatccgcttggccagcagctcctggatggtgaggtaggcccagaggcgctcgacgtggttctccagcatgtggccacgctctcggagcagtttcttcatctcctcctcatccactaggcaggttatactgaattcttgtccctccccatgggcctgcacatcagccttgaagctgctctgtttgttgtcagcaatgcgcccggccaccacaatctctgagccttcgtagtactgtttatggtggttctgggtcagggccaagacagcatcctgggggtactgcaaatccacatccaccagcaggggtttggctacctggctgtagaaaccctgcagctgctgggtggcatcatggtcctcgtagattctctgggcccgtccgttgttctccatggacatgacctccagaaagttaaagtccacattgtggccgaaacccaggttgtagagcgggaacctgccccggatggcgttgcggacgttcttgaggatttgggaacggtccgtcaccccctctgtgggatcgccatctgtcaacatgatgagtattgaggcatggttgctgagttctgggaggctttcctgaacttggttcaagatctcaattccccggagcaaacctccattcaggtttgtggcctcatccagggaaaagccccgcacaaagtcttgagctgcttgtaggttggcctcagatgcttgcaccagcgagcccttccacgattgtactcgagtcccaaaaagaaccaggtcaaagtagtcccctggctgcatgtcccccagaattttaaggagtgcctccttggtctgcttcactttctggcctctcatggagccactgatgtcaatcacaaaaaccacgttcttgttcatgtttgtcaggttttggggggcaaagaagtgggcaaagtggttattggccaccaggaggtcgcagatcttgtctcgactgacatcgtaggtcaccttgaagtgcccgttcagtaaggatgtagagcatgtggggcaggactgctgctggctcacggtgggacggaacagcacatgacccttttttcctgagaaggacttcttgatagtttgggctgccagttccttcggcaggaaagaggcctgggcatccagcttgctgatcccctggggctcgaagatgtccacatcaatctcaaaatgatgcaccagctgcttgggcttgactttgatgacaatttcatactgcatatggtttctcttcagcacttcctcataagtcagctgaaacgtgaccttgctctggggattgacggtgaggtggatggtgaattgctccatagttctccccgaggccctgacaaggccggcattctctcctgagatagctgctttccggtactgcttccatgcagtcaccttgtcctttatgtctccgataaatgcgtttccatctgctgtaacggcaaagtcactgatgaatgctgtcttggggatttccaggtcgaaggccacttccctggcttcattggcagtgttgaccacttggctggtgacaacatagtgggcgaagcgagaggtgactttgcagttgactttcaaactccggatgaacacgccatcgacagcggtgtccacagcctgtcgcttctcgctgctcttggacctgcctgtagccgagcccagggcaggcatggcctgcaggatgaggagagataccaggtacatgcacaacagcagcccccgaggccccatggcaccgtccatgctctaaggctcctgctgccctgtcacctcc

SEQ ID NO: 250786 - DNA, 1044 bp, Homo Sapiens
  misc_feature (843)..(843): n is a, c, g, or t
  misc_feature (888)..(888): n is a, c, g, or t
  misc_feature (941)..(941): n is a, c, g, or t
  misc_feature (950)..(950): n is a, c, g, or t
  misc_feature (986)..(986): n is a, c, g, or t
  misc_feature (997)..(997): n is a, c, g, or t
  misc_feature (1003)..(1003): n is a, c, g, or t
  misc_feature (1005)..(1005): n is a, c, g, or t
  misc_feature (1025)..(1025): n is a, c, g, or t
  misc_feature (1035)..(1035): n is a, c, g, or t
  misc_feature (1041)..(1041): n is a, c, g, or t
ccccatcagagggatcagcagctccagggaaggcctggctgccccgcttctaaatgccactccccctcccatcagcgttcgtgctgtcagccttgcagccttctcctactcattccagctccaatacccagcggctgccagaccgagtgaccggcgtggacacagaccctcacttcatcatccacgtgccccagaaagaggacaccctgtgcttcaacatcaatgaggagcctggtgttatcctgagcctggtacaggaccccaacacaggcttctcagtgaatggacagctcattggcaacaaggccaggagccctgggcagcatgacggcacgtactttcgggcggctgggaatcgcaaaccctgccacggactttcagttgggaagtgactcctcagaacattacgctgaaccccggctttggtgggcctgtgttttcctggagggaccaagctgtgctgcggcaggacggggtggtggtgaccatcaacaagaagaggaacctggtggtgtctgtggacgacggtggcacctttgaggttgttttgcaccgagtgtggaaggggagctcggtccaccaggatttcctgggcttctatgtgctggacagtcatcggatgtcagcccggacgcacgggctgccttgggggcaatttttccaccccattcggtttttgaagtgtcttgacatccacccaggcttccgaccccacaaaagccagatgccacgatggtggttgaggaaccgccggctcacggtcaccagggggtttgcaaaaagactacagcaaggacccgtggcatggggccgaggtgtcctgctggttcattcacaacaatnggggctggactcatcgatggtgcctacactgattatatcgtcccngacatcttctgagccctctggccagcacgcctgtcctcccccggggccaaggnagaggaggnggacgcatcctgacctgctgctgaggctgtacctcnttgactaagcnggttcntngtgtaaagaactcatgcctncattaaaganggcggngtc

SEQ ID NO: 250787 - DNA, 899 bp, Homo Sapiens
gcgtcatcagagggatcagcagctccagggaaggcctggctgccccgcttctaaatgccactccccctcccatcagcgttcgtgctgtcagccttgcagccttctcctactcattccagctccaatacccagcggctgccagaccgagtgaccggcggcttctcagtgaatggacagctcattggcaacaaggccaggagccctgggcagcatgacggcacgtacttcgggcggctgggaatcgcaaaccctgccacggactttcagttggaagtgactcctcagaacattacgctgaaccccggctttggtgggcctgtgttttcctggagggaccaagctgtgctgcggcaggacggggtggtggtgaccatcaacaagaagaggaacctggtggtgtctgtggacgacggtggcacctttgaggttgttttgcaccgagtgtggaaggggagctcggtccaccaggacttcctgggcttctatgtgctggacagtcatcggatgtcagcccggacgcacgggctgctggggcaatttttccaccccatcggttttgaagtgtctgacatccacccaggctctgaccccacaaagccagatgccacgatggtggggtttgcaaaaagactacagcaaggacccgtggcatggggccgaggtgtcctgctggttcattcacaacaatggggctggactcatcgatggtgcctacactgattatatcgtccccgacatcttctgagccctctggccagcacgcctgtcctcccccggggccaaggcagaggaggaggacgacatcctgacctgctgctgaggctgtacctccttgactaagctggttccttgtgtcaaagcacctcatgccttccattaaagagaggccgtgtccaaaa

SEQ ID NO: 250788 - DNA, 380 bp, Homo Sapiens
  misc_feature (218)..(218): n is a, c, g, or t
  misc_feature (253)..(253): n is a, c, g, or t
  misc_feature (341)..(341): n is a, c, g, or t
  misc_feature (355)..(355): n is a, c, g, or t
  misc_feature (363)..(363): n is a, c, g, or t
gagtcatcagagggatcagcagctccagggaaggcctggctgccccgcttctaaatgccactccccctcccatcagcgttcgtgctgtcagccttgcagccttctcctactcattccagctccaatacccagcggctgccagaccgagtgaccggcgtggacacagaccctcactttcattcatcccacgtgccccagaaagagggacaccctgtgcnttcaacatcaattgaaggagcctgggtgttatccntgaagcctgggtacaggaccccaacacaggctttcttcagtgaatgggacagctcattgggcaacaaggccagggagccttgggcagncattgaacgggcanttattttnggggcggcttgggaatt

SEQ ID NO: 250789 - DNA, 468 bp, Homo Sapiens
  misc_feature (55)..(55): n is a, c, g, or t
acacaggcttctcagtgaatgacagctcattggcaacaaggccaggagccctggncagcatgacggcacgtacttcgggcggctgggaatcgcaaaccctgccacggactttaagttggaagtgactcctcaaaaacattacgctgaaccccggctttggtgggcctgtgttttccctggagggaccaaactgtgctgcggcaggacgggtaacctgccagggcctgggcaagatgcagggggaggtgtgccctgggccccaggactctgctgagtctgcagggccctcgtccctgagccatgtctgtgggtgacacccatgtggcctgtgcagacatgtcagactccatggcccacccagccctccatttcccttggttactggatatgtcctctgggcccagctgcatggcaactgtgctcccaccgcaccttagctctgaatgccaccaataaaaatcctacaga

SEQ ID NO: 250790 - DNA, 1896 bp, Homo Sapiens
  misc_feature (143)..(189): n is a, c, g, or t
  misc_feature (1648)..(1648): n is a, c, g, or t
  misc_feature (1683)..(1683): n is a, c, g, or t
gggctttgctgtgtgggataaacagtaatggcggaggctgcaactcccggaacaacagccacaacatcaggagcaggagcggcagcggcgacggcggcagcagcctcccccaccccgatccccacagtcaccgccccgtcccnnnnnnnnnnnnnnnnnnnnnnnnnnnnnnnnnnnnnnnnnnnnnnntggactaaacaggtcacctgcaggtattttatgcatggggtttgtaaggaaggagacaactgtcgctactcgcatgacctctctgacagtccgtatagtgtagtgtgcaagtattttcagcgagggtactgtatttatggagaccgctgcagatatgaacatagcaaaccattgaaacaggaagaagcaactgctacagagctaactacaaagtcatcccttgctgcttcctcaagtctctcatcgatagttggaccacttgttgaaatgaatacaggcgaagctgagtcaagaaattcaaactttgcaactgtaggagcaggttcagaggactgggtgaatgctattgagtttgttcctgggcaaccctactgtggccgtactgcgccttcctgcactgaagcacccctgcaggcctcagtgaccaaggaagaatcagagaaagagcaaaccgccgtggagacaaagaagcagctgtgcccctatgctgcagtgggagagtgccgatacggggagaactgtgtgtatctccacggagattcttgtgacatgtgtgggctgcaggtcctgcatccaatggatgctgcccagagatcgcagcatatcaaatcgtgcattgaggcccatgagaaggacatggagctctcatttgccgtgcagcgcagcaaggacatggtgtgtgggatctgcatggaggtggtctatgagaaagccaaccccagtgagcgccgcttcgggatcctctccaactgcaaccacacctactgtctcaagtgcattcgcaagtggaggagtgctaagcaatttgagagcaagatcataaagtcctgcccagaatgccggatcacatctaactttgtcattccaagtgagtactgggtggaggagaaagaagagaagcagaaactcattctgaaatacaaggaggcaatgagcaacaaggcgtgcaggtattttgatgaaggacgtgggagctgcccatttggagggaactgtttttacaagcatgcgtaccctgatggccgtagagaggagccacagagacagaaagtgggaacatcaagcagataccgggcccaacgaaggaaccacttctgggaactcattgaggaaagagagaacagcaacccctttgacaacgatgaagaagaggttgtcacctttgagctgggcgagatgttgcttatgcttttgggctgcaggtgggggacgacgaactaaacagactctgaagatgagtgggacttgtttcatgatgagctggaagatttttatgacttggatctatagcaaccttgcgtggcgtgtgaactggtctgctgacctcagacagcagctgtcccctgtggtggtgtggcagtgcctgtgttctctcctaggcaggcctctcaactccaggtgctgtcctaagaatttttacccagggcctgtcttctcaacccctcacctttccctgagngagtgtgttgttttccctgttgaaaaaagttacanaaaataaatcttaaagttagttttttgtatacacgaaattaactgtcagacagttagtgtaggtgtgtgtgcgtcatctgttttcaaccagattgcatttatggacttttcacacactcattttgaggaccccaggttcaaaagtaaaagcagtggccctgctttggggtcaagaatagagtgatgggtgaggggacctagctggccatagcc

SEQ ID NO: 250791 - DNA, 1223 bp, Homo Sapiens
gggtcagacagttagtgtaggtgtgttgcgtcatctgttttcaaccagattgcatttatggacttttcacacactcattttgaggaccccaggttcaaaagtaaaagcagtggccctgctttggggtccaagaataggagtgatgggtgaagggacctaagctggccaatagccctctgccccagacatgggatgtggatccttgaggtttctggtgaaatctgcacatctgtgtttttatatctgttccctaccctgtaatccctaccacgtgcacttgttctgtggttttggtctcttgtttaattgcacacaagtaatactactgggtaaccagaatcaggtgtgaatgtgttgagattttttactgttttgcatgataggaaaattgagaaagaatacgtataaaagatagagaggcataacatcaatgcagagttggaagttggctcccaagggctgacatggtgtgagtgtgtgggtgtgtgataagcttctcatccctgcatagatgcagtattcttagccttagtagaaaaacctggtttagtggtttaagccttgtgtggcagatagatcttaaagggcaaagcagtatattggtagttgtcaatatagcagtgctagctctgtctatataaatagagaaatggggttagccatagaggttaaaactacctggttaatcccatataataacacaaactgggtcttggatacacagttgtatttaatgttttacgatctagcctttccagtacaggcactttctgagaaacctttgtcctcacttgaggcattttgttgtcgggtttttgtgtttggtttttgtgggtatttgcctcattccacccctgagctttcaggtagacagacgtgattcaaaactctgttctaaggtgtttattgtagtggagtaatgggtttgcagtgataagtcatacttttccaccgaaagggagggcttgggaatccctgagattagctaaagttaagttgttggaagaattccttgattggaaattgtacctttgtgttttgttgctctgtttcctgaaaataactcggggatgctcctggtttgtccatctactgctttgattccttggatcccacccattctttcactttaagaaaaaacaaataattgttgcagaggtctctgtattttgcagctgcccttttgtaagaagcacttttcccaaataaaacaattaaaaaaa

SEQ ID NO: 250792 - DNA, 444 bp, Homo Sapiens
gtcttcatttgtgctttctcttttggggaagaatttagtaacttgtgccaactttcaaccagatggaccgcatttaaatgcatgcattttatcttgaaactgggatattctaatggggatttcttctttgtatttcagctagcttctaggttagttggtctatctacttttatttgaatgaggaaaccctgtgtatcagttagaatcttcgtgctttttctgaggagattgtgtttaatggattattagccagtttaggctcagtgaacaaactgatctagctctgaatgtatgtttcctgacgttttacatttccactttcctattccattcattaagctagccaacaatccaccatcctttaaagattgttctcataactgaacaaaaaccacataatctaaacagagcaaagctacaagaaataaatttatttaaacggaa

SEQ ID NO: 250793 - DNA, 387 bp, Homo Sapiens
  misc_feature (350)..(350): n is a, c, g, or t
  misc_feature (361)..(361): n is a, c, g, or t
gagcaggttcagaggactgggtgaatgctattgagtttgttcctgggcaaccctactgtggccgtactgcgccttcctgcactgaagcacccctgcaggcctcagtgaccaaggaagaatcagagaaagagcaaaccgcccgtggagacaaagaagcagctgtgcccctatgctgcagtgggagagtgccgatacggggagaacttgtgtgtatctccacggagattcttgtgacatgtgtgggctgcagctcctgcattccaatggatcttgcccagagattcgcaggcataatcaaatcgtgcatttgagggcccattgaggaagggacatggaagcttttcattttngccgttgcagncgcagcaaaggggacatgggtgttgt

SEQ ID NO: 250794 - DNA, 784 bp, Homo Sapiens
aaagtcaatcagtcccaggtgttgcaatacagaccacacctctctccaaatcacgtatttgtggtcccttaggagcaccaccgtagatacaagtagacttcaagcgacatgctctacaatattcagcagctacttgctgcacctgttgggccagttcccgagttggtgccagcaccaaacaaataggcccatcgcctctctctagcccagatccagtctgtgccactccaaccatatccaatccacttagagcaactggccatccctgagcttgaatagcagtgggttcagtgaaattctgtcttgcaataacatccatgacatttgcagggaaattggcttcataaaaatttagaactggcttcgggcagttgtgacctctaactgtaatttccttgcttcttctgtatgtttccacctcttgtgctgtgcgcctagccaaatcagggtgctcttgataaaaattcttctcaaatttaggcagctcatcaagattccacttctaactaatttctccccagggtttccaaacttctttccagataagggccctgccctacttcctccaaatcgaggtgcaccaaaccctcggtcccggccgcggtctcggtcactcgaataacccgacatggcgtcaatggttgcggttggcggggaacgaagtatatagaaaagcgtgcgacaagtcgctggaaatggcctcgatgacggcgaagccttgcgggggcggcagcggaggaaggacaccgatgacaccagccgaagctgcactcccagagaccgg

SEQ ID NO: 250795 - DNA, 634 bp, Homo Sapiens
  misc_feature (423)..(423): n is a, c, g, or t
tagtagtgcagcttcggctggtgtcatcggtgtccttcctccgctgccgcccccgcaaggcttcgccgtcatcgaggccatttccagcgacttgtcgcacgcttttctatatacttcgttccccgccaaccgcaaccattgacgccatgtcgggttattcgagtgaccgagaccgcggccgggaccgagggtttggtgcacctcgatttggaggaagtagggcagggcccttatctggaaagaagtttggaaaccctgtggagaaattagttaagcaccctgatttggctaggcgcacagcacaagaggtggaaacatacagaagaagcaaggaaattacagttagaggtcacaactgcccgaagccagttctaaatttttatgaagccaatttccctgcaaatgtcatggatgttattgcangacagaatttcactgaacccactgctattcaagctcagggatggccaagtgctctaagtggattggatatggttggaagtgcacagacttgatctgggccattgctaattgctttctggcattgtcacatcaatcatcagccatttctagagagaagccgatggccctatttgtttggtgctggcaaccacttccggaacttgccccggtg

SEQ ID NO: 250796 - DNA, 617 bp, Homo Sapiens
  misc_feature (505)..(505): n is a, c, g, or t
  misc_feature (537)..(537): n is a, c, g, or t
  misc_feature (556)..(556): n is a, c, g, or t
  misc_feature (604)..(604): n is a, c, g, or t
ccggtctctagtagtgcagcttcggctggtgtcatcggtgtccttcctccgctgccgcccccgcaaggcttcgccgtcatcgaggccatttccagcgacttgtcgcacgcttttctatatacttcgttccccgccaaccgcaaccattgacgccatgtcgggttattcgagtgaccgagaccgcggccgggaccgagggtttggtgcacctcgatttggaggaagtagggcagggcccttatctggaaagaagtttggaaaccctggggagaaattagttaagcaccctgatttggctaggcgcacagcacaagaggtggaaacatacagaagaagcaaggaaattacaggtagaggtcacaactgcccgaagccagttctaaatttttatgaagccaaattccctgcaaatgtcatgggatgttattgcaagacagaaattcactgaacccactgctattcaagctcagggatggccagttgctctaagtggatgggatatggntggagtggcacacactggatctggggcatggnctaatttgcttctgccatngtccacatctcatcagccattcctagagagaggcgatggccctacttngttggtgcttgcc

SEQ ID NO: 250797 - DNA, 661 bp, Homo Sapiens
cgagtggctgctccctttcgattagagaggtgaaaaagctgaacgcgtgccagtaatcttcaaaaggcagaacatatcacctctgccccgtaaactgttctctccgagggaaaaaatggaagttatcctcacaggtcactgccgcggtatttcttctgtcccatgctttgcatgactgccatggtacagccttggttcaaactgtgtcactgtgatctgtgggtctttgagtttcagtgagtttgctgaaatgtcgaagaagtagttccaaacttcaatgtgtcaatgaaatttttgttcaagtttgaaatggagagagcagctttaaaaggtactaagccttttacaaattggtgagtactggcacatgagatctagagcaggagcaacttctcacacatagtaagtgggaaaagaaagtgctttgaaaggtcctccctcacctacacagtagtcgtcatgtcgagacctggcacagagagacacattctcaagtgaatcctggcttcttggaagcgcttgcctatacaagacacagtgcatatggcaagacaagcactgtggccagaattttgaacttctgatgaatgtgtaatgcaaaggaccctgtacatttttttgggttaagagcctcacaatgagcacatgaagagggtgctgt

SEQ ID NO: 250798 - DNA, 430 bp, Homo Sapiens
gcacatgtcatctgtataattcatcacccacccagtgacagaccctgtcaaaaggaatgtgtgttccctaagcacattcccaaatcagcaagttcccttacagatcatcaagtgacatctgaatgcttgaggaccttgaaacaaaaaaatgtacaaggtcctttgcattacacattcatcagaagttcaaaattctggccacactgcttgtcttgccaagaccttacaaccgcagctgcaagaaaacatacctgtcccccaaaagttgtttttatgcactgtgtctcgtctaggcaagcgcttccaagaagccaggattcacttgagaatgtgtctctctctggcaggtctcgacatgacgactactgtgtaggtgagggaggaactttcaaagcactttcttttcccacttacctcgtgccgaatcctg

SEQ ID NO: 250799 - DNA, 539 bp, Homo Sapiens
  misc_feature (302)..(315): n is a, c, g, or t
tgggtttgctagcagaagtgtttctgagaaaacccttgttctgttatcgctgactgtactgtttaggttcttaccactaaagctgtttggttccttattgctgatagtgaattgctaggctggtggggaagattacagtaaccacaagaagtggtgtgtgccagaatcccaaattctggcatgtgggtgacaagtttccgacatgataaatccccggcttccgacatgataaatcccaggctgtttacatgacctaagtaatgtgtacttgggactacgggaaatgttaactgtggctgttnnnnnnnnnnnnnnttttcacgaaggacagtgctaggtttacctctcgaagtctgttttcagtggtttttagcttgtgccaatggatgacaaatctatacagaaacctgtgtatagccatttgaaaatgtgaataacgttttttttcattccaggtttggtgcacctcgatttggaggaagtagggcagggcccttatctggaaagaagtttggaaaccctgtggagaaattagttaa

SEQ ID NO: 250800 - DNA, 363 bp, Homo Sapiens
ctgccatgggtatccatggggacacgagtcaacacgagcgcgactgtgttctataatgggaaatatttcaaatgaagtatttttcccccttacttaacctatctagaattctgctcagataattgatcatgtatatgccttcctttgtagaattcaaacatggcaaactcgcattcatggcttgggttcccagaagatatccatttaacttttttaaagaaaggttattgcgtttctttaacctgcattttttctaagatttttttcacataaaggtgctgtctttgtggcaaggcctaggcatgacaatcggaggactcgagggggatggaggactattgatcggctggctgcttcactcgt

SEQ ID NO: 250801 - DNA, 587 bp, Homo Sapiens
ttacatatacttctaaagtcttattgggaatatcctgttggctttggataaccaatcataggtgcagctccagtagcaggatatgcatatgcctgttggttcataccattgtgcatatttggaacattacttccgtatgcctgagtgctatcataaccattctggtaagtccctgttggattaccagtcctaaaactggtctgtataccagcagacacaaaattacttgccccaaaatctcttttaagcaggctagagtaacctctgtcataattttccctgtctctaaaggtattaaatccaccccttttgcccgcagagtatctgtcccgacggtcatccttcatgcctcctctacccctggaacgacctgaacctctgtcttcgaccaactgaagcaacttgggattaattgcttgattagcttcacgaagcacagagataaggtcgctcacttgctttatgttattaggtgtaaagaaagtgtatgctgtgcctgttttggtactgcgagcagttcttccaattcgatgaatataatcctctgaggagttagggtagtcataattgatgacaaatttcacatc

SEQ ID NO: 250802 - DNA, 1965 bp, Homo Sapiens
  misc_feature (1163)..(1178): n is a, c, g, or t
  misc_feature (1292)..(1301): n is a, c, g, or t
  misc_feature (1305)..(1344): n is a, c, g, or t
  misc_feature (1349)..(1349): n is a, c, g, or t
  misc_feature (1359)..(1360): n is a, c, g, or t
  misc_feature (1365)..(1365): n is a, c, g, or t
accattttaactgtattttttgcagcccgtaccttcttgggaatacaattgtctaactttttatttttggtctggctgttgtggtgtgcaaaactccgtacattgctattttgccacactgcaacaccttacagatgtggaagatgtgaaatttgtcatcaattatgactaccctaactcctcagaggattatattcatcgaattggaagaactgctcgcagtaccaaaacaggcacagcatacactttctttacacctaataacataaagcaagtgagcgaccttatctctgtgcttcgtgaagctaatcaagcaattaatcccaagttgcttcagttggtcgaagacagaggttcaggtaaggatgactgataggaaatgttggtagttacgagtcacatcgttgtctacaaatccatttaaatggtattggagggtgagtaaaaccttgaatgtgaaaacttaagctgaaaaattgtaaaaacatttcacgcctaccatgaatagatctgtttctttctgtccacaatgatttgtgtcatagacataattgatcaatttgcaattgttttcttgacaggtcgttccaggggtagaggaggcatgaaggatgaccgtcgggacagatactctgcgggcaaaaggggtggatttaatacctttagagacagggaaaattatgacagaggttactctagcctgcttaaaagagattttggggcaaaaactcagaatggtgtttacagtgctgcaaattacaccaatgggagctttggaagtaattttgtgtctgctggtatacagaccagttttaggactggtaatccaacagggacttaccagaatggttatgatagcactcagcaatacggaagtaatgttccaaatatgcacaatggtatgaaccaacaggcatatgcatatcctgctactgcagctgcacctatgattggttatccaatgccaacaggatattcccaataagactttagaagtatatgtaaatgtctgtttttcataattgctctttatattgtgtgttatctgacaagatagttatttaagaaacatgggaattgcagaaatgactgcagtgcagcagtaattatggtgcactttttcgctatttaagttggatatttctctacattcctgaaacaannnnnnnnnnnnnnnngtactagaaaatgcaggcagtgttttcacaaaagtaaatgtacagtgatttgaaatacaataaatgaaggcaatgcatggccttccaataaaaaatatttgaagactgaaaaannnnnnnnnnaagnnnnnnnnnnnnnnnnnnnnnnnnnnnnnnnnnnnnnnnnccaanacccaaaaannaaaanccctttttcccccgccctctcccccccagaaaattttttcaaaactctttcctcttgggggcgccgggcccaaaaaggtaacggaccccctgccctaccagcttgttctcccaagaaaacccctgggcaaagaaccacgccccttgaatttccccccccacaaaaaaaacgccccgcggggcgcaaacctgcagggtcttgtaaaccaattcccaggaggggagtttctcgaggctttcatatcgggaattttacccaaggggggagcgccaacgggaggtctccaatatacaaaattagcgcccccgtccctgtccaccctctatcgagagaacacgggcttaaacattcccctataaccagtttctatgcccaacacttggacaacgccccttccctaatacgccctctcgtcgtgaaccctgtaactatgcgcccgcccgcgcgacctctacgcccccgttgtcgtccgcctttgggagatatacatcacctattcgcgcgcccgagccgataaacaccaacgggggtgtgtacaaataaaaagcctcggcgtcatcatgatgtgtgcgcaccccgctgtattacaaacacacgacc

SEQ ID NO: 250803 - DNA, 1994 bp, Homo Sapiens
  misc_feature (1803)..(1803): n is a, c, g, or t
  misc_feature (1856)..(1856): n is a, c, g, or t
gggacctcattcatttctaccggtctctagtagtgcagcttcggctggtgtcatcggtgtccttcctccgctgccgcccccgcaaggcttcgccgtcatcgaggccatttccagcgacttgtcgcacgcttttctatatacttcgttccccgccaaccgcaaccattgacgccatgtcgggttattcgagtgaccgagaccgcggccgggaccgagggtttggtgcacctcgatttggaggaagtagggcagggcccttatctggaaagaagtttggaaaccctggggagaaattagttaaaaagaagtggaatcttgatgagctgcctaaatttgagaagaatttttatcaagagcaccctgatttggctaggcgcacagcacaagaggtggaaacatacagaagaagcaaggaaattacagttagaggtcacaactgcccgaagccagttctaaatttttatgaagccaatttccctgcaaatgtcatggatgttattgcaagacagaatttcactgaacccactgctattcaagctcagggatggccagttgctctaagtggattggatatggttggagtggcacagactggatctgggaaaacattgtcttatttgcttcctgccattgtccacatcaatcatcagccattcctagagagaggcgatgggcctatttgtttggtgctggcaccaactcgggaactggcccaacaggtgcagcaagtagctgctgaatattgtagagcatgtcgcttgaagtctacttgtatctacggtggtgctcctaagggaccacaaatacgtgatttggagagaggtgtggaaatctgtattgcaacacctggaagactgattgactttttagagtgtggaaaaaccaatctgagaagaacaacctaccttgtccttgatgaagcagatagaatgcttgatatgggctttgaaccccaaataaggaagattgtggatcaaataagacctgataggcaaactctaatgtggagtgcgacttggccaaaagaagtaagacagcttgctgaagatttcctgaaagactatattcatataaacattggtgcacttgaactgagtgcaaaccacaacattcttcagattgtggatgtgtgtcatgacgtagaaaaggatgaaaaacttattcgtctaatggaagagatcatgagtgagaaggagaataaaaccattgtttttgtggaaaccaaaagaagatgtgatgagcttaccagaaaaatgaggagagatgggtggcctgccatgggtatccatggtgacaagagtcaacaagagcgtgactgggttctaaatgaattcaaacatggaaaagctcctattctgattgctacagatgtggcctccagagggctagatgtggaagatgtgaaatttgtcatcaattatgactaccctaactcctcagaggattatattcatcgaattggaagaactgctcgcagtaccaaaacaggcacagcatacactttctttacacctaataacataaagcaagtgagcgaccttatctctgtgcttcgtgaagctaatcaagcaattaatcccaagttgcttcagttggtcgaagacagaggttcaggtcgttccaggggtagaggaggcatgaaggatgaccgtcgggacagatactctgcgggcaaaaggggtggatttaatacctttagagacagggaaaattatgacagaggttactctagcctgcttaaaagagattttgggggcaaaaactcagaatggtgtttacagtgctgcaaattacaccaatggngagctttgggaagtaaattttgtgtctggctggtatacagaaccagtttttanggactgggtaatccaacaggggactttaccaggaatggtgtatgatagccactccagccataccggaaagtaatggtctccaatatggcacaatgggtatgaaaaccaccaggccatatgccatatcccttgctactc

SEQ ID NO: 250804 - DNA, 1626 bp, Homo Sapiens
  misc_feature (510)..(524): n is a, c, g, or t
  misc_feature (1498)..(1514): n is a, c, g, or t
tggcacatgagatctagagcaggagcaacttctcacacatagtaagtgggaaaagaaagtgctttgaaagttcctccctcacctacacagtagtcgtcatgtcgagacctgccagagagagacacattctcaagtgaatcctggcttcttggaagcgcttgcctagacgagacacagtgcataaaaacaacttttgggggacaggtatgttttcttgcagctgcggttgtaaggtcttggcaagacaagcagtgtggccagaattttgaacttctgatgaatgtgtaatgcaaaggaccttgtacatttttttgtttcaaggtcctcaaaatgagcacatgaagaggttgctgtgaaactttaagtggccctactgcgcagaagcattcagatgtcacttgatgatctgtaagggaacttgctgatttgggaatgtgcttagggaacacacattccttttgacagggtctgtcactgggtgggtgatgaattatacagatgacatgtgcnnnnnnnnnnnnnnncaacctcaatggtattcctacaggaaatggataaccattttaactgtattttttgcagcccgtaccttcttgggaatacaattgtctaactttttatttttggtctggctgttgtggtgtgcaaaactccgtacattgctattttgccacactgcaacaccttacagatgtggaagatgtgaaatttgtcatcaattatgactaccctaactcctcagaggattatattcatcgaattggaagaactgctcgcagtaccaaaacaggcacagcatacactttctttacacctaataacataaagcaagtgagcgaccttatctctgtgcttcgtgaagctaatcaagcaattaatcccaagttgcttcagttggtcgaagacagaggttcaggtcgttccaggggtagaggaggcatgaaggatgaccgtcgggacagatactctgcgggcaaaaggggtggatttaatacctttagagacagggaaaattatgacagaggttactctagcctgcttaaaagagattttggggcaaaaactcagaatggtgtttacagtgctgcaaattacaccaatgggagctttggaagtaattttgtgtctgctggtatacagaccagttttaggactggtaatccaacagggacttaccagaatggttatgatagcactcagcaatacggaagtaatgttccaaatatgcacaatggtatgaaccaacaggcatatgcatatcctgctactgcagctgcacctatgattggttatccaatgccaacaggatattcccaataagactttagaagtatatgtaaatgtctgtttttcataattgctctttatattgtgtgttatctgacaagatagttatttaagaaacatgggaattgcagaaatgactgcagtgcagcagtaattatggtgcactttttcgctatttaaggtggatatttctctacattcctgaaaacannnnnnnnnnnnnnnnnggactagaaaatgcaggcagtgttttcacaaaagtaaatgtacagtgatttgaaatacaattaatgaagggcaatgcatggcctttcaaataaaaaatattttgaagactgg

SEQ ID NO: 250805 - DNA, 1377 bp, Homo Sapiens
  misc_feature (873)..(882): n is a, c, g, or t
gatgctgaagcaatatctgaggttgatgtgagcttaaaaaggttgttattttattcctgtcacaggtgcacactggaggaacatttagtttatgcctaagttctcagctcttgtcctcagttgctctctcattttgatatccacctcatctctcatcttctgaagatcacctcatcaccacgtcttcgatggctctatcatgtcaaacctcttttggcaaaaacagttgttgcaaaccaggtccggccttgtctctcaggctacattatttgttgtgcattcccgtgttccttctgaggtagattttcctgaattacttccctgtacaccctttcctgcttctcctgacctccatgactgtgggtacccttttctcttcactggaatcctctttctctctttactaatatggataattgctattgtttttccagattcagttttagtgttatcttctttgtgaagctgcctctactctcttaggaagcattgagcccctctcctttttgggggcccacacttttatcagggttcactgtatgctataatcagttgtttttgcatctatttcctcaccaggtgagctccttgaaggaaggaattgttggctattcattttgtatcctcagcagattgcacagcacctagcacatgattagttgactgagtctaacactctggcttaggggcattatgaataatcaagatttgggtggaggtacagagtgctgagctttgcagaggctgaacccacctgagtggagattggggatgcttctgggggagggcagtggtaccatttattgatggttgataggatgccacatttagacattgacatcttctgtgcattttacttatttctattaattnnnnnnnnnngtctatgaatcctttctcttagcccctccaaggccaaaagacaaaaaaagtcagaacagacattaatcaagtaaaatatcatattttaaattccaattatcttaacaaaaatccctggaatcagtgtgggtcttttctttagaagagttcaaataatttcacaaatgttactcatttatcttctcaacattatctgtccatatttcaccaacacagaattttctagcagaatggaattccacctggggcagcaagctcagtgggaatgttccaatcaacccagatgactgacccctgccaagaatggtagagagaaaggtaattcttgcatttgctacaatttagagtggtaactcttttcccttcatgtttctgtaaaaagagatgagggcagatgatggaagaaccaagaagcaacgacacagcagagaactcggtccatatcttgaaactccaattagtgatgatttctataaaacttgccttttgagggac

SEQ ID NO: 250806 - DNA, 1193 bp, Homo Sapiens
  misc_feature (1110)..(1119): n is a, c, g, or t
ggagtcgcggggcagcagaggcgtaaggagtaggcggggcgagccggctgggctcagggtccaccagctcacccgggtcgagagggcaatctgagagcgactggtgacgcgcttatccacttccctcctcccgcctccccccggggtggcagctcgctggtgacgtagtgagtgtgatggccgccgcgaggccgggaaggtgaaggactggtggagtcaacacagtcaatcaatagccaacctcaacccgagacaggacagaagagaactcagaatctttttgccttttggacttcagccatgtccatgatgcctaccctgtgaagatctctcaccatccaaaaaacgcaatgtccctgctcttctctcgatgcaactctatcgtcacagtcaagaaaaataagagacacatggctgaggtgaatgcatccccacttaagcactttgtcactgccaagaagaagatcaatggcatttttgagcagctgggggcctacatccaggagagcgccaccttccttgaagacacgtacaggaatgcagaactggaccccgttaccacagaagaacaggttctggacgtcaaaggttacctatccaaagtgagaggcatcagtgaggtgctggctcggaggcacatgaaagtggctttttttggccggacgagcaatgggaagagcaccgtgatcaatgccatgctctgggacaaagttctgccctctgggattggccacaccaccaattgcttcctgcggggtaagggcaccgcatggccccgagggcctttctccttacccgagggctcccacggaaaaaggagtggcccagactggtgaacccagcgtggcccatggccctccaccaaggacaaggcagcctcccttgcccgaaaaccctaatggagtgcggatggcgggcccaacctcctaaatggccccccttccgggaggggatggaccttccttttttgattggaacaggcccctgggaaattggaagggtcaaccaaccgacacctggaaccaggcgggagattggaaaaaagtttttggaccgggatatgcctgaatgaggtcttttggccctgggcgagcccaatccttaaaaatnnnnnnnnnntggtattgggataagggcataaagttacaccttcttttccgcaccaaggtgtgatgtttaagcaggtcctcctc

SEQ ID NO: 250807 - DNA, 1412 bp, Homo Sapiens
  misc_feature (275)..(275): n is a, c, g, or t
  misc_feature (345)..(404): n is a, c, g, or t
  misc_feature (1069)..(1069): n is a, c, g, or t
  misc_feature (1095)..(1095): n is a, c, g, or t
  misc_feature (1167)..(1167): n is a, c, g, or t
  misc_feature (1261)..(1271): n is a, c, g, or t
ggaggtgtagagaacagattcggaaactggggaggtctagcatgtggcagtaggagggggtcctcactccgcttcgcgattgccaaaacgagcctgccggaagcagccctaagagggttttcttctcccagggaaccagcggggaaactgaggctcggggtggagcgcaggattgtgggacgcgccaagactgctgtctttcccagcagcagcggaagatgtcggacagcgaggacagcaacttttccgaggaggaggacagcgagcgcagcagntgacggcgaggaggccgaggtagacgaagagcggcggagtgcagcgggcagtgagaaagaagaagagccnnnnnnnnnnnnnnnnnnnnnnnnnnnnnnnnnnnnnnnnnnnnnnnnnnnnnnnnnnnntgatgaccgaccccccaagaaaccccgccatggaggcttcattctggacgaggctgatgttgacgatgagtatgaggacgaggaccagtgggaggatggagcagaggacattctagagaaagaagagattgaagcctccaatatcgataatgttgtcctggatgaagatcgttctggggctcgccgcctgcaaaacctctggagggaccagcgagaagaagaactgggcgagtattacatgaagaaatacgccaagtcatctgtgggagagacggtgtatggaggatctgatgagctctcagacgacatcacccagcagcagctgctcccaggagtcaaggatcccaatctgtggactgtcaaatgtaagattggggaggaacgggccacggccatttccttgatgcgcaagttcattgcctaccagttcacagacacgcccctgcagatcaagtcagtagtggcaccagagcatgtgaagggctacatctacgtggaggcctacaagcagacccacgtgaagcaggccattgagggggtgggcaacctgcggcttggctactggaaccagcagatggtgcccatcaaggagatgacagacgtgctcaaagtggtgaaggaggtggccaacctgaaaccaaagtcctgggtccgcctcaagcggngcatctacaaggatgacattgctcangtggactacgtggagcccagccagaacaccatctccctgaagatgatcccacgcatcgactacgatcgcatncaggcccgcatgagcttgaaagactggtttgccaaaaggaagaagtttaagcggcctccacagaggctgtttgatgctgagaaatcagtccctnnnnnnnnnnnatgtgccctcggatgtggacttcctcatcctttgaaggggaacgtttacgcccggaagggcttttctggtccagagcttccccatggcctgctgggacccacgggggttgtggaaccacccccctccctaatttggaaaaa

SEQ ID NO: 250808 - DNA, 1023 bp, Homo Sapiens
caggcctgggtggcgaattcggcacgagggccagtcgactgcgagttccttccgcagcttgtatcgttacccactcctgcaggtgctgctgctgcctccactgtactcagacccaggtagcacaggattgtccatcctccagcagctcagtgcaacggtgtgaactcagcctgtttcagagcctccacaccatgacctccaagaagctggtgaactcggtggctggctgtgctgatgacgctcttgctggcctggtggcctgcaaccccaacctgcagctcctgcagggccaccgcgtggccctccgttctgacctggacagcctcaagggccgggtggcactgctgtcgggtgggggctctggccatgagcctgcccatgctggtttcatagggaaggggatgctgactggggtcatcgcgggagctgtgttcacctccccggcagtgggcagcatcctggcagccatcagggccgtggcccaggccggcacagtggggacgctccttatcgtgaagaactacactggggatcggctcaacttcggcctggcccgggagcaggcccgggctgaaggcatcccggtggagatggtggtgattggggacgacagcgccttcactgtcctgaagaaggcaggccgggcggggggctgtgcggcaccgtgcttatacacaagggtggcaggtgctctggctgaaggctggtgtgggggctgggaggagatcgcaaagcagggtgaacgtggtcaccaaggccatgggtaacccctggggggtgaagcttatccctcctgcagccgtccctggttccaaaacccacctttcgagctctccaccccacaaaggtggaacttgggccctgggggattccacgggggaaaactgggggtgccgcccggaataaaaatggcaaccgcccggatggagaattgtgaaaactcatggctcgaacaccatggacaaaacaccaccaaacgcggtccccatgttgcctggtgcacccccggttccccccaaattg

SEQ ID NO: 250809 - DNA, 1039 bp, Homo Sapiens
ggcctgggtggcgaattcggcacgagggccagtcgactgcgagttccttccgcagcttgtatcgttacccactcctgcaggtgctgctgctgcctccactgtactcagacccaggtagcacaggattgtccatcctccagcagctcagtgcaacggtgtgaactcagcctgtttcagagcctccacaccatgacctccaagaagctggtgaactcggtggctggctgtgctgatgacgctcttgctggcctggtggcctgcaaccccaacctgcagctcctgcagggccaccgcgtggccctccgttctgacctggacagcctcaagggccgggtggcactgctgtcgggtgggggctctggccatgagcctgcccatgctggtttcatagggaaggggatgctgactggggtcatcgcgggagctgtgttcacctccccggcagtgggcagcatcctggcagccatcagggccgtggcccaggccggcacagtggggacgctccttatcgtgaagaactacactggggatcggctcaacttcggcctggcccgggagcaggcccgggctgaaggcatcccggtggagatggtggtgattggggacgacagcgccttcactgtcctgaagaaggcaggccggcgggggctgtgcggcaccgtgcttatacacaaggtggcaggtgctctggctgaggctggtgtggggctggaagagatcgcaaagcaggtgaacgtggtcaccaaggccatgggtacccctgggggtgagcttatcctcctgcagcgtccctgggttccaaacccaccttcgagctctcaccccacgaaggtggagctggggcctgggggatcccccggggaaaactggggggccccccggataaaagaagggcaacccccccgatgaaaatttgtgaaaacttcattgctccaaccaacattgaacaaacacccaccaaaacgccgtcccaatggtggcccgggggcaacccccggcttcccttcagtttggggaaagaatggccccaaaaaaccct

SEQ ID NO: 250810 - DNA, 134 bp, Homo Sapiens
cttttaagcatgaaaatgaaaccaaatgtaagtacagaaggaaatgctgaatcaggcctgagggataggtggcaaagagatagaaaagatggaaggtactacatatattttcttaccttaaaaactgttgagga

SEQ ID NO: 250811 - DNA, 813 bp, Homo Sapiens
gggaccgcccatcagctgagaattgcagctgagggctccggggtaggtgggtgacggcggtcggaggtgtaggagggagccgtggaggtccaggtgactgcttagaaaactgcacagcatctgatgaaattagcgaataagaacatcaaccatgtcttacactccaggagttggtggtgaccccgcccagttggcccagaggatctcttctaacatccagaagatcacacagtgttctgtggaaatacaaagaactctgaatcaacttggaacacctcaagattcacctgaattgaggcaacagttgcaacagaagcagcagtatactaaccagcttgccaaagaaacagataagtacattaaagagtttggatctctgcccaccacccccagtgaacagcgtcaaaggaaaatacagaaggatcgcttagtggcagagttcacaacatcactgacaaacttccagaaggtccagaggcaggctgctgagcgagagaaagagtttgttgctcgagtaagagccagttccagagtgtctggcagttttcctgaggacagctcaaaagaaaggaatcttgtatcctgggaaagccaaactcaacctcaagtgcaggtgcaggatgaagaaattacagaggatgacctccgtcttattcatgagagagaatcttctatcaggcaacttgaaactggaattatggaaattaatgaaatatttaaaagatttggggaatgatggattcctggaacaagggaaagggtaataaaataagccatagaagcgccaatgttgggaaaaatgccagaaaggga

SEQ ID NO: 250812 - DNA, 965 bp, Homo Sapiens
  misc_feature (568)..(583): n is a, c, g, or t
  misc_feature (834)..(834): n is a, c, g, or t
gtggacagagcaagcacatactgttacggttctggccatcaattcaattggtgcttctgttgcaaattttaatttaaccttttcatggcctatgagcaaagtaaatatcgtgcagtcactcagtgcttatcctttaaacagcagttgtgtgattgtttcctggatactatcacccagtgattacaagctaatgtattttattattgagtggaaaaatcttaatgaagatggtgaaataaaatggcttagaatctcttcatctgttaagaagtattatatccatgatcattttatccccattgagaagtaccagttcagtctttacccaatatttatggaaggagtgggaaaaccaaagataattaatagtttcactcaagatgatattgaaaaacaccagagtgatgcaggtttatatgtaattgtgccagtaattatttcctcttccatcttattgcttggaacattattaatatcacaccaaagaatgaaaaagctattttgggaagatgttccgaaccccaagaattgttcctgggcacaaggacttaattttcagaaggttgcnnnnnnnnnnnnnnnnaacccagaatatatacgattgcaatctagacgccatatgacttatagagcattaagcatttttaagatttaaaaggtcatattttattcaattcatcttaatatatctgttattatatactttcaagaatagcaggatgcagggatttgaaatcaggaagaaacaaatttcagcgcatagtttatcgtatgagagttcacaatatacatatgttgcttctgtgtcacagtacataataaaataaatattanaaagttaagggtcaatctgatggagaacagatatttggatacactttttttggtataaactgtatttaggcaaaaagctggaatcaatatttttaatgtctataattatctccataattatttaaataaat

SEQ ID NO: 250813 - DNA, 421 bp, Homo Sapiens
aacaatctagaatcccagtactgaccaggtcctttggctcctccttgtaaaatgcgacccaatctaaagatgatggctctttcatactcttttataatctagaataaaaacatgaataataatttaacatgaggagtacaaatatatacatgcatggcttcttaaatatatatttctgctctaaacagattagatgcctcatcttttttctttagaaccagatcatatctataaatcacacgtccaatgtttaccttctcaaagcttatttattattttcttactgattacaaaagcaatagatattcactgtataaatttaggaaggacagaatagtatacagaaacaaatccataacctcactcctcagctgttaacattgttattcagttactcatgcaggccaggcacggtggctca

SEQ ID NO: 250814 - DNA, 1037 bp, Homo Sapiens
  misc_feature (929)..(930): n is a, c, g, or t
  misc_feature (933)..(934): n is a, c, g, or t
  misc_feature (936)..(936): n is a, c, g, or t
  misc_feature (938)..(938): n is a, c, g, or t
  misc_feature (975)..(975): n is a, c, g, or t
  misc_feature (981)..(981): n is a, c, g, or t
  misc_feature (1000)..(1000): n is a, c, g, or t
  misc_feature (1011)..(1011): n is a, c, g, or t
ggaattcccgggattccgggtttggcaacgaggacgggggagtgcgactgcgtctcgggcagcatggccgagaagcggcacacacgggactccgaagcccagcggctccccgactccttcaaggacagccccagtaagggccttggaccttgcggatggattttggtggcgttctcattcttattcaccgttataactttcccaatctcaatatggatgtgcataaagattataaaagagtatgaaagagccatcatctttagattgggtcgcattttacaaggaggagccaaaggacctggtttgttttttattctgccatgcactgacagcttcatcaaagtggacatgagaactatttcatttgatattcctcctcaggagatcctcacaaaggattcagtgacaattagcgtggatggtgtggtctattaccgcgttcagaatgcaaccctggctgtggcaaatatcaccaacgctgactcagcaacccgtcttttggcacaaactactctgaggaatgttctgggcaccaagaatctttctcagatcctctctgacagagaagaaattgcacacaacatgcagtctactctggatgatgccactgatgcctggggaataaaggtggagcgtgtggaaattaaggatgtgaactacctgtgcagctccagagagctatggctgcagaagcagaagcgtcccgcgaggcccgcgccaaggttattgcagccgaagaggaaatgaatgcatccagggctctgaaagaagcctccatggtcatcactgaatctcctgcagcccttcagctccgatacctgcagacactgaccaccattgctgctgagaaaactcaacaattgtcttcctctgcccatagatatgctgcaggaatcataggggcaaacacagcatctaggtagtgtagnntgnngnancttccagcatgagtcgggacaaattagctttactctnaagagnggtagggtttcttttccantgtcattgtgngtccagatgtttacagtataaaatag

SEQ ID NO: 250815 - DNA, 1570 bp, Homo Sapiens
  misc_feature (62)..(165): n is a, c, g, or t
ttatgttataccagtgattattatccctacattagctgggcatggggtcatgagcccggttnnnnnnnnnnnnnnnnnnnnnnnnnnnnnnnnnnnnnnnnnnnnnnnnnnnnnnnnnnnnnnnnnnnnnnnnnnnnnnnnnnnnnnnnnnnnnnnnnnnnnnnngccacaagagtgaaactccatctcagaaaaattttaaaagactctctggaggtaaggcacatatgacctggagaagctggttgtggtgtaaggtcatcactttctgcaaagcatttagccagtcagcggtgtcaggtggcagttacagccccaggttccttcctctggcctgggtgcttagggggttcagaatgagtcagtggaagtcaaaacaagagggatctaacctactacataataatctaaaaatacaaacttttaactattttaagactaacagattaccttatataaatcaccaatctctcagtatttacaagctaacaattctttcacctatttttataactgctatacattctgggaacaccacaattgacatatggaaaaagaaaagccctaccctctctttatgagttaaaggctaatttggtccccgacttcatgcttggaaagctagcgctcatctctacactagcctagatggctgtgttttgcccctatgattccttgcagcatatctatgggcagagggaagacaattgttgagtttttctcagcagcaatggtggtcagtgtctgcaggtatcggagctgaagggctgcaggagattcagtgatgaccatggaggcttctttcagagccctggatgcattcatttctccttcggctgcaataaccttggcgcgggcctcgcgggacgcttctgcttctgcagccatagctctctggagctgcacaggtagtttcacatccttaatttccacacgctccacctttattccccaggcatcagtggcatcatccagagtagactgcatgttgtgtgcaatttcttctctgtcagagaggatctgagaaagattcttggtgcccagaacattcctcagagtagtttgtgccaaaagacgggttgctgagtcagcgttggtgatatttgccacagccagggttgcattctgaacgcggtaatagaccacaccatccacgctaattgtcactgaatcctttgtgaggatctcctgaggaggaatatcaaatgaaatagttctcatgtccactttgatgaagctgtcagtgcatggcagaataaaaaacaaaccaggtcctttggctcctccttgtaaaatgcgacccaatctaaagatgatggctctttcatactcttttataatctttatgcacatccatattgagattgggaaagttataacggtgaataagaatgagaacgccaccaaaatccatccgcaaggtccaaggcccttactggggctgtccttgaaggagtcggggagccgctgggcttcggagtcccgtgtgtgccgcttctcggccatgctgcccgagacgcagtcgcactcccccgtcctcgttgccaaacccggagatcccgggaattcc

SEQ ID NO: 250816 - DNA, 1266 bp, Homo Sapiens
  misc_feature (1160)..(1160): n is a, c, g, or t
  misc_feature (1230)..(1230): n is a, c, g, or t
cgcccgccgaggctcggggctcgggccgggctccgcgcggagttgcagcggtggccggatgccaagtgtaagtgattttttatcaagcagaaatgcatcgaacaacgagaatcaagatcactgagctaaatccccacctgatgtgtgtgctttgtggagggtacttcattgatgccacaaccataatagaatgtctacattccttctgtaaaacgtgtattgttcgttacctggagaccagcaagtattgtcctatttgtgatgtccaagttcacaagaccagaccactactgaatataaggtcagataaaactctccaagatattgtatacaaattagttccagggcttttcaaaaatgaaatgaagagaagaagggatttttatgcagctcatccttctgctgatgctgccaatggctctaatgaagatagaggagaggttgcagatgaagataagagaattataactgatgatgagataataagcttatccattgaattctttgaccagaacagattggatcggaaagtaaacaaagacaaagagaaatctaaggaggaggtgaatgataaaagatacttacgatgcccagcagcaatgactgtgatgcacttaagaaagtttctcagaagtaaaatggacatacctaatactttccagattgatgtcatgtatgaggaggaacctttaaaggattattatacactaatggatattgcctacatttatacctggagaaggaatggtccacttccattgaaatacagagttcgacctacttgtaaaagaatgaagatcagtcaccagagagatggactgacaaatgctggagaactggaaagtgactctgggagtgacaaggccaacagcccagcaggaggtattccctccacctcttcttgtttgcctagccccagtactccagtgcagtctcctcatccacagtttcctcacatttccagtactatgaatggaaccagcaacagccccagcggtaaccaccaatcttcttttgccaatagacctcgaaaatcatcagtaaatgggtcatcagcaacttcttctggttgatacctgagactgttaaggaaaaaaattttaaacccctgatttatatagatatcttcattgccattacagctttctagatgctgaatnacatgtgactatcgtccaattttgctttcttttgtagtgacattaaatttggctataaaagatggactanatgtgatactcctatgggacggttaattggaaagaa

SEQ ID NO: 250817 - DNA, 1271 bp, Homo Sapiens
gccagctttaaggttggttctggccaacttggacatctggttggaaaggtttccttgaggctatggttttactggataaagggcagcctgaataacatctccagcagctgtgcctggggagatagtataaatcccaaaggagtccagaatctgagtaactggcattaaatgcagaaacatcaaaatggctgctgagttgctttggcaacagcctggtgcagatggctggtggtgttgctgcccttcttgacatgtggcccagcaccgaggacatgctgaagaacactaaatgcatttgcctctgcacttcccgcgacagcactttctgctacaaaagcagcatggacaagactgtctccattctgttctcggatttcacctccacggtagttggcctttgcaccagataaaccaagcccacccctcatgttgagaaactgttcagcaacttgctttagaacaggatgactcacaccaagtccaatcaaagccattcttgcacttgtgaaatggttctgaacgaagtaatgtaactcctctgatgtcacttttccaatcctatagtcaggacaatacaagggattagccaaggcattccggtaagctgctgcatgcaaattttcaatgacatgagtctgcggattctgaaaggccacagctttgtcaatctttagctgaggctgaaggtcagctacttcccaacgacgaaattctggtgctgtggtgacattgagcaggaactccattagaatatcaacatcaccccgcaggcattccacagtataagccatgttttcccttgttgcggtcacacttaatttgccaccaactgcttcaattccacgggttatcttgaaagatgaagctccttttgtcgtcagactggatgtaagacgcagcaaatgggtggttcctaaattgctgaagtcctcatatctactgcctgctttaatgaacaaaccaattcttgatacaggagaatagttttccaaagaagcaatcaccaagccatttggtaacttggtaaactcaaggtcctgaggttgtggcggtgctcctgcaggcgcagctgtggctttaactttgggggcaactttgagggaataaaatctcgagaaagagccggctctggttagtagcttcatgattcaagattgttctgacacacggtcactgccggattaaaggaaagcaagatggtggcggaggccgggagtttcccagcgttccccgctaacactttcccacgtccccttcgtgaggtactcccc

SEQ ID NO: 250818 - DNA, 1686 bp, Homo Sapiens
  misc_feature (1621)..(1621): n is a, c, g, or t
gagcgaggcctgggtggcgaattcggcacgaggccaaagttaaagccacagctgcgcctgcaggagcaccgccacaacctcaggaccttgagtttaccaagttaccaaatggcttggtgattgcttctttggaaaactattctcctgtatcaagaattggtttgttcattaaagcaggcagtagatatgaggacttcagcaatttaggaaccacccatttgctgcgtcttacatccagtctgacgacaaaaggagcttcatctttcaagataacccgtggaattgaagcagttggtggcaaattaagtgtgaccgcaacaagggaaaacatggcttatactgtggaatgcctgcggggtgatgttgatattctaatggagttcctgctcaatgtcaccacagcaccagaatttcgtcgttgggaagtagctgaccttcagcctcagctaaagattgacaaagctgtggcctttcagaatccgcagactcatgtcattgaaaatttgcatgcagcagcttaccggaatgccttggctaatcccttgtattgtcctgactataggattggaaaagtgacatcagaggagttacattacttcgttcagaaccatttcacaagtgcaagaatggctttgattggacttggtgtgagtcatcctgttctaaagcaagttgctgaacagtttctcaacatgaggggtgggcttggtttatctggtgcaaaggccaactaccgtggaggtgaaatccgagaacagaatggagacagtcttgtccatgctgcttttgtagcagaaagtgctgtcgcgggaagtgcagaggcaaatgcatttagtgttcttcagcatgtcctcggtgctgggccacatgtcaagaggggcagcaacaccaccagccatctgcaccaggctgttgccaaggcaactcagcagccatttgatgtttctgcatttaatgccagttactcagattctggactctttgggatttatactatctcccaggccacagctgctggagatgttatcaaggctgcctataatcaagtaaaaacaatagctcaaggaaacctttccaacacagatgtccaagctgccaagaacaagctgaaagctggatacctaatgtcagtggagtcttctgagtgtttcctggaagaagtcgggtcccaggctctagttgctggttcttacatgccaccatccacagtccttcagcagattgattcagtggctaatgctgatatcataaatgcggcaaagaagtttgtttctggccagaagtcaatggcagcaagtggaaatttgggacatacaccttttgttgatgagttgtaatactgatgcacacattacaggagagagctgaacgttctctcagcccagagcagcaaacacatgaaagtcagaagtctctaatatatcatttgtcttttttccagtgaggtaaaataaggcataaatgcaggtaattattcccagctgacctaaagtcaataaaaacttcctgtttaaagtggtttaacttaacatttttccccaacgaagctaatccaaaaaggagtttattaaggggcctggaaatccttttggatctaacaaggcctttaaagggagaaccnggaaaaatagtctagttggaacagaaggaaaacgctccagacagacctaattaagaacttaaggg

SEQ ID NO: 250819 - DNA, 575 bp, Homo Sapiens
gccgaaatgccagtctgaatcatttcctctgggaagattcgacattgagggttgattggctgacccatgatatcaaggaagtcttcggccagtacaacaggacctctgtcaatgggttttcccgatccattgaatacccgaccaagcatatcctcagacaccggtgttcggagaatatccccagtaaactcacaggacgttttcttagcatctatacctgaagtcccttcaaatacctgaactactgccttggaaccactaacttccagaacttgcccacttctctttgtgccatccggtaaggtcaaatggacaatttcagcatacctgggaaacttaacatgatctaagatcactagtggaccattgactccagatactgtcttgtatgtgaggcgaggctgggagaggtagttccgactgactgccagcgcctgctcccgagctcccaccgccggcccaccggtgggcacgggtagctcgggtgcggccccgttgacaatcccccgcatcgcccgcagcgccatcttgtctcccccggccgtaatggcactctgcgttgataccatgcttcc

SEQ ID NO: 250820 - DNA, 858 bp, Homo Sapiens
ggggtggagcggaagtcactccctgaggcagtggcgacagcggcggcgagaggatgaacaacaagttcgacgctttgaaagatgatgacagtggggaccatgatcagaatgaagaaaacagcacacagaaagatggtgagaaggaaaaaacggaacgagacaagaatcagagcagtagcaagagaaaggctgttgtccctggaccggcagagcatcccctgcagtacaactacactttttggtactccaggagaacccccggccgtcccacgagctcacagagctatgaacagaatatcaaacagattggcacctttgcctctgtggagcagttctggaggttttatagccacatggtacgtcctggggacctgacaggccacagtgacttccatctcttcaaagaaggaattaaacccatgtgggaggatgatgcaaataaaaatggtggcaagtggattattcggctgcggaagggcttggcctcccgttgctgggagaatctcattttggccatgctgggggaacagttcatggttggggaggagatctgtggggctgtggtgtctgtccgctttcaggaagacattatttcaatatggaataagactgccagtgaccaagcaaccacagcccgaatccgggacacacttcggcgagtgcttaacctacctcccaaccacatttatgggaatacaaaactcccaccgacagcttcaaaatgccaggcagggctgggcccccccaaggctccctttttcaaacctcctggaaacccccggtttgaatggggcatggacccttttcctttttggaaggcaaccatcctttgaagcttgcggtcatccgagatctcct

SEQ ID NO: 250821 - DNA, 332 bp, Homo Sapiens
  misc_feature (12)..(12): n is a, c, g, or t
  misc_feature (136)..(136): n is a, c, g, or t
tgcttaaccctncctccccaaaacccatttatggaataccaaaactcacaccgacagcatcaaaaatgcccaggcaggctgggccccccaaaggctcctttttcaaaacctctggaagccgcggttgaatgtgccnatgaccctctccctctctggatggcaccatcattgaagctggcgtcatcggagtctcttgttctgttggcgtgctacctggaagatccttctgtcctggacaagaggaattggaagagcattttatgttttaagaacaggctgacacgcagcagctacaacaacagctgagatcacttaataaatggtgctaaact

SEQ ID NO: 250822 - DNA, 463 bp, Homo Sapiens
gcctgtgggtttttgccttagtctgctagaaagactggcctgctgctctctgctttatccagaggtctgcctctgggacttcagccctgtagctgtagagaccagaagaccaaccctctttgagacccagatgctactttcccttgcgtccccctctctttcctctcccaatgagccaaccttttgcacttccactagaatgccaggcaggctgggcccccaaaggctcctttttcaaaacctctggaagccgcggttgaatgtgccatgaccctctccctctctggatggcaccatcattgaagctggcgtcatcggagtctcttgttctgttggcgtgctacctggaagatccttctgtcctggacaagaggaattggaagagcattttatgttttaagaacaggctgacacgcagcagctacaacaacagctgagatcacttaataaatggtgctaaact

SEQ ID NO: 250823 - DNA, 537 bp, Homo Sapiens
  misc_feature (241)..(281): n is a, c, g, or t
  misc_feature (285)..(298): n is a, c, g, or t
  misc_feature (306)..(362): n is a, c, g, or t
  misc_feature (382)..(435): n is a, c, g, or t
ggccctacgcttttctagaatactagtgcttctgaaacataatgcagaaaaagtatcctcataactacttaaaataagaatgataccaaaaactaagttagtaaatagaatagtcctgggtttttttgtccgtaagtttttccttaaaaaaaagatcacctgctgtcaattatcaataaatcaatttaacaagtatcatattattattaatagaaataaatggaaacaaaaatcatgctcnnnnnnnnnnnnnnnnnnnnnnnnnnnnnnnnnnnnnnnnnttcnnnnnnnnnnnnnnttagctgnnnnnnnnnnnnnnnnnnnnnnnnnnnnnnnnnnnnnnnnnnnnnnnnnnnnnnnnntcttgagcccagaacatcannnnnnnnnnnnnnnnnnnnnnnnnnnnnnnnnnnnnnnnnnnnnnnnnnnnnnagactctgtctcaaaaaaaattaatttgactgaatgtatatatatgatgtgcacatatgcttgattttatgagacaggtctcactatgttactcagactggt

SEQ ID NO: 250824 - DNA, 330 bp, Homo Sapiens
  misc_feature (287)..(287): n is a, c, g, or t
tcagcctccaaagtagctgggactgcaagcatgcaccatcacatccagctgatttgttttaatcttgagtagagacagtgtctcactatgctgaggcaatcctcctccctcagtctccccaaatactgagattacaggcattagccaccatgtctgcctgggccctacgcttttctagaatactagtgcttctgaaacataatgcagaaaaagtatcctcataactacttaaaataaggaatgataccaaaaactaaggttaggtaaataggaataggtcccggggntttttttggtcccgtaaggtttttcccttaaaaaaaggatcac

SEQ ID NO: 250825 - DNA, 703 bp, Homo Sapiens
  misc_feature (49)..(69): n is a, c, g, or t
  misc_feature (95)..(316): n is a, c, g, or t
actcatcacttaaaaaaaaattttttttgaactgacatgcttgagagcnnnnnnnnnnnnnnnnnnnnngagatgagagagtcttgctctgtccnnnnnnnnnnnnnnnnnnnnnnnnnnnnnnnnnnnnnnnnnnnnnnnnnnnnnnnnnnnnnnnnnnnnnnnnnnnnnnnnnnnnnnnnnnnnnnnnnnnnnnnnnnnnnnnnnnnnnnnnnnnnnnnnnnnnnnnnnnnnnnnnnnnnnnnnnnnnnnnnnnnnnnnnnnnnnnnnnnnnnnnnnnnnnnnnnnnnnnnnnnnnnnnnnnnnnnnnnnnnnntgagccactgtgcctggccagagctcatcactgttaactcagcctgggtttttcacagcagtcatggaaatagattcattaataatagtaacaaatatatagtctccctctcaaagaaaccttgagtggcagtggcataccagatacacagtaggaaatactgtagaattatgttgttaagttcataaccaaacatcatacatgatgataaaagacaagataatggtcacatttatgcagtattaactgagagggcaaatttgtgcctgagaagctattgggaatgttctctctctttgcattactaggaattacatgggaaacacatgtagacagtcttcaggctattaagatttgtccacttaatctttacttatacatgtttaa

SEQ ID NO: 250826 - DNA, 348 bp, Homo Sapiens
gggagcgcccagggcatgtccgccgatcccaaggagagcaatctgtcaggcgccgccgcccgggcaggcagtatgcctgagagaggagtcctccgtgttcgcagcctcccgccgcctgcactgaaaggtctgtacctgagcctggatacttgaacagaggcagacactgcggctcaaaaccccaagagtaggtacctattgtgcggagtctcggaacgcctgcctggaagaagagttccggcggctccccgaacgcttggagaaagcgcttggatgcagttgcaggaatatcctagctctgagacaaaaattgggaacctcagcatgagtttgtcacctgaatgaaat

SEQ ID NO: 250827 - DNA, 949 bp, Homo Sapiens
  misc_feature (788)..(788): n is a, c, g, or t
  misc_feature (813)..(813): n is a, c, g, or t
cttttccggttcccagagtggggcacagcgaggcgctagggggaacgctggcctctgaaactagctctgggaccggggtctgcggccggcccctagctggccccgtctcccatccccagaagggtattcactggggattctgagctttggctactccagtttcccacgacacgatgttgttccctttctacagctgctggaggactggactgctactactactcctggctgtggcagtgagagaatcctggcagacagaagaaaaaacttgcgacttggtaggagaaaagggtaaagagtcagagaaagagttggctctagtgaagaggctgaaaccactgtttaataaaagctttgagagcactgtgggccagggttcagacacatacatctacatcttcagggtgtgccgggaagctggcaaccacacttctggggcaggcctggtgcaaatcaacaaaagtaatgggaaggagacagtggtagggagactcaacgagactcacatcttcaacggaagtaattggatcatgctgatctataaagggggtgatgaatatgacaaccactgtggcaaggagcagcgtcgtgcagtggtgatgatctcctgcaatcgacacaccctagcggacaattttaaccctgtgtctgaggagcgtggcaaagtccaagattgtttctacctctttgagatggatagcagcctggcctgttcaccagagatctcccaccttcagtgtgggttccatcttacttgtcacgtttgcatcactggttgctgtttatgntgggttgggggggttcctataccangcgactgggtagtggggagccaagggaaattgaagccagtttcccccacttagcccttctgggccaggatcttgggcaacctggtaagcagaatggcctggtgacttttgtctggcggttctaaaacctcgaaaat

SEQ ID NO: 250828 - DNA, 1009 bp, Homo Sapiens
ggcgtagacgcgccgcggtccccgcctgccgctgctccgccgcagtcgccgctccagtctatccggcactaggaacagccccgagcggcgagacggtccccgccatgtctgcggccatgagggagaggttcgaccggttcctgcacgagaagaactgcatgactgaccttctggccaagctcgaggccaaaaccggcgtgaacaggagcttcatcgctcttggtgtcatcggactggtggccttgtacctggtgttcggttatggagcctctctcctctgcaacctgataggatttggctacccagcctacatctcaattaaagctatagagagtcccaacaaagaagatgatacccagtggctgacctactgggtagtgtatggtgtgttcagcattgctgaattcttctctgatatcttcctgtcatggttccccttctactacatgctgaagtgtggcttcctgttgtggtgcatggccccgagcccttctaatggggctgaactgctctacaagcgcatcatccgtcctttcttcctgaagcacgagtcccagatggacagtgtggtcaaggaccttaaagacaaggccaaagagactgcagatgccatcactaaagaagcgaagaaagctaccgtgaatttactgggtgaagaaaagaagagcacctaaaccagactggatggaaacttcctgccctctctgtaccttcctactggagcttgatgttatattagggactgtggtataattattttaataatgttgccttggaaacatttttgagatattaaagattggaatgtgttgtgaagtttccttgcctacttttactggccatatatatagggagcactttaaacttaatgcagtggggcaatgtccacgttttttggaaaatggattttgcctccgggtaaggaaaagatgtatgttggctatcctgcagggaaatataaactttaaaataaaatttatatcccccccgggcacacaacagtccgcat

SEQ ID NO: 250829 - DNA, 622 bp, Homo Sapiens; identical to SEQ ID NO: 13831

SEQ ID NO: 250830 - DNA, 505 bp, Homo Sapiens
  misc_feature (427)..(427): n is a, c, g, or t
  misc_feature (463)..(463): n is a, c, g, or t
ggcccagtcgcgccgccagcgggctgagggtaggaagtagccgctccgagtggaggcgactgggggctgaagagcgcgccgccctctcgtcccactttccaggtgtgtgatcctgtaaaattaaatcttccaagatgatctggtatatattaattataggaattctgcttccccagtctttggctcatccaggcttttttacttcaattggtcagatgactgatttgatccatactgagaaagatctggtgacttctctgaaagattatattaaggcagaagaggacaagttagaacaaataaaaaaatgggcagagaagttagatcggctaactagtacagcgacaaaagatccagaaggatttgttgggcatccagtaaatgcattcaaattaatgaaacgtctgaatactgagtggagtgagtnggagaatctggtcccttaggatatgtcagatggctntatctctaacctaaccattcagagacagtactttcctaatga

SEQ ID NO: 250831 - DNA, 688 bp, Homo Sapiens
  misc_feature (89)..(89): n is a, c, g, or t
gacacaagccagcaaccagaaacatctgcctatgaagcttgggccttggtctaatttgttttgaagccaagaagatcaaagaaagagcnccgtgctcagtgcaagcaacagtttgaatgaagtggtctgctgagtctcttacccctcagcaggatcacttgacactttcctatggcattcctacatctcagcacaaccagcaacacacaaacacaaaagaaaccaaacagaaacacaatcaaaggccctgaatcctctagaaatagctgtgttcaagtgaaaataagatgcctcctagtgacaagcaaaaccagggttttagggcaggcacttcttcaatggtattcaacttaaggagcactcagtctggtcataaaaaagcaggtggaatctttcaagtgtaggatttcagaaactcatatctcatatcatcactgacacttttaatcttgttaagatccaaactacacatttttcccattttctctctctctctttttcagttgttcttgtctgtcaattacttatttaattcagagtcaacattccttccaatgactgtgctcctcgtaattaccctagccctcttcttttcccatcataacaatcagccttccacaagctgttgataacaaccatttgaaaatgtaggcatcagtaggacgaaaagcaccataaataagaggtc

SEQ ID NO: 250832 - DNA, 2062 bp, Homo Sapiens
gggccacttggcgagtgagacgctgatgggaggatggacatactggtgtctgagtgctccgcgcggctgctgcagcaggaagaagagattaaatctctgactgctgaaattgaccggttgaaaaactgtggctgtttaggagcttctccaaatttggagcagttacaagaagaaaatttaaaattaaagtatcgactgaatattcttcgaaagagtcttcaggcagaaaggaacaaaccaactaaaaatatgattaacattattagccgcctacaagaggtctttggtcatgcaattaaggctgcatatccagatttggaaaatcctcctctgctagtgacaccaagtcagcaggccaagtttggggactatcagtgtaatagtgctatgggtatttctcagatgctcaaaaccaaggaacagaaagttaatccaagagaaattgctgaaaacattaccaaacacctcccagacaatgaatgtattgaaaaagttgaaattgctggtcctggttttattaatgtccacttaagaaaggattttgtatcagaacaattgaccagtcttctagtgaatggagttcaactacctgctctgggagagaataaaaaggttatagttgacttttcctcccctaatatagctaaagagatgcatgtaggccacctgaggtcaactatcataggagagagtataagccgcctctttgaatttgcagggtatgacgtgctcaggttaaatcatgtaggagactgggggacccagtttggcatgctcatcgctcacctgcaagacaaatttccagattatctaacagtttcacctcctattggggatcttcaggtcttttataaggaatctaagaagaggtttgatactgaggaggaatttaagaagcgagcatatcagtgtgtagttctgctccagggtaaaaacccagatattacaaaagcttggaagcttatctgtgatgtctcccgccaagagttaaataaaatctatgatgcattggacgtctctttaatagagagaggggaatccttctatcaagataggatgaatgatattgtaaaggaatttgaagatagaggatttgtgcaggtggatgatggcagaaagattgtatttgtcccagggtgttccataccattaaccatagtaaaatcagatggaggttatacctatgatacatctgacctggctgctattaaacaaagactatttgaggaaaaagcagatatgattatctatgttgtggacaatggacaatctgtgcacttccagacaatatttgctgctgctcaaatgattggttggtatgaccctaaagtaactcgagtcttccatgctggatttggtgtggtgctaggggaagacaagaaaaagtttaaaacacgttcgggtgaaacagtgcgcctcatggatcttctgggagaaggactaaaacgatccatggacaagttgaaggaaaaagaaagagacaaggtcttaactgcagaggaattgaatgctgctcagacatccgttgcatatggctgcatcaaatatgctgacctttcccataaccggttgaatgactacatcttctcctttgacaaaatgctagatgacagaggaaatacagctgcttacttgttgtatgccttcactagaatcaggtctattgcacgtctggccaatattgatgaagaaatgctccaaaaagctgctcgagaaaccaagattcttttggatcatgagaaggaatggaaactaggccggtgcattttacggttccctgagattctgcaaaagattttagatgacttatttctccacactctctgtgattatatatatgagctggcaactgctttcacagagttctatgatagctgctactgtgtggagaaagatagacagactggaaaaatattgaaggtgaacatgtggcgtatgctgctatgtgaagcagtagctgctgtcatggccaaggggtttgatatcctgggaataaaacctgtccaaaggatgtaatccttcataggtttgaacactgtgtgtttttaccaaagtggccatt

SEQ ID NO: 250833 - DNA, 537 bp, Homo Sapiens
  misc_feature (400)..(400): n is a, c, g, or t
  misc_feature (409)..(409): n is a, c, g, or t
  misc_feature (433)..(433): n is a, c, g, or t
  misc_feature (446)..(446): n is a, c, g, or t
  misc_feature (454)..(454): n is a, c, g, or t
  misc_feature (463)..(463): n is a, c, g, or t
  misc_feature (484)..(494): n is a, c, g, or t
  misc_feature (520)..(520): n is a, c, g, or t
ttaaatctctgactgctgaaattgaccggttgaaaaactgtggctgtttaggagcttctccaaatttggagcagttacaagaagaaaatttaaaattaaagtatcgactgaatattcttcgaaagagtcttcaggcagaaaggaacaaaccaactaaaaatatgattaacattattagccgcctacaagaggtctttggtcatgcaattaaggctgcatatccagatttgggaaaatcctcctctgctagtgacaccaagtcaggcaggccaagtttgggggactattcagtgtaatagtgctatggggtatttctcagggtgatggtattggtcatggactcttgggctggttggatttttttaagggattattatccatcatggccatttaccagggnttaattacnctttaccaggtggtatcccccggnggaaaaggggccntttgcccncagtttggnaaaacctgtgggaaggggttnnnnnnnnnnnttttggtttttaccctttttaggggncccttttttaggggttg

SEQ ID NO: 250834 - DNA, 1199 bp, Homo Sapiens
  misc_feature (1171)..(1171): n is a, c, g, or t
ccctgagggaggggtcagacgctttaggaaagagttaatgcgaagagggggaggggataggacgaagaaaccgaagggaaagctcagctgcagcggcgactttcagtttcatttccacggaccctcctgcctgggccgcagccgccgccgcgatgcccagtaagttcagctgccggcagctccgggaggcgggccagtgtttcgagagtttcctggtcgttcggggactggacatggagacagatcgcgagcggctgcggaccatttataaccgcgacttcaagatcagctttgggacccccgcccctggcttctcctccatgctgtatggaatgaagattgcaaatctggcctacgtcaccaagactcgggtcaggttcttcagactcgaccgctgggccgacgtgcggttcccagaaaagaggagaatgaagctggggtcagatatcagcaaacaccacaagtcactgctagccaagatcttttatgacagggctgagtatcttcatgggaaacatggtgtggatgtggaagtccaggggccccatgaagcccgagatgggcagctccttatccgcctggatttgaaccgcaaagaggtgctgaccctgaggcttcggaatggcggaacccagtctgttaccctcactcacctcttcccactctgccggacaccccagtttgctttctacaatgaagaccaggagttgccctgtccactgggccccggtgaatgctatgaactccatgtccattgtaagaccagctttgtgggctacttcccagccacagtgctctgggagctgctgggacctggggagtcgggttcagaaggagccggcacattctacattgcccgcttcttggctgccgtcgcccacagccccctggctgcacagctgaagcccatgactcccttcaagcggacccggatcaccggaaaccctgtggtgaccaatcggatagaggaaggagagagacctgaccgcgctaagggctatgacctggagttaagtatggcgctggggacatactacccacctccccgcctcaggcagctgctccccatgcttcttcagggaacaagtatcttcactgccccctaaggagatcgcagagatcaaggcccagctggagacagcccctgaagtggagggaacttatgaggtgnaagctgccggctgctggctgcaccctgg

SEQ ID NO: 250835 - DNA, 1031 bp, Homo Sapiens
  misc_feature (29)..(29): n is a, c, g, or t
  misc_feature (48)..(48): n is a, c, g, or t
  misc_feature (960)..(960): n is a, c, g, or t
  misc_feature (969)..(969): n is a, c, g, or t
  misc_feature (1008)..(1008): n is a, c, g, or t
  misc_feature (1020)..(1020): n is a, c, g, or t
cctaaagaaataccaaagagaaaaggganctctgaacgctgagggganctgatgctttgggccccaaatgtcgatggaacatcagtctcccccaggtgacacggaaccctatgataagagctcttgaggagaagaacaagaactttcagaaagagctttccgatctagaggaagaaaaccgggtcctgaaggagaaactgatctatcttgagcactccccaaattcagaaggggcagcaagtcacactggcgacagcagctgcccaacatccataactcaagagtcaagcttcggaagcccaactggaaatcagttgtccagtgacattgatgagtataaaaaaaacatacatggaaatgcattacggacatcaggctcctcaagtagcgatgttaccaaagcttctttgtcgccagatgcttccgactttgagcacattacagcagagacaccctcaaggcccctgtcctccaccagtaacccctttaagagttcaaagtgttctactgctgggagttccccaaacagcgtaagtgaattgtccctggcttccctcacagagaagatacaaaagatggaagaaaaccaccatagcactgcagaagaactacaggctactctacaagaattatcagaccagcaacaaatggtacaggaattgacagctgaaaatgagaagctggtggatgaaaagacgattttagagacatcctttcatcagcatcgagagagggcagagcagctaagtcaagaaaatgagaagctgatgaatcttttacaagagcgagtaaagaatgaagagcccaccactcaggaaggaaaaattattgaactggagcagaagtgcacaggtattcttgaacaggggccgctttgaaagagagaagctactcaacattcagcagcagttgacctgtagcttgcggaaggttgaggaagaaaaccaaggagctttaganatgattaancgtctgaaggaagaaaatgaaaactgaatgagtttctanactggacggcanaataatacatg

SEQ ID NO: 250836 - DNA, 799 bp, Homo Sapiens
gggggggcggaagaggcacgtgcgctgctgaatggagctggtcgctggttgctacgagcaggtcctctttgggttcgctgtacacccggagcccgaggcttgcggcgaccacgagcaatggactcttgtggctgacttcactcaccatgctcacactgcctccttgtcagcagtagctgtaaatagtcgttttgtggtcactgggagcaaagatgaaacaattcacatttatgacatgaaaaagaagattgagcatggggctctagtgcatcacagtggtacaataacttgcctgaaattctatggcaacaggcatttaatcagtggagcggaacatggactcatctgtatctgggatgcaaagaaatgggaatgcctgaagtcaattaaagctcacaaaggacaggtgaccttcctttctattcacccatctggcaagttggccctgtcggttggtacagataaaactttaagaacgtggaatcttgtagaaggaagatcagcattcataaaaaatataaaacaaaatgctcacatagtagaatggtcccccagaggagagcagtatgtagttatcatacagaataaaatagacatctatcagcttgacactgcatccattaggggcaccatcacaaatgaaaagagaatttcctctgttaaaatttctttcaaagtctgtcccttgcaggggctggagatgaagaaagttataaaggttttttgactggggaattccctaaatgggccctcttgccaaattttaaaggcttcatgaaaaaccggggttaaaagggat

SEQ ID NO: 250837 - DNA, 994 bp, Homo Sapiens
gcggagcatccgcttccggttcccagactgaattgtcagtgagcggagtctgaggtcgctgtggactgcccactgggccttgcccgagatggacagccggattccttatgatgactacccggtggttttcttgcctgcctatgagaatcctccagcatggattcctcctcatgagagggtacaccacccggactacaacaatgagttgacccagtttctgccccgaaccatcacactgaagaagcctcctggagctcagttgggatttaacatccgaggaggaaaggcctcccagctaggcatcttcatctccaaggtgattcctgactctgatgcacatagagcaggactgcaggaaggggaccaagttctagctgtgaatgatgtggatttccaagatattgagcacagcaaggctgttgagatcctgaagacagctcgtgaaatcagcatgcgtgtgcgcttctttccctacaattatcatcgccaaaaagagaggactgtgcactagaaagttgcagcccacagcccttcatgtggactctgtcatgacatgctaactagacttcaggggagccacttctgttttcagcccctccctggaatagtgagttgggaggatggggagacagctaaccaactgcattacccaaaccatattgcacttttagttccctagttttctaggtgagcttcattccctgaaaggaggatgatgatatctaggcataacctagcctgtgaggaacctagttaggaaagacaactgacatttattgaatatcatgcactagtcccttacatatgtcatattttaattatagaaatcagtagcaaaaagaatcttggggattttccatctgacttccctggccatcttatcccatccttgcactaccagaagattcatacacttttgagactccagtgagacgctgttttcaccccttcctcctcctagcctctctcccaaaaagtaaaacacaatgctgag

SEQ ID NO: 250838 - DNA, 502 bp, Homo Sapiens
  misc_feature (44)..(44): n is a, c, g, or t
  misc_feature (421)..(421): n is a, c, g, or t
  misc_feature (440)..(440): n is a, c, g, or t
  misc_feature (469)..(469): n is a, c, g, or t
  misc_feature (480)..(480): n is a, c, g, or t
  misc_feature (489)..(489): n is a, c, g, or t
attcggcacaggtctgaggtcgctgtggactgcccactgggctntgccgaggattggacagccggattccttatgatgactacccggtggttttcttgcctgcctatgagaatcctccagcatggattcctcctcatgagagggtacaccacccggactacaacaatgagttgacccagtttctgccccgaaccatcacactgaagaagcctcctggagctcagttgggatttaacatccgaggaggaaaggcctcccagctaggcatcttcatctccaaggtgattcctgactctgatgcacatagagcaggactgcaggaaggggaccaagtttttaggctgtggaatggatgtgggattttccaaggatatttgaggcacagcaagggtttttgagattcctgaaggacagcttcgtngaaattcagctgcgtgtgncgttttttttcctaacaattatcatcggncaaaaagtggnggattttgncattaggaaagtt

SEQ ID NO: 250839 - DNA, 1569 bp, Homo Sapiens
  misc_feature (279)..(337): n is a, c, g, or t
tcatgacccatgagtttcagtgagagattctgtctctctctaaaagcaagaaatatcccccagctcagatttacataagtagtgccgcctttaaataaaagtcaaatgctgtcctgcctgtaaaattataaatatttctaacccactttacagaattttaaaatgcttataaatgcattatcttccagtaaataaacattatggtactgaacctcatttaaaaaaaagtcatcacactggcccatggaaatatctaggactatatctcctaacattagnnnnnnnnnnnnnnnnnnnnnnnnnnnnnnnnnnnnnnnnnnnnnnnnnnnnnnnnnnngcaactactatgacctaaaagagtgtactgagatgtcttcattcaattcagtaactaaacatttctggaatgaacatttgtagataactaggtaaggagagtgattctcttagcactcaggtcaaaatcacaaggtatggagaaataatttccacattctataaggaaagacagactttgaaacggagtgactgtttaaaaaccacataccaagatttagccagaatattgaagattggcagatcttgatggagtgaaatcttcagaggcaacaaattaaaaatcatgatcctatggatgccacttatttttaccaatgtgaaaaaaggaaagatgattgcaaagtacagtatacactgaacaggtgaaatatgggacattatgaacaatttaaataaccaaaatgttccctatggaagcataaaaacatgattttcaaattgattcaacttgtagtgtgtctgttagatgtaagtagtagttttagttctgtgtcctgctgagttgctctttacataaaatatttccttcatcttaaaaaaaaggcttctgcatggcactgagtctttcagtgtaggagaggaggaaactttgtagagtggacggacaaacttgtttccaaggtccccacccaggtgattcattccatcaaactcacagtatctccaaatctacatgtcgaacttcaggatttcgttttttcagttccttctcaagtctatctacttcagctcctaaagtatcaataatattttctccatgtttaagcataaaggtctctagttcttcaggagttttcacttcttgaatttcttgtaacatttggtcaaaatcttgtttttccaaatatgatcttgtaacaactcgcccatcaaaatctacttctgccttaaatcttactttacctaatcccagatctgtggctttaacatcatgaattgcccttactgatgggtcattctccaggagttcagtgagccgttgtacttgttctggctggatggaccgccctaagagtgcttctgtgttagtgtagatgaggaatgctgagaccatgcctaataaggtgcccacacccaaagaacctaggctgtcatacagtggattgcctgttatagaagtaaggcccatgcaagtggctgctattataactcccaagactgcagcagtatcctccaataatatcacatttgtactaggatcacgactttccattacatacttgtaaatga

SEQ ID NO: 250840 - DNA, 741 bp, Homo Sapiens
ggggatggggagtggaggcggaggggagcggagcccggagcgtcgtggaaagcattggacacatttccaccatgctaatggcattttaaatatatttggcaattttcccaattttttactgaagaaaactgtaagtttatacttgaggactgaagtgtgactctgccgattatcaggctttcaagatgaatctggaaaaactcagcaagcctgaactcctgacactatttagtattcttgaaggagagcttgaagcaagggaccttgttatagaagccttaaaggcccaacacagagatactttcattgaagaacgctatggaaaatataacatcagtgatcctttaatggctctacagagagattttgaaacactgaaggagaaaaatgatggcgaaaagcagccagtctgcacaaacccactctctattcttaaggttgggatgaagcagtgcaagaacatgcaggagcgcatgctgtcccagctggctgctgctgagagcaggcaccgaaaggtgatcctagaccttgaggaagaaaggcagcggcatgcacaggatacggctgaaggagatgatgtcacctacatgctagagaaggaaagagagaggctgactcaacagttggaatttgaaaaatcccaagtgaaaaagtttgaaaaagaacagaagaagctctctagtcagctggaagaggagcgctcccgccacaagcagctctcatccatgctagtgcttgagt

SEQ ID NO: 250841 - DNA, 624 bp, Homo Sapiens
tacttcatcatgcttacgttccagtgggggttaaaagacaagcaaagtgagtaaattataaagcatattttaaggtgacaactgaaatggaggaaaataaagcaggaaagacgacagaaagttgggggacacaatttacagctttaaactagacctcaccaagaaggtgaaatttgaatgaagcctaaaaaagtgtaaagaagcaagtcttacagatacctgacagaaaaacgattccaagcaaaaaagattaagaagcacaaaaaccccgggggaggggggaaacatacttggtgtgtgtgaaagaagcaaagagggcaggatggctagagaggaactaggagagccatacgagatgaaggcagtgagacagagggggaagtgtggatatgtaaaccaacctaactttataacaaggtcactttgagcctactaaaagaccactgttcccaaaaaagtagcagcaggcagacaagtgtaagcatggaatctctttggggtaacaatgattgcatctggaaaaaaggaactgggggaaaaatgtgagatactgaattctcaccgtgaactttttatacttttgaatttttctgtttatgtattacattttcaaaagaaaaaccc

SEQ ID NO: 250842 - DNA, 857 bp, Homo Sapiens
aaaaatgcaaaggggtagaggtggtggtaaaggagaaaagctgctgtttttatttttcaatgttggcagggaaactgagaacaatgcattacacaatacagctactaatcctgttctgataaatcccggtgaacaacttagggtccacgggggcttgctggtcatcctaaggcaagctcactgtaaactctattaaccactacattatcatataaggcactacaataagggaaggaggaagaaagggaaggaagagacacacactgaaaaactcctcaccagacacacctgtgcaaaacaattccaagggtctcctctccttgcaggcaatgcccctgctcattcagcactacagtaatatgctctaatataattgcaattagttcacatacattccaacaagtatcagttcattttggtttaaatacaatggagacatcaatccatctccgggataacactggaggatcacatacacactaagtacacaattcaagtgtaatcactacacatttgattacaaataacattttgggttagcaggaaaaattgcttgttatatttttctaatcaatatgtacatatttaattatgtaaaatattaaaacaccaccattacaaaacttctaaaatatttttaaattcagtaataaatttttaaaatattttttgcaattcctacatgcacttattatataagtcttaataagagagcattcaatttgctgctggcatacaaaggaagctactttgaagtatcaaagctatacacaagaaatgttcttatctggtttcaggtttttttagctttctccccaagcaaatcacataaaacagaagggagagatgagcacccg

SEQ ID NO: 250843 - DNA, 1263 bp, Homo Sapiens
  misc_feature (206)..(206): n is a, c, g, or t
  misc_feature (208)..(208): n is a, c, g, or t
  misc_feature (1221)..(1221): n is a, c, g, or t
gggcggggcggggcgcgcacctcggggcgatctcggtgctccttacctgggaggtctcccggcttagtttcggcctcgttgggtcggaatctccaaagacagtgggtttcagccagaaacgcgaagacgaacgcctagccggcgcgggcagaaccgaggacacaatgagatttgtgggaccgggcgcccagaggctggcgcggggnanaccccacagctaaaatgctcggtacccccgggcagtcgtgggttagttagaaccgcagagcctttcccgacccctcggaagcgcagaagtatccgaaatctacccgtttcttgggtccagcaaaacttttaagccaggtgtgaaaatcacaaatgtcaaatgacggaagatccaggaatcgggacaggcgctacgatgaggtcccaagcgacctgccctatcaagataccaccataagaacccacccaactcttcatgacagtgagcgggcagtgagcgctgatcccttgccaccaccccctctcccattacagccaccattcggcccagacttctactcaagtgacacagaagaaccagctatagcgccagatctcaaaccagtaaggcgctttgtccctgactcctggaagaactttttcagagggaagaaaaaggaccccgaatgggataagccggtgtctgatatcaggtacatctccgatggagtggagtgttcaccaccagcctctccagcaagaccaaaccaccgttcgcccctcaactcctgcaaagatcccttcggagggtcagaaggaacctttagttcccggaaagaggctgacgcagtgtttccccgggatccctatggatctctagaccgacacacacaaacagttcgaacatacagtgagaaggtggaggagtataacctgagatactcctacatgaagtcgtgggcaggcctgctgagaatactgggtgtggtggagctgcttttgggggccggtgtctttgcttgtgtcacagcttacattcacaaggacagtgagtggtacaacttgtttggatattcacaaccgtatggcatgggaggcgttggtggattgggcagtatgtatgggggctattactacactggccctaagaccccttttgtactcgtggttgctggattagcttggatcaccaccattattattctggttcttggcatgtccatgtattaccggaccattcttctggactctaantggtggcccctaactgaatttggaattaacggtgccttggtt

SEQ ID NO: 250844 - DNA, 826 bp, Homo Sapiens
gagaacagaaacacaaaatgctcttaaggaagaggaagagagacgaaaacgtattgctgagagggagcgtgagcgagaaaaaattgagagaggtgatagaaattgaagatgcttcacccaccaagtgtccaataacaaccaagttggttttagatgaagatgaagaaaccaaagaacctttagtgcaggttcatagaaatatggttatcaaattgaaaccccatccaagtagatggtgttcagtttatgtgggattgctgctgtgagtctgtgaaaaaaacaaagaaatctccaggttcaaggatgcattcttgcccactgtatgggccttggtaaagactttacaggtggtaagttttcttcatacagttcttttgtgtgacaaactggatttcagcacggcgttagtggtttgtcctcttaatactgctttgaattggatgaatgaatttgagaagtggcaagagggattcaaagatgatgagaagcttgaggtttctgaattagcaactgtgaaacgtcctcaggagagaagctacatgctggcagaggtgggcaagaagatgggcggtgttatgatcatagggctatgaagatggatagaaaatcttgctcaaggaaaggaatgtgaagaatccggaaacttaaagaaaaatttaacaaagcttttggttgaacccaggcccccggattttgggtggtttgggaaggaaggccctttttcttaagaaatggaaccatctggctggtttctcaaggctatgtaattcctttacgcactccaggaaggaggggtttatttttaaacgggaaacccgcctttcca

SEQ ID NO: 250845 - DNA, 1137 bp, Homo Sapiens
  misc_feature (206)..(238): n is a, c, g, or t
  misc_feature (247)..(506): n is a, c, g, or t
agctttttatgtctgtcatcattctgccccctttgcctttaaaacttacaaaaatacgtgtttgttatttgagaaagcatgtttaaaaattgcagatgagaaatattgtcgttaataattatgtactgtcttaatgtgggcacttcatttgttagtataatactagataatagcagcctagttctttaggatttgacgattcaaannnnnnnnnnnnnnnnnnnnnnnnnnnnnnnnngagacagannnnnnnnnnnnnnnnnnnnnnnnnnnnnnnnnnnnnnnnnnnnnnnnnnnnnnnnnnnnnnnnnnnnnnnnnnnnnnnnnnnnnnnnnnnnnnnnnnnnnnnnnnnnnnnnnnnnnnnnnnnnnnnnnnnnnnnnnnnnnnnnnnnnnnnnnnnnnnnnnnnnnnnnnnnnnnnnnnnnnnnnnnnnnnnnnnnnnnnnnnnnnnnnnnnnnnnnnnnnnnnnnnnnnnnnnnnnnnnnnnnnnnnnnnnnnnnnnnnntgagccaccatgcccagcctcaaatatgtttttaaaaaatatcattgtcctcctcctcttaagatttttttaagttattttgctcaagtacttaagtagtctggctcaagtactttgtttacaattaaaatggatattatagcatttaatagaagaaatggttatggcttatccaaaaagaatgtcagcatgacctggtgtagacttaaaaaactacatgtttgtgaatattttataatgtggaatgatcattgaaatatcaaggattctagtaattgtatttcctgaataaatgtatgtttatgaattttctaacttacattttgttgtgtcctctgccaacaatctggttttataattgttgtctaaagtttgctagtagtgtttcttcaaaggttattccaggtatggttaagtagtgagaaaaatcacttattaattttcaagaactttgagactaatttgtattgactcggttttttaaaataactggcaaatgctatgcttctacttttaaaatttgtggtaatacccagaatggatgtaaaataacattttttcaatagattacttcatttatcaatttaaattctgattttaaagcttatttaaaataaatttgtatgagttt

SEQ ID NO: 250846 - DNA, 2742 bp, Homo Sapiens
atagatatattagcatcagggagacagggcaaaggtttcacccttcagttcagtccccaatccctgcttattatttccctaacagaagaccatcccccttgccactccctggtttttcttctctggcagcaatgaagcagctgctgacccagctctagttttcgggaagtcagatgaccttttccctcccgcggctctctacctctcgccgcccctagggaggacaccatgggcccactgatggttcttttttgcctgctgttcctgtacccaggtctggcagactcggctccctcctgccctcagaacgtgaatatctcgggtggcaccttcaccctcagccatggctgggctcctgggagccttctcacctactcctgcccccagggcctgtacccatccccagcatcacggctgtgcaagagcagcggacagtggcagaccccaggagccacccggtctctgtctaaggcggtctgcaaacctgtgcgctgtccagcccctgtctcctttgagaatggcatttataccccacggctggggtcctatcccgtgggtggcaatgtgagcttcgagtgtgaggatggcttcatattgcggggctcgcctgtgcgtcagtgtcgccccaacggcatgtgggatggagaaacaactgtgtgtgataatggggctggccactgccccaacccaggcatttcactaggcgcagtgcggacaggcttccgctttggtcatggggacaaggtccgctatcgctgctcctcgaatcttgtgctcacggggtcttcggagcgggagtgccagggcaacggggtctggagtggaacggagcccatctgccgccaaccctactcttatgacttccctgaggacgtggcccctgccctgggcacttccttctcccacatgcttggggccaccaatcccacccagaagacaaaggaaagcctgggccgtaaaatccaaatccagcgctctggtcatctgaacctctacctgctcctggactgttcgcagagtgtgtcggaaaatgactttctcatcttcaaggagagcgcctccctcatggtggacaggatcttcagctttgagatcaatgtgagcgttgccattatcacctttgcctcagagcccaaagtcctcatgtctgtcctgaacgacaactcccgggatatgactgaggtgatcagcagcctggtgccaactataaagatcatgtgaacaaccaaatgcgactcctcggcatggacgatggcctggcaggtccgacatgccatcatccttctgacagatgggtccaatatgggtggctctcccaagacagctgctgaccatatcagagagatcctgaacatcaaccagcagagaaatgactatctggacatctatgccatcgacgtgaacaagctggatgtggactggagagaactgaatgagctagggtccaagaaggatggtgagaggcatgccttcattctgcaggacacaaaggctctgcaccaggtctttgaacatatgctggatgtctccaagctcacagacaccatctgcggggtggggaacatgtcagcaaacgcctctgaccaggagaggacaccctggcatgtcactattaagcccaagagccaagagaacctgcccggggggccctcatctccgaccaatgggtcctgacagcagctcattgcttccgcgatggcaacgaccactccctgtggagggtcaatgtgggagaccccaaatcccagtggggcaaagaattccttattgagaaggcggtgatctccccagggtttgatgtctttgccaaaaagaaccagggaatcctggagttctatggtgatgacatagctctgctgaagctggcccagaaagtaaagatgtccacccatgccagggcccatctgccttccctgcacgatggaggccaatctggctctgcggagacctcaaggcagcacctgtagggaccatgagaatgaactggctggaacaaacagagtgttcctgctcattttgtcgccttgaatgggagcaaactgaacatttaaccttaagatgggagtggagtggacaagctgtgccgaggttgtctcccaagaaaaaaccatgttcccaaacttgacagatgtcagggaggtggtgacagaccagttcctatgcagtgggacccaggaggatgagagtccctgcaagggagaatctgggggagcagttttccttgagcggagattcaggttttttcaggtgggtctggtgagctggggtctttacaacccctgccttggctctgctgacaaaaactcccgcaaaagggcccctcgtagcaaggtcccgccgccacgagactttcacatcaatctcttccgcatgcagccctggctgaggcagcacctgggggatgtcctgaattttttacccctctagccatggccactgagccctctgctgccctgccagaatctgccgcccctccatcttctacctctgaatggccacccttagaccctgtgatccatcctctctcctagctgagtaaatccgggtctctaggatgccagaggcagcgcacacaagctgggaaatcctcagggctcctaccagcaggactgcctcgctgccccacctcccgctccttggcctgtccccagattccttccctggttgacttgactcatgcttgtttcactttcacatggaatttcccagttatgaaattaataaaaatcaatggtttcccca

SEQ ID NO: 250847 - DNA, 966 bp, Homo Sapiens
  misc_feature (822)..(824): n is a, c, g, or t
gccccaccctctctctataccgacacccaaaaaaaataataaatacggggggggcctgggtggcgaattcggcacgaggctccctcatggtggacaggatcttcagctttgagatcaatgtgagcgttgccattatcacctttgcctcagagcccaaagtcctcatgtctgtcctgaacgacaactcccgggatatgactgaggtgatcagcagcctggaaaatgccaactataaagatcatgaaaatggaactgggactaacacctatgcggccttaaacagtgtctatctcatgatgaacaaccaaatgcgactcctcggcatggaaacgatggcctggcaggaaatccgacatgccatcatccttctgacagatggaaagtccaatatgggtggctctcccaagacagctgttgaccatatcagagagatcctgaacatcaaccagaagaggaatgactatctggccccaaagccacaggagtctggtgatttccctcttccccaccagacatctatgccatcggggtgggcaagctggatgtggactggagagaactgaatgagctagggtccaagaaggatggtgagaggcatgccttcattctgcaggacacaaaggctctgcaccaggtctttgaacatatgctggatgtctccaagctcacagacaccatctgcggggtggggaacatgtcagcaaacgcctctgaccaggagaggacaccctggcatgtcactattaagcccaagagccaagagaacctgccgggggggccctcatctcccgaccaatgggggtcctgacagcagctcattgnnncttccgcgatggcaacgaccacttcccctgtggaagggtccaatgtggggaagaccccaaatccccagtggggggcaaagaaatcccttaatgaaagaaggccggggatcctcccccagggggtttaatggccctttgcccc

SEQ ID NO: 250848 - DNA, 985 bp, Homo Sapiens
  misc_feature (22)..(22): n is a, c, g, or t
acaagggaaggatagggggtgnttaaggggtagtttaccacatgattcattcaacactagtaattttatttcaaaatataaatatttcacattaataaagaagttacatcagtaggttgtcaaagcaagttagctaagaaacagcatttgtgtgagaacagagggtatttattgtattcgaatattcttttttacttttgaattgcctccttcacctgagaacccagggatgatacattttcaaagagttatgtaagcaattacaactctatatcaaatcttagttcaaaatcaaattgtactggaaatacacttcagttacctaaataagtggcactgcaaagggcaaagaagggttttctttgggatggctacaatgagagttacatctgctgggtctctgcaataaaaaataaatgatatttgataataagccaaaattatcaggatttgcttccatacttttcactgtaaaataaaaagctagcaaaaagctagtaagaaaccagatgtctagtaaagaactctggacttggagtcagaagttctgcaactaaattctggctccatcattttgtggtataaacttaggggaatatcaccaaaaacttttcagagcctccagagcccccccatctgtacaataaggataatattgtctgtctcacagggctgttacaaaaggtgtctgaaaactataaagtgccatacaaaagcattataaaaatgtaatataaatatatcaccactgtatttgcacattagttgatccttgaaaaacctgcaaaattaaacacaatactgattttacacaccacaggtggaaaagaatctctataccttaagtatagctctaaacagcaaatatacttgctttctggacttcaagatttattacacactacatggtaccacagtaatagatctgccattcagtatttccattagggatgtcttctcaaagagttgtaaacttgatcaaggg

SEQ ID NO: 250849 - DNA, 888 bp, Homo Sapiens
  misc_feature (26)..(26): n is a, c, g, or t
  misc_feature (59)..(59): n is a, c, g, or t
  misc_feature (705)..(714): n is a, c, g, or t
ccaggccataggacttggaatgattntacttaattgtgtggttattagtcatgtttctnaaaacacctgaggaatgagagcatactctcagtggaagtagtaaatggaggaccataatttaaaaggttcttcccttgaaaataactgacttggtatgtgagcaagtggaaggtgatgcatttaaataatgttttaagcaacctgtaaaatattgtgtaacctctccctgttagctttcagggcacaagtgtttatcatccttgctagtgatgaatataacttaaacatttaaattcgtgggaagagtgaataaaaaggaagagaaaaatcaaaagatgtaaagaattactgttacatacatcaagacaaaataactttgaagatccctattagagctggaactaactctgcttctctttcctttccttataaagagtaattatctaatggaccaaaaccaggtagcacatttgtgatacagaatttcagcagaaccaaataaactggtgccagatcactgaaacagctgttcctaaggtctatacagaggctatggtaaataacttaaaaatagttattaagatgatgtgtataatctattatttatactgtggttaaagcatttttgggtttttggtgttttattcactgtctataataaaagttaacttggtttagccattttctgtagatgtgatcgatctnnnnnnnnnncccaaatacctcatcctgcatgcttaagggttttcattattaacaaatttaaaaattactatattttgacagcaccaattcattaatgtggctatccaggttaaattaaatttaacatggaaacagaacagagacattaatactgttatccctgacttaaagtcttgtcaattg

SEQ ID NO: 250850 - DNA, 568 bp, Homo Sapiens
  misc_feature (95)..(175): n is a, c, g, or t
ttcttccccaaccaaccagttttcaatttcaagagggccacactgcaacttcagcttaacatgaataacaaagactggctcaggagcagggcttnnnnnnnnnnnnnnnnnnnnnnnnnnnnnnnnnnnnnnnnnnnnnnnnnnnnnnnnnnnnnnnnnnnnnnnnnnnnnnnnnttgtgtatatctttgtgtgtcttcctgtttatgtgtgccaagggagtattttcacaaagttcaaaacagccacaataatcagagatggagcaaaccagtgccatccagtctttatgcaaatgaaatgctgcaaagggaagcagattctgtatatgttggtaactacccaccaagagcacatgggtagcagggaagaagtaaaaaaagagaaggagaatactggaagataatgcacaaaatgaagggactagttaaggattaactagccctttaaggattaactagttaaggattaatagcaaaagatattaaatatgctaacatagctatggaggaattgagggcaagcacccaggactgatgaggtcttaacaaaaaccagtgtggcctccc

SEQ ID NO: 250851 - DNA, 1624 bp, Homo Sapiens
  misc_feature (1473)..(1554): n is a, c, g, or t
atagtcggcgagcaacgctggagcatcccgctctggtgccgctgcagccggcagagatggttgagctcatgttcccgctgttgctcctccttctgcccttccttctgtatatggctgcgccccaaatcaggaaaatgctgtccagtggggtgtgtacatcaactgttcagcttcctgggaaagtagttgtggtcacaggagctaatacaggtatcgggaaggagacagccaaagagctggctcagagaggagctcgagtatatttagcttgccgggatgtggaaaagggggaattggtggccaaagagatccagaccacgacagggaaccagcaggtgttggtgcggaaactggacctgtctgatactaagtctattcgagcttttgctaagggcttcttagctgaggaaaagcacctccacgttttgatcaacaatgcaggagtgatgatgtgtccgtactcgaagacagcagatggctttgagatgcacataggagtcaaccacttgggtcacttcctcctaacccatctgctgctagagaaactaaaggaatcagccccatcaaggatagtaaatgtgtcttccctcgcacatcacctgggaaggatccacttccataacctgcagggcgagaaattctacaatgcaggcctggcctactgtcacagcaagctagccaacatcctcttcacccaggaactggcccggagactaaaaggctctggcgttacgacgtattctgtacaccctggcacagtccaatctgaactggttcggcactcatctttcatgagatggatgtggtggcttttctcctttttcatcaagactcctcagcagggagcccagaccagcctgcactgtgccttaacagaaggtcttgagattctaagtgggaatcatttcagtgactgtcatgtggcatgggtctctgcccaagctcgtaatgagactatagcaaggcggctgtgggacgtcagttgtgacctgctgggcctcccaatagactaacaggcagtgccagttggacccaagagaagactgcagcagactacacagtacttcttgtcaaaatgattctccttcaaggttttcaaaacctttagcacaaagagagcaaaaccttccagccttgcctgcttggtgtccagttaaaactcagtgtactgccagattcgtctaaatgtctgtcatgtccagatttactttgcttctgttactgccagagttactagagatatcataataggataagaagaccctcatatgacctgcacagctcattttccttctgaaagaaactactacctaggagaatctaagctatagcagggatgatttatgcaaatttgaactagcttctttgttcacaattcagttcctcccaaccaaccagtcttcacttcaagagggccacactgcaacctcagcttaacatgaataacaaagactggctcaggagcagggcttnnnnnnnnnnnnnnnnnnnnnnnnnnnnnnnnnnnnnnnnnnnnnnnnnnnnnnnnnnnnnnnnnnnnnnnnnnnnnnnnnntgtgtatatctttgtgtgtcttcctgtttatgtgtgccaagggagtattttcacaaagttcaaaacaggc

SEQ ID NO: 250852 - DNA, 547 bp, Homo Sapiens
  misc_feature (83)..(159): n is a, c, g, or t
ccagtcttcacttcaagagggccacagtgcaacctcagcttaacatgaataacaaagactggctcaggagcagggcttccacnnnnnnnnnnnnnnnnnnnnnnnnnnnnnnnnnnnnnnnnnnnnnnnnnnnnnnnnnnnnnnnnnnnnnnnnnnnnnttgtgtatatctttgtgtgtcttcctgtttatgtgtgccaagggagtattttcacaaagttcaaaacagccacaataatcagagatggagcaaaccagtgccatccagtctttatgcaaatgaaatgctgcaaagggaagcagattctgtatatgttggtaactacccgccaagagcacatgggtagcagggaagaagtaaaaaaagagaaggagaatactggaagataatgcacaaaatgaagggactagttaaggattaactagccctttaaggattaactagttaaggattaatagcaaaagacattaaatatgctaacatagctatggaggaattgagggcaagcacccaggactgatgaggtcttaacaaaaaccagtgtggc

SEQ ID NO: 250853 - DNA, 613 bp, Homo Sapiens
  misc_feature (59)..(60): n is a, c, g, or t
  misc_feature (182)..(318): n is a, c, g, or t
tgagccaccgcacccggcgtctgaaggatttcctttagtgtttcttgtagcacagatcnnctggtgatgaaatatttcagcttttatatgtctaaagtagtctttatttttgtctttgtttttgaaagatatttgtactaggtatagaattctaaacggactttttttctttcagtactttnnnnnnnnnnnnnnnnnnnnnnnnnnnnnnnnnnnnnnnnnnnnnnnnnnnnnnnnnnnnnnnnnnnnnnnnnnnnnnnnnnnnnnnnnnnnnnnnnnnnnnnnnnnnnnnnnnnnnnnnnnnnnnnnnnnnnnnnnaatttcattatgatgagcctttgtgtggttttcttcatgattcttatgtttggtgttcattgagctttttggatctgtgactatactcttttcatcaaatttggatatttttcagccattattttctaactaatttttctcttccaccccctctcttctccttcagatattccagtcaaatgtatattaaactgtttgaaattgccccacagctcactgatgctcttttccatttttaaaaaattcctttttttctatttcatgttgagtagttgctatttctgtctttaaattc

SEQ ID NO: 250854 - DNA, 2421 bp, Homo Sapiens
  misc_feature (1149)..(1149): n is a, c, g, or t
  misc_feature (1167)..(1167): n is a, c, g, or t
gggtaccggtccggaatttcacgggatatcgtcgaccacgcgtcggtcgcgccgctgctggttgctgtccctggacccctaccatggaggagaccatcaaagatccccccacatcagctgtcttgctggatcactgtcatttctctcaggtcatctttaacagtgtggagaagttctacatccctggaggggacgtcacatgtcattataccttcacccagcatttcatccctcgtcgaaaggattggattggcatctttagagtggggtggaagacaacccgtgagtattacaccttcatgtgggttactttgcccattgacctaaacaacaaatcagctaaacagcaggaagtccaattcaaagcttactacctgcccaaggatgatgagtattaccagttctgctatgtggatgaggatggtgtggtccggggagcaagtattcctttccaattccgtccagaaaatgaggaagacatcctggttgttaccactcagggagaggtggaagagattgagcagcacaacaaggagctttgcaaagaaaaccaggagctgaaggacagctgtatcagcctccagaagcagaactcagacatgcaggctgagctccaaaagaagcaggaggagctagaaaccctacagagcatcaataagaagttggaactgaaagtgaaagaacagaaggactattgggagacagagctgcttcaactgaaagaacaaaaccagaagatgtcctcagaaaatgagaagatgggaatcagaagtggatcagctttcaggcccagctgtcaactcaagagaaagaaatggagaagcttggttcagggagatcaagataagacagagcagttagagcagctgaaacaaggaaaatgaccacctctttctcaggttaactgaacagaggaacgaccagaagaagctcgagcagacagtggagcaaatgaagcagaatgaaactactgcaatgaagaaacaacaggaattaatggatgaaaactttgacctgtcaaaaagactgagtgagaacgaaattatatgtaatgctctgcagagacagaaagagagattggaaggagaaaatgatcttttgaagagggagaacagcagattgctcagttacatgggtctggattttaantctttgccgtatcaagtnccctacttcagatgaaggaggcgcaagacaaaatcccgggacttgcctatggaaacccatattctggtatccaagaaagttcttcccccagcccgctctccatcaagaaatgccctatctgcaaagcagatgatatttgtgatcacaccttggagcaacagcagatgcagcccctttgtttcaattgtccaatttgtgacaagatcttcccagctacagagaagcagatctttgaagaccacgtgttctgccactctctctgagtatcccaacctcttggatgtatacagagattttatagaatagaacctatagcttctaccatgagttatatgagtcaagatcctgcctaacctgaaattattagggatttactcagccctgctgccgctaacagtggagttatgtcactgatctgaaggtcactgttaagggcttctgctgccatccttgtgggttgctacctttaagtcgcataactctagctgtatcatcctctcacctgtcattcttctgagggtctcagtacaagggccctgggatggagccaacctgggtattcacaacaggcctgacttgatactaagtgattagttttccaagttgtcccactgccattcaaagtcagcccttgagtgtatttgttctcagtcctaaccctggggccagagattggtccgaggttgagaattccttcctcctcatccttggtgttgctttctccaaatgattgttttagactagccaaaaatgccgtggcaaagagctcagaaatccaatttggataccaaaggtttctcatgttaatttctcagcccccaaagaagcatcttactccctgaaccttagacaggaagtattgtttcagtcacagaaagcttttctgggtacctctggttagcactttctactctctgatatttcctatgtacatagcttttattgttgtaaatcctttcttaatggttaaataggattgttagcaactatgggtttgcagttttctgagtaggtgagttttgaatatgggtaaatcagaataatgagacaacttgttaatctctttaatactaaaaataaattactcttctatttcagggacttaggtaatttaaaataaaccttcaatttatggtcttctattttgaagctcatgggaaaattgtgatcaaaagggctatgggaagggcagaccccgccaatgatttctcttcacctgtcttaagattaaataaaaaagagtgtcctggcaaa

SEQ ID NO: 250855 - DNA, 425 bp, Homo Sapiens
  misc_feature (24)..(24): n is a, c, g, or t
  misc_feature (29)..(29): n is a, c, g, or t
  misc_feature (78)..(78): n is a, c, g, or t
  misc_feature (81)..(141): n is a, c, g, or t
ccttaggtaatccgaaattgactntgccnaacctaaatccatagccccaacaaaacagctgttgctgcttgttcttgnttnnnnnnnnnnnnnnnnnnnnnnnnnnnnnnnnnnnnnnnnnnnnnnnnnnnnnnnnnnnnntggctaaggaacctttaagacaatccttaacattgtttgactctcagacctaagctaaacatttggacttttattgacagtgaaggaaataaccttttaataatactaccaagtcccaaagtgatggtatatatacccttaactcttttagtcactgtgttatagatgaaaaagtcaaaccctctgaattcggtgctgattagagtatagaaaatcatactaaaatatgtgttacatgtagattagactattcagtgtgcacttatacctgttctcaactttaa

SEQ ID NO: 250856 - DNA, 1098 bp, Homo Sapiens
gcttgggctggggtataggtaaaaaactggcagcggacggcattggtgcacagtttctggcaggcctcgtgactttttgcagcaacaatatccagttcttctcccaagaaatcagtgtcatggtaaaatgaagaatggcggaacactgggatgctgtgcctgcagctttgtagactgaaaccagaaagagctttgctctttttaatgcgtgtactgggcaatccactctcagatgttttaaggagacaaagatttctttgagattctttgggccattcctgggaaaagaaggtaaaaaacaagcaaccgggatgatgagtgcagattcggccacagacaaaagcatcgggagccatgacactgtcgatgttgctgtctgcaaacaccgtattagggaaaatgtccctaatacaagccagattagaaagtgcacaggatttcagtgaaaatccagacaccactttatcgagcttcgtatctagggttggtgtccctgtttgagtgtgcttcagtagacaaaggttacgatgctccaggctgggaaactgccttgtggcgtacgtgaaaaagtggcagtggacgtcatccgtgcatctttcttggcattcttgagcactcttggcaactgagctgttatagtttatgcccttcatgtctaggtccacataaatgtctttgttgcaagcgcttatttggtgtgagcattgcttgaaagaatacccagaaatcgctgctgtcctattcactcttggcagtgtttctgtaacactgtctttcaggacacaagtaaaccatcgggtgggatcctcagatggtgattccgccgtgaaagtgaagagtaaacatcttgggtggtaagtgcagactacctggcagtacttggcgcttggtgtgaagaccgtagtaatgtcccctccttcaaagcaggtgtccttcaacaactgagtcacacattcaccagaaactgaagtaaataaaatgaaatgtaccacttgatataagaaaatcatcctgaaaagaccttgttggcttacttgctgcaattcttaataagggtgcttttcttcctccaaaatggtcttcatcctcctctgaatc

SEQ ID NO: 250857 - DNA, 699 bp, Homo Sapiens
  misc_feature (461)..(461): n is a, c, g, or t
  misc_feature (594)..(594): n is a, c, g, or t
  misc_feature (596)..(596): n is a, c, g, or t
actgtaacattttttagactgggaagggcactgacaatcataccaattgcagctgtttcaaaagtgccaatttaaaagtgtagcgcttttgaaattagccaagtatatatatttttctgacagtgttattaaaagatagactccttaccataaatgaaatgcatccaaattaggctttaagtgtatttttcatgaagaaaactaggagtactattatagaaatgtcttttaggggttcaaaataaattctggcataaagttgatggcaaaagctttttagtaaatcacgattctgtttttcatccgaccactcgaatgtcctgggactcactcaccgatgctccaggctgggaaactgccttgtggcgtacgtgaaaaagtggcagtggacgtcatccgtggcatctttcttgggcattcctgaagcactcttgggcaactgagctggtaaaggtttatgncccttcatgtctaggtccacataaatggccttggttgcaagcgcctaattgggtgtgagcattgcttggaaagaatacccagaaatcgctgctgtcctattcactcttggcagtgtttctgtacactgtcttnangacacaagtaaacctgtttttttaaaaaatacatattaatgaatagggatttatgtttttaaaataatggatcttaaaagtcagcacaacagaagcccaaaag

SEQ ID NO: 250858 - DNA, 625 bp, Homo Sapiens
tttagaaagtgccagggtttcagtgaaaatccagacaccactttatcgagcttcgttattctgggttggtggtccctgtttgggtgtgcttcagtagacaaatgttacgatgctccaggctgggaaactgccttgtggcgtacgtgaaaaagtggcagtggacgtcatccgtgcatctttcttggcattcttgagcactcttggcaactgagctgttatagtttatgcccttcatgtctaggtccacataaatgtctttgttgcaagcgcttatttggtgtgagcattgcttgaaagaatacccagaaatcgctgctgtcctattcactcttggcagtgtttctgtaacactgtctttcaggacacaagtaaaccatcgggtgggatcctcagatggtgattccgccgtgaaagtgaagagtaaacatcttgggtggtaagtgcagactacctggcagtacttggcgcttggtgtgaagaccgtagtaatgtcccctccttcaaagcaggtgtccttcaacaactgagtcacacattcaccagaaactgaagtaaataaaatgaaatgtaccacttgatataagaaaatcacttcctccaaaatggtcttcatcctcctctgaat

SEQ ID NO: 250859 - DNA, 757 bp, Homo Sapiens
tagactccttaccataaatgaaatgcatccaaattaggctttaagtgtatttttcatgaagaaaactaggagtactattatagaaatgtcttttaggggttcaaaataaattctggcataaagttgatggcaaaagctttttagtaaatcacgattctgtttttcatcgaccactcgaatgtcctgggactcactcaccgatgctccaggctgggaaactgccttgtggcgtacgtgaaaaagtggcagtggacgtcatccgtgcatctttcttggcattcttgagcaactcttggcaactgagctgttatagtttatgcccttcatgtctaggtccacataaatgtctttgttgcaagcgcttatttggtgtgagcattgcttgaaagaatacccagaaatcgctgcttgtcctattcactcttggcagtgtttctgtaacacttgtcttttcaggacacaagtaaaccatcgggtgggatcctcagatggtgattccgccgtgaaagtgaagagtaaacatcttgggtggtaagtgcagactacctggcagtacttggcggcttggtgtgaagaccgtagtaatgtcccctccttcaaagcaggtgtccttcaacaactgagtcacacattcaccagaaactgaagtaaataaaatgaaatgtaccacttgatataagaaaatcatcctgaaaagaccttgttggcttacttgctgcaattcttaataagggtgcttttcttcctccaaaatggt

SEQ ID NO: 250860 - DNA, 685 bp, Homo Sapiens
tctgatccaaaatgtgatagcaactcaaccttgacatattttgcatacatctgttcatctaaagggagactctgtacattccgctcatctctaccatgaaaagtacccagcttaatccacttatttgttggatatctgtcactgatagaaaccagaaatctttaggagtagaagacaataattcataatttgcaatatcaagctgttttacttgaattggttcacaaagttcaataacaaaccaaattttagtgctgcaaggattcaacatgtaaagatccatattttctataagaatagcagatgtgctcttggcttctggattagctgctagaattttggcaccacattctactgaggcataattatttcgatttttctggacctttttggtggcatgtgaacctccattagaagatgcatgcatcgactgacttttttctttttctacttccataactttcttcttccattcatcaaatgttggtatatcttctggatctttgggacttgctactgatgtagggtcaatgtctcctggttttgtataatcagagctctcattttttaaattatctgaagcattcaatgcagattttggatcaccaccgccctgttcacttgctgaaaattaagattcaaattctgattttgttatctttcctttaccatgtgaagatgatac

SEQ ID NO: 250861 - DNA, 1102 bp, Homo Sapiens
  misc_feature (1051)..(1051): n is a, c, g, or t
accttcgattatacttatttatggtcatattttactttttcttctagaagagtataaattccttaaggatagggattatgttttatgttttactcatgtttttaactccctaatcacttgtatctgtgcaataatttagaagtcattgaataaaaaggaattttttactttttaataagaaactataattagtgctgtggttttcttgctttcttacatagtgcatgacacatggagaaaatgttttccgtaaatctttcagaaagacagatatttgcataataaacggaataatggattatatattttattttctagaaaatgtcttaggcttattcagtgctttttaagacgttaatgatgatgcttgccttacatgacttactattaatatgttgcccatcagttttactgaaatgcatttgactttctcatttaatcaaaatacattaaacactccataattaatgtatggattattcttgtaaattcttccttgttaatttttcatacctggttagcatcttctaggcacccagcaccctgttcccctgcttcctcttcccagtctctgggtctgtctcagagactgaggatataagcagtttgtgctattagcctaagcaaagcaagattgggatggctaatttgtcaaaatggtgtaatgcaaaccagaatcttaacacatgattagtgatttttgttcttaactaactgacatttaagagtgaatgatgctttccaacttttcccccacaaagatcacaatggatttaacacccttttaggatggcaccaagacatttttctcaatgggttatgaagaattaatttctacagtatagttcagtaaaatattagagcaattttctcattagttaatgcttttaggttctatctcctgcagaaccaaataaattcctaaaggcaaaattgagattttgacctagcgagagacccacttcttgtaatacaggactcagcaacactccctcacatcctttgtattttctaatgactttaatcatccctttagtctgacctttctgtntctctatcctgtgtgtaaggtcatgtctttgagctaacaaaacatgggtca

SEQ ID NO: 250862 - DNA, 489 bp, Homo Sapiens
gggcgtggtgaggtaggagtggttgcgcgtgttgcggcccgggttctgttcgtaggtttacaattgtcgcgggtagtggggcgccccagctgccaactgcacgtggtttctttctggcgtttgcctagtgtcctgtccattccgccccgttgggaagtgggaagcggagaggttctgtggggacagagctgggagtcctgaaggagaaagcgcgcagccgaggggctctggagtgccttacagcagagctgcggccgcggaaggggagcagctgagaaaggagggccgctgcacgcggggttcgaaccgtggggtctgagctgctcccgcggagggcctgagcggacgcgggatgctgggggtccgctgcctgctgcggtccgagcgcttctgttcctccgcccccttccccaagcacaaaccttcacccaaactgatcgtgcgggacgctctcggggctcacaacgcgagtggggagcgcattaatat

SEQ ID NO: 250863 - DNA, 597 bp, Homo Sapiens
atccaggacagtgccctcctggtctttggaagacgtcagaataatgtgtggaacatgcgtgtacacattaaaaagggctattccttctcttggttgagcatctatctaacccaatctaatctaccaagcaacaaagtgctcagccttctaaccttgggtacgttgtaggttggttggttaattgattcattaatctatttacatatgcacacatatttttatttttagttcctattgcctgagggtctactatgtgccttttccttcatacaaaaaagtgggcatatgatcaaccttcgtcatacatgatactatgataacattattatatccatgctctatatacagaactttgtatgtctggtttatagttattattcatgcctcccctcaaataccttctacgcagaaatgcactgggaatggccccaacaaaacatacacatggttacgttttcgtacaattagcaaaagtaagacaatttaatgtcagctgtttgagatctctgtatcttgccacttccacttactcctctgtcacatatgacctcatgctgagtggtcctgaagtggctgtgataatttacggaaactgac

SEQ ID NO: 250864 - DNA, 975 bp, Homo Sapiens
  misc_feature (714)..(714): n is a, c, g, or t
cggggcgccggaggaggggtttcggccgacacgtcgggattggcggctgcagccaggggtcctccgacgctgggcttccgtgagcggcgctctgccagatctctggaccggattcgtcccattctcgtcctcatggtggacaagaaactggtggtggttttcggaggcacaggtgcccagggtggctccgtggcccgcacactcctggaagatgggacattcaaggttcgagtggtgacccgaaaccctaggaagaaggcagcaaaggagctgaggctgcaaggtgcagaagtagtgcagggagaccaagatgaccaggtcatcatggagctggccctgaatggggcttacgccaccttcatcgtgaccaattactgggagagctgcagccaggagcaggaggtcaagcaggggaagctgctcgctgatctggccaggcgcctgggcctccactatgtggtctacagcggcctggagaacatcaagaagctgacggcagggagattggccgccgcgcactttgacggcaaaggggaggtggaggaatatttccgggacattggcgttcccatgaccagtgtgcggctgccctgctattttgagaacctcctctcccacttcttgccccagaaagccccagacggaaagagctacttgctgagcttgcccacaggtgacgttcccatggatggcatgtccgtgtctgacctgggntcctgtggtgctcagccttttgaagatgccagaaaaatacctcggccagaacatcggggctgaacacttgcaggcccaacgcccgaaggagtaccctgcccttgctcacccaagcaacccccgcaaagggtcgggcaccaaaggcccagaaataactccctgaaggaattacaaaaaaagcttggggtttttcccccgggggcccccgggaaccctgggcccaaaacttggtttcccggtttttcaattggcccctcggaa

SEQ ID NO: 250865 - DNA, 355 bp, Homo Sapiens
acgtcgggattggcggctgcagccagtggtcctccgactctgggcttccgtgagcggcgctctgccaggtggggccggagctgcggggagggagttggcgcctagcgcgcagctccatccccgcctctgcagtggactcggccgcagaatcggggtcccgggctcctggaacttgtcccgcccaggccgcggcgaggaggtcactccagccgatctctggaccggattcgtcccattctcgtcctcatggtggacaagaaactggtggtggttttcggaggcacaggtgcccagggtggctccgtggcccgcacactcctggaagatgggacattcaacgttcgagtggtgaccc

SEQ ID NO: 250866 - DNA, 782 bp, Homo Sapiens
  misc_feature (647)..(647): n is a, c, g, or t
ggctacatctacacctggaccaagagccgattttggagaaagactcgctccacccatactggatctagctgcattggcacagaccccaacagaaattttgatgctggttggtgtgaaattggagcctctcgaaaccctgtgatgaaacttactgtggacctgccgcagagtctgaaaaggagaccaaggccctggctgatttcatccgcaacaaactctcttccatcaaggcatatctgacaatccactcgtactcccaaatgatgatctacccttactcatatgcttacaaactcggtgagaacaatgctgagttgaatgccctggctaaagctactgtgaaagaacttgcctcactgcacggcaccaagtacacatatggcccgggagctacaacaatctatcctgctgctgggggctctgacgactgggcttatgaccaaggaatcagatattccttcacctttgaacttcgagatacaggcagatatggctttctccttccagaatcccagatccgggctacctgcgaggagaccttcctggcaatcaagtatgttgccagctacgtcctggaacacctgtactagttgagaaagctgatggccttgtttcaaaattctcatttttcatttcttttctgtcgntgaattcttattttggtttgcctggatgttttgcacatcccaatctttcttttaagcttctgggtctattaaactaggtagatcttttccgtattgatcataataaaagtgaatcattacctattgggaaaaaaa

SEQ ID NO: 250867 - DNA, 605 bp, Homo Sapiens
gctttgttttctttgcgtttttgcatgcgtgtgttttggtttgtttgcctgcaaacaggtaaacaacttctttgcacaaccataaagacttccttgtctcctgcttttctgttacaaactcttacaagacaagataaatagaggctcagagtgaatgcttggggagggtattagggaagacattcttgcacaagaattacttggatcatatcactaggttaagtagaaaaatgaaaatgggtcctgaataagcatataatacgatccaaattgttacttacatgttttgaatgccttaaaaataatgtacagggcatttgtttggcagtgtgcttttatttatttccttacttattcctgtttcttttgcagaatgccctggctaaagctactgtgaaagaacttgcctcactgcacggcaccaagtacacatatggcccgggagctacaacaatctgtgagtcttggcttcagaactgtgcaaagaaccatgtgcctaaaaagccaacgaaaggttcctggggcctttcttttctgatagtttaaagcatgtggcttttgcctcacagtaaatttttctaaaatatgtaatcagctttctgttc

SEQ ID NO: 250868 - DNA, 445 bp, Homo Sapiens
atgtgggccagaaattttatctagacactggtgatgccagtaattttgcacgttggaggtataaggtatctgtcacactgtctggaaaaaaggttacaggacacatactagtttctttgttcggaaataaaggaaactctaagcagtatgaaattttcaagggcactctcaaaccagatagtactcattccaatgaatttgactcagatgtggatgttggggacttgcagatggttaaatttatttggtataacaatgtgatcaacccaactttacctagagtgggagcatccaagattatagtggagacaaatgttggaaaacagttcaacttctgtagtccagaaaccgtcagggaggaagttctgctcaccctcacaccgtgttaggagactactgttatttgaccaatgaattgacttctaataaaatctagtggtgatgc

SEQ ID NO: 250869 - DNA, 750 bp, Homo Sapiens
  misc_feature (380)..(396): n is a, c, g, or t
  misc_feature (431)..(526): n is a, c, g, or t
tcaaatagttgagcactgaggttaacatagcttagtttctaaatgtgtcggctgggaatatagtaggaaatcaattaatgcccgatggctggctactgcttagcagtgaccatggaagctctgtgcacagcagatgccactgcaacctagataaactgtagcaatacttaagttatttatataaacttagggaaggcaagaactatgacaactatcactctgtgagctgtgaattaacaaataatatgtacagaaaacactgacacaaaaacattccagtaaaaacataatttaaaaactggacaagagttccagtggtttttaatattgtacccatagctatttaaagtcatatacatacacatacacacacacaaatnnnnnnnnnnnnnnnnnttcatgtgcatgtggatttatatacacagatatannnnnnnnnnnnnnnnnnnnnnnnnnnnnnnnnnnnnnnnnnnnnnnnnnnnnnnnnnnnnnnnnnnnnnnnnnnnnnnnnnnnnnnnnnnnnnnnctacatgtaacatagatatttaccactctgtaaactctgcacttagttttccaagtcttaaaaacagcaaaatattactgaaaacaaacaaaacaactttcattgacagtgacttctcatactgacttatttggagcaagtatatttcctgcactagtgaataggtgacaggaaatacagttaattctcttagaatattaatgccaaaagcaactctcaaggcc

SEQ ID NO: 250870 - DNA, 1360 bp, Homo Sapiens
  misc_feature (893)..(936): n is a, c, g, or t
  misc_feature (1138)..(1182): n is a, c, g, or t
gtatgacccaagtaaaagatcccctaaaattttaaaaacaggttttctatggggatggcatgaaattccaatggttcatcctttaaaaactgctgggagaaatgggctgccaaggtctttttgtatcaacataatatgaacgagggaagtataattgttcccatgtgctcaaaaatatagtttcccccatgacagacttttaatttgatcaaattctggctaaagtggttgaacccagaagaaaaactatctagtgagggcacacagagcctctgaaatagctctgtcttctgattcagagctagtaaaggtcacgctacagggaccatacatgtggatgcataataaggcatagcttcagctgttaaggttgaaatatgggccagtgtattccacatctgttccttaaaaagttaaaaaaattatcagaacctcttccatgaaattcagccggtggtgtgaagtgtgggattccttgttacgagagatatgctcaggactctaaagcagcagcaacttaagaagttagcaatgaaactttggcttaaaataaaaacaaagaaaagaaaaggtcaaactggtgcaagttgtctcctgaaagaggtatgtgggactgaccctcataaatgtcatccaacgtaagtttcccctgccttcttttactgttatcaccttcattgcacaggagttatatcattctgtatgggtaagtttcataaataatgagaaaactatgtgtaacaaatacatcatatttcccacccacccagcaacccttcccaaaataagaaaagttacatcaaattaaaaagtagcttcatgaatgaaggtactgctttaagttgcacttttcctgcaagtgcggccagtgcctttgcgctgggtatgaaggnnnnnnnnnnnnnnnnnnnnnnnnnnnnnnnnnnnnnnnnnnnncaatgtccggtttcaaccagtcaaaaccgggctgagcggaagccgagatatctcagtaccgtcccatcagagggtccttgcaatgcctgttcttcatcctgataggtatctatgtccttgtgattgtaaacaatccataagatactatgttttgtttcttaaaacatcctctgattggcaaatgaagtaaatatttgttttnnnnnnnnnnnnnnnnnnnnnnnnnnnnnnnnnnnnnnnnnnnnncagtgagcttgtttggagtccataggatccgatccggaagagctcggaaaatgtgttatgtgttttctcctgttttcggctggaaaggtactagaggttgcgttggtcgaggaaaggattgtagagtaggaaaaccaaagatgttaagctagacttcagaaattcaagtgttagcttc

SEQ ID NO: 250871 - DNA, 684 bp, Homo Sapiens
cccacccaccagcaaaccccccaaaataaaaaaagttccatcaattaaaaagtagcttcatgaatgaaggtactgcaagttgcaccctgcaagtgcggccagtgcctttgcgctgggtatgaagaaaagaaaaaaattctccacataacctgacaaaaaattttaaaaccaatgtccggtttcaaccagtcaaacccgggctgagcgaaagccgagatatctcagtaccgtcccatcagagggtccttgcaatgcctgttcttcatcctgataggtatctatgtccttgtgattgtaaacaatccataagatactatgttttgtttcttaaaacatcctctgattggcaaatgaagtaaatatttgttttgaaaatagaaaattaaaattaaaccagaagaaaagaaaagaaacccagtgagcttgtttggagtccataggatccgatccggaagagctcggaaaatgtgttatgtgttttctcctgttttcggctggaaaggtactagaggttgcgttggtcgaggaaaggattgtagagtaggaaaaccaaagatgttaagctagacttcagaaaattcaagtgttagcttcatcatctgtgtcttctatcaataccttagtgtcacgagccttggattgagaagcgaggcgaggccggcgcagggatatgctctggttgct

SEQ ID NO: 250872 - DNA, 623 bp, Homo Sapiens
caaccagagcatatccctgcgccggcctcgcctcgcttctcaatccaaggctcgtgacactaaggtattgatagaagacacagatgatgaagctaacacttgaattttctgaagtctagcttaacatctttggttttcctactctacaatcctttcctcgaccaacgcaacctctagtacctttccagccgaaaacaggagaaaacacataacacattttccgagctcttccggatcggatcctatggactccaaacaagctcactgtgtttcttttcttttcttctggtttaattttaattgtctattttcaaaacaaatatttacttcatttgccaatcagaggatgttttaagaaaccatagtatcttatggattgtttacaatcacaaggacatagatacctatcaggatgaagaacaggcattgcaaggaccctctgatgggacggtactgagatatctcggcttccgctcagcccggttttgactggttgaaaccggacattggtttttaaattttttgtcaagttatgtggagaatttttttctttccttcatacccagcgcggcactggccgcacttgcaggggaacttttcttttttggggggttgctgggtgg

SEQ ID NO: 250873 - DNA, 650 bp, Homo Sapiens
  misc_feature (89)..(142): n is a, c, g, or t
  misc_feature (424)..(494): n is a, c, g, or t
gggatattcttctaacatagttatgtatatgttcattatttattgtctgtctccactaaaactcacaagatgtctttactgattttatnnnnnnnnnnnnnnnnnnnnnnnnnnnnnnnnnnnnnnnnnnnnnnnnnnnnnnatatacagtaggaaagacacatacacacaaggcaggctgcagtaagtgctgtaaaagagacaatgagacagtacaggaattctgcaacagaagctgtggtgagaattaatctatgatgtgttagactctccagctatatatatgcctggaccgatgtcaccacttatctgcagatctcctgtgatgtttccagcgtacatgattaagactcatttaacattccaggaatgttctgctgatgaataatcactgagctggagtcaagagaagaagctatagatnnnnnnnnnnnnnnnnnnnnnnnnnnnnnnnnnnnnnnnnnnnnnnnnnnnnnnnnnnnnnnnnnnnnnnnttctataacatatgggcaggaaagacttgataacacactcagggtctatgtgggctggtctgaaggcatctggccacccatcagcttcttatggccaagtactagggaggatctgaggatcaattacagggacagaacagggtctatttttcccat

SEQ ID NO: 250874 - DNA, 626 bp, Homo Sapiens
ttgaatatcaaagaagtttaatacgctgccataaaataagcgccttgaaaaagctcatggaatagaagtcagtgttagagaaacccctcccacacatcctctggctccacaccgcatccttcaaaaccaaacaagagaatctgaaacaacacaggacatccttccaagcttggatttcagtgagggcccctctaccaataacaagaacacagtttcctacatggcctgataggaaagcaaaacacagaagcacaagaagtctacaagatttcaatatttaagagacttgggtacatattcaaagttaaaataactccaacttttatagctatacatattgttttaaagcaacttaatatattttaaaattttatatatacactctcaaaggttcttcaggtgaggtatgtaaacattgtctaatgaaaaatttcaatgtttcaaaccaacaaattcacagcatacattgaattttcatccattaaagacacagtatattcctacactcactaacatagtagaaatccaggcccaagagctacagactgatattccgggtggccacttgcagaatttctcatttcactgcttcgggaaagacactgtcacacaggccaggagcacac

SEQ ID NO: 250875 - DNA, 859 bp, Homo Sapiens
  misc_feature (763)..(763): n is a, c, g, or t
  misc_feature (815)..(815): n is a, c, g, or t
ggacgactaaagaagacagacattccgctactgcagaggctcctacagggaccttctgaaaagaatgctcgcattttcctcatggataaagatgcagaagaaattagcagtgatgtggctcagtacattaactttcacttttctctcttggaatccattcttcaaagattaaatgaagaagagaaaagagagattcaaagaatagtaacaaaattcaataaagaaaaggcgattatactgaaatgtcttcaaaataaactagtaataaaaacagagacaacagtttagcagtacaagcttctattgctaaaacatttcaaaaaactcagagatattactctttgatgaatgcataagttctgtacttgcatttatacgaacatatatgagacttgaatcgtagaaaattgaatgtcaaaaaaagctcatttctttttgaagtgatgaggttaactagggttcacagttggacaaaatgagtttgagtttagtttcagtaactgaaataagcttgaatactgcatatgccaaatagcttttatagtaaaccatgtaatgaactcaaatttaaatggtgtcttcagataagcagtttaaacttcatttagcttggactctcaagagaactgaaacataatcaatggattcagaaatgactcagaaaaaagaagctgccagttcttggaatgaaaaagaaatacagtcttacaccatcaaggaatctacctgatagtgacagtagcttcttgaaaactctggcatnttcataaaatctaggactatcttaaatggcctgttgacttctgactatctgntacatcagagctgtctggcctttggaaaggaaaattatggactc

SEQ ID NO: 250876 - DNA, 1064 bp, Homo Sapiens
  misc_feature (3)..(3): n is a, c, g, or t
  misc_feature (8)..(8): n is a, c, g, or t
  misc_feature (10)..(10): n is a, c, g, or t
  misc_feature (12)..(12): n is a, c, g, or t
  misc_feature (22)..(22): n is a, c, g, or t
  misc_feature (31)..(32): n is a, c, g, or t
  misc_feature (34)..(35): n is a, c, g, or t
  misc_feature (38)..(38): n is a, c, g, or t
  misc_feature (42)..(42): n is a, c, g, or t
  misc_feature (46)..(46): n is a, c, g, or t
  misc_feature (62)..(62): n is a, c, g, or t
  misc_feature (70)..(70): n is a, c, g, or t
  misc_feature (86)..(86): n is a, c, g, or t
  misc_feature (651)..(652): n is a, c, g, or t
  misc_feature (717)..(717): n is a, c, g, or t
  misc_feature (898)..(922): n is a, c, g, or t
aanaaaanantnaaaggaatcngggatcaanncnnaancctntcanacaccttagaaacacnttaggtgnaatttcagttgtctanggcctctggtaaatgggcatgctctgggttaaaagctattaaaatgcgagacccttttagttattagttactaacacagacatgggaaacttagtaaaatgaggtggaagtgccaagcagagggaataggctttgatgttcattccacttcgatgatcctgggcaaattaatattcctgaatctcaatttcttactctataaaagagaagaatattacttatagggatacatgatgattaaataaaataatgtaataaggtacctggtatagttagtttttaataaatgttagtttccatcctctctttcctaaatgatcctaatgactttatataaatgattttaaaatatagatgattgcttgctatctttatagataattatccttaaacccccaaataatacctagcatgacactttgcagcttaatatgtgctttcatgtacattgtctcatttggtcctcacaatcaagagataggtatgatggccataacagtaaaggcaggtcttctggcttgaacccagtgcttttcctactgtcacacttccctctgtaattttnntttttacccgatttttttcagcagcccaaagaagcaatctgcttgggtctttttccatttttttntcttgcaatcgataccactcttcatttttgtcatcttgctcctcatcttcatcagaattgcctacccaaagactttgagtaccagtaggaataaggtgtccatgtgtttccaacaattcaagttggttaaagtgttcagaaaaatccaaggaattctcttggtctggtattccatcatcannnnnnnnnnnnnnnnnnnnnnnnnactactattctaaataaaaagcatttcaaatgccaggatataaatctttctagagatgaattatgactgctttgttcatcaagatctgacagaagggaaaatcgccgccatcccgggaattccggaccggtaccagcctgct

SEQ ID NO: 250877 - DNA, 898 bp, Homo Sapiens
  misc_feature (412)..(412): n is a, c, g, or t
tgcatccttagttcttggggttgtgtaggagttggcaggctttgagatataaatagaagctgatttcagaggcccctgttgactaggctttatgtgagagcctccatccagctcagcttgtcacattgcagccttgtgacaggctgaagcgccctcccatgtgatctgagcttctgagaaatattaaagcaagctgtgcacatgtgatggcatttaaaagctggctttctaggggaaaaaaatctaaaagatgggaacccatgtagaagactcatgtcctggtacctcttgtgtgtctcgcagttgaaagttatttataatgaaatgaaggtagacatgttctctgaagcaaagttggaatactttgttatctctgagtgtgtgaaatctttagatggagtatcctccattntatctaaaacaaagattttaagaatcagattaactaaaattacttaggtaggttgatcgcttggccttaaactttaaagccaatgtcacatgaaactgggcctcagtgtagaaaatgtaagctagcatacttaaactggttttaaggagtgacccaactttcatgcatagggcaaacattcacacatattttgtgcgtggtgggcatgcaaatacatacatatttatcatttgaaagcattttttgctcctattatgctcatttaaaaacccagctgaaagtgtttattaataaacttcctaagtgatgttgaaatgtttacactaccctgctccaaaatgagtcagctaaattccagttaatatttaaagagacagtgtcaactaaattaatactgttgttaaaagtaagttgtggatcttggtcactccacacaagctagattgtcttaatatttgtatggtgcacttttacttacaaaaggga

SEQ ID NO: 250878 - DNA, 1135 bp, Homo Sapiens
gggcagatcttgtatcaaggcagaggtgatgccatgccatacttttaggaagtctgagatgataaatatttcaaggtcagtgaagtctatcaatcattctccccttcctcatcagcaatggtagatagaaatgtcctaaacttttctaaatcctagtgatgaggatgtgctgatattcaacatagtccttaaagtgaaaactgagttgttgctgacctccacaaaagaatatggaaaaaagccttgctgtacacctagttgtacagccactctggccaattccatttcctgtccctctgtggttctgactggagacccccagtgtgggggaggtcttaccatttaatatagaaatgatatcaataactaatgctatgtacttggaaaatccaaataaggaagttttaggttggtgcataactttgtttctcaaattttcgttgtcagaacaaatggaaggagaatattatttagactaatccagatttgctttctatgaaaatctaatgtctggattatcttccttttctcatggcctaagaaataaggatcaataaggaatgatttgaatgtaattttgtgaatgtgtggaaaatataaagcagggatttagccttaataaaggtaaccttctgacatctgttgttaatccccctttgtactcttttcctgtatctgcactgttattttgagatgtcatactgtacactgtattgtaaaaataaaaagtaaaattatatttcaaattttaaaagccactaagcaatttctcttgctatttgctcggtcactcaaggtttccacacatgtaaagaccaccctcctcttcaagtttttgccaaaagcaagaccattggatcctccagctacaacacaaaatactttttgatttgttctttacagagggatagtgccccctgttggcacaggtataggtaggtcctgtttccttaattattaaaaccaacaactaagtgtattaaagatggacaacgcaaggctgtgaacttgaaagttttctggagaaggaggtatgtaataatactcaggcaaatggaccttatgtgcagcctgggatctgaggacactgaggcagcatgtgaattattggcaaatatataacatactttgtttc

SEQ ID NO: 250879 - DNA, 785 bp, Homo Sapiens
  misc_feature (15)..(15): n is a, c, g, or t
  misc_feature (25)..(25): n is a, c, g, or t
  misc_feature (95)..(95): n is a, c, g, or t
catgcttaagctccnagtaaccccncttgtagaaggtaaagctgaccaacccctgtcaccccagattatgaaagcaataccccactcctgaagcnccccacaatactttaatgggctactgcctcctagttaaacttaagccaacattccagaccttgcccacttcatggacccaagacctcttggaagcagcaactgctaagtgatcagcaagtttttatatgtctaactaattaattaaaatgaaagaaaccactggctcattacctggaaatacgattcattattgcttggaagaccaatgctaaaatttgaaattgcatttgtccctggtaacagggatgatacgctgagagccaagttccgagttgtaatattcacatgtgatgtgctatttaggtctatcttgaaggccaattcatcaattgtttttaaagctccagaagatgactcaagcaagtcactgtctgaactgcttaagatattagaaaatatattcattagagttgagccaagtgttatatcaatgttttcttctttattcacaattcttttgacctgttccacaatgttggtaatattggctgaggttaagttctgcccatcagcagttaaatttaaaatctggttagcaacttcatttgcttcttttaaacagttggagatatcaacaggtccccagtaggttaccaatgggttggtagcattgtaaaaacatatccgagaagcagaaaagccaggcttgtctggacaaggaagaacgtattcagaaggttggatagatg

SEQ ID NO: 250880 - DNA, 639 bp, Homo Sapiens
atcagacagaccaagggatttcataatgccccactggtatttagaagatccagctttagcagcagctttactcttttttcctttagctttatccttaattattatatcttctgttttaacactggtttcttcctcttcctcttcttcatctggaaaatcaggggggcaaccatacagctctatttctcttttcaacttatcagcacatgccttaataggcattccagtacagtgcaggccaaagggaaacagacaacattttcctttcaatcgctggtaccctacagcaaactcacatttggataaagaaaacgtgtgtcccaaatgaaggcgtccattcatatatggatatgggaaggttacaaaatacttgcccttgctggtctgtttctctaaattagatgcattgacctcaaacactctctcagtatcccatttctgttggatttctttctcaatcttcttcaaaaagtccactttggctgttccttttctttccgccattgcaccgcccagccgactgtgcaaatccacgacaatgaccctggcgacctccacaaaggagtggttacctttcccctccctctcggagatgccaggcctcccacgaaactaaagcacacgcttcacacctgcccc

SEQ ID NO: 250881 - DNA, 371 bp, Homo Sapiens
  misc_feature (355)..(355): n is a, c, g, or t
atgaggatgtcatcattgaagtgaatggggtgaatgtgctagatgaaccctatgagaaggtggtggatagaatccagagcagtgggaagaatgtcacacttctagtctgtggaaagaaggcctatgattatttccaagctaagaaaatccctattgtttcctccctggctgatccacttgacacccctccagattctaaagaaggaatagtggtggagtcccatgactcgcacatggcgaacgggcccacagtacagcctcacattcttcttccaattctgaagatacagagatgtgatgaggaatcctttctcaaggaatgagttgtgacctgtttactgtctctttagaaganaaactccactggaaac

SEQ ID NO: 250882 - DNA, 1253 bp, Homo Sapiens
gcggcgagtctgtggaaaccctggatcatgacagtgtggtagaaatgattagaaagggtggagatcagacttcactgttggtggtagacaaagagacggacaacatgtacagactggctcatttttctccatttctctactatcaaagtcaagaactgcccaatggctctgtcaaggaggctccagctcctactcccacttctctggaagtctcaagtccaccagatactacagaggaagtagatcataagcctaaactctgcaggctggctaaaggtgaaaatggctatggctttcacttaaatgcgattcggggtctgccaggctcattcatcaaagaggtacagaagggcggtcctgctgacttggctgggctagaggatgaggatgtcatcattgaagtgaatggggtgaatgtgctagatgaaccctatgagaaggtggtggatagaatccagagcagtgggaagaatgtcacacttctagtctgtggaaagaaggcctatgattatttccaagctaagaaaatccctattgtttcctccctggctgatccacttgacacccctccagattctaaagaaggaatagtggtggagtcaaaccatgactcgcacatggcaaaagaacgggcccacagtacagcctcacattcttcttccaattctgaagatacagagatgtgatgacaagtaatagctttggctgtttatttgatagctgtttctgggtatttaataggaatcctttctcaaggaatgagttgtgacctgtttactgtctctttagaagaaaaactccactggaaaccattcaccatgtgtgattgtcttctgttatcatttgtcttacaggcggctattgcagacggctaatttatgcttaacttaggaagagataaggcaagagctagatttttttcatgtgatcttttccaagcttcaacttaacttaactacatttctctgtatgatgatgtctcttacttctacaggttccttgagcaccaaagatgattcataactctgtataggtgacagctgcttataaaagcatcttagcagataagcctattaaaattgtgcttttgtaacaatgttgtggttgctagaataaataccattaacaaatgccttttgagtatgcttgatagtgcttttgttttggattcactttttatgctttaaccttcatttgcctctagaaacccaaaacgcaataaagtacagattaagaccttagaataagataag

SEQ ID NO: 250883 - DNA, 810 bp, Homo Sapiens
  misc_feature (465)..(504): n is a, c, g, or t
caagagtaagcctgcagttatattcacaaattctttcaaaatcttaagaccaaggacttaaaactcatttatcaatcatttggcattctcttatcactaccaatttgagttgagcttcagtttagccttaatgatgattgttatgcctcttccagtttgaggaacaaagtcctaactcagtgcaaaagttgaggtcatgagtgaatgggcccagccttaatgcatgaatatatggccttgtattacttaccagtctgtacatgttgtccgtctctttgtctaccaccaacagtgaagtctgatctccaccctttctaatcatttctaccacactgtcatgatccagggtttccacagactcgccgttgacagcaactaccagatcattgttcttcaagccagcctcctctgctggacttccagaatctatgtccttgatgatttgacacccctcccccaaccccnnnnnnnnnnnnnnnnnnnnnnnnnnnnnnnnnnnnnnnncagattttctgctggagcccaaagccctgatgaaatagataaaaaaggcatgctgagtacaactaccaccccttccaccagcatcccaggaagcttataagcacactatctaggctcgtttcctgctcagaactcaccccagaaactaacccagcaattaacaatgaaggggtcttaacgaaaataatcctgttactaaaagcatctgacatttgattttggcaaaatagcatattaaaaggctgcaagttcccagaaagtcagtgggcatacttgtagccacgcgtcttatgtaaaagctgtcat

SEQ ID NO: 250884 - DNA, 1471 bp, Homo Sapiens
  misc_feature (27)..(27): n is a, c, g, or t
  misc_feature (160)..(162): n is a, c, g, or t
  misc_feature (168)..(169): n is a, c, g, or t
  misc_feature (176)..(177): n is a, c, g, or t
  misc_feature (206)..(206): n is a, c, g, or t
  misc_feature (273)..(273): n is a, c, g, or t
  misc_feature (296)..(296): n is a, c, g, or t
  misc_feature (310)..(310): n is a, c, g, or t
  misc_feature (338)..(338): n is a, c, g, or t
  misc_feature (364)..(418): n is a, c, g, or t
  misc_feature (482)..(482): n is a, c, g, or t
  misc_feature (520)..(570): n is a, c, g, or t
tatcccaaagccccttaagtccatggncccggggttctccttaaggaaaaccagctatgggcccatgtttcactttaccctactggggcccgcggcgccaaaacgaattggtctaggaaagctttttgaggggccgaaggccggccgaccagttttggtnnntggggnnggggggnnttttttgacatggtcataattttttattnaggtatcaaattgtcttcaatataaagttacaacttgattaaaagttgatagacatttgtatctatntaaagaccaaaaaaaattctttnatgtacaatatctngtctagagtctagcaaatatagtacctntcattgcaggatttctgcttaatatnnnnnnnnnnnnnnnnnnnnnnnnnnnnnnnnnnnnnnnnnnnnnnnnnnnnnnngctcaactacaaatgtcaatattgaatgaagcattaaaagacaaacataaagtaacttcagctnttatctagcaatgcagaatgaatactaaaattagtggnnnnnnnnnnnnnnnnnnnnnnnnnnnnnnnnnnnnnnnnnnnnnnnnnnntcccaccaatcttccatgggtaaactttcctgctccagggatgtaagctgactctagaccatctcgcggttcctgcggatagcacagcacaagatcatactgaagatcatgccaaatatcatgaccacggcaatgccgatgcccactgcgccgatgatgtggaatttattgtcgaagacctctttgatggcatcaggacaggacttcacggtgaaggtttcgagtacgtccttcttggggcagatgtctgagataaactgttccacgcccccagccaaaccacagcagttcaacgcatagtggatggctttcagcgtttcccgctggggctcatccttggttttcagcttgttgtaggtgtccttgtaaaactcctggacttccttaatcacctcatccttgtgggaatatccccagatggccgcagctatttcaatggcgaatatcaccaagaggaagccgaagaacagtcccagcatgcactgggactcctgcacagccccgcagcagcccaggaagcccaccagcatcatgagggcgccggctccgatcagaatatagactcctgtgtagaagctggaattattattattagtttcttgctcgaagatgctcttggtctgagagtcgaatcggagccatagtccaatggcaaggacagcaatcccggcaagccagaagatgaagttaaatccgaacagcaggtatttgatgcacttggtgcctcctttgaccggcatggtgagggctaacttagcctgggccgaacgggtgcgggactggggggcgcgcgcagctgggactggcgggacctggcgctggatacagatgcaggcggctgtaggctggtctccggctgcacttttaaaagtgatcccgaaattccggaccggtccagccc

SEQ ID NO: 250885 - DNA, 506 bp, Homo Sapiens
gggagagtgagaagtggagcaggttcattcagcagcattcttaattgagccagcattgacacccagccagcaggcctttgcatggcattcggggaccaggactctgaatctgcttaccaatcaatctcggtttaatcaccaaaagtgcagagcaggcaaaatgcagctgtttatcaatctcaaaagctttgggacagtgtcatagttgaaagatgagacttaagaaaacagtttcctaaacttcttaaaacttaagaaacattgtttcataaaacaatattgagtgggcattcttctgcacagtgtgatgctccaaccctggccctagtctcagtagaccatgctgcctcgagtgtgcatcggagagaagccatgggtaccttccccattagaggctacttccttctagtaacaggaagggaagttccagcatgaggtagttatccagggtagaaggtcctttgaggggcttggttgaattgagagcatcatctctagatgatgct

SEQ ID NO: 250886 - DNA, 913 bp, Homo Sapiens
ggctggggtgaaagtatgggtacttactggggataaacatgaaacagctgttagtgtgagtttatcatgtggccattttcatagaaccatgaacatccttgagcttataaaccagaaatcagacagcgagtgtgctgaacaattgaggcagcttgccagaagaattacagaggatcatgtgattcagcatgggctggtagtggatgggaccagcctatctcttgcactcagggagcatgaaaaactatttatggaagtttgcagaaattgttcagctgtattatgctgtcgtatggctccactgcagaaagcaaaagtaataagactaataaaaatatcacctgagaaacctataacattggctgttggtgatggtgctaatgacgtaagcatgatacaagaagcccatgttggcataggaatcatgggtaaagaaggaagacaggctgcaagaaacagtgactatgcaatagccagatttaagttcctctccaaattgctttttgttcatggtcatttttattatattagaatagctacccttgtacagtattttttttataagaatgtgtgctttatcacaccccagtttttatatcagttctactgtttgttttctcagcaaacattgtatgacagcgtgtacctgactttatacaatatttgttttacttccctacctattctgatatatagtcttttggaacagcatgtagaccctcatgggttacaaaataagcccaccctttatcgagacattagtaaaaaccgcctctttagtattaaaacatttctttattggaccatccctgggcttcagtcatgccctttattttccttttttgggatcctatttactaattagggaaagatacctctcctgcttggaaaatggcccaaatgtttgggaaac

SEQ ID NO: 250887 - DNA, 989 bp, Homo Sapiens
  misc_feature (110)..(118): n is a, c, g, or t
tcacactctgtggcagccatctgtgaagccagttacactaaactacttctacagttgattgtaaactttggtttatttttatttgagttctcattgtacagcaagcatgnnnnnnnnngagagtggagtccgtgaggagatgaactgtcagtctgtctttaatctggcatgatgagacacctggtcagtcaggcctgctttgatagagtttgttacagactgccttatgttttcctccatcaaattatcacccaggggcttcaatacctgttcccatagtgtttcagcaatctgatcaatcactgttccaatttctctgaactcccccagagtatttaacatatgcccaagtacaaagaaatatcagtgctaaccccatgacaaggttacacaagacagctatagagtttaggccaatgaagccagtcagtcctgagattatatacatagcaaacatgaccgcaaacagtgtggctggggtacgagcagcatagaagatatttttgccatcattgtgctttataaaatttgcataggtttcttcaatttcagcttcaagctggtcctgataacgacggcagaactcatctccacccatcttttttactgaacgaaattgttttatcgccacttccttgagatccaagtgttttcgctccagatctgaaggtgcaatgtaaggcttgtcccctccacatacctgttccatacttttacaataggtatctcttgctcctgctactgcagcaagattattagcttcagctgttgcctgaagcatggactttggatgtggaagttcttctccttgatagattttgatgtaagccttaaaatattctacaagatctctacaagtgactttagatccacttatctctttttctaccaaattttcaggggcaagcagcaatggaaccagatttcgaagctctcgtttaaagtcttcatcaatatctttcaatctcccatcaaaactaggattagtt

SEQ ID NO: 250888 - DNA, 1323 bp, Homo Sapiens
  misc_feature (218)..(218): n is a, c, g, or t
  misc_feature (1166)..(1174): n is a, c, g, or t
atttttatatgtaactctttttttacctcatgtttgtttgttttgcacatttctcataccacaggtattgaagcccctgggtgataatttgatggaggaaaacataaggcagtctgtaacaaactctatcaaagcaggcctgactgaccaggtgtctcatcatgccagattaaagacagactgacagttcatctcctcacggactccactctcttttnttttcatgcttgctgtacaatgagaactcaaataaaaataaaccaaagtttacaatcaactgtagaagtagtttagtgtaactggcttcacagatggctgccacagagtgtgaagattgtttgttagttttaagcattcttttaatggctcctaagacatgcagatggactgaggagcattggttaatcatgcacctttgtgccatgtttaactcttttatttctttttacttaatctaatgttagtgaatttgtcttatgtaaaaggatatttcagggaaatattttcagaaatctatttagagtctctttaacacagtgtcccattgaaattttaatttttagagaatttatgaatcactgttcaaagaacaagattggaaagacaatgaagcctttattgagccactacattaaaagtatatattgctttactgccttcaataccagtattacatcaatgcatgtatcagaaacttcacagaaattacatggcaactcttgtagctaagaaagtaattctgaggtgtacatttgtcttgcctttttaaatttataaacttgccctaaaaggagatgcatatctgggaaactgaactgtctttttgcagtttagccttcatgtatataaaatatgccattaattttattggggaagaaattccatccaaaaatgttgcctacagctatgagttaagagtgtctgtacagtgtgtagcttttattttctaaaatcacagatagggcatgtatatgacttataaatatataaatacgattttgtattaaaagttttgtagtttatggcaaaatctggtcctgtggtaggctaaataagtactgtccctgtgaaaggaatgtttgtggctcatgtcagtgtgtgaatgcatagacaatttgaagtttttgatatatttgtgatatttatcttgagcactgcaatctcannnnnnnnngcccaccaagggaattcaatgggaatgtttattgtgactttgtcctctgttgcattttaaagttatttcctgtaatttattttcagtacataattaaaaatttgttgcatatatccttcccccatatttccgggttacgccatccttgt

SEQ ID NO: 250889 - DNA, 703 bp, Homo Sapiens
  misc_feature (44)..(104): n is a, c, g, or t
  misc_feature (414)..(414): n is a, c, g, or t
catgtatatacaaatatggaccatacatgtagattacacatgcnnnnnnnnnnnnnnnnnnnnnnnnnnnnnnnnnnnnnnnnnnnnnnnnnnnnnnnnnnnnnctcttacaggaaaagcatttaattagagaaagaatttaatcttcagatgccatgccttacagagagagatgcacagttaagttactctcaaactgttgtgaaatgatacatcaacgtatatcttatttttcaaaaataggaactggggagaaggttggggtttcgaaccttctgacagagcgcttgtctttgtggataaccatgacaatcaacgaggacatggggctggaggagcctctattcttaccttctgggatgctaggctgtacaaaatggcagttggatttatgcttgctcatccttacggatntacacgagtaatgtcaagctaccgttggccaagacagtttcaaaatggaaacgtaagttttgaaattgttcaaaatatccttttctcgaagaaacagaaggcggtcttgttctaacttaatatgacaactattaattatatattcaacaaataattgattagaaacctgatatagggctgcgattttagtaatgcaggttatattaaaggagtaaaatatatattttccattgacaaagagtatgcaagccttttcagacatatgataaacatccccctagcccacagg

SEQ ID NO: 250890 - DNA, 730 bp, Homo Sapiens
catggatgtgtagtattttattcaacatacagtatatatttaaaattaagtttgacacagtttattttttaagatattatgttagatttcctttttctcagaacttgaaatgagtttatacattaccaaacggtgcttcactgtacaagttatatttttaatagttttcataaagtagacgcatattcagagaatatacatctgcaatgagctgctctctagtttgctttacatgttctcataaagaactaaccattctgatgaaaatatggaagcattattaattatcgttaagtctcttctctccataggaaattgacgggaaggctctgctcctactcacgagtgacgtgttgctgaagcacttgggggtgaagctgggaacggctgtgaagctatgctactacattgaccgacttaaacaaggaaaatgctttgaaaattgaaaaaatccttgtgcaaatttagattgggccaacttctagaggcaccaatgccttcttagtgtggaatcatttttctgccctttagtcgtttttgttttgtagaaagtatctctcaaaatatattatagctagaattgtagaactatgttatagtccagtctacttctttaaaaaccatttaaactgctagatagtattagaatagtccaatagaaaattcattctttataggtctttaaaaattacttttattatattgtttacaaatatatttcatgcaagaa

SEQ ID NO: 250891 - DNA, 1056 bp, Homo Sapiens
  misc_feature (52)..(52): n is a, c, g, or t
ccgaagcggtcaatgtagtagcatagcttcacagccgttccagctttcaccncaaagtgcttcagcaacacgtcactcgtgagtaggagcagagccttcccgtcaatttcatggcttctgaagaggtcgacaagagggcataatgcaagaggatctgtttgagaaataggaccactgcttccaccgaccaggttgaagggtgcttagtgatgcatccttcctctatgtaaccgtcattttcaactggtgaccttgtaactgaaggtggtgctgcagaagcatggtcagttgagtaagtgttgtggatgctgtcagcccgagggttgccaaggcagagccctgaagaagaaccatacgttgcaccatcagatgcataatacggctgacaattatgctcagagaaatctgagggatgcactggactcggagtgcggctgaggatcgggtcctcctccagctcagctcgctggtattcttccatgcaaaaggatggccttggaaggttgctcggggaattattctcacgccttgacactggtaaagtggggctgtaactttcagggtaggagaatgtctcgtaaacctcatttttcttcattttctggagtttaagctttttaacaagccggtaagaatgctttttatatccatatcgcttatgatttgtccacagggatctcgcatggaaacgttggatttttgaaacctttctacgaatcacatcaatcttcttatccaggttttgcagagcatcatatataacctggcaatgaataaggacatcatcaactgtcttcagttgctcttcagtattacaggatgcgtcagatacaatattcggttcctgctattttagtgacagagcctgtcacgccggcctccggaggtcgcggtaaaactgctcgcagtagtcctgcctctccgatgggcgacagctgtgaccgttaggccactcgacgcttcggaaaggtcctggcaccggaaaccgggcctggtcacgcgcacgcgagaccagtgatgccctgacccctgagtggatcagagagcatcccggga

SEQ ID NO: 250892 - DNA, 621 bp, Homo Sapiens
  misc_feature (611)..(611): n is a, c, g, or t
aaatcataagcgatatggatataaaaagcattcttaccggcttgttaaaaagcttaaactccagaaaatgaagaaaaatgaggtttacgagacattctcctaccctgaaagttacagccccactttaccagtgtcaaggcgtgagaataattccccgagcaaccttccaaggccatccttttgcatggaagaataccagcgagctgagctggaggaggacccgatcctcagccgcactccgagtccagtgcatccctcagatttctctgagcataattgtcagccgtattatgcatctgatggtgcaacgtatggttcttcttcagggctctgccttggcaaccctcgggctgacagcatccacaacacttactcaactgaccatgcttctgcagcaccaccttcagttacaaggtcaccagttgtgacggttacatagaggaaggaagcatcactaagcacccttcaacctggtcggtggaagcagtggtcctatttcttgaaattgacgggaagggctctgctctactcacgagtgacgtgttgctgaagcacttgggggtgaaagctggaacggctgtgaagctatgctactacattgaccgacttancgggtgcttt

SEQ ID NO: 250893 - DNA, 444 bp, Homo Sapiens
cacccagagctgttgctgtaatcaaaagataactgtagataaagtccaaccctctcctgtatccaacaaaaggtttttgctcatatgcaaaaaaaatctaatttttaaattatcctacaagtgaatatacaacttggattcataagaaccttctattatatgcagcaacaagctgatctggacagcagtatttcaaaatgagccccataactcaaaaatagtcagtcaatctaaaaacatgcatcattcttccccctcccatgaattagctactaaaatgtccttgaaaagttaagacttggtttgaaaatgtcgtacatacaatggggatgtataagatccactatttgatcatctgataaaacttgcatagcaagatgggattcaataagccttttttgttgttgacaaccatctggaagacttgaaagtcccccccagaac

SEQ ID NO: 250894 - DNA, 3438 bp, Homo Sapiens
  misc_feature (2641)..(2645): n is a, c, g, or t
  misc_feature (2647)..(2677): n is a, c, g, or t
  misc_feature (2679)..(2680): n is a, c, g, or t
  misc_feature (2682)..(2683): n is a, c, g, or t
  misc_feature (2685)..(2685): n is a, c, g, or t
  misc_feature (2687)..(2692): n is a, c, g, or t
  misc_feature (2694)..(2734): n is a, c, g, or t
  misc_feature (2738)..(2738): n is a, c, g, or t
  misc_feature (2746)..(2748): n is a, c, g, or t
  misc_feature (2758)..(2758): n is a, c, g, or t
  misc_feature (2770)..(2779): n is a, c, g, or t
  misc_feature (3126)..(3135): n is a, c, g, or t
  misc_feature (3192)..(3192): n is a, c, g, or t
  misc_feature (3317)..(3325): n is a, c, g, or t
  misc_feature (3356)..(3380): n is a, c, g, or t
gagcgaggcctgggtggcgaattcggcacgagggtggttgtcccgccatggcactgtcgcgggggctgccccgggagctggctgaggcggcggccgggggccgggtgctggtggtgggggcgggcggcatcggctgcgagctcctcaagaatctcgtgctcaccggtttctcccacatcgacctgattgatctggatactattgatgtaagcaacctcaacagacagtttttgtttcaaaagaaacatgttggaagatcaaaggcacaggttgccaaggaaagtgtactgcagttttacccgaaagctaatatcgttgcctaccatgacagcatcatgaaccctgactataatgtggaatttttccgacagtttatactggttatgaatgctttagataacagagctgcccgaaaccatgttaatagaatgtgcctggcagctgatgttcctcttattgaaagtggaacagctgggtatcttggacaagtaactactatcaaaaagggtgtgaccgagtgttatgagtgtcatcctaagccgacccagagaacctttcctggctgtacaattcgtaacacaccttcagaacctatacattgcatcgtttgggcaaagtacttgttcaaccagttgtttggggaagaagatgctgatcaagaagtatctcctgacagagctgaccctgaagctgcctgggaaccaacggaagccgaagccagagctagagcatctaatgaagatggtgacattaaacgtatttctactaaggaatgggctaaatcaactggatatgatccagttaaactttttaccaagctttttaaagatgacatcaggtatctgttgacaatggacaaactatggcggaaaaggaaacctccagttccgttggactgggctgaagtacaaagtcaaggagaagaaacgaatgcatcagatcaacagaatgaaccccagttaggcctgaaagaccagcaggttctagatgtaaagagctatgcacgtcttttttcaaagagcatcgagactttgagagttcatttagcagaaaagggggatggagctgagctcatatgggataaggatgacccatctgcaatggattttgtcacctctgctgcaaacctcaggatgcatattttcagtatgaatatgaagagtagatttgatatcaaatcaatggcagggaacattattcctgctattgctactactaatgcagtaattgctgggttgatagtattggaaggattgaagattttatcaggaaaaatagaccagtgcagaacaatttttttgaataaacaaccaaacccaagaaagaagcttcttgtgccttgtgcactggatcctcccaaccccaattgttatgtatgtgccagcaagccagaggtgactgtgcggctgaatgtccataaagtgactgttctcaccttacaagacaagatagtgaaagaaaaatttgctatggtagcaccagatgtccaaattgaagatgggaaaggaacaatcctaatatcttccgaagagggagagacggaagctaataatcacaagaagttgtcagaatttggaattagaaatggcagccggcttcaagcagatgacttcctccaggactatactttattgatcaacatccttcatagtgaagacctaggaaaggacgttgaatttgaagttgttggtgatgccccggaaaaagtggggcccaaacaagctgaagatgctgccaaaagcataaccaatggcagtgatgatggagctcagccctccacctccacagctcaagagcaagatgacgttctcatagttgattcggatgaagaagattcttcaaataatgccgacgtcagtgaagaagagagaagccgcaagaggaaattagatgagaaagagaatctcagtgcaaagaggtcacgtatagaacagaaggaagagcttgatgatgtcatagcattagattgaacagaaatgcctctaaacagaaccctcttactatttagtttatctgggcagaaccagattgttatgtcctttgttccaaagggaaaaaattgacagcagtgacttgaaaatgattctgctccctttgaaagcattcattttgctagaactgttagacacattgcagtatgctgtattgaaagtaggaatatagttttaaaaaccctttgaacaaagtgtgtgcataaccagtcatgagataaaacaacacaatgcatgttgcctttttaatgtaaatacccttaggtatcattaatagtttcaaaatattgtggtttagtaaagttgatacctggttataaatattatgcctttatttttggctagaagaagaattatttttagcctagatctaaccattttcatactcttaactgattgaaacagattcaaagaagtatcgagtgctatgcattgaaacttgtttttaaatgttagatggcactatgtatattaatgtaaaacaatgttaatttactcaagttttcagtttgtaccgcctggtatgtctgtgtaagaagccaatttttgtgtattgttacagtttcaggttatttatattcgatgttttgtaaaactcaaataacgactatacttatggaccaaataaatggcatctgcattcttgttannnnnannnnnnnnnnnnnnnnnnnnnnnnnnnnnnnannannanannnnnnannnnnnnnnnnnnnnnnnnnnnnnnnnnnnnnnnnnnnnnnaaanaaattttnnnaacccttagncccccaaaaaannnnnnnnnnccctttccctctgcgcgcccggaaaaattttttaaaacatatttttgtggcgcggggcgggccccaaagagaaaccggggaacctgggccaaaggggtttgtgtatcctcagaacaataacagaaatactgccgcggggggggtttcttaattatccctccccataaaacaaaacaccccgcccggggggggtttccaccaggggttctttttattggagaactccctcccccagagggggggctctccccaggggggtttcgttttcagatggggatatatttttacaccgcccgcgggggtcctctcggcgccgagaatttttgaaataaaaacaatgtgtttgnnnnnnnnnntttttagcccattttttcgcccccaaaattggtggggctcctttcccacaaaaaacnccatttttctcgcccccctagaattacaccccctcttccaaaaagaggccgtgttggaccccctcttacccccaccaaatttgtccccctaagctttaaaacccccctcggaaataaaatatttnnnnnnnnngtgggcaaaacgtggggaccacaacaattgnnnnnnnnnnnnnnnnnnnnnnnnncctcccaccgggggaacctctcccccccgaaaatctttgtaagaaaaaacacctattt

SEQ ID NO: 250895 - DNA, 1036 bp, Homo Sapiens
gagctaaatgacgggcggagcccggcggcggcttccggtcgggggaaaaaagttgggccgaaggaggggccgggaagacgcaagaggaagaagagaaaacggccgggcggcggtggctgtaggttgtgcggctgcagcggctcttccctgggcggacgatggacagccagggcaggaaggtggtggtgtgcgacaacggcaccgggtttgtgaagtgtggatatgcaggctctaactttccagaacacatcttcccagctttggttggaagacctattatcagatcaaccaccaaagtgggaaacattgaaatcaaggatcttatggttggtgatgaggcaagtgaattacgatcaatgttagaagttaactaccctatggaaaatggcatagtacgaaattgggatgacatgaaacacctgtgggactacacatttggaccagagaaacttaatatagataccagaaattgtaaaatcttactcacagaacctcctatgaacccaaccaaaaacagagagaagattgtagaggtaatgtttgaaacttaccagttttccggtgtatatgtagccatccaggcagttctgactttgtacgctcaaggtttattgactggtgtagtggtagactctggagatggtgtgactcacatttgcccagtatatgaaggcttttctctccctcatcttaccaggagactggatattgctgggagggatataactagatatcttatcaagctacttctgttgcgaggatacgccttcaaccactctgctgattttgaaacggttcgcatgattaaagaaagactgtgttacgtgggatataatattgagcaagagcagaaactggccttagaaaccacagtattagttgaatcttatacactcccagatggacgtatcatcaaagttgggggagagagatttgaagcaccagaagctttatttcagcctcacttgatcaatgttgaaggagttggtgttgctgaattgctttttaacacaattcaggcagctgacattgatac

SEQ ID NO: 250896 - DNA, 608 bp, Homo Sapiens
  misc_feature (434)..(434): n is a, c, g, or t
agcagctgtgctgcgcagctccctaagcggttgtcaccgctggagacggttgggagaaccgttgtggcgagcgctacacgaggcaaacgacttctcccttctttgaactggaccccgcgagcaccagagtcggcgtaactatcgcctgacagggtatctgaagtaaaaggggcatttaaatcaaacggtattgagatggattgggttatgaaacataatggtccaaatgacgctagtgatgggacagtacgacttcgtggactaccatttggttgcagcaaagaggaaatagttcagttctttcaagggttggaaatcgtgccaaatgggataacattgacgatggactaccaggggagaagcacaggggaggccttcgtgcagtttgcttcaaaggagatagcagaaaatgctctggggaaaggcaaggaaanaatagggcacaggtatattgagatcttcagaagtagcaggagtgaaatcaaaggattttatgatccaccaagaagattgctgggacagcgaccgggaccatatgatagaccaataggaggaagagggggttattatggagctgggcgtggaagtatgtatgacagaatgcgacg

SEQ ID NO: 250897 - DNA, 1699 bp, Homo Sapiens
  misc_feature (5)..(5): n is a, c, g, or t
  misc_feature (7)..(7): n is a, c, g, or t
  misc_feature (18)..(18): n is a, c, g, or t
  misc_feature (43)..(43): n is a, c, g, or t
  misc_feature (47)..(48): n is a, c, g, or t
  misc_feature (334)..(354): n is a, c, g, or t
  misc_feature (356)..(358): n is a, c, g, or t
  misc_feature (363)..(364): n is a, c, g, or t
  misc_feature (373)..(374): n is a, c, g, or t
  misc_feature (380)..(380): n is a, c, g, or t
  misc_feature (394)..(397): n is a, c, g, or t
  misc_feature (530)..(530): n is a, c, g, or t
  misc_feature (1111)..(1263): n is a, c, g, or t
  misc_feature (1273)..(1282): n is a, c, g, or t
atttncncatcacaatcngttgctttaccaaataatattttgnaaanncattccttcagtcattataaagttcttaaaatacaaaagaaattaaatctgtaagaaagtctagtagaccagatgctgttgtcaagacttgtatgttggtgtttttgctttcagtacatcccacgccatccacctccactcatgccgccttgcccatagtaacctccactgcctccaccaccacggccataaccacccaaaccatcaggagtaccatatcctccactgtaattgttcccctattcccattcttccaactgatccatagcctccctgattatctttnnnnnnnnnnnnnnnnnnnnntnnngactnntcgataagnngctaancctgcatattttannnnctttacatacccattccatctcttccgtagcctcccattccagaacctcccatgccagagccgcctccaggagtagaattcaagaagagttcaatatatcgatgttctttaagaaaaaaagaaagagtaacangggagaaaggaatgatggataaaattcatcaatacaagctttgtaaaaaagatcaattaagtaatattaaacaaagtatgcttattaattactagtacagcgatatataaagccccacagaaagccattaatagaggtcaaaatggttttaaatcccaacaactgccaagcgttacctacagatcttagagcctcttattttataaattcacgtttaggaaataagattgtgtgccaaagacaccacttacgcatgttatttttatctttagacatggcagctactgcatcttcatgtgtcacaaactctacatctgcttctcctgtggctctgccatcagctccaatatcaatatgaactcgtattggatttagtggtgagaagaactaaataaaaggaaacacttatttacttttctattgagaatattaaagtaaattaccacataccttgatttttcctcatcaattaaaacaaacccttccactgccctgtcagactaataacttagtcaactacagaggttctgtgaatatcagagtatacacttaaggataatgtaaagaatttactgcttttnnnnnnnnnnnnnnnnnnnnnnnnnnnnnnnnnnnnnnnnnnnnnnnnnnnnnnnnnnnnnnnnnnnnnnnnnnnnnnnnnnnnnnnnnnnnnnnnnnnnnnnnnnnnnnnnnnnnnnnnnnnnnnnnnnnnnnnnnnnnnnnnnnnnnnnnngactctgtcnnnnnnnnnngcacacaaacacacagagagaaatacgggatatcatgatttggaactatgcggtttgaataaagccacctatttaagactatatgaaattgttccccaaaagatatcatttggttctaatcacaagttagccaggttttaaactatcattaaaagcagttggaactcaggccagctgattcccagtaagatctagagcacaccattgctttcaaagccagagtcagtacttttggcctgaatggccattgggtctctaatgtaccactcaacagtagaggaatggtgtgaccggatttagcccatggactgaagtttgctgaccttctaacaatctgtaaccaaccagtttcacatcagtgacaacagcagcatctattcctggtattttcaactcctcagtttctaaacactatct

SEQ ID NO: 250898 - DNA, 1220 bp, Homo Sapiens
atatactttatgaattgttttccgtgactaatttctttgtaaaacttaaatatttaattaagtttgtaggtttaaactgttaacttacggtgtatttaggcaatttaaattgggttatgtatctagatatagaaaaacttactgcattttgcccagtatctaatttacactaatacatttatgctgaaacctgtaccttaaaacatttttaaataggtatattgagatcttcagaagtagcaggagtgaaatcaaaggattttatgatccaccaagaagattgctgggacagcgaccgggaccatatgatagaccaataggaggaagagggggttattatggagctgggcgtggaagtatgtatgacagaatgcgacgaggaggtgatggatatgatggtggttatggaggttttgatgactatggtggctataataattacggctatgggaatgatggctttgatgacagaatgagagatggaagaggtatgggaggacatggctatggtggagctggtgatgcaagttcaggttttcatggtggtcatttcgtacatatgagagggttgccttttcgtgcaactgaaaatgacattgctaatttcttctcaccactaaatccaatacgagttcatattgatattggagctgatggcagagccacaggagaagcagatgtagagtttgtgacacatgaagatgcagtagctgccatgtctaaagataaaaataacatgcaacatcgatatattgaactcttcttgaattctactcctggaggcggctctggcatgggaggttctggaatgggaggctacggaagagatggaatggataatcagggaggctatggatcagttggaagaatgggaatggggaacaattacagtggaggatatggtactcctgatggtttgggtggttatggccgtggtggtggaggcagtggaggttactatgggcaaggcggcatgagtggaggtggatggcgtgggatgtactgaaagcaaaaacaccaacatacaagtcttgacaacagcatctggtctactagactttcttacagatttaatttcttttgtattttaagaactttataatgactgaaggaatgtgttttcaaaatattatttggtaaagcaacagattgtgatgggaaaatgttttctgtaggtttatttgttgcatactttgacttaaaaataaatttttatattc

SEQ ID NO: 250899 - DNA, 1504 bp, Homo Sapiens
  misc_feature (15)..(15): n is a, c, g, or t
  misc_feature (32)..(32): n is a, c, g, or t
  misc_feature (40)..(40): n is a, c, g, or t
  misc_feature (79)..(79): n is a, c, g, or t
  misc_feature (250)..(250): n is a, c, g, or t
  misc_feature (299)..(299): n is a, c, g, or t
tgggaggctccgganagatggaatgggtaggnaagttttnaaatatgccagggttagcctggcttatccgatgaagccnccaatttttttccctctctccctttttaaaagataatccaggggaggcctatggaaccagtgggaagaaatgggaaatggggaacaattaccagtggaggatatggtactcctgatggtttgggtggttatggtaagtatctctagttccagtttgtgttagtcccgcatnatgtagtgcaaactttaaagtgcaggtattacttttattattttatgcnagatatctcctgctgagtgattcttaatatctttttcttaaggccgtggtggtggaggcagtggaggttactatgggcaaggcggcatgagtggaggtggatggcgtgggatgtactgaaagcaaaaacaccaacatacaagtcttgacaacagcatctggtctactagactttcttacagatttaatttcttttgtattttaagaactttataatgactgaaggaatgtgttttcaaaatattatttggtaaagcaacagattgtgatgggaaaatgttttctgtaggtttatttgttgcatactttgacttaaaaatcctaaagatgtgctgccttcataagatttgggttgatgtattttactattagttctacaagaagtagtgtggtgtaattttagaggataatggttcacctctgcgtaaactgcaagtcttaagcagacatctggaatagagcttgacaaataattagtgtaacttttttctttagttcctcctggacaacactgtaaatataaagcctaaagatgaagtggcttcaggagtataaattcagctaattatttctatattattatttttcaaatgtcatttatcaggcatagctctgaaacattgatgatctaagaggtattgatttctgaatattcataattgtgttacctgggtatgagagtgttggaagctgaattctagccctagattttggagtaaaaccccttcagcacttgaccgaaataccaaaaatgtctccaaaaaattgatagttgcacgttatcgcaagatgtcttagagtaaggttaaagttctcagtgacacaagaattcagtattaagtacataggtatttactatggagtataattctcacaattgtattttcagttttctgcccaatagagtttaaataactgtataaatgatgactttaaaaaaatgtaagcaacaagtccatgtcatagtcaataaaaacaatcctgcagttgggttttgtatctgatccctgcttggagttttagtttaaagaatctatatgtagcaaggaaaaggtgctttttaattttaatccctttgatcaatatggcttttttccaaattggctaatggatcaaaatgaaacctgttgatgtgaattcagttattgaacttgttacttgtttttgccagaaatgttattaataaatgtcaatgtgggagataaa

SEQ ID NO: 250900 - DNA, 441 bp, Homo Sapiens
  misc_feature (26)..(26): n is a, c, g, or t
aaagggcccttaccgggaaagaaggnatggggaaatgggataaatccagggaaggcctatggaatccagttggaagaatgggaatggggaacaattaccagtggaggatatggtaccccccgatggtttgggtggttatggccctggtggtggaggcagtggaggttacctatgggcaaggcggcatgagtggaggtggatggccgtgggatgtacctgaaagcaaaaacacccaacatacaagtcttgacaacagcatctggtcctactagactttcttacagatttaatttcttttgtattttaagaactttataatgactgaaggaatgtgttttcaaaatattatttggtaaagcaacagattgtgatgggaaaatgttttctgtaggtttatttgttgcatactttgacttaaaaataaatttttatattcaaacc

SEQ ID NO: 250901 - DNA, 379 bp, Homo Sapiens
gacccgtcaccgcacgctctgcccccaccccggcaagaggtcacaccatgtcagcagccttgcactgaccgcagccggcccccaggcctcagagttctggatgcttccgtgcggctccaacaggcatcgtcttcccttccgcaggtggaggggccgcttcccgcaggcatctgagctctgcctcggaaacactcttgaatgtctgagtgagggtcctgcttagctcggcctgtgagatgctttgaaaatatttttttaagatgaagcaagatgtctgtagcggtaattgcctcacattaaactgtcgccgactgcaggcgcagtgactgctgaatgtacaagacaatcataaaacactcgagactagttctctcctcgt

SEQ ID NO: 250902 - DNA, 669 bp, Homo Sapiens
  misc_feature (577)..(589): n is a, c, g, or t
agatccccccttctgggtgcagactgcacctcgggatgcaggatgtccatcctccagaagagagacggtctcgggtccagggagtgaagggggctgcccctgccgtgcaggtcctggccgatggcgccttaccctgctgccctgggctttggcctgaagcaaattcctgagtggggggtactggggcctgccgcatcctgtcctgtccactgcccacccccgtgtgctggctccctcacttctggctgcagtgggagccgccagtctgacccttgtcaccgcacgctctgcccccaccccgttgcaagaggtcacaccatgtcagcagccttgcactgaccgcagccggcccccaggcctcagagttctggatgcttccgtgcggctccaacaggcatcgtcttcccttccgcaggtggaggggccgcttcccgcaggcatctgagctctgtgccggggccgtggccatgggaagatgttccacgctgcctcctcctcgagttttcctcggaaacactcttgaatgtctgagtgagggtcctgcttagctctttggcctgtgagatgctttgaaaannnnnnnnnnnnnaagatgaagcaagatgtctgtagcggtaattgcctcacattaaactgtcgccgactgcaggcgcagtgactgctgaatgt

SEQ ID NO: 250903 - DNA, 1813 bp, Homo Sapiens
  misc_feature (1062)..(1062): n is a, c, g, or t
  misc_feature (1151)..(1151): n is a, c, g, or t
cggcacccgaggaacacgattctccgaccgaagcgtcccagccgattgtggaagaggaggaaactaaaacatttaaagacctgggtgtgacagatgtgttgtgtgaagcttgtgaccagttgggatggacaaaacccaccaagatccagattgaagctattcctttggccttacaaggtcgtgatatcattgggcttgcagaaactggctctggaaagacaggcgcctttgctttgcccattctaaacgcactgctggagaccccgcagcgtttgtttgccctagttcttaccccgactcgggagctggcctttcagatctcagagcagtttgaagccctggggtcctctattggagtgcagagtgctgtgattgtaggtggaattgattcaatgtctcaatctttggcccttgcaaaaaaaccacatataataatagcaactcctggtcgactgattgaccacttggaaaatacgaaaggtttcaacttgagagctctcaaatacttggtcatggatgaagccgaccgaatactgaatatggattttgagacagaggttgacaagatcctcaaagtgattcctcgagatcggaaaacattcctcttctctgccaccatgaccaagaaggttcaaaaacttcagcgagcagctctgaagaatcctgtgaaatgtgccgtttcctctaaataccagacagttgaaaaattacagcaatattatatttttattccctctaaattcaaggatacctacctggtttatattctaaatgaattggctggaaactcctttatgatattctgcagcacctgtaataatacccagagaacagctttgctactgcgaaatcttggcttcactgccatccccctccatggacaaatgagtcagagtaagcgcctaggatcccttaataagtttaaggccaaggcccgttccattcttctagcaactgacgttgccagccgaggtttggacatacctcatgtagatgtggttgtcaactttgacattcctaaccaattccaagggattacatccatcgagtagggtcgaacangctagagctggggcgctccggaaagggctattactttttgtcacacagtattgatgtggaactcttccagcgcatagaacacttaattngggaagaaactaccaggttttccaacacaggatgatgaggttatgatgctgacagaaacgcgtcgctgaagcccaaaggttttgcccgaaatggagttaagggagcatggagaaaagaagaaacgctcgcgagaggatgctggagataatgatgacaccagagggtgctattggtgtcaggaaccaaggtggctggaggaaaaatgaagaagcggaaaggcccgttaatcacttttatgaaggctcgagttctgctgttctgtaaaagagaattggagaatgaaacctgctccaaccagagatcatgagactgaaaattggtcagaattgtgtcccagaatgtgctcagctaattcagtattcttccccattctgggttggagtttactgcagagtaattcttacagtgctgatgtcaagactgttactgttcttcgactttgattccttgctcatgacatgagtagggtgtgctcttctgtcacttcacacagaccttttgccttttttagctgcaagtcaaggactaggttgatgatgcccatgacctgtaattgtaaagaagcttggacatctgcaaatgatatttaaaccatcttggcttgtgctttattcaaactaatgtgaaacaataaatttaaatattatttttaaaagattct

SEQ ID NO: 250904 - DNA, 2302 bp, Homo Sapiens
  misc_feature (177)..(203): n is a, c, g, or t
  misc_feature (388)..(396): n is a, c, g, or t
  misc_feature (398)..(398): n is a, c, g, or t
  misc_feature (993)..(1071): n is a, c, g, or t
aattccaacgcaaaaagtttctgcttgattaaggctcagttatcacctgaacagaatgtacttctatatgtacgtgctaattatgaaaatcacagcgcattcacagtgtacggtacacagccccacacaggcaaacagctcccacatgtttcgtaagtgagacaagccagtgcaagnnnnnnnnnnnnnnnnnnnnnnnnnnngtcttttgcttaccttcttgcttaatggaattgttatggctaagcacatagaaggccaaaaaaggagttttccaaacccagcaaatcaagtgcttggattctgaactgccaaaagaaaactgcacttcccctcttaagtaaaacgaaatgagtttcttaggtaaatgtattcatcagcccagatnnnnnnnnncnccagttatgtgagcgttagtcactgctcatttccaggaagatcaaacaaaataccagcccagccagactcacatgtgtgtatatatatataaagcaaagagccacacccacaagccagcagctgggtgaaatatcagctgtccacgccgtggtatgccaattcggggaaattactccttggaaaaactggaagaatctacttgctggaaaaaatagcttcatctgcataaaaagtgttctacaaaagaatccctgtggttagcttactcttaggttagatcttctaataaggctgaaattcaaaatcaaaaccttagtgtgtccgagtccagcctgggttccagcattctgttcaggccacttctgaacggccgaaggtgccccattccagacctgcccatttgatggacagagcagacagcccggaacagattcaagcaagaaagtcctccgcacatcgttaaattaaagataaagcctctataaaagttaggttatggttttcatttttacctcctttatggccattttgaaatatttcttcacaggctgtggaattttctagctaaacattctagtttctccttaaaaaaannnnnnnnnnnnnnnnnnnnnnnnnnnnnnnnnnnnnnnnnnnnnnnnnnnnnnnnnnnnnnnnnnnnnnnnnnnnnnngaattctgcccacttttttaaaaaagtagtatactttctgtattaccaacagatagctagacagatatgtgaaacttgtgccttttaagcaaatacattaacattgggggttttttaatacttctgtatctttaatatgtgtgaaaatgttacatattaaatacagccggtgtgtgatctatacaattgttgtgcaaggtctatatgaaagtctcaaggtggcagaattgctcagatttctccattttcctgttttccattttaacactgacagtcaagttgcctaaagtgttgaacaaatactgacatgtaaagggagtttcactctatgtctttgtgaaggaggaccttaaagagattttttttctgtattatacgttgatacagtacactgccaggtgaaacaagagccttaataaagcatgcatcgcccacacccctgtatgagacccccacagaagggatcgcttgcgtaaggcaccattatgaaggtcaacagtgcattaacagctagaaaaccagaaattagtcctcaaggcataaataagagaaacatagctgcatgagaaaacagtttctaagcgttagtggttttatccacccaactgagaaaaattttaggttcttaagtctaatgaaacattagaccagcaattcccagccccagctttgtgacactcaatacgtgtccaatttcttctaagggcatcacagaattctccaaaaagttaattcaaattcagaatcatttaaaaataatcctgtgttgcacaatgcctttctggaaggggagtgttacaaacttggaggggaaaaaaaattgtatattgccaggcccggatggctagggggtcactgtattagacagattggatcttagctgctcattaactggaatcagtattgcagtcctgacttaaaaatggaaaagcatatagttccccagaccatgcatgactttttgtattctaaggaaaagttaaattgttgtgttatatttgtaaatacacagcttatacaatgggttacaaatgagctatgttgtagcgtgtaaaacaagctacttgacacattgcacatttaatagctgcaccagacactaagagttcctctcacacagaaaagggggagagaggctctccctccccacaccactcgccactctggggtcctgagttcccacgcccaccctccaagattttccttctttttgtgtttgtgtttttgtgtt

SEQ ID NO: 250905 - DNA, 374 bp, Homo Sapiens
ggaactcaggaccccagagtggcgagtggtgtgtggagggagagcctctctcccccttttctgtgtgagaggaactcttagtgtctggtgcagctattaaatgtgcaatgtgtcaagtagcttgttttacacgctacaacatagctcatttgtaacccattgtataagctgtgtatttacaaatataacacaacaatttaacttttccttagaatacatgcaatactgattccaggtaatgagcagctaagatccaatctgtctaatacagtgaccccctagccatacgggcctggcaatatacaattttttttcccctccaagtttgtaacacttcccttccagaaaggcattgtgcaacacaggattattct

SEQ ID NO: 250906 - DNA, 462 bp, Homo Sapiens
agaacagagcgagactctgtctcaaaaacaaaaaacagttctaatacatctgtgctgatgttaacatttaatacttacctttttttgagatgagtttcattgagaatatcaaaagctatctccaagtgaacattagtagccatcaaccaattttgcacaaaagcctatgttgtctatgaccaccagaaaataagcagcatctatagttttttaaccactttataacaaagtagagaagcttatctttcagatgctagatccatcccccaccgtcatttaccaagttacatacacaaatgccttattctccccttttgctttcccctgaagacttttacaattaacaataaaagatggctaataccattagattgccttttaagaacttttaatttgctaacacattaacacaagagtcaaaatcttatcttacttaacaatttaaagattaactgatagacc

SEQ ID NO: 250907 - DNA, 782 bp, Homo Sapiens
  misc_feature (37)..(37): n is a, c, g, or t
  misc_feature (64)..(64): n is a, c, g, or t
  misc_feature (81)..(81): n is a, c, g, or t
  misc_feature (92)..(92): n is a, c, g, or t
  misc_feature (97)..(97): n is a, c, g, or t
  misc_feature (272)..(272): n is a, c, g, or t
  misc_feature (274)..(274): n is a, c, g, or t
  misc_feature (347)..(347): n is a, c, g, or t
  misc_feature (688)..(688): n is a, c, g, or t
  misc_feature (701)..(701): n is a, c, g, or t
  misc_feature (719)..(719): n is a, c, g, or t
ctataaaataatggagctatgccataatttttcatanactagtttttatacctgaggttgcaanactagtgactcaacggnattcctgcatntgttngccacaaattgtggtggtctttttaactgaatctgaatacattaagacagaacatggacacctcaatctccaatcctagcactccctaatgccatgccttacacctggctctattcacatgtacatgcaccttcctggtttctctgtatatgaactgaattactaataagtttantntaaaactgactcagtacctgaaaatctgttcaatcatgaaaatttaacttgattaagaaaggcagggtcctanaaattataaaataccctcattcgtaattttgtaatcacaatttattttattaacaaggcccaaatgaggcacagatattcacactgaatgaagtgtaacaccgaatccacgtcttttattcctagaaaagaagacttttcagtctacttatttaacctggtcagaactgtgtcatcgtcttgcttcacgccccacatagtagcagcaaagtaaaaaagctaaggaggcaacagaatgtcatggcagtcagatgtgatagctttaaaaggatatgaaaagcaagacagaccctaaaaaatgatggaagtagtctaaaagccacaataatgtatgcttttggngtaaactatttantgtaagaataaatggttntaattacaaacaaaaatatgtttttttgtttatgaaggcagacaaaaattttgcaggcttttt

SEQ ID NO: 250908 - DNA, 611 bp, Homo Sapiens
  misc_feature (29)..(29): n is a, c, g, or t
agggcgaataggatataaaaccttgttanaaagaggctggtactggtccggaattccgggatatcgtcgaccacgcgtcgctgtcattgactgcccagagtccttcaggggcacccctctgccttggtgtgcggtccaggctctcaccaggtgccgcaccctactggggtcttctgtccagctcccttgccccatgtgctgtcactgactctccttgggactacgctctgacgtgctcagagccctggcagggacttaggtcagcgtgcctgttcagtgtcaacacttccctgcacatcttaaaactgggctttatttatcgctgaaggaactgtgttgggacccttgacatctgtcaggtttgcacatgctgtttttttatctcagcccacgtgttctcccccacgtggggtagcagcaggacagacagtgaatcacagagtctgccctgagcagaggctgctgtccctgggactcctagccatggtcagactgtacaaaacggttttccagaaatgaaatgtaaatccatttttatactgaaaatgttactgaaagtcacttttatgagcatctgccttaataaacagacattgattcccttaaaaaaa

SEQ ID NO: 250909 - DNA, 624 bp, Homo Sapiens
  misc_feature (108)..(134): n is a, c, g, or t
  misc_feature (459)..(459): n is a, c, g, or t
  misc_feature (564)..(564): n is a, c, g, or t
ttgttatagtagctgccctatagttacaaaaataaaaactataaaaacccatcccctatctacttaatccagatagcctggatttaacaaaaccaatagtataaaaannnnnnnnnnnnnnnnnnnnnnnnnnnagagagagagtacttgattcattaaaaagtcctggaaacagctgttctaggatcttgtcatttttactgaaagtctcgtgcacatgtgaagtgccctctgagtttaaggtttggttaatactggtatatttttataagattgaaattgtgtccccatctttaacttaaacattttcattatcagggtcaatgtgctagaactgaattgtaacatttttaggcacagatggaaaaaaatgttattggctccttgaaaatgtgtgtgtgtggcgaggggaatagatccacaaaagcatgtatgtacttacaaaccaagctgtagagntcaagaaaagaacttaagtgttgatctcaagatttctaaattgtcaagatttacatggcattgtggtggaactagttaacacttagagcttttggtatgtaatanctatttgctatggactgattaaatgtttcaaaagattgtgttcttcaattttggtgggtt

SEQ ID NO: 250910 - DNA, 1847 bp, Homo Sapiens
  misc_feature (45)..(46): n is a, c, g, or t
  misc_feature (66)..(66): n is a, c, g, or t
  misc_feature (229)..(229): n is a, c, g, or t
tctccatctggctctcctctacctccaggcaggctcacccgagannaccgccccgaaacccccctngcacactcggcccagcgctgttgcccccggagcggacgtttctgcagctattctgagcacaccttgacgtcggctgagggagcgggacagggtcagcggcgaaggaggcaggccccgcgcggggatctcggaagccctgcggtgcatcatgaagttccagtanaaggaggaccatccctttgagtatcggaaaaaagaaggagaaaaaatccggaagaaatatccggacagggtccccgtgattgtagagaaggctccaaaaaccagggtgcctgatctggacaagaggaagtacctagtgccctctgaccttactgttggccagttctacttcttaatccggaagagaatccacctgagacctgaggacgccttattcttctttgtcaacaacaccatccctcccaccagtgctaccatgggccaactgtatgaggacaatcatgaggaagactattttctgtatgtggcctacagtgatgagagtgtctatgggaaatgagtggttggaagcccagcagatgggagcacctggacttgggggtaggggaggggtgtgtgtgcgcgacatggggaaagagggtggctcccaccgcaaggagacagaaggtgaagacatctagaaacattacaccacacacaccgtcatcacattttcacatgctcaattgatattttttgctgcttcctcggcccagggagaaagcatgtcaggacagagctgttggattggctttgatagaggaatggggatgatgtaagtttacagcattcctggggtttaattgttgtgcagtttcatagatgggtcaggaggtggacaagttggggccagagatgatggcagtccagcagcaactccctgtgctcccttctctttgggcagagattctatttttgacatttgcacaagacaggtagggaaaggggacttgtggtagtggaccatacctggggaccaaaagagacccactgtaattgatgcattgtggcccctgatcttccctgtctcacacttcttttctcccatcccggttgcaatctcactcagacatcacagtaccaccccaggggtggcagtagacaacaacccagaaatttagacagggatctcttacctttggaaaataggggttaggcatgaaggtggttgtgattaagaagatggttttgttattaaatagcattaaactggaattgacaagagtgttgagcatccctgtctaacctgctctttctctttggtgccccttatctcaccccttccttggaatttaataagtctcaggcatttccaattgtagactaaaaccactcttagcatctcctctagtattttccatgtatcaggacagaggtgtcttatgtagggagggggcaagtatgaagtaaggtaattatatactactctcattcaggattcttgctcccatgctgctgtcccttcaggctcacatgcacaggaatgctacatgatggccagctgcttccctccttggttatcatccactgcagctgctagttagaaaggtttggagggatgacttttagtaaatcatggggattttattgatttattttcacttttgggattttgtggggtgggagtggggagcaggaattgcactcagacatgacatttcaattcatctctgctaatgaaaagggttctttctcttgggggaaatgtgtgtgtcagttctgtcagctgcaagttcttgtataatgaagtcaatccatcaggccaaggaaataaaataattgcttaccttaaaaatcct

SEQ ID NO: 250911 - DNA, 389 bp, Homo Sapiens
ggcacgagcctactgttggccagttctacttcttaatccggaagagaatccacctgagacctgaggacgccttattcttctttgtcaacaacaccatccctcccaccagtgctaccatgggccaactgtatgaggtaatggttctggttgcacaatactggatgccgtccagtgcagtctggcatcctctagcccttgttctagatgcgttgataacacatctgagaagtggggcagaaggtgttatttatccggatcctcttacatatggcagtgtaaggctctgagagattagataccacttgttttttagggattagccactctactagatttaatccttctgaaatcttgtctgactatagtcttgtctgactatagtgttttaa

SEQ ID NO: 250912 - DNA, 447 bp, Homo Sapiens
  misc_feature (52)..(52): n is a, c, g, or t
  misc_feature (66)..(66): n is a, c, g, or t
acaaaggtgcccttatgtagggagggggccaagtatgaaagtagggtaaatnatatacctactccncattccaggattccttggctccccatgcctgctgtccccttcaggcctcacatgccacaggaatgcctacatgatggcccagctgccttcccctccttggttatcatcccactgcagcctgcctagttagaaaggtttggagggatgacttttagtaaatcatggggattttattgatttattttcacttttgggattttgtggggtgggagtggggagcaggaattgcactcagacatgacatttcaattcatctctgctaatgaaaagggttctttctcttgggggaaatgtgtgtgtcagttctgtcagctgcaagttcttgtataatgaagtcaatgccatcaggccaaggaaataaaataattgcttaccttaaaa

SEQ ID NO: 250913 - DNA, 937 bp, Homo Sapiens
  misc_feature (24)..(24): n is a, c, g, or t
  misc_feature (29)..(29): n is a, c, g, or t
  misc_feature (39)..(39): n is a, c, g, or t
ctgccttgggaatatgtgggggancgacnaagatgcacnggcaatcccaacagcaaattaaaactgtgactggggagcataaaaacatacctgtgtaaacttcctcctacccatggaatcagtaaatgcataagttgggatgaggtgaaacaacaccctctggggaacctttcatgacaatttaacagcagacataaggcaacttaaaaatacaattttagaatcccttcaaactgtagatctacacacccaacaaacagccatatggaagggtgtgtgagattatctctcctggatagaccaccgctcctgggggcggggggtggtgggtcactccttgattagaaaagaatgttgctaattatactcatgtttgtcttatgttatttactaattttaggatgaaagccggaataagagcaatgaccaccatgcctgacagacccttgctgcgcacacctgtactctccaatgaacaagactgaatgcaaaaaaaacagaaaatggggagatttaggggatcagtcagtgtggttggaaaattgtaagatgaagttacaggatatagacacaaaccttcttggaaggccagaaggtttgcatagcttcagtaaaggatttggctgaaatcctttttacctctaatcccctttaccttgagttgatagcaatagagcaaataacatgggaatgtgggggagtttatctgaatagcttgtttactcatgtggtcctaagaccaacctttgattatccgcaggtgcatgattgctctctacctgggggcagggggagttaattacccacaggtgtgttgactcaaagcctttgtcattaagtctgtgctgaataaatgccatgagggccagccagttaaggcctgtggcccccacaactctttctgtgcatggcccggcccttagctgctctgtcactg

SEQ ID NO: 250914 - DNA, 784 bp, Homo Sapiens
ggaaagtgagggagtctgacccttgcaggtctaaaattatttgtctctggtcataaacatatctcgaacttcagactcatttttggttcttatttcttctttttgtgttaatcaccaagttctgttggtccttccttctaggaaggaaattgtttttgaatctccctgttctgtctattctcacagctacacatctgctgttacatcatggttggaccataatagtagcctccaaaatggtctccttgtctctattttctaccatccttatgtgtcctgggaaatctctcaatcttttgaaaataccaattcccctacctcacttttttgaataaaaactttgaagataaaaaatagagatggtgacttcttggccttttgactaagatcaactgtaaaggatagagatgaaatatctgtgggcagttgaggctttccacaatctaaatttaccttgtcttctgtttccttgtgacattaccacctcaccttattccccactgtgtttctgcctgaaccaagaccaattggacctgtctgctcactaacaaacatgttatttactttccctccttctatttctcaaccctgcaaattcttactactcctccttgttaatcaaatcctagcaacttttttgagacttgggatgttctacgttttgccgaaagccttcccccacctaatctaacttatgctaattttctcctttctcagagcctctcctagcatttatgacctctggtatgtattttgacatgtttccttactattaaacgttatt

SEQ ID NO: 250915 - DNA, 608 bp, Homo Sapiens
tgatgactcaactattgttactccaattattttgaaggactgaccctcagggattttgcttttactggacagatcaaaacaaggagacagagctactggatctcagccttgtcaaagatgccagatgtgggagacacgccaaagctccaaaggaccccaaattacgtgaacttttggatgtggggaacatcgggcgcctggagcagcgcatgatcacagtggtgtatgggcctgacctcgtgaacatctcccatttgaatctcgtggctttccaagaagaagtggccaaggaatggacaaatgaggttttcagtttggcaacaaacctgctggcccaaaacatgtccagggatgcatttctggaaaaagcctatactaaacttaagctgcaagtcactccagaagggcgtattcctctcaaaaacatatatcgcttgtcttcagcagatcggaagcgagttgaaactgctttagaggctcgtagtcttccatcttcaagggtggaaaaagctaatgaggctgcgaaaagtgagcagagctgtggaaaggctcccccaaaacattttcaccttcattttataaagcaaaataaaatgcttgaacctgaa

SEQ ID NO: 250916 - DNA, 1343 bp, Homo Sapiens
  misc_feature (75)..(75): n is a, c, g, or t
actcactccatggcttagaaagaacacgtccaccgcggaggccgcaatgcccacctagagcaggtcgtagaagtngtccaggccctggcccagctcccagatagagaccccaacgcccagctcccgggccagctccagccgcacctgcagggacttcagggttgggtagaagacgacgtgcctcccactgcggctcttcttgtactcgaagaagtgctctgaggcctggctgtcccacaccatccggggcctgtggtccttcagtgtctggatgtacctggccccgacaacaggctcacgggcatccttggaggtcgcgtagtccataccatagaagttgagccccaggaggattttgcttcgccacttggacttcgggtccaggacctggacgcaggctcgaacccaggacaggggtgcattagggccaggctgatgcgctgtagagtagtcgtaggtcatgaggctgaaaccatccagcacgggggccagctgctcaaactccttgtgcgtgaacatgcccagctggtcggtcacgcgcttctggcttagcagctggttccagacctccaccacgaagccatcgaaatgctggttctttgccacctgggccacggtcttgctcagctcctctatctcatcctcactgtctaagacgttccggaaatcatcgtaagtacagtcctcaaacaggagccgaggcattatgtgcaggcccttggcatgcttcctgacagctcgcatccacccttggtccacgtcgtggaggcccgtgacctcaaacatctcacggccacgtctcttcagctgcagccagacgggtgagatctgtgtgaacttgctcccaaagaccttggtgacatcgtagccatggctgttccatggagtgacatagcccagtacatccccagcaaagtgtctgtcccgggcctttgccgagcagtagctgcgatgctcaagaaccacactctcagctttgaggtccgtcaccaccaaaccccggtcttgcaccggcttatctgaaaactgactcttctccagcagcgtctttgaggcggcttttttggcatctgactttgacagggtagtgtgaacagggctgcaggccagggcaagccagaggaggttgaagagtgtccgcatggtaggtgtgtcacagtagggtccaacctcggggtccagagggctggccaggctgaaacggtggctgcctcagctcccaggcacccagtctttgaccccagcccattccatgaccactggctccttctctgtcttctgggtggaaatctgcatgtcagggaggccggacggccacaaacgcacggccggaaaacgcatcc

SEQ ID NO: 250917 - DNA, 1397 bp, Homo Sapiens
acttccggcgcgctggagcgttttccggccgtgcgtttgtggccgtccggcctccctgacatgcagccctctggaccccgaggttggaccctactgtgacacacctaccatgcggacactcttcaacctcctctggcttgccctggcctgcagccctgttcacactaccctgtcaaagtcagatgccaaaaaagccgcctcaaagacgctgctggagaagagtcagttttcagataagccggtgcaagaccggggtttggtggtgacggacctcaaagctgagagtgtggttcttgagcatcgcagctactgctcggcaaaggcccgggacagacactttgctggggatgtactgggctatgtcactccatggaacagccatggctacgatgtcaccaaggtctttgggagcaagttcacacagatctcacccgtctggctgcagctgaagagacgtggccgtgagatgtttgaggtcacgggcctccacgacgtggaccaagggtggatgcgagctgtcaggaagcatgccaagggcctgcacatagtgcctcggctcctgtttgaggactggacttacgatgatttccggaacgtcttagacagtgaggatgagatagaggagctgagcaagaccgtggtccaggtggcaaagaaccagcatttcgatggcttccgtggtggaggtctggaaccagctgctaagccagaagcgcgtgggcctcatccacatgctcacccacttggccgaggctctgcaccaggcccggctgctggccctcctggtcatcccgcctgccatcacccccgggaccgaccagctgggcatgttcacgcacaaggagtttgagcagctggcccccgtgctggatggtttcagcctcatgacctacgactactctacagcgcatcagcctggccctaatgcacccctgtcctgggttcgagcctgcgtccaggtcctggacccgaagtccaagtggcgaagcaaaatcctcctggggctcaacttctatggtatggactacgcgacctccaaggatgcccgtgagcctgttgtcggggccaggtacatccagacactgaaggaccacaggccccggatggtgtgggacagccaggtctcagagcacttcttcgagtacaagaagagccgcagtgggaggcacgtcgtcttctacccaaccctgaagtccctgcaggtgcggctggagctggcccgggagctgggcgttggggtctctatctgggagctgggccagggcctggactacttctacgacctgctctaggtgggcattgcggcctccgcggtggacgtgttcttttctaagccatggagtgagtgagcaggtgtgaaatacaggcctccactccgtttgctgttcgacacaaac

SEQ ID NO: 250918 - DNA, 817 bp, Homo Sapiens
acatagggccaggtgactgcgcggtagagtagtcgtaggtcatgaggctgaaaccatccagcacggggggccagctgctcaactccctgtgcgtgaacatgcccagctggtcggtcacgcgcttctggcttagcagctggttacagacctccaccacgaagccatcgaaatgctgtttctttgccacctggaccacggtcttgctcagctcctctatctcatcctcactgtctaagacgttccggaaatcatcgtaagtccagtcctcaaacaggagccgaggcactatgtgcaggcccttggcatgcttcatgacagctcgcatccacccttggtccacgtcgtggaggcccgtgacctcaaacatctcacggccacgtctcttcagctgcagccagacgggtgaaatctgtgtgaacttgctcccaaagaccttggtgacatcgtagccatggctgttccatggagtgacatagcccagtacatccccagcaaagtgtctgtcccgggcctttgccgagcagtagctgcgatgctcaagaaccacactctcagctttgaggtccgtcaccaccaaaccccggtcttgcaccggcttatctgaaaactgactcttctccagcagcgtctttgaggcggcttttttggcatctgactttgacagggtagtgtgaacagggctgcaggccagggcaagccagaggaggttgaagagtgtccgcatggtaggtgtgtcacagtagggtccaacctcggggtccagagggctgcatgtcagggaggccggacggccacaaacgcacggccggaaaacccc

SEQ ID NO: 250919 - DNA, 379 bp, Homo Sapiens
ggaataaccagggcctgagcaacccctgcgggctgaataggatctcccttccatattacccctagtgacctagtccctttttggccctctgtggtaaaatgtagtatcactttgtaatgatgtaataagataaaatatttaaccctgatattatataacagggcagctggaatgttgggctttttgtcattaagtgtggtgattttgtcatttgattacttgttttagtataaatgttttatgcagttttatgtttctgtagtgtatttcttaagcagttaaaatttttacctgctattaagtaaaaattttaatttatgtgtttttaggcattcattgttaatgcttaaccaagatattcagagcataaaaatttggg

SEQ ID NO: 250920 - DNA, 931 bp, Homo Sapiens
tttaacttgaatgccccccaataagtaaaacttgaagcccattcctaaattgaagataaattttctccattgaaaagcatgacatgtgttccaataaaagattcttaagtgggctaaattcaaagtgcttgacatcaaaatgttctagagtgattagctactagattctgaatcagacatcacatctgactagagaccagtttctttcgaatgattcttttatgtatgtagatctgttcttctgagacagcggttggccaactatagcccaaaggccaaatttggacttctttttataaatgcagattgtctatggctgctttcccactactccagcctaaggtaaacagctgcaatagaagccaaatgagaatcgcaaagcccaaaatgtttattaacctgccctttacacaaaatcacacaaaaagtttcctgatctctgttctaagaaaaggagtgtaccttgcatttaaaaggaaatgttggtttccagggaagggaggaggccaaataattgatacggaattttcctcttttgtcttcttttttctcacttaagaatccgatactggaagactgatttagaaaagtttttaacatgacattaaatgtgaaattttaaaaattgaaaagccataaatcatctggtttaaatagttacatgagaaaatgatcactagaataacctaattagaagtgttatcttcattaaatgtcttttgtaagtggtattagaaagaatatgtttttcagatggttctttaaacatgtagtgagaacaataagcattattcacttttagtaagtcttctgtaatccatgatataaaataattttaaaatgattttttaatgtatttgagtaaagatgagtagtattaagaaaaacacacatttcttcacaaaatgtgctaaggggcgtgtaaagaatc

SEQ ID NO: 250921 - DNA, 1691 bp, Homo Sapiens
  misc_feature (1674)..(1674): n is a, c, g, or t
cctgggtggcgaattcggcacgaggcatgcaagtaccacacactgtttgaattttgcacaaaaagtgactgtaggatcaggtgatagccccggaatgtacagtgtcttggtgcaccaagatgccttctaaaggctgacataccttggaccctaatggggcagagagtatagccctagcccagtggtgacatgaccactccctttgggaggcctgaggtagaggggagtggtatgtgttttctcagtggaagcagcacatgagtgggtgacaggatgttagataaaggctctagttagggtgtcattgtcatttgagagactgacacactcctagcagctggtaaaggggtgctggaggccatggaggagctctagaaacattagcatgggctgatctgattacttcctggcatcccgctcacttttatgggaagtcttattagagggatgggacagttttccatatccttgctgtggagctctggaacactctctaaatttccctctattaaaaatcactgccctaactacacttcctccttgagggaatagaaatggacctttctctgacatagttcttggcatgggagccagccacaaatgagattctgacgtgtccaggtttctcctgagctcatctacatagattggtagacccttcctttggattaggaaagatgagttttacctctggtacactgtcttggtaagcctggatgtgacagacacctcggctctccttgaataagaaagccagcagaactcttaaagccagttgtagtacggagttgtcagcactcactgaacctcactttacagggataagagtggtgtggcattttaaatacaatggtatgttattgccagggagtgaggtacaagacgatggctcatgtcacaggcctacctgatacggtgtcagagaaagtggtggggaaaggatctggttcatggaattctgatcttggcccataggtgaaccaccaaaatagtgctcgagtcttaggttactgtcatcaaagacttgggatgactccattatatcctggggttgtgggtattagaactaaatatggaggtcctgagcatggggactggcgtcctcagtaggtgtttgggaatatgggaagggtctcctatttattcaatagagttttctcagttattttcctcctttgcccttgcaatctccagcaaaaggtgggatctaggaagaaagaatccagtgtagaagttgagaagaacttgaacgttttggttctggataaggtcactgtcctaggtgctaggtggaccgagcaaaagactcagtggatgaactggtgcagtgcctgacagaataaagaacagtattaatccctttgagaaagcatagtccagcaggacagtggccatttggacagaagcccacttagtttcttgggagcaacagcacgtatcagaagccagacttgctcttcggtcatgcactttgggatacagcgtataggtgcagccctgtcacaacaccaacagaagtagcagcctctgggtgcagtcacccacaccccaaagctggaaggatctggttcaacatagcacaaacccttagggaaaaatggaaattaacatcactggatgtgtaaatccagtaaaatctcccttttttcgggtgtgtatgttgggcatgtgccnattttccatgggtgtgt

SEQ ID NO: 250922 - DNA, 765 bp, Homo Sapiens
ggaggccgcctcagcgaaaaaaatgtccgcctgaagagacccacaagttctattcggggggaccgacagcccgccccgggaggaaggggcggccaggcccgaaagccgcctccccctcccagacccgagagctcgtgcggggcaaagtgaaccgagccgctgggcggtgcaaggggaagcccaagcccgttctcccggccaaagtgaactttaatcggggtggttggatgcggagacggggcggcaggacctgctagaagtggccgaagatgaatccccagcaacaacgcatggccgctatagggaccgacaaggagctgagcgacctactggacttcagtacgatgttttccccacctgttaatagtgggaaaactagaccaactacactgggaagcagtcaattcagtggatcaggtattgatgaaagaggaggtacaacatcttggggaacaagtggtcaaccaagtccttcctatgattcatctagaggttttacagacagccctcattacagtgatcacttgaatgacagtcgattaggagcccatgaaggcttgtccccaacacctttcatgaactcaaatctgatgggtaagttggtaattctctgcaagtagtcttctcaaagcttctttggtcagagacattttttatccctttgtctaagaggaagcaagggaaggaggaagaaaggaaagaggagatgaaagggggagaaaagatagaagtagagagatcgagtttgattaatgtgcacatgac

SEQ ID NO: 250923 - DNA, 524 bp, Homo Sapiens
ttgcacagtactttgtgatttttaatgtaaggtccacagattgtgaaacttcccactcacccattgtgtctcctttataactaccatgttttggtactcaaagttggctaaatgaatttctaatagacttcaagtgtctaccaaattgcagtccttgtgtttttcaactttgtctttttctttctcttaaactgtttacttatagccctcaacgacatgcaaaggctttcttttctgctagttcattttatttgtattttctgtgttattgtattcccttgccaaagcatcttgcagatcaaaaagtttggggaatattacagacagagatatgtttattcttaaagtcttagagtatgtattaattaggttaaaggatttataaaggtaccaatataaaaaataatcaagtattagtcttatttaaattcattaagtcttgctattccaagcaactttccaaaacaatcttcctactgttcaaacactactgataaacttcagctatagaacatagcacacat

SEQ ID NO: 250924 - DNA, 1270 bp, Homo Sapiens
gaaacacatttcagtgtaaacgactgggagtatctgagcaaattatttcttacgtgactttagagaaaacggctacctatctgaccccaaaacgacttgaggaaactgtttccacggtcctgctgcagaggggaagcacagtcgtcaagaagagagtggggtcaggatcaaaacacatttagtgtgacttagggaaagaaaacattttccctctttgaacctctctggatacagtcattttgcctctacttgaggatcaactgttcaacctcaatggcctttcaggacctcctgggtcacgctggtgacctgtggagattccagatccttcagactgtttttctctcaatctttgctgttgctacataccttcattttatgctggagaacttcactgcattcatacctggccatcgctgctgggtccacatcctggacaatgacactgtctctgacaatgacactggggccctcagccaagatgcactcttgagaatctccatcccactggactcaaacatgaggccagagaagtgtcgtcgctttgttcatcctcagtggcagctccttcacctgaatgggaccttccccaacacaagtgacgcagacatggagccctgtgtggatggctgggtgtatgacagaatctccttctcatccaccatcggtgacctgaagtgggatctggtatgtgactctcaatcactgacttcagtggctaaatttgtattcatggctggaatgatggtgggaggcatcctaggcggtcatttatcagacaggtttgggagaaggttcgtgctcagatggtgttacctccaggttgccattgttggcacctgtgcagccttggctcccaccttcctcatttactgctcactacgcttcttgtctgggattgctgcaatgagcctcataacaaatactattatgttaatagccgagtgggcaacacacagattccaggccatgggaattacattgggaatgtgcccttctggtattgcatttatgaccctggcaggcctggcttttgccattcgagactggcatatcctccagctggtggtgtctgtaccatactttgtgatctttctgacctcaagttggctgctagagtctgctcggtggctcattatcaacaataaaccagaggaaggcttaaaggaacttagaaaagctgcacacaggagtggaatgaagaatgccagagacaccctaaccctggagattttgaaatccaccatgaaaaaagaactggaggcagcac

SEQ ID NO: 250925 - DNA, 544 bp, Homo Sapiens
  misc_feature (90)..(98): n is a, c, g, or t
tctgaatttccccaccaatcagctcatgaaggcttcttaaaatttggtcacttttgtgtagcaatcatttttatgccttttccttgagannnnnnnnnctcaaaaataccaggatacagatccttttacgcatactggggttgcggaacaagtcacacacagtagttttggtctgtgctgcatccagctcctcctgcatggtggatcttacaacctctatgttcagggcttcagcattctttattccatttgtgcgtgcaacttctaagtgcctttaagccctcatctagtttattggtgattatcaaccaccgagcagattccaccagccaccttgaaagaagaaagaagacaaagaaaggtacagacgccaccacgtgcagggtttgccagtctcggaagacataagccaagcctcccaggattatctgtccaatactaagggcaccagatgacaatattactaccagggctttagagttgggccttatccactcagtaatgggcaaagaattatttgatataatgatcatggaagaatatc

SEQ ID NO: 250926 - DNA, 835 bp, Homo Sapiens
ggaagaaaaaccgccaagaagcgtagtacacagtaaacagggaaggtgggagcgaaggcagcgcaggtgtcagtaatggcaagctggagcaaacaccatctgagaataaatccgcccaaacctgtctgagacatggccacctatgatgcctcccaccagcattccagtcagaagtaggaattgaaccactgatttcagtgactgataatcacataccaggtcccacttagtcacaatggtcgaagggaagtagctttgatcatatacccagccatccacacagggttctgtgtctgcctcacttgtgctgtggatagtcccattcaggtgaagaagctgccactggggatggacaaagcgacgacacttctctggcctcagatttgagtctagtgggatagagattctcaagagggcatcttcactgaggattccagtttcattaccagatccagtattattgtccagcatgtggacccagcaacgatgaccaggaatggctgcagcaaagttctctagcagtatatgagggattaataacatgagagagggaagaataaaaaccagatgaagcatctgaaatctcccaaggcctccaacttgactcaagagctcctcaaaggccattgattgtgaacacgtgacccccaagaggaggcacaatggctttacggagataagttcaaagggagaaaatatttccttttattaattcaaattaagcttgtattgatcctcgcatcaaattctcatccatgggcccggactcaccagtgcaatacagccgtagtggaaagagcttcctcagttcttttgctatcaggaggtagatgtt

SEQ ID NO: 250927 - DNA, 437 bp, Homo Sapiens
  misc_feature (28)..(28): n is a, c, g, or t
  misc_feature (37)..(37): n is a, c, g, or t
  misc_feature (71)..(71): n is a, c, g, or t
  misc_feature (94)..(94): n is a, c, g, or t
  misc_feature (109)..(109): n is a, c, g, or t
accctgaatggggacccttcccccaaanacaaagtgnccgcagacatggaagcccctgtgtgggatggccngggtgtatgacaagaatctcccntcctcatcccaaccnatccgtgactgagtgggatctggtatgtgactcctcaatcactgacttcagtggctaaatttgtattcatggctggaatgatggtgggaggcatcctaggcggtcatttatcagacagtagccgagtgggcaacacacagattcccaggccatgggaattacattgggaatgtgcccttctggtattgcatttatgaccctggcaggcctggcttttgccattcgagactggcatatcctccagctggtggtgtctgtaccatactttgtgatctttctgacctcaagattttgaaatccaccatgaaaaaagaactggaggcagcac

SEQ ID NO: 250928 - DNA, 965 bp, Homo Sapiens
  misc_feature (477)..(477): n is a, c, g, or t
  misc_feature (495)..(503): n is a, c, g, or t
  misc_feature (525)..(766): n is a, c, g, or t
aggaaggtagttggaaaatgaacataaaaatgggaacctcagtgacagcttatgtctgggaacatgagttattccttcgtgccgactccagtataaagcatatccattttacaggtgagaaaaagggttgctggcagagctgagaatgatgtgaactctagagtggggacctatctcttgcagaatctgcattagcatagagccagactctggacctctgagtgctgtgaagttgagagaaattaatggtgaatttcaaggacagatatcattaatatccatgttgaaactctgtggggtttaagcaaaagaacaatatcttcccccatcccacaaaatctgggtttaatctatctcacattgagttctgtgcatcagctctgcttagtactctagaaatagaaccggaatcacaactgaatctattttgcagaagccccaggagactctgggcactgatgatggtaaatgactctntactctattattatatcnnnnnnnnngagacagagattcgctcttacnnnnnnnnnnnnnnnnnnnnnnnnnnnnnnnnnnnnnnnnnnnnnnnnnnnnnnnnnnnnnnnnnnnnnnnnnnnnnnnnnnnnnnnnnnnnnnnnnnnnnnnnnnnnnnnnnnnnnnnnnnnnnnnnnnnnnnnnnnnnnnnnnnnnnnnnnnnnnnnnnnnnnnnnnnnnnnnnnnnnnnnnnnnnnnnnnnnnnnnnnnnnnnnnnnnnnnnnnnnnnnnnnnnnnnnnnnnnnnnnnntgagccacaagccctggccgggtttttactttttttgagcctgaacagataactattacctgtctaatgacaatccccccctaccttaactttagatctatcccatagctttaaagggcagtatttttaataatttgtgggaaaagtttttttgggacaacctgaagccggctttagatggctatttgggttggggggc

SEQ ID NO: 250929 - DNA, 1043 bp, Homo Sapiens
ccttcttcctggagtgccttcattgaggaaggaaatctggcccttgggtttcctggttccactgctactgacccagaggggaatgagggctgagttatgaaaagataacttcatgaagacttaactggcccagaagctgattttcatgaaaatctgccactcagggtctgggatgaaggcttgtcagcacttccagtttagaacgcaatgtttctagagacatattggctgtttgttttgatgataaaaggagaataagaaaaggcatcactttcctggatccaggataatttttaaaccaatcaaatgaaaaatacatacaaacaaaaaaggaaatgtcatgtgaggttaaaccagtttgcattcccctaatgtggaaaaagtaagaggactactcagcactgtttgaagattgcctcttctacagcttctgagaattgtgttatttcacttgccaagtgaaggaccccctccccaacatgccccaccccacccctaagtacggtcccttgtcaccaggcaaccaggaaactgctacttgtggacctcaccagagaccaggagggtttggttagctcacaggacttcccccaccccagaagattagcatcccatactagactcatactcaactcaactaggctcatactcaattgatggttattagacaattccatttctttctggttattataaacagaaaatctttcctcttctcattaccagtaaaggctcttggtatctttctgttggaatgatttctatgaacttgtcttattttaatggtgggttttttttctggtaagatttggacctaaatcgcatcatgccaacttgtgactttgagactattcatcaagaatgaggatatagtagccatgacatagcttgagctatagcctttaattccttactttggctatgggtggagggtgagtttgaagaggttctgattttcttgtaacctgggaaagccatgaccttgtgcccgattctttcagattgctttgggtaataaatattggtggtggtatctgaaaaaa

SEQ ID NO: 250930 - DNA, 1124 bp, Homo Sapiens
  misc_feature (630)..(651): n is a, c, g, or t
  misc_feature (797)..(797): n is a, c, g, or t
  misc_feature (801)..(804): n is a, c, g, or t
  misc_feature (817)..(818): n is a, c, g, or t
  misc_feature (967)..(967): n is a, c, g, or t
  misc_feature (979)..(979): n is a, c, g, or t
gttgaaaatcatgctcaagtgtgaccccagtgaccagaatccctgatgttaatgggctctgccctcatccccacagtcttgggatctcagggcacaatggctggacatgggtgggctctgatgcagaactttctcttttgaatgttaagaataactaatacaattcattgtgaacagaagtccttaagcagaggaattggtgtgccttaaagatacaatctgggatagtttgggggaacttgtagccagaatgccctgttcatgctgagcaaagttcagcaagtagagcagagtttgggcaggcaggtgccaggaactccccttcttcctggagtgccttcattgaggaaggaaatctggcccttgggtttcctggttccactgctactgacccagaggggaatgagggctgagttatgaaaagataacttcatgaagacttaactggcccagaagctgattttcatgaaaatctgccactcagggtctgggatgaaggcttgtcagcacttccagtttagaacgcaatgtttctagagacatattggctgtttgttttgatgataaaaggagaataagaaaaggcatcactttcctggatccaggataatttttaaaccaatcaaatgnnnnnnnnnnnnnnnnnnnnnnggaaatgtcatgtgaggttaaaccagtttgcattcccctaatgtggaaaaagtaagaggactactcagcactgtttgaagattgcctcttctacagcttctgagaattgtgttatttcacttgccaagtgaaggaccccctccccnacannnnccaccccaccccnntaagtacggtcccttgtcaccaggcaaccaggaaactgctacttgtggacctcaccagagaacagggagggtttggttagctcacaaggacttcccccaccccagaagattagcatccccatgactagactcatactcaaactcaactnaggctcatactncaattggatgggttatttaggacaatttccattttcttttctggggtattataaaacaggaaaatcctttcctcttctccatacccagtaaaggcttcttgggaatcttttccgggtgggaatggatttctattgaacttgtcct

SEQ ID NO: 250931 - DNA, 451 bp, Homo Sapiens
tttcattccaacagaaagataccaagagcctttactggtaatgagaagaggaaagattttctgtttataataaccagaaagaaatggaattgtctaataaccatcaattgagtatgagcctagttgagttgagtatgagtctagtatgggatgctaatcttctggggtgggggaagtcctgtgagctaaccaaaccctcctgggtctctggtgaggtccacaagtagcagtttcctgggttgcctgggtgacaagggaccgtacttaggggtggggtggggcatgttggggagggggtccttcacttgggcaagtgaaataacacaattctcagaagctgtagaagaggcaatcttcaaacagtggctgagtagtccccctaactttttccacattagggggacccctgcccaattcttgggctccagggcaaaattcccccatagtgagg

SEQ ID NO: 250932 - DNA, 497 bp, Homo Sapiens
tgcccaccaggaggatgaaggtctccgtggctgccctctcctgcctcatgcttgttgctgtccttggatcccaggcccagttcacaaatgatgcagagacagagttaatgatgtcaaagcttccactggaaaatccagtagttctgaacagctttcactttgctgctgactgctgcacctcctacatctcacaaagcatcccgtgttcactcatgaaaagttattttgaaacgagcagcgagtgctccaagccaggtgtcatattcctcaccaagaaggggcggcaagtctgtgccaaacccagtggtccgggagttcaggattgcatgaaaaagctgaagccctactcaatataataataaagagacaaaagaggccagccacccacctccaacacctcctgtgagtttcttggtctgaaatacttaaaaaatatatatattgttgtgtctggtaatgaaagtaatgcatctaataaagagtattcaattttttaa

SEQ ID NO: 250933 - DNA, 378 bp, Homo Sapiens
  misc_feature (77)..(77): n is a, c, g, or t
aaacagaaaaataagaggaacaaagatgaacttgaaactgtcccctgtggatttccccgaattatccccaatagctnacaggcaagatcaaaaaaaatgtttccaaggaagagtccttccctcccaggagattaatctaatcctctaagcctgagataggagtgggggactatcttagactcttggattcaggattgggatgtggtgaatgctgccttttttccctttccagttctattcctgtagttccaaccaggaggtgttagcagtggtgaatccatatcagtctgcagcagcctcagttcttgcctcctcagaagaaataattcaactgaggggtataaggcagagtgagagaccgagacaagatagagcagg

SEQ ID NO: 250934 - DNA, 961 bp, Homo Sapiens
  misc_feature (265)..(273): n is a, c, g, or t
  misc_feature (876)..(876): n is a, c, g, or t
  misc_feature (913)..(913): n is a, c, g, or t
  misc_feature (926)..(926): n is a, c, g, or t
  misc_feature (946)..(946): n is a, c, g, or t
tctcggtctctcactctgccttatacccctcagttgaattatttcttctgaggaggcaagaactgaggctgctgcagactgatatggattcaccactgctaacacctcctggttggaactacaggaatagaactggaaagggaaaaaaggcagcattcaccacatcccaatcctgaatccaagagtctaagatagtcccccactcctatctcaggcttagaggattagattaatctcctggagggaagactcttccttgaaacannnnnnnnnatctgcctgtagctattgggataattcgggaaatccacagggacagttcaagtcatctttgtcctctactttctgttgcactctcagccttgttctctttttaggaaactgcatggtaactattatatagctaaagaagagcattctgacctctgccctgggacttcctggatcctcctcttcttataaatacaagggcagagctggtatcccggggagccaggaagcagtgagcccaggagtcctcggccagccctgcctgcccaccaggaggatgaaggtctccgtggctgccctctcctgcctcatgcttgttgctgtccttggatcccaggcccagttcacaaatgatgcagagacagagttaatgatgtcaaagcttccactggaaaatccagtagttctgaacagctttcactttgctgctgactgctgcacctcctacatctcacaaagcatcccgtgttcactcatgaaaagttattttgaaacgagcagcgagtgctccaagccagggtgtcatattcctcaccaagaaggggcggcaagtctgtgccaaacccagtgggtccgggagttcaggattggcatggaaaaagctgnaagccctaattcaatattattaattaaaggaggacanaagagggccagcncacccacctccaacacttcntgaggctttggaagg

SEQ ID NO: 250935 - DNA, 509 bp, Homo Sapiens
  misc_feature (17)..(17): n is a, c, g, or t
  misc_feature (27)..(27): n is a, c, g, or t
  misc_feature (32)..(32): n is a, c, g, or t
  misc_feature (63)..(63): n is a, c, g, or t
  misc_feature (111)..(111): n is a, c, g, or t
actgtcaactgggttgntaacaaacgnaaagncccccttttggtgaatgaaaaacaaatcccnggccttggaaccactggcctgttggtcctccataagtaaatcccaatnaaacccgaacgcgggaatcttgttaggtagtgtaggtgaaagcagcactctgaggggtggtaaggtccccgtgaggaggattcagtcttggtccctagggcgatggtgatgaggaggaagaagggaatggcagccacggagatcttcatgctgtgggaagctgttgtgggaggagagctggcctggtgggagcttcagaggctcaggaggtgttggaggtgggtggctggcctcttttgtctctttattattatattgagtagggcttcagctttttcatgcaatcctgaactcccggaccactgggtttggcacagacttgccgccccttcttggtgaggaatatgacacctggcttggagcactcgctgctcgtttcaaaataacctgtgccgaat

SEQ ID NO: 250936 - DNA, 457 bp, Homo Sapiens
ctcctcccacaacagcttcccacagcatgaagatctccgtggctgccattcccttcttcctcctcatcaccatcgccctagggaccaagactgaatcctcctcacggggaccttaccacccctcagagtgctgcttcacctacactacctacaagatcccgcgtcagcggattatggattactatgagaccaacagccagtgctccaagcccggaattgtcttcatcaccaaaaggggccattccgtctgtaccaaccccagtgacaagtgggtccaggactatatcaaggacatgaaggagaactgagtgacccagaaggggtggcgaaggcacagctcagagacataaagagaagatgccaaggccccctcctccacccaccgctaactctcagccccagtcaccctcttggagcttccctgctttgaattaaagaccactcatgctcttcaaaa

SEQ ID NO: 250937 - DNA, 365 bp, Homo Sapiens
ggggatggggagagaagagggatagggccagcaaggcagggatcgaacgagtgtctggcagccgggagcccagcgaagagagcgagcaagcttaggaaaacgagcgaacatggtggctgtatggacagtctgacagaacagagactgacatctcccaatctgccggccccccacctggaacactacagtgttctgcattgcaccatgaccctggatgtgcaaactgtagtcgtttttgccgtgattgtagtcctcctgcttgtcaatgtcatactcatgtttttcctgggaacgcgctgaatggagtccagccacctgagctgtcgcgaactctcgctttgatttcatcccgagagccaccaaaa

SEQ ID NO: 250938 - DNA, 1146 bp, Homo Sapiens
  misc_feature (580)..(582): n is a, c, g, or t
  misc_feature (584)..(586): n is a, c, g, or t
  misc_feature (590)..(631): n is a, c, g, or t
  misc_feature (637)..(641): n is a, c, g, or t
  misc_feature (654)..(654): n is a, c, g, or t
  misc_feature (674)..(674): n is a, c, g, or t
  misc_feature (695)..(706): n is a, c, g, or t
  misc_feature (722)..(753): n is a, c, g, or t
  misc_feature (777)..(829): n is a, c, g, or t
  misc_feature (1060)..(1099): n is a, c, g, or t
acagaaaacagtgctagcctctgttttttcagtgttgtctgccatctatgcctcacagactgagcaagagtatctaaagatagaaaaagtagatcttcctctaattgacagcctcattcgggtcttacaaaatatggaacagtgtcagaaaaaaccagagaactcggcagagtctaacacagaggaaactaaaaggactgatttaacccaagatgatttccacttgaaaatcttaaaggatattttatgtgaatttctttctaatatttttcaggcattaacaaaggagacggtggctcagggagtaaaggaaggccagttgagcaaacagaagtgttcctctgcatttcaaaaccttcttcctttctatagccctgtggtggaagattttattaaaatcctacgtgaagttgataaggcgcttgctgatgacttggaaaaaaacttcccaagtttgaagggtcagacttaaaacctgaattggaattacttctgtacaagaaataaactttatttttctcactgacagttgaaattgacttattggaaatattaactaaagcccatattagaccataannnannnaaannnnnnnnnnnnnnnnnnnnnnnnnnnnnnnnnnnnnnnnnntttttnnnnnccccccacaccancccaaaaaatacccccccanactccctttcgcccattgtgnnnnnnnnnnnnaacctaacaacaggannnnnnnnnnnnnnnnnnnnnnnnnnnnnnnngggccggcgcccacaagcgttgtnnnnnnnnnnnnnnnnnnnnnnnnnnnnnnnnnnnnnnnnnnnnnnnnnnnnntagaagaaattccactcccgccccctaataaagaagctttcccgggccccatacccagggggggtttttcaaaaaaccccccgctggggtgtttttttgtaaagggccgcgccctcggggccctttcccccccaaggcaaccgcagggggaccctccccacaaaaccatattggcgccccccggcgatggcccctttcttacacggccgctcggtttagtaattttatctnnnnnnnnnnnnnnnnnnnnnnnnnnnnnnnnnnnnnnnnaagggggaattattttgaacccccggaccgggaaaacggggtgggtc

SEQ ID NO: 250939 - DNA, 960 bp, Homo Sapiens
actaacaaatgcaaatcatgagcaagaatgccattacttttcaatatatttaaggttcttaagtcaaacaatactacccagtgttctctcccaaataatcactattggtccatgtgtagtaaactgggaaaatatcattcttcatttttatccaagttggccatcaatgaatttcactgttagttcctcagacttaaccaatggtgaaggaacacagattccaccataatagtaaaatgcaaaccaaccaacccagacactaacaatgtcagagggcttagaaaatgccaataaagtacttcacctttttacaaacacagcacacattactgaagctgtgccagattgctaccttatagaccattacatcatttagaattaatgggtgggttccaagtaatcaaccattaagacagtttactcacatgtacctcctctgaggttattttgataaaaattaaaacataaacataaacattctcataacggattgtatgcctcttaaagaacctaaccatcaaagtttccatctaattagccagtctagatttataatagtgttcaatttgcttcaaataggaatagttcaaattagtttcagcgaagacctaccttgtttgggctacaaatttctgcctcaatatgactactacttccgcttagtaaaataaagacattttcccctgagaatacatgagactaactgaacagatttaaagagagatgattcagatttctcaaactaatttagttccaaactattattttccagagttaagaaaatgaaaagcttttcaagactaaaatattatgcaaaaatgtatagagccaagagcaagaaaaatatacttattaaaagcaattatcttactgaagaatttttttaatgttactttaaaacgtaatctattttctaacaaaaatgccaggtaaaaaaataaagatagatgttttagggct

SEQ ID NO: 250940 - DNA, 452 bp, Homo Sapiens
  misc_feature (134)..(134): n is a, c, g, or t
atatcatgatcaagtagaattattccaggaaatttaaaggtgagttaacatcaggaaatcagctgggtgcagtggcttatgcccgtaaatcccagccactcaagaggctgaagtgcgaggatcacttgaggccnaggagtttgataccagcctggataacatagtaagaccccaccactaaaagtctattattacctcagttcatacagaaaaagcagttgatagagatcactacttagttatgataaaagtttttgtcaaactaagaatataagaaaagtttctgagcttgataaaggttaaatctagaataaccatataattaatcttccaaattttcacacttcagttcaggattaataatgcataaggtaatgtcagctagaacaagaataagatagggttgttttgagcaaattagcatgagaaaggagggagggagggagagatgg

SEQ ID NO: 250941 - DNA, 644 bp, Homo Sapiens
aaagagccccagcaccgcccctcctggaagaaggaagaggtgactataactacccaatattgcagccatggagtccatgcttaataaattgaagagtactgttacaaaagtaacagctgatgtcactagtgctgtaatgagaaatcctgtcactagagaatttgatgttggtcaacacattgccagtggtggcaatgggctagcttggaagatttttaatggcacaaaaaagtcaacaaagcaggaagtggcagtttttgtctttgataaaaaactgattgacaaatatcaaaaatttgaaaaggatcaaataattgattctctaaaatgaggagtccaacacttaactcgacttcaacaccctcgacttcttactgtccagcattctttagaagaatccagggattgcttggtgttgtgtacagaaccagttttttgccagtttagccagtgttcttggtaactgggaaaatctccctttccctatatctccagacattaaggattataaactttatgatgtagaaaccaaatgtggtttgcttcaggtttctaaaggattgtcattcttgcatagcagtgtgaaaatggtacatggaaatattactcctgaaaatacaattttgaataaaagtggagcctgg

SEQ ID NO: 250942 - DNA, 1651 bp, Homo Sapiens
  misc_feature (688)..(704): n is a, c, g, or t
  misc_feature (967)..(988): n is a, c, g, or t
gctgggtggcgaattcggcacgaggtggcggcggcggcatgggtgccccgacgttgccccctgcctggcagccctttctcaaggaccaccgcatctctacattcaagaactggcccttcttggagggctgcgcctgcaccccggagcggatggccgaggctggcttcatccactgccccactgagaacgagccagacttggcccagtgtttcttctgcttcaaggagctggaaggctgggagccagatgacgaccccatagaggaacataaaaagcattcgtccggttgcgctttcctttctgtcaagaagcagtttgaagaattaacccttggtgaatttttgaaactggacagagaaagagccaagaacaaaattgcaaaggaaaccaacaataagaagaaagaatttgaggaaactgcgaagaaagtgcgccgtgccatcgagcagctggctgccatggattgaggcctctggccggagctgcctggtcccagagtggctgcaccacttccagggtttattccctggtgccaccagccttcctgtgggccccttagcaatgtcttaggaaaggagatcaacattttcaaattagatgtttcaactgtgctcttgttttgtcttgaaagtggcaccagaggtgcttctgcctgtgcagcgggtgctgctggtaacagtggctgctnnnnnnnnnnnnnnnnntttttgggggctcatttttgctgttttgattcccgggcttaccaggtgagaagtgagggaggaagaaggcagtgtcccttttgctagagctgacagctttgttcgcgtgggcagagccttccacagtgaatgtgtctggacctcatgttgttgaggctgtcacagtcctgagtgtggacttggcaggtgcctgttgaatctgagctgcaggttccttatctgtcacacctgtgcctcctcaaaggacagtttttttgttgggnnnnnnnnnnnnnnnnnnnnnnggtagatgcatgacttgtgtgtgatgagagaatggagacagagtccccggctcctctactgtttaacaacatggctttcttattttgtttgaattgttaattcacagaatagcacaaactacaattaaaactaagcacaaagccattctaagtcattggggaaacggggtgaacttcaggtggatgaggagacagaatagagtgataggaagcgtctggcagatactccttttgccactgctgtgtgattagacaggcccagtgagccgcggggcacatgctggccgctcctccctcagaaaaaggcagtggcctaaatcctttttaaatgacttggctcgatgctgtgggggactggctgggctgctgcaggccgtgtgtctgtcagcccaaccttcacatctgtcacgttctccacacgggggagagacgcagtccgcccaggtccccgctttctttggaggcagcagctcccgcagggctgaagtctggcgtaagatgatggatttgattcgccctcctccctgtcatagagctgcagggtggattgttacagcttcgctggaaacctctggaggtcatctcggctgttcctgagaaataaaaagcctgtcatttcaaacactgctgtggaccctactgggtttttaaaatattgtcagt

SEQ ID NO: 250943 - DNA, 642 bp, Homo Sapiens
  misc_feature (278)..(346): n is a, c, g, or t
attaaccgccagatttgaatcgccggacccgttggcagaggtggcggcggcggcatgggtgccccgacgttgccccctgcctggcagccctttctcaaggaccaccgcatctctacattcaagaactggcccttcttggagggctgcgcctgcaccccggagcggatggccgaggctggcttcatccactgccccactgagaacgagccagacttggcccagtgtttcttctgcttcaaggagctggaaggctgggagccagatgacgaccccattgnnnnnnnnnnnnnnnnnnnnnnnnnnnnnnnnnnnnnnnnnnnnnnnnnnnnnnnnnnnnnnnnnnnnnaggaacataaaaagcattcgtccggttgcgctttcctttctgtcaagaagcagtttgaagaattaacccttggtgaatttttgaaactggacagagaaagagccaagaacaaaattgcaaaggaaaccaacaataagaagaaagaatttgaggaaactgcggagaaagtgcgccgtgccatcgagcagctggctgccatggattgaggcctctggccggagctgcctggtcccagagtggctgcaccacttccagggtttattccctggtgccaccagccttcctgtgggcccctt

SEQ ID NO: 250944 - DNA, 932 bp, Homo Sapiens
  misc_feature (727)..(743): n is a, c, g, or t
  misc_feature (797)..(797): n is a, c, g, or t
ggggacatgccccgcggcgcgccattaaccgccagatttgaatcgccggacccgttggcagaggtggcggcggcggcatgggtgccccgacgttgccccctgcctggcagccctttctcaaggaccaccgcatctctacattcaagaactggcccttcttggagggctgcgcctgcaccccggagcggatggccgaggctggcttcatccactgccccactgagaacgagccagacttggcccagtgtttcttctgcttcaaggagctggaaggctgggagccagatgacgaccccatagaggaacataaaaagcattcgtccggttgcgctttcctttctgtcaagaagcagtttgaagaattaacccttggtgaatttttgaaactggacagagaaagagccaagaacaaaattgcaaaggaaaccaacaataagaagaaagaatttgaggaaactgcgaagaaagtgcgccgtgccatcgagcagctggctgccatggattgaggcctctggccggagctgcctggtcccagagtggctgcaccacttccagggtttattccctggtgccaccagccttcctgtgggccccttagcaatgtcttaggaaaggagatcaacattttcaaattagatgtttcaactgtgctcttgttttgtcttgaaagtggcaccagaggtgcttctgcctgtgcagcgggtgctgctggtaacagtggctgctnnnnnnnnnnnnnnnnntttttgggggctcatttttgctgttttgattcccggggcttacccagtgaaaantgaggggagaagaaaggcaagtgtcccttttgctaaagctgacagctttgttcccgtgggcagagcctttcccagtggaatgggcctggacctcatgttgttgaggctgccacaggtcctggatgggggacttgg

SEQ ID NO: 250945 - DNA, 673 bp, Homo Sapiens
  misc_feature (68)..(68): n is a, c, g, or t
  misc_feature (73)..(73): n is a, c, g, or t
aaactgaaaaaacctgagtaagaacctacaaccccgccaaagaagaagcagcaaaagtttttctttanacganccaccattgttcattccagataacatagctaccataagaagagaaggctctgatcatagctcctcatttgaaagcaaatatatgtggactcccagcaagcagtgtgggttttgcaaaaaaccacatggcaacaggtttatggttggctgtgggagatgtgatgactggtttcatggtgattgtgttgggttaagtctttctcaagcacagcagatgggcgaggaagacaaagaatatgtctgtgtaaaatgttgtgctgaagaagacaaaaagactgaaatactagatccagatactttggaaaaccaagctacagttgaattccatagtggagataaaacaatggagtgtgaaaagcttggattatcaaaacacacaacaaatgatagaaccaaatatatagatgatacagtgaagcacaaggtcaaaattttaaaacgggagtctggtgaaggcagaaattcatcagactgtagagataatgaaattaaaaaatggcagctagctcctcttcgtaagatgggacaaccagttttacctcggagatcctcagaagaaaaaagtgaaaaaataccgaaagagtctaccactgttacttgc

SEQ ID NO: 250946 - DNA, 1200 bp, Homo Sapiens
  misc_feature (160)..(168): n is a, c, g, or t
  misc_feature (377)..(377): n is a, c, g, or t
  misc_feature (417)..(417): n is a, c, g, or t
  misc_feature (428)..(428): n is a, c, g, or t
  misc_feature (569)..(569): n is a, c, g, or t
  misc_feature (1163)..(1163): n is a, c, g, or t
  misc_feature (1179)..(1179): n is a, c, g, or t
ttcaggaaaccaaggggcctgtttggtgggaaatttcccctcccgggcccttggccccattctgttttagagcgcagtttgatttttggccaccaggagtctttaaagtttccattccctcccttcccaaaaagagtttttgtgtaatcccttttggggnnnnnnnnngggaagttttttggatatgcaaagcactttttcccagtttgacaaagttggtaaaaatcgatgacaccttaaaataaaaaactgaagtgacctgatgctccagaaagatgtgaaatggccacagtgcatgtggtgatgtctccatgctgagtttcaggcagcacagcactaagtatcaggtgacctgtggtcccaccagagcatagtcntcatgaaataggcctaaccagataccttttaactcatctntattttggtgncaaagatgtggtttacttagctacttactatttgttcccatttgaagtctcagagcttgccaagttaaacaccgccttcagtaccgagctgctatacaagaacattataaaatacaaagtataaactaagataatcctctntacagaattcagattagtgcattaaaacaacattgatttaaaaagggaagtgagataactggcaaacctccaattgcttttttaatgaaggatgacacaaaatggcacgcaaggtaaacactaaattttgtcaggtgctcaaaaacagttaattgtgggaaagttactttccaaaagtaattttgacctaaaaatattaaccattattctataagacataagggaaggtaaataatggcccacaaaaccagatgatatggttaagataactagtttagtggaataacaaactggggtcttaagaatccaaacgcaataggtattggtattggttgttcatactcttcttccaaattatgttaaacatttttagtaactacactttcccccgtaaacatcagacttaaatagaccatatgtaaaaacaacctatccttagtaattttactaggcaatctacagcaaaagcttaatatatacacagaaagagtatcaaataaactagaaaagtattcaccgacttcagggtaaaaaagatcttaaaagagaaccaacaaaaaaatgaaagacactttgtgctgttgtggacccggnaaatacaccctgtatnggccttaattatttttccatt

SEQ ID NO: 250947 - DNA, 482 bp, Homo Sapiens
actgacccttagattgcaggcaatcaaccccagtcaggacttgactccttacacacacatatgtatgcacatgttcgtgtagacacacatgtactttttaacaagaaacaggcccattttcaaccatattgtcaacactcttattgtaagacccttgctttttaggcttaacttcagggttaatcataaagcaattggcttatttgcccccaagcataaacatgtgttactcccatgagaacaaggacattatttcatgcttagaaagcaggcataagtatcagtgttcaaaacagcctaagcgaaaatttaggcttggacaaatgtcaggctaggcctgtggtctatttcactgttagaaagaacttttgatgggtaaaagttaatcactggggctaagcattcctgcactcggattccttcttccagcagtctcaggacttcacaccaaatatgagaaatggagtgattactagcttcct

SEQ ID NO: 250948 - DNA, 659 bp, Homo Sapiens
  misc_feature (30)..(30): n is a, c, g, or t
  misc_feature (543)..(576): n is a, c, g, or t
actacacctgaaacactataaactcaggtnttaatattaatccaaatgtaacaatagcaaatttatgtatgcaatgctgaaattactgcccaaatatgccagcaccaatgctattagcatatagacaagctcctacaacaagctgattgatttaatggcaattttctctaaaactctgcccaaatttataattcaattgcattagcaatgaatctactgggagaaatagcctaatattagactaaacgaacaatattctacctactgctactgtgacaacattaatgtttatcctgatgtcatgaggataaagaataatctaggggaatagttgtatggggtagagggagggtgtcagccatttctttggccacatctgaaaaatgaactacggctcctgagacaagggaagaagggggaataagaaaatgacacagaaaaggcaaatagcagtgaatcacggaatgcctactaagtaataataaatgcagactagctctaacccaagactattcttccaaggtcagagtaattttgtatttnnnnnnnnnnnnnnnnnnnnnnnnnnnnnnnnnnggcatcacgggcaaactaatgtggtcagtttaaggatggagctcatttcaaaatgccaaatatagattcacctgccaaacttg

SEQ ID NO: 250949 - DNA, 606 bp, Homo Sapiens
  misc_feature (31)..(31): n is a, c, g, or t
  misc_feature (57)..(57): n is a, c, g, or t
  misc_feature (101)..(201): n is a, c, g, or t
cgcttggcttacatgatgaaacccctggctnctaactaaaaaatacaaaaaattagncggaagtgtggtggtggccacatgccctatagtcccctgctacnnnnnnnnnnnnnnnnnnnnnnnnnnnnnnnnnnnnnnnnnnnnnnnnnnnnnnnnnnnnnnnnnnnnnnnnnnnnnnnnnnnnnnnnnnnnnnnnnnnnnttctatctctaaataaataaataaataccaattcgctgagggaagtttagatgctcaaagggcatgccaacattctgaaattgttaaaagaacatccaaagcacattcgattcctttattccttattcagaagctgaagactacactgaatttgggttagaacagcaagtttaccgatcttccaaagaaatataaccttatagaaaaataatcaacaaaatagtgccaacatatggagattcctggagactgaagtttcagagtgtcagcctacacataggtagcactggtaagctctcccacttcactttttcccctgccaaaggtagttaaatacgtgcttgtcctctacttagaccaaccaaatttccatgtggtcttaggtattatctcaaaacttacttt

SEQ ID NO: 250950 - DNA, 627 bp, Homo Sapiens
  misc_feature (406)..(406): n is a, c, g, or t
  misc_feature (481)..(481): n is a, c, g, or t
  misc_feature (531)..(531): n is a, c, g, or t
  misc_feature (608)..(608): n is a, c, g, or t
tgaagtctgaagaatcgtattcaactggatttttttgcactattattatatgtctatctcatatttatatactcacactaatttcagtgtaacttgctaatttttaacgttagaaagaaaagacttatatttaaatgaagaccgttaattatattctctatccttttcttctggtttacttttatattacatatttatatattatacaaatacagtattatgtatagtacgtttatgctgttttgagcctccttgccctcatcctttgattcttgcctttttaatttcttgccagtttactatttatactgacaaaagcaacttagagtgtatacacaaaagattttataaaatcagtttatgtcctagtatttataatcccagatttaataatataaaccatagnaattttcaacttaagtgactaaggatttttgggcaaaagatatgtgatatcctttaatatccccctactttatangccacaccttccaatttgaggtaaatcctctccttcaatttttcctatangtccaatcagtgaaagtcgaagagtactacaggaatcatgtgagtttttcctaaaggcacaattctaaagttaaacnccaaaagaagcactataaa

SEQ ID NO: 250951 - DNA, 1311 bp, Homo Sapiens
  misc_feature (814)..(814): n is a, c, g, or t
aacctgatgacattaattgttggcatctctgctgtcttctgggttggaagcaaaaagacatgcacagaatgggctgggttttttaaacgaaatcgcaagagagatccaatcagtgaaagtcgaagagtactacaggaatcatgtgagtttttcttaaagcacaattctaaagttaaacacaaaaagaagcactataaaccaagttcacacaagctgaaggtcatttccaaatccatgggaaccagcacaggagctacagcaaatcatggcacttctgcagtagcaattactagccatgattacctaggacaagaaactttgacagaaatccaaacctcaccagaaacatcaatgagagaggtgaaagcggacggagctagcacccccaggttaagagaacaggactgtggtgaacctgcctcgccagcagcatccatctccagactctctggggaacaggtcgacgggaagggccaggcaggcagtgtatctgaaagtgcgcggagtgaaggaaggattagtccaaagagtgatattactgacactggcctggcacagagcaacaatttgcaggtccccagttcttcagaaccaagcagcctcaaaggttccacatctctgcttgttcacccagtttcaggagtgagaaaagagcagggaggtggttgtcattcagatacttgaagaacattttctctcgttactcagaagcaaatttgtgttacactggaagtgacctatgcactgttttgtaagaatcactgttacgttcttcttttgcacttaaagttgcattgcctactgttatactggnaaaaaatagagttcaagaataatatgactcatttcacacaaaggttaatgacaacaatatacctgaaaacagaaatgtgcaggttaataatattttttaatagtgtgggaggacagagttagaggaatcttccttttctatttatgaagattctactcttggtaagagtattttaagatgtactatgctattttacttttttgatataaaatcaagatatttctttgctgaagtatttaaatcttatccttgtatctttttatacatatttgaaaataagcttatatgtatttgaacttttttgaaatcctattcaagtatttttatcatgctattgtgatattttagcactttggtagcttttacactgaatttcctaagaaaattgtaaaatagccttcttttatactgtaaaaaaagatataccaaaaagtcctatattagggatttaacttttaaaaccccacttattgaataccttaccatctaaaatgtgg

SEQ ID NO: 250952 - DNA, 615 bp, Homo Sapiens
  misc_feature (476)..(476): n is a, c, g, or t
  misc_feature (533)..(533): n is a, c, g, or t
  misc_feature (562)..(562): n is a, c, g, or t
  misc_feature (568)..(568): n is a, c, g, or t
  misc_feature (576)..(576): n is a, c, g, or t
taaattgcatttacttaaatgtacaaggaactcttaacaattgccacagaaatgaacattcctacttgaaccaaatatattaaagctgttctcaaagctaagaattaaactactaaatagcatatttataggctgaacccaaacttccttggggtaagagtacagacataatatatcacaaaatgctttccaaatgtgttatgctttaataaaaaatgtgtaatgcagtatttaaaatagtgatgattttacataaaatcaaatctcaccttccttcactccgaggcactttcagatacactgcctgcctggcccttcccgtcgacctgttccccagagagtctggagatggatgctgctggcgaggcaggttcaccacagtcctgttctcttaacctgggggtgctagctccgtccgctttcacctctctcattgatgtttctgggtgaggtttggatttctggtcaaagtttcntggtcctaggtaatcatgggctagtaattgctactgcagaagtggccatgaattgcngtagctcctgtggctgggtcccatggganttgggnaatgaccntcagcctggtgtgaactggggttatagtgcctccttttg

SEQ ID NO: 250953 - DNA, 546 bp, Homo Sapiens; identical to SEQ ID NO: 3570

SEQ ID NO: 250954 - DNA, 1480 bp, Homo Sapiens
ggggggatttggcggggcctttgtctctcgctgtcgccggagtcccaggtctgtcttcactgctctgtgtcctctgctcctagaggcccagcctctgtggcgccgttaccagcaggtattgggagatccacagctaagatgccaggaccccctggaagcctagaaatgggaccattgacatttagggatgtggccatagaattctctctggaggagtggcaatacctggacactgcacagcagaatttatatagaaatgtgatgttagagaactacagaaacctggtcttcctgggtattgctgtctctaagccagacctgatcacctgtctggagcaaggaaaagagccctggaatatgaagagacatgagatggtggatgaacccccaggtatgtgtcctcattttactcagagacctttggccagagcaagacataaaagattcttttcaaaaagcaatactgagaagacatggaaaatatgaacatgagaatttacagttaagaaaaggctgtaaaagtgtggatgagtataaggtgaacaaagaaggttataatggacttaaccagtgtttcacaactgcccagagcaaagtatttcaatgtgataaatatttgaaagtcttctataaatttttaaattcaaacagacctaagataagacatactgaaaagaaatctttcaaatgtaaaaaacgtgtcaaattattttgcatgctttcacataaaacccaacacaaaagcatttatcatagagagaagtcctacaaatgtaaagaatgtggaaaaacctttaattggtcctcaacccttactaatcataggaaaatttatactggagagaaaccttacaaatgtgaagaatataacaaagctcctaagcaactcctcaacccttactaaacataaaataatacatgctggagagaaactctacaaatgtgaagaatgtggcaaagcttttaatcaatcctcaaatcttacgacacataagataattcatactaaagagaaaccttacaagagtgaagaatgtgacaaagcatttatctggtcctcaacccttactgaacataagaaaattcataccagaaagaaaacctacaaatgtgaagaatgtggcaaagcatttagccagccttcacaccttactacacataagaggatgcacactggagagaaaccctacaaatgtgaagaatgtggcaaagcttttagccaatcctcaacccttactacacataagataattcatactggagagaaaccctacaaatgtgaagaatgtggcaaagcttttaggaaatcttcaactcttactgaacataagataattcatactggagagaaaccctacaaatgtgaagaatgtggcaaagcatttagccaatcctcaaccctaactagacatacgaagatgcacactggagagaaaccatacaaatgtgaagaatgtggcaaagcttttaatcgatcctc

SEQ ID NO: 250955 - DNA, 1047 bp, Homo Sapiens
  misc_feature (12)..(12): n is a, c, g, or t
  misc_feature (23)..(23): n is a, c, g, or t
  misc_feature (46)..(46): n is a, c, g, or t
aaaactcccaantatgatgaaanccaaagaatagcccacattgagnacatattataatcaaactgtcaaaaagaaaaaacacaggcctttgtctcctcactgcagcccagagctccccagtcttgtgtttacttctctgtttccttctgccttcctaagaggcccagcctctgtggccctgtgacctgcaggtattgggagagccacagctaagacgccgggaccccctggaagcctagaaatgggaccattgcaatttagagatgtggccatagaattctctctggaggagtggcattgcctggacactgcacagcggaatttatataggaatgtgatgttagagaactacagaaacctggtcttccttggtattgttgtctctaagccagacctgatcacctgtctggagcaaggaaaaaaacctttaactatgaagagacatgagatgattgccaaacccccagttatgtattctcattttgcccaagacctttggccagagcagagcataaaagattctttccaaaaagtgatactaagaagatatgaaaaatgtagacatgacaatttacagttaaaaaaaggctgtgaaagtgtagatgagtgtaaagtgcacaaaagaggttataatggacttaaccaatgtttgacaactacccagagaaaaatatttcaatgtgataaatatgtgaaagtctttcataaattttcaaattcaaacaaacataagataagacatactggaaaaaaatcttttcaaatgtataaaatgtggcaaagcttttaaacagtcctcaacccttactacacataagaaaattcatactggagagaaaccctacaaatgtgaagaatgtggcaaagccttcaaccaatccgcaaaccttactacacataagagaattcatacccggagagaaaccctacaaatgtgaaaaatgtggcaaagccctttaccagtcctcaaaccttactacccatagaaaaattcttactggagagaaaccctacaaatgtgaagaaagtggccaaagccttcaaccg

SEQ ID NO: 250956 - DNA, 329 bp, Homo Sapiens
agaaatttgtttcaaatattgcatgggacatacttacacagcagttcttggcagtttatctgaaattcaaatggaattgggcatcctgtgttctacctggcacctgtccccatagaaatgagcgtgagtgcccgggatctgctgcggggctgtgctgggctctttctcagcctggcccgaagtttccagatctgattgagcgagagagcagcaggacctgcccctctgctgggcccttaccttcgcggcactcgccactgcccagcagcaggtgaggcccaacacaaccagttgcaggcgccccatggtgagcatcagcctactgggtc

SEQ ID NO: 250957 - DNA, 1805 bp, Homo Sapiens
  misc_feature (1545)..(1553): n is a, c, g, or t
  misc_feature (1722)..(1752): n is a, c, g, or t
gggacccagaacctgctatgcggaacaaggctgatcagcaacttgtggaaatagacaaaaaatatgctggattcattcatatgaaagcagtggctggtatgaagatgtcttaccaggtacaacaggcaatcaacacatgcctaaaagatcctgtaaggggtttcagacaagacgagtcctctagcgctttgtgttcacacctttactccatgatccgtggaaaccgccaacacagacgagcctttcttatttctttactcaacctctttgatgacacagcaaaaacagacgtgactatgctcttgtatatagcagacaatctagcctgttttccataccagacacaggaagagccgttgtttataatgcatcatatagacattacactctcagtttctggtagtaacctactgcagtcattcaaggagtctatggtaaaggacaaaaggaaagagagaaaatcatcacctagtaaggaaaatgagtcaagcgacagtgaagaagaagtttccaggcctcggaagtcacggaaacgtgtagattcagattcagattcagattcagaagacgatataaattcagtgatgaaatgtttgccagaaaattcagctcctttaatcgaatttgcaaatgtgtcccagggtattttattacttctcatgttaaaacaacatttgaagaatctttgtggattttctgatagtaaaattcagaagtactctccatctgaatctgcaaaagtatatgataaagcgataaaccgaaaaacaggagttcattttcatccaaaacaaacactggacttcctgcggagtgacatggctaattccaaaatcacagaatgaggtgaaaaggagtatagtcagtatctagatttaaacttctcatgaacatctggaccctgatgaagaagaagaagaaggggaggtttcagctagcacaaatgctcggaacaaagcaattacctcactgcttggaggaggcagccctaaaaataatacagcagcagagacagaagatgatgaaagtgatggggaggatagaggaggaggcacttcaggggtgaggcggaggaggagtcaacgtatttcgcagcgtattactcattgagaaggtcaaaacgaaattcagactctacggagttggcagcacagatgaatgaaagtgttgacgtcatggatgtcatcgctatttgctgtccaaagtacaaagatcgaccacaaattgcaagagtagtgcagaaaaccagcagtggcttcagtgttcagtggatggcaggctcctacagtggctcctggactgaggctaagcgccgtgatggccgcaaactggtgccttgggtagacactattaaagagtcagacattatttacaaaaaaattgctctaacgagtgctaataagctgactaataaagttgttcagactttacgatccctgtatgccgccaaggatgggacttccagctaatgaatttgtacatgcagccaaatttacaggaatttttttaaaaggcagaaaaacttgaaataccaacattctggcnnnnnnnnntcagttttatgaagagtaagtggaacccgggatgcaggaacaaaagaaggaaatgttgggcaaacatttttgtgggagctcccttcgctgttgtgcagcagaaacagattctcagttcatttttactcccactgtattatagtttaacaaaaattgtttatatcttggnnnnnnnnnnnnnnnnnnnnnnnnnnnnnnnaagtgaatgttggaaattagtctgttaatgttcttaataaagtgttcttggag

SEQ ID NO: 250958 - DNA, 568 bp, Homo Sapiens
tgtgtaatctacatgtatggtccatatttgtatatacatgtatggaatacttacattcatattacaaatataagatttttgttattaaaaaaggtcctttcagaggtttcagcacattatcatttagaggcactccagaaggatcaatatccatatcacattatacagaatgtcaaactagattaaaataaggcttcaatactgtattgttataatataaatattttttatatttttaattcatataatacatgtaaattctacaggatggaaactttgtacatacttcataaatgataggatcattttaataataacctggctttaaaagattatatgcaaacatcagtcaaatccagtatattcatctcgtacttagacgaaaactcctaggatatgtttagcgttcctaggcatactcacttgtgacagacactctaaatacaaaagatgattgattagagtttagggcactagaatacttatcattaacaattgactccttgatagttgtctgaaaaagaatgttccagaagataactcacactggggtactatgactaataaa

SEQ ID NO: 250959 - DNA, 651 bp, Homo Sapiens
gtccccttttgccttcaaccttcgagccgccacgtaatgccacgtccccgcgcatgcgcatcttggccgctgctggcggctgtttccgggcttagagggctggagtggccgccgagttggaggcggtggtggcagcagtaggagtgtgtagagtgcgggattgggggccaggccctgcggagggcgggggaagttgtcttcttttttttccggaggggccggtaaacctggtggctgaacggcaagatgaatttcctccgcggggtaatggggggtcagagtgccggaccccagcacacagaagccgagacgattcaaaagctttgtgacagagtagcttcatctactttattggatgatcgaagaaatgctgttcgtgctctcaaatcattatctaagaaataccgcttggaagtgggtatacaagctatggaacatcttattcatgttttacaaacagatcgttcagattctgaaataataggttatgctttggacacactatataatataatatctaatgaagaagaagaagaagtagatgatgttgaagaagaaaattccacaagacagagtgaagatttgggaagccaatttacagaaattttcattaagcagcaggaaaatgtcactcttctgttatctttattg

SEQ ID NO: 250960 - DNA, 968 bp, Homo Sapiens
  misc_feature (771)..(771): n is a, c, g, or t
  misc_feature (930)..(931): n is a, c, g, or t
  misc_feature (941)..(941): n is a, c, g, or t
  misc_feature (947)..(947): n is a, c, g, or t
  misc_feature (952)..(952): n is a, c, g, or t
aaacaaaacagcggctggtctggaaggaacctgagctacgagccgcggcggcagcggggcggcggggaagcgtatacctaatctgggagcctgcaagtgacaacagcctttgcggtccttagacagcttggcctggaggagaacacatgaaagaaagaacctcaagaggctttgttttctgtgaaacagtatttctatacagttgctccaatgacagagttacctgcaccgttgtcctacttccagaatgcacagatgtctgaggacaaccacctgagcaatactgtacgtagccagaatgacaatagagaacggcaggagcacaacgacagacggagccttggccaccctgagccattatctaatggacgaccccagggtaactcccggcaggtggtggagcaagatgaggaagaagatgaggagctgacattgaaatatggcgccaagcatgtgatcatgctctttgtccctgtgactctctgcatggtggtggtcgtggctaccattaagtcagtcagcttttatacccggaaggatgggcagctaatctataccccattcacagaagataccgagactgtgggccagagagccctgcactcaattctgaatgctgccatcatgatcagtgtcattgttgtcatgactatcctcctggtggttctgtataaatacaggtgctataaggtcatccatgcctggcttattatatcatctctattgttgctgttctttttttcattcatttacttgggggaagtgtttaanacctataacgttgctgtggactacattactgttgcactcctgatctggaattttggtgtggtgggaatgatttccattcactggaaaggtccacttcgactccagcaggcatatctcattatgattagtgccctcatggccctggtgtttatcagtacnncctgaatggnctgggnggtcncttggctgtgattcag

SEQ ID NO: 250961 - DNA, 612 bp, Homo Sapiens
gggaacggaacgtggaggtggccctggccggggaggaggggcggcggcgaatgctgggagagtccgacgagcgctgcactaacgcaggatccggctgccgaaggtcctcgccagcaggatgaagttaaaggaagtagatcgtacagccatgcaggcatggagccctgcccagaatcaccccatttacctagcaacaggaacatctgctcagcaattggatgcaacatttagtacgaatgcttcccttgagatatttgaattagacctctctgatccatccttggatatgaaatcttgtgccacattctcctcttctcacaggtaccacaagttgatttggggggccttataaaatggattccaaaggagatgtctctggagttctgattgcaggtggtgaaaatggaaatattattctctatgatccttctaaaattatagctggagacaaggaagttgtgattgcccagaatgacaagcatactggcccagtgagagccttggatgtgaacattttccagactaatctggtagcttctggtgctaatgaatctgaaatctacatatgggatctaaataattttgcaaccccaatgacaccaggagccaaaa

SEQ ID NO: 250962 - DNA, 475 bp, Homo Sapiens
ggccgggagagatagtccaatttctgcttgagaaagggtaaacattttaggctgtaccacctgaaagggtttgtggtttaatttctttgttacactatttactttaaaatcttgcttgtttccatatttatattgttgaactactaaataactcattggctaatttatgtaaaaatgtagcacaatttttctaacttaaaactttgtaacctttttcattgagaaattatttctttatagcaaagcaaatttatgaggagtctaattataaattttcctcccaaatagaaaatgcagatctcactatgactaccaaggacttcttgtagaattttggtatctctttatagtgcataaagcttaatactgttttattttgtgagtaattatccagaaagtgtaagtatccactgtctcttaactttttgtcatttatgattgttcttttaaccttcccaatagtaaactatgtaac

SEQ ID NO: 250963 - DNA, 1363 bp, Homo Sapiens
gtcccccagtggaggcccactgccccagaccttacttcctggtcctacttctgtttttacggcaaataaaacatctgaccaatgacatggggccacagtggtggtggaggacacctcgcagcttcttcgccatatagaaccctctggccaaatgccatcgtatggccttccccaccctctttcacccgatgccccctctgctgatcttcctccccgacaaccagctgggagtggatcccatcccaagctgtgcctgcagctcagcttccaatcagggcacttgtgttgagggcttccacctccagggagccctcccctcagtccactctgctctctgcagcctctgaaccaccccccccacccagcactgtgacaagcgtcacacgtgcctcggggtggctgatcccatttccttcctcagaatcgcatgtggcgcaagactcggtcccacacagcaggctccctctgtattggcgtggaccccaacaggaactgggacgctggctttgggtgtaaggcccagagtgtcttgggagcaaggatgggatggcctcgaatggctcctcaccactgctcttgctccccgcctctctcctgcccctgcagtgaggggagggttgggggtggcagctctgcctctgagggctcttggggatggaggctgtgctctgagagttggttgttactcgcctgcaaaaggcaagttgcttgcaaatgggctaaggtctgaaatcctacctaggggccttctagcttaacctcaagtcctcccgccttggccacgtctctgtgagaactggtctccactgaggagcccgtcttccctccctgggtgtgtccatcagctctgcccaaaccaggctgggagggcagttcccccaggttatagaaggcctttgggctttcctgaatccaggggtgggagtgagcccttccataccacctcacccccaactccatgcaaagaactggattccagaagccacagaagctggaggagccacaccgccatgccctctgtccccccacagtgtccggagccagcagtaacccctgctcggagacttaccacggcaagtttgccaattccgaagtggaggtcaagtccattgtagactttgtgaaggaccatgggaacatcaaggccttcatctccatccacagctactcccagctcctcatgtatccctatggctacaaaacagaaccagtccctgaccaggatgagctggatcagctttccaaggctgctgtgacagccatggcctctctctacgggaccaagttcaactatggcagcatcatcaaggcaatttatcaagccagtggaagcactattgactggacctacagccagggcatc

SEQ ID NO: 250964 - DNA, 936 bp, Homo Sapiens
cgtgtgaatcacatcaacaaagtcagcatcagagggatcaagtcgcacctcttcaggagtactctcgaaacttgcttctacaggatccaaccctgtaatcctgctcaggcctggagtcttgcttcctgcctctccagccacgtgggctcccaggctgtggccaatgaggtgaactttggaaggggggtagctatactctgtctggagagggaagattgtattttcaggacaatttttgctgtggtttttctaaaatgccagcctaatggatattactcctctgctgaaaaccttccatgcctctcattgccttcaggatcaagcccaaactcattctgaaggcctccgagctttcctaactcatcatctatttttctagactcttcagccaaaccccttgttgaactttcagaccctcggatacatcatagcctctcacctctgggcctggtttgttcttctcttcttgttgttgtctatcccccaagcacttgccagctaacatcaacagactagccttcagctgtcaatttagacgtctcttccttgggagacctccttaagccctttccccaccccatcagtgtggattagctgccttctatgtgttcctgtaaagctcctactctccccatcagaacccactaatagatcgcactctactggcattgcaagttttcactgcaagctccttgatggtctgggatctcatgtgtcttctttacttcctcacatactcctgacattctgctccaaaagtactggtgaacaagcaaatcaaatagagctatgaggtatttgcacatgttgatctcagagacgttcacccaaaggcacttcatttagtggtctatcatacttccttgcacaaataccatgggttgggatttctgcaggagtgcagaagttgattcttttgtagaccctttaactatc

SEQ ID NO: 250965 - DNA, 1121 bp, Homo Sapiens
  misc_feature (383)..(403): n is a, c, g, or t
  misc_feature (480)..(485): n is a, c, g, or t
cccaacaaaatgccaagagccacactcaaagatcagaataaacaaaaaatcccccaacccatggtggggacacaaaaagtaacataagtgactaaggtgtgccattcatagagaggttgaagactccatgccccaggaccacttagctgcaatagggtgaaatagtctactttttgatttcatgaattttttttctaggaaattctttacattttcaaacaaaaatagtactattttaaacccaaaccattcaaaacagggcaacagcctgaccccaatccatctcaatgtctatgtcacaagtattttcacccgtattgcacccagtcagctggtttttaattctaatagtataaaaattggaaatttgaaatagttctgtnnnnnnnnnnnnnnnnnnnnnacatctgctttctctcatggtttaatacagcattggaaggctttcagatgttttcttaaaaaaaccaaacccaaaannnnnnctcaacatttaaaaccaaatctcagcttcatttccagaaatattgcagtttggtttaggtaatgtttcatttaatctactccagtttccacaaaatggcattttattaaaaaaacctttcagttatttggtccttttgcaatttgctgtgcacataatgcctactgtaccaaacttttattgcctttaaatttagttgtaattttattgataaaatttaaatctagtgtctttatttcttctgttacaatagtgttgcttgtgtaagcaggttagagtgcacagtgtccccaattgttcctggcactgcaaaaccaaattaaacaattccacaaagaattctgacatcaatgtgttttcctcagtcaggtctatttcaagattctagaagttccttttgtaaaacttgcctttaaaactcttcctcctaatgccatcagatctcttaacattggctcactgtgggatctttcctcttaggttgaatttctacgtgaatatcaaagtgcctttttcctgaaaaagcacagtttgaagctttactgtgagaactccctcctcctcagcctctcagtaggtctcagaatcggagtcgttgagctcatccacgtcagtgtataagtactcctgttcccct

SEQ ID NO: 250966 - DNA, 622 bp, Homo Sapiens
gtgaaaggaatcgaaaaagaagtgaatgtgtataaatctgaggattcacttggtctcaccattacagataatggtgttggctatgcttttataaagagaattaaagatggtggtgttattgactcagttaaaacaatctgtgttggggatcatattgaatccataaatagagaaaatattgttgggtggcgtcactataatgttgctaagaagttaaaggaattaaaaaaggaggaactctttactatgaagttaatagaacctaagaaggcatttgaaatagagctgaggtcaaaggctggaaagtcatcaggagaaaaaattggttgtggaagggcaacacttcgcctgagatcaaaaggtcctgccaccgtggaagaaatgccttctgaaaccaaagcaaaggcaattgaaaagattgatgatgttcttgagttgtacatgggaattcgagatattgatttagccaccacaatgtttgaagctggaaaggacaaagtaaatccagatgaatttgctgtggcacttgacgaaactcttggagactttgcgttcccagacgaatttgtctttgatgtttggggagtcattggtgatgccaaacgaagaggattataatgtg

SEQ ID NO: 250967 - DNA, 550 bp, Homo Sapiens
tggaaagcaggaatcagtgtctctaaggctgcatcctattaccacaatggggtgtgctataactgctggtattagagagggaactttggccctttcacgtttttcttaatgtttgtaacactacttcagaggtttataacctcaaagcagaagaagagcctcaacaacccgggacttataagttatttttatgttactagacttgcataaagattcttgttttccaactcttcattttgttgcaatgtgttattacaggatatatgaaccaattaaggtttttcactacagttcttgaataaaatttaaaaatcattttttattttaattaaaaatatttcccatttatagaatgcatatatttgcaatggacttccactttcatcaactttccatctcatcgctttaaacaggaacttgaacaagcactgttagtttagacctaaaggataggaaagcattaaataatactttggatctcctgaggaaaagataagtttgcttgcaatttacacattccatggggaaagaagagccatatttccttaaa

SEQ ID NO: 250968 - DNA, 907 bp, Homo Sapiens
  misc_feature (199)..(199): n is a, c, g, or t
tcgcgcttctcactggagccactcttgtggagtgcgaaggtgcgcacagtgtatgtggccagctccactgtgtcaacagggtcacctgagaaggcacaggtctccgtgcacgggctggccagtactgatcacattttaccccgggacttctccctccaagccgtgtcatcatgaccacatgtggccgtgcgcatgttcncacaccattctccagaaataacccatggtctccgggcagggggccctgcgtggcgatgtaggcattctgcttgcggtagccatcgatgtagttggcattgatgtagtcactcccggggacgccatcgatagaggtaaggatgactcgagagtggtcgtaggcgatgacattcgcatagcggttcttgggcttgttcacctccaggtttgaattctcccacgtgaactgctgtccagggtcgatggactcatactcctgggagaacttgaggccatcgttggctttgaggcgctcgatgttgtccgccaagtcggtgatggggatgggtgggtggtctcgcatacctggggtctggtagttgagcctccgcatctccacagggtcagaggagtgggccagcaaggagtccttcagtccgatcgactgctcatccttagaggacggagagtgggtccctttccctttgaacaagaggatggcgatgacaatgaggatgatgaggatgactgccagcacgggacccgtcacccacagcatctccggctcctcctgctgctgggctggtgtcacctggaccacgatctcatccgagtaggggctggaggcatagcgcttctggtccatgggttccttcaaggaggcaagcacaaagcactggtagctcaagtccggagacagaggccggttgtagaagccccggtagttctt

SEQ ID NO: 250969 - DNA, 747 bp, Homo Sapiens
  misc_feature (687)..(687): n is a, c, g, or t
gtgacaaaagtaatgatgttaagcctcaataggaccttcagtggacttaagccagttgaaggaaacataaacgcatcaaagcttaagtccaagatgacataacattggaattttaaatgtatttgctctttcagggaacaaagaccccttcatgtccctgtctgttgctttataatggtactttcttaggaatgaattaagttcaaatgcagagaattgccagcatataaaacgcaaggatcagaaccctgagtttgaactcagcccctgtgtacagcctccgtgtggcctctgtttaattagatcgtgctgctatagcagttccttctagctcagttgctttgatgtagtacccaaattttggcctaaaagtgatttaattagtaataatttttaaagatataggatgttgaacaaagtatagcacaaagaagatgtgatttgaggattgtataatcataatgtcctgggaacttcttaagtaaaagatcttcttaaatggatctcaggtctttattttcctgtatcagccagagttgaacaaacttttgtttaaaaaaagagccagatagtaaatattctaggctttatgggccataaagtctcttggagctactcatttctacagttttagagcaaaagcagccatagatagatcataggtaaatgaatgggtgtggctgtgtntcaagaaaactttaaaaaaagctggcagctggctagatttggcttgtaaggtgctatatg

SEQ ID NO: 250970 - DNA, 932 bp, Homo Sapiens
  misc_feature (341)..(375): n is a, c, g, or t
gggagtgatggctgccggcgctctctgcgtggttcttcttctcggccgctcaaacccccgcggctgcttcctgggaaggtcgtgagtcccgctgagctgtccccggtgccgccgacccgggccgtgtgcccgtggctccagccgctgccgcctcgatctcctcgtctcccgctccgccctcccttttccctggatgaacttgcgtcctttctcttctccgccatggaattctgctccgtgcttttagccctcctgagccaaagaaaccccagacaacagatgcccatacgcagcgtatagcagtaactccccagctcggtttctgtgccgtagtttacagnnnnnnnnnnnnnnnnnnnnnnnnnnnnnnnnnnngcatttttgatacctcatattctgtttacacatcttgaaaggcgctcagtagttctcttactaaacaaccactactccagagaatggcaacgctgattaccagtactacagctgctaccgccgcttctggtcctttggtggactacctatggatgctcatcctgggcttcattattgcatttgtcttggcattctccgtgggagccaatgatgtagcaaattcttttggtacagctgtgggctcaggtgtagtgaccctgaagcaagcctgcatcctagctagcatctttgaaacagtgggctctgtcttactgggggccaaagtgagcgaaaccatccggaaggggcttgattgacgtggagatgtacaactcgactcaagggctactgagggccggcctcagtcaagggctaggtttgggtctgctggggggcaactccggggcttcgtttttgaaagctccctatttctggaacccttggaattgtttggggcaactattgggttctccctcgtggcaaaggggaaaggagggggtcaggggggcctgaaatgg

SEQ ID NO: 250971 - DNA, 1193 bp, Homo Sapiens
  misc_feature (756)..(773): n is a, c, g, or t
cagggtggcagccccggagccggggaatgtgaagagctctcggctgtgcagtggtaccgtcggggcctgggccgcgaaggatcttctgccacagctgcaacatgggcggcaagaacaagaaacacaaggctccagcggccgcggtggtccgggccgacgtgtctgcttccagagccaaatctgccgaggctggaattgccggggaggcccaaagcaagaagccagtgtccaggccggccaccgctgccgctgccgctgccggctccagggagccccgtgtcaagcaaggtccaaaaatttatagttttaattctacaaatgattctagtggtcctgcaaatctggataaatctattttgaaagtggtaattaataacaaactagagcaaagaattattggagtgatcaatgagcataaaaagcaaaataatgacaaaggaatgatttctggaagacttactgccaaaaaattgcaggatttatacatggctttacaagcattttcatttaagacaaaggacattgaagatgccatgaccaatacactcttatatggaggtgaccttcattctgccttggattggctctgtttaaacctttcagatgatgcacttcctgaaggattcagtcaggaatttgaagagcagcaacctaaaagtaggcctaaatttcagtctcctcaaatacaagccactatttcacctccattgcaacctaaaacaaaaacatatgaagaaggaccccaagagtaagccnnnnnnnnnnnnnnnnnntatggaagtaaatatgaaagagtggattttacgatatgctgaacaacaaaatgaagaagaaaagaatgagaattctaaaagtttagaagaggaggaaaaatttgaccctaatgaaaggtacttacatcttgcagcaaaactgctggatgcaaaagaacaagcagctacctttaaactagaaaaaaacaagcaaggccaaaaagaggctcaggaaaaaataaggaaatttcaaagagaaatggaaactttagaagaccatccagtatttaacccagccatgaagatttcacgtcaacaaaatgaaaggaaaaagcctcctgtagccacagaaggagaaagtgcattgaattttaatttatttgaaaaatctgcagctgctactgaagaagagaaagataaaaagaaagaacctcatgatgt

SEQ ID NO: 250972 - DNA, 846 bp, Homo Sapiens
  misc_feature (15)..(15): n is a, c, g, or t
  misc_feature (429)..(562): n is a, c, g, or t
  misc_feature (586)..(688): n is a, c, g, or t
  misc_feature (711)..(734): n is a, c, g, or t
aacctgggtcaaaanctgtcaagatttcctaacagtttcaaatacctcaatatcaccctaaactgagaaagattattagcccgtgatggtgggacccttattgacgaaggcctgccccctcctcacagttgggtagattccctgggttcctgatggttcaggagcctgggctgtcatttgtctacctggggtttgcagcagccctagtacaagaagattcattcgtgctgtttactttggcagcctcttcacacaactttcctctctaacacgtgttaataatcagagtattcacctcacctccttacttcccagcttctccaaaatcaaagcaatagtaataaacaatttggaaaatgttgcttagtattttaagccatggttagcattataaccttaattaaagagaccccaggctggggtggctcnnnnnnnnnnnnnnnnnnnnnnnnnnnnnnnnnnnnnnnnnnnnnnnnnnnnnnnnnnnnnnnnnnnnnnnnnnnnnnnnnnnnnnnnnnnnnnnnnnnnnnnnnnnnnnnnnnnnnnnnnnnnnnnnnnnnnntagctggccgtggtggtgcgtacnnnnnnnnnnnnnnnnnnnnnnnnnnnnnnnnnnnnnnnnnnnnnnnnnnnnnnnnnnnnnnnnnnnnnnnnnnnnnnnnnnnnnnnnnnnnnnnnnnnnnnntgacagagtgagactatgtctcnnnnnnnnnnnnnnnnnnnnnnnngagggaccccagctgctgtgactttggaaactaaaggtgttaacgaaggtcaagcctttccttaggatcgtttctggtttcaccacttatgtgattcccaaaaactcaacta

SEQ ID NO: 250973 - DNA, 662 bp, Homo Sapiens
  misc_feature (499)..(499): n is a, c, g, or t
  misc_feature (615)..(615): n is a, c, g, or t
cgggtgagtaaaacgggcacaaatttgtcaaaatcattagtaatacttgagagttagtggggttggaaatgaatttagggttttcatttgtaggttggaattaatcttatgctatttctgcctgtaggttggaattaatcttttgctatttccatctgtaggttagaattaattttactgtgctattttgactttaatctcagctcatacctcactttcttaggattttctgagtcaagggctttttgttatttattgtcaaagcacacatgtacttaacattctgagaaattattacagtagagatttaataatttatttaacaatacttgtttaaaatgtttgtcacctgttctagaatataaacttcgtgaagacaaggaccatgtctagcatgggagaaggcacgttgccttgtgtgtaagaggtgattagaaatatttatggatagataattgaatatgtggtatcttcaggaaggttcagagaacaccatgtntcttactttagtatcattctagacctgtagattagcaataagtaatcttactgatggaggaacatagaaacttctcactggaccatggcttcaaaactagagtcttgagtctggtnttgtgattctcactacagcccttagtcctatcatgagaatatttcca

SEQ ID NO: 250974 - DNA, 544 bp, Homo Sapiens
aggggtcggaaagggaaaacaactacggctgcggtgtggttggtggtgagatgacgaccttagtgctggataatggagcttacaacgccaaaatcggttacagccatgaaaatgtgtcggttattcctaattgtcagttccggtcaaaaacagcacgtcttaaaacttttactgccaaccagatagatgaaataaaagacccttctggactcttttacatcctcccttttcaaaagggctacttggtgaattgggatgttcagagacaagtttgggattacctttttggaaaagaaatgtatcaggttgattttttagatactaatattattatcactgaaccatactttaacttcacttcaattcaagaatcaatgaatgaaattctatttgaagaataccagtttcaagcagtattaagagtaaatgctggggctctcagtgcacataggtatttccgagataatccttccgaattatgctgtatcattgttgatagtggatattcctttacacatatagttccttattgtagaagtaaaaa

SEQ ID NO: 250975 - DNA, 969 bp, Homo Sapiens
  misc_feature (340)..(372): n is a, c, g, or t
  misc_feature (743)..(769): n is a, c, g, or t
  misc_feature (949)..(949): n is a, c, g, or t
gatggagtctcaccatgttgaccatctagcctaaagtggtctgctgccttggctcccaaagttctgggattacaggcatgagcactacacctggttgagattgtgcccttaaccactgcccatactgctgcttatatggacttaaattctgaaagttaaatatttaaatactttcattgtacccaaccatgtcatgtaatctaagcctgtaatacacttgcttctagatgatatttacagattgttctccctcacactggcagcctgagctactaacattatttcaaacaataagaattcggcctggagccctggcttatgccaataatcccagcactannnnnnnnnnnnnnnnnnnnnnnnnnnnnnnnnttaaaagtaaggaataatcttaaattactgtaaaaggttcctccccagagccccatcctcccaaagaatcaaagctaagcatcacctgtaagatatgatctcctttagatgattggttaagagttttcctcccacatttatcctgcaaggggagaactcaaatttaattatcgcacatatcattctgtttaatctttagaaacaacatgaaaattaaatacaactcaccgaataattgcttcttttttctttttacttctacaataaggaactatatgtgtaaaggaatatccactatcaacaatgatacagcataattcggaaggattatctcggaaatacctatgtgcactgagagccccagctatttnnnnnnnnnnnnnnnnnnnnnnnnnnntataacactaatttaaagcaattaaaaaggtaggaaacaaagacaagcaccaagacaaaaatgttccctttattacaagaaaaatgttaatttataatactattcataactgtcaaaagatctttattgtgtttatactttaaaacaccacacttacatggtaaacataataaaaatttnctcgtgccgaataactgggg

SEQ ID NO: 250976 - DNA, 685 bp, Homo Sapiens
  misc_feature (536)..(536): n is a, c, g, or t
  misc_feature (588)..(588): n is a, c, g, or t
  misc_feature (607)..(607): n is a, c, g, or t
acatgaatccctcatgtctgctggctaagcagcctgccttcctcgctgcggtcgtccctccgaccacagacttacagactggctcctcccctcccattacaacacatggggggttatttgcctaaatgtactatgctctctgccttgcaagtactaggggaaagcagtccccatgatgtacctcattcacgatgtatttgctgatgaactcgttgaccgtcatgagggtctgggaccattcctcatctgtgtacctcgaaccaacttccactgggacagttcggcagccagcgatctcctggatatactccaaactagcagaaagacacacattggcatcgtcactgctaatatctgttgggcatagtactaagtgtgctttgcatgtggtcccctttcatcctcggccggcatggagaggtggggctccctgctcaaggctgtgtggctcatacacagtgctgtgcagctttgcagacagggccggtaagtctggttggctgggctgctctagttccctgcttgccaacagcctnctcactttcttctttgctcaatttgtcactaagctgagagaccttttgacanatagcggacagcgtggcanggtggcagtctcctggactctgccctctagccctggacttgatccagccctcataagtacaggccgggatctgaggcg

SEQ ID NO: 250977 - DNA, 385 bp, Homo Sapiens
cgggagtgttgctttgaggcttatgtgaaaattaaattctcttaattacctggtgaatgatactggttataataagattttaaaattgtttctgcagctcttaggttatctgaggtctgcgttatagctcccagccctgtttccttgttttcccatgtatcctaactgctctgcttcatctggatatgtatgctagctttcattgctttagctctgatttttctttgagtattcacaaaacctgtctcactacacagctgacttaattgaagttacaagagggagtaggaagtgatcccttgaatggatgtatagtgtgttttgctcactgtggtttaagaatatagttttgtttacaaatgattaatgttccctgttgaaaaaa

SEQ ID NO: 250978 - DNA, 550 bp, Homo Sapiens
ggccgcggtgctgctgctcagtgggagcgggtcttcgcaactgtctccgcgtgggcgcgcctctaccgccttcccctggcggctacggccggagggagcggaggcgagcgggagtcgggctccatggagagcggcggaaaactaggcagacttctgggcatatttgagaaccaagaccgaaagcacagaacatatgtttatgttctaacagtcactgaaatattagaagattgggaagattctgttaatattggaaggaagagagagtggttcaaagtagaagatgctatcaaagttctccagtgtcataaacctgtacatgcagagtatctggaaaagctaaagctgggttgttccccagccaatggaaattctacagtcccttcccttccggataataatgccttgtttgtaaccgctgcacagacctctgggttgccatctagtgtaagatagagagaactgggtaggcctctcccaccatgtggcagtctcatgggggagagggcttcttttcgttttccttcgttcaaacatctggatttgacgg

SEQ ID NO: 250979 - DNA, 665 bp, Homo Sapiens
  misc_feature (604)..(618): n is a, c, g, or t
aaggtggtgggtgtgaaacaaagataatacaaatctaatttttccaggaactgtagcactgcccctgtccccatgaaattaagtcacaatttcactggtcaacataatataaaactgttttgaggaagagtgaaatagaagcatgaatatagatacgcaccaaaccctatattacggactaatttacacacagtatttttgataacaacctaattagatattgtctttcattgcttactataattctgagaaactgtttttaacaacatacacttacactaccacttaactaaatggggacatataaatacataaatttttaaagaaaaaaattcaagttatttagaggagaaataaaacttcaattatttacttttttgaaactgcatttagataaaaaggtatatggtttatgatacttttcacaatgtaataaatttatattccaattttctcataaacgagaggttgtaaagcaaaatatttgttccttgaaaataacttctctcttctaaccctggtaagaacaatgagtgtgcccttaatttcaagactcttgttgtcatccatgtcaattgtctttttcatgaagtataatattttnnnnnnnnnnnnnnnttgtaaaaattaaagagaaaacctgcttttgaaatgcaacaattcta

SEQ ID NO: 250980 - DNA, 976 bp, Homo Sapiens
  misc_feature (14)..(14): n is a, c, g, or t
  misc_feature (75)..(75): n is a, c, g, or t
  misc_feature (79)..(79): n is a, c, g, or t
  misc_feature (93)..(93): n is a, c, g, or t
  misc_feature (410)..(410): n is a, c, g, or t
gagcccaacacaanattagggctcatgagggtgcagctattatcattaagctctctgccaaaattgccaagacanacanacaaaaaggaattntacatcattagcttgaaaatggaaaaactgtgaaacatgctatatgaagtaatattggaatgtagttttagcttttgatatttagatgtgatgtttcagagtattcaagggaagggatctgcatttaatctttatagtgcacaatcttgactataacacttccttggctcagtattgtaaaattgtggaagttcagcttcctgagtcacgctaattatgctgccactttcacctataaaaagaggaatgctttacagaagcgctcagcatttctatgttgtgtacattttaaaaccataaatcagtagaaaaaaaanctggtatgtttcaaaaggtactgaaacaacataaatattaaatgtaacatgtcaaataacaagttaagattagtgaaatacccaaagctcctctattgcaaggaatactggatctctgtgtcttgagtgacaccccagagaggcatgtaccatggccattgtctatttatattatttccccatggctagaaaatggtactatgcctgaatctaatagtctagtattttagggaataataaatttgctatataagacaagaatttggtatttaagatattatagacaggattgttataacatatgaatggtaatattttacgtacgctcaaggttttagatgcatatagattttctaaaacatacagaaggaatggaaacaaatgcatacctaattttacttattcatcaagacagatatctattactacaggcacagtttaaaacagaaaagacataagatatagagcaaatattgtcaagatgacgatattttgccaatcagctatttttgagaaatcatcttttattatgaggctgtgcttttcattcacagtgaatataaatc

SEQ ID NO: 250981 - DNA, 581 bp, Homo Sapiens
gaaaggtggagaattgacttcagttctctccatcctttccccttaagtgttggtggcgctgcaggggcaacgtgcctcccattggaagtggtgacttcctctttgatagaggtttgcctgtctcttgaaaatgaaaagaagcggagattgatctctggagtcccatccgtccagtttagactattgggaatatcttttatcgggatgttaaaaacaatattagagacgtgagatagtaaatttgtggtaataccggatccaggaagcttacagtgaagagtatgaacttaacctgaaaagtatttctctgttctataaatctctcagtgacatttggattaatcaagcataattaaatgtagttagatttttgtcagattgtacttcaaaataatattcatctatggagagggtaatatattatgtagaaattttattaagcactttagttaagcaaacactaaggagaacaaaatcaacctcaggaaggttaattactaaaaaaatcacaaagtatagtagattatgtaaatcattttaattttgaataccatggcttgagctttaatttacatagagac

SEQ ID NO: 250982 - DNA, 1062 bp, Homo Sapiens
  misc_feature (956)..(956): n is a, c, g, or t
  misc_feature (1031)..(1031): n is a, c, g, or t
  misc_feature (1042)..(1042): n is a, c, g, or t
  misc_feature (1045)..(1045): n is a, c, g, or t
cgggagccgccacttccgagagcgcctgccgcccctgcgccgccgagccagctgccagaatgccgaactggggaggaggcaagaaatgtggggtgtgtcagaagacggtttactttgccgaagaggttcagtgcgaaggcaacagcttccataaatcctgcttcctgtgcatggtctgcaagaagaatctggacagtaccactgtggccgtgcatggtgaggagatttactgcaagtcctgctacggcaagaagtatgggcccaaaggctatggctacgggcagggcgcaggcaccctcagcactgacaagggggagtcgctgggtatcaagcacgaggaagcccctggccacaggcccaccaccaaccccaatgcatccaaatttgcccagaagattggtggctccgagcgctgcccccgatgcagccaggcagtctatgctgcggagaaggtgattggtgctgggaagtcctggcataaggcctgctttcgatgtgccaagtgtggcaaaggccttgagtcaaccaccctggcagacaaggatggcgagatttactgcaaaggatgttatgctaaaaacttcgggcccaagggctttggttttgggcaaggagctggggccttggtccactctgagtgaggccaccatcacccaccacaccctgcccactcctgcgcttttcatcgccattccattcccagcagctttggagacctccaggattatttctctgtcagccctgccacatatcactaatgacttgaacttgggcatctggctccctttggtttgggggtctgcctgaggtcccaccccactaaagggctccccaggcctgggatctgacaccatcaccagtaggagacctcagtgttttgggtctaggtgagagcaggccctctccccacacctcgccccacagagctctgttcttagcctcctgtgctgcgtgtncatcatcagctgacaagacacctgaggaacatcttggcaccagaggagagcagcacaggctggagggagaggaancaaacaaaatnagngggggaagctggttttt

SEQ ID NO: 250983 - DNA, 1184 bp, Homo Sapiens
ggggccaccatcacccaccacaccctgcccactcctgcgcttttcatcgccattccattcccagcagctttggagacctccaggattatttctctgtcagccctgccacatatcactaatgacttgaacttgggcatctggctccctttggtttgggggtctgcctgaggtcccaccccactaaagggctccccaggcctgggatctgacaccatcaccagtaggagacctcagtgttttgggtctaggtgagagcaggcccctctccccacacctcgccccacagagctctgttcttagcctcctgtgctgcgtgtccatcatcagctgaccaagacacctgaggacacatcttggcacccagaggagcagcagcaacaggctggagggagagggaagcaagaccaagatgaggaggggggaaggctgggttttttggatctcagagattctcctctgtgggaaagaggttgagcttcctggtgtccctcagagtaagcctgaggagtcccagcttagggagtcactattggaggcagagaggcatgcaggcggggtcctaggagcccctgcttctccaggcctcttgcctttgagtctttgtggaatggatagcctcccactaggactgggaggagaataacccaggtcttaaggaccccaaagtcaggatgttgtttgatcttctcaaacatctagttccctgcttgatgggaggatcctaatgaaatacctgaaacatatattggcatttatcaatggctcaaatcttcatttatctctggccttaaccctggctcctgaggctgcggccagcagagcccaggccagggctctgttcttgccacacctgcttgatcctcagatgtggagggaggtaggcactgcctcagtcttcatccaaacacctttccctttgccctgagacctcagaatcttccctttaacccaagaccctgcctcttccactccacccttctccagggacccttagatcacatcactccacccctgccaggccccaggttaggaatagtggtgggaggaaggggaaagggctgggcctcaccgctcccagcaactgaaaggacaacactatctggagccacccactgaaagggctgcaggcatgggctgtacccaagctgatttctcatctggtcaataaagctgtttagaccaga

SEQ ID NO: 250984 - DNA, 656 bp, Homo Sapiens
  misc_feature (585)..(585): n is a, c, g, or t
tacggccgggcagatgggaggcgctcaatcagtgtttagcggatctagaagaagattgtttcaactgagagaaatgagattcataatattctcactttaagtgtaattttaggaggaaattctacccacaactttgaaatattctggtgtatgtaatgattgctttctttcttcagttagatctatttccagaacaaggttgccacctcttaccttatattctatttcttaaccttggtgcctttgagatagactttggagagtgggtctaatgttgacagatggatagagaggggatagattctatgaaagacaaaggatgaggccaaaaccacatgcatgggaaatcagagcatcttgggcattatacgaaaaaagaattttgtacagggctacattattaaaggcctgagatgttaatccaaaacatcatttagttttctgactaagaaattgtgtctcaaatagtatcaaagaaaactagatgaatctcccatcaaattctctattttctttttctatctcgaaagataacagatgctaattatctcaatctagtcttcaaaaaattaacaatgcaaagtntagttttataaagtgcttattctctaataaatagaagtggaataattagtcattaattattggtaatacat

SEQ ID NO: 250985 - DNA, 969 bp, Homo Sapiens
  misc_feature (68)..(68): n is a, c, g, or t
gctataaaaattaagtaatatatgtgaaaatgccttgaacgtgacatgtgctcaataaatattagagntccatcatgcttctgtttagataattgtacaaaacaatacatcagaacattttttataaattgacaccagttttaatattatgtttttctgattggcactttaaaaaatcttaattaaaaaaaccagagtaaccctaggaagtttttcagtgttgaccttagaattatgtcatatggtgaaaagtgaacaaaactaagagtttttagcatgcagcagtcctggcaaagtggaaaagttatagtaatagaaaaaataaaaatactctatgacccctaacatcagaaataagaccaattagtagaaatcaaaagaagttggctcaatataaaagtacaccttctaaatattaaagctgtttaacaatagaatcaattgctatacaaagtgcggacttctcaaactgaaaggaatctaaaaaaagctagctagatatccgtgtgactcataggaaggaggaatttctgctttagttctgaagtctctgatgctgtttctgaaccctttagtttaaaagaaaaccttctactagctttccaaatatctttacactgtaatttctctgttcctttttgaaacttctcatcagattaatgtctttaccatactcccaaatatttttctcattcttacctttcttggaatactctctaaatttctattctttagtacatatcatttccttcctcttatatgatactttccctatttaactcagctcaattgattcatttctttctattccatataactttttaaaagtatttaacaaacatttatattgttctcactacgggcagatgatgttttaagttctctaaaagtgttggcatgtataatcttcctatcagccctgaggtaggtacttattcgaagtatatattttaatcccctgtgtctagc

SEQ ID NO: 250986 - DNA, 730 bp, Homo Sapiens
tgcatttggttgaggagcagaatgtaacttatattaaagaataaactactatttagtatctgagtgaagtacaaaaggaggcactaaaatcattgaggaaaatcccatgttatatggcttacattaatatttttctaggtaaggtaaggtaagttactactaccaagttatgaaacaccatttgatgattgcaattcattttctctggcatgaagaaacaatcactcttgtaacacattgatactacaaactacattatgcacaggtagccaaagaaatctatcacaattcaaatgcaacagtctgtcccagtagcacacagttggtatcctctattttccattgtatcctctattttccattcaggatagcacaattgtccagtcgctctcttctcttccatactgcaacaaaagcaagaaaacgtgtttcagtacagaagctaacagggcagaaatagcttacaaacaaacttaataccgccaaggttacacaaaaggttcgcttctgctttgaacaacattttcacattaaacatgttcacattaaaaactggattagagagaaagagaggaaaagagggacaccatataaaacataagataaaagcatacatagggagttttttaaaaaccaaatacctgaaaagaattacaaattttacaattattgctgaactcaaattcatagctggtataggtcctttatctatttaggtacatgccttttc

SEQ ID NO: 250987 - DNA, 699 bp, Homo Sapiens
  misc_feature (466)..(466): n is a, c, g, or t
  misc_feature (468)..(468): n is a, c, g, or t
  misc_feature (478)..(478): n is a, c, g, or t
  misc_feature (491)..(491): n is a, c, g, or t
  misc_feature (542)..(542): n is a, c, g, or t
  misc_feature (563)..(563): n is a, c, g, or t
  misc_feature (580)..(580): n is a, c, g, or t
  misc_feature (585)..(585): n is a, c, g, or t
  misc_feature (593)..(593): n is a, c, g, or t
  misc_feature (598)..(598): n is a, c, g, or t
  misc_feature (604)..(604): n is a, c, g, or t
  misc_feature (622)..(622): n is a, c, g, or t
  misc_feature (654)..(654): n is a, c, g, or t
ttctcctcttcctcatcaatattatgctttggtatatcctgcctacgacatgcaagagaattttataataataaaagcataaaggtgttctccagcatgaaaacattttgcttcactacttgatctgagggtcactggcattacatattttttttgctgtttgttataatgataatactatgtttctacatcatgctgtattttaagtggttgaatattatgtcatattagatatattttagacatgagtcacactttaaatataaccgatgtgaacagaatgctgaaatgaaaatgagaagtattttatgtaaaactaaccagtatttatatgtgagaataataagcaaaaaaacccatcttcgtcttgtgactaaacagagaaatttgtgtagatcaacttagcagctgtctaaagtaccaaaataataaatttttcactgttgataatttaaaataaaatgtncntttgtatatnttatgatacaganttaatggattgcttcaaatgtttttcagaatatgtttttaaatagtactgntttaattaagatgttttgttntgaatatttctgagganctacngtagtgtngtttngttttnctatttgcgtttttggtngtttggagtaggggataattttggtttattcnatacagttgaaaagtgtactgctatgagaatgagcttatggttac

SEQ ID NO: 250988 - DNA, 1257 bp, Homo Sapiens
cgggagacttggaagcctgggcccggaagtgagcagaccccacgttagctgaaatgggaaaaaacttgaaggaggcagtgaagatgctggaggacagtcagagaagaacagaagaggaaaatggaaagaagctcatatccggagatattccaggcccactccaggagcagtgggcaagatatggtgagcatcctccagttagttcagaatctcatgcatggagatgaagatgaggagccccagagccccagaatccaaaatattggagaacaaggtcatatggctttgttgggacatagtctgggagcttatatttcaactctggacaaagagaagctgagaaaacttacaactaggatactttcagataccaccttatggctatgcagaattttcagatatgaaaatgggtgtgcttatttccacgaagaggaaagagaaggacttgcaaagatatgtaggcttgccattcattctcgatatgaagacttcgtagtggatggcttcaatgtgttatataacaagaagcctgtcatatatcttagtgctgctgctagacctggcctgggccaatacctttgtaatcagctcggcttgcccttcccctgcttgtgccgtgtaccctgtaacactgtgtttggatcccagcatcagatggatgttgccttcctggagaaactgattaaagatgatatagagcgaggaagactgcccctgttgcttgtcgcaaatgcaggaacggcagcagtaggacacacagacaagattgggagattgaaagaactctgtgagcagtatggcatatggcttcatgtggagggtgtgaatctggcaacattggctctgggttatgtctcctcatcagtgctggctgcagccaaatgtgatagcatgacgatgactcctggcccgtggctgggtttgccagctgttcctgcggtgacactgtataaacacgatgaccctgccttgactttagttgctggtcttacatcaaataagcccacagacaaactccgtgccctgcctctgtggttatctttacaatacttgggacttgatgggtttgtggagaggatcaagcatgcctggcaactgagtcaacggttgcaagaaagtttgaagaaagggaattacatcaaaatcttggtggaagattaactccgcctccccagtggggggtggttcaaaatttttccaggaaattacaaggcttcgaatccgggggttttaagcccttccccatggccccaaatg

SEQ ID NO: 250989 - DNA, 1267 bp, Homo Sapiens
  misc_feature (1078)..(1078): n is a, c, g, or t
  misc_feature (1162)..(1162): n is a, c, g, or t
  misc_feature (1236)..(1236): n is a, c, g, or t
atttgttgagatttactacgcaccagacactgttctaagtgccttgtggacattaactcatttcatcttcacacacaccctatgtggtaagccctattttgaattctgctttatatttaaggaaattacacagagtgattaagcgacttgttcaagatcacccagtaagtggcggaaccatgaacttgaatattaacatttctgaatcctggctctcttctctgtcaaatgaagaaaccaaatatttgtcccaattaccttacagagatgtaagttgtaagataacgtataaaaaggtgtttcataaactaagaagtcatccggcagagccgcctggcagctcctcctcttctccgccccggcggccgcgggcgcgggggacgtcagcgctgccagcgtggaaggagctgcggggcgcgggaggaggaagtagagcccgggaccgccaggccaccaccggccgcctcagccatggacgcgtccctggagaagatagcagaccccacgttagctgaaatgggaaaaaacttgaaggaggcagtgaagatgctggaggacagtcagagaagaacagaagaggaaaatggaaagaagctcatatccggagatattccaggcccactccagggcagtgggcaagatatggtgagcatcctccagttagttcagaatctcatgcatggagatgaagatgaggagccccagagccccagaatccaaaatattggagaacaaggtcatatggctttgttgggacatagtctgggagcttatatttcaactctggacaaagagaagctgagaaaacttacaactaggatactttcagataccaccttatggctatgcagaattttcagatatgaaaatgggtgtgcttatttccacgaagaggaaagagaaggacttgcaaagatatgtaggcttgccattcattctcgatatgaagacttcgtagtggatggcttcaatgtgttatataacaagaagcctgtcatatatcttagtgctgctgctagacctggcctgggccaatacctttgtaatcagctcggcttgcccttcccctgcctgggcncgtgtaccctgtaacactgtgttttggatcccagcatcagatggatgttgcctttcctggagaaactgattaaagatgatttanaggcgaggaagactgcccccttggtggcttggccccaaatggcgggaaccgggcagccgtttagggaccccccngaaccaagatttgggggaaaattggaaaagc

SEQ ID NO: 250990 - DNA, 934 bp, Homo Sapiens
cactagaatgtcagttccactgatgacagtgtattcagaattaattttctttaagaaaacaaaaaggaatttcttgaggggctttctactgtccagtactcagtgaatatctgttgaattaatatactccaatcccatgagttagatatgattagtgatgagggacctgggattgagacattagtctaatgacactacattctagaccctgtttctaagcacttcctgtattgcatatcaactcatttaatcctcacagcaatgtgagatacatactatcctccccattttataattgagggaactgaagcatagacaggttacatagctggtgactggcagatgaattgacttagccgtggtcctgcaggtgatgagtggcagcactgtgctcttatcaccagctcttgagcgtgctgcatcctctcatttgtcgttggtctcccctagtgttcagtactgtgccttgcacgtgtttatactcagtagcttttgaatgacagacttacattgcaaatacaacagatttccatgtcttattagaaactgcttttcttgaattactacatgtaacctgaaggattgggtgaatatttaacagatgttgaaatacaaaaacaggtggctgaacttagaaaccacccaagtggcaggtgactttgccctgacatccgtgttcacagacctccacagccccctggtgaaaaccacttcttcatgtcccatgtccatctaattacatgtgttattttttgtcatttgcagagtcaacggttgcaggaaagtttgaagaaagtgaattacatcaaaatcttggtatagtatataatttcatctgttttcaaaatataactttttttgaacctcagcaactttgaatgattttagaactttagaatgattttctccacatttcaagtggaattgtggcagc

SEQ ID NO: 250991 - DNA, 697 bp, Homo Sapiens
gcacagcctttatttttttaagtacatggtgagtaagcaacattaaataattagttcttagactggtgttttttcttccagtgtgaatctggcaacattggctctgggttatgtctcctcatcagtgctggtatgttgttgatttactgaatattggtgtttttaagaatgaatttaaaatcactcaatccctcctggctcttcacagtttttatggaatgggagggaggggtgttagggtttgtgtattctgataatctaacaaagagttgttcttgttttggtagctgcagccaaatgtgatagcatgacgatgactcctggcccgtggctgggtttgccagctgttactgcggtgacactgtataaacacgaccctgccttgactttagttgctggtcttatatcaaataagcccacagacaaactccgtgccctgcctctgtggttatctttacaatacttgggacttgatgggtttgtggagaggatcaagcatgcctgtcaactgagtcaatggttgcaggaaagtttgaagaaagtgaattacatcaaaatcttggtatagtatataatttcatctgttttcaaaatataactttttttgaacttcagcaacttagaatgattttagaactttagaatgattttctccacatttcagtggaattgtggcagctccagtaaaaaacaaaac

SEQ ID NO: 250992 - DNA, 421 bp, Homo Sapiens
  misc_feature (359)..(359): n is a, c, g, or t
  misc_feature (376)..(376): n is a, c, g, or t
agcactttctcccagaactttgaacaagaaatatttacatgcagggcgattagtctctggctcacgagacagtcaatccagacaacaccactctggatggaaggtacagaaatgagatgtttttctgtctctgctgtggccaaggagtctttcatttaaatgtcaggcttctactcaccagttgacagggcatgcttgatcctctccacaaacccatcaagtcccaagtattgtaaagataaccacagaggcagggcacggagtttgtctgtgggcttatttgatgtaagaccagcaactaaagtctaaaaaagccaaaagaggtttattaattcaaagccattggcaattctcattantaggaacttaaccaggntacccttttgcttacccacttagtgtggggctaggatgccatact

SEQ ID NO: 250993 - DNA, 567 bp, Homo Sapiens
gctctttgtagttatgtgagccagtaagatctctttggcttaagccaatttgggttattttgtgatctgtgacccaaagagcccttcgtgataaatgtcaccaaagtgagagcctggatgtccagtcctcataaggactctgtgcaggcccgaatggagccaccagcctcaccgccagcttacccctccacatgaagccatatgccatactgctcacagagttctttcaatctcccaatcttgtctgtgtgtcctactgctgccgttcctaggataaaacacatcagggcattaaaaggaacaaatgttttctaaggctttataccttaaacacttttatacacattatcgccctaggagggaagtgatttattatatccctattttattgagattttctttgtggaaggacttaaaatcagtgtttgtgagttgacttattacaagctttgaagagtatgtaatctctattacatgtatctaattgtgtcattgaattcttttatatacttattttctatctacttgatctgctgactcatgagaaatatattcaaatctcccgcc

SEQ ID NO: 250994 - DNA, 774 bp, Homo Sapiens
  misc_feature (381)..(381): n is a, c, g, or t
ggggggcgacagcggcgcgcttcgccgggccggtactccaggtccgacccgcgaacccctctgggatccccgccgctctgtctacaacccgagcactttcatttggacccgtggatacccattgaacagatgcttgaaacctgcaagtaatcttcagatcctagcagaaccataggcctttcctttgtgttgggaggatatagcctgcctatatgctgtggaaatgaacggggagcagcagcttgatgcagatgccggctctggtacggaagaggtagaattaagctgggaagattatctagaagaaacagggtccacagcagttccctatgggtcttttaaacatgtggacacacgtttgcaaaatggatttgctcctgngatgaagctggaggtggctgtgagaacagatcctgagacctactgggttgccaccgttatcactacctgtgagcagttgctccttctccgctatgatggctatggggaggatcggagagcagatttctggtgtgacatcaggaaaggctgatctctaccccattgggtggtgtgagcagaataagaaagacccttgaaagccccagaaggcatcaaagataaaagtatctgactgggatgagtttctgcggtagaccctgataggagcatgtaatcctcctggtccgctgctagaagggctcccgtattgggagggaatcctttagaactcattgcctccaggatccaaactagaatgtcaagcttttccaggaattcttttaaacccctggg

SEQ ID NO: 250995 - DNA, 357 bp, Homo Sapiens
gctgcagatttgtggtgcgttctgagccgtctgtcctgcgccaagatgcttcaaagtattataaaaaacatatggatccccatgaagccctactacaccaaactttaccaggagatttggataagaatggggctgatgggcttcatcgtatataaaatccgggctgctggtacgttaccttatgttggatgtctctgaagtcaggaagaaaattattttcaaaaagaatcacaattcacattgtaaaggaactatgggttctaactaggtatgaacattagagctacctacagtccttcggaaaaaaatacagggagcacatgtcagctataaaagacatttggggacagtggggaa

SEQ ID NO: 250996 - DNA, 651 bp, Homo Sapiens
gggatgagtggaggatgggatgagtggaggatgggatgagtggcgttggctgcagatttgtggtgcgttctgagccgtctgtcctgcgccaagatgcttcaaagtattattaaaaacatatggatccccatgaagccctactacaccaaagtttaccaggagatttggataggaatggggctgatgggcttcatcgtttataaaatccgggctgctgataaaagaagtaaggctttgaaagcttcagcgcctgctcctggtcatcactaaccagatttacttggagtacatgtgaaagaaaacgtcagtctgcctgtaaatttcagcaagccgtgttagatggggagcgtggaacgtcactgtacacttgtataagtaccgtttacttcatggcatgaataaatggatctgtgagatgcactgctacctggtactgctttcagtgtgttccccctcagcccctccggcgtgtcaggcatactctgagtagataatttgtcatgcagcgcatgcaatcagaatctcactgagccacccatcattgtgaaataattacctcagttgtacaggacttggtgatcaggatccaggcactcacttgtattctactgctcaataaacgtttattaaacttgatcctgctacttaaaa

SEQ ID NO: 250997 - DNA, 931 bp, Homo Sapiens; identical to SEQ ID NO: 79946
  misc_feature (68)..(115): n is a, c, g, or t
  misc_feature (128)..(363): n is a, c, g, or t

SEQ ID NO: 250998 - DNA, 872 bp, Homo Sapiens; identical to SEQ ID NO: 171258
  misc_feature (422)..(435): n is a, c, g, or t

SEQ ID NO: 250999 - DNA, 281 bp, Homo Sapiens; identical to SEQ ID NO: 79945

SEQ ID NO: 251000 - DNA, 968 bp, Homo Sapiens
cggccggggagccatccgatgctgtgacagatgccaacttataaaaccagatcgctgccatcactgctccgtctgtgataaatgtattttgaaaatggatcatcattgtccatgggtgaacaattgtgttggattttcaaattataagttctttctccttttcttggcttattctctgctctactgcctttttattgcggcaacagatttacagtattttatcaaattttggacaaatggcctacctgatactcaagccaagttccatattatgtttttattctttgctgcagctatgttttctgtcagcttgtcttctctgtttggctatcattgttggctagtcagcaaaaataaatctacattagaggcattcagaagtccagtatttcgacatggaacagataagaatggattcagcttgggtttcagtaaaaacatgcgacaagtttttggtgatgagaagaagtactggttgctacccattttttcaagtctaggtgatggctgctcctttccaacttgccttgttaaccaggatcctgaacaagcatctactcctgcagggctgaattccacagctaaaaatctcgaaaaccatcagtttcctgcaaagccattgagagagtcccagagccaccttcttactgattctcagtcttggacggagagcagcataaacccaggaaaatgcaaagctggtatgagcaatcctgcattaaccatggaaaatgagacttaactcttcaagcaagataaattcatactttataaaagtatcaatgctgtagatggatggaagaggcttcccacaggaaggtgccaccagtcagttgtgcctatgtccctttggctggaaatgcagaatatgaattgattagttctctccaagccattgcttaaaatataacatgttttggatccaatacacacattgttacaactaacacaaattcctattaaatatt

SEQ ID NO: 251001 - DNA, 351 bp, Homo Sapiens
tgagccaccacacgcagcccctatcttttttaatgtagagaataaactacaaataaaactccatcattagagatcgggtaactatacttttcagagtacctgggttctgctcattttgcacatggtttggcttatgtgtacatctctgtcccatttgacagaaatttgtaggtcccttatttgctgtctcttgcattgtcatagttttcctgaactgaggtgatttttgttcacaaaggtatccactttattttatgaagcacagtcactacaaataccatatatgtttaagtaattgcagtgtttcacaacaaatttgggattgggctctttattatcattggagtgatt

SEQ ID NO: 251002 - DNA, 585 bp, Homo Sapiens
agggcccgctcatcatctgatgagtcctggtcacggttagcccgcttgcgctgtacacggcgccgaggctgctcttattcctcatattattcctcctattcctattcctatgagcggtcatggactcgattttcatcattaatggagtaatgaccagtgtcctccatgctgtcagagtccttatcttcacctgagctctctgtgtctgtgcctagactttctgtgctggtgcggttggggccaccatcatccccagtcaagctcaaactcaggtctgaggcctccacttcaatgcctgaggatgtctccctcccctcttcagctccagacatctcatatggaatgatagacaggcttccattagataagtatgttctgccatctgtactgctccctttgctggacatcttgaatgatgtttgctgcagccagcctttcctccttttatcactgaagtaaggccaggctgagctcctgagaagataggtctgtagattcaactggccagcggccgccaccaccaccgcctccgctctctgcgcttgcgcctgcgctgccacgctttccggccccgtttgccccggc

SEQ ID NO: 251003 - DNA, 436 bp, Homo Sapiens
  misc_feature (403)..(403): n is a, c, g, or t
  misc_feature (410)..(410): n is a, c, g, or t
gctgggctggaacagtcggagcagccgctagcagaaggatgacccaagacgggaagcgggctgctgagcctcgccgattcccgtgcttgtaactgccccagccggacaccccccctcccttgacctacccggtctgtgtctcgttccggctcggcctgcgccccccctcgcttcccagccggtttcccctaaggatgggcctgacccgtatcccaagctcttagcgctcaggtcttttccttccgccgacccgaagtcatcgctgggagtactggttgcccttttccttcaggctggctacagcaaacatcattcaagatgtccagcaaagggagcagcacagatgggcagaacagacttagctaatgggaagcctgttttaggcagttccagaggagatgtntgggagnttgaagagggggagggagacattctt

SEQ ID NO: 251004 - DNA, 675 bp, Homo Sapiens
gtcaatgccacggacaaatgggctttcacacctttgcacgaagcagcccaaaagggacgaacacagctttgtgctttgttgctagcccatggagctgacccgactcttaaaaatcaggaaggacaaacacctttagatttagtttcagcagatgatgtcagcgctcttctgacagcagccatgcccccatctgctctgccctcttgttacaagcctcaagtgctcaatggtgtgagaagcccaggagccactgcagatgctctctcttcaggtccatctagcccatcaagcctttctgcagccaccagtcttgacaacttatctgggagtgtttcaaaactgtcttcagtagttagttcaagtggaacagagggtgcttccagtttggacaaaaaggaggttccagcagtagattttagcataactcaattcgtaaggaatcttggacttgagcacctaatggatatatttgagagagaacagatcactttggatgtattagttgagatggggcacaaggagctgaaagagattggaatcaatgcttatggacataggcacaaactaattaaaggagtcgagagacttatctccggacaacaaggtcttaacccatatttaactttgaacacctctggtagtggaacaattcttatagatctgtctcctgatgat

SEQ ID NO: 251005 - DNA, 458 bp, Homo Sapiens
  misc_feature (380)..(404): n is a, c, g, or t
tatatacagcacatatgaatagggcccttaatatgtaaaaaacttatatttcaaaaaaattatgaatgtgaataaatccataaaagaagatatacaaaattccagagtattttttcaaaaactattaacccacataaataataaaaggtgtataagtaaaattcatgagtgggtttctcagttatttaattaacaaaggttgaaggcaaaagtaaaataaaaggcaaggcatgtactatgcctaaaatacaccaaaatgctaacagaagttgttttctgggtgcttttgttatgaagaccttctagtttatttcttgtatttttctatgctttaaaataatacaatgaatagtttttgttttaccatcaataagcttttnnnnnnnnnnnnnnnnnnnnnnnnnctctctgtgcctgaagatgtctgtcttcacacaacaaaaactaatctttggact

SEQ ID NO: 251006 - DNA, 970 bp, Homo Sapiens
  misc_feature (660)..(660): n is a, c, g, or t
gagcatacgccgagccggtctttgagcgctaacgtctttctgtctccccgcggtggtgatgacggtgaaaactgaggctgctaagggcaccctcacttactccaggatgaggggcatggtggcaattctcatcgctttcatgaagcagaggaggatgggtctgaacgactttattcagaagattgccaataactcctatgcatgcaaacaccctgaagttcagtccatcttgaagatctcccaacctcaggagcctgagcttatgaatgccaacccttctcctccaccaagtccttctcagcaaatcaaccttggcccgtcgtccaatcctcatgctaaaccatctgactttcacttcttgaaagtgatcggaaagggcagttttggaaaggttcttctagcaagacacaaggcagaagaagtgttctatgcagtcaaagttttacagaagaaagcaatcctgaaaaagaaagaggagaagcatattatgtcggagcggaatgttctgttgaagaatgtgaagcaccctttcctggtgggccttcacttctctttccagactgctgacaaattgtaccttgtcctagactacattaatggtggagaggtgttctaccatctccagaggggaacgctgcttcctggaaacacgggctcgtntctatgctgctgaaatagccagtgccttgggctacctgcattcactgaacatcgtttatagagatttaaacagaaaatatttgtagatgcacggaccgatgtcttatgattggattcgcacgggaactgacgcaaaggcaatccactttgggacgcggatattggctggggttataagagttgagaggggaggggtcggaagctgatgagggtggcgggtatgcgaaaatgaatggattaggctcggaaataagaacggggcgaagaagggggaacggaatctagggtagaccgagcagaaagggtatgg

SEQ ID NO: 251007 - DNA, 1538 bp, Homo Sapiens
  misc_feature (767)..(767): n is a, c, g, or t
gtgtttatgtattttttctcccctctcttatccccttgtcatctaacataaaatttattaaaatagctacatttacataatattattaaagttactggattatcaaggataaaagtgaacaccagtcaaggactgtgaattctctcccaggaaaagagcatattttcagttgtacacagattagctgtgtcatgataggcagaagttttactttgttattgtctttattgggagattaaatggtttaaggaaatgtgtacaggtgccaagttaacaagacatggactgtggtgatcaattttacgtgttgacctggctatgctataatacccagttattcaaaaactgacctaggtgttgctatgaaggtatcttgtaaatgtaatttacatctacaatcagttaactttatgtaaaggagattatcctggataatatggttgggtatgatccactccgttgaaagctgaggtttccctgaagaaggagaaattccaccagtggactgcaatgtcaggtcttgtctgagagtttccagacctcccttccacacggcctgccctgtggattttggatttgcctagccagcccctacaactgcataaaccaattccttgcattaaatctaggtagatgacagatacatggatatgaagacagacaagacagaatatatcctactggttgtgtttctctggcggaactctgactgacacacaaatcatctgagaaaatcttgcatctcttcagtcagagcttgtttttgnacccaaaagggatcaccaagctttcatcagacatggccccaaaatgactgggcaaatctcaggagttcaaaagattattctgatggaggagtcagattaggcaggtgttctctcttttaaggttctgttcctcaaggacttttagggtgtaccctcagatatgtccgttcttttgtgttgactaaactatctgcaacacattggaatagtatatagccactttaatgctcattattaactgtgtctaaaaggagacacaaaatctcataacattaactgcttcaaggaaggtaaccccgtagctggaagacagaggtgggagggagaatttttgctttttgtgcctttagaataatgtatcatgtgaatgtgtcatttagattaagggttggtatactatggtccacaggcccaatctgtcccctgctttttaaaagttttattggaacatagccatgctcatttgtttacatattatctatggctgctctcacactggaatggcagagttcagaaattgtaatctgtatacctaatgtcatggaccacaaaggctaaaatatttactgactctttacagaaatgatttgccaacctgtctagattttttaaaaatagaaaactgacattaaaaataaaagatgccccaagataattgaaaacatatctacacaaaaatctgtacatcaatgttcatagcagcactaatcacaatagtcaaaaagtagaaacaacccaaacatccctcaacagatgaataaacaaaatgtg

SEQ ID NO: 251008 - DNA, 337 bp, Homo Sapiens
gatatcagaagagaaaaagtcaaagtcataactacatactaatgagttaattaaaataaaaaaattacaaaacacattaagggtagcaataacatatatatatccagtttgcttcaatatcaactagttttagacataactactaaaagactaacactaaagaataaagtttaaagtgttcctggaagctgagctaccaaagttttcttattcaatacattttcttattggaggaataagtttaagcccttttagtgatgagacagctttgttgccactagttgtatacaataacaaccagaacctgggctactctaaaagtctccaaatcattctt

SEQ ID NO: 251009 - DNA, 1307 bp, Homo Sapiens
  misc_feature (1297)..(1297): n is a, c, g, or t
ggacgagcgattctgagtatcagttcccaggaagctgcctcaagttgttttttgaaaatattaataacagattttatattaaaagcaatcattgtcactcctctcagaggagtggtggccagtgccagtgccagtgatggacatgtgtgtggattctgcttctcatcctcaggtctgagctctttctactcggagctgatgaaaggactgggtgcaggggggcgcctctgggagctcctggagagagagcccaagctgccttttaacgagggggtcatcttaaatgagaaaagcttccagggtgctttggagtttaagaacgtgcattttgcctatccagctcgcccagaggtgcccatatttcaggatttcagcctttccattccgtcaggatctgtcacggcactggttggcccaagtggttctggcaaatcaacagtgctttcactcctgctgaggttgtacgaccctgcttccggaactattagtcttgatggccatgacatccgtcagctaaacccagtgtggctgagatccaaaattgggacagtgagtcaggaacccattttgttttcttgctctattgctgagaacattgcttatggtgctgatgacccttcctctgtgaccgctgaggaaatccagagagtggctgaagtggccaatgcagtggccttcatccggaatttcccccaagggttcaacactgtggttggagaaaagggtgttctcctctcaggtgggcagaaacagcggattgcgattgcccgtgctctgctaaagaatcccaaaattcttctcctagatgaagcaaccagtgcgctggatgccgaaaatgagtaccttgttcaagaagctctagatcgactgatgggatggaagaacggtgttagttattgcccatcgtctgtccaccattaagaatgctaatatggttggctgttcttgaccaaggaaaaattactgaatatggaaaacatgaagagccgctttcaaaacccaaatgggatatacagaaaactaatgaacaaacaaagttttatttcagcataaggaagcaattactggtaaacaatatgagactttaatgcaaaacagtgttgcagaaaaaaaactcagagactatgaaatacataaaccatatatcaagttatttgaaaaatacctatttttttccaaagtgtgtaaaagattgttttgaaacgtacctgttctcaagatctttttattcagagttttaataattgtaactttttaaatgtctatagcactgaagttattttcaggttttgtattntcttttcttg

SEQ ID NO: 251010 - DNA, 1479 bp, Homo Sapiens
  misc_feature (126)..(174): n is a, c, g, or t
  misc_feature (311)..(341): n is a, c, g, or t
  misc_feature (1154)..(1154): n is a, c, g, or t
  misc_feature (1250)..(1251): n is a, c, g, or t
  misc_feature (1320)..(1321): n is a, c, g, or t
  misc_feature (1385)..(1385): n is a, c, g, or t
  misc_feature (1412)..(1412): n is a, c, g, or t
  misc_feature (1430)..(1430): n is a, c, g, or t
  misc_feature (1448)..(1448): n is a, c, g, or t
  misc_feature (1456)..(1456): n is a, c, g, or t
ttattgttcttattccttcaatagttattacagtaattttcctcttcttctggcttttcatgaaagaaacattatatgatgaagttcttgcaaaacagaaaagagaacaaaagcttattcctaccnnnnnnnnnnnnnnnnnnnnnnnnnnnnnnnnnnnnnnnnnnnnnnnnntccagaatggaaacctccatgaatccgactctgagagtgtacctcgagactttaaattatcagatgctttggcagtagaagatgatcaagttgcacctgttccattgaatgtcgttgaaacttcaagtagtgttagnnnnnnnnnnnnnnnnnnnnnnnnnnnnnnncctgtgcttgaagagcaggtcatcaaagaaagtgacgcatcaaagattcctggcaaaaaagtagaacctgtcccagttactaaacagcccacccctccctctgaagcagctgcctcgaagaagaaaccagggcagaagaagtctaaaaatggaagcgatgaccaggataaaaaggtggaaactctcatggtaccatcaaaaaggcaagaagcattgcccctccaccaagagactaaacaagaaagtggatcagggaagaagaaagcttcatcaaagaaacaaaagacagaaaatgtcttcgtagatgaaccccttattcatgcaactacttatattcctttgatggataatgctgactcaagtcctgtggtagataagagagaggttattgatttgcttaaacctgaccaagtagaagggatccagaaatctgggactaaaaaactgaagaccgaaactgacaaagaaaatgctgaagtgaagtttaaagattttcttctgtccttgaagactatgatgttttctgaagatgaggctctttgtgttgtagacttgctaaaggagaagtctggtgtaatacaagatgctttaaagaagtcaagtaagggagaattgactacgcttatacatcagcttcaagaaaaggacaagttactcgctgctgtgaaggaagatgctgctgctacaaaggatcggtgtaagcagttaacccaggaaatgatgacagagaaagaaagaagcaatgtggttataacaaggatgaaagatcgaattggaacattagaaaaggaacataatgtatttcaaaacaanatacatgtcagttatcaagagactcaacagatgcagatgaagtttcagcaagttcgtgagcagatggaggcagagatagctcacttgaagcaggannatggtatactgagagatgcagtcagcaacactacaaatcaactggaaaagcagcagtctgcagaactannataactacgccaggattatgctaggttggtgaatgagctgactgagaacacaggaagctacagncagaagaagtccaaaagaagaatgctngagcagcagctactcagntggaggttcaactaccanaaactganagaaagtgggaagaagttcccac

SEQ ID NO: 251011 - DNA, 961 bp, Homo Sapiens
  misc_feature (386)..(427): n is a, c, g, or t
gtgcctcacctccctgtgaggcttgatgaatattgtggccagtgagtggaaaatgattcttgtcgaattagacagagtattcccaccccaggaatggattaatagaagacacaatttgagcacttctcagaattatctagtatgcctgagtagagactcacatgggtggaatctgtgttgtctcatcagagggaataaaaagacaatgaggtggtaaatgtgaaaaaagcagccttttagaaaaacattattttcaaatacctttataaatcatctaatttatcttcacataatataaagaaaaaactaataaaaattttcatatttcactttacataatatgttctcccatatttagggatcatacaattgtattgtcttcaaannnnnnnnnnnnnnnnnnnnnnnnnnnnnnnnnnnnnnnnnncccttccaagaaagctgatccttcagaaaataaatcttatttttaagcacttgggttttcaggccagaaaattaataaatcctaaacctgacccatttttgtaacagctaaaaaggagaagaaaaagctagttaaattttgtgtggatccatttatctcttaaaatatgccaaagcaatttgaggtgggggtggaaacaggtatttatctctcatgcgtgattctctctttatatttctatctggtgggaaaagggtaaagaactattcttggtcattattgatgtattgtgttgccactttgtatggtgcctgctgtgctttatcccgaggcatagcagtaatcgttactatcttgactctttccttcatcacaagagagtaaatatgaagtctgaatgtcgttcctcacccccaaattgtttaactctgcttccaaactagtttaagaaatgcaaaatgggaagagctagcttttcttagatacatttcttccttttttattctttcttgggagacgttaagtataaaaggg

SEQ ID NO: 251012 - DNA, 1053 bp, Homo Sapiens
  misc_feature (1037)..(1037): n is a, c, g, or t
ttcccaaaggtggtcctgacagtggcccagatggacatggggctcacctcaagggacaaggccaccaggtgcgggggccgaggcccagatgagccttactctaggagcaaaatcccctgtgggggcttctccttgaagtccgccagcagggctcagtctttgggcccaggcaggtcagggggtggcggcccacctgggggcagcaaggcagagcggctcagggcctcggccaccccaacccccagacgcggctacactgctggacctcccgctccagcactttcaggcgctgttcgtactcgcggatgtgtcccagctgtttcagtgccaagtccaccttctgggacgtgcgcttcagacgctcggagtcgctctcccgcttgtccctagcgcgtgccagcagaaagttctccttatgcaccgattcccacgttagcagcttccgctcggcttccttagaaaggtaaacccggaaatgctcgagggccggggaggacggctgggggctccggggtcgcctgcacaattgcctgagcaggaggcgcaagtgggagatgacgataaagggcggggccagcgcgggccgagagtggaattcccggatgaggcggtaacgctgcgccttccagtagagatcgctgttgccctgtactttgccgaatgtgtaactgaacatggcaatgagcaagttgaccagcaggatgttggccacgagcaggaagatgacgaggagcagcaccaccagccagttggcatactgggagacgcaggtgcccgcctgggccccaggagggtgtgcccagaagccgggctccgacgagcagttgctgtgctccatgagggccacgtccatgtcctcctggggaatctgcccgaagatctgcaggtagggacggtagaagacgcggcgcaggatacttgggaagtcactgtcccgtggcctcaggagcccctccgtggccacgccataggctaccagccacacgccgaggaagaagaggaagaagaacacgtccttcatctgtggggagatcccngggaattccggaccgg

SEQ ID NO: 251013 - DNA, 813 bp, Homo Sapiens
gtataaggtccacaccccgggagctgagtgattgcagaaactggccttccatctctctcagacaccaagctgcagatccaggcttttctgggaaagtgaggccaccatggctctggagaagtctcttgtccggctccttctgcttgtcctgatactgctggtgctgggctgggtccagccttccctgggcaaggaatcccgggccaagaaattccagcggcagcatatggactcagacagttcccccagcagcagctccacctactgtaaccaaatgatgaggcgccggaatatgacacaggggcggtgcaaaccagtgaacacctttgtgcacgagcccctggtagatgtccagaatgtctgttcacaggaaaaggtcacctgcaagaacgggcagggcaactgcaacaagagcaactccagcatgcacatcacagactgccgcctgacaaacggctccaggtaccccaactgtgcataccggaccagcccgaaggagagacacatcattgtggcctgtgaagggagcccatatgtgccagtccactttgatgcttctgtggaggactctacctaaggtcagagcagcgagataccccacctccctcaacctcatcctctccacagctgcctcttccctcttccttccctgctgtgaaagaagtaactacagttagggctcctattcaacacacacatgcttccctttcctgagtcccatccctgcgtgattttgggggtgaagagtgggttgtgaggtgggccccatgttaacccctccactctttctttcaataaaacgcagttgcaaat

SEQ ID NO: 251014 - DNA, 1330 bp, Homo Sapiens
  misc_feature (982)..(1224): n is a, c, g, or t
  misc_feature (1230)..(1231): n is a, c, g, or t
  misc_feature (1282)..(1282): n is a, c, g, or t
cacggggggggccttgtgggaaaggcccaccgcagggttggccaccttgagaagctgcgaagatggcggagtaaggcgtgccgctgcaaactggcctctgggccgggggcgagcagcccccgggaggccgagtgcatctgttggaccgtgcgaggagaagaaaaaaaatatcggccagaggagaggaactaaccgaacattcttcctccctaccttatagaggggagtggtcatctacactaaagcaaagtgttaggcgcgtccgtgcgaagagaccaccaaacaggctttgtgttccttatcacaggaagaaaattttccttgacctttaggtgcttttatattcatctcaaaaacaaaattctgaactcaggacttggcaagtgtctctatgttgtctcctagagtgggtagtcctgcttcttttacccagttactttccctgtttttgaaatgtggctatcacttctctacacattacctccatgatttggaatggaaaaggccacttttctttttgttctgcctctcaaattcaacacagaggagctcctaggattccagttatcctgctaacatctccaggaagaaagaagcaactcacatgggtcttttgctgtttgcttaattataaagacatcattttgcaagcagaaggctgagtttcatttgaaacaggtgcttaggtggtggtatttgtgaatacttttcattccaagcaagaagactaaagaagtagcaagtatgaatgacttcagggtttaaaaaaaatgtcttccagtttcagccactaccatgataagcacagttgagactgcagcagtaaattccaaatatgtgtttctaatttgacgtgaaagatactaaaaatttatatttgtatatttaaatcctggcctcatcctgtgacatagatttactgaataggaacaaaggcccaattttaaacaaaaacctaggcccgggtgtggtggctcacacnnnnnnnnnnnnnnnnnnnnnnnnnnnnnnnnnnnnnnnnnnnnnnnnnnnnnnnnnnnnnnnnnnnnnnnnnnnnnnnnnnnnnnnnnnnnnnnnnnnnnnnnnnnnnnnnnnnnnnnnnnnnnnnnnnnnnnnnnnnnnnnnnnnnnnnnnnnnnnnnnnnnnnnnnnnnnnnnnnnnnnnnnnnnnnnnnnnnnnnnnnnnnnnnnnnnnnnnnnnnnnnnnnnnnnnnnnnnnnnnnnngatgtnnctccgtctcagaaaaataaaaaacaactttggacatagaggagttgggggnagaggggggaggatgagagaattttccatgtaactccttttccttaag

SEQ ID NO: 251015 - DNA, 808 bp, Homo Sapiens
  misc_feature (138)..(249): n is a, c, g, or t
acaattatttaaggaaatgagagtattttattacaacatcattgcaattaatattatcaatgaatgataattagtagtggtgctaacagtagtagtgttggttaagcatttatttttgcatcctaatcctaatatccnnnnnnnnnnnnnnnnnnnnnnnnnnnnnnnnnnnnnnnnnnnnnnnnnnnnnnnnnnnnnnnnnnnnnnnnnnnnnnnnnnnnnnnnnnnnnnnnnnnnnnnnnnnnnnnnttaggactcatgtctgacccctcgccccatgctcttaaccacataatgccatcttttatttcagtgacaagacaaaagcatttaggtcacactcttgttgttaaacaggaaaattatataaatgcaaattgtttagaataggttttggatttccttttgagcaaacccccagtcctttaaaggatatacttaaaattttttttaagcagaggaaaatagactactatttaccaatgacaaagtttatagagttttaaaacgagaggttttttaaaaatctgcatccaaggtgaagacagttatctgtggtttctgccataactgcaaaacgctgatactctgaaactcgtttctcaaagaaatttgtttttccttctaaagaaatgttttccataaaatcaaaaggattttctgcctgaaaaacctttgagaatccaagttccacaagtaatctgtcagctacaaactcaatgtactgtttcatcaaaatgcaattcattccaatgaggccaactggcaaggcttctgttaaaaactcctgctcaattttgacagcacc

SEQ ID NO: 251016 - DNA, 657 bp, Homo Sapiens
  misc_feature (141)..(141): n is a, c, g, or t
ccattctctgaaatcttccatgtaaagacagttgtattggtgggtgcttcagacaccacttacttcagctatgactgtggtaccttatatgtaaaataattttgtgtatccattttgcataatatgctactcggacaaaantaccaggacgatttggaatggcacatccacgaccaggaacaatgacaccaagaaccattctcattttatgttgctcacaaacaagtgggccaccataatccccctaggagtaagacatacaaaaacaaagtattattaggaattaaaaaaaagctcattaacataatcatatatagatttgcatctcagagatatatacagaaaaagagaataactgcaactgaaatatgaagatataaaaattagtgtactagacatttgttgactttctactgaattagccaagactgagataagtacaaagtttaaagtgttctattatgtgtggtattctcctaaaaatgacttgccttttccaaaagaagtcaaccatccttttaaggtgtgctttgcctttgttggatgcagaccagcatataaccatcggtgcctatttaataaggtagatttgatatttattttgatcttcttatgttcaatataggaaatttggaacatgtagaaaaatacaagtat

SEQ ID NO: 251017 - DNA, 707 bp, Homo Sapiens
aaatttatcagcgtaattaaataagaaaagcaccctcctaattgccctatggaaagaaagcgattaacatttgccccaaacacttaaatgttttcttgttatttctcatactgagtcagtccacatttttaggcaggcagaggtaggtctcaggagttctgtttccagaattcctgcccatcttccttcacccaaggtgaagctctgacacggcaactctgaaaatgcgatagggagaaaagcttcaatctgccatcccttctgacagcaaaaagtaatgatggataacattgcagacattttaaatttccttggcccagaaaacacccaaccagcttcttctacagtcaccaactgtcagacagtcactcttgggaagcctacagggtatatttggttaagatattttgaacccaagctagttttcccatagcattttcacagatcttcacattatatgaattgcagtggaaaaaattcaaaagcagataattagtctcagaattatatactacaagcatcttgatttataagaatgagaaacagatatttaagagctagaaaacagaaatttgaaagagagaaaaatatcactagatgtcaggccatgttaaagcagtcaactgtactagaagctgccatataaatttctgtattcattttaaggcaattttaagacatgtaagtgaacaaaacccagtttttaa

SEQ ID NO: 251018 - DNA, 790 bp, Homo Sapiens
ggggtgtaggtggcacccccgtcctccccacaccaaaaagagatcagttctgacaagaaagctccaacgtgcccttgatggtgctgttggtagaatgcattagaccaggcacgtcccagctgatgttctgctggatgaggtacaaggtgggaggagaatatgcctcattcattactcaatcaatttcttggccttgaagaagcgtcgcaggtagaagacctgccaggtagctagtccaatgagacagaacattgaaaagatgctgaagtataggacccgagtgtttgttgactcgttggtatcacgcatctcctcttctctcttcttcatgtaggcaaaatcattaacaatagattctgaaaggcaatctaggcgtcgaatcgcctccactccatgcttcatgtctaggatcacgagttggtcaggtatccgccctgttcccttgctctcaaaacacacttcaaacatgtcataatcttcagtggtaaaggcaaatttccccttggctgcatcctctttggagtagagaatatggccagcagaatctgtgatcttgaggtggctgcgcaggccgccagcgcccccagactggtcggagatctcgtacgcgccagtcactagcaggtccttgtgaatctcctcacggaggcacttgcgagagttaatgggcagatggaaggagatggcaaggaccaatctggggccgagcaggaacaaaagcagcaacgctaacggaaaagggccgcgccgggctggtgggccagacaaaccagacatggtgctggagact

SEQ ID NO: 251019 - DNA, 665 bp, Homo Sapiens
agtcacgtgggtccccccggttccggcgcggttgaggccttcggtggtgaacgagtctccagcaccatgtctggtttgtctggcccaccagcccggcgcggcccttttccgttagcgttgctgcttttgttcctgctcggccccagattggtccttgccatctccttccatctgcccattaactctcgcaagtgcctccgtgaggagattcacaaggacctgctagtgactggcgcgtacgagatctccgaccagtctgggggcgctggcggcctgcgcagccacctcaagatcacagattctgctggccatattctctactccaaagaggatgcaaccaaggggaaatttgcctttaccactgaagattatgacatgtttgaagtgtgttttgagagcaagggaacagggcggatacctgaccaactcgtgatcctagacatgaagcatggagtggaggcgaaaaattacgaagagattgcaaaagttgagaagctcaaaccattagaggtagagctgcgacgcctagaagacctttcagaatctattgttaatgattttgcctacatgaagaagagagaagaggagatgcgtgataccaacgagtcaacaaacactcgggtcctatacttcagcatcttttcaatgttctgtctcattggact

SEQ ID NO: 251020 - DNA, 1372 bp, Homo Sapiens
aaagcaggctggtacggtcggaatgtcgggatatcgtcgacccacgcgtccgcgagtctccagcaccatgtctggtttgtctggcccaccagcccggcgcggcccttttccgttagcgttgctgcttttgttcctgctcggccccagattggtccttgccatctccttccatctgcccattaactctcgcaagtgcctccgtgaggagattcacaaggacctgctagtgactggcgcgtacgagatctccgaccagtctgggggcgctggcggcctgcgcagccacctcaagatcacagattctgctggccatattctctactccaaagaggatgcaaccaaggggaaatttgcctttaccactgaagattatgacatgtttgaagtgtgttttgagagcaagggaacagggcggatacctgaccaactcgtgatcctagacatgaagcatggagtggaggcgaaaaattacgaagagattgcaaaagttgagaagctcaaaccattagaggtagagctgcgacgcctagaagacctttcagaatctattgttaatgattttgcctacatgaagaagagagaagaggagatgcgtgataccaacgagtcaacaaacactcgggtcctatacttcagcatcttttcaatgttctgtctcattggactagctacctggcaggtcttctacctgcgacgcttcttcaaggccaagaaattgattgagtaatgaatgaggcatattctcctcccaccttgtacctcagccagcagaacatcgctgggacgtgcctggcctaaggcatcctaccaacagcaccatcaaggcacgttggagctttcttgccagaactgatctcttttggtgtgggaggacatggggtaccacctacacccaacaagtcaatgagggacttctttttaatttggtaggattttgactggttttgcaacaataggtctattattagagtcacctatgacaaaaaataggggttacctagataatgccaaagtcagcatttgtcctgggttcccttgtgtgatctgtttggactatgttttcttttcttctcccacttgctcagcagcttgggcttccattctagttcttttaccaagatttttgtgtgaccatgttgacttcatttggattgccctctttcaatttccttgtgaaaacacccttaactttctctttacccttagctgaaatgtttacatagcttctggtgatatcttttcatgattttatatctcttaaaatggtgatggatgtgacacctcataaaagtgagctttgaactgtagataactcttaaagaaaatgtcattttagacaattaaaatatttgtgctcaactgcttgacaaaa

SEQ ID NO: 251021 - DNA, 462 bp, Homo Sapiens
  misc_feature (153)..(153): n is a, c, g, or t
gagtctccagcaccatgtctggtttgtctggcccaccagcccggcgcggcccttttccgttagcgttgctgcttttgttcctgctcggccccagattggtccttgccatctccttccatctgcccattaactctcgcaagtgcctccgtgagnaatttcacaaggacctgctagtgactgggcgcgtacgagatctccgaccagtatgggggcgctggcggctggcgcagccaaccttcaagatcacagattctgctgggccatattctttaattccaaagagggatggcaaccaaggggaaattttgccttttaccattgaaggattatggacatgtttggaagtgtgtttttgaggagcaaggggaacaggggcgggttaacttggaccaattcgtggattcctaggacatggaaggcttgggagttggaaagggcgaaaaatttacgggaggaggattt

SEQ ID NO: 251022 - DNA, 1971 bp, Homo Sapiens
aacaccaaggcctttgaggtcccagcgcgggccaatttcctcaagttccaatgatgtctttgtcctcaagacccagtcttgctgctatctatggtgtgggaagggttgtagcggggacgagcgggagatggccaagatggttgctgacaccatctcccggacggagaagcaagtggtggtggaagggcaggagccagccaacttctggatggccctgggtgggaaggccccctatgccaacaccaagagactacaggaagaaaacctggtcaccaccccccggctctttgagtgttccaacaagactgggcgcttcctggccacagagatccctgacttcaatcaggatgacttggaagaggatgatgtgttcctactagatgtctgggaccaggtcttcttctggattgggaaacatgccaacgaggaggagaagaaggccgcagcaaccactgcacaggaatacctcaagacccatcccagcgggcgtgaccctgagacccccatcattgtggtgaagcagggacacgagccccccaccttcacaggctggttcctggcttgggatcccttcaagtggagtaacaccaaatcctatgaggacctgaaggcggagcttggcaactctagggactggagccagatcactgctgaggtcacaagccccaaagtggacgtgttcaatgctaacagcaacctcagttctgggcctctgcccatcttccccctggagcagctagtgaacaagcctgtagaggagctccccgagggtgtggaccccagcaggaaggaggaacacctgtccattgaagatttcactcaggcctttgggatgactccagctgccttctctgctctgcctcgatggaagcaacaaaacctcaagaaagaaaaaggactattttgagaagaatagctgtggttgtaaagcagtaccctaccctgattgtagggtctcattttctcaccgatattagtcctacaccaattgaagtgaaattttgcagatgtgcctatgagcacaaacttctgtggcaaatgccagttttgtttaataatgtacctattccttcagaaagatgataccccaaaaggagcctatggtcctcatttcaacttctaaggtcgctagattgtttctatcctgaggtattgcatcaattttaatactcctatagttttctcttcttagaagagcacaaacactccatggaacattagagttctgaggcactaccctagcttgtcctctatcatgactcatttttatctatggcaggtaggctgaagcactttgcaggtttacatcttccccagagtaacagcttttccttttcacatatactttccttactgccttactcagtgggtaagttaaagggctgaaggagagttgaatggtccacaagactaccctcttaagaggtttcacaaattccaaacagtaccagtgagagcagcacttccactggggctaggcttgagacctaaaggcaagtatgaaatgcatatgctacttcactccctctcccaacccttaataatgaggcaaagcaagagcctagtgaaggccaatgctaggtttacaaacttacccagaagcctctgcaaagcttcacaggctcctcagatgaaaataacaggaatcaatggggactacggccagacactggtttgccattctgttccttttaagaagtaacagtgctgcaaggaagtccatgtcagaaagccaacagaaggtgatttccacaactttgaacaggttgttacaagtatcagcaagaatgtgtccttttcagaaataacagtcaaatcaaagaaggttaataaaggctttaatttcatacacacaaaaaaactctatggcataattttaaaagggaacaaaacaaagaaaaaccgtaaaggatacagaggaacagttctgctaaaacacagataaaagtgccgctccatacaaaacattaa

SEQ ID NO: 251023 - DNA, 261 bp, Homo Sapiens
  misc_feature (102)..(152): n is a, c, g, or t
ctttatgttcagagtgacttttgattctgattctttatgttttgtatggagcggcacttttatctgtgttttagcagaactgttcctctgtatcctttacgnnnnnnnnnnnnnnnnnnnnnnnnnnnnnnnnnnnnnnnnnnnnnnnnnnngtgtatgaaattaaagcctttattaaccttctttgatttgactgttatttctgaaaaggacacattcttgctgatacttgtaacaacctgttcaaagttgtggaaatca

SEQ ID NO: 251024 - DNA, 1204 bp, Homo Sapiens
  misc_feature (12)..(12): n is a, c, g, or t
  misc_feature (34)..(34): n is a, c, g, or t
  misc_feature (651)..(664): n is a, c, g, or t
tactataccatnccctggtattatgatgccattngtggatgttccattatggttgacacatactgtaagtgtacaacaacctgaccccttggtatggtttgcaaacatgtccatattgcacagaatgaacttcttgctgcaaataatatatctaacatacatcctttcaaaatgtaacatccttaactagttaacatagtctagagtctaggggcaaagacaagcgaatattgatgatttagaaatgcagtagcacgttaggctacaacatggttaattccaagtcacttcatattttgcaagttctttgctcctatgattgaatacttcaaacatgtatcttatctttcctcctgagtatccaaaagtgctttggagagcaaaagtgctttgtctccccatttcacagaagcaaggaggggggatagggctgtagcaagaagggccagctgctctagagaaaatgtggcagtaccagggtaaatgttagcatccttaagcgggtatcttcagccagcaacactggtgtatgggggctagtgacggtaggatttcatgtgtaacctaagaacaactctcttcagggcatgttttctaataatcttaaaaggattcctcagcttggctctacctaactggaaaatggagatnnnnnnnnnnnnnnttccatccccaagctgtcctttcaatgctcccccagctggtctgggcacactccttcctcttgcaccacttagagcgggccagcagctccctctgggagaaatgaggccccttagctgtgcatacccagagggaacgaaacattctcttctgtagcaggtgccccgatttaggaagacaattctacaaagccttgtgagctaggcaagagtccagagagaacacatttttttcctctgaatcaagtctttctctcatttacacagtctcatcttaagaactttaagtgtgaaaggaaatatgctaaattattctgagctgtccacttagagtgtggtgtggattttcccactgtttttaaacacacagaaagacacactccaaaaggcctttccttcttgttcactggtgtggtttattcttgaagcaaggtctctctccagttgaagcccccagttggtccatgggtaagaggaaggattggtggatccgtcagctgccatattccagtttctcctaattcttcacaggaacaaaatcc

SEQ ID NO: 251025 - DNA, 1077 bp, Homo Sapiens
  misc_feature (100)..(152): n is a, c, g, or t
ggcctcgcggccttctcggcttctccagcttcggtaggagaggatccggcgccgaatcactgactggcacaggtgttgggatagtgtctcacttggtcannnnnnnnnnnnnnnnnnnnnnnnnnnnnnnnnnnnnnnnnnnnnnnnnnnnntcctgggctcaagcaattctcctgcttcatcctcctgagtacctaggactacagaaaatgatccacagtctatttctcataaactgttccggtgacatatttctagagaagcactggaagagcgttgtgagccagtctgtctgtgattatttctttgaagctcaagagaaagctgctgatgttgaaaatgtaccacctgtcatttcaacacctcaccactacctcatcagtatctaccgggataagctcttctttgtatctgtcatacagaccgaagtgccacctctctttgtaattgagttcctacatcgagttgctgacacttttcaggactactttggtgagtgttcagaggctgcaattaaggataatgtggtcatagtatatgaactcttagaagaaatgttagacaatggatttccactggctaccgaatctaacattttgaaagaattgattaaaccaccaacaattctacgctctgttgtcaactctattacaggcagtagtaatgttggggacacactccccaccgggcagctgtcccaacataccatggcgtccggcaggggtaaagtacacaaaccaatgaagcctattttggatgttgttgaagaaatagacccaattatagaataaatcaggatctacaggtctttgcagaaattcagggggtcattgatgcttgcattaaactatctggaatgcctgatctctccctttctttcatgaaccctaggcttctggatgatgtcagctttcacccctgcatccggttcaagcgttgggaatctgaaagagttttgtcatttattcctccagatggaaatttccgactcatatcataccgtgtcagctcacaaaatctagtggcaataccagtgtatgtgaaacatagtatcagctttaaggagaacagttcttg

SEQ ID NO: 251026 - DNA, 801 bp, Homo Sapiens
  misc_feature (529)..(576): n is a, c, g, or t
gggtggttatctgagaggttctaacattcacatgcaatttggtgtggccatttagctattaatgagttaatggcgcagaacttgttgatatttgaagtgttctctccccttttcccatgacgtaaatacataggtgtgttccaggatttgttcaggtttttcccccctcctaatcttgtacataacttgtattatgtgtaagttaaacattttattttgaacttggaatgttcccagtgatttcattcagcagggtatttactgccttgttggcaagtgacaaaaaatatgggaagtatttgctaccagttggtagatggtgcccttaatggtagaatgaggaaaatgtccgcaaaagcatgttttattatctttacttttttggggggttggagggggtagcctagccagaacatcattgtaatcttaaaacataagatgcttttattagatgatcaactaaaatagctggaagacagtactttagaaacagatagttgtaagattataaaatgcaaatgtaacttannnnnnnnnnnnnnnnnnnnnnnnnnnnnnnnnnnnnnnnnnnnnnnnccagtactgagcatctccacaaatgtctcctaactcagaaaaagtttcttttcttttcatttgagatttggttgcattcagggttgtaagttggcccttgcttgctaaccccgcccggttttaccgtggctttcattcctgaaactttggttatggcctttggttgggtttccttcaaaatggaggcgaaactcattggggccttacatttagtaccagggaccc

SEQ ID NO: 251027 - DNA, 635 bp, Homo Sapiens
  misc_feature (579)..(579): n is a, c, g, or t
ggttgacagtcatccacaaggcatagcctccaagtatactctcaaatgtatgaagcaactggggtgggcagaagacattttagaatgagggctttagtttaaattaaagtcatggtggagaagactcttgcttcctccaagtgtttgaaaacacaaaatgcgatatgaaaagaagaaatagaatttgtataggttgcattgatagaatgggaagctataatctttgaataaaccttacatatcaactatcttaaaggtaataaaacatatatatggagggaaatatagcagtaatgtataagatacctagtatgccatagcactgaaaagtaaagtactactcaaactactaactaggaagactattggtcagtgttttctattatatttgttctctgccaggtgttaaccgaaaaatttgtaaaatgcttcaacagtgttaataattttaatgaatattgaattgctgcatgtctagtccttgaaatggtcaaattctatataatgagaataacaaggtgagataatgcaattgacaatcccaaacaaatccagtgtcaaaggaattttcagttttgnaagctatccctcataaagtcaacatcagagtttgcaactgatggtggcataacttg

SEQ ID NO: 251028 - DNA, 1235 bp, Homo Sapiens
gaagctctggtggagagagtgttgtctaaaacaagttccggaagggaggctgcccttcgcggtccgagaaccaccggcctccccagtttgagggctgttaccccgtgcgcgcttcgacgttgctgctgttggctctcctcgcccctcgttcccttgggaaccgcctgggaactccgccatgtcatccacttcgcccaacctccagaaagcgatagatctggctagcaaagcagcgcaagaagacaaggctgggaactacgaagaagcccttcagctctatcagcatgctgtgcagtattttcttcatgtcgttaaatatgaagcacagggtgataaagccaagcaaagtatcagggcaaagtgtacagaatatcttgatagagcagaaaaactaaaggagtacctgaaaaataaagagaaaaaagcacagaagccagtgaaagaaggacagccgagtccagcagatgagaaggggaatgacagtgatggggaaggagaatctgatgatcctgaaaaaaagaaactacagaatcaacttcaaggtgccattgttatagaacgaccaaatgtgaaatggagtgacgttgctggacttgaaggagccaaagaagcactgaaagaggctgtgatactgcctattaaatttcctcatctttttacaggcaagagaacaccttggaggggaatcctattatttgggccgcctggaacaggaaagtcctacttagccaaagctgtagcaacagaagccaacaactcaacatttttttcaatatcttcctctgatcttgtttctaagtggctaggtgaaagtgaaaaactggttaagaatttattccaacttgccagagagaacaagccctccattatcttcattgatgaaattgattctctctgtggttcaagaagtgaaaatgaaagtgaagccgcacgtagaattaagacggagttcctagtgcaaatgcaaggggttggtgtagacaatgatggaattttggttctgggagctacaaatataccctgggttctggattctgccattaggcgaagatttgagaaacgaatttatattcccttgccggaaccccatgcccgagcagcaatgtttaaactgcacctagggaccactcagaacagtctcacggaagcagactttcgggaacttgggaggaaaacagatggttattcaggggcagatataagtatcattgtacgtgatgcccttatgcagcctg

SEQ ID NO: 251029 - DNA, 1206 bp, Homo Sapiens
  misc_feature (1022)..(1022): n is a, c, g, or t
gtgacctcgtgcagtttcagggaggagtccatcacctgactggactgggcctttcagggggacgagaacgtatttcttccaacgaaacctgaataaccagctatctgcctgggacgccgcgaggcagaagtaggcgggcccattgacttagtgtcaaggcggaggccgcgcttcatgccagcggtcacggaggcagcggaaagccgagccaggcgcctgcgcgctgggaagagtaggttcagagtgcattccggaacccggggcgcggcgcactgcgcaggcggccggactccgctcagtttccggtgcggcgaacaccaaagtccgggaacttaagcattttcggtttctagggttgttacgaagctgcaggagcgagatggaggtggacgcaccgggtgttgatggtcgagatggtctccgggagcggcgaggctttagcgagggagggaggcagaacttcgatgtgaggcctcagtctggggcaaatgggcttcccaaacactcctactggttggacctctggcttttcatccttttcgatgtggtggtgtttctctttgtgtattttttgccatgacttgttcgctgatatctaaattaagaagttggttcttgagtgaattctgaaaatggctacaaacttcttgaataaagaagacaggactctcaatagaagaatttcacatctccaagggacccttcctttcattttacactttgttactaatttgcagaactctattaattgggtaggatttcacccattcctagctaagttcttaaaattaaaccctttggttcgtgtttaaaaactttcaaacatctgatggctttacaggggctgaatataaaagcatttgtacttaaaagtcttgtgtattcattaagaaatatagtaatgtcttttaatgttttaagaattgatcacgggttactatgaagcaagtaataggatgaataattaaggaaaggtttttgtgaaattcaaaagtcaattattcaaaagcagggaaagattntgagagagggaacaaagtattcttagattgcgtagaagctgctaagttccagttttaatttttaggtttagttggactctgttatgaaaagataggttatgggtgggcgacaggttgatacaggcttagagggatcttccccttttttccttttaaatcttgagcctctataacgaaggatatg

SEQ ID NO: 251030 - DNA, 500 bp, Homo Sapiens
  misc_feature (389)..(389): n is a, c, g, or t
  misc_feature (473)..(473): n is a, c, g, or t
gaggtggacgcaccggcgtgttgatggtcgagatggtctccgggagcggcgaggctttagcgagggagggaggcagaacttcgatgtgaggcctcagtctggggcaaatgggcttcccaaacactcctactggttggacctctggcttttcatccttttcgatgtggtggtgtttctctttgtgtattttttgccatgacttgttcgctgatatctaaattaagaagttggttcttgagtgaattctgaaaatggctacaaacttcttgaataaagaagacaggactctcaatagaagaatttcacatctccaagggacccttcctttcattttacactttgttactaatttgcagaactctattaattgggtaggatttcacccattncctagctaagttcttaaaatttaaaccctttggttcgtgtttaaaaactttcaaacatctgatgggcttttacaggggctgaantataaaaggcattttgtacttaaaaaa

SEQ ID NO: 251031 - DNA, 799 bp, Homo Sapiens
  misc_feature (767)..(767): n is a, c, g, or t
ttaattcaaggactgggagtaaactaggtatttctcccctgatgttggctgcaatgaatggacatgttcctgcagtaaaattgctgctcgatatgggttcagacattaatgcccaaatagagaccaatcggaacacggctctcaccctggcctgtttccagggccgagcagaagtagtgagtttgcttctggaccgaaaagccaatgttgaacatagggcaaagacgggtcttacccccttgatggaagcagcttctggagggtatgcagaggttggaagagttcttcttgataaaggagcagatgttaatgctccccctgtgccttcctcaagagatactgctttaacaatagcagcagacaaaggtcactacaaattttgtgaactcctgattcataggggagcccacattgatgttcgtaacaaaaagggaaatacgccactttggctggcatccaatggaggtcattttgatgttgtgcagttgctagtgcaagcaggtgctgatgtggatgcagcagataaccggaaaatcacacctcttatgtcagcatttcgcaagggtcatgtaaaagttgttcaatatttggtaaaggaagtaaatcagttcccttctgatatagaatgcatgagatacatagcaacaattacagataaggaactgttgaaaaaatgtcatcaatgtgtcgaaaccattgtgaaggctaaagacccagcaagctgcagaagcaaataagaatgcgagtattcttttaaaggaacttgntctggaaaagtcaagagcagagagcagaaagc

SEQ ID NO: 251032 - DNA, 588 bp, Homo Sapiens
tgactgcaccactgtacttcagcctgggcaacagagggagaccctgtctcataacaaacaaacaaaaaaattctttcctttagaggacttttaatttatgtatctgcaatttttttaaaaaaacacaagctggcagtatgtatctgcgtttaaaatgatcttttcctctgactccagttccttatagatattgatcacatctgggcttttgttgttgttgttgttttctctcttatgaaactatcaggatcacatctattttatttctcaatgtatatccagagtttggtatagtgcaaaaaatagaggaggtgacaattacaacacttttctgtcacattcccttttgatcttccaggcaaaagttagaactatacctatcagggactcgatggtgggcaccccgccgaggtagtccagcagttcgtggattggatcattgtgctccggagcaatggcatcctggtgatccaacaggagagtgtgggtgttgatgatttcaccaatggaaatgtagattactggtttggtgagggttactaaatcagagtactcatccacattaaatttatcctgaagctctgggac

SEQ ID NO: 251033 - DNA, 1547 bp, Homo Sapiens
  misc_feature (698)..(719): n is a, c, g, or t
tcctgcaggaattcataggtgatgaagtggatggactggaaggggatgttcatggtcagctgcgtggtgtagctccggtagaaggcccccaacccctcggtcctccacaccgtccggatgcagctgattgctgaccggtgctgcgagttgtacatctgcaagcgctgcttcaccacttctgctggattcattaccgcatcgtggagcagggtggccatactcccagctatccctgcaaaacaaactccagaaaattaccctctgcgatcgggtgttctcaggaagttcctggaacctaaaatcagacggaacccaggacttagctttctaagaagcaaaatgtactacccagtccgcccaggtgagcactgactcttaaaaccctgaagtgatggtggaaatatgataaaaatggggatggttaatttaggcacactcaaccacattttaatcttgcaaaaacatggttttctttcttgtagtcaaccctgggaaaaagctaaacctgcaagtgttggtggttcccagaaaccacacaccatggctttttccactgtctagatgttaactctctcttgtccctcgcctttgtctacacattaactcactttgcccttaagctggggccctgaaaggagatatcatatctacagctgagaagggggaaaaaagaaaatctggttacaatccaggctttnnnnnnnnnnnnnnnnnnnnnnctgggcaagagaagaggaaatcaggaaaatctgcattttgtagatttccagggtcagtctgcaaagcgacgggactgaccccatctgagagtcgggtcaggcctggcttcaagaaccaggaacctcaaaagccagaatcaggcctggaattttgctttcggctttgagtttcctccctttgcggtgacactgccccgtaattaaaatgaccacgggaaggtgggaggaatgaggaacaccaggatgactcttcagcaatgcatgtaatacccactcccccaccacacacacacttataatcattcccagcaagatcaccacagcatacaccacatattgcagaaacagtgcagggcagcacttggcataaaatggattccgtcaaatctctttcaaggagtaaaaccattacgtaaggcagtttcagcaaaagaagggccccaatgtcatagaatcaggggtaggtcagggcatagctctttagagatcatctcaataaatgcactaatggccaatttttacaaagcagaacaaatatctgcaaaccagccaggcacacttatgaccaaggttgggtaatgggaggagagatgctttttgagcagagtaaaaagagagggggagaagttattgtgggtcaaatctatgtctccattgttgaaaaaaatgaattttgtcaaaataaaagtactttatgctgctatccatatttccattccaaacccaaacaagaaacaataaaagccaaccccactggagaggagaaaataaaagctcagccctccccaataaaacatgccttacgtaagagctgctggcagatttgca

SEQ ID NO: 251034 - DNA, 589 bp, Homo Sapiens
atgtttttgcaagattaaaatgtggttgagtgtgcctaaattaaccatccccatttttatcatatttccaccatcacttcagggttttaagagtcagtgctcacctgggcggagctggtagtacattttgcttcttagaaagctaagtcctgggttccgtctgattttaggttccaggaacttcctgagaacacccgatcgcagagggtaattttctggagtttgttttgcagggatagctgggagtatggccaccctgctccacgatgcggtaatgaatccagcagaaggtaatgtttcatggtcccagggaggggcagtaggggatgtgcaaaggggcacaaaaaatggttgtgggagagtggagaggactgaaggtgggcagagcggctcctagtctccagtcagaccagacagaagaattgaattttttactacgttatcaaaggcctcaaaaaaggacgtgaacataagagtttttggtattcctgtgctcggagctactcaaagtgtgttctacagaccagcagcatcagacatcttgaggggtgttggaaatgctaattctgaggctgggtgcagtgctcat

SEQ ID NO: 251035 - DNA, 1286 bp, Homo Sapiens
  misc_feature (18)..(18): n is a, c, g, or t
  misc_feature (30)..(30): n is a, c, g, or t
  misc_feature (45)..(45): n is a, c, g, or t
  misc_feature (64)..(64): n is a, c, g, or t
  misc_feature (72)..(72): n is a, c, g, or t
  misc_feature (77)..(77): n is a, c, g, or t
  misc_feature (109)..(109): n is a, c, g, or t
  misc_feature (118)..(118): n is a, c, g, or t
  misc_feature (184)..(184): n is a, c, g, or t
  misc_feature (826)..(826): n is a, c, g, or t
  misc_feature (1017)..(1026): n is a, c, g, or t
ttaaacacctaaacatgnaaaaaacccagntgtgtggttcctggnaacccaccaaacactgcangtttaacnttttnccccaggttgaccaacaaagaaagaaaacccngtttttgcnaagattaaaaatgtggttgaatgtgccctaaaattaacccatcccccattttaatccatatttccnaccatcacttccagggttttaaagagtccagtgcctcaccctgggcggagctggtaagtacattttgcttccttagaaagctaagtccctgggttccgtctgattttaggttcccaggaacttcctgagaacacccgatcgcagagggtaattttctggagtttgttttgcagggatagctgggagtatggccaccctgctccacgatgcggtaatgaatccagcagaagtggtgaagcagcgcttgcagatgtacaactcgcagcaccggtcagcaatcagctgcatccggacggtgtggaggaccgaggggttgggggccttctaccggagctacaccacgcagctgaccatgaacatccccttccagtccatccacttcatcacctatgagttcctgcaggagcatgtcaacccccaccggacctacaacccgcagtcccacatcatctcaggcgggctggccggggcctcgccgcggcgccacgacccccctggacgtctgtaagacccttctgaacactcaggagaacgtggccctctcgctggccaacatcagcggccggctgtcgggtatggccaatgccttccggacggtgtaccagctcaacggcctggccggcctacttcaaaggcatccanggcgcgtgtcatctaccagatgccctccaccgccatttcttggtctgtctatgagttcttcaagtactttctcaccaagcgccagctggaaaaatcgagctccatactaaaggaagggatcatagaatcttttcttaaagtcattctctgcctgcatccagccccttgccctctcctcacacgtagatcannnnnnnnnngcagggtgctgcctatgggccctctgctccccaatgccttagagagaggagggtgacggcacggccgctcaccggaagactgtgtgcggggacatccgaggtggtggtggacaggaaggacttgggaaggggagcgagaaattgctttttctcttcctccctgggcagaatgtagcttttctgcttcactgtggcagcctcctccctggatccttagatcccagaggagggaagaaaatttgcagtgactgaaaacagta

SEQ ID NO: 251036 - DNA, 447 bp, Homo Sapiens
  misc_feature (24)..(24): n is a, c, g, or t
  misc_feature (69)..(69): n is a, c, g, or t
  misc_feature (100)..(100): n is a, c, g, or t
tgcgattcggggttttcctcaggnaagttccctggaacccttaaatccggacggaaccccaggacctangctttctaagaggcaaaatgtactaccccantccgcccaggtgagcactgactcttaaaaccctgaagtgatggtggaaatatgataaaaatggggatggttaatttaggcacactcaaccacattttaatcttgcaaaaacatggttttctttcttgtagtcaaccctgggaaaaagctaaacctgcaagtgttggtggttcccagaaaccacacaccatggctttttccactgtctagatgttaactctctcttgtccctcgcctttgtctacacattaactcactttgcccttaagctggggccctgaaaggagatatcatatctacagctgagaagggggaaaaaagaaaatctggttacaatccaggctttaa

SEQ ID NO: 251037 - DNA, 1065 bp, Homo Sapiens
  misc_feature (935)..(935): n is a, c, g, or t
  misc_feature (1031)..(1031): n is a, c, g, or t
ttaggggacggtgggcaagggtcgcccttcgatagcgcggcggctggtccaccagagaaaccaagttttctaggtcgccggggaaaagcggaaaattagacttgagccagccttgctcctgtgagacattcgtgcactcataacccagcagtgggtgcctctacctagaatgagcccttcatttcccggatccgttcagggggaaacagcgaaatccccaaatccgcttccttacgtggctaataaaggggtgcttacagagcatggaaaaacaaaacaaagaaacaagaataccttgagtgttttgacgtttgaaaacccgactccggagaatcatggaatcatattccaagtttcagtgtctaatgaagtttaaggggacgcctattacttgagtttgtaaaatcgcggcgtcgcgcccgccccaagtcaaagctgagcagagcagggatggggaaggtctccggccccaggcgcggcgcgcggggcttctgcccagtttcctgcttctcagccgcggtgtctgccccggcccagagcagtctgtgcaatttagaaactcgataggaggcagcagctggtctcccaccaccctaaaaataatccgttccggcgcactgcgtgcttcgcctaggggaggaaaactgtcatcggagagttctgcgtccgggtttgaaatttacatcttaagacagtgtaggaagtcggtgttttgaaggtagctcaagtgcaccggcaggggtttgaagcagcgtgaagctattgcccaagagtaaaccatataagaagaaatgagcctttcattttgtggtaacaacatttcttcatataatatcaacgatggtgtactacttcctgctttgtggatgccctcaacctggtccctcatgtctttctgttgtttatcacttttccaatattggttattgggtggnggagccaaagctcatggattcttacattcgctctcctgtttgtgcatgtctgtgaaatagcaagaagcattggttcagactcgtaagtgatctaangtttaccactgcagtataccagtgggtatatggt

SEQ ID NO: 251038 - DNA, 1722 bp, Homo Sapiens
  misc_feature (984)..(984): n is a, c, g, or t
  misc_feature (1202)..(1222): n is a, c, g, or t
  misc_feature (1477)..(1532): n is a, c, g, or t
  misc_feature (1571)..(1571): n is a, c, g, or t
  misc_feature (1589)..(1589): n is a, c, g, or t
  misc_feature (1650)..(1650): n is a, c, g, or t
  misc_feature (1657)..(1657): n is a, c, g, or t
  misc_feature (1663)..(1663): n is a, c, g, or t
  misc_feature (1676)..(1676): n is a, c, g, or t
  misc_feature (1705)..(1705): n is a, c, g, or t
cttttgttctcccactggtaatcacgttaatgaaatcttagaatcacccaagaaggcaaagtcgcgtttaataacgagtggctgtaaggtgaagaagcatgaaactcagtctctcgccctggatgcatgttctcgggatgaaggggcagtgatctcccagatttcagacatttctaatagggatggccatgctactgatgaggagaaactggcatccacgtcatgtggtcagaaatcagctggtgccgaggtgaaaggtgagccagaggaagacctggagtactttgaatgttccaatgttcccgtgtctaccataaatcatgcgttttcatcctcagaagcaggcatagagaaggagacgtgccagaagatggaagaagacgggtccactgtgcttgggctgctggagtcctctgcagagaaggcccctgtgtcggtgtcctgtggaggtgagagccccctggatgggatctgcctcagcgaatcagacaagacagccgtgctcaccttaataagagaagagataattactaaagagattgaagcaaatgaatggaagaagaaatacgaagagacccggcaagaagttttggagatgaggaaaattgtagctgaatatgaaaagactattgctcaaatgattgaagatgaacaaaggacaagtatgacctctcagaagagcttccagcaactgaccatggagaaggaacaggccctggctgaccttaactctgtggaaaggtccctttctgatctcttcaggagatatgagaacctgaaaggtgtctctggaagggttcaagaagaatgaagaagccttgaagaaatgtgctcaggattacttagccagagttaaacaagaggagcagcgataccaggccctgaaaatccacgcagaagagaaactggacaaagccaatgaagagattgctcaggttcgaacaaaagcaaaggctgagagtgcagctctccatgctggactcngcaaagagcagatgaaggtggagtccctggaaagggccctgcagcagaagaaccaagaaattgaagaactgacaaaaatctgtgatgagctgattgcaaagctgggaaagactgactgagacactccccctgttagctcaacagatctgcatttggctgcttctcttgtgaccacaattatcttgccttatccaggaataattgcccctttgcagagnnnnnnnnnnnnnnnnnnnnngcacatgcctactgctgcctgtcaccgctttgctgccaatgcaacagccctggaagaaaccctagagggttgcatagtctagaaaggagtgtgacctgacagtgctggagcctcctagtttccccctatgaaggttcccttaggctgctgagtttgggtttgtgatttatctttagtttgttttaaagtcatctttactttcccaaatgtgttaaatttgtaactcctctttggggtcttctccaccacctgtcnnnnnnnnnnnnnnnnnnnnnnnnnnnnnnnnnnnnnnnnnnnnnnnnnnnnnnnnaggagacagtttggcctattgttacttccaatttataancaagaaggggcctggatncccttttaaattacacacactctcacacacatacatgtatgtttatagatgtgtgtctttncctgaancatagnaagtaagactgcntacagaagacatattccttggatgtgagncctatttgaaaagagcc

SEQ ID NO: 251039 - DNA, 603 bp, Homo Sapiens
aaaataaaaaacagcagaagccctgatattacctctttttcctcatttcttatactaccttttaaaataaagcaggaaatgtggccagcagctggtcccgtctcttctgccccaacagctgtatccactttagcacaaagaaaaacaaggatgctaaatacgtatatactttatcaagcagtgatgtttcacaaagaatttcttaatgcctcttacactgaaggacaccataattcaatttatacaactggttaatagattcaagggaataaatcccaccttaggaaaatagtaccaatcgtgtcatttaagtggccagaaccactcaatttaaaaaattattttaaaataggacaaatacttttgaaacacagagaataagattctttgtgaagcctcactttacacgttttcattcacatttcacaaccttcaatatctaatcatacatatataaatttaacctaaaattttaatacaacaaaaataaagatgttcaacaatttattcaatctcagtgatagggtaatcactgctggtcctcaaagaaacattagccattcttattctccaattaactaaaacgcaggagtctcatatgta

SEQ ID NO: 251040 - DNA, 397 bp, Homo Sapiens
  misc_feature (284)..(284): n is a, c, g, or t
  misc_feature (352)..(352): n is a, c, g, or t
  misc_feature (382)..(382): n is a, c, g, or t
ccttcctgccaggctccgttgtaggggttacagaacagtcgttcccgcctcacaacctgtggatacagctgttggggcagaagagacgggaccagctgctggccacatttcctgctttattttaaaaggtagtataagaaatgaggaaaaagaggtaatatcagggcttctgctgttttttatttttaacatgttcataattaaaaagtattttccagcagtccaaagatgtaagttatcttacacataaaatgttttattttgttatttggttatggaaaatnggaatccttgttcttggcacaactgtgaaatgtttttgtttgctagattaatacgatttggagacccngaatttggtcttttgggtttcccagtgccntcaccagccttattt

SEQ ID NO: 251041 - DNA, 846 bp, Homo Sapiens
ggtacggcccggaagttcgggatatcgtcgaccacgcgtcggaaacatttgaaacttgtgggaaagctctatgaccagtgtcatgataccctggtgcagttggtgggtttttagcatctaatctgagcacagaagattatataaagcgagtgccttcaattgatgtactctgtaatgaatttcatacaccccatgatgcagcatttttcctgtctaggccaatgtatgcccatcatatttcgtcaaagtatgatgaacttaaaaaatcagaaaagggaagtaaacagcaacataaagttcataagtacattacatcatgtgagatggtgatggcgcctgtccatgaagcagtggtctccttacatgtttccaaagtctgggatgacatcagccctcaattctatgctacattctggtcattgacaatgtatgaccttgcagttccacacaccagctatgaacgagaagtcaataaacttaaagtccagatgaaagcaattgatgacaatcaggaaatgcccccaaataaaacgaaaaaagagaaggagcgctgtactgcccttcaggacaagcttcttgaagaagaaaagaaacagatggaacatgtacagagagttctacagagatgaaactggaaaaggacaactggttttagcaaaatctaccaaaaatgagaccatcacaaaatttctacagctgtgtatatttcctcgatgtattttttcagcaattgatgctgtttactgtgcctcgtttgtggaatggtcctccacgcgaaactcaaattttccacaccttctttgctatgatcgagttctctgactaattacacagtgcagcgtcgga

SEQ ID NO: 251042 - DNA, 1434 bp, Homo Sapiens
  misc_feature (56)..(56): n is a, c, g, or t
  misc_feature (575)..(584): n is a, c, g, or t
  misc_feature (788)..(788): n is a, c, g, or t
  misc_feature (791)..(792): n is a, c, g, or t
  misc_feature (796)..(855): n is a, c, g, or t
ctctcgggtcttttgttcccccctgtggggccccaaaacgcccagaaaagcgcgtntctcgtttttgtccttgggagggtggagagagggcgcaacggggcccgcgttttccgcgtgctagcgtgggagagaattccccacacaactttgtatatgggatacaaaggtttttgtttccccggttgaaaaatcaccaaagacctttgttcccctctttaaaccggggtgaaagggcaggaatcaaaaaatattcgggttattgcggggcttatacccccggagcgcagagttgttccgctcttccccccagattctaaattgggtggccctgtggccaagaatggttatttttacctcccggccccccttttttggggccatgggtttaatccccaagtgccaaccaaggggcagaatttccgttgggcgatgtccgagttcaattattaccctttgcggatggagttagcgtttcccgcctgggcgcctataaggggattcacacaataccccacaattggttgacaggggccggggcgagactggaaattagatgtcggggtggggctcccaannnnnnnnnncagtcaccgggctttgccctcgcatatggatttgttttggtaccctaggtttccgctcgggcggtttttatttgttgggatgcaaacgctagttctttaccggggtctcgttcgggcacagagtcaggcccaggtccttttccgttttcggctcggggccccggtcgcatgggtttggtatccttctcctcgtccggggttgtnggnnaagnnnnnnnnnnnnnnnnnnnnnnnnnnnnnnnnnnnnnnnnnnnnnnnnnnnnnnnnnnnngggtatgaagaactttgatttattctttctttacactcaagaaaacacaataaagtaaaacacagatcaaactaccatgcacttgaaacactatgtacccttctgcatttcatgtcttgtttagcatgtatttcagggctcactttacccatattaacaacaacaaaacagtagacacaggaatactaacacataaacaactaacattaaacacggaaatggatttcgagatgtgtgcatgtacacaaaaaaatatatacaaagatttgcctggatacctgaattgcctcaagttcccattttagaagtaaactagatggagagttcaaaacccaaagtcatttagaatgtgaaaatcatttagaaattctcacttaaggcacccacagaattaggggacccacaatactcaattctaatcattataaaatgatatctaggcacttgggtaaatctaagactgtatttgttctagttacagactgatgattttaagagtctcaagataagtcttggacaccaactgaattccacattttaaattggggccaggcatggtggtcacgcttataatcccaa

SEQ ID NO: 251043 - DNA, 372 bp, Homo Sapiens
aattatatataacaaagatgtctatctcaatgcaaagaagtcaaagccctaaaaatgtccatttttctctgttaaatattaatacatttaacaattccaggcaggttttctcatattcttacctattctgaaatggtaaaggggacctaatatagtccagatctgatcttgagcgatacgtagtatgtcttggttctccatataactccagcccaccagaagaatgataaaatgagtcagtcttttctgcacctaaagtaacccaaaatattccttgtaaagaaaaataaaatcccaagaccttaaaaaatttctacaaaatagagtaactgctcaaaagactattatactatattatacaatctcctccca

SEQ ID NO: 251044 - DNA, 1381 bp, Homo Sapiens
ggtcaggtggtatcgacagacaggagctggtagagataattcttccaggttttcattgaatggtggtgccaacattgaagccatcattgcctctgaaaaagaagtatggaacagagaaaaattgactctccagaaatctttgaaaagggcagaggctgaagtatacaaactgaaagctgaactaagaaatgactctttacttcaaactctgagccctgattctgaacatgtcactttaaagagaatttatggtaaatacttgagggcagaaagttttcgaaaggctctcatttaccagaagaaatacctgctgctgttactgggtgggttccaggaatgtgaagatgccaccttggccctgcttgcccggatgggggggcagccagctttcacggatctagaggtgatcaccaatcgcccaaaggcttcaccaaggtttcggtcggccgtcagagtatccattgcaatttccagaatgaaatttttggttcgacggtggcatcgagtcacaggttctgtttccatcaatattaacagagatggctttggactgaatcaaggtgcagaaaagactgactcattttatcattcttctggtgggctggagttatatggagaaccaagacatactacgtatcgctcaagatcagatctggactatattaggtcccctttaccatttcagaataggtacccaggcactccagctgatttcaatcctggttctttagcatgttctcagcttcagaattacgatcctgacagagccctaacagattatatcactcggctagaggcactgcaaagacgacttggaactatacagtcaggttcaactactcaatttcatgctggcatgagaagataatcctttgaaacatcattaattgaagtgattttaaatagatttccttttgtaaatcaatggctcttttgtgcttttgtattgtgaatattcaatgggaccaatatgaacacagcttatgattgtatacaaatcccttgccagcacatgaaaacaaactggaatttgtatatataagcattgtgtatgtattcatgcacaataattattgaattacctgtatatttgtggaatgctaatttaaaacattaaattataaaccttgtgtatttatcaaatgggtgaaaagattaaacttttacgcattacaatactgctgaatgtgtagctcgaggtgtcctgcacttttcttataaggctactgaagttacatgttttgcctaatatattctactggtgatgaagacagataatatcacttgtagagacctatttttgtataatggtagaagttttgaattttatggggtattttgtcaagtactgaaataaaaatgacttcaccattttcaccaa

SEQ ID NO: 251045 - DNA, 403 bp, Homo Sapiens
  misc_feature (57)..(57): n is a, c, g, or t
  misc_feature (126)..(126): n is a, c, g, or t
  misc_feature (356)..(356): n is a, c, g, or t
ttccgcacacggtagtaggacggtagccggtattcaatcttcaaatcagcgccgcgngaagtgcgggcggagtgttgctcccctgtctctggacgacgctgtgactgatcccaggcttggagccgnagctgcgagcaaggcagtgaaagggtggcaggtatggctttgctggactcggaggacgtaagagaaaggcggggactggcttctaggtttaccctaccgaagataaaactttagtctccaagcgcagtgacttcaggtttggatatgtggggtcctgttcaacttgagtagcttgagagaaagcaagagttggggctccgactggcacttgggtagatgtcccagggcgntcttggttggggacttggggagaggcttcaatttttgcattttccct

SEQ ID NO: 251046 - DNA, 1059 bp, Homo Sapiens
  misc_feature (562)..(571): n is a, c, g, or t
acaaatccactccaggggtagcttttgacaggactttctgtttcagatttcaggtactcagactccacctttacttttacctatgttggcggccccagaaggtatttatgggtgtagagttgcttcatttcctgttcacactcttgtgtttcctttgttcttagcgtgttccgtgttcgggtattttggttgcttgtttgattactgtggcttttctttacctacaacccaagcctgacgtccctcggttttaaatagcagggggaggggaatcaatgtttgattcaggtgtttcgaagaccatgccacaggcgatgagcagaactcttcatgttgaaacggttctgctacagtactagattgctctcaggcgatttggggttgatacaggcaagccggtgcaaaactggaatactggatatgaagtgaaatgtataaaagacataaaatgtcacaaaatagtttgatcacaagtgttgattttcctggtgagttggggctgcgtgtttccatgttttctgaaggttcacataaacatgcagcctgccaattctctgtacannnnnnnnnncaatgagtggtattttcggttttcacgtttagttgtaagacagaaattggagacttatatgtagctggagtggatgacttctttcttttgggggaagaatgagagatgcacatttcgttagtaaattgtgaacaacttgaaacaaacccaaatccaattgtgaatttaagaagtagagttaaaatgaaaggtagccattcaaatactatgccttgctgccttcacttattaagttaggattttcttccttttagccctttagggatacagtagtttaaaagagcagtagccacatatgaaaggatcagatttagcttagagggaattccttagaaccagccctgctgttaagacttgacattcaatattgtttgatcacattccaaaatatagcttagctaatggcaacatttgtaaacatataaattgcaaaagaagctttcttgtgtacatacatttttaaaagcttgaaattgatgtgaactttt

SEQ ID NO: 251047 - DNA, 486 bp, Homo Sapiens
  misc_feature (328)..(328): n is a, c, g, or t
ctctatttattctctttaaagagagagaaaactatgagaggccaaaattatttaattaaatctttaccttagcgcaagggaaaaaatggaatttgcctaatataggtgatgaagcatacacaatgaacagaaacaatcacattttagtaaaaggcaaaaatttgagacttataagctatatggtagcttatttttgggtggggaagaaatgagaaaagaatataacatctcttactggcatgacacattttgataaaaaatcttattgtcctttcctactagaatgatccactgtaaggcaaaaataatatacaaggcaaagtttttntttgggaggacagagtctcactctgtcacccgggctgggagtgcagtgggtacgattcttgggctcactggcaacctctccctcccggggttcaaggtgattcttcgtgcctcagcctcttgagtagctgggggtttacagggcgcgtgccactgcgt

SEQ ID NO: 251048 - DNA, 815 bp, Homo Sapiens
  misc_feature (103)..(103): n is a, c, g, or t
  misc_feature (186)..(186): n is a, c, g, or t
gatccacttcaaagctaacatgttgccaatcagaggatgtgatcacaattcgtaataaaggatccaggagtttttgtagataggtagcaccatataccttganacagaatgtcattattttactggccaagctgttgcctcggaagagagtctgcatggagtctgccaattctacttctttagaanacatgttgcagagcagttggtagagtaaatcccgagaatcaaacagagtaacccaagaactcgagctagtttcatcccactgaggaacaaggaaccacattggccagagccatcgctatagggagttctccttgatcacccatcattgtgaccagttccaccaatctctcaaaccgatcaggccaatactgtttctgcaagtgtgtcaaattctgtgccttgttgaaggatttttgtcagaacttccataaatgtagctcttgtctggagatccttgtggtaacctaagcctatggagtgcatgagaccactgtctacgttggcattgagtaagtttgacattgcaaggaccgtacagtgcctcagtgatgccagcctccgagacatgccacgtttcctgccacctgtttgcgcactttcatcttcaacttcactgcagtcattcaaaaggttcataaataatgtgaagtatttaagaaataactgtgatttggcttccatcaattccacaccatctccttcttcaggctgcagagggagaccagctagaagtgaaactactgcttccatgcttgcctggtccaaatctcttgtaagacattttacatcatcatctgctgcttggttcc

SEQ ID NO: 251049 - DNA, 1000 bp, Homo Sapiens
  misc_feature (87)..(87): n is a, c, g, or t
  misc_feature (869)..(877): n is a, c, g, or t
ggatatatgcagatgctgatgaaccagataactctctaaggatggaatactgcacatttcacagacattatagtggagattaataanatgttttctcttcaacaaggtgcatgcatttcagtcacagtatttgttagactcagaagaacagtacatacgctttatgaataatccatattatgatagtaatgatgcaggtagatgttctattatgaatagttttgataaagcagaaaacctcaagcaaggtagaatgttcaatataaaccttaacaaactgtatacttgttgcttaggaacttaaaacttacttacaaagttctgcttaaaagatacccatcctattctaaccaagtatcttcctatatgccaagctgtgactttagatcattctttaagattaatacatatatccagaactagaaaccaaggcgtaccacaaaacgtgcttttatgtttagtgtttttgtgtgtttttcaactaaaagaaataagaatcaaccattttcttcatataataatttaatatatgccagccaaacaaagtatttgtatctttattcaattaaattaaaacagacctgccaggtatattatataacattcactatatacatatgatttaggcaatgcaagataattctagatatgctgattactcaactatgtgtaaaacatgagcggtgtcagtgatgcccagcaagtgctccttttcacattgggtgcctgcatttccatggtatggttagagggatagctacgagccatgacatggactaccagtaaacttctgtgggagaaggagggaaaatgacaatctagcatagattaacagtctcctaaatgcaaatagaatagttgacagttannnnnnnnnaaaaagttcttctgtcatgttaatgacacaaaacttctcttttttgaaggcaacaccaccacattttgtttgggtgtgtggggacaggtggggggaatgctcttaaaattggtacaattattc

SEQ ID NO: 251050 - DNA, 634 bp, Homo Sapiens
ggattactagcattacagcagattgcagattacatcatggccaattctttctccgggtttttcttcacctcctctcagtcttggcatggtcacacctatcaatgaccttcctggtgcagatacatcctcatatgtgaagggagaaaaacttactcgctgtaaacttgccagcctgtacagacttgtagacttgtttggatgggcacacctggcaaatacctatatctcagtaagaataagtaaggagcaagaccacattataataattcccagaggcctatctttttctgaagctacagcctccaatttgggtgaaagtcaatataataggagaagtggttgaccagggaagtaccaatttgaaaattgaccatacaggattcagttccccatgctgcaatctattcaacacgtcctgatgttaagtgtgtgatacacatccatacccttgcaacagcagctgtatcctccatgaaatgtgggatccttccaatttctcaagagtctcttcttctgggagatgttgcctattatgactaccaacggtcacttgaagaacaggaggagagaattcaactgcagaaggttctgggacccagttgtaaggtgctggtactcaggaatcatggtgtgg

SEQ ID NO: 251051 - DNA, 547 bp, Homo Sapiens
atttccgcgggcgctgagcactagagagagcgtcttgtggctgcggcctgcccctcagcctcctccgcgcggttacccctgtacccgccgccatccgtcctggcgctccggatgagtcaatgaggggcagggcccgaggagtggtcttcccaagaacccctggtggcctcccaaggccggtgctgtgtacctcctccccgacaaaaggggaaactgaggccccgaggggagtgggaagagccggctggacgtcaggcccagccgctggtgcagtggtccgtcccctctgccggggtgggcccctcgggtttcgcgtgtcctcgggaaagagactggcgggcctcgtgggctgtgcggctatcctggagacagatgacagctctcccttggatggctttgctggttccgcaccagccagcgcccccatttttcctgcagcaccctgatctgcactccctgaggggctcccactgtccgcggtgtgaggatgtccctggatagtccactgtgtgcagaggcatgggagttgtcatgttgggaacatgct

SEQ ID NO: 251052 - DNA, 690 bp, Homo Sapiens
ggcactggcagggcagagccagctgaagggtcttcaactctggatcccaagtccccagagccacagggcttttcctctgcccacccacgctgagggaaaagtcgaataatgttgtgctgagacaataggggcaagaaggtccggccatgagtcacagggtgacatcactcgtcactcttggtctgtgatcaacccccaaacaatcatgaggaggcccctccaggggagctgggaccccaggtcattgtcctgaaaggctccagtgcctgcacctcttggggtttcctctaacagtttcccaagaccccaaggcagcatccctcaaggatactgaggtctagcatgttcccaacatgacaactcccatgcctctgcacacagtggactatcccagggacatcctcaaaccgcggacagtgggagcccctcagggagtgcagatcagggtgctgcaggaaaaatgggggcgctggctggtgcggaaccagcaaagccatccaagggagagctgtcatctgtctccaggatagccgcacagcccacgaggcctaggcagggaaaagcgtagggaaggggcttagtacaaggtcctggcaaaggagtctggacatttgcgtctggggccctgggagcgtcctccatttaaacctcagccaactggtctgtaaaatggaggttttacagctactt

SEQ ID NO: 251053 - DNA, 539 bp, Homo Sapiens
  misc_feature (518)..(518): n is a, c, g, or t
caggcactgagcctctcaggacaatgacctggggtcccagctcccctggaggggcctcctcatggtaagtgaatgccaagaggttaagttggcctgtgtttccgaggtggaaattccaggtcgctggcttcatttgtcttctcttttagattgtttgggggttgatcacagaccaagagtgacgagtgatgtcaccctgtgactcatggccggaccttcttgcccctattgtctcagcacaacattattcgacttttccctcagcgtgggtgggcagaggaaaagccctgtggctctggggacttgggatccagagttgaagacccttcaggctgctctgccctgccagtgccacagagtgccatggcccaggaagacaggttttcttccatctaggccaggccatccagtggccatcctccgtgtcctcccgcctcctcctggtgtgacttctgaaaaccaagaatttgttcctgttgactttttctgtgctatggaccattgtcctctcacccacntcaataaatcttgaaacatgc

SEQ ID NO: 251054 - DNA, 1129 bp, Homo Sapiens
  misc_feature (348)..(356): n is a, c, g, or t
catagaatcatataggctcttacgcaaggttatgctaaaaatcactacaatgtaagtaacaggttttattattttctatcccagagtcagctaaatttagcatatggatcaaataatccttagattaaacccagatctttcttaatgaaaggcactaaaaaaaatgcaacttagtctaacagtatatccactcatactttatagctcagcagctttagctacactaaatgctggggcatttaaaatgccaaataattatgatctttactccaaggaaagaaaatataaacttctgcctatgaaataatgttttaaaaacccatacttgcctggttattctttcaaagnnnnnnnnngacttataaattgtacatatacagaaaacagaaggtaaaccatagccaaaagtgacagaaaagccaccaaggaaataaagcaaaaaagaaagcagcggacaaagggcacaccatagaagaacagctagtgaggtacagcaggcagaagctccacaatcgagaaagtcaagttaaaatatttcagggagaggctggtcagtaaagaagctgagtcaggggcttttttcttctaccttgtacccaggaactgacttggacagtacagaacgtttgggaccatcttttcttggagtggcagctttgtcttttgatttctgtcttccctggaaagagtcctcctggctgtcaggagggctttccccttcagatacattgccagaggagctgtccgaagtgcctttatttttccgtttctcatcacctcgaccatcttcgccatcatctgaatcaccatcactgtctagagcagggagctcaggatccagagggggctcatacagggctgtgtttaatggcagataccgcagctcatctggtgagtacctcttataatattcctggaactgtccggggatgagagccactgggtaagaactgacctttgttcgctctgttggcaaaactttgtacttcccttgaggtacctggataacatgtgtctgcaagtcaaaataagctcttctttcttccatgcgttcccggtttaagttgctattaaattctgctgcttttttggcagctttcttaatatactcaggcactttactggcttc

SEQ ID NO: 251055 - DNA, 1234 bp, Homo Sapiens
  misc_feature (36)..(36): n is a, c, g, or t
  misc_feature (78)..(78): n is a, c, g, or t
  misc_feature (671)..(671): n is a, c, g, or t
gatgagactctcccagcactccaaaaggctgcatanacgctatcatgacatgaagagcttgtggactcttatgtgcanatatgaccaaagctgtgattatacaggtcatgtccaccagcttttcatccctagacaattccaactaaaggataagtgaaaggccagaatgcccctgctaagttttggaagtatagttctatagaatgagctggtgtttttctactgaaatactaaagtaacaaagcctttatttttatatgttatctatttagaaacaacaaaatgactgctacgtctttatacatttctatagaaatctattatagatttctgtaaattgaggcagcatgacaattccagataactttagaacagagttgaataaatcacagtaattggactaaaacattacacagataattgtgtaattttagaacttacttgcatagttaacactgtataatactcttataaaatatatgcctacaacgaagtttcctgggaatcattaagcaagcaacataattatttttctgtagtaattcagatcaagtatgtagtacaagttatcattgtgctgttaaagttttaaagtgctgtcagcagagtacaccaggacttgaaagaatgctgttaagacacacagagcaggagagaaaaagtcttaaaanagccaaattccggaatgggttttgaccttttgaagtatgatagtgtttgaatttcaggaaagattgttctttcttaaaggtccgtatcaccgtatggcattgcatctctcccatcccccttgacttgcaatgaattttgcatggcattgattaccattgattaagtttacattttttccttaaattaagggaactcatagtgccctttctcaccacaaaatccagagaggaatatcattaatgatagctaaggcagaagagtttagatgggcttaaaattcagtccagtaaagataatttttcattctatactaacaatttttttcctaggtcgctggatttgtgactgttgtaagcgggcccccccaacacccaggaaagtgggcagaagggggaaaaacagcaaagagggataaaatagtttttgactctaatactgtatatgcatttaagtggaatatttggtgccattgacaacattattttcatgccaataaaagattttttttgcaaattatgagcttaaaatctgcagttatttctgttaaaagctacgcttaccc

SEQ ID NO: 251056 - DNA, 1389 bp, Homo Sapiens
gcagaaaacttgatagagtacaaatggccacctgatgaaacaggagaatactatatgcttcaagaacaagtcagtgaatatttgggtgtgacctcctttaaaaggaaatatccagatttagagcgacgagatttgtctcacaaggagaaactctacctgagagagctaaatgtcattactgaaactcagtgcactctaggcttaacagcattgcgcagtgatgaagtgattgatttaatgataaaagaatatccagccaaacatgctgagtattctgttattctacaagaaaaagaacgtcaacgaattacagaccattataaagagtattcccaaatgcaacaacagaatactcagaaagttgaagccagtaaagtgcctgagtatataaagaaagctgccaaaaaaagcagcagaatttaatagcaacttaaaccgggaacgcatggaagaaagaagagcttattttgacttgcagacacatgttatccaggtacctcaagggaagtacaaagttttgccaacagagcgaacaaaggtcagttcttacccagtggctctcatccccggacagttccaggaatattataagaggtactcaccagatgagctgcggtatctgccattaaacacagccctgtatgagccccctctggatcctgagctccctgctctagacagtgatggtgattcagatgatggcgaagatggtcgaggtgatgagaaacggaaaaataaaggcacttcggacagctcctctggcaatgtatctgaaggggaaagccctcctgacagccaggaggactctttccagggaagacagaaatcaaaagacaaagctgccactccaagaaaagatggtcccaaacgttctgtactgtccaagtcagttcctgggtacaagccaaaggtcattccaaatgctatatgtggaatttgtctgaagggtaaggagtccaacaagaaaggaaaggctgaatcacttatacactgctcccaatgtgagaatagtggccatccttcttgcctggatatgacaatggagcttgtttctatgattaagacctacccatggcagtgtatggaatgtaaaacatgcattatatgtggacaaccccaccatgaagaagaaatgatgttctgtgatatgtgtgacagaggttatcatactttttgtgtgggccttggtgctattccatcaggtcgctggatttgtgactgttgtcagcgggcccccccaacacccaggaaagtgggcagaagggggaaaaacagcaaagagggataaaatagtttttgactctaatactgtatatgcatttaagtggaatatttggtgccatttacaacattattttcatgccaataaaagattttttttgcaaatta

SEQ ID NO: 251057 - DNA, 439 bp, Homo Sapiens
ggggtgaagacatagctgcgggtggctgtgctggtggcgttcaagatgtcgaccaagaatttccgagtcagtgacggggactggatttgccctgacaaaaaatgtggaaatgtaaactttgctagaagaaccagctgtaatcgatgtggtcgggagaaaacaactgaggccaagatgatgaaagctgggggcactgaaataggaaagacacttgcagaaaagagccgaggcctatttagtgctaatgactggcaatgtaaaacttgcagcaatgtgaattgggccagaagatcagagtgtaatatgtgtaatactccaaagtatgctaaattagaagaaagaacaggatatggtggtggttttaatgaaagagaaaatgttgaatatatagaaagagaagaatctgatggtgaatatgatgagtttggacgtaaaaaga

SEQ ID NO: 251058 - DNA, 636 bp, Homo Sapiens
  misc_feature (24)..(24): n is a, c, g, or t
  misc_feature (39)..(39): n is a, c, g, or t
tactggcatctagtgagtagagcncaggcatgctgccanacatctatctcataatgcacaggcaagtcccccctgctccccaccagcaaaggatatccagcccagaatgtcaatagtgctaaggttgagaactgccttacagagaaaattagattagatattaacctaagaaatttctgaggcttaaagttattaaaaataggtaatgtattatcgaaggagactacaacatagtctctatatccttaaaaacagcatatggatgcttttctgcataagattgggaggggttattctaaacagatcttgaaatgttatgtgggagaactaagcacctatccaagtagccagagacagtggagagagcaggggcctgaatcttagcaggtttgccatagtgctgaagacttgactctcacccatgtactgggatttaaatatattatgagcatatctccagatccatccatatcccctgcaatcagctgaagacaacctccctcacatgtttaataactctttgtatgcaactttggggaccaatttttctccactaacattttcgctggagggaaaaagatagtttctccaaattatatacaggtgaagatatactattttatagttagcttccca

SEQ ID NO: 251059 - DNA, 444 bp, Homo Sapiens
taaagcgctatgtaaatgtaaggtattatagaaacatctttaacatatagtttcataccattcattttttaacaaagaaagggaaaagtctgcttgtaagctggttgaaaaagttaatcttgatataaatttgtgtttgataaatatcctctcagtgttttatcttccatgtttcaacaactattgaaatatgaaatgcctgtgaactcttaaagcttcatgagcagctgcttgagttcaggaagttcactgttagaaataggctttgttagctgactagggtcagggaaacttttctcttcaaatttgaaagctgtttctgttttcattttacattattattcagaaatggtagctattctatacctatggtttaagtaaatatttctgaataaggcttcaccatactgtaagcattttaggtagattgccttaaaggttatg

SEQ ID NO: 251060 - DNA, 503 bp, Homo Sapiens
ctgcagttactcaaaagcaccatagtatttcctttctggcttgcttactctactccttctgcctggggtaccattcccaatatgtggcttggtaaatttataagagaaacttttaaagatttaattcaaacatcattttgtttctgtatatttgtggtgacctctggcttccaaaactggtcctctctggtagaactgatcactctagttatttggctatattaatcttccttcacaatgcttaaagattcttgggggcaggaaactgtcacacattcatctttgtcttctcagtagtgatgtgcgtaagtttgactttgacatatttgccccaaatctgctatgactttgatttctggcacaggaaaagctgactgccctttcaacattctttttgggaatccctgatttgtgctttattagtgctcctaatcataattaaccagcatatcaatgttagtactattaaataaacataatatttgaatttactacaattatct

SEQ ID NO: 251061 - DNA, 673 bp, Homo Sapiens
gaagatctgaatgtagactcagccccttgaaatgtaaatgactatatttaaaaaaaataatagcacttaatgaatgctttctataaataatccaagctatgaagcactttacagtcactatctcacaactaccttaagaggtaggtcaaaaaatactccaattagaaagcaatcttatctacagacttcttgttatatataataaatactcttaatgcttaagccactattaggttttctgttacttgtagccaaaaacatctacaatcaatatacacaatgaaacaacttattactcagacacacaggtaaagactggtatataatccctaaaaaacagctccattatgttaaaatactgtcaagtgtaattagaatagcttaactattcagtgtcaattgacatatataaccccacccactcctctatgagttttcaaatactcaccagcagtctgtgcaggatttattcctattccatcattggtaataattgcacttgttgcagcaggaactttaaattcttctgctgcaaactttaagactgctgtgaaaggtgtactttcaggaacactgagtactttgtacggcagccgtgggtccgacgtcagcgtgatcttaaaggaaaccttcgacatggtggtgccggctcgtgccgaattcctgcagccgg

SEQ ID NO: 251062 - DNA, 636 bp, Homo Sapiens
ggcacgagccggcaccaccatgtccaaggttgcctttaagatcacgctgacgtcggacccacggatgacgtacaaagtactcagagatcctgaaagcacaccttgcacagcagtcttaaagtttgcagcagaagaatttaaagttactgctgcaacaagtgcaattattaccaatgatggaataggaataaatcctgcacagactgatggtgagtatatgaagctattctaattacacttgacagtattctaaccataatggagctgtctattagggattatataccagtctttacctagtgagacgaatgatatgtagatccattgtgtatcttgatagtagatgtgtttggctactagtctcagaagatctaatagctgtttacgcgttactagcagttattatgtatagcatgaagcctggggattagatggctcgatacatggagcatggtatgacctacctgttatagaacttgcgagatctcgactgtacagcgactcatagcatggatatagatagacagcatctataagagctatgacatttggaaattatggatccacattacatggggctgagtgtacattcagatgttcctgctgatcaatctatacatgagacataatgctgtc

SEQ ID NO: 251063 - DNA, 1248 bp, Homo Sapiens
  misc_feature (42)..(42): n is a, c, g, or t
  misc_feature (57)..(57): n is a, c, g, or t
  misc_feature (74)..(74): n is a, c, g, or t
  misc_feature (100)..(100): n is a, c, g, or t
  misc_feature (113)..(113): n is a, c, g, or t
  misc_feature (119)..(119): n is a, c, g, or t
  misc_feature (135)..(135): n is a, c, g, or t
  misc_feature (658)..(668): n is a, c, g, or t
tcgggctcccccatcttccctttccgggcttcttatccacangggtgactgatcttngcactcccttaaaagtngggtttccaataaatataactcatcngcacttccgatcngtattncctggagctttttttngatcttcagatctgtgcaataatactctgttcctgaatgctatttagaaatactatcctcaaaacaccagtggtttcttgaagctacttgttttaaatgttgtatcaaaagagattgataaaggaatgtataactcagcaaaggatgcttctactgtaaattcccaccattaaaagtactggattctataggtccaccattaaaagctggtatgggacaccaatttatacacataagggttagattaaaattttaattttttggttgatattaaactgaaatttatataactgaggtctgaatcttaaaaaaagtaaatgataaaaatttaatatagttaactgttcactgatatgtctattcacttcatcataacctatatatttaattaaaaatcaaattatgagtctgcaaatcagatgctatcaagcaaattgccatccagggtccataattctttttatatttttatctcagatgaatatatacgattcagtaaattttaatgttccaaattgttctnnnnnnnnnnnttatcaaaagcttccagttaacagttggctaattcagcccccaacgaactacctgtttgtgttgtgaggtagcatcaaagactatgatcttctgtgacagtagtagccttaattcatacgcattccctcttcataggaagagtatggaccatagtatgttaaatgcctgatttcaaacaacaacaaaaaataccaatatttattctgaaaggcaatcgtatgttccaagtagcagatattaacaacttccaacacgatctctaggaataatccgcagttctgaaccatgttttagaaaaacatttccagcagtctgtgcaggatttattcctattccatcattggtaataattgcacttgttgcagcaggaactttaaattcttctgctgcaaactttaagactgctgtgaaaggtgtactttcaggaacactgagtactttgtacggcagccgtgggtccgacgtcagcgtgatcttaaaggaaaccttcgacatggtggtgccggaatgaatccagaacacacgacaactccgcgggggtagcacgacttcctctagtgtgctggggaccgccccccc

SEQ ID NO: 251064 - DNA, 329 bp, Homo Sapiens
ccctccagatctgtgccaataatacccctgtcccctgaaggcctatttagaaatacctatccctcaaaacacccagtggtttccttgaagcctaccttgttttaaatgttgtatcaaaagagattgataaaggaatgtataactcagcaaaggatgccttcctactgtaaattcccacccattaaaagtactggattctataggtccaccattaaaagctggtatgggacaccaatttatacacataagggttagattaaaattttaattttttggttgatattaaactgaaatttatataactgaggtctgaatcttaaagtaaatga

SEQ ID NO: 251065 - DNA, 712 bp, Homo Sapiens
  misc_feature (78)..(78): n is a, c, g, or t
  misc_feature (186)..(203): n is a, c, g, or t
  misc_feature (441)..(498): n is a, c, g, or t
  misc_feature (556)..(569): n is a, c, g, or t
ctagtgatccctttcaccatttacgtgggcatgagaggacagaattacccctgtaatcctttccatggcactatcacnagtgaatcacaacattgccattcagctttacatattacccttaatttccctctttgtttaaatggggtagacagcagtcatattttgtaatagataggtactttggcnnnnnnnnnnnnnnnnnngcacagaataataaatgaatccatgtagaaatgacctggaacaaaacatcttggtccattttgcctattgatttagtgataactatacatataattttatcttgctccatggcatttttataacataacatcattcaacataaatgtcctgttactattgacgtcacacaataaacacattaacagttctatcaatatcctcattcttctaaactgcattttaaagttgaaaacaccnnnnnnnnnnnnnnnnnnnnnnnnnnnnnnnnnnnnnnnnnnnnnnnnnnnnnnnnnncagatatattctcagtaaaaatatactttggatcagattgactatttaaatgaatttnnnnnnnnnnnnnnaacacacacattaacagtttaaaggtaaatgtatctttgcaaaagaagagaaattagggagtgctctgaaattcagtgtagtgatgcacttctgaagtcctatgcagcacatgatttttattgcaggaaacagttactatgtg

SEQ ID NO: 251066 - DNA, 1320 bp, Homo Sapiens
gaggcagcttgtggcggcgaagccatcggtgttcgctgatgtccagtctatggagtcagttggtaccggtggcggcgcggaagcagaaggcggtgtccgaggaggggcctctgccccaccaggatgttaccgggcttggccgccgccgcggcccacagatgtagctggtcctccctgtgccggctccgtctgcgatgcagggcggcggcctgtaatcccagcgaccgccaggagtggcagaatttagtgacatttggaagcttttcaaacgtggttccctgtagtcatccatatattggtaccctgagtcaagtaaagttgtactccacaaatgttcagaaagaaggacagggatcacaaacactcagagtggaaaaagtaccatcatttgaaacagcagaaggtataggcgcagaactcaaagctccacttaagcaagaacctctccaagtaagagttaaagcagtccttaagaaaagggagtatggatcaaagtacactcagaataatttcatcactggagtcagagcgataaatgagttctgcctcaaatccagtgatctagaacaacttcgaaaaatcagacgacgaagtccccatgaagatactgagtcttttactgtatacttgagatcagatgtggaagcaaaatctttggaagtttggggaagccctgaagctcttgccagagagaaaaaattgcgtaaggaagcagaaatagaatacagagaaaggctatttagaaaccaaaaaatattaagagaatacagagatttcttgggaaataccaagccacgctccagaacagcatcagtgttttttaagggaccaggaaaagtggtgatggttgcaatttgcatcaatggattaaactgcttctttaaatttcttgcctggatttataccggttcagcaagtatgttctcagaagctatacactcattatctgatacttgtaatcagggtttactagcattgggcatcagtaagtctgttcaaacaccagatcccttctcatccgtacggattttccaaatatgcgctatattttcttcgctatttaggggtgttgggattttcatgatgggtgcaggaatatcttggtaccatgggagtcatggggattgctttctccctcaacccattaaaattcgccttctaatggggaatattggaatttttaaccaagggaaccattaaagtatccctgaaagggagcacaaacccttctccttggggtggcccgggaaaaaatggaaacccttcccccaaaaggaaatggggctcccgcgggcctttaagaggggaaattggtcccaa

SEQ ID NO: 251067 - DNA, 656 bp, Homo Sapiens
attataagacttctgagggagattccatggagctggaaatatggtgtcttgaaatgaatgaaaagtgtgataaagaaatcaaagtttcctacacggtgtacaacagactgtcattgctgctgaagtcccttcttgctataactagggtgacaccagcctataggctctccaggaaacaagggcatgaatatgtcatattatacaggatatattttggagaagttcagctgagtggcttaggagaaggcttccagacagctcgtgttgggacagtgggcacccctgggggcaccatcactctttcttgtgcttacagaattaacttggcattcatgtctaccaggcaatttgagaggaccccacctaccacggggattattattgatcactttgtggaccgtccctatcccagctcctctcccatgcacccctgcaattacagaactgctggtgaggacactggagtaatatacccgtctgtagaagactctcaagaagtgtgtaccacctctttttccacctccccaccatcccagctgatggttcctgggaaggaaggtggggtaccccttgctcccaaccagcctgtccatggtacccaggctgaccaggagagactggcaacctgcaccccttctgacagaacccactgtgct

SEQ ID NO: 251068 - DNA, 511 bp, Homo Sapiens
gattcggcagaaaagcatgcatacagttgggatataaatagagccctgaaggaaaacattaccgatgctatttggggatctgaaagtaagtatgaagctatgaaagaaggactcaacattcgatatttggacttgaagcaaaaccgagatgggctggtgattttggcagcagcatggcactcagcagacaatccatgtctcatctattactctctgataacaatagaagataatggttgccaaatgtcagatgcagttactgtagaagtcactcaatataatccaccttttcagtctgaagacctgatattgtgtcagttgacggtcccaaacttttcaaaccagactgcctatctgtataacgaaagtgctgtctatgtgtgctccacaggaactgggaaattttctcttccccaggagaaaattgtctttaatgcacaaggagatagtgttttaggtgctggtgcctgtggtggtgttcctatcatcctttctagaaacagtggactgg

SEQ ID NO: 251069 - DNA, 793 bp, Homo Sapiens
gtgtgagccgccgcgcccagcctaggatcatttttttctgtcctaggtgttgattttttaaataagagtttgcagtactggtgtttagtggtgcaataatttccatttaatcatctggcatacgcagagagtataccagatgactgagagtatatctcacagagagtataccagatgactgaatggggattagagcgagtatttaaactcttcattcattgatcctgttaaaggaaagcttacttaataacataaactcttggttatgaattagatgtttctcctatgaaagcttgtggggatctttgagccaacttaatacctgattatttctgttcaaaaatgccgagaactaaaaatcccattcaaacctttacttttctccttttggaaaagtgcatgaggtgttccttttggtaaaaagacacactgtgcgaccacagagacctgagcctgaacccatgaagatgtgaacaaggtgaacaatgagactatgtaaaggggaggttaattccaaggtgacaggaactttatggagaagattatgatttctacactttgtatccccttctaactctagtatgaagttacattgtatacgttggtgctctaatctcagtctgtggatattagatattaagattggggagaaaataaaacagccagttaatgtgcaccatttttataggcactgtcagtagcatataagaaatagcatgtttctcaaaagtaaattagttcatagtagtcgagttggcacatttggcaggtacttctgtgaacttttttttgc

SEQ ID NO: 251070 - DNA, 919 bp, Homo Sapiens
gatgaatggcacagtagtgtatatagtagtgtttttcttggacgggcttattgtaattcctttagtattttttgtaacttagaatacttgccatccgagcataattattaatcttggttgtcaatttctattctactttatcaagtataaatatcaccaatatgatgaaactttttcttaatgattaatttgttaaatattagctcatataataattactccgacactgatggttttgtggttttgtggtttcaattttgggtgtaagaatgatttaagttttaaacatatgacttaagtttctagtgttaaattaaaccacccctaagtaatatgtaacctaggtaaaactaaatattcagtttatccacttattatgtcgacttcagattttcagaatattaattttgtgaaaacgatacccagatgttaaacctgtccatcaatattctttcactttagagctaatatagttaagaaattgaactgatatcttgtgcattttaataactgtaaagtctgataacttgcctaattcagctaagatattgttaacaaattagaatgtaatagtgtttgatttatattttagcttatatttgatttacagatatgtgcactttttccccttataagtgcacaagttaatataattttgaactgattttctaatactaatgaattgattaaccaaaaatactgttttattggaagtgcaactggcaattatttttaaatagcttagatgactcttactgctcccataataacctttgttatttttcagtcacagcacttagcacgttacttttaatgactgatatatgaattcattatcttcattggagtttaaggtttttgcggacaagaactgccttgtcattcttattttcacagtggttaccactgtgctagcaca

SEQ ID NO: 251071 - DNA, 507 bp, Homo Sapiens
  misc_feature (252)..(252): n is a, c, g, or t
  misc_feature (338)..(388): n is a, c, g, or t
ccacaaatgtgtgaagttgggtaagtgtggaagaacagtgctataaattagattttgtggattatttctattttcaacatttttgtactgcacaatttcagagtcaaaattttatgtattttaagacagaagggagaaaactgtgcttatagcataatattgaaattaatgctaactataattttcatatttttaatatttagtaaaataacacacctgatttttcttgttttttgtatcaccccaaacatntaaatcttaatcatgttaaatatgctaaaattttaccaagaggataaaggaaacagacaaacaaaaacctcttaatgctttttggnnnnnnnnnnnnnnnnnnnnnnnnnnnnnnnnnnnnnnnnnnnnnnnnnnnattattcttcagcgttccaggccttggcaaagttcgaatcagaaaacacaaggtctggcacaatcccctctttattttgtccaacagttggagcagtttatctacaagtattatgcaac

SEQ ID NO: 251072 - DNA, 739 bp, Homo Sapiens
  misc_feature (31)..(31): n is a, c, g, or t
  misc_feature (70)..(70): n is a, c, g, or t
  misc_feature (87)..(87): n is a, c, g, or t
  misc_feature (164)..(355): n is a, c, g, or t
gctcagtggtgagtgaattctgctttttaancaatctgtatcatctcttgcagtctctattttttggtanaatttcttctgtaaaancctccctatgttcaaattaatcactggaatacagcaaagagattgagattttcttaatttttacttttaagagaagnnnnnnnnnnnnnnnnnnnnnnnnnnnnnnnnnnnnnnnnnnnnnnnnnnnnnnnnnnnnnnnnnnnnnnnnnnnnnnnnnnnnnnnnnnnnnnnnnnnnnnnnnnnnnnnnnnnnnnnnnnnnnnnnnnnnnnnnnnnnnnnnnnnnnnnnnnnnnnnnnnnnnnnnnnnnnnnnnnnnnnnnnnnnnnnnttaaaagttgagatgagacactttgagaatctgaaaagtgtaaaaggggtagacaaaaaaatgacccttttgacaaattctgctttaaaaaattctgatcaacaattgaagaaataatagcaaagtttcttattaaaaagaaacaattttacattatacaatcactgaagcaacattaaaatgtactcttacattcaatgaaaaagagagggacagagtatgagaaataacccaccttctcatactccaaatacgtgggtactcagtaatgaaagtcacattaacaaagaaaagcaagttctcgcttgaggactgagaaaagaccaagtaatcctgagacaaattctgatgggtgaaaaagatgaagactgagattgcactcta

SEQ ID NO: 251073 - DNA, 479 bp, Homo Sapiens
caaaaccaataaaacctctcttttttgctgcaggagatcacagtgccagcagatatgcctcctcacccagaattcataacaattaaattgtcctgatttgattgccatgattcaccctgaaggggcattgtgtcattgagttctggggccttcaagctggggcctataaggagactgtgcatagcctcaaaccaaactgttttcctgtgaactgatcaatgacatttaatattgtgcctccttgtatttccttcctctttcctatccctcaagttcctagtaagttcataatctcatattagacaacaagtggtagagctgtatctgaaccaatcaagtacatcagatgtgcccaacattaacctaggctttccatttcaagaacattaatgcccttttcttagaaaatacaagtttttaaactgaagtttttaaactgaaactgcatttaggctctctgccactttgtccttttaccc

SEQ ID NO: 251074 - DNA, 1257 bp, Homo Sapiens
  misc_feature (187)..(202): n is a, c, g, or t
  misc_feature (208)..(208): n is a, c, g, or t
  misc_feature (219)..(219): n is a, c, g, or t
atacgtcactgcagtaccttaagaggtgactcttaagaatgcatcccctcctgattcctcagctggttcacccttgaggttatttgcaaaaagaaaaggaggttcttgagggcaccgattgcaagcattctggtgcctggctccccgcctgggaagcgatggggtgctcagagcagcaggcaggttnnnnnnnnnnnnnnnntcatanttgggttccanctcctggcttgatgagcccagggcgcttacaggcagcccatgaagttgatgacagttttagcatgagaatcacacagggtccctgtcctgggctcctctaaagccagtggatgtgctgggcaccagagacaaatcatggagatggctgctggtggctcccaggttggcccagatggggtgagctgacataccacaggcccatcccaggccccgtgggctctgcttctggggctccataccctgccctgcaggggtgctgtgtttttcacacatttctttccctgaagccttctgtaacctgtcattttccttccttcctcttccggagcctgctgctttctctggacctgtctccacctcccacacagctcatcgtgaacaccacttggtgatggagggagtggacccgtgtgtggtccccaagtgaggccactgggagtttgtccttttcctcctttgcttcactcccaacagcagacccaggttgtcaggacaggagggcctgagctaagcagtaggcatcagtctcgtttgtcttcagacggcgggggcaggtccaggtgaggctgggtggagggctgaccaaggtccaaagggcctgcgcagcctccgggagggcagcttctccagccagaggcttgtgtgagccatcgtgtgctgggcttgttttaagtaagaaacaaggaaatcactccagattctgtcattccaaggaaagggacggggaccagctcaggtttctcagctgttctaggggtcactgggcgtttactcttctcagagagttggtcagaacacctgaggaggggccgggatgtaccccaccagaaggtggcttagggtcacgggcaagaacggctcagcttggctctagaccggtctatttaaagggagggcctgaagtggagactttcttcattgagggaaagccacaagcaccgatggggagaggtgacggttggcgattaaccccccctgatctcatcgtgattcggccgacgatgttccgggggcccctctgcccgttctcctgacttg

SEQ ID NO: 251075 - DNA, 663 bp, Homo Sapiens
  misc_feature (382)..(565): n is a, c, g, or t
tccattacaggacttccagtataatctgtaattcaaacaacaaacaatttttattgtaaccatgtccaaatatttcatgggacagacttatactgaaaaattattgttcctctgaaatttaaatttaactggtcagtctgtatttttttgctaagcctgaacgttctgggaataaagtgatgttttagcaacagtgacctagcagaggtgtttaaaagatagctgtaatgtcatcaacgagaaaaaggcattctcatagcacctttaaaatcagttgtctttctttttaatctttttcctaaaataaattctagtttaccataactaaatattttatatgacttccatttcaactaattttgccccccactcccactcccannnnnnnnnnnnnnnnnnnnnnnnnnnnnnnnnnnnnnnnnnnnnnnnnnnnnnnnnnnnnnnnnnnnnnnnnnnnnnnnnnnnnnnnnnnnnnnnnnnnnnnnnnnnnnnnnnnnnnnnnnnnnnnnnnnnnnnnnnnnnnnnnnnnnnnnnnnnnnnnnnnnnnnnnnnnnnnnnnnnnnnnttgctttaaataaatataagaacaaagtcacattcctggacaaaggctctcgcctttcacaggatcttatactttcttcgcaaaactttacaatgttc

SEQ ID NO: 251076 - DNA, 524 bp, Homo Sapiens
ttcagataagcgaatcatccccagttgagacccactgcttttgagtcaaaacgaaagtttataccttgactctgcttccttggggaatgcccattttacaggcacactgtgacttacacatctcaacaaacaactagtaactagtggcctaagagatctttctcaattctgtgtgatcagaaacggtaaagaatggttaggaggaagcactctacatttcaaagagaattgaagtaattttactgtcattacactagtaaaaattatctgagtcatgatgcttaattgacagatattctaacaattagaaaaatgctaattgtatattataacctgttaaggatcacaaggattgatgcagtctaagaacgggaaacttaacaatcatcaatggctagttcagaccaaagtctcctccttgactgaatattcccatcaaattctcaattcaaaaatctaaagtcttatctttaaactgcttgcttgtactacagccttatcatttctttcaaatgatcaagaag

SEQ ID NO: 251077 - DNA, 852 bp, Homo Sapiens
  misc_feature (653)..(654): n is a, c, g, or t
gagtcggcgagagggagactgggttgggggaggggttcaggcctgttccccgcggctgcggcagcaccagggccggccgccaccgcctctagaacgcggaggaggtgggtcctgggaagcgggatgtccatcgctccagcttggtggtgaatgctgaggagagtcactgttgctgcagtctgtgccacccggaggaagttgtgtgaggccgggcgggagctcgcggcgctctggggaatcgaaacgcggggtcggtgcgaagactctgctgctgccagaccctttcctattctggccatgcctggaaggaacaaggcgaagtctacctgcagctgccctgacctgcagcccaatggacaggatctgggcgagaacagccgggttgcccgtctaggagcggatgaatctgaggaagagggacggagggggtctctcagtaatgctggggaccctgagatcgtcaagtctcccagcgaccccaagcaataccgatacatcaaattacagaatggcttgcaggcacttctgatttcagacctaagtaatatggaaggtaaaacaggaaatacaacagatgatgaagaagaagaggaggtggaggaagaagaagatgatgatgaagattctgggagctgaaatagaagatggccgtnnattcccctaaaaatcctttgaaataaaaatgtcgggcccgcctccggcccctccagaagctttccaagaaccattcgctttggcgcccggggcccagttagggaaggtgaacaatggggccatagcctggtttccccaagaaaaaaacctgggccatgaaactaaggggcttgggatactcccaccccaataaaaaac

SEQ ID NO: 251078 - DNA, 1247 bp, Homo Sapiens
  misc_feature (73)..(73): n is a, c, g, or t
  misc_feature (96)..(96): n is a, c, g, or t
  misc_feature (491)..(510): n is a, c, g, or t
ttcaatccctatattactcatacctttacttcagagattgaggaactatatacaccaaattaatttattttcnccatagggataacatactgtacntctctgccaatgttacttgaaaatcttccatgtcaaaacaacttgacagtagatataaacaattcaataaatatgcaatgatctttcattacagtcctttaaagacgcatgttaattcatgctgttaaccttaggatcacagtgcatagaatccaaatataaacagttggggtgacttttaaagtaatgttggatccctcactttatttatattcccactataaccagtaagttcatttcataggccctatcatgcattaatcattgaatggcaggagttaatgaaaacttttcctgttacaacgcccattgccggcaatgaacgtaccaaaaccgccaaggaagtcattgttattgcacaatacatgaggacctggagcttttccaaaagcttnnnnnnnnnnnnnnnnnnnntggaattatatttgacatttcctgacacctgcattaatactgtatgactaataaaagcatgtcagttgcctggactgaaccagcgatcaacatgcgcccagaatgcacacgagtaaaaatgcagtaaaaggaagtagtcttcattgcctataggtcacttccagtcaaaggttaaagttcaaagactgaatgatcaaagtgctcattttctcagtaggactatcttctgctaggaggatgataacagtggcatcaacaagtatcatcatgataccaccattttgttttctttggattcttgttacatgttcgcacataaaaagaattatccggtggtcgtctcttttccttgcagctggaaagcatgctaataatgctaagacaaactgattggactgagagcgctggggaccagtcttctgttagaatggataaacagatatgaccattgctataaacatgaggatgaacaggaatattttcaccagtaaacatgacctgaggagagtcaaaaggatatcgactactaaatttaaatagaagttgaaatttttccccttcatataaggtacctggtgcaccttccatgtctacaatccactgtgtaattgaattttgaacactcttctcatttaaggtcattccaggaggtgggtcattttgcaaagccaacagttctttctgtagtcgtttctgcattgacgccatgatggaaccatccccccaagaccggcccc

SEQ ID NO: 251079 - DNA, 358 bp, Homo Sapiens
ccgaaagagaaaccgatatgggcagaagtgcggccacgtcattctcgtggggttgttggtactgagaggccatcagaaggaaagcccgctgggcctggaaagcactgtgcaccatttctgcatgggtctccacgtccccagcaaggatcctactgttctttaaaaactcggccaccatactgtccatcagcttgtcaaaggcttccacggagggtgccacacctgcaatgacaccattgacttccccgcagttcccagggggcctgtgggactctgcagacagcgactccaggcggctgacagctcgttccagtctttccaccagtccctgcatgttggccattctgcttcgctgccc

SEQ ID NO: 251080 - DNA, 543 bp, Homo Sapiens
aacaaagggaagattatttgaacttgtccccatgcgtttttacttggtaccgtacattttctcagttggcatttgatggagaaaaactcagtcactcagcctctgaagaagcttcgggttcagactcaggcagtcagtcggaaagtgagcagggaagtgatccaggaagtggacatggcagcgagtcgaacagcagctctgaatcttctgagagtcagtcggaatctgagagcgaatcagcaggttccaaatcccagccagtcctcccagaagccaaagagaagccagcctctaagaaggaacggatagctgatgtgaagaagatgtgggaagaatatcctgatgtttatggggtcaggcggtcaaaccgaagcagacaagaaccatcgcgatttaatattaaggaagaggcaagtagcgggtctgagagtgggagcccaaaaagaagaggccagaggcagctgaaaaaacaagaaaaatggaaacaggaaccctcagaagatgaacaggaacaaggcaccagtgcagagagtgagccagaac

SEQ ID NO: 251081 - DNA, 558 bp, Homo Sapiens
tcatgtgttctagaaaaggtggatgtgtaaaactctgagagaattaaatctcttatggttcttgtctatatacatccttcagttgttattcacttctgactattccataagtgaatttaatcggactacattatagtttttaagcaagagtaaaagagtttaaccccatatttcctagacattatagtataaagacacttgacaatagtatcaggagatgccttactaagtctaaggttgtttctttgtgaactgaggtgtccaaggtttgtcaaagcaggtcttattaacttatttataaagcagcccagacaccaatatccactctactttgggatggtcactgggattgactagacattgcacgaaagttactcttactcttgctttcttgtttcatctaaaagatggctgtgggaaactctcaagcctgttgcaaaggcacccttgggcttccagagtccagaagtctctctgtggaagctcagttacaccccactacctggccagtgccgacactatggaggccaagggcctgcagggacagagcaaatgttt

SEQ ID NO: 251082 - DNA, 707 bp, Homo Sapiens
  misc_feature (543)..(543): n is a, c, g, or t
  misc_feature (587)..(587): n is a, c, g, or t
gcagccagtcctgagcacctaaccactgttgggcatcactgtcctcgctgcgctcttggcctgtgcctccagctgtggggtgcccagcttcccgcccaacctatccgcccgagtggtgggaggagaggatgcccggccccacagctggccctggcagatctccctccagtacctcaagaacgacacgtggaggcatacgtgtggcgggactttgattgctagcaacttcgtcctcactgccgcccactgcatcagcaacacccggacctaccgtgtggccgtgggaaagaacaacctggaggtggaagacgaagaaggatccctgtttgtgggtgtggacaccatccacgtccacaagagatggaatgccctcctgttgcgcaatgatattgccctcatcaagcttgcagagcatgtggagctgagtgacaccatccaggtggcctgcctgccagagaaggactccctgctccccaaggactacccctgctatgtcaccggctggggccgcctctggaccaacggccccattgctgataagcntgcagcagggcctgcagcccgtggtggatcacgccaccgtgctnccaggattgacctggtggggcttcagggtgaagaaaacatggtgtgcgctgggggcgatggcgtcatctcagcctgcaatggggactccggtggcccactgaactgccagttggagaacg

SEQ ID NO: 251083 - DNA, 527 bp, Homo Sapiens
ggaaaaggaaagaatagaacgtgaaaaggaagagctaatggaacgtctaaaacaaattgaagagcagacaattaaagctcagaaagaactagaagaacagactcgaaaagctctagaactggatcaagaacgaaaacgagcaaaagaagaagcagaacgacttgaaaaggagcgtcgagctgctgaagaggcaaagtctgccatagcaaaacaagctgccgaccagatgaagaatcaggagcagctagcagcagaacttgctgaattcactgccaagattgcacttctagaggaagccaagaagaaaaaggaagaggaagctactgagtggcaacacaaagcttttgcagcccaggaagacttggaaaagaccaaagaagagttaaaaactgtgatggtctgccccccctccaccttcaccaccaccagtcattcctccaacagataacgaacatgatgaacacgatgagaataatgctgaagctagtgctgaattatcaaatgaaggggtaatgaaccatagaagc

SEQ ID NO: 251084 - DNA, 1823 bp, Homo Sapiens
  misc_feature (438)..(466): n is a, c, g, or t
  misc_feature (1799)..(1799): n is a, c, g, or t
gggacgcgtttcctgttggccgagctgcgcacgtgcggccggaagggaagtaacgtcagcctgagaactgagtagctgtactgtgtggcgccttattctaggcacttgttgggcagaatgtcacacctgccgatgaaactcctgcgtaagaagatcgagaagcggaacctcaaattgcggcagcggaacctaaagtttcagggggcctcaaatctgaccctatcggaaactcaaaatggagatgtatctgaagaaacaatgggaagtagaaaggttaaaaaatcaaaacaaaagcccatgaatgtgggcttatcagaaactcaaaatggaggcatgtctcaagaagcagtgggaaatataaaagttacaaagtctccccagaaatccactgtattaaccaatggagaagcagcaatgcagtcttccaattcagaatcnnnnnnnnnnnnnnnnnnnnnnnnnnnnntggtgaatgatgctgagcctgatacgaaaaaagcaaaaactgaaaacaaagggaaatctgaagaagaaagtgccgagactactaaagaaacagaaaataatgtggagaagccagataatgatgaagatgagagtgaggtgcccagtctgcccctgggactgacaggagcttttgaggatacttcgtttgcttctctatgtaatcttgtcaatgaaaacactctgaaggcaataaaagaaatgggttttacaaacatgactgaaattcagcataaaagtatcagaccacttctggaaggcagggatcttctagcagctgcaaaaacaggcagtggtaaaaccctggcttttctcatccctgcagttgaactcattgttaagttaaggttcatgcccaggaatggaacaggagtccttattctctcacctactagagaactagccatgcaaacctttggtgttcttaaggagctgatgactcaccacgtgcatacctatggcttgataatgggtggcagtaacagatctgctgaagcacagaaacttggtaatgggatcaacatcattgtggccacaccaggccgtctgctggaccatatgcagaataccccaggatttatgtataaaaacctgcagtgtctggttattgatgaagctgatcgtatcttggatgtggggtttgaagaggaattaaagcaaattattaaacttttgccaacacgtagacagactatgctcttttctgccacccaaactcgaaaagttgaagacctggcaaggatttctctgaaaaaggagccattgtatgttggcgttgatgatgataaaccgaatgcaacagcggatggccttgaacagggatatgttgtttgtccttctgaaaagagattccttctgctctttacattccttaagaagaaccgaaagaagaagcttatggccttccttttcatcttgcatgtctgtgaaataccactatgagttgctgaactacattgatttgcccgtcttggccattcatggaaagcaaaagcaaaataagcgtacaaccacattcttccagttctgcaatgcagattcgggaacactattgtgtacggatgtgggcagcgagaggactagacattcctgaagtcgactggattgttcagtatgaccctccggatgaccctaaggaatatatttcatcgtgtggggtaggaacagccagaggcttaaatggggaggaggggcatgccttggcttcatttttgcggcccaggaaggaattggggtttttctttcgttaacttggaaaacaatccaagggtttccctttaaggtggattttggantttttcccggggtcttaaattttc

SEQ ID NO: 251085 - DNA, 1712 bp, Homo Sapiens
  misc_feature (11)..(11): n is a, c, g, or t
  misc_feature (37)..(37): n is a, c, g, or t
  misc_feature (52)..(52): n is a, c, g, or t
ctgtttttttntcctaaactttggttccattttcaanccttcaacagcaaangtattttttgtttcagggcccgggaagaggtatttttttcctcagaaagaagctaacattaatgtgtgctgggcaccgtctgacagcttggctctaactccaagtaagttgcccttgtcttctaagtactctacagagtgcaaaggcttaccaaatccaaaccaccttgaattaaacaaatcttaatgaggagcatcatcgttctttgtatgaaagtctttgttatgttaccaaatgaagaaatgcagtacattacacctctattgatgtaaatgaggctcaaacatctcaattccatcctcttcctaccccccagccatcaaacgttataactgcttagtgacactttattcaaattacaacccatagtttttgctccaaaaaatgcaacacctgagaaaggcctgttgctttaaaatcaagaatctataaaagcaatgccaccctaatcttaaggtgcttcttaggtatttcccaaagctctttgctcttttatactgcagcattttcaggaggagtcattagatactgtcaaggtccaagaaataactaaaaacaaaaaataacctgagactcttttctgcaccgccaccagctgcccagtacactaggtcaccttttacagcagtgagcacagcaatccatgccacaaaaatcttcacaaaacaagaaggaaaggtacaaaaagaattatattaaaatggtaacatacacttgtatgagggagggatatttaaaattaaaatattatcatcacaagaaacaccagatattccttgctctgcccttgggcaaccaagaaacttaaagcctgttttatatcccagaaataaaagagagacgtgatagaagtaacagtgctcagtgcttgcaacccaagtcaatttatactcttgttaggtaagtccaaattctaaagtctacaaaaatcctgttaaatcaaggggaaaaaaaattcattttaggacaaagttattcaagatgaaaggaaggcatgtgttcagtgagagaactgcctgctgtcagatgatttcttgctaatgtgtttaaagattttgggatttctcaactttcttggttttctggtagccaaatccaccaccacctcctcgctttttctgcttgccttcattactgttgacgttcagatcaacgaagggaggcaccttgaaaccaaatgacagagcaacctgaggcaaatttaggttattaacattaaagatctgtttcagagaatgggaatcataggctcgtatgtatgacttatatgcttcctgggctgacttatgaagaaagtaattcttttcaatcaatttctcaagctgagactgaatgtcagaaattttagaccaggaaaagtcaaattcacttaatggaaccttggattgtttcaagtagcgaagaaaacccaattcttctgggcgcaaatgagcaaggcatgccctctcccatttaggcctctggctgttctacccacacgatgaatatattccttagggtcatccggagggtcatactgaacatccagtcgacttcaggaatgtctagtcctctcgctgccacatccgtacacaatagtgttcccgaatctgcattgcagaactggaagaatgtgcgcacgcgtggtcgacgatatcccggaattccggaccggttacca

SEQ ID NO: 251086 - DNA, 829 bp, Homo Sapiens
ggaaccaaggtgaaaagttgtttatacattcaaactgcagataagagaattacatgaaaagttctaccataaacggctttaagattgaaaacagccaaaggagtccatatatgggattttagttatgttaatagattataattgatatcaaagagcaaggcagactgagtgctctacttgggatccaagccatatgcattcacagcacagaagttactgtggctacactctgaattttcaggcccatttggataaaagacaagaaatagcagtatctccacatgggcacagagagatgggaaactacgaggcacttcagggaaggttttatgaagtaaggtgatgtttacaactccaagggtaggcaggaaatttaaataaaacataactcctaatttaagaaatgcaactccatctaataagacttctgaaataaactttagctcccagatttctgatgatgtaatgagagtttaatattgctcataatttaaatccatattttttctcaaaaggtaaaaaatttgggtagagaagattatctacttctcgacttgttcttaaagaatgaaactgccaaaaatgtctacaaagaaaaatatgtagtatgttctgctgaattcaagtagtcaaatattctgcatcaagtttcacaagcattttaccttataaaatggaaaatcagtctttacaagaaaggcataatgaaacctaaatgtaatatttattttgtcacgtaggtaaaatactctttggacacaaaccacgtgcttattgattaagactattcagttaatgcacttcatttgatgtctaacatgaatatgaa

SEQ ID NO: 251087 - DNA, 508 bp, Homo Sapiens
ggggatcctttagaaatggttaacgcctaagaataaactttatcaaaatgagtaattgcaataaagtgcttgttacatttcaaaatgatgcttttagactgtggtatgttgttttaaaagtgtgtgctattccttccgtaaaggatccccaggcatgagagttgggtcttctcacctgtcccataaagcagcagcactatcttttggtaggctgacaataggcacattacccatgcggatgaggctatactagtgctatggcaaaaggggaagtaaattagaaaagtgggaggcatgtagagggttcctattatagttatatacaaatatattaaatatactataaaaatagtcgattctattcctttgcaattacttcagaagctccttttagaagaaagctcacccaatccaaacttaaaaggttctctttctccaaacacttaaaagtggcaagtgcctttgtgcagtttcttctctaccattcaaaaattccaatcagcttgtc

SEQ ID NO: 251088 - DNA, 501 bp, Homo Sapiens
ctttcattgagcttcttaggtctgtaagttaaagttttcatcaaattcggaaagtttccacacagccaatatttatttttattctgcctacaacactctttcctttctgaagccccatgtttggacacttacttgtcccacaatttcctaaccaagctctttatgacctttcaggaataactgcctttgcttttgttttctgcttagttcatatcactgtgctgaaagatttgtttctaaccactgtccctagttttaaactagttttctgtgtcacctctacaagttcacctctcagcttctttgcatcatcattactgaagctacaaatctaagatccttccaactagacaaaaagggatccaaaaattaagggcttgttctcataacatcttaactaagactaggcaaaaatagggggatttgttctcataacatcttaactaaaactacgggcaaaaagggaactatgtaggcaagaaaacataggtgtggcttttg

SEQ ID NO: 251089 - DNA, 2352 bp, Homo Sapiens
tgaaaaggcacgagagaaatttatgaggctaaactacagctgcaacagagcagagctaaaacaattgcaggaagaaagaaagaaattgactgacattcaggagaaaattcaggcattgcaaacggcatgccctgacttacagctgtcagctgctagtgtgggtaactgtcctaccaaaaaatatatgccagctgttacttcaaccccaactgttaatcaacacgagaccagtacaagcaaatctgtttttgagcctgaagattcttcaatagtagataatgagttgtggtcagaaatgagaagacatgaaatgttgagggaggagctgcgacagagaagaaagcagcttgaagctctgatggctgaacatcagaggaggcaaggtctagctgaaactgcatctccagtggctgtgtcattgagaagtgatggatctgagaacctatgtactcctcagcaaagtagaacagaaaaaacgatggcaacttggggagggtctacccagtgtgcactagatgaagaaggagatgaagacggttacctttctgaaggaattgttcggacagatgaagaggaggaagaagagcaagatgccagttccaatgataacttgtctgtgtgtccttctaacagtgtgaatcataactcctacaatggaaaggaaactaaaaataggtggaagaacaattgccctttttcggcagatgaaaattatcgtcctttagccaagacaaggcaacagaatatcagcatgcaacggcaagaaaaccttcgttgggtgtcagagctctcttacgtagaagagaaagaacaatggcaagaacaaatcaatcagctaaagaaacagcttgattttagtgtcagtatttgtcagactttgatgcaagaccagcagactctatcttgtctgctacaaactcttctcacgggtccttacagtgttatgcccagcaatgttgcatctcctcaagtacacttcataatgcaccagttgaaccagtgctatactcagctaacatggcaacagaataatgttcagaggttgaaacaaatgctaaatgaacttatgcgccagcaaaatcagcatccagaaaaacctggaggcaaggaaagaggcagtagtgcatcgcaccctccttctcccagtttatttgtcctttcagctttccaacacagcctgtaaatctcttcaatatacctggatttactaacttttcatcatttgcaccaggtatgaatttcagccctttatttccttctaattttggagatttttctcagaatatctctacacccagtgaacagcagcaacccttagcccagaattcttcaggaaaaacagaatatatggcttttccaaaaccttttgaaagcagttcctctattggagcagagaaaccaaggaataaaaaactgcctgaagaggaggtggaaagcagtaggacaccatggttatatgaacaagaaggtgaagtagagaaaccatttatcaagactggattttcagtgtctgtagaaaaatctacaagtagtaaccgcaaaaatcaattagatacaaacggaagaagacgccagtttgatgaagaatcactggaaagcttcagcagtatgcctgatccagtagatccaacaacagtgactaaaacattcaagacaagaaaagcgtctgcacaggccagcctggcatctaaagataaaactcccaagtcaaaaagtaagaacgaggaattctactcagctgaacaacgcagagttaaacaacatcaaaactgggagctgactctctcgtccatgctccgaagctttgcgacgactactactctattctgcaacgctagctacattaactcttctcacaaagtgaagtctcgctccacattcatcttactcgaactcttccatgcagctgcagcctacgtaaacacagactaccttgagcacagagggccttttgtatgccattgccggcacgatagctatcccggacactatccccctgcgagaccactgccacaggcgcccacctgtgccgctccgctcacactcctgcgtaacttgcgacagcatccaacactcagaacacttactccataggtgagcacccaccgccgacctagccgaccgcaccgccacccccacgacgcaagaacccaccgcgcaccgagaaatcccggacaaaaaactcaacgctgagggcgcgcaacgcatgcccgcaccccgcgcacaacaggtcgccagcactggcaacaaatcacagcaccgcgcgccctccggcacccagcgggacccaacccacaccccggcaccccagcaacaaccagggcaccacccggacaaccaaacagccacagg

SEQ ID NO: 251090 - DNA, 502 bp, Homo Sapiens
ggctgacagaactcccacggacacaccatgataaggaccctgctgctgtccactttggtggctggagccctcagttgtggggaccccacttacccacctgatatgactagggtggttggcggtgaagaagcgaggcccaacagctggccctggcaggtctccctgcagtacagctccaatggcaagtggtaccacacctgcggagggtccctgatagccaacagctgggtcctgacggctgcccactgcatcagctcctccaggacctaccgcgtggggctgggccggcacaacctctacgttgcggagtccggctcgctggccgtcagtgtctctaagattgtggtgcacaaggactggaactccaaccaaatctccaaagggaacgacattgccctgctcaaactggctaaccccgtctccctcaccgacaagatccagctggcctgcctccctcctgccggcaccattctacccaacaactacccctgctacgtcacgg

SEQ ID NO: 251091 - DNA, 959 bp, Homo Sapiens
ataacaatacatcttgatgagtgctaaacttaactaaatatgtatatttaaataaagtttataatcattttatccttataattaatttgggtaacgtcattatttcaaaggactggattatggtaaattttttagatctaatgttttgcttaattgaattaaaatgtttgtttttcaatgcagatttgagttctgtgaacctgcatttgttgttggtaattgcctccagatagcttctgacagtcatcagtatgatcgaatttattgaggagctggagtacagaaagaccatgaaaactacatgaaaatattactaaaagttggaggcatattagtcatgcctatagaggatcagttaacacagattatgcgaactggacagaacacttgggaaagtaaaaatatccttgctgtttcatttgctccacttgtgcaaccaagtaagaatgataatggcaaaccagattctgtgggactccctccctgtgctgtcaggaatctacaggacttggctcgtatttacattcgacgcacacttagaaatttcataaatgatgagatgcaggccaaggggattcctcaaagggctccacccaaaaggaaaagaaagagagttaaacagagaattaacacttacgtatttgtgggtaatcagcttattcctcagcctctagacagtgaagaggataaaaaaatggaagaggataacaaagaagaggaggaaaaagatcacaatgaagcaatgaagccagaggagccacctcaaaatttactgagagaaaaaatcatgaagctgcccctccctgaatctttaaaagcttacttgacatattttagagacaaataacttagatcaagaagaaaaatgcctactgataattcctttagtcttgaaaatgtagcatttgttaggagttaaaagagggaattatttctttcatcagagcaaattatagtgg

SEQ ID NO: 251092 - DNA, 1314 bp, Homo Sapiens
  misc_feature (1258)..(1258): n is a, c, g, or t
cacacagtggcactagcattataccaagagtatgagaaatacagtgctttatggctctaacattactgccttcaagtatcaaaggctgccctggagaaagagatggcagcctcagggcttccttatgtcctccaccacaagagctccttgatgaaggtcatctttttcccctatcctgttcttcccctccccgctcctaatggtacgtgggtacccaggctggttcttgggctaggtagtggggaccaagttcattacctccctatcagttctagcatagtaaactacggtaccagtgttagtgggaagagctgggttttcctagtatacccactgcatcctactcctacctggtcaacccgctgcttccaggtatgggacctgctaagtgtggaattacctgataagggagagggaaatacaaggagggcctctggtgttcccggcctcagccagctgcccacaagccataaaccaataaaacaagaatactgagtcagttttttatctgggttctcttcattcccactgcacttggtgctgctttggctgaactgggaacaccccataactacagagtctgacaggaagactggagactgtccacttctagctcggaacttactgtgtaaataaactttcagaactgctaccatgaagtgaaaatgccacattttgctttataatttctacccatgttgggaaaaactggctttttcccagccctttccagggcataaaactcaaccccttcgatagcaagtcccatcagcctattatttttttaaagaaaacttgcacttgtttttctttttacagttacttccttcctgccccaaaattataaactctaagtgtaaaaaaaagtcttaacaacagcttcttgcttgtaaaaatatgtattatacatctgtatttttaaattctgctcctgaaaaatgactgtcccattctccactcactgcatttggggcctttcccattggtctgcatgtcttttatcattgcaggccagtggacagagggagaagggagaacaggggtcgccaacacttgtgttgctttctgactgatcctgaacaagaaagagtaacactgaggcgctcgctcccatgcacaactctccaaaacacttatcctcctgcaagagtgggctttccagggtctttactgggaagcagttaagcccctcctcaccccttccttttttctttctttactcctttggcttcaaaggattttgggaaaggaaccattntgctttacactcattttcaatttctaaatttgcaggggatactgaaaaatacggca

SEQ ID NO: 251093 - DNA, 160 bp, Homo Sapiens
agctaggaaaggcagaaacacaaccactcaccagtcctaggttttagaactcaaccccttcgatagcaagtcccatcagcctattatttttttaaagaaaacttgcacttgtttttctttttacagttacttccttcctgccccaaaattataaactcta

SEQ ID NO: 251094 - DNA, 459 bp, Homo Sapiens; identical to SEQ ID NO: 7608

SEQ ID NO: 251095 - DNA, 489 bp, Homo Sapiens
  misc_feature (22)..(22): n is a, c, g, or t
ggagcaagggaaggaaagcggngcaaaggaggaaggaaacgaacgagggggagagcgaggtccctgtttatggaggagctagtgtagcgttgccaggcccctgaagtggagcagagagggaggatgcttcgccgtttctcctgccaggggtaggtcccggcttcccgtggaggctccggaccaagccccttcagcttctccctccgaatcgatgtgctgctgttaacccgtgaggaggcggcggcggcggcagcggcagcggaaaatggtgttgctgagagtgttaattctgctcctctcctgggcggcgggaatgggaggtcagtatgggaatccttaaaataaatatatcagacattatgaaggattatcttacaatgtggattcattacaccaaaaacaccagcgtgccaaaagagcagcctcacatgaagaccaatttttacgtctagatttccatgcccatggaagacatttcaacctacgaat

SEQ ID NO: 251096 - DNA, 1553 bp, Homo Sapiens
gggtagctgagagatggctacagaatatcccatcgcaggacgaaaaacgtgaaaaagccgaggctttgttgaagaagcttcatatccagtaccggcgatcgggcacagaagctgtgctcatagcccacaagctgaacactgaggaatatttaagagtgatcggaaagccagcacatcttattgtcagtctctacgaacatcctagcatcaatcaaagaattcagaattcatctggcacagattatcctgatattcatgcagcagctaaagaaatagccgaagtcaatgaaattaatttggaaaaagtctgggacatgttgttggaaaaatggctatgcccttcaacaaaacctggtgaaaaaccatcagaattatttgaacttcaagaagatgaagccctacgaagagtgcagtatctcctcctgtctcgtccaattgattatagttcaagaatgctgtttgtatttgcaacatcaactacaaccacattaggtatgcatcagttaacttttgcccatagaactcgagctcttcagtgtctcttctatttggctgacaaggaaactatagaatctctctttaaaaaacccattgaagaagtgaaatcttatttgagatgtataacttttctggcatcatttgagactttgaatatccccatcacatatgaattattttgcagcagtcctaaagaaggaatgattaagggtctgtggaaaaaccacagccacgagtccatggcagtaagattggtgactgagctgtgtttagaatacaaaatctatgacctgcagctttggaatggactcttgcaaaagcttctgggcttcaatatgattccttatctaaggaaagttttaaaagccatctccagtatccattctttatggcaggttccctacttcagcaaagcgtggcagcgtgtgatacagataccactgctttcagcctcttgtcctttaagtcctgatcagctgtcagattgttctgagagtctcatcgctgtcctcgaatgtccagtctcagatgatcttgacctgatcggagtcgccagcaagtatatccagttagaacttccggcatttgcattagcttgtctgatgctcatgccccactcagagaaaagacaccagcaaattaagaattttctgggttcctgtgaccctcaggttattttaaagcaattggaagagcatatgaacacgggccagctagcaggattttcacatcaaattagaagtctgattttgaataatatcatcaataagaaggagtttgggattttggcaaagaccaaatactttcaaatgttgaagatgcatgcgatgaataccaacaatatcactgagctagtgaactatttggcaaatgacttaagatgtttcttagtggattatcgtaaatcactgaacctttttttcaagaaggacaagaattttggagtctgctattaatggaccatatttattacagtttttaaattgtacaatctctgtattatagctatttgtctaacattaccccacatgtaataaataaaacaatatgagcat

SEQ ID NO: 251097 - DNA, 520 bp, Homo Sapiens
  misc_feature (25)..(25): n is a, c, g, or t
  misc_feature (39)..(39): n is a, c, g, or t
actaaaccccaaactcttctggtgnacctcaagcttaanattttttccctgtttatttacccatgcttgattgcattaacagatgattcaagataaatgctcaacgtacatatgtattcaaaagtctgtctcatctccctaagcaagcattgtcttgcacccatgctcccatttagttctggtctctgtaacatctgcttagcgtgctgaatggtgcacctattgacagtttccactggctgtctgcattcacagtggttaactccctggtcagtccacattcctgaagccaggagccaaacaaactgtccacaaacaagtctccaccaaggcctaatctggctgcatgctctggtcagaccaccccttctgcccactaaattctagctagattgaacttgcaatttccctaacggcaatatgacctttagcttcaggttcttgcctatagaaatgtcctctgaggcagttggagcagagagaggagaaggggatggaccagtaggcaaatgattctcag

SEQ ID NO: 251098 - DNA, 525 bp, Homo Sapiens
aagaattttctgggttcctgtgaccctcagtttattttaaagcaattggaagagcatatgaacacgggccagctagcaggattttcacatcaaattagaagtctgattttgaataatatcatcaataagaaggagtttgggattttggcaaagaccaaatactttcaaatgttgaagatgcatgccgatgaatacccaacaatatcacctgagctagtgaacctatttgggcaaatgaccttaagtttagatgaagcttcagtcttgataactgaatattcaaagcactgcgggaaacctgtgcctccagacactgctccctgtgaaattctgaagatgtttcttagtggattatcgtaaatcactgaacctttttttcaagaaggacaagaattttggagtctgctattaatggaccatatttattacagtttttaaattgtacaatctctgtattatagctatttgtctaacattaccccacatgtaataaataaaacaatatgagcataattgccccataca

SEQ ID NO: 251099 - DNA, 468 bp, Homo Sapiens
tgtttgtggaacagtttgtttggccccccggccttcgggaatgtggactgaccccgggagttaccccactgtgaaatgccagaccagcccagtggaaactgtccaataggtgccacccatccagcacgcctaagccagatgttaacagagacccagaactaaatggagcatggtgcaagacaatgccttgccttaggagatgagacagactttgaatacatatgtacgtgagcattatctgaatcatctgttaatgcaatcaagcatggtaaataaacaggaaaaaaatgttaagctgagatgcacagaagagtttggattaagtttctagagcttacggttgtagttgatgttgcaaatacaaacagcattcttgaactataatcaattggacgagacaggaggagatactgcactcttcgtagggcttcatcttcttgaagttcaaataattctgatggtttttcc

SEQ ID NO: 251100 - DNA, 594 bp, Homo Sapiens
atttattatacttgcttcctccttattagatatcatttacttatcaaacagatagttgacagaagactccagagacatactacgaggaagtgaccagtgttcatctgaaacggatgccttgtttctcagaaatgtcattctctttatttcatcttcgtagttctgtgccttctctcagcaatttctgatttctttatttactgccacacagatgacaaatgacatgcatgtccatgataccctttactcaattcacatgcgatttccaaggctggctataattcccaaaccctcccactcaagaaggtacatttcaggatacaaatgactcaaagtacaatggaatcagtctagctttataattatatcatccccaaactttggtatgtttaacaagcataatcaacaaatctcttgggatatacctcacaaatgaactcacgtactactgttacttctattgttgggataggtatattttgcctccagagcaagacttttaagacactagaggagagggacaaatcttaggcttcttctattctcctggtgtgccttgtatgctactgatattgagcatgtaataagtaaact

SEQ ID NO: 251101 - DNA, 1239 bp, Homo Sapiens
agggctgacgttccagctggactgccgccatggaactcagcgccgaatacctgcgcgagaagctgcagcggtacctgtaggcggagcatgtggaggtggaggacacgaccctcaaccgttgctcctgtagcttccgagtactggtggtgtcggccaagttcgaggggaaaccgctgcttcagagacacaggttctgtacagagtaatgagatgtgtgacggctgcaaaccaggtgattttttctgaggctgtgttgacagctgctaatgagcgtgttggtgttctgctcggcagcttggatcctagcatgactatacattgtgacatggtcattacatatggattagaccaactggagaattgccagacttgtggtaccgattatatcatctcagtcttgaatttactcacgctgattgttgaacagataaatacgaaactgccatcatcatttgtagaaaaactgtttataccatcatctaaactactattcttgcgttatcataaagaaaaagaggttgttgctgtagcccatgctgtttatcaagcaatgctcagcttgaagaatattcctgttttggagactgcctataagttaatattgggagaaatgacttgtgccctaaacaacctcctgcacagtctgcaacttcctgaggcctgttctgaaataaaacatgaggcttttaagaatcatgtgttcaatgtagacaatgcaaaatttgtagttatatttgacctcagtgccctgactacaattggaaatgccaaaaactcactaataggggtgagtctttaattgtaatgactttgttttatccacagttaagccttttctcattacatatttatgtatttcactgtcatgtcaagatgtctgcagaatcactgtgtgtaacaaacagccatatttaagacatgcctggataaataaaattggctaggaatgttttcttggcattatatttaacttttcttcgtctttttccttgacaaatcttgataagtttttttatattagttttattttctagaaaatgtcttatgaatttctcccatttgctctagcatgcttatagaaaatgtcagtggttcttacagctcaaatttgtggtagttgctttaaaatgcggtctctttcttcttcccctggtacttttttctttctgtctactgaagttagttcttatacatggtcttatattttggctgtcttttttttccctaggaacattcata

SEQ ID NO: 251102 - DNA, 390 bp, Homo Sapiens
gccggacaaggggaaaagagctcggggggcgggttcggcaccattcatattcttccgctcggtaggaggtggaggacacgaccctcaaccgttgctcctgtagcttccgagtcctggtggtgtcggccaagttcgaggggaaaccgctgcttcagagacacagcttggatcctagcatgactatacattgtgacatggtcattacatatggattagaccaactggagaattgccagacttgtggtaccaattatatcatctcagtcttgaatttactcacgctgattgttgaacagataaatacgaaactgccatcatcatttgtagaaaaactgtttataccatcatctaaactactattcttgcgttatcataaagagaatattcctg

SEQ ID NO: 251103 - DNA, 886 bp, Homo Sapiens; identical to SEQ ID NO: 97823
  misc_feature (778)..(786): n is a, c, g, or t
  misc_feature (827)..(827): n is a, c, g, or t

SEQ ID NO: 251104 - DNA, 934 bp, Homo Sapiens
attgttgactggtcacgcttatccagtctctggcagctatagaacagtctttccaaccaattgtccttccctgttctatgagagttcccatacaaaataaaactaataacatcagagaaatcttgggggtggaatgtattacttggtgctttactcatgtgacttcttaatgctaaagaaatttcttgaatttctgtgtgattgttatcgcttaggaaaacacctaaaggaattgatttcaacagttttccaaatgcttgtcgaatacaagttccacggtgcactagttggacacggcaaacatcaacacatctctgtaaaagatcatctggcaaggaagaggatagagcatgtagactgctgcatgcctgcagacagatattcacatcttcaacgagagtgtcggctaaaaggccttggcaaaagttatggaaagacggaagacagaataaaggtgcatatgtttcggacttcttcattacaacagctacttccaaagcccaagtcattaacagtttcctcgtgtcctggttatctttcttaagtaacattcccagaagatttaatataattgagaaatgtttctttgtggccatagtaacagtgccaatcacagctccatcaaacaaagaaggagaggaagaactgaggctactaaagataaagtgatcatgcctggtacaatgaggatacaacgtgtagagcacagcatactgaatggcagggaagtgaacagccaggtcactgagcacaatcatcagattcttactcagaagtgcaaagacagttggagatagcgcccacatccctattagtgagtttttggcatttccaattgtagtcaaatttaactccaaattttgtagtcaattgaggtcaaatttaactacaaattttgcattgtctacattgaacacatgattcttaaaagcct

SEQ ID NO: 251105 - DNA, 627 bp, Homo Sapiens
agtgcagtcatgagtttatctcgatacatcatactttgcatccctcctaagttcttctggttctgctcgtgcacataatcaaaatgcctgtcatctccagtggccaatgctttccaatgcgacctgtcatcctgaaagaatggcctgacatttgaagagtgagaatgccaccgggcctgtctggaagaccagagctgggctgctatcactgggttgcttgctttgaacgttgaatgtctccggaatggataacgtttactaggcttcctctcaaaggtgctggttcttcgtaacctgaagccatgtgtagcttgatattctgtccgcccactgaatctgaagcgagagcccagcctgataaagtcggatctattggatttgctgtttcctggcgtccacagtcggaagaatgcgtggtgctcaactgcacacttccaaaggtgtttgcaggtcctggcactgtctaaccggaacacaaacgtgtgctcttgctcacgtccctgatcatcatcctcgaccaccacgagtgtcaatttgctctttttaaaatcccttttggtaattttaggcctagtcagacagaaagcattttaaaagcacaatctgcagtaaaactatctacacatc

SEQ ID NO: 251106 - DNA, 419 bp, Homo Sapiens
  misc_feature (39)..(39): n is a, c, g, or t
  misc_feature (47)..(47): n is a, c, g, or t
  misc_feature (89)..(89): n is a, c, g, or t
agggccccaacctttcgggaaggacgggcccgcaacggnaaagccancggcccagtggaagaaggaccagccccattttgaattaatgnccccacgacccagaacccagaaggaaccttaggagggatgccaaagtatgatgtatccgagataaactcatgactgcactttgagagactgaagcatctctcttcccattcaccttcatagtttcattgcattcccatgaaaagtgtcttggcctcagatggatggatgtgtttggacgagtgtctttaaggagtagtcctgaaaggtgtttttggtgtccatgtaaatatttgaagataaaaccactatagcttgtcataatttactgttgactgcattctcattaaaatgaaggtaaaggctcaggaatcatattgatgttctgattt

SEQ ID NO: 251107 - DNA, 667 bp, Homo Sapiens
  misc_feature (368)..(412): n is a, c, g, or t
  misc_feature (437)..(437): n is a, c, g, or t
  misc_feature (444)..(444): n is a, c, g, or t
  misc_feature (446)..(447): n is a, c, g, or t
  misc_feature (453)..(455): n is a, c, g, or t
  misc_feature (460)..(460): n is a, c, g, or t
agaacatatgccaaatagtgtaggttaactgctaatctggattaaatgcagcctaaacttaaaattcctagatgaaatttcattattaagctcctgtagtttgtctaagttgataatgcatataagtaggaactgcactatgaaaatgcaatgagaacctgtcaggtttgcaattatctgtggactatgctcagaatacttgctaatgtgtgggaataatcagtgttaattatggtactttcagataaggttcataaagtaacttagtcactatacatgaaagtttatagtataggttgaatatcacccaaaatgcttgagaccagaagtgtttcggattttggaatatttgcagtatacttgccagnnnnnnnnnnnnnnnnnnnnnnnnnnnnnnnnnnnnnnnnnnnnntagcatttcctgttggtgctcaacnagttttngnntttttnnncattncagatttcagattagggatactcaacctgtactttattatcgacactaaatgccagtgttattttaagccttggaataacatttaacaagggcttggattaccagtaaaatggtgacagtatttgctttacattgctaaaaactgcaaaacaatgttatctatgggacagagaaacacagttactcagaatacattcagtgattaaa

SEQ ID NO: 251108 - DNA, 246 bp, Homo Sapiens
  misc_feature (75)..(85): n is a, c, g, or t
gacagcaggtcactaatgttggaaaaagtacagagtccagggaaagacttgcttgtaactttatgaattctggannnnnnnnnnncctttgctttttcttaactttcactaagggttactgtagtctgatgtgtccttcccaaggccacgaaatttgacaagctgcacttttcttttgctcaatgatttctgctttaagccaaagaactgcctataatttcactaagaatgtcttctaattcagat

SEQ ID NO: 251109 - DNA, 687 bp, Homo Sapiens
  misc_feature (62)..(62): n is a, c, g, or t
  misc_feature (73)..(73): n is a, c, g, or t
  misc_feature (172)..(180): n is a, c, g, or t
  misc_feature (511)..(542): n is a, c, g, or t
  misc_feature (551)..(587): n is a, c, g, or t
catttgaccgatgcactgaggtccaagatgaaattttcaatttcttgaatagccccctttcnttgagtatcanactgattggtagtcacatctctaagtacaatcagagttttacaacttgttaaatgaaatattagtaaggtcaaaaagacagactaaatttcaaactagnnnnnnnnntctactcaagtattacattcagttttcaaatcatttactaacatgacaacagatttggcttcaatcgctcttgtacacactcacacccacaacaggcaccccagccactgatctgctttgcaatacaaggccatatagtcagagatggcattcttcaagccaaactttaaatagattaaaaaaagtaatttgctaattttacagaaatgcttcttcaaaaaatattttctctcattccctcatctcctatactgaaggatgtatgtttcttttttttcttccaagctaaatctgaaccctcaaaattgattcctggcagcaaatctctgcnnnnnnnnnnnnnnnnnnnnnnnnnnnnnnnnatacttttnnnnnnnnnnnnnnnnnnnnnnnnnnnnnnnnnnnnntgattggaatcctccagcatttaaaaaccacattagagatgattttggggtcctatcactcacaactccaaaatccataatgaaatggacgtacttcccg

SEQ ID NO: 251110 - DNA, 865 bp, Homo Sapiens
  misc_feature (696)..(696): n is a, c, g, or t
  misc_feature (698)..(698): n is a, c, g, or t
  misc_feature (700)..(733): n is a, c, g, or t
  misc_feature (752)..(752): n is a, c, g, or t
gatctaatagaagattcctctgttcagaaggatggtctcaatcagacaactataccagtttctcctccaagtactacaaagccatcgagggcaagtactgcttcaccatgtaataataacataaatgcagctacagctgtggctctacaggaaccccgaaagttaagttatgctgaagtgtgccagaagccccctaaagagccatcttcagttcttgtgcagccactacgggaacttcgctccaatgtggtgtctcccaccaaaaatgaagacaatggagctcctgagaactccgttgagaaaccacatgagaagccagaagcaagggctagtaaggattattctggcttccgaggcaatataatccccaggggagcagcaggaaaaatcagggaacagagacgccagtttagccatagggctatacctcagggagtgactcgacgtaatggcaaagagcaatatgtgccacccagatcaccaaagtaaaaaacaacaaaactattcaaaaacttcactctcttcccattaaacttgaactgtggctatattgaactgttttggaggggagggggtagcccaggaaggaaacaagagaaagtacgtcccatttcattatggattttggagttgtgagtgataggatcccaaaattcatctctaatgtggtttttaaatgctggaggattccaatcnanannnnnnnnnnnnnnnnnnnnnnnnnnnnnnnnnnaaaagtataatttttctanttttgtttttggttttaatttgcagagatttgctgccaggaatcaattttgagggttcagatttagcttggaagaaaaaaaagaaacatacatccttcagtataggagatgag

SEQ ID NO: 251111 - DNA, 1335 bp, Homo Sapiens
  misc_feature (664)..(705): n is a, c, g, or t
gggagtgacgcgtattgcctggaggatggcggacgccggcattcgccgcgtggttcccagcgacctgtatcccctcgtgctcggcttcctgcgcgataaccaactctcagaggtggccaataagttcgccaaagcgacaggagctacacagcaggatgccaatgcctcttccctcttagacatctatagcttctggctcaagtctgccaaggtcccagagcgaaagttacaggcaaatggaccagtggctaagaaagctaagaagaaggcctcatccagtgacagtgaggacagcagcgaggaggaggaggaagttcaagggcctccagcaaagaaggctgctgtacctgccaagcgagtcggtctgcctcctgggaaggctgcagccaaagcatcagagagtagcagcagtgaagagtccagtgatgatgatgatgaggaggaccaaaagaaacagcctgtccagaagggagttaagccccaagccaaggcagccaaagctcctcctaagaaggccaagagctctgattctgattctgactcaagctccgaggatgagccaccaaagaaccagaagccaaagataacacctgtgacagttaaagctcagactaaagcccctcccaaaccagctcgagcagcacctaaaatagccaatggtaannnnnnnnnnnnnnnnnnnnnnnnnnnnnnnnnnnnnnnnnntgatgactcagaggaggagaaggcagcagccacccccaagaagactgtacctaaaaagcaagttgtggccaaggccccagtgaaagcagctaccacccctacccggaagagttctagcagtgaggattcctccagtgacgaggaagaggagcaaaaacccatgaagaagtctctgggaacccagcctcccaagaaggctgtggagaagcagcagcctgtggaaagcagtgaagacagcagtgatgagtctgattcaagttctgaagaagagaagaaacccccaactaaggcagtagtctctaaagcaaccactaaaccacctccagcaaagaaagcagcagagagctcttcagacagctcagactctgacagctctgaggatgatgaagctccttctaagccagctggtaccaccaagaattcttcaaataagccagctgtcaccaccaagtcacctgcagtgaagccagctgcagcccccaagcaacctgtgggcggtggccagaagcttctgacgagaaaggctgacagcagctccagtgaggaagagagcagctccagtgaggaggagaagacaaagaagatggtggccaccactaagcccggcgactgccgcagctcttctctgcc

SEQ ID NO: 251112 - DNA, 667 bp, Homo Sapiens
cggccggggagacatggccggcgaaggagatcagcaggacgctgcgcacaacatgggcaaccacctgccgctcctgcctgcagagagtgaggaagaagatgaaatggaagttgaagaccaggatagtaaagaagccaaaaaaccaaacatcataaattttgacaccagtctgccgacatcacatacatacctaggtgctgatatggaagaatttcatggcaggactttgcacgatgacgacagctgtcaggtgattccagttcttccacaagtgatgatgatcctgattcccggacagacattacctcttcagctttttcaccctcaagaagtcagtatggtgcggaatttaattcagaaagatagaacctttgctgttcttgcatacagcaatgtacaggaaagggaagcacagtttggaacaacagcagagatatatgcctatcgagaagaacaggattttggaattgagatagtgaaagtgaaagcaattggaagacaaaggttcaaagtccttgagctaagaacacagtcagatggaatccagcaagctaaagtgcaaattcttcccgaatgtgtgtgtgccttcaaccatgtctgcagttcaattagaatccctcaataagtgccagatatttccttcgtagaagaaggttcatggggcaaa

SEQ ID NO: 251113 - DNA, 372 bp, Homo Sapiens
aaaaacccggtccctccccgaaaaggccaaaaaaccccgccggtggtccccaaaacgtgcctcccccttccctgtaacatgctgtaagccaaagaacagcaaaggttcctatccttcctgaaataaaatcccgcacccatactgaccttcttgagggtgaaaaaagctgaaagaggtaatgtctgtcccgggaatcaggatcatcatcacttgtggaagaactggaatcacctgacagctgtcgtcatcatgcaaagtcctgccatgaaattcttccatatcagcacctaggtatgtatgtgatgtcggcagactggtgtcaaaatttatgatgtttggttttttggcttctttactatcctggtcttcaac

SEQ ID NO: 251114 - DNA, 517 bp, Homo Sapiens
ccggtgctgaacttgagcacgttcataggccggttctcaaaagaagagccaatattcactttgctcactagaccagggtgctcagccacgaggttatccatttcttgggaaatctcttccagggtatggtaggccccaaaattgaagttaccactccgttctcttctcctattaaaaagcatttcttcattctctttgtccaacaggacctgcacgtcttcaatcatgatggaataggcaattccctgggactccaagaacactttgactgcctggacgttgacgaagggaactcggacgtgggctgtctcccctggggtggtgggtgatttccaaaaatcaagctggagatgttcttgagcctccaattgtagcagatttttaatttgttcttcattgcttggtacaatctcaagaacttggtctcccacaaatgtttctagacagtagatatgcccaaaaagggcaccaaaaaacaggatcaacctcagtggccatgggttttcctggagtccac

SEQ ID NO: 251115 - DNA, 711 bp, Homo Sapiens
  misc_feature (382)..(390): n is a, c, g, or t
agccagcttctaccagtctcatgtcctaaaggatcttacccttctaggagcagtgatacgatcgatgccaagcatccaagaattattaaccaaaatgaaatgaaagtaacaggaatggtggagctcctatgaaattctcatttaattattcctcagcagacactcatttgctctctcaaaagcaggaattttgaattatctctgcagatgtaccacttggtgttgtgtatatctaatcatcccacttaaatttagtttgattcgcaaacattttcaaaacttactgggctccttaagctgcaagggaaggtgacagatggtgaaaagggagtgcacaacaatgactatatcattgtgattggttggctttcttaacaaaggnnnnnnnnnccccaagctttatgaaacctcaagtggttttaaaaagtaaaagcttatttttaatcattcttaaatcttaattcagtcagcaaataaacatggtagtatagtacccagaccatgtctactactgtaattaccctcagttaatgagtttttaagagctgatgtattttaatcaaccaaacagttctggccgtgcaagatgagtatcggggcaaatcatattaggcagaaataacaaaagacaggctaaaaagttatggaaaattgtttgtgaagtcccatgtatttgatgaatgaatatctaaagtaaattccactgaagtt

SEQ ID NO: 251116 - DNA, 721 bp, Homo Sapiens
taccggtccggaagtccacttgatatcgtcggaccacgcgtccgggcagaatcttctctcagttgtgccgccctcacagtacaacgtatcgctcactcaggtttccagctggaagacatctccacaagccagaggttcatgctgggtttagctggcagaaggacatccaaagctgcaatggcagggcactacttactgaatatttctacctacggccggggctcagagagctttaggaggacccattctgtaaaccctgaagatcgtaatggtctaagcagtcccactgaagccttgaaaatgggatatacagactgtaaaaatgcaacaggagagagtagcagcagcaaagaagatgacactgatgaggaaagtactggtgatgagcaggaatctgtcacagttgaaagaggagccccaggtttcccagagtgctggcaagggtgacacaagttcaggacctcacagcagggaaactctatctaccagtgattgcttagctagcaagaatgtgacaggctgagaataccattgacatgagcaaaccactttacagtaaggagaattacctgttcactagaggccaaaacatttgatgaaaagacccatagccagagattcaattcaggcagcacagaacgcagatggctcatgcagtgagaggtaagggcaaatccgtagcaagccccgagcttatcaagactactggacttactctgct

SEQ ID NO: 251117 - DNA, 527 bp, Homo Sapiens
tcccatgatttattccaaaaggacctaaaattaagcccaccattgtacttaaatatccggttccacttcccaggttaagaaaagacaatcctggttgaagtttcaatgcttccataacttcagaataaatgcaaggtgctgacaagtggacgtttccatgcttccaggctaagtctttgtaagcattgtctctgtagccttccaaatagtaatctccacgatcaatcgctatgaaggcttgctccactctttcagtacgaatatactgagcttcttttaaattatcaattaagtcatcattatcttccccagcactcacagctcctcccatgatagtattcaaatcaaatcataaatttaaaagtgaaataaaattagtagaaatggcttccaatattgcacttgatttccaaaaataaattaatcctgtggcgcgggcagcggcgcgcaggccaggcgctaggactcggcggggtccgcagcagccagacgccgctaccaccacaataacaacacggacgccaccc

SEQ ID NO: 251118 - DNA, 1221 bp, Homo Sapiens
tacggccggggacttccgggttcggcaataacctggagccggcggcgtaggttggctctttagggcttcaccccgaagctccaccttcgctcccgtctttctggaaacaccgctttgatctcggcggtgcgggacaggtacctcccggctgctgcgggtgccctggatccagtcggctgcaccaggcgagcgagacccttccctggtggaggctcagagttccggcagggtgcatccggcctgtgtgtggcgcgaggcagggaagccggtacccgggtcctggccccagcgctgacgttttctctcccctttcttctctcttcgcggttgcggcgtcgcagacgctagtgtgagcccccatggcagatacgaccccgaacggcccccaaggggcgggcgctgtgcaattcatgatgaccaataaactggacacggcaatgtggctttctcgcttgttcacagtttactgctctgctctgtttgttctgcctcttcttgggttgcatgaagcagcaagcttttaccaacgtgctttgctggcaaatgctcttaccagtgctctgaggctgcatcaaagattaccacacttccagttaagcagagcattcctggcccaggctttgttagaggacagctgccactacctgttgtattcactcatctttgtaaattcctatccagttacaatgagtatcttcccagtcttgttattctctttgcttcatgctgccacatatacgaaaaaagtccttgacgcaaggggctcaaatagtttacctctgctgagatctgtcttggacaaattaagtgctaatcaacaaaatattctgaaattcattgcttgcaatgaaatattcctgatgcctgcgacagtttttatgctttttagtggtcaaggaagtttgctccaaccttttatatactatagatttcttacccttcgatattcgtctcgaagaaacccatattgtcggaccttatttaatgaactgaggattgttgttgaacacataataatgaaacctgcttgcccactgtttgtgagaagactttgtctccagagcattgccctttataagcagattggcaccaacagttccatagttttaacatctagtttaagctacaaatatagtataagcattattagcaggtggtacttctgctaggggttgtaaattccaggtgttacactgacctcaatccaatttacataattta

SEQ ID NO: 251119 - DNA, 555 bp, Homo Sapiens
atatgtggcagcatgaagcaaagagaataacaagactgggaagatactcattgtaactggataggaatttacaaagatgagtgaatacaacaggtagtggcagctgtcctctaacaaagcctgggccaggaatgctctgcttaactggaagtgtggtaatctttgatgcagcctcagagcactggtaagagcatttgccagcaaagcacgttggtaaaagcttgctgcttcatgcaacccaagaagaggcagaacaaacagagcagagcagtaaactgtgaacaagcgagaaagccacattgccgtgtccagtttattggtcatcatgaattgcacagcgcccgccccttgggggccgttcggggtcgtatctgccatgggggctcacactagcgtctggtgcagccgaatggatccagggcacccgcagcagccgggaggtacctgtcccgcaccgccgagatcaaagcggtgtttccagaaagacgggagcgaaggtggagcttcggggtgaagccctaaagagccaacctacgccgccggctccaggttatt

SEQ ID NO: 251120 - DNA, 679 bp, Homo Sapiens
  misc_feature (294)..(294): n is a, c, g, or t
gaatctcttccgagaaacagagatggcagagtgacgttgggtccaacgcaggtttttctggcaaacaaagattctggttatccacaaatagttggcgtttccaatatgcagaaagcacaagagttcttacctaaaaagatttctggtgatatgagagggattcagtataaatggaaagagagtgaatcaagaggggagagagtgaagtcaaaggattcttcatttcataaattaaagatgaaagatctcaaggactcaagcatagagatggaactgaggaaagtaacatcgtcnatagttgaagcagctcttgattccagtgaactgctgactaacatggaagatgaggatgatactgatgagacactgacttcactgctcaatgaaattgcctttcttaatcaacaactaaatgatgactctgttggcctggctcaactacccagctctatggatacagagttcccaggggatgctcggcgggcttttattagtaaggttcctcctggaagcagagcaactttccaggttgagcacttgggaactggtttgaaagagttgcctgatgttcaaggggagagtgactctatcagtcccctcctcttgcccttggaagacgatgacttttctgagattgaaaaacaacttgcagaaccagcctctgagccagatgtcctta

SEQ ID NO: 251121 - DNA, 1407 bp, Homo Sapiens
  misc_feature (50)..(59): n is a, c, g, or t
  misc_feature (94)..(116): n is a, c, g, or t
  misc_feature (1090)..(1129): n is a, c, g, or t
ggcaacccctgcctcaggtatcatcccaaaacatggatccacattccagnnnnnnnnnnttaaaacaagatttggggacacatgccgtgccgtnnnnnnnnnnnnnnnnnnnnnnnacccccaacatgaacagtgtatacttgatatctgagggggatatgcagtaattttaacaatacatgtcgatggcctgaacaaaggtgaatgctgcctgtgttaagcattgcttaaaaaatctacttttaagcaaagcaagttgtcttccttaggtcagccactgcctggtccgaccagtgcagcttggccagcctcactatgagtggtcttattcccttgtcctctccaggccgatatactaatatataggctcacaaggagctgtagggtttccctcctgccctcttaggtagagaagtataggcacttctctacccagtacagtgcctgctgatctctgacgttcagtgaaacagaatataatgtcatttcctcctgacagtaagaaatttatagccacctaaagaaaagcagtagttggtatttgtcaactcaccataattaagaactgaagaacatggtcagtgctcacaattcatgaagagatgaacactccaagtccaccgagaaacccaacacaactggattgcatatttgaggttcacatggtggcaatatcacttgcagtgtttgaaggaaaacccccaacacgatgctattctgccgttacacctccttccaatagaatgacacaaaataaaggcacaggaaaataccttacatccattaatcctaagtgggacccaaaacaaaagagacaactggctcaagaacaggaggggaaaaaaggtactgccataattgatcctagcatcccttcatggctgcaatgcgtaactctcacttttcagtgagaaaaatctatactcttgtgtttctaaagaaagcacaaaatattcttgcaagatttaaatactgctaatcagtggcaaagagtgtaaacagatgaaatggcaaagttttaaaagtttttttgtagtgtttgggaaaataaagaatctgtggtaggaagcaagcaggtttaagtacaagnnnnnnnnnnnnnnnnnnnnnnnnnnnnnnnnnnnnnnnnccgaaagcccagcctcaagcctcaacctactttaagatgcacaaatacaactcaaacttcataaagcagaggagtaaaaggtgcaagagccatgtagcatccctgaagccatggcgaaacaaacacagcggtatttaaaaactgggttcactcaaaggcacaattcaatcaacctctttttctctatttaagtgtatatatttatatccctttgtatatcagagataagttttgttaattgtagaggacacaatggctttcttcttgcttctaaaaat

SEQ ID NO: 251122 - DNA, 1350 bp, Homo Sapiens
  misc_feature (1044)..(1044): n is a, c, g, or t
  misc_feature (1050)..(1059): n is a, c, g, or t
gaagacttgtttgacttgtgtgacagaacattttctcttaaaacagttctcatgatagctatacaactgatttctcgcatggaatatgtccattcaaagaacttgatatacagagatgtaaaacctgagaacttcttaataggacgaccaggaaacaaaacccagcaagttattcacattatagattttggtttggcaaaggaatatattgatccggagacaaagaaacacataccatacagagaacacaagagccttacaggaacagctagatatatgagcataaacacacatttaggaaaagaacaaagtagaagagacgatttagaagctttaggtcatatgttcatgtattttctgagaggcagtcttccttggcaaggcttaaaggctgacacattaaaggagaggtatcagaaaattggagatacaaaacgggctacaccaatagaagtgttatgtgaaaattttccagaagaaatggcaacatatcttcgttatgtaagaaggctagatttttttgaaaaaccagactatgactacttaagaaagctttttactgacttgtttgatcgaaaaggatatatgtttgattatgaatatgactggattggtaaacagttgcctactccagtgggtgcagttcagcaagatcctgctctgtcatcaaacagagaagcacatcaacacagagataagatgcaacaatccaaaaaccaggttgtaagttctacaaatggagagttaaacacagatgaccccaccgcaggacgttcaaatgcacccatcacagcccctactgaagtagaagtgatggatgaaaccaagtgctgctgttttttcaaacgaaggaaaaggaaaaccatacagcgccacaaatgactctggacacagacagatcctggggagttacttacatgttcatctgctgtcttgtgattaaaatcatctctgtagtgaccacgtatattttcaaggactcactcttagaaacaaaaatgtcatactttcatacttcattttgtggttgtcttacattctttntctttnnnnnnnnnnctctaatttaacctttatggaagctttaaagttttgtcaaaacatgagtgctttgcccatcagtgaatggaatggaccaatgaggtggtatcaatgaatatagttccatagaacattttccagaagttcttctgttgtagaaagcagtacagtatcttaagtgtcaaccagttatatacctaatctggttttttataacttctgtaagagcataatcaaacaggaattttcttttctcagtggataatacaacagagaaaacagagttgcccaaatatttagtattaactg

SEQ ID NO: 251123 - DNA, 484 bp, Homo Sapiens
ggggcagtcgtgagccctcttgtccttgagcgtcaaccttctttccctgaagtggctggggttcctgtttccttctttgattgacaacttgtgttaaccctcgcacatctctgggccaatttttgcttgaaaatggcagctcccgagcagccgcttgcgattatcaaggggatgcacgagctcctcctcgctttccccgcctcggggcgaccgaacccttctggtcaggcacctgccggctgagcttactgctgaggagaaagaggacttgctgaagtacttcggggctcagtctgtgcgggtcctgtcagataaggggcgactgaaacatacagcttttgccacattccctaatgaaaaagcagctataaaggcattgacaagactccatcaactgaaacttttaggtcatactttagtcgttgaatttgcaaaagagcaagatcgagttcactccccatgtcccacttcaggtttctgaaaa

SEQ ID NO: 251124 - DNA, 704 bp, Homo Sapiens
  misc_feature (112)..(112): n is a, c, g, or t
accctagacctaggcatcttaatctctgggaaggggtacacaatcaaatgtaagaaggtttctttagtatttttaaggcctgaacagtttagacactgctgtgtaagagtanaatgatcaggtgcctagtatcagcatagcgatccaactttatattatcactaggaaaataaagggttggagcctctgtgtaactttgttgaaaaatctgctactattattagatctgtgaaacaaattgaaaattcggttattatcaccttaaaagtacaaaacctatagattttgaaaatgtaattatttttctgtaggcatagttaaaaagattttgtaaatgttataaatcagtttctttataagcggtttatttagataaattttgttatactgacatgattcactaattttctaaatataaatggttcagctcttagttatttttaaactaatgacctgtgttatacttcctatttttaatgggcttttatgatgttttaggtttttttgaatcccgtgtccttcaagtgcttgctaactttgagaggaagaaattgaccacctggactatggaactgtgcgtaacagctttgaaagtgtatttaaaaattaaatctatatgcctttaaatcagtgaattggaaacatattacatgtattttaatgattttcctcaaatataataaattgtttcctttccaataaaa

SEQ ID NO: 251125 - DNA, 2100 bp, Homo Sapiens
  misc_feature (714)..(725): n is a, c, g, or t
  misc_feature (1303)..(1303): n is a, c, g, or t
  misc_feature (1349)..(1349): n is a, c, g, or t
  misc_feature (2085)..(2085): n is a, c, g, or t
tacctcttgtccttgagcgtcaaccttctttccctgaagtggctggggttcctgtttccttctttgattgacaacttgtgttaaccctcgcacatctctgggccaatttttgcttgtaagtctttccggagacccctgggaatttaaatcattagcaccgcgcccttccccgaagagtcttcgaagggttgccgcttttcggtgggcgcagttctcgcgagaagggtgactttctttctcggtatttccggggtttccagaatccttagcgcgaggcggaaaaaaatatttctcccagcttgtgttgatgccgcgattttgactgagacttcttcccacgatttctgtttttgcttctccaaggaaaatggcagctcccgagcagccgcttgcaatatcaaggggatgcacgagctcctcctcgctttccccgcctcggggcgaccgaacccttctggtcaggcacctgccggctgagcttactgctgaggagaaagaggacttgctgaagtacttcggggctcagtctgtgcgggtcctgtcagataaggggcgactgaaacatacagcttttgccacattccctaatgaaaaagcagctataaaggcattgacaagactccatcaactgaaacttttaggtcatactttagtcgttgaatttgcaaaagagcaagatcgagttcactccccatgtcccacttcaggttctgnnnnnnnnnnnnggtctgatgaccctgtcgaagatgataaagaaaaaaaagaacttggttatttaacagtagaaaatggaattgcaccaaaccatggggtgacttttcctttaaattcatgcctcaagtatatgtacccaccaccttccagcacaatcctagcaaacattgtaaatgccttggcaagcgtgcctaagttctatgtacaggtccttcatcttatgaataaaatgaatttgcccacaccctttggaccaattactgcgcgacctcccatgtatgaagactatatgccattgcatgcacctcttccacccacatctcctcagccacctgaggaacctcctttgccagacgaggatgaggaattatctagtgaagaatcagaatatgaaagcactgatgatgaggaccgacagagaatgaacaaattaatggaactagcaaatcttcagcccaaaagacctaaaacaataaagcagcgccatgtgagaaaaaagagaaaaataaaggatatgttgaatacacctttgtgtccctcacacagcagtttacatccagtgctgttaccttcagatgtatttgaccanccacaacctgtaggtaacaaaagaattgaattccatatatctaccnacatgccagctgcatttaagaaagatttagaaaaggaacaaaattgtgaggaaaaaaatcatgatttacctgctactgaagttgatgcatccaatataggatttggaaaaatcttccccaaacctaatttggacatcacagaggagattaaagaagactctgatgaaatgccttcagaatgtatttctagaagggaattggaaaagggcagaatttctagagaagaaatggaaacactttcagttttcagaagttatgaaccgggtgaaccaaactgtagaatttatgtaaagaatttagctaaacatgttcaagaaaaggaccttaaatatatttttggaagatatgttgacttttcatcagaaacacagcggatcatgtttgatatacgtttgatgaaagaaggtcgtatgaaaggacaagctttcattggacttcctaatgaaaaagcagcagcaaaagccttaaaggaagctaatggatatgtgctttttggaaaacccatggtggttcagtttgctcgatctgctagaccaaaacaagatcctaaggaaggaaaaagaaagtgttaaaaattaataaaggtttttttgaatcccgtgtccttcaagtgctttctaactttgagaggaagaaattgaccacctggactatggaactgtgcgtaacagctttgaaagtgtatttaaaaattaaatctatatgcctttaaatcagtgaattggaaacatataanagtatttaatgattt

SEQ ID NO: 251126 - DNA, 520 bp, Homo Sapiens
  misc_feature (137)..(137): n is a, c, g, or t
  misc_feature (157)..(157): n is a, c, g, or t
gggacatggggagtgaactcgatcttgctcttttgcaaattcaacgactaaagtatgacctaaaagtttcagttgatggagtcttgtcaatgcctttatagctgctttttcattagggaaatgtggcaaaagctgtnatgttttcagtcgccccttnatctgaacaggacccgcacagactgagccccgaagtacttcagcaagtcctctttctcctcagcagtaagctcagccggcaggtgcctgaccagaagggttcggtcgccccgaggcggggaaaagcgagggagggagctcgtgcatccccttgatatcgcaagcgggctgctcggggagctgccattttccttctcgcggagaactgcggccaccgaaaagcggcaacccttcgaagactcttcggggaagggcgcggtgctaatgatttaaattccaggggtctccggaaagacttacaagcaaaaattggcccagagatgtgcgagggttaacacaagttgtcaatcaaagaaggaaacag

SEQ ID NO: 251127 - DNA, 489 bp, Homo Sapiens
  misc_feature (16)..(16): n is a, c, g, or t
aaccctgtcgagatgnttaaggaaaaaaaaggaacttgggttatttaacaaggtaggaaaatgggaattggcacccaaacccatgggctgacttttccttttaaattccatggcctcaaggtatatgtacccacccaccttccagcacaatcctagcaaacattgtaaatgccttggcaagcgtgcctaagttctatgtacaggtccttcatcttatgaataaaatgaatttgcccacaccttttggaccaattactgcgcgacctcccatgtatgaagactatatgccattgcatgcacctcttccacccacatctcctcagccacctgaggaacctcctttgccagacgaggatgaggaattatctagtgaagaatcagaatatgaaagcactgatgatgaggaccgacagagaatgaacaaattaatggaactagcaaatcttcagcccaaaagacctaaaacaataaagcagcgccatgtgagaa

SEQ ID NO: 251128 - DNA, 519 bp, Homo Sapiens
  misc_feature (170)..(222): n is a, c, g, or t
ggatatgtactttgcagacaacatcctttacactattcatatgggatgtcatgggtatgaaaatccttttcagtgtaatatatgtggatgcaaatgtaaaaacaagtatgattttgcctgtcattttgcaagagggcaacataaccaacattgattgaaaatagtcatannnnnnnnnnnnnnnnnnnnnnnnnnnnnnnnnnnnnnnnnnnnnnnnnnnnngtcatccctaataaagtgtctgctaattcaaggcttatacattatatttatagaatataaatttgtcagtggaataaaatttcccctttttttcataaaaatctggtcagggtcatttatatattagaacagttagacacattggtgtctcttttttcctttcctttcgacattggagaattggagtgcagtcataatcttacaagatgttcatttgaatttctcacatttatggtccataaaaacttcaaggcttatccatactttttgatgtttcaatatgcattgacctggatg

SEQ ID NO: 251129 - DNA, 1203 bp, Homo Sapiens
  misc_feature (306)..(306): n is a, c, g, or t
  misc_feature (1133)..(1133): n is a, c, g, or t
gtcgacgccggggaagcagccgccattgtccgcggctgaggtgaggcctttgctcaggctgtggggccgccgtagctgcggggcttggggggtcaggagagccggctgggagaggcggcgtcagggtgggtcctgcgcctgccctttccgcgccggctttgcgccgtcgttgccgtcggttctccagccagcagcctgcctccggcctcccgcctccgggcgttcttcgttttctggtcggacgggcctgggtgaaatctgctgcacgtcggctccgcgggcctttgtccccgaggccgcgccggngaactcccaagcgcactcctgggccggacctcggcgcgggacaaaagccaaacgccccaggcgggcaaaccccgatcctgctgcgccgccttcaagggggaccgccggccgcgagccaggttgggatttgctgtgttcctgggcaggtgcctggtcaatcagtcctcgggatggcagccatcaacccgtgggcctcctggggtgcccttacggaccaatcttgggggatgacagctgttgacccatgggcctcctgggctctgtgtcctcagtatcctgcctggcacgtggagggaagcctggaggaggggaggagggccactgggctcccagcagcccaggttcaggtgagatggggctgtcctgttcccagagagatagatgtccaggttatccctggtcatcccagttgatgcggctctccagtttacaacagttggagtttgggtagggaaggaagcaactggaagttaatccttcctgagagcaggtagggagaattaggccgtttttagtgattcggagccttagtgtcaaccagtctgtccacaggactgagctccaactctacctggcttgttgtggggcatgaagggcagcccttttggctgacaggcccacttctctattgccaccttcactcatgtctttagcacccgattaaggctgatgctgtacagtgcctgctgtgcctgctgtgaaggaacaaagacaggtgtgagcctttaccctgaggagctgccaaaccctttttcagggttgattgactcaggctaagagatctgacggtgctacctggaaccacacgtgcagtgtgggacaggganaaaccttatacgagttggtatagatcctgtagtacacaaatcccttattgagactgttgaatggtacaag

SEQ ID NO: 251130 - DNA, 729 bp, Homo Sapiens
  misc_feature (45)..(63): n is a, c, g, or t
  misc_feature (67)..(67): n is a, c, g, or t
  misc_feature (264)..(264): n is a, c, g, or t
tatggtatggtattccttaaccctcagattaattccagaaagacnnnnnnnnnnnnnnnnnnnaagngggcattgagtctttaagcttcctccttctatgtttcaaacatgtaggcgggacagataaagtgtaaaatgagaaaacgaagacataaccatactcttaaaacaaggcgaatgtattttcatgggttagaaattgtacacctaacttcataggggagacaaaacctggctcctgctgagccctggtcccgaagcaanacatggggttgccagaaattagtatcctttaaggtcacaggaactcacaaggccaacaggaactcacagtgctccgtgggagttagaggactggttccaaattcactgaataaaatcagaggctgggaggagctctttcccccatgaaggtgaaagaaaaatacaatcaattactacctgtaactgtggatttatattagtctcagtactggagaagcagaaggaatcagaccaaggccacgacctgagtcaacctacctgtttgttcagtgataggaatgctgaagcccattggccactatggacaagagcttgaatagaaaagtgataagaacgttacatttggaacaaccaaacactaagatttatgtctcttcctatttggtaataactcatgacagaaaatcatttttggctaagagcctcatgattctatgaacagtgttttaccctaagttctagata

SEQ ID NO: 251131 - DNA, 600 bp, Homo Sapiens
  misc_feature (569)..(569): n is a, c, g, or t
ggatttaataatcttgctgtttttcctctttatgacaaagaatataattgggaggatgaagtgtcttaaaaattgtagagaccagctcactggaatgtttttccatccctgtattcatggcttgactttgtgactgctctacactgcatgtctgacattgcagagtgagctatgttgaggtaaactggttggttgtcattattttgcaatcagcctggtctctcccatgaagatgtcgtgtgcataagcacaatcatcactgattagaagatcacagcagaatacccttggattagagagaagttcgtaccttgcatttctctgaattctagtctctcataagcactgctttgctggatgattttcactgctttgtgttaatgactttgagcgatctctcacatgatggggttctttagtacatggtaacagccatgtcatcttacacacctagcattgtgaatgctgtagtgacatcctttataggcaccttacagctcaaaacttttgtttcatttcatgccttacttatcaaaaaggcaggaaagtaggtatgatctctaaagaanaacaaacacccctcccaaatacaaaacttgt

SEQ ID NO: 251132 - DNA, 288 bp, Homo Sapiens
acatttttacatttttttacatatttatagggtactagaaatatgtcttggacaaaatggaaagcacatactattaagatttgctttcccacaaaatgacttatattggtgaacccaaacatgaaaaggttctttccatcctcaaagcccaaacttaggtggcagtttttaaatttcccaaataagtccaagatggactctctatgttccgtgctagcattcagaaaatgctaagaaaagtcacgctcattgagaggagtggttagagctcattctaaaagcagctta

SEQ ID NO: 251133 - DNA, 834 bp, Homo Sapiens
gaaactctatgtccttgtccctgactgtcatcctgaccatgggctcgttaggggcacctgagcctggtcccccttagtccagtagcccttctgccagattaaacaaggccctttcatccttgcctgagacctctggcttggagccattttgtttcttctttaactgggggcacttgtctttccagtcttagatcgtaaatgagctgccaagggaggggtttctcccgcagcttcacattctctcttgtctgttctgggtggtctaggggtgtatctgtccagaggaggcacaggtgctgtgggctcaggagtggggagtctctcttctaggtaaggacggggggcattgctgtgccatttcctgccatgggtcctctgacattgggtcagatagaactttaggagctgacttcccttggcgggtggggagagatccctcattggctatctgtccctttgccactaacactgctgctgcctgtcctctcaacgcactgtggggggtctaaaaccagctgtaactaagtgtctgtgtacaggaacttgtctggataccctggcttacaggtaatcttgtgccatacctttgaaataagggacctatccaggcttccttctgatggccaacccacctctaatgctggccagtctgtctcacacaaagttctaagttttcctggtgttatagtaactccatagtctcccttaaatccctttttgaaattttttataacatagttcctagtggggtgggcttactttgtgtctgacccatttttctttcgagacaagacaacactcacactacaagagggaaagggtaaaggtcactca

SEQ ID NO: 251134 - DNA, 565 bp, Homo Sapiens
  misc_feature (21)..(21): n is a, c, g, or t
  misc_feature (39)..(39): n is a, c, g, or t
  misc_feature (60)..(60): n is a, c, g, or t
  misc_feature (72)..(72): n is a, c, g, or t
  misc_feature (92)..(92): n is a, c, g, or t
  misc_feature (104)..(152): n is a, c, g, or t
  misc_feature (162)..(162): n is a, c, g, or t
  misc_feature (176)..(176): n is a, c, g, or t
  misc_feature (204)..(204): n is a, c, g, or t
  misc_feature (224)..(224): n is a, c, g, or t
  misc_feature (342)..(342): n is a, c, g, or t
  misc_feature (495)..(495): n is a, c, g, or t
  misc_feature (547)..(547): n is a, c, g, or t
aacctttaaaaaacaagcctnggtttgtaagtattgaanccttcacagttatttaaaaantacccagtcaanatgtttgtaagtaaaaattntgcaagcccgtnnnnnnnnnnnnnnnnnnnnnnnnnnnnnnnnnnnnnnnnnnnnnnnnntatctgctanctgcagctatttanaggagttacccccgaagggccgaggaangggggacccctgggaaaaanactcagtctgacccaacccatgcctgcagcataacccagtgtgcatactgtaaagaaacagcgcattggaaagacaagtgcccctagttaaaagagaaacaaaatggctctgagccanaggtttcaggcaaggatgaaggggccttgtttaatctagcagaagggttactggactgagggggaccgggctcaggtgcccccaatgagcccatggtcaagatgacagtcaggagcaaggacattgagtttcctgtcaatacttatcctgaanattcaagtagtaaccaccccaagttacccccttcctacctccaagaataaangaatctcaaccctgaaaa

SEQ ID NO: 251135 - DNA, 1104 bp, Homo Sapiens
  misc_feature (12)..(12): n is a, c, g, or t
  misc_feature (16)..(17): n is a, c, g, or t
  misc_feature (19)..(19): n is a, c, g, or t
  misc_feature (27)..(27): n is a, c, g, or t
  misc_feature (34)..(34): n is a, c, g, or t
  misc_feature (42)..(42): n is a, c, g, or t
  misc_feature (49)..(49): n is a, c, g, or t
  misc_feature (53)..(54): n is a, c, g, or t
  misc_feature (63)..(63): n is a, c, g, or t
  misc_feature (71)..(72): n is a, c, g, or t
  misc_feature (76)..(76): n is a, c, g, or t
  misc_feature (78)..(78): n is a, c, g, or t
  misc_feature (81)..(81): n is a, c, g, or t
  misc_feature (85)..(85): n is a, c, g, or t
  misc_feature (90)..(90): n is a, c, g, or t
  misc_feature (98)..(99): n is a, c, g, or t
  misc_feature (101)..(101): n is a, c, g, or t
  misc_feature (122)..(122): n is a, c, g, or t
  misc_feature (135)..(135): n is a, c, g, or t
  misc_feature (144)..(144): n is a, c, g, or t
gaatgggggggntaannancgcaaccnctccccngcccaaangagaccngatnnataaaccantacttacnnccancntanactntcatnaagcacgnncngctttaaccttaggagttgtntaaaagacataancactttganctccatgaaacctgtcttccaccacaacaaccctgggagagaaaaacatgctaaaggaggtatcttggcttaataattcctcatagccaatatcaacagtggcaatcagcacacagaggaaggacccaaatcactatgtagcttaaagatttctgttaatttgaaagaacaaaaacaagacagaacttctggtactctaatcaggatgattcctaacaagtcagtcatttgtgaacttagtggactttttggttactttaatttgcatatattctccagttacatcggactctatctgtggccttgttcttcatttcagtgttaatcagctaaacagaagttgttgcttatgatgtgtgagtgaacatatgccactgcctggcctctttttcttcagagcttgttgtctttttcgctatattagactttgcagtatgcccagaagctttccttcataaaatagaaagaaaaaaacatttggcttatttttcactgtagctagtcttttatacaataatcttgtaagaaaatttcttgaattctaaatattactctttctagatttttgaaatcaaaaagttttcagtaaaaagtttcttactttattttattatattaggtagtaaaaaatgtagggttatttaccataacctgttcattaatatcagaaatttacaatagcattttaagaccatagtaggattctagcataccgtgtagtacctatggagtattgtaagagctaattgttggagatgaattgcttctcatcttgttctccagtttccattgttggtttattgcagatttgtatcctgtgtcaaattcaaggtattattgataaaccttttcaaccagcagcaagaagttcaaatttttttctgtcactgtaacagaaaacacaatatgtatataacatttatgtagcaataaatgtgccatcttttttttaacaccaac

SEQ ID NO: 251136 - DNA, 869 bp, Homo Sapiens
  misc_feature (740)..(756): n is a, c, g, or t
  misc_feature (758)..(766): n is a, c, g, or t
  misc_feature (768)..(768): n is a, c, g, or t
  misc_feature (775)..(775): n is a, c, g, or t
  misc_feature (785)..(785): n is a, c, g, or t
  misc_feature (836)..(836): n is a, c, g, or t
ggggaggtacctagtgtctgagcggcacagacgagatctcgatcgaaggcgagatggcggacgtgctagatcttcacgaggctgggggcgaagatttcgccatggatgaggatggggacgagagcattcacaaactgaaagaaaaagcgaagaaacggaagggtcgcggctttggctccgaagaggggtcccgagcgcggatgcgtgaggattatgacagcgtggagcaggatggcgatgaacccggaccacaacgctctgttgaaggctggattctctttgtaactggagtccatgaggaagccaccgaagaagacatacacgacaaattcgcagaatatggggaaattaaaaacattcatctcaacctcgacaggcgaacaggatatctgaaggggtatactctagttgaatatgaaacatacaaggaagcccaggctgctatggagggactcaatggccaggatttgatgggacagcccatcagcgttgactggtgttttgttcggggtccaccaaaaggcaagaggagaggtggccgaagacgcagcagaagtccagaccggagacgtcgctgacaggtcctctgttgtccaggtgttctcttcaagattccatttgaccatgcagccttggacaaataggactggggtgggaacttgctgtgtttatatttaatctcttaccgtatatgcgtagtatttgagttgcgaataaatgttccatttttgttttccaannnnnnnnnnnnnnnnnannnnnnnnncntgtcggnccgcctcggnccctcgagaaggctttctaaaaccattcgttttggcggcgcgggccccagntaggtgaaggggaacttgggccctagccggttt

SEQ ID NO: 251137 - DNA, 1670 bp, Homo Sapiens
  misc_feature (894)..(942): n is a, c, g, or t
acagcgcggcagcgggtctggctggcggcagcggcgggagggagccgagagacccgagtgcacgtgtggagaagcggcggcacaagcgcggcggcgggagacactcccgcccccaccagactcaagccctcactcgactctcgcggccttcgttgctcgcacagctccctgcccaggctaggaggccggcttgcggggttgagtggcccgagctaagggtgcggagacccaagggcggcgactacgacggcgttgatatcggtggtaacgacggcctcagcaggcggggaagatgaaaggccggatcgagctgggagatgtgacaccacacaatattaaacagttgaaaagattgaatcaggtcatctttccagtcagctacaatgacaagttctacaaggatgtgctggaggttggcgagctagcaaaacttgcctatttcaatgatattgctgtaggtgcagtatgctgtagggtggatcattcacagaatcagaagagactttacatcatgacactaggatgtctggcaccttaccgaaggctaggaataggaactaaaatgttaaatcatgtcttaaacatctgtgaaaaagatggtacttttgacaacatttatctgcatgtccagatcagcaatgagtcggcaattgacttctacaggaagtttggctttgagattattgagacaaagaagaactactataagaggatagagcccgcagatgctcatgtgctgcagaaaaacctcaaagttccttctggtcagaatgcagatgtgcaaaagacagacaactgaacaaattacaaatgaactttcttgcacttgcttgtcgccaaataaaagagaggcccattgattcctcccccaccccaacacttttcttttaaagnnnnnnnnnnnnnnnnnnnnnnnnnnnnnnnnnnnnnnnnnnnnnnnnngagagttttaatactttcaaggactttaaaaaaataatcatgtttgaattgttttctcttatttttgtgaggtggtttgaaggaaggacaaggtagatctgtttagttttgcagttgaagttagatggtcctaaacatttaattgtcaaataatttcaaatttaatgtcctgctttcacattgaagggcagagactacaaaacattgtatatttcaaaagacaaaaagaagcagcagcagtatcttgttctctaattcatagacaagttgagtgtgtttgtggtactttgggtttttaaacactttgggatactaatccctagacattgccttcactccacctttagtccttctgagcactctctcgggagttggaacattgttatccttgtaagaaatactaagcttatgttgatttttaagtaattatatcttctcttcttgctggtgggtggggcagtttggtttagtgttatactttggtctaagtatttgagttaaactgcttttttgctaatgagtgggctggttgttagcaggtttgtttttcctgctgttgattgttactagtggcattaacttttagaatttgggctggtgagattaattttttttaatatcccagctagagatatggcctttaactgacctaaagaggtgtgttgtgatttaattttttcccgttcctttttcttcagtaaacccaacaatagtctaaccttatgttt

SEQ ID NO: 251138 - DNA, 1486 bp, Homo Sapiens
ccttgcttttagtgtttgtactgctgctgatcaggacattaaaatattgaagtgtttttaaaaattaaagaagaagaaaagtaaaagagcttaccactggcgcctatgcgatcacttcatttttagtttgagttgcaccagaagctgccgtagaaagccatgcgctactgcttacctcctccactccccctgcctgcccccagcatctggacaagctaatagcaaatattacccattgctatcaagggaggagggggtagtcttgtacaacccatgtgtgacagtcatgtgcacacatgggcgggggcttttaaaaacctttcaggaagtcaatgatttctgtgaatgatataattcttaaggtgtctgagagcaggtacagaataggaacttcagaggctttgtttaaaacgcaaagctttgtaaaacccacaaggtctgagctgaacccctcctttttgaacttactgtgacaagcacaggaacggtcagaaactgggctcatcacaccaaggcaaagcaacgggcgagtcttcctccttgtccgtagttactgcctatggaggcagtgtttagatcaagaaggcctctcttgctcccaagggccctcaccaaaggccagggctgccagtcactggtctggggggtggaggcctaacctgagggcagggtgcctgacctgtgtgccggctgctcactgctgtgaccagcagccgagcccttggccctagcccctgctgcgcagaacagcttgctggcagctggcatcgtgtcgctttatctgcccccgcacagtttgctttgtacgtctgccaacgaatcttccagttattagcaaactcagacgaatgtaccgccagtattatcagcagtcaacaagcaccttcctctccacagaagcagctggaagagaactcgaggggctgtgctgcaggcctcccctcgaaagacactgggaggtcagcatgttccacaggtgttcagagggagtctgctacaaactatcagggcaaaatctcactggatttctccactgaaaacctacttgaggtttctggtctgaaggcttaagagtcacatcttagcacttccgctctcaggcctcctcctccatcacagatgtctggatgcttttggaaatggccttggctaaagtaaaagggaaaagtagatccgataacttaaaaacgtagctcatcccttaccatccaaggggcactcccttggttggattttctatgacagcacaggggacaggtggcacaccatgagaggtctgcccagggtgggagcagtgtcactgtgctagcaatagttggcttctcccctgtcagtggaaaccccacttctgcccggcccttgagcttcttgcccactgtctccccatccttccacctacttgtggcgatctgagtactctactcttgctcaagaagtaatacgacaatcagaatacaaaccagtaaggcaacacgaataaactaag

SEQ ID NO: 251139 - DNA, 457 bp, Homo Sapiens
cttgattgcccataatcaacagccctggaaatgtggaccctgtacccaggcaggctcagtgtcttgctcctcgctagttggtaaaaggtaaggaagagctgcaggaagatggtgctaagatgttgtatgcagagttccaaagagtgaaggcgcagacacggctgggcacaagactggacttagacacagctcacatcttctgtcagtggcagtcctgtctccagatggggatgtatctcaaccagctgctgtccactcctctcccagagccagacctaactcgactgtacagtggaagcctggtgcacggactatgccagcaactgctagcatcgacctctgtagaaagtctcctgagcatatgtcctgaggctaagcaactttatgaatatctattcaatgccacaaggtcatatgcccccgctgaaatattcctaccaaaaggtagatcaaattc

SEQ ID NO: 251140 - DNA, 679 bp, Homo Sapiens
tatgtactctattagccagtgtatggatcatggcacagatctagaactctcccccacaaccagggtaagtttttgcaatgacaatgaaaccagtgtgtaataaagcagtgttatcattttgtagctctcaaagctacatcttgtacagaggcacatacagtaaaattccatcaattaatataagagaggaagctgtgggcttacagggcttcccaagctgcagctctgttgaactgaactccagcaatgactcagtgctctctcctgccaaagaccattacatgacacacaagtgaataaaaatggattgcttccggaatggcaaaaaaatatgcttctcttcccacccccaaccctatgggtaaggggctcataacacatgtggtgtctaatgaccactaaagcctggccttacacagagtcccaataaattaacaaaataacataaagaaaccttccgccataatacatccacacaccctataaactatatccaaacaaaatggaatatattaaatacatttctgtgtcttagaaaaataaaaagattggccaatttactgaaccgaaattatctcacagacgtaaaagcatgcccagcaagcacagccctgtaagactacattaatgtcaaatcaaagcaattgggttactaaaatcaacctggtttgaagttcac

SEQ ID NO: 251141 - DNA, 446 bp, Homo Sapiens
ggcagaatttggcaagggttttgtagtcttccatctctctaccatcatttcctgcctggtgactcttctttaaccagataaaaaggcatcatccagctagcccagcctaggaaacaaattattggatgtggttaattaagagtataaaaacctatgtaacgtttaggggaagaatgagtattgggaagaaaaccgatggatggtttttatatttattggcaaactcatttctgaaaacactggtcttgatacaagaagatacatgtagaatatgaatttagtgttttctccctctgcctatgtgaggataatttccacaccacgtacgtgatttttctggagtctcagataaatctaaattaaaataaccttagagctcctccttcttgcacctccacacaggtctcccctggagcttggaatgcatctaacagatgccctaagag

SEQ ID NO: 251142 - DNA, 633 bp, Homo Sapiens
  misc_feature (505)..(513): n is a, c, g, or t
atcctatacctatcgctttgaaaaagaaaggtattgcttggtggacagataaaaatgtgaaattcagaaatccccctggaggagacaacctggaagaacgatttaaaggtacaacaaagcctgtgaactggcttaaaccagtttacatgctggattctgacccagataataatggattcataaatgaggattttattgtttggatgcgtactgcagcattacctacttttcgcaagttgtatcgtcttatagaaaggaaaagtgatttacatccaacattaccagctggccgatactctttgaatgtcacatacaattaccctgtacattattttgatggacgaaaacggatgatcttgagcactatttcatggatgggaggaaaaaatccatttttggggattgcttacatcgctgttggatccatctccttccttctgggagttgtactgctagtaattaatcataaatatagaaacagtagtaatacagctgacattaccannnnnnnnnatattatgaaagcaaatcatctgcatgtgcatcaaggccagtcctattcaacctagctttcgaatgctgatatctggttagtatgtcattttgaaagttgcacataacttttctaaaaaa

SEQ ID NO: 251143 - DNA, 571 bp, Homo Sapiens
gggagaggcgggtttgggaaggaaggtgcgccaggctgaagctggggtcggagaagtgttgggtggagacctcactgtgggtgcgttcctcctctcctctccccaaaacgatggtgttaaaagctagggtcaggatgtggagcgctgcctgggcctcttcctttccgatggttatggagaatgagcctacttcctggacccaaaatccttttcttctgttactcatttatgttggttttaaaaggagctttggggcagagcttacttgttgcctcctacgagagcgcctcattttagaactcgtttcttccactacttccctctttgcagccccctcggaaaaccacactgagagttgcattaaaaaccagcatgtaggtatttgtaagtgactttttccctccagtttgtcgcatttaatcaaggagcggttgtagctgcctacgattttgtagaaaattgtgttggcttgagagcaagtcctaagttgagctgtccggcgtgttgtcagattaggggcctacctcatgcatttaggctattttattccatttcctttccctgggttgtt

SEQ ID NO: 251144 - DNA, 1030 bp, Homo Sapiens
  misc_feature (654)..(663): n is a, c, g, or t
  misc_feature (718)..(728): n is a, c, g, or t
ggatagaccagtggcactgttgtttcacaagatgatgtttgaaactattccaatgttcagtggcggaacttgcaatcctcagtttgtggtctgccagctaaaggtgaagatatattcctccaattcaggacccacacgacgggaagacaagttcatgtactttgagttccctcagccgttacctgtgtgtggtgatatcaaagtagagttcttccacaaacagaacaagatgctaaaaaaggacaaaatgtttcacttttgggtaaatacattcttcataccaggaccagaggaaacctcagaaaaagtagaaaatggaagtctatgtgatcaagaaatcgatagcatttgcagtatagagcgtgcagataatgacaaggaatatctagtacttactttaacaaaaaatgatcttgacaaagcaaataaagacaaagccaaccgatacttttctccaaattttaaggtgaagctgtacttcacaaaaacagtagaggagccgtcaaatccagaggctagcagttcaacttctgtaacaccagatgttagtgacaatgaacctgatcattatagatattctgacaccactgactctgatccagagaatgaaccttttgatgaagatcagcatacacaaattacaaaagtctgaannnnnnnnnnatcaagagggataaaacaccatgaaaataaacttgaataaactgaaaatggaccnnnnnnnnnnnaatggcaataggacattgtgtcagattaccagttataggaacaattctcttttcctgaccaatcttgttttaccctatacatccacagggttttgacacttgttgtccagttgaaaaaaggttgtgtagctgtgtcatgtatatacctttttgtgtcaaaaggacatttaaaattcaattaggattaataaagatggcactttcccgttttattccagttttataaaaagtggagacagactgatgtgtatacgtaggaattttttccttttgtgttctgtcaccaactgaagtggctaaag

SEQ ID NO: 251145 - DNA, 1398 bp, Homo Sapiens
  misc_feature (1185)..(1188): n is a, c, g, or t
  misc_feature (1190)..(1190): n is a, c, g, or t
ctataccgtggacagaaatgacagtttctctacggaagacttctccaactgtctgtaccaggactttagaattcctcttagtcctgtccataaatgttcattttataaaaataacaccaaagtgagttacgggttcctctccccaccacaactaaataaaaattcaagtggaatatattctgaagctttgcttactacaaatatagtgccaatgtaccagagttttcaagttatatggcgctactttcatgacaccctactgcgaaagtatgctgaagaaagaaatggtgtcaatgtcgtcagtggtcctgtgtttgactttgattatgatggacgttgtgattccttagagaatctgaggcaaaaaagaagagtcatccgtaaccaagaaattttgattccaactcacttctttattgtgctaacaagctgtaaagatacatctcagacgcctttgcactgtgaaaacctagacaccttagctttcattttgcctcacaggactgataacagcgagagctgtgtggcatgggaagcatgactcctcatgggttgaagaattgttaatgttacacagagcacggatcacagatgttgagcacatcactggactcagcttctatcaacaaagaaaagagccagtttcagacattttaaagttgaaaacacatttgccaacctttagccaagaagactgatatgttttttatccccaaacaccatgaatctttttgagagaaccttatattttatatagtcctctagctacactattgcattgttcagaaactgtcgaccagagttagaacggagccctcggtgatgcggacatctcagggaaacttgcgtactcagcacagcagtggagagtgttcctgttgaatcttgcacatatttgaatgtgtaagcattgtatacattgatcaagttcgggggaataaagacagaccacacctaaaactgcctttctgcttctcttaaaggagaagtagctgtgaacattgtctggataccagatatttgaatctttcttactattggtaataaaccttgatggcattgggcaaacagtagacttatagtagggttggggtagcccatgttatgtgactatctttatgagaattttaaagtggttctggatatcttttaacttggagtttcatttcttttcattgtaatcannnngnaaattaacagaagccaaaatacttctgagaccttgtttcaatctttgctgtatatcccctcgaaaatccaagttattaatcttatgtgttttctttttaattttttgattggatttctttagatttaatggttcaaatgagttcaactttgagggacgatctttgaatatacttacctattataaaatcttactttgtatttgtattt

SEQ ID NO: 251146 - DNA, 1369 bp, Homo Sapiens
gggaatttgcccagacaagcaacatggctcggaaacgcgcggccggcggggagccgcggggacgcgaactgcgcagccagaaatccaaggccaagagcaaggcccggcgtgaggaggaggagagaggatgcctttgaagatgagaaacccccaaagaagagccttctctccaaagtttcacaaggaaagaggaaaagaggctgcagtcatcctgggggttcagcagatggtccagcaaaaaagagagtggccaaggtgactgttaaatctgaaaacctcaaggttataaaggatgaggccctcagcgatggggatgacctcagggactttccaagtgacctcaagaaggcacaccatctgaagagaggggctaccatgaatgaagacagcaatgaagaagaggaagaaagtgaaaatgattgggaagaggttgaagaacttagtgagcctgtgctgggtgacgtgagagaaagtacagccttctctcgatctcttctgcctgtgaagccagtggagatagagattgaaacgccagagcaggcgaagacaagagaaagaagtgaaaagataaaactggagtttgagacatatcttcggagggcgatgaaacgtttcaataaaggggtccatgaggacacacacaaggttcaccttctctgcctgctagcaaatggcttctatcgaaataacatctgcagccagccagatctgcatgctattggcctgtccatcatcccagcccgctttaccagagtgctgcctcgagatgtggacacctactacctctcaaacctggtgaagtggttcattggaacatttacagttaatgcagaactttcagccagtgaacaagataacctgcagactacattggaaaggagatttgctatttactctgctcgagatgatgaggaattggtccatgtaagtgatcctcccggatcactgttttttatcagtactgttaactaatgataatggcagccatgtgccagatgccattccaggtgtgttaccgacactaccttattcagtcctcataatgacgttgatagctgctgaagcccagaatagctacatgatgcctctaaggtcttttccttggtgagcctgagaatcgagattgggatcagagtctgagtgggaggcctgtatgctttcctcctatcgcctctagttgtggtgtacaaaaagcccgtaatttttggtcagatgtgctaaaaatattttcattaatttttccaattttggcttcagaagtcccaggaaatgttttttcaaattggatgctgaagtcctgaaaaaggggtttttgatcccccatttgggtggtgacactggcagggcacagggcaagggggggagggtt

SEQ ID NO: 251147 - DNA, 467 bp, Homo Sapiens
gtgatcactgtaaaaataaaaacaaatcactcccaagagcttactgtttaactcaccagaatagaagaaacacattactaacccatttgatagaagactttgggcctactctagtgaaatgggctcccagacacaatcatactcctgctgataatgatgatatacattttagccataaactttcttttaaaagtgacaattttagttaaacataagccttttgaggagaaaggcttttatgcatctcagttaaacacgtgcattgatagtatcaacaaatttgcaatatagaagttgaagatagttttttacctcactttttaggaggttgtattcaaaattaaaatctcagaatcttacaggacatttaaagactcatgttgatagcatggaggagaaggaaagaagtcacagccttctactcagttgtaggtcttcttgtcatccagctgtcacactgacaaaaa

SEQ ID NO: 251148 - DNA, 757 bp, Homo Sapiens
acaacagctccactcatagatttaaacttttattttgacttatctggtcataagtggcattctctcacattccacatgatatagagggctacgtttggaattttccttttcttaatgcccagagttatcagacagattataaaaatggcttttaatggcttaaaccatttctaaacctctatcttagcagatcaatgcaggatctaattctttgataagttctagctctaaaagtgatagtgggactgtatgttttctgatactggtggcttatgttattaaaccttttttaaaaaaggttcactctaaaagctgaactacatccttagttttcagtctacttgactctatcaggagctttttaaggaaagtaagtataacatgcaaaggaagctttttttgtattcattttggactcctgtcaataaaaatagaagtttgttgactcgttttatgtttcaatggtgtgtgtctttttactatcaggacataaatagggcaatccacttctttatttttcaactaaagattgaatagtattgtacattactgctaaagtgactgctatttctgtatactgtagaaaaacccaggagtgagagggatttcccctcatagtacaactggaaggatagtgcttgtaaagagtagagatgtgtacatgatgaatcattgagggagggtggatatttttattcctagatatggaggaaacataagtctgtagtattataaaactgattgtaataattctttc

SEQ ID NO: 251149 - DNA, 550 bp, Homo Sapiens
ggggcggccggtgcagccgcagctgccatcttaggggcgcccggcgctacgggtttctcgttggaggcggccttcgtggcagctgtagacgccgggaaaaggcataaagtccgttggccgacacctttctttcctccggcctcggtagaaccgccagcccgcgtccgaaggcggaggcgaggggaactggccgcgtgaggggcctgaggcgagcggttagagcgtctcccggaaggatgggccggtctcggagccggagctcgtcccgctccaagcacaccaagagcagcaagcacaacaagaagcgcagccggtcccggtcgcgatcccgggacaaggagcgcgtgcggaagcgttccaaatctcgggaaagtaaacggaaccggcggcgggagtcgcggtcccgttcgcgctccaccaacacggccgtgtcccggcgcgagcgggaccgggagcgcgcctcgtccccgcccgaccgcatcgacatcttcgggcgcacggtgagcaagcgcagcagcctggacgagaagcaaaagcgagagggagagga

SEQ ID NO: 251150 - DNA, 176 bp, Homo Sapiens
agaccccatctcgcacaaaaaccacaaaattatctgtgcatggcagcgcatgcctgtggtcccagccacttgggagtctgagacaggaggactgcttggccccggagttcaaggctttgaggcttcagtagctatgatttccccacctgcactccagcggggtaacagagtgagac

SEQ ID NO: 251151 - DNA, 618 bp, Homo Sapiens
  misc_feature (105)..(137): n is a, c, g, or t
ctgatggggagaacataccaatagtctctatttttccctctattttcccctgcctctgagaatatcacacaatgctgcttccaggggcttagagacctgaagaannnnnnnnnnnnnnnnnnnnnnnnnnnnnnnnntttagaagaacatggaggagggaaaagaaaaggcaaaaccaccaccagaagccccacaagggaagccccaccaccagacactgtgggtctagaattagcgaatggctcctattcactcacaaagcactttaagcctcgtccaggcgcttctatggattttgacgtgtgaagtttcctttccagtttgttttaaatcgcatacaagaaagagctgttcatgctgaccctaaaatggcaattttcccctggataagaaaagttaaaggcaacaacatcctacttaaatgctaggactggaaatggcagcttgtagggttggctggcagaacctacaccacagtaaatcccttaagtcagaagacaatcagaggatgggataagctggacggcttttttgagttttatttgtaaagatggaaaggctgaaaagacactttgcttttcaagtgttgattagaaagagaaagcggagaataatgat

SEQ ID NO: 251152 - DNA, 654 bp, Homo Sapiens
agtgtgtatgtgcgggcgagaagatggcggcggcgggggaagcagcgtgagcagccggaggatcgcggagtcccaatgaaacgggcagccatggccctccacagcccgcagtatatttttggagattttagccctgatgaattcaatcaattctttgtgactcctcgatcttcagttgagcttcctccatacagtggaacagttctgtgtggcacacaggctgtggataaactacctgatggacaagaatatcagagaattgagtttggtgtcgatgaagtcattgaacccagtgacactttgccgagaacccccagctacagtatttcaagcacactgaaccctcaggcccctgaatttattctcggttgtacagcttccaaaataacccctgatggtatcactaaagaagcaagctatggctccatcgactgccagtacccaggctctgccctcgctttggaaggaagttctaatgtggaggcggaagttttggaaaatgatggtgtctcaggtggtcttggacaaagggagcgtaaaaagaagaaaaagcggccacctggatattacagctatttgaaagatggtggcgatgatagtatctccacagaagccctggtcaatggccatgccaattcagcagtcccgaacagt

SEQ ID NO: 251153 - DNA, 284 bp, Homo Sapiens
catatttagtgtattatgtaaaaagctttataggattgggttcaatattgacaatattcctatttctaagaatattagacattatttctgtaatttctattccttttgatattgttttaacaaggcagtactcctcttacaatattgtgataaattcagatttttataagacttgttcttttttcctcccaattttaaaattatttcttgaaaactattatttttcatagctatttgcctctagaagcaattgttcataatggaggcatattttcctttgtaga

SEQ ID NO: 251154 - DNA, 1028 bp, Homo Sapiens
ttctgggcagtagaggcgcggggtgcggagctagggcggccgagagccatggcggcgctattggcggcggcggcagtgcgagcccggatcctgcaggtttcttccaaggtgaaatccagtcccacctggtattcagcatcttccttctcttcttcagtgccaactgtaaagctcttcattggtgggaaattcgttgaatccaaaagtgacaaatggatcgatatccacaacccagccaccaatgaggtcattggtcgggtccctcaggccaccaaggcagaaatggatgcagccattgcttcctgcaaacgtgcttttcctgcatgggcagacacttcagtattaagccgccagcaggtcttgctccgctatcaacaacttattaaagaaaacttgaaagaaattgccaagttaatcacattggaacaagggaagaccctagctgatgctgaaggagatgtatttcgaggccttcaggtggttgagcatgcctgtagtgtgacatccctcatgatgggagagaccatgccatccatcaccaaagacatggacctttattcctaccgtctgcctctgggagtgtgtgcaggcattgctccattcaattttcctgccatgatccccctttggatgtttcccatggccatggtgtgtggaaataccttcctaatgaaaccatctgagcgagtccctggagcaactatgcttcttgctaagttgctccaggattctggtgcccctgatggaacattaaacatcatccatggacagcatgaagctgtaaagtttatttgcgatcatccggacatcaaagcaatcagctttgtgggatccaacaaggcacgagagtatatcttcgagagaggatcaagacatggcaagagggttcaagccaatatgggagccaagaaccacggggtagtcatgccagatgccaataaggaaaataccctgaaccagctggttggggcagcatttggagctgctggtcagcgctgcatggctctttcaacagcagtccttgtggg

SEQ ID NO: 251155 - DNA, 849 bp, Homo Sapiens
ggctgctcttggagaggtcactccggagacggcgttggttttggggtgtggggggttggtggcactatgtggcgcgtctgtgcgcgacgggctcagaatgtagccccatgggcgggactcgaggctcggtggacggccttgcaggaggtacccggaactccacgagtgacctcgcgatctggcccggctcccgctcgtcgcaacagcgtgactacagggtatggcggggtccgggcactgtgcggctggacccccagttctggggccacgccgcggaaccgcttactgctgcagcttttggggtcgcccggccgccgctattacagtcttcccccgcatcagaaggttccattgccttctctttcccccacaatgcaggcaggcaccatagcccgttgggaaaaaaaagagggggacaaaatcaatgaaggtgacctaattgcagaggttgaaactgataaagccactgttggatttgagagcctggaggagtgttatatggcaaagatacttgttgctgaaggtaccagggatgttcccatcggagcgatcatctgtatcacagttggcaagcctgaggatattgaggcctttaaaaattatacactgggatttcctcagcagcacctaccccacaagggggccccagcaccaaccccctgctggcacctgcttcgcccacctacaccctttctgcctccgggcttccctgggtagcctccattatcccccccctccacttggcaggggttactttctttttcctggcgccttcttcctccccaaccaattggacccatgggggcacccaagtttccccagagaattgcgggaaaaacaacaacgggt

SEQ ID NO: 251156 - DNA, 347 bp, Homo Sapiens
ggcacgagaccatgagtcaataccctgtagtcacgctgttgcgacgagcgggagccgggccagatcgcgaggtcactcgtggagttccgggtacctcctgcaaggccgtccaccgagcctcgagtcccgcccatggggctacattctgagcccgtcgcgcacagacgcgccacatagtgccaccaaccccccacacccctctctgaactggtagcagtttcccaggatctccaggctgtttcttccatccttccatgcctccacatatgctttcctcttacttccctgttgtgcctggctcctctgccatcacctgaagacccccacgccgagccctatgcagtctc

SEQ ID NO: 251157 - DNA, 735 bp, Homo Sapiens
  misc_feature (327)..(343): n is a, c, g, or t
gatatagaaaacaccttagcttgttggttattaatagagctctaattttaactgtgaaatcatggagtttctttaaatgttttcctagagtgtttgttatcatgaacattggaaatagcattattccttttcttctaccacatgtcttgaacattcacatgggttaaagaagatggaaactgatactactgacaatcaagctgctttctgactttcataattttctttatattgtggatagcattttgaaggtgaccgtgattctgtaggaagagctgtaatcaatatttttcaaactctaagagtacagaggttagtaagatttcnnnnnnnnnnnnnnnnngttacgtcaagtagcttattaagaaaaagattcatgacttaaattcttaattctcagttgatacaaaggcttataatcatgtgttttaaaattttgatttcattttcgttccttgaaggttaaagaatggaaactggggataaaaattaatacactgcagctttgccaaggtctgtgatatggttgtaaccttttaaagactactaaagtcataatttgaaatttttactaaaataaaacatatgtgtctatggttttcaattggagtagtctttcttactttcccccttcccctctttggttctcctaaccagcttagaggacccaaagagagcttagggatagacaccagaatactctgtggaggtggaacaacttaacctcactgtttt

SEQ ID NO: 251158 - DNA, 1192 bp, Homo Sapiens
  misc_feature (484)..(484): n is a, c, g, or t
  misc_feature (884)..(884): n is a, c, g, or t
  misc_feature (1046)..(1047): n is a, c, g, or t
  misc_feature (1156)..(1156): n is a, c, g, or t
  misc_feature (1171)..(1171): n is a, c, g, or t
gtccccccagtttggccgttcaccccggagcgctcgggacttgccgatagtggtgacggcggcaacatgtctgtggctttcgcggccccgaggcagcgaggcaaggagggagatcactcccgctgcgattcagaagatgttggatgacaataaccatcttattcagtgtataatggactctcagaataaaggaaagacctcagagtgttctcagtatcagcagatgttgcacacaaacttggtataccttgctacaatagcagattctaatcaaaatatgcagtctcttttaccagcaccacccacacagaatatgcctatgggtcctggagggatgaatcagagcggccctcccccacctccacgctctcacaacatgccttcagatggaatggtaggtgggggtcctcctgcaccgcacatgcagaaccagatgaacggccagatgcctgggcctaaccatatgcctatgcagggacctggnacccaatcaactcaatatgacaaacagttccatgaatatgccttcaagtagccatggatccatgggaggttacaaccattctgtgccatcatcacagagcatgccagtacagaatcagatgacaatgagtcagggacaaccaatgggaaactatggtcccagaccaaatatgagtatgcagccaaaccaaggtccaatgatgcatcagcagcctccttctcagcaatacaatatgccacagggaggcggacagcattaccaaagacagcagccacctatgggaatgatgggtcaagttaaccaaggcaatcatatgatgggtcagagacagattcctccctatagacctcctcaacagggcccaccacagcagtactcaggccaggaagactattacggngaccaatacagtcatggtggacaaggtcctccagaaggcatgaaccagcaatattaccctgatggaaattcacagtatggccaacagcaagatgcataccagggaccacctccacaacagggatatccaccccagcagcagcagtaccccaggcagcagggnntacccagacagcagcagggctacggtccttcacagggtgtccaggtcctcagtattctactacccacaggaacaagttcagcagtatggaggatatagaccaacacaanctggcgcaccacagncaccccagcagaggccttatg

SEQ ID NO: 251159 - DNA, 1107 bp, Homo Sapiens
tttcctaactgcaggaacagcatacataaaaacgctcgggtcctgaagcaattctttaagcacagcaaacgttgagtcaaatggctttcactccatgtttataaaaggcaatgccaccatcataagtttctcaataattcctatcacttctaagcattttcatgtattaatctcaatatattttaatagcatacatatggtctcaaaaaaccctttcctggggcttactgttggctttttattcccccagatcttcttaaaatcttagcctatacatgacttagaacatgtttttaacaagttatatgaaaatctccttttgtgctccacattgacagagcctgtctgaatcccagagaaggcaatcacatcctgttatgttgtcagtgtgagaggcaaaagctccaaagtactaagttcctagagctgtaaatccattgtgcttcatgttataaataaagaaattgccctgtgacagctacagtttggaagcattatcatttctcttttcaactctcacttttaatcttttcagttattttccttagtaaaacttagccaccaaagtatgacttcttgtgtcacaaacctatatgccacaattaaaagaaagaaattccagccaaccatgtcagtggctgtagtcagcatttaagacaaaactgactcctatcgatttagcagaagagagttctccctgccccgtgtctccttccatcctgccgctccctgccctctccagccttttgggcaagccttttcttcctgatgcattgcgaatgtgtgatgtacgctttctagcagatgcatttgaggttaggtcttcgcaaccatgaaaacacagttataaattgttctcggagctaacccactcaacatcttggcacttggttgtttttaacttttcaacaataggcactgttcactcccctccatctcagttctttattcagtgatcaggcaggacactgatgaaaggctagtcacggcttccccccatggtatcagtgtggtggcatgtgatgattcacatggggtgtgtttgatccgaggaagcccagtctctgcttattcttcctttgttctgtcatctgctccttgagctcc

SEQ ID NO: 251160 - DNA, 687 bp, Homo Sapiens
  misc_feature (61)..(61): n is a, c, g, or t
  misc_feature (623)..(624): n is a, c, g, or t
  misc_feature (677)..(677): n is a, c, g, or t
tgacatttggtcattgggaattactgctattgaactagccaagggagagccacctaactcncgatatgcatccaatgagagttctgtttcttattcccaaaaacaatcctccaactcttgttggagactttactaagtcttttaaggagtttattgatgcttgcctgaacaaagatccatcatttcgtcctacagcaaaagaacttctgaaacacaaattcattgtaaaaaattcaaagaagacttcttatctgactgaactgatagatcgttttaagagatggaaggcagaaggacacagtgatgatgaatctgattccgagggctctgattcggaatctaccagcagggaaaacaatactcatcctgaatggagctttaccaccgtacgaaagaagcctgatccaaagaaagcacagaatggggcagagcaagatcttgtgcaaaccctgagttgtttgtctatgataatcacacctggcatttgctgaacttaaacagcaggacgagaataacgctagcaggaatcaggcgattgaagaactcgagaaaagtattgctgtggctgaagccgcctgtcccggcatcacagataaaatggtgaagaaactaattgaaaaatnntcaaagtgttcagcagacgaatccccctaagaaacttattattggcttctgtntcatatggac

SEQ ID NO: 251161 - DNA, 833 bp, Homo Sapiens
  misc_feature (617)..(617): n is a, c, g, or t
  misc_feature (619)..(619): n is a, c, g, or t
  misc_feature (637)..(637): n is a, c, g, or t
  misc_feature (642)..(642): n is a, c, g, or t
  misc_feature (644)..(644): n is a, c, g, or t
  misc_feature (669)..(669): n is a, c, g, or t
  misc_feature (673)..(673): n is a, c, g, or t
  misc_feature (677)..(677): n is a, c, g, or t
  misc_feature (685)..(685): n is a, c, g, or t
  misc_feature (731)..(731): n is a, c, g, or t
  misc_feature (740)..(740): n is a, c, g, or t
  misc_feature (746)..(746): n is a, c, g, or t
  misc_feature (755)..(755): n is a, c, g, or t
  misc_feature (790)..(790): n is a, c, g, or t
  misc_feature (793)..(793): n is a, c, g, or t
  misc_feature (795)..(796): n is a, c, g, or t
  misc_feature (798)..(798): n is a, c, g, or t
tttgcagacgtttttcatcacatgaacaaatggacaagtctctgaaaggttctggggaaaaaaatttttcttaaagcgacaagactcttagatctaaaaggaaactgacttgccaccttgccagaggaattcttgaaatgtttctgcagccacttggccttgaaaataaagggtgcaactctcaagtcttgttctaacccggctggaggaaccacaagacccaatgaaatagcattttctctccttttcccagcactagtatataacctatgaggaacccttgtctctgaatctgctcagcttgaaattttgtctctgaaggaagagaatgaactcagccctagtctgacagtcctagatttctgtgaaataagagtattcttcaacttagtgctcacactcacataccatgagggttctctgcaggggtttaaggggtttcctgaatttgaaagttttttcaaggcctctttttgggtaaaacaattgaaaaggcagacaccaacaaagtctgcaaaattaactgtccagattaagaatattaaggagctgtttagcttgtagaaatggacttatccttaagtttaattaatggctagtgaacatgggaatgtatntntatcctcctagctgtggntctgntngggtaaccagactagaatgatttgnaggngcanagagaatngcaggaccttcttctatagcttacatatttagaatggtatactaantgacatgangtaccntgcatgatngatagaggatatatatcagtaggggataggaggangantnngngcctctagcagactgtcagacgattatttgagtgg

SEQ ID NO: 251162 - DNA, 488 bp, Homo Sapiens
gtccggaagtgacagtaacagagactgcgcagggggcctgagcgggagagtcctggcgagggcgctggccgagaggtgctcggcttgtagcaggtcccgcactccagcctctcgctgccagggtttgctctctgcttgtcctgggctgaggtgtccatgacggagtcatccaaggaggaaaaaatctgttccgggtgagcccaggccgccccggatatgcgatggctgaggagcagacaccaggggaccacactgaggttgggtttcagaccaagacaccggattctcctagttaagataaagagctttgggtgcctgacagtgaaaatggtgtaatctgcgttaacagttcacagcttgaaggcatgacaattaaagaacacacatggacttgtggcacatggaaatgtgcgcacagaaaaaggaaatctataattcttttaaagtaagaaagcattcttccttgccaaaatgggtacattctgttc

SEQ ID NO: 251163 - DNA, 715 bp, Homo Sapiens
  misc_feature (45)..(45): n is a, c, g, or t
  misc_feature (70)..(70): n is a, c, g, or t
  misc_feature (74)..(74): n is a, c, g, or t
  misc_feature (82)..(82): n is a, c, g, or t
  misc_feature (103)..(103): n is a, c, g, or t
  misc_feature (105)..(105): n is a, c, g, or t
tatcgctattaaaatgacccttattccaggttcagagatcatagnccacagaggtgtcaaagcacagtcntatntatccagntaacaacttgcccccatactntnttcccagtgtatgtttctagtttactcaactatttttgttgtgcagcctttttcctggcagctctataatttttgtaaatgagtttctgatgccttgaaagaccatatttccctgctactggctgttgaattcgttttagtcaacaggcaactattattcactggtggtctcttcatctgttttctaaatgttctctcttctttcaacagtaaggtctcagtctcctgacatacaataggcattcaatgtacatatttgttgaataaattaattacctaaagtgaatattttatgtaaatgcctttcacgtgggcccctatggctatcaaccttcacggcttcattaacttccgaaagctgaagactctctgcagactcgaaggcacctctctcaattaccagacaacactgaacaagacaacagtgaaccttttcctttcaaactactttattcaaaccagtaatgggatagaacccaaatctttcaattctccctcaagtttctaagtcatatcctcaaatgatctcattataaagtggacaacattccttttcctacagtaggcttgttcattgaaggaccgaggagaagaaatcagtcaagaagag

SEQ ID NO: 251164 - DNA, 1132 bp, Homo Sapiens
  misc_feature (112)..(122): n is a, c, g, or t
  misc_feature (216)..(216): n is a, c, g, or t
tatgtaaactgtccctcatccttcaccatcccaccatagaaagttaactttctcccaagtagccaattttcacttggtgagagttgagctaagatttgaaagatggtgattnnnnnnnnnnntcaaactgttaaataggaatttggagagacaggcttttgtcattttccaatgcacttgggaggcacaagatttcgattgtaaaagggaaaaccnccggaaagcatagtgataaagttctattttcagaacaaagaggtgagtttatcctcatgctgcaatttctactctgaaataatttctatgcctcagtgaacattgagaggatattatcagtagataagggcatcaacatttggttgtgaacacacacttttgcttaatttgtctatttaaattagaaagggaggggaaaataatactaaaaaaatccaaataagtctggaatcaatattgaactcgccccagatcaaaaagatatctagcaatctgtctacataggtgaatacactacagctttgccttttaccttgcaaatggcaacacaaagttgatatgaattacacggaacagcaaaaacccagtggcacactgacacgaacaaggactgccatcctcttttaaaacaaagccagtcagaaaactgtgactacaagttgggattacttccctattttgtgctgatggaatttttccttcccactttattccaatgtcatgattatccaaactgcttttttttaaagcaagtgagaaaaataacaaattggatctaatgactctgtgcattagtagagtgtgagctgggagatgtgtgaggccgcgggtgcagagtgaggtggctggtgcccccgcccgtgtggctgcaccctctgtctacactgcgaggccctgttagtcccctggatggtgcagggcatcataggactgcaccatttaatttaaagtcagcaggttttaaggctttgtgctgacaataattgagttcatacattcctgtccatcagcagaatttataaatgacgttaaattacagcgatcgggtcagctagtcagtcacatgggtcaagacctgtattctccaaagtcaaatgtaattcttattaaagttgaattaaaaaatggcatttat

SEQ ID NO: 251165 - DNA, 1711 bp, Homo Sapiens
  misc_feature (146)..(146): n is a, c, g, or t
  misc_feature (537)..(537): n is a, c, g, or t
  misc_feature (851)..(903): n is a, c, g, or t
  misc_feature (1584)..(1584): n is a, c, g, or t
  misc_feature (1603)..(1603): n is a, c, g, or t
tatcctgtttaggaaagctggttagtagtttggaactcttcccttgatgaaaaagtttaggtatccttctattttattactatggattcaggggtactaaacctgggttctaatcaagtcttaccctgttgtatcttctatgcggnactagccaaaaaagaagaacatgtcggcctaccaagtgttctgtaaagagtatcgcgtgaccattgtggctgaccatccaggtatagattttggggaacttagtaaaaaactggctgaggtgtggaagcaattaccagaaaaagacaaactgatttggaagcaaaaagctcagtatctgcagcacaaacagaacaaagcagaagccacaactgtgaaaaggaaagcatccagctcagaaggttccatgaaagtcaaagcctcttctgtaggagttctgtcaccccagaagaagtccccacccaccaccatgctgttaccagcctcaccagccaaagcccctgagacagagcccattgatgttgctgctcatcttcagctgttgggagagtncctaagcctcattggacaccgtctgcaggaaactgagggtatggtggctgtgtctggcagtttgtcagtgcttctggattccattatctgtgcccttggcccctttggcatgtctcaccacacaactacctgaattgaatggctgtcccaaacaggtcttgtcaaacacattagacaacattgcttacatcatgccgggactgtgacagcaaagaatcctgggacagaaaccttatcctacaccattgctggtttgtgtatatatgactgttgcagattccttcagtggcctctggctgtaggttttaaatttnnnnnnnnnnnnnnnnnnnnnnnnnnnnnnnnnnnnnnnnnnnnnnnnnnnnngactgtaactactttgcttttaataattttatgaaatggcaaaggtttagccaagaggaaattttggcatgaatacaggcttgggattcttttttctcctgtggtggataaatctgccttaaaaatcaatgtaacttgggggctgggggcttgttctgggtgccaagcgcatctctttatggacagctaaaatgtgattattttccaagctcagttggacctccagacccatcactgaccatttgccttacctgtcttagtctgaaatgtaataggaaagataacgggaagatgccagttgactgaaaattcaaagcctttcaatttgaagtgacctaggtgggaggtgataaaatttgttccctttatagttacggaggtggcttaggtgaattgagtagagggttcattccaattcctactgtataggtgtctgtgtctcaaaatttattgtaatcattggtaccattggtggcctcaacagaggccaaggagttctgtgagccctggcagcaactgagctaacccagaatctttagtcggcagaattaagtgctggtgtctttcactggcagcatgaagttagccaccaagtcctcacaagccgtgctgcttagttgctcggtggttatggataaactctgcccagcatgattcttgggttcatcttatcggttcccnctggtgggcagatacacangtgtactgcattccacatgtaagtgaattgcagaaacacaacagaacttactctcttggaagggtatttatgcgtggtgggatgtgaattcaattatgtgtatttaaa

SEQ ID NO: 251166 - DNA, 586 bp, Homo Sapiens
  misc_feature (453)..(453): n is a, c, g, or t
  misc_feature (508)..(508): n is a, c, g, or t
  misc_feature (563)..(563): n is a, c, g, or t
tccagacccatcactgaccatttgccttacctgtcttagtctgaaatgtaataggaaagataacgggaagatgccagttgactgaaaattcaaagcctttcaatttgaagtgacctacgtgggaggtgatttcattccacattcctactgtataggtgcctgtgtctcataatttattgtaatcattgataccattgatggactcaacagaggccacacagttctgtgagccctgctgcacataacaccttgtggggtgaagctgttaatgccaccagttggacctgcatacattatgagctaacccagaatctttaagacgtagatttaagtgctgcagactgtcactgactgtatgaaagtagccaccaagtcctgacaagtcgagctgattagatgctaggtggctatggatgaactatgcccacatgattgtcgcgtcatcttatcggntccactggagtgcagatcacagtggtgtgcatccacatgctagtgaattgcaganacataacaaactgactctgttgcacgttaattcatgtgtgcctgaatgtgatttntaatatgcgcattaactctttaa

SEQ ID NO: 251167 - DNA, 1017 bp, Homo Sapiens
  misc_feature (40)..(40): n is a, c, g, or t
  misc_feature (284)..(292): n is a, c, g, or t
gtgtccggttagctgtcttgtcatgggccctttcctcctnggtgtgaggcctgggtggcgaattcggcacgaggggcgaaatgagactgttcgtgagtgatggcgtcccgggttgcttgccggtgctggccgccgccgggagagcccggggcagagcagaggtgctcatcagcactgtaggcccggaagattgtgtggtcccgttcctgacccggcctaaggtccctgtcttgcagctggatagcggcaactacctcttctccactagtgcaatctgccgatannnnnnnnngttatctggctgggagcaagatgacctcactaaccagtggctggaatgggaagcgacagagctgcagccagctttgtctgctgccctgtactatttagtggtccaaggcaagaagggggaagatgttcttggttcagtgcggagagccctgactcacattgaccacagcttgagtcgtcagaactgtcctttcctggctggggagacagaatctctagccgacattgttttgtggggagccctatacccattactgcaagatcccgcctacctccctgaggagctgagtgccctgcacagctggttccagacactgagtacccaggaaccatgtcagcgagctgcagagactgtactgaaacagcaaggtgtcctggctctccggccttacctccaaaagcagccccagcccagccccgctgagggaagggctgtcaccaatgagcctgaggaggaggagctggctaccctatctgaggaggagattgctatggctgttactgcttgggagaaaggcctagaaagtttgcccccgctgcggccccagcagaatccagtgttgcctgtggctggagaaaggaagtgctcatcaccagtgccctcccctacgtcaacaatggtcccccccttgggaaacatctttggttgggtgctcaaggcccgatgtctttgccagggtactctccccttccggcagggggaacacctcctatctgtggtgggaa

SEQ ID NO: 251168 - DNA, 2125 bp, Homo Sapiens
  misc_feature (33)..(33): n is a, c, g, or t
gtaccggtccggaattcccgggatcgcgcatgntgcagcaaagaatggaggagtcggaacccgaacggaagcgggctcgcaccgacgaggtgcctgccggaggaagccgctccgaggcggaagatgaggacgacgaggactacgtgccctatgtgccgttacggcagcgccggcagctactgctccagaagctgctgcagcgaagacgcaagggagctgcggaggaagagcagcaggacagcggtagtgaaccccggggagatgaggacgacatcccgctaggccctcagtccaacgtcagcctcctggatcagcaccagcaccttaaagagaaggctgaagcgcgcaaagagtctgccaaggagaagcagctgaaggaagaagagaagatcctggagagtgttgccgagggccgagcattgatgtcagtgaaggagatggctaagggcattacgtatgatgaccccatcaaaaccagctggactccaccccgttatgttctgagcatgtctgaagagcgacatgagcgcgtgcggaagaaataccacatcctggtggagggagacggtatcccaccacccatcaagagcttcaaggaaatgaagtttcctgcagccatcctgagaggcctgaagaagaaaggcattcaccacccaacacccattcagatccagggcatccccaccattctatctggccgtgacatgataggcatcgctttcacgggttcaggcaagacactggtgttcacgttgcccgtcatcatgttctgcctggaacaagagaagaggttacccttctcaaagcgcgaggggccctatggactcatcatctgcccctcgcgggagctggcccggcagacccatggcatcctggagtactactgccgcctgctgcaggaggacagctcaccactcctgcgctgcgccctctgcattgggggcatgtccgtgaaagagcagatggagaccatccgacacggtgtacacatgatggtggccaccccggggcgcctcatggatttgctgcagaagaagatggtcagcctagacatctgtcgctacctggccctggacgaggctgaccgcatgatcgacatgggcttcgagggtgacatccgtaccatcttctcctacttcaagggccagcgacagaccctgctcttcagtgccaccatgccgaagaagattcagaactttgctaagagtgcccttgtaaagcctgtgaccatcaatgtggggcgcgctggggctgccagcctggatgtcatccaggaggtagaatatgtgaaggaggaggccaagatggtgtacctgctcgagtgcctgcagaagacacccccgcctgtactcatctttgcagagaagaaggcagacgtggacgccatccacgagtacctgctgctcaagggggttgaggccgtagccatccatgggggcaaagaccaggaggaacggactaaggccatcgaggcattccgggagggcaagaaggatgtcctagtagccacagacgttgcctccaagggcctggacttccctgccatccagcacgtcatcaattatgacatgccagaggagattgagaactatgtacaccggattggccgcaccgggcgctcgggaaacacaggcatcgccactaccttcatcaacaaagcgtgtgatgagtcagtgctgatggacctcaaagcgctgctgctagaagccaagcagaaggtgccgcccgtgctgcaggtgctgcattgcggggatgagtccatgctggacattggaggagagcgcggctgtgccttctgcgggggcctgggtcatcggatcactgactgccccaaactcgaggctatgcagaccaagcaggtcagcaacatcggtcgcaaggactacctggcccacagccccatggacttctgagcccgacagtccttcccttctctccaagaggcctccagtccccaagactgccaccagtctacacatacaggcagccccctggacagaatcagcatttcagctcagctggcctggaatgggccaggctggtcctggctgcctgttccctgtgctcttcagaattactgtttttgtttccttttaccccagctgccattaaagcccaaacctct

SEQ ID NO: 251169 - DNA, 962 bp, Homo Sapiens
  misc_feature (759)..(780): n is a, c, g, or t
attcggcacaggatttcacgtcgtactcgcctggcctttctaaatgtccaggcagcagaggaagccctacccaggattgttgaactgatgggcagggaactgaattgggatgattataagaagcaggaacaacttgaaacagccaggaattttctatattatgaaatgggctataaatctcgatcagaacagttaacagatcgctctgaaattagcctactgccttcagacattgacaggtataagaagagatttcataagtttgatgcagaccagaaaggctttattaccattgttgatgttcagcgtgtattagagagtatcaatgtccaaatggatgaaaatacactccatgaaattctaaatgaagttgatttgaataaaaatggacaggttgaactcaatgaatttttgcagctgatgagtgctattcaaaaaggaagggtatctggaagccggcttgctatactaatgaaaactgcagaagagaacctcgacagaagagttccaattccagtggaccgtagttgtggaggattgtgagtctgggcagtaaatccacagccaacaaacatagaaacgacaaatcaccatgtaacaaccagagatgactgaaaccactctgaaataatgaatgtggatagctgcctttttttaacactagaaaacattccaaaactttaaggtgttggtgtatttgccagctttatttgctgtactttatttgtatttgccattcagtctagcttttaagtatannnnnnnnnnnnnnnnnnnnnnaatgcacattagttttgcatctgttttgtgacctgttagatgtgacacattctctttttgtttattcccttattctaaatgagttctaaaaacataatattttggcaaaaattgaaaaaagctggagacattttgtgacatgcatacagatagcatgtgttattaaaaagagtttcctattg

SEQ ID NO: 251170 - DNA, 738 bp, Homo Sapiens
  misc_feature (318)..(330): n is a, c, g, or t
ggtgattgtattgttttgtttctaaatatacaaggaattctttaaatagagaaaaaggttaatcctcactgaaacaccaggatgcccactggatatactaatctgaacatctgtaggtagtttgtcatgaaaaagtggagagaagatgagacttttgaatgaatgaaaaagggtatcttgatacccagaattccccccaaagtacgggtaattcaacctgcacagttttctttcactcaaagtgttcagcacttgtgagtgaaaaatcatgtaattatctgtaaatatgtagctaacaaattgacctagtttctgtannnnnnnnnnnnngtactaaagtttataggtctgtgccagctagagagaagttgctgtcattaccagttgtggtcctagcatctaaccctgaaaccatcctaggtgacatttttagaattaatacttaaatgttaaacagggggaaatgaagcttaatcatggtcaggtttgagatcttttgcagtgaaataattttatttaatataaatgatcacatgtcctcaatcatgaatgaggtagggagcctctctcccccagtggccatgtttacaaaagtgtgttttgtctataaaagtgcaagcggttttaatgtttatgtaaaattatgcaggttgataacatgggtttggaaactggttttattggggctcttttaacctgaattttttccaaatgaaaatgaaacctattgccttaatt

SEQ ID NO: 251171 - DNA, 668 bp, Homo Sapiens
  misc_feature (576)..(576): n is a, c, g, or t
  misc_feature (582)..(582): n is a, c, g, or t
  misc_feature (590)..(590): n is a, c, g, or t
  misc_feature (592)..(592): n is a, c, g, or t
  misc_feature (594)..(595): n is a, c, g, or t
  misc_feature (598)..(598): n is a, c, g, or t
  misc_feature (600)..(600): n is a, c, g, or t
  misc_feature (609)..(610): n is a, c, g, or t
  misc_feature (621)..(621): n is a, c, g, or t
  misc_feature (638)..(638): n is a, c, g, or t
cttttgcctctgtcccagtgcgaagtccattcagcggggttgaaagttgcaggcagctttgggaaggggggcgtcggacagggttgcattgtagaaagtggctttgttcgatccttcgcacagatgcaaatggccagagcattcattccctttcttcaagagctgaggactgggggggccactggtgatcagttcccaactctagctctcctctgactcatctcaggacccattgaggacatccaaaactcactcaagatcaccaagtggtaggaaagtactaactcccgggcatagccctaggggagtgactacaatgtgaatactcatggaatgcctagccaggtgaagaagtgaatgcatgttggcatcccagagggaccccccttaagagggcatagtttggggttcagatttgactccagcatactgttgaaattgggcacagggggctagtgattagtcaggatcaatcagtggagaggagattaaaactcacatctgggagtccggaatcagaacttgtagttcttttttttgaaatggagcctgggctacagagcaagacactatctnagatcnaaaaagananannaananagaaggagnnagaaccagagnaacataaggaagagtgngaggaagaaagaaagatgcaatttgggaag

SEQ ID NO: 251172 - DNA, 662 bp, Homo Sapiens
  misc_feature (267)..(267): n is a, c, g, or t
  misc_feature (274)..(393): n is a, c, g, or t
  misc_feature (407)..(526): n is a, c, g, or t
  misc_feature (633)..(633): n is a, c, g, or t
ttccatttggctgaaggtctgactggagcctaaagtttaattggagtgatttaatcatgattgatccgccttggggtgagaaatgtccagagcttgggacaaataagggcatgtttcagactcgggacatacctgctctaaagaattatgggctctagggagctcaaagatcagaacaaaaagaggaggagggttcaggcagggtacaggacatgtgggtgaggatattaaggggcaaaagaagaactactatagggctgggcatgngtgtcannnnnnnnnnnnnnnnnnnnnnnnnnnnnnnnnnnnnnnnnnnnnnnnnnnnnnnnnnnnnnnnnnnnnnnnnnnnnnnnnnnnnnnnnnnnnnnnnnnnnnnnnnnnnnnnnnnnnnnnctgtggtggtgggnnnnnnnnnnnnnnnnnnnnnnnnnnnnnnnnnnnnnnnnnnnnnnnnnnnnnnnnnnnnnnnnnnnnnnnnnnnnnnnnnnnnnnnnnnnnnnnnnnnnnnnnnnnnnnnnnnnnnnnntccatttcaaaaaaaagaactacaagttctgattccggactcccagatgtgagttttaatctcctctccactgattgatcctgactaatcactagccccctgtgccnaatttcaacagtatgctggagtcaaatcc

SEQ ID NO: 251173 - DNA, 424 bp, Homo Sapiens
gaggcggagtcttgctctgctgcccaggctagagtgcagtatgctggagtcaaatctgaaccccaaactatgccctcttaaggggggtccctctggattgccaacatgcattcacttcttcacctggctaggcattccatgagtattcacattgtagtcactcccctagggctatgcagggagttagtactttcctaccacttggtgatcttgagtgagttttggatgtcctcaatgggtcctgagatgagtcagaggagagctagagttgggaactgatcaccagtggcccccccagtcctcagctctttgaagaaaggggaatgaatgctctggccatttgcatcttgtgcgaaggatcgaacaaagccacttttctacaaatgcaacccttttccgacggcccccttcccaaagctgcctt

SEQ ID NO: 251174 - DNA, 672 bp, Homo Sapiens
cactttccccctcacagaccagagccccaggggaacaaatcctggttacccaagcagggaactcggtatatttaggggcttcaccgaaagggctgttggacagaggctgttttcagaggggcttgtgcaattgcagagacttcctcgcatcccctagtgaataggggaaccattgctggtctcctctttggacctcttggcttagaccttttagtgggagtttcttggaagtgaggctgcttggtcaacagcagaccttagtagacactgactccactcagcattgcacaaggcacagagctttggacagggttggatcgttaacccaacccgtgtaaatattcccaaagtgattggccccttctctcctattttactcctgccccagatcaagccagtggaagcactattgactggacctacagccagggcatcaagtactccttcaccttcgagctccgggacactgggcgctatggcttcctgctgccagcctcccagatcatccccacagccaaggagacgtggctggcgcttctgaccatcatggagcacaccctgaatcacccctactgagctgaccctttgacacccttcttgtcctcctctctggccccatccaggcaaccaaataaagtttgagtgtaccaggaacagaatcctggggcttgc

SEQ ID NO: 251175 - DNA, 2572 bp, Homo Sapiens
  misc_feature (2257)..(2308): n is a, c, g, or t
  misc_feature (2437)..(2438): n is a, c, g, or t
  misc_feature (2446)..(2460): n is a, c, g, or t
catcgtgtacggtcccgcgtggctgcgcgcggcgctctgggagtacgacatggcgcgcgagctgcgggcgctgctgctgtggggccgccgcctgcggcctttgctgcgggcgccggcgctggcggccgtgccgggaggaaaaccaattctgtgtcctcggaggaccacagcccagttgggccccaggcgaaacccagcctggagcttgcaggcaggacgactgttcagcacgcagaccgccgaggacaaggaggaacccctgcactcgattatcagcagcacagagagcgtgcagggttccacttccaaacatgagttccaggccgagacaaagaagcttttggacattgttgcccggtccctgtactcagaaaaagaggtgtttatacgggagctgatctccaatgccagcgatgccttggaaaaactgcgtcacaaactggtgtctgacggccaagcactgccagaaatggagattcacttgcagaccaatgccgagaaaggcaccatcaccatccaggatactggtatcgggatgacacaggaagagctggtgtccaacctggggacgattgccagatcggggtcaaaggccttcctggatgctctgcagaaccaggctgaggccagcagcaagatcatcggccagtttggagtgggtttctactcagctttcatggtggctgacagagtggaggtctattcccgctcggcagccccggggagcctgggttaccagtggctttcagatggttctggagtgtttgaaatcgccgaagcttcgggagttagaaccgggacaaaaatcatcatccacctgaaatccgactgcaaggagttttccagcgaggcccgggtgcgagatgtggtaacgaagtacagcaacttcgtcagcttccccttgtacttgaatggaaggcggatgaacaccttgcaggccatctggatgatggaccccaaggatgtccgtgagtggcaacatgaggagttctaccgctacgtcgcgcaggctcacgacaagccccgctacaccctgcactataagacggacgcaccgctcaacatccgcagcatcttctacgtgcccgacatgaaaccgtccatgtttgatgtgagccgggagctgggctccagcgttgcactgtacagccgcaaagtcctcatccagaccaaggccacggacatcctgcccaagtggctgcgcttcatccgaggtgtggtggacagtgaggacattcccctgaacctcagccgggagctgctgcaggagagcgcactcatcaggaaactccgggacgttttacagcagaggctgatcaaattcttcattgaccagagtaaaaaagatgctgagaagtatgcaaagttttttgaagattacggcctgttcatgcgggagggcattgtgaccgccaccgagcaggaggtcaaggaggacatagcaaagctgctgcgctacgagtccctcggcgctgccctccgggcagctaaccagcctctcagaatacgccagccgcatgcgggccggcacccgcaacatctactacctgtgcgcccccaaccgtcacctggcagagcactcaccctactatgaggccatgaagaagaaagacacagaggttctcttctgctttgagcagtttgatgagctcaccctgctgcaccttcgtgagtttgacaagaagaagctgatctctgtggagacggacatagtcgtggatcactacaaggaggagaagtttgaggacaggtccccagccgccgagtgcctatcagagaaggagacggaggagctcatggcctggatgagaaatgtgctggggtcgcgtgtcaccaacgtgaaggtgaccctccgactggacacccaccctgccatggtcaccgtgctggagatgggggctgcccgccacttcctgcgcatgcagcagctggccaagacccaggaggagcgcgcacagctcctgcagcccacgctggagatcaaccccaggcacgcgctcatcaagaagctgaatcagctgcgcgcaagcgagcctggcctggctcagctgctggtggatcagatatacgagaacgccatgattgctgctggacttgttgacgaccctagggccatggtgggccgcttgaatgagctgcttgtcaaggccctggagcgacactgacagccagggggccagaaggactgacaccacagatgacagccccacctccttgagctttatttacctaaatttaaaggtatttcttaacccgnnnnnnnnnnnnnnnnnnnnnnnnnnnnnnnnnnnnnnnnnnnnnnnnnnnnctatcctgagggacttggaatttaatctacaatgaaaccctcaaagagctaaaaataattaaggaaaaatggagacaccctctgggggtcctctctgaatcaaatccaagggagggtaattgtacaatnntttttggnnnnnnnnnnnnnnnaaaaaatttttacaaccttttgtgggggccggcccccccgcaaagaacaacaaggagctttcttgtctctccaaaaaaacccggggaaccaaaaaggggggtggtccccccc

SEQ ID NO: 251176 - DNA, 935 bp, Homo Sapiens
  misc_feature (155)..(155): n is a, c, g, or t
  misc_feature (268)..(268): n is a, c, g, or t
agttagtatcaattctgtgctgtctgatgtatgcacttttccatggactgagtatgaaacctggttttattacttttcttctcttgatgtgcaatggttcatcaatcccctcttctttgcatttctctctccagagaaggttgtcttcagccaanattctccagtagcgacatgtctgagctgcttgtagcaggtctttgggttccaggaatgaaagcacatagagtgccaactctttagggagcaatgaaatgaagtctcgttgaanactggggttctatcactggcatcatatgttttacttgtgttggttcacaactatcaatgagttcatctaaagcaagcaatttctctggtccactccagctctgaaacatttttagccattcctggaggcctgtaggtggctggacagatgtaattcggcgtcgttgttgcccttggccattggctgctctgaggtccccaaaagttgttggtgttgctgaacatggtacaagcccagtggtacttgtatattctgagactttgcatggtttctttcccaaagaaaaagagcggacctcagaaccatggtccaactttcttttcatccgtcttcgacaaaaagggaggccttgggcaatgatgctaatgctaaatatcttcatcacagtttgatgtggtagaggctcttttgcacttttaagatcaacaggaaccaagccatggtttagagtaggttttcccggttttgacattttaaaactcctcttggttgacgaatactctctacatgtaatacaggcacattactaaaagctctaaccactaaattttaaaaatatatatttaataatagtttttaaaaggctgagaacccaaggcctgctgcttttgtctttcaaccttcccctaccaaatgtcctgacctgtctgaggcttggtgaagtgcc

SEQ ID NO: 251177 - DNA, 1029 bp, Homo Sapiens
  misc_feature (34)..(34): n is a, c, g, or t
  misc_feature (51)..(51): n is a, c, g, or t
  misc_feature (871)..(890): n is a, c, g, or t
ttacagacttgccccctaattagacagcaaatanataaaggggaagtcaanacggaaggggcaataaggagaaagggggaatctaactcttgttctaaagagacattctggcacttcatcacagccagtagaagaacaatgtaaacctccatctcactacacatttgacgtcttccactccaaacgctctaatctagtcagaaaagagcacagctcttcgctgaaagccccccagggttccctgcatcaagccactacagggttattgaaaaatataatacttcacttaaggatatgctgcttttctccttgaaaacattgtgtagacctgtactcatttaattagggttgcagaggagatggaaaaacaagctgtttgattatgaaggcaacacttctgtcagtagaattgctttggattgtaaatatgtttacttcagaggaaatcagtcagagtggatggctcagcaaaacccatcacaactgcggaaaaaggaagtgactggctagaggtaaggaaatagatctctaagttaactggcctacgtgtgaatcgaaccctgcaccctggcctcattagcaccaacacttgtgaagaacagctgtggcagagaaagtgccacggccccaccccatcaccagattcagtagaaaggcccttggaatttcctacaaggttcagttctgaacagctccacttcaaatcagtatagaatcctcacagtgactctgtgagggaggtaaatgtcactgctccccgttggtgggggaaacagaggccagagtggttaaagattttgcctgaagttaaaacaaaaaatgaaaagtcacttggactgcagggaagaatacttacaatacaaggcaattnnnnnnnnnnnnnnnnnnnngttgagccaacctgtcactcttcactcagatgccatgaaagacatcatcaccagacagtccccacactcttgccacttggcaggacaggctccatgacagaggatttttcactctgtggaaatataaagcctatctctt

SEQ ID NO: 251178 - DNA, 123 bp, Homo Sapiens
aacataagtcaacaatatccaaaaaatgtttgattaaagcaattactgtcagcagatcacttaaaaagattagttaatataagcttttctatcttaataaaaatatacctcgaaataatcccc

SEQ ID NO: 251179 - DNA, 1399 bp, Homo Sapiens
  misc_feature (691)..(731): n is a, c, g, or t
gcagaaaaaaaattgcttggtccccttggcatgaaaactttagatccagatgatatggtttactgtggaatttatgacaatgcattagacaatgacaactacaatcttgctaaaggtttcaattatcaccaaggacctgagtggctgtggcctattgggtattttcttcgtgcaaaattatatttttccagattgatgggcccggagactactgcaaagactatagttttggttaaaaatgttctttcccgacattatgttcatcttgagagatccccttggaaaggacttccagaactgaccaatgagaatgcccagtactgtcctttcagctgtgaaacacaagcctggtcaattgctactattcttgagacactttatgatttatagtttattacagatattaagtatgcaattacttgtattataggatgcaaggtcatcatatgtaaatgccttatatgcacaggctcaagttgttttaaaaatctcatttattataatattgatgctcaattaggtaagattgtaaaagcattgattttttttaatgtacagaggtagatttcaatttgaatcagaaagaaatatcattaccaatgaaatgtgtttgagttcagtaagaattattcaaatgcctagaaatccatagtttggaaaagaaaaatcatgtcaccttctatttgtacannnnnnnnnnnnnnnnnnnnnnnnnnnnnnnnnnnnnnnnngatagcttttaattgtggtatatataatcttcagtaacaatacatactgaatacgctgtggttcattaatatcaacaccacgtactatagtattcttaatacagtgctcactgcatttaataaatatttaataaatgatgaatgatagaagtttccatctacaatatatgttcctaaatggagcacagatgttcaaactatgctttcattttttcactgatatattaatttttgtgtaatgaatgccaacagtatattttatatgatttacttatgtgaggaaacatgcaaagcattaggaaatttatttcctaaaaacagttttgtaaaattagtattgagttctattgagtattataagatagcttacattttcaaaatggaaattgtcggtcatatttctagaactttaaagaaaaaagaatgttatattagttttctaaaactcaactatctttagtcatgttcaaaaatctattgctagatcatagtagatactgggttttctattaactcaaaacctacattgacaagtttaacattgagaagaatcttaacaaaaatatggatatgaattcagtagatatcttaaattcaataaaatcactggaagtttttcatgataacttattttaagatgccttaaaaatcttaaagtcacaaaagga

SEQ ID NO: 251180 - DNA, 759 bp, Homo Sapiens; identical to SEQ ID NO: 5551

SEQ ID NO: 251181 - DNA, 648 bp, Homo Sapiens
  misc_feature (86)..(86): n is a, c, g, or t
  misc_feature (110)..(110): n is a, c, g, or t
cattcctgcaggtcaactcatatccttaagcaaagttgtatgtactggctgttcaataaatatttgttaaaggaaatcaagtttanatatggtgagattcagagagtcanatatgagcctcaattctcaagttaagaatagttgaatcagaataagggaagtagttttaagtttttctaaccaataattttctatccaataattatccaatttatatgctgacaatctttaaactaaattccatacacagagtatttctaaaatagtattccaatacaagtaagctttgctatgacgctgtttttgatcatataagaaaattacagtgcatggaaataaaatgataaagtgctcataagatatctgttagatctgataatggcattctagatacacaagataactaaaaggttttcatagttatatcactgaagaatatagggatgaaataacatgatgcctgggaattacttttaaatactctttttttaaaaaaagggaaagcgtaatagatgagccatggtaaaactctgattgttatttattaggcctgggtgatggtgtggggattaattatccagtccccactgttgtgtatatttgaagttccattaagggggaaaaggaagaaaaactcattcctaaaac

SEQ ID NO: 251182 - DNA, 893 bp, Homo Sapiens
cttctgcttatcttctaccacagagtttgggtactctggatatgggaggagctcagggttgttggctaagatgtaattttaaggaaacactttatatttcataccaagtaagaatttcaatggcaatgaatattaccacatagctgtatactgtaactcagggattctgtcagatgagtgcaaacattaccgtgctgtaaccatccagagtcccagggtcacattggcagccaaaagtacactgccacccagcaagatgaaaaaccctattagatctttgacatcattgtctccaatcactgaggtaagggtggcatccaagaaagagtttagaatccatggtccatccaaagcaaagcagggtactgcactaacaatagccagagctcctgagagggaaatcaggtacttgacaaatgtctccacaaccactggcagatctatgcttagaaagttaaaacgtgggataaaactggtgatgctcactgtgtagtgaagatgcagaggatgtcctacgtataacatatcaatctgaggtgggtgttttacttttattaagcgagtgtgagtttccaaagaaggtattatacagaaacttgaacttgagctttttttacagtctttattggttctgcaaacttgagttgcttcaactgctttccgggcaggaagacatgtatgcaaacgcttattaaaattatttctgtaggaaaagcacacatctgtgaggctgtgattgttacagcattcagttgaaccatctagtcgtttgtatgctctaactgggaaacttaactgctgtaaagttgatgcacttatacagtaaccaatttggggctcataggcgatggtatctaaacattcattccaatcttgcacattagtaacaggac

SEQ ID NO: 251183 - DNA, 992 bp, Homo Sapiens
  misc_feature (782)..(834): n is a, c, g, or t
cgggtgaaaaagatgttataggaaatggcattatcatgggagcttcgggattgatcaaggagataggttgaaatactaattatggacaaaatgtaaggtaatgtgtaaaagaacacagaatccactgtaatggagaaagaaaggtagatagataggctgtatgcatatagtgaggtacagtaaccccatccatggagagaaaatgtgaaatagagcaaggtaatgggggaaatagtaaaaggaaagaaggaggaaataagcaaggaaaggttagccaggatagaaaggtagtttgagagacatgttagctgagggagaagagacaggatatttgcaaaattttgtagcttgaaaggtcaacagcatcagctacttccagcatttcaattgcaagggtagattcattgtcaatgtcatagtttagttgctgagctttacataggactagtttgtactggtaactttgatgagtttagtgagaagaggcaacaacaggaaaaaaataccccaatgagaaacagcttattaaattaataccactcaaaacagatttatattgcaggttttaagcaaatacagttgttttaaaagcaagaggttcaactgtattcttgttgatattgattaatatgtagggaaattaaaccaaaattacatgttttccatgaggaaggaatcatattttcagtgagaagaatttacaattttctagttaaaaaatatcgaatttctgttttaaaagataaattgtgccctttttttatgaactatatgccattggnnnnnnnnnnnnnnnnnnnnnnnnnnnnnnnnnnnnnnnnnnnnnnnnnnnnntctagaagcagttgttttgatcaatcctttccacccctgccagcatcaatgtacttcgtaagactataaaaatcaaatattttaaaaatgctgattcattctttggaaagctctaccttgagttagggtagtttgttttttggcagtcttgtctcttc

SEQ ID NO: 251184 - DNA, 1282 bp, Homo Sapiens
  misc_feature (1136)..(1136): n is a, c, g, or t
ggagagcaccaaagctgaccacaacatgtgtgttctgacatgtttctaatatgtggccagggcgttcagatttccagttttgaaaacaattgtatagatttcacaacacaaaaaggacatttgtggatgttactgcacattttaaattcttaacactaatttatctgtataagtgttttatatgcatatttttggacataaacagtttatgtaaaattagtaatgaatgatggcaacgagggcactgttatcttcgtttgttttcaatgatcatttagcattcaatgatggaacagctggtataacataagttgttggcatgaaatatttgagattggaaacttcttgccttgaacagaacttatatcttagattctctctcacattttcttggagctggggtttgaataggaaccagatgatgttcactgctgaaattccataatgcttcccattgaagggaagttgagaaccaggaaagctgctttcacgtcattgccatccagtactgacagggaagaaagatgtagttttccagtagtgatgaatcaaattattgaattaaatttcttcttaagaagtaaaaactcagaatgtaccatcttgtttcctttcagtttattaaatggcatcataaagatgactttgctaagttaatagagttaaaaatttttttaatataagccaaaatattaactttaatgaaacattgacttggcaaatgaatttcctataaattatcattggtcagaatgctgttttgtttaataatattacgcaacataaaccataggtgttattagaagtggagaactgcctttttcatctggggcttttaaggacttgctataaatgattattttttaaatgctttataaatcttcatggtttttctatttctgatacactcagctatagttaataccagagtatcctaccaggagtaatatttggaatatttaaatctagtaaaagaagaaagttgtacttcctggctgggagtattaggagatgggagtagagattcacttttaagttcttgaaaatatatgcattctcctaaatattaacaaaaatgatttggggaaatgacatggcttgattgttctgtttaaatttgtactgtggcttatgtnacacatgttcatgttcacctctcattcacctgttttatatggtttaaaattctctttaacaaaattcagaaaattcacctgaaacgtattttgacctaaaagaaacatatttttgtatcagtattgaattttggacagtgccccca

SEQ ID NO: 251185 - DNA, 1260 bp, Homo Sapiens
  misc_feature (58)..(58): n is a, c, g, or t
  misc_feature (178)..(178): n is a, c, g, or t
cctcctcgccgccaccgcccaggaccgccggccgggggacgagctcggagcagcagcnagaaagcataacccctactgtagaactaaatgcactgtgcatgaaacttggaaaaaaaccaatgtataagcctgttgacccttactctcggatgcagtccacctataactacaacatganaggaggtgcttatcccccgaggtacttttacccatttccagttccacctttactttatcaagtggaactttctgtgggaggacagcaatttaatggcaaaggaaagacaagacaggctgcgaaacacgatgctgctgccaaagcgttgaggatcctgcagaatgagcccctgccagagaggctggaggtgaatggaagagaatccgaagaagaaaatctcaataaatctgaaataagtcaagtgtttgagattgcacttaaacggaacttgcctgtgaatttcgaggtggcccgggagagtggcccaccccacatgaagaactttgtgaccaaggtttcggttggggagtttgtgggggaaggtgaagggaaaagcaagaagatttcaaagaaaaatgccgccatagctgttcttgaggagctgaagaagttaccgcccctgcctgcagttgaacgagtaaagcctagaatcaaaaagaaaacaaaacccatagtcaagccacagacaagcccagaatatggccaggggatcaatccgattagccgactggcccagatccagcaggcaaaaaaggagaaggagccagagtacacgctcctcacagagcgaggcctcccgcgccgcagggagtttgtgatgcaggtgaaggttggaaaccacactgcagaaggaacgggcaccaacaagaaggtggccaagcgcaatgcagccgagaacatgctggagatccttggtttcaaagtcccgcaggcgcagcccaccaaacccgcactcaagtcagaggagaagacacccataaagaaaccaggggatggaagaaaagtaaccttttttgaacctggctctggggatgaaaatgggactagtaataaagaggatgagttcaggatgccttatctaagtcatcagcagctgcctgctggaattcttcccatggtgcccgaggtcgcccaggctgtaggagttagtcaaggacatcacaccaaagattttaccagggcagctccgaatcctgccaaggccacggtaactgccatgatagcccgagagttgttgtatgggggcacctcgcccacagccg

SEQ ID NO: 251186 - DNA, 903 bp, Homo Sapiens
  misc_feature (121)..(121): n is a, c, g, or t
  misc_feature (631)..(641): n is a, c, g, or t
  misc_feature (835)..(835): n is a, c, g, or t
atcctgaagaaatgtcaccccccttaatgaactcagtgtcccccccgcaagcattgttgcaagagaatcaccttcggtcatcgtgcagcctgggaagagacctttacctgtggaatccccnggatactcaaaggaagcggaggatacacagatgtgattatgatggatgcaacaaagcgtacactaaaagctcccacttgaaagcacacagaagaacacacacaggagaaaaaccctacaaatgtacatgggaagggtgcacatggaagtttgctcggtctgatgaactaacaagacatttccgaaaacatactggaatcaaacctttccagtgcccggactgtgaccgcagcttctcccgttctgaccatcttgccctccataggaaacgccacatgctagtctgattgcctctgtgtcctgcctcagcgtgactccccactcacctggctctctctctgtcctgcctcccattatctaacacattttttacatgtacattttaatttgattcagctggtctgaatctctgaatttatatcatccaaaacttccatatggtcagtagtagatgttctctaatcctccctctccttaccacgggtcagacctaaagaatgtgaacactgtnnnnnnnnnnnctggggatgctaagcaaacccttcttacagatacgtttaatgtaataagaacaagggaacatgtaaactaacataaccaattgtcagttctccatgtattcctcaaaagaatgtcagagtaaatgtattagaaatacagtatccagactgctagtccttgccagagacaatcctacctttgccctgtgataatnatttatgcttgacagtgatagtgcagtaaccttttcggcatttttaacatttgtcaccttgtcttctt

SEQ ID NO: 251187 - DNA, 390 bp, Homo Sapiens
  misc_feature (335)..(347): n is a, c, g, or t
tgcaggaattcggacgaggaagggtcatggaagtttgctcggtctgatgaactaacaagacatttccgcatactggaatcaaacctttccagtgcccggactgtgaccgcagcttctcccgttctgaccatcttgccctccataggaaacgccacatgctagtctgattgcctctgtgtcctgcctcagcgtgactccccactcacctggctctctctctgtcctgcctcccattatctaacacattttttacatgtacattttaatttgattcagctggtctgaatctctgaatttatatcatcccgggtcagacctaaagaatgtgaacactnnnnnnnnnnnnnctggggatgctaagccccttcttacagatacgtttaatgtatg

SEQ ID NO: 251188 - DNA, 487 bp, Homo Sapiens
  misc_feature (76)..(119): n is a, c, g, or t
gaagcagtaaaatacagtgagaataagcagcctcacagataaccagttattggaattagtagaaaagggccttagnnnnnnnnnnnnnnnnnnnnnnnnnnnnnnnnnnnnnnnnnnnngtcaaagaatttaaaggacaagatacatatagtttggagagaaatgtgtgtgacattgcttattctcacgatcgtctcctgtttctttgcattataattggcaaattttaatggtccccctcataagagtactaaaacataacctaacaagaagacaaaaatgcagaaaggatataagatttgaacccatttcagtcaatttaagtggcctttagaaaacacaatgctaggcaaatacagaatatagattcttttgaagtgcacatacaacattcacaaaatagacagatgtgggactataacaagtgtaagtaaatgtcaggaaactgacatgttaagacatcatattgagtatgttctcttgccac

SEQ ID NO: 251189 - DNA, 732 bp, Homo Sapiens
gctgggcacagccatctccttcttactcttcctctccacagatgtccaaggggaacctgcacagcaagccagggtcacaaacagggcacccaagttacccacggggctcaactgatcctaagtacacaaaaaagacattaaaattcgccaagaaatattttacaaggttccacatcagttattaatggtattttcttatactgttaagtgactaattacacttggtaacatattaaattataattttagcctcacttctaatcatcttttttctatcaccacaacattttcagcataataattcttggctgccgttccacttccttagtgagacccaggccaaagaagcttacaacttccctccagaaagatcaacagagcagaaagaacctccacactgagttccagcttaaagcaggcatttccactcagggctacgcacgctgccctagcctcggcgccaacacttaacatgacaactgtctcattcaggagcaagatgactgccaagccaattgcaactattaatgaggaaacagactttgcttatttcttaactggtttatattttttaacatgttttaaaacacaaaatttccagaaagttgaacttatacttttaattccattctggactgctagctaaattttacaaatacaaagaaatatgttatcagtttctttgtcaaatgagaggacaccaaagaaattcatcattcaattcttatttgt

SEQ ID NO: 251190 - DNA, 835 bp, Homo Sapiens
cctcatatattccctttaagtgctgtgcactttcgatttttctaaatgagactaaccttttccatggcaaataatagctgtacattttggtaatgaaaattatgctgataaatacacaaggcatgtatatatccacagtatcttatttttcacagttaccaaaaataaaaattgcattcaactcatatatctataaacactctgattcctcactgtatggatttggaggaagtgggagtacaaagtcttttcaacaacctggattttaagtttctttcttcaatgtctgccctctacatggaccttccagaatctttctgcaatgtgatcatgctctgagatgatggcagaaaggaagcattggggtgggatgaggcaggctgggctggggcttctttttccagccagctttaggagggctgatcgaacccagtctttttaatgttatattttaaggcagtctgaatttcaatcaaatgcccacacctccagatcctgaactatgaagtcttcctttttggaaagaatatcattattgaaagtgctgcaagagttgcttcgtccgtggtataaatcagcatctagccataaaccaaatcgtccccctccaccaccaagttctaaagaacttatgtctccattgataaagtatgaattttctccactccacttaaagaccttaaaatgagggctgaatgtgtagagaaaagtttcgcctgtgccataatagtggtcactgaacttgaaaggatgagttgcatatgctccaaaaatctgattatccatatctttgatgaccaataggacaggactgtctagtgatgccgatttccgg

SEQ ID NO: 251191 - DNA, 490 bp, Homo Sapiens
tttcattgagcacctattaagtgttcattataaagtatgtttcctgccactgagaatttacaatcctactgaaatgataagacttgggtaccagaaaccatacaaaaggagaacagaattgggagtttccagttagtgcaatagtaagaattcaggaaaggaaaatagcaatgtttgctgaagctgctcagtgaagattatagagaggggatgcaatttgttctgagctttgaagtctgggcaggatttgagtggcagagaaaggaatagggtgttttaggcagagaaaagagccaacaaatgaacaatggagaaactgaaagatgaagttgaggaagaaagtagaagagggtcatcctgtatcgagtgttctccttaaggaagagtcggggcaagggccaatcaatgaggtaaccaggttgtgtaggcacttgaatgccaggatgaatcctgcgtcacagtgggccctggagccagggacctggaaaat

SEQ ID NO: 251192 - DNA, 343 bp, Homo Sapiens
cacaagtgcccgtaaaacattttcaaagataggccatgtattaggccataaaacaagccttataaaattaaaaggattgaaatcatacaaagtatgctctcccctcacaagggaattaaatgagaaattattaacagaaggaaagttgggaaattcacagatatggaaattaaaccaacaaacctcataaataatgaatgggttaaagaaaatcacaagggaaattagaaaatatttggaatgaattaaagtgaagacataacacccaaaacttacgggaagcaataaatgcagagcttagaaggaaatttatattaataagagatctcagtcacaatgtctt

SEQ ID NO: 251193 - DNA, 1337 bp, Homo Sapiens
gctaatctagaataatttcctgagcaagcctagtcaaccaagtacacaaagatgcttcttcaatagaaagttaccataagaatgagcactgcattgactcaaatcagattaaatacaaattcccttctagacagggctttaaactcactgaggctttcctgggtagatgagaatattcctaatgactttcaggacatgagaccaactataaaggcactactgtagtagtctagactcaccatgttctcagagcccaggccaggccgccccctgtagcctaggcctccgtccaccaatgttcagcttttttccgtttccctcctttgaatcgagatttccgaaaccaggcattctgcattgccagatctaggagttccttagaaacgtgttgattggctccttccaagttccggaccaggtcaccagcaaaattgctgtccttgggactgagtagggtatagcccacacctttctcacccgctcttcctgtgcggccaatcctatgcgtgtgggtatcaatgtctcgtgccacatcatagttaatgacagtcttaattgaaggaatgtccagaccacgggctgcaacatctgtggccaccaggactgggatgtcctttttcttaaagtctgaaaggaccttgtttctctcactctgatccatatccccatggagcagcccaagattatgaccctcctgttaaaggttattcgctagctcttcagcattgccttttttagtaacaaagaggaggacactccctgaagaggtaaattctaccagacgccgggtaagccagttccatttactaggtccagaatggagaatctccacaatctgtgtcacatcttcatttgcctctccaatatctccctgcaccactcgaatagggtcgatcaggatgtctctggccaacttttcaatcttcttccgaaaagttgcactaaataagagagtctgcctgtcaggacgaacatgacttgctatggatcgaacttggtactcaaatcccatgtcaaacattcgatctgcttcatcaaacacaaggtaagagactctttgaagattggtagctttctttttcacatgatctatcagtcgacctggggtacacacaacaatctctgccccctcctgaagggccttggcctgctcccacatactccctcctccatatacggccactgatcgaagattatatgcttttcccaaaccgcttacattctgcatggatctgctggcaaagctccctggtaggacacacaatcactgcaattggtccatcacctggttccaactccttctggtccattatatgaatcaacatgggccaaatgaa

SEQ ID NO: 251194 - DNA, 488 bp, Homo Sapiens
  misc_feature (392)..(392): n is a, c, g, or t
  misc_feature (427)..(427): n is a, c, g, or t
  misc_feature (451)..(451): n is a, c, g, or t
ctcaatagtgagaaattaattctgtgttccataatatgagaaataaacccattaaggtcccatccagccctgcttagggttacctctccaatatctccctgcaccactcgaatagggtcgatcaggatgtctctggccaacttttcaatcttcttccgaaaagttgcactaaataagagagtctgcctgtcaggacgaacatgacttgctatggatcgaacttggtactctgcaagaaacagaacaataaaattattataacctgaaatacagtttgggaagcctggaaaaagccatattagtaaaagtcttcataagaagttgtaagaattaagaaaattagaaaccccaggccaggcacagtgggcttcatgcctgttaatcctaggcantttcgggagggccgaggcagggcgggtccactttnagggtccagggagtttcgcagccngggggcaacacagcttttcttctacttaaaattaccc

SEQ ID NO: 251195 - DNA, 369 bp, Homo Sapiens
  misc_feature (130)..(190): n is a, c, g, or t
cgtagttggcaaagtactcaccttcctccagtgagtcacttcacatgtaacatgcattttggagtttacaaaataaacatgattttaaacgttttctcctttgctcataatatactatcttaaaacatannnnnnnnnnnnnnnnnnnnnnnnnnnnnnnnnnnnnnnnnnnnnnnnnnnnnnnnnnnnnatagcactggcattataatcgaccatactataaaactgtcgtccaaaggcccacatgcaaagcatcatcaaagcaaactcagtgaaggtgatgcatccccacaccgtgcttacaatctcagtacctgctagacacttcatttctgatgaacaagaaatccaagaaagtagagaggaaaa

SEQ ID NO: 251196 - DNA, 713 bp, Homo Sapiens
gtacgagctttcatcatacttgaaatcagatcactgaaaaacctatgcaaaacatattctaagtgctattttttggtgggtacagattcacaatgtcactttgtttgcatatcatattttattattattagagcaatggctttatctgaaacatgaaagataaacttttttggctgtgagccaccatgcccagccagttgtaaattttttaatatccaagttttttaaaagtcacaaataattcaatattttttgagcacccactctgtagcagacatgtcctggaagctaaggaaataaagcctcagaggggcattaggcgtcttttttatgccgggcactgtgctggcactgagaacacagcatgagcaaagttgaggtctctccctccctcccctccctcaaggagcctgtttgaacatcgagattcttaaccagaggtacacatcagaatcaccaaggtagcttcatcatagtacagatgccagcccccgcactgagagattctttcccagtaatgggtggggtcatcagtatttgagaaacctgccatgatgattctaaggctaaaacatggttttttaagataaggactgacccctattctctgaaaattgcaaaataggtacctcttctggacttctcatggagggggctgtatcaatagaatataaattcgtagaaagagaaaggtgttcataattgaattttta

SEQ ID NO: 251197 - DNA, 980 bp, Homo Sapiens
  misc_feature (898)..(898): n is a, c, g, or t
aaacaagggtgtcagagcttatcttggagttctgacgggaaacaaaaatccctggattcttctgattaaaatatacttgattcatttgcccattagctgtcatatagcaatgaaaaaataagatgtattcccccagagttcatagtccagatcacatgtgtacgtgatggccaaaaaggaaaataatcaattccattaggcccatattactgaacacatgcacagaaatgtggaacatctcccgacaagtaggtgtcttatagtgactgttgagcaggctgctcagcaccagccatgagatcgtgtgcacatacaagagtagtcaaagtctgacagaaaagagatgaagccaaagcaaatcatgcttttatacacattcaaccaacatgttctttaataatctcttctttaaagaacaaaataatcaagtacatggcattaagttaaatgtctctgcacatgaatttccaccttataaatctggtatattaaagtgtgctgtaaatagatgtgtatattttcttttttgagtactatgataggtgaaatggtatgactataaaaaggatttgtttctttttgtctcctggaatgacatgatgcctttctagagaaagaaaaattgcaggctacaggaaaatgataaaaactactggattcatttagactattcgatttaggaaggtacaaccacttctttaacatcaagctaaaagtgggggaaagtctcagtctcccaggtaggtctcctctcacactgtcctgggtggcaggcgctgtttatacatgcccgctatcgctctggctgcactgtagatcatctgccgacgggacatcccaggtaaatgccatgtgccaatcagtccggctgacattcagtaaactcttttccaggacnttcacccactgtcaccaaaagggccttgaccacctcagattatagtcctggggagttagactttgagcctgtggaaagatga

SEQ ID NO: 251198 - DNA, 694 bp, Homo Sapiens
cataatatggttcttgcaacatgtagctcttatttcagggccatgtttatgagtggactaagtgaaagcaaacaaacccatgtacacctgaggaatgtcgatgctgccaccttacagataataataacttatgcatacacgggtaacttggcaatgaatgacagcactgtagaacagctttatgaaacagcttgcttcctacaggtagaagatgtgttacaacgttgtcgagaatatttaattaaaaaaataaatgcagagaattgtgtacgattgttgagttttgctgatctcttcagttgtgaggaattaaaacagagtgctaaaagaatggtggagcacaagttcactgctgtgtatcatcaggacgcgttcatgcagctgtcacatgacctactgatagatattctcagaagtgacaatttaaatgtagacaaggaagaaaccggtcgagaagctgctatgctgtggctagaggatatacacagaatcacgaacccaggatttggcttctgtgtcttagccaaatcagaattgatgcactttcagaagtaacacagagagcttggtttcaagggctggcacccaatgagaagtcagaggtggttcaagggctgtgtaagtgcatgcgccaagtttttcaaaccaagacttgggatgactcaagaggtgatgtttcattggagcatcttcg

SEQ ID NO: 251199 - DNA, 949 bp, Homo Sapiens
  misc_feature (145)..(155): n is a, c, g, or t
ccattcttttagcactctgttttaattcctcacaactgaagagatcagcaaaactcaacaatcgtacacaattctctgcatttatttttttaattaaatattctcgacaacgttgtaacacatcttctacctagaatgagaaggnnnnnnnnnnncaggctgatagggccaggacagacacattttacttttatgtaagacgtaagtatattaatcagatgcccatagtgtaatttttattttcagatacacacatctgggctgagataaggtcttctggtagtaataaactcagaagactataaaattttgcagtattttttcctgctcagtggcctacttaactgttctatttaggaaccagcagtacaacaataaataggctcttaaaaaacaaaacagccttaaagaataggtaaggaaattcacacataagtcatactttcctagactttatatataattgagagaactatatgaaaaaatgtaaataaatcatagtatagagaaaattattgttgttgaataactggattctggtttcctcaatttgaacacagtcacataaaaccagaaaatcatgcacaatgagtaagagtagttatttgccattcttatcgagaggtaagataacaaagcaacacgaaatagacttacgtgcagttataaatcacctacatttaaatgacccatcttagccactgtaagcttcctagatttgttttttcttaagaaggtagatcccagttgaatcagatgtgctacccactatacttattcagcatcacagtgaccaactagaaactgtttacactgacaagtcaggttgcttggatttaaaacttaattggccaattagtacctggaaactacttattaggaaagaagcttcacatctctaaacttcaattttctcttatataaaatggggaaataatagttatctccc

SEQ ID NO: 251200 - DNA, 807 bp, Homo Sapiens
  misc_feature (20)..(20): n is a, c, g, or t
  misc_feature (65)..(65): n is a, c, g, or t
  misc_feature (187)..(187): n is a, c, g, or t
ctgtcgccaggttctcattntgaccaaaagatacctaagcggcagaaacaccctaagactagccntcaatgaagcactgaatgccttctctgttaagcatctcaagcactgttaaagatactagcctcagctgttcttgttcagatcattcctgtgattaatttagttataaaataagagggtttanaaagaatattacattatggtttttctagcttttaagattcaaaagcagaatgattttcacttaagttttaacttgttttgtggggatactggcaaacattctgtcacctagtggtcaatttcaggttttgcagctagggaatcaaagaaatcagctgtcccaccaagcagctactcttagggatgctcaattttaggaactatggttttattccaggggccagatatcagtagctgcagcagaggagagaaggacaagtgctccctgcttagagaggactgggtgactacctggttgtcctggttatcaattaagaggaatcttgcctctcaggatgtctctggagacattcatgggtgcctaactaccaacaagttgtcaacttccccaggtaagccaggtaaactaaacctgaaagtggtcagattaggagaatgactgctagaatactcaagtgatgaaagaaaagtgatccaatgaggtactgaagatggatatacctaacccaaggtctctggacactccacagaacccaactgttaaaatacataagatgaagtatggatgaatcagaatcagaggtaagcctggccttcagattctagagaaggcttttgttt

SEQ ID NO: 251201 - DNA, 847 bp, Homo Sapiens
aaggttaaaattgaagataaaagtaaatcaaaagataggaaaaaatccccaattataaatgaaagtacaagtcacaatcgaggtaaaaaatccacatccccagtggatttaagacgtaaatccaaagacagaaggtcacggtccaaagagagaaaatcaaaacggtctgaaactgataaagaaaagaagccaattaaatctccctctaaagatgcttcatctgggaaagaaaataggtcacccagcagaagacctggtcgtagtcctaaaagaagaagtttgtctccaaaaccacgtgataaatcaagaagaagcaggtctccacttttgaatgatagaagatctaagcagagcaaatccccctcgcggacactgtctcctgggagaagagccaagagccgatccttagaaagaaaacgacgagaaccagagaggagacgactttcttctccaagaacacgacctcgagatgatatcctcagtagacgtgaaagatcaaaagatgccagccccatcaatagatggtctccaacccgaagaagaagtagatctcccattagaaggaggtctcgttccccactcagacgtagcaggtctccaagaagaagaagcagatctcctcggagaagggacagaggtcggaggagcagatcacgcttgcgaaggcggtctcgatcacgcggtggtcgtagacgaaggagcagaagcaaagtaaaggaagataaatttaaaggaagtctttctgaaggaatgaaagttgagcaggaatcttcgtctgatgataaccttgaagactttgatgtagaggaagaagatgaagaagccctaatagaacagagaagaatcc

SEQ ID NO: 251202 - DNA, 391 bp, Homo Sapiens
  misc_feature (270)..(270): n is a, c, g, or t
  misc_feature (299)..(299): n is a, c, g, or t
  misc_feature (318)..(318): n is a, c, g, or t
  misc_feature (361)..(361): n is a, c, g, or t
  misc_feature (368)..(368): n is a, c, g, or t
  misc_feature (377)..(377): n is a, c, g, or t
agtctaaaccgtgaagagacggggtgtaggttcagaggtggcttattatatcatctatcaccttcctggctgtagttcatttcatgtctttaaatggagcaaaacccaccagaagaatcaatgctgctattctgattttccattcttgaatgcaccaaaatgtgcatgcttgttgtaattaggtgccttgttaagaaggtgaagctggtgtctcagcaaatcagaccccttggagaaggcgtcgaatgggcctgtgccccgttttccttnttctctttccgcaccatcaaaagggaaangtgaggaaaataggcaganacattagttaaatcctgaattattaccccataacctacagggnttaatcntcactacantgaaaggttgacat

SEQ ID NO: 251203 - DNA, 451 bp, Homo Sapiens
ggatttaactaatgtttctgctattttctcacttttccttttgatggtgcggaaagagaaaaaggaaaacggggcacaggccattcgacgccttctccaaggggtctgatttgctgagacaccagattcaccttcttaacaaggcacctaattacaacaagcatgcacattttggtgcattcaagaatggaaaatcagaatagcagcattgattcttctggtgcagctcagtggaagatgatgacaaccagaagacatgagctaagggtaagggactgttctgaagaacctttccgatttagtgatcaagatatggaagctgatttctgaaaatgctcagtgtgtactctaattatttatggtaccatttgaattgtaacttgcattttagcagtgcatgtttctaattgacttactgggaaactgaataaaatatgcctcttattatcaa

SEQ ID NO: 251204 - DNA, 545 bp, Homo Sapiens
aatcagcttatacataagcaggacagcctgaaaagctactgtgaaatacagaaataggataaatatcctaacacctctttgaaaaaggcagcatgggatgaagataatttacttctaagaatatttattccttggccttttagagggtcttcctttttggtggggagggagcagttggagaggaaagtgtgttgtcgtggctggagaagcaaaatgacagagacatggataaggggggagaccttcgaatgccccagaagtcaatgtaactcctataatatagccctacacagggcctttgctagatgacgactcatcagcaagcttcttaatatctgttactctgtgcccacctactaggaatgatgataggccttctggacaagttaccattgttattaactcaaaagatccagcaatacaatataaaagctcattaatctacaccttgttaactaataatctgtgatgtgttagacaagctggatatgtttacctatatattgctaagggtagacagaggaaaggagaagactcccctagtt

SEQ ID NO: 251205 - DNA, 588 bp, Homo Sapiens
caatagttcctccaaaatgaacactgtggaatatatgctgaaaaatgacataaaatgctgataactgaaatgaaagaggtcctaaatagatacctcatgttcatggattggaagacacaaaattgcattcaaaaccccagtaggattttttgtagatacagagtagctaattctaaaattcatatggaaggcaaagaaactaaattagccaaaacaattttgaaaaagatttcaaaaaaattttgaaggaatcatactgcccagttttaagacttactataaagctgtgataatcaaggcaatctggtatttatgaaaggataaacacatagatcgatggaataaagtccaaaaccagactcacataaatagcaattgatttctgacaaaggtgaaaagacaactcaatggggaatggagagtttttcaacagacgattttaaaacaactgaacatccatatgcaaaaaaataaacctacctaaatttcacagcttacacccaaattaacctaaaatggatcacggatctaagtgtagaactaaatttataaaatttttagaagaaaaaaatccataggccgggcacg

SEQ ID NO: 251206 - DNA, 524 bp, Homo Sapiens
cagaatgactccaaagattctcagaaccctgtctcttgaagctcaatcttatttgggttcatcactgaaaacttagaacaaatcagtaaagaatcctgtattgaagaattaagtttgagtttaagcccactcaccgcagggctggtttttgcatgtaatactcccatgatgtctggggaaatgacagtttctgttgaattataattctccggtttaagggtctccttcccctggtgtctgatggtgagaggtctgaagagcatttgtcagagtacattaggcattctcaacctacttcatgctttacgagagctgagaaatcagacgcaccggcctttattattatatatgctacatctgttgagtatttttaaaataccaataagaggacttgtttatttcataaaccacttcttccctctctttcaaagaaaatacattattaccatacttttacattagtctgagaatttttgctaaatatgattaagtattccaaaatataatggcgtcattattcttga

SEQ ID NO: 251207 - DNA, 1291 bp, Homo Sapiens
  misc_feature (32)..(32): n is a, c, g, or t
  misc_feature (40)..(40): n is a, c, g, or t
  misc_feature (57)..(57): n is a, c, g, or t
  misc_feature (82)..(82): n is a, c, g, or t
  misc_feature (374)..(374): n is a, c, g, or t
  misc_feature (665)..(665): n is a, c, g, or t
  misc_feature (984)..(1035): n is a, c, g, or t
cacctctcgcaacaggcaacagctgcccccangaactccnaaccccatgtgaatggncaaatcccccggtgatgttctgtangggtttggtggaggcaggaaaaagtatttgtttaataaatagggcttgagtacatttctacttgaagtttaaggttttaggaggcccatgaccagaagcccaggcccaggcttcctgctccccattttcgcccatcccctccagcccactgcatcctcctgtatagtagattccatggatgaaggtcttaaagatggacaggttctgtatgttctcttttcagaaaaggcaaacaacttgccatcccagaatctttacacaaaaccttttccgggctacagcaagacacacnacgcaatgctctgaggaccagatgaaattccaggcttttatcagaagcaaaagtttatccctatccaaaaatgaaattatacaaattcatacatatggtaaagattctagctgcctcttaaacgagacaaattttcagcagaagggcccaaaacaaaatggtcctagtcctctgaagtaaaaatatttatgggaaaaatcagtttttgtaagaaagaaaaattaagaatagtctctctcccaggccatagagcttcctttgtccaaatcaggttgggagcatgccaggggnagatcagcttgcctcagaagtccactatctaacgaaagaaaaacataaatcctttcagagaaaggacactcagaaagaacaggtgaggagtgtgtaacatcaaaccaaaccaacctcatctcaacccccactcagggcctctctgatgcaatcccaaagttagcagtggcaatgcaactttcagaccgggagagctctgactgcctgttggatactcgagtcacagtccatggggtgttttgttattggccaatgtctgttaaccattaactctcttcatgattgcaccagttagaccatttgccctgatggggggacnnnnnnnnnnnnnnnnnnnnnnnnnnnnnnnnnnnnnnnnnnnnnnnnnnnnctgctaatggccgatcccaacacactttctgggagacagtagatgaaatcacagcacagtgaacacatgctgcctaaaatcagccttgttggggagtaatcccaactgccacccccaagacacagggtccagtccacttatctatagtctgagatgtcccccaacaaaaatggactaaagaatcttggacacaaagggccagaagaaaaagcctgagatgatcggttcagtgatttgttgcagagtgacccacgag

SEQ ID NO: 251208 - DNA, 1305 bp, Homo Sapiens
aaaagtgggtgaaaggtcggcggcgccggcactgcagctggggctgagaagccaggacggcccgagaactgacagacggagtgacagacggactgaccatggccgaccagccaaaacccatcagcccgctcaagaacctgctggccggcggctttggcggcgtgtgcctggtgttcgtcggtcaccctctggacacggtcaaggtccgactgcagacacagccaccgagtttgcctggacaacctcccatgtactctgggacctttgactgtttccggaagactctttttagagagggcatcacggggctatatcggggaatggctgcccctatcatcggggtcactcccatgtttgccgtgtgcttctttgggtttggtttggggaagaaactacaacagaaacacccagaagatgtgctcagctatccccagctttttgcagctgggatgttatctggcgtattcaccacaggaatcatgactcctggagaacggatcaagtgcttattacagattcaggcttcttcaggagaaagcaagtacactggtaccttggactgtgcaaagaagctgtaccaggagtttgggatccgaggcatctacaaagggactgtgcttacccttatgcgagatgtcccagctagtggaatgtatttcatgacatatgaatggctgaaaaatatcttcactccggagggaaagagggtcagtggagctcagtgcccctcggatcttggtggctgggggcattgcagggatcttcaactgggctgtggcaatccccccagatgtgctcaagtctcgattccagactgcacctcctgggaaatatcctaatggtttcagagatgtgctgagggagctgatccgggatgaaggagtcacatccttgtacaaagggttcaatgcagtgatgatccgagccttcccagccaatgcggcctgtttccttggctttgaagttgccatgaagttccttaattgggccacccccaacttgtgaggctgaaggctgctcaagttcacttctggatgctggaagctgtcgttgaggagaaggagtagtaagcagaactaagcagtcttggagggcaaggggaggggaatggtgagatccgagccctgtgcatggacttggtgagactgttgccttaatgacatcctgcaccgtgtataacttagtgtgtcattttgaaacttgaattcattcttatcaatttaagggatcttagaatgctgcctaccagttaactgctggtcctaccacaggccaaagtattcctcattgagagatcttggtctc

SEQ ID NO: 251209 - DNA, 503 bp, Homo Sapiens
acagcaagccagatggctataccattgttagaactttggcctttgccctggctaaaaagaagagccaaggttataacataactttctttttaacagaatcttcctggctactgtgttgaaaagaggctgaaggtgaacagttaggctgttgcaatcattcagacagaagtttttgttgtcagaaccaagatggtggcagtgagagtgacagtgaatgactgaattgtggattccttttgaagatgtttgtttatgatactgacacgggatgcgggagaaagagcagaatcacagataacaccaagagtctccatccctcaaaacttaaaaacaataaaaattctatttaccgagcaattacttatttttgctccattggcctaatttcagactcatacttaaccaatcttaactatatttaatggaaattgtcccataaagaactctgtttttgaatacttttgtttttgcttatgtggtgtcactgtaacctgtggagacta

SEQ ID NO: 251210 - DNA, 845 bp, Homo Sapiens
atccactgagaacagtctgtaaaggtccgtagtgctatctacatccagacggtggaagggagagaaagagaaagaaggtatcctaggaatacctgcctgcttagaccctctataaaagctctgtgcatcctgccactgaggactccgaagaggtagcagtcttctgaaagacttcaactgtgaggacatgtcgttcagatttggccaacatctcatcaagccctctgtagtgtttctcaaaacagaactgtccttcgctcttgtgaatagggaaacctgtggtaccagggacatgtccttgtgtgcccgctgcggccagtggagcgcttccatgacctgcgtcctgatgaagtggccgatttgtttcagacgacccagagagtcgggacagtggtggaaaaacatttccatgggacctctctcaccttttccatgcaggatggccccgaagccggacagactgtgaagctcccagaaacatgacaaggaggactttcctgcctcttggagatcagaggaggaaatggcagcagaaggcgcagctctgcgggtctactttcagtgacacagatgtttttcagatcctgaattccagcaaaagagctattgccaaccagtttgaagaccgcccccccgcctctccccaagaggaactgaatcagcatgaaaatgcagtttcttcatctcaccatcctgtattcttcaaccagtgatcccccacctcggtcactccaactcccttaaaatacctagacctaaacggctcagacaggcagatttgaggtttccccctgtctccttattcggcagccttatgattaaacttccttctctgctgcaaaaaa

SEQ ID NO: 251211 - DNA, 939 bp, Homo Sapiens
gagggagactttttgtctacggctttggaaccaaaaaaacttcactctaattcagtcctaaaggctattttacattttgccggggtaaagtgactgcaagatacagcatggtgtcttgtatctagtagaatattgtgctagccatctaaaaaagtggatttgagccttaatttggccgtttctcaattgtctagttgaccttagacaattagtgtccatggctttccttttgtttttcccatactgaggaacttaaactacagctctaaaatgtcttttggttttaaaattctgaatgcttatatactactattaaaaattaaaaatccctcaaatagtagggaaatacaggtaatatgaaattaaatgtatttttatccattatttgattcccacctgttattttatttagaatacgaatacaaccaagtagggaaaaacgtatcagtaactgctattcaacttaaattcagcgaattaatagctgaatagaaatagctaatgacaatgcaaaagagaaaacaagccatattgctaagaaaaggatagtaagctgcttagaaagaaccagcctgtgttggaaataattctcttctagataatttaccttattttcttggcttgtactaattgaatggaagtggttaatttgttcagagtttattgccgtttgatgccaccccagtctatagttctgtgtgactttccatattgaaagagtagggttagtagccaggttgtcagtcttttacaaatgtctacataaatgtctacataaatctgaaagtggtttatattcaaggttagtttttcagtagcgtctcctccttattcattcacttttactgtgaagactgaaatccaaaagccaggttccccaaaaaagtatttttaaaaaattttagggggacccaaataaatagagggaagaccaattat

SEQ ID NO: 251212 - DNA, 370 bp, Homo Sapiens
  misc_feature (331)..(331): n is a, c, g, or t
  misc_feature (343)..(343): n is a, c, g, or t
gtacttctcagagtgaagaaaaagctccctgaattgcccaaaccccaaagaaaaacagatgtttcatgtgcagaaagaaagttggtccttacagggtttgactgcccgatgtggaaatttgttttgtggacttcaccgttactctgacaagcacaactgtccgtatgattacaaagcagaagctgcagcaaaaatcagaaaagagaatccagttgttgtggctgaaaaaattcagagaatataaattacttcttgtgaagagactgaaactttgtttttattttaatatatcgtaggtacattacacttgtctgtcttataattgatattntaggatgtttgngtgtttgtacaggcagaattgatagat

SEQ ID NO: 251213 - DNA, 1570 bp, Homo Sapiens
ttcctctgtacatggcttttattatttacataatacaatatagcatcaatgctgaatagcatgattatgtgcaatacataaatatgaactatctgtacacatctgcaggtctaactcagaactaaggtacataaaattgaaagcaaaactgaatgctttaagaataaaagtaaaaactaggactgaacattgcaataaatcagaagtagtgcctcgtgtacatacttaactatttacagatgaaaacaggcattaccacaacactaactatactcatttatatataaaaaacacaagtttcatacatcacaaaaaaccttccattataacacagaagtgattattaccagacaagcatcagtgaagtatactgccttttctagttgttattgtacaatgctgtagataatgcagcccatgcaatacacccaagaacactagagtcctacacccaagtacaatatgataaagcagccctctgcaagtggcgctggataccactaagaagtctactgcagccatgttggttatgattttccatgcagaagggtacagttacattaagaactgaagtcttttaaaaagctttaaacattctttcttgaaccaaaccattcgacaaaagatgcacatgaaaaattattcagatacctttgcaacttaaaattcagatgcatgttattcaatagagctgctgtatgtgaaaaccaaacgtagagtttaaatttcttcttgtaaacaaattaatcctagtgcagttctgtgctacacatttttagcaatgagtaatgcagacatcttctggtgcaggccagtacaataagcttcaaaggttatctcaagaccctgttgttggcttgatggttttacttataaccagtttcgatgtttacctttcacagaatgtcttatttgacagctttagatgaccaatttaaccaggcttatatatggcgccaaatactggtttcacgggaaagaaggtctgatcctctttatgagcatttcttcctgcttccaaagaatatgttgtgaaattaaagagggtgaagtttaactatggtagaagtagactgccagtccttttctggtgtaccattttaaaaaaatacaggcacataacactagccaaagattataccttgattacattcccaaaaggcagatatgctgcaaacatgcagagatttcatttattttgtttggcacatgggaactacattttgttcctattatctgtgtgtttcactttgctgtgcagattttcatccaatttttttcaggggagggcatatacatttgtagggctgtatctatccaattctgcctgtaacaaacacccaaacatcctaaaatatcaattataagacagacaagtgtaatgtaaaactctggagaacatcaaagaaaaatggccatgcatctgctctttaatgttttcctacgatatattaaaataaaaacaagtttcagtctcttcacaagaagtaatttatattctctgaattttttccgggacgcgtgggttcgacgatatcccaaggattccggaccggtaccagcctgcttt

SEQ ID NO: 251214 - DNA, 910 bp, Homo Sapiens
  misc_feature (86)..(86): n is a, c, g, or t
cctccctgggaaataatgtggaacctaagaaacgtggaaccgtggttccttgaaccctcgaatcgaacttggcaacttctgcctanttcctacttctccttggctgtccttttccttaacaccattgtaagggcttttggaagcctgttgtctatcctcaggttcttttttgactgtcttcacattaatggagattggtgatttctcttcagcttttacttctcttggtgatgatggcttggaggctggagaaaatccacccagggttgaaagggctggagttccatccggattcaatccctttgcttttaatttggcttcttgtaaggctacttttcttttttctacttctttttccagtaattcatagtttggcttttttctggtataaagcctaagtgtttctatgcagatttcctggatttcctcttctgtagtaccaaaaagaagaaaccaatggggacgagttggcaacggaatctgaagtgctctagctgcaaggtagatgcaagcacatgctatagtctctggttgaaatcgaacaaacacattggttcgaagactgtcattcatgtaattccaggcagtttgaaccagggtttgattacgttcacattctaagacttgtaaatacataacaatgatctgaaggacaagggaaaaaaactcaattcagtatactggtagttctttcggagtagagttcaatgaaaaaagtaattgaaaatgttagactcaagttctaattgtgcatcgataatacagaccaatttaaatgtacataagattataatgtgaactgctacatgactagattttatataaattatgtttagaagcatatttcaaaattgtacaggaaaaaaggccaccaaaagaatatttttcattggcaatttaatatgtgatg

SEQ ID NO: 251215 - DNA, 955 bp, Homo Sapiens
  misc_feature (131)..(132): n is a, c, g, or t
  misc_feature (156)..(156): n is a, c, g, or t
  misc_feature (274)..(274): n is a, c, g, or t
gaatccctaaacatgatacggttttcaaatactatagatgtgatcttaaaaagtcttttgttggtaagtctccaatgcacaaaaccaaatcttacttgagaaggtactcaaagtataactaaagcaaagtnnagtaatagtcaaaccatgtctccnagttctattcataaaacctagaactctttaccacaacaggtaatcaacttattttataaagagaggacatatcaacccaaaatttgcctggtggcgaatccaagaacaatccttttcntaacaaccacaacaacaaaatgtttttaatgtgctttccaaaatcaacctgattttcaagaaaacgtatcgttttgtgatgggtaacagaatctttggacataaatgcatgatgaaacacacttattagagagaagccacacctcaagaacaaagtgaaaatatgaaaaggcaaatctgagtatacccagaaagacaattatacacagtatcaataaacatcttacctgttcacagtaaaaggctgtcgagaaggctgctgctttggcatacatattatgcttggcgagcttctgttggggctacctaaccctgaactgctcatgctatttgtcctgctaggaattccaatgccctgaccaacctgggagtggttcatcatattcctaggattcataggcaaaatacccctgcttggagatggaggcgtgtgaagtgacattgttggtacccctgttgttggcgtgacgtggctcggtaactgagtgccttgtgataagctgcgatttaactgaggggtattgttgctcatccccctcattggaaggcctagtgcactttgttgcccgtataaacttgccccaaactgagacagctgacctgatgtagatggtgatgccagcatatctttttctgaccgatgtggaaacatagaagactggctgtagtacatgttttcgat

SEQ ID NO: 251216 - DNA, 1049 bp, Homo Sapiens
ccctcttcactccctgcccccatcacccctacgtatcgaggcctgggtggcgaactcggcacgaggccatcttggatccgcgggacaagaaaattcatgcgagggagacgtggtgggcggtccttcctgtgacacgacccttgagtgacagttctatttgattgcctccggtactgtgaggaaaggacacgactctatggtgaggactgatggacatacattatctgagaaaagaaactaccaggtgacaaacagcatgtttggtgcttcaagaaagaagtttgtagagggggtcgacagtgactaccatgacgaaaacatgtactacagccagtcttctatgtttccacatcggtcagaaaaagatatgctggcatcaccatctacatcaggtcagctgtctcagtttggggcaagtttatacgggcaacaaagtgcactaggccttccaatgagggggatgagcaacaatacccctcagttaaatcgcagcttatcacaaggcactcagttaccgagccacgtcacgccaacaacaggggtaccaacaatgtcacttcacacgcctccatctccaagcaggggtattttgcctatgaatcctaggaatatgatgaaccactcccaggttggtcagggcattggaattcctagcaggacaaatagcatgagcagttcagggttaggtagccccaacagaagctcgccaagcataatatgtatgccaaagcagcagccttctcgacagccttttactgtgaacagtatgtctggaattgggaatgaacaggaatcaggcattttggaatgaataactccttatcaagtaacatttttaatggaacagacggaaagggaaaatgtgacagggattggaccttttcagatttccccagcattaagcagaccgaaaccaggaggggaaggagagtggtaacccaaactcccattaataaacccccttggggtgggaagacctcccttaaggtggggaaggggtaaccaaacccggccaagtggaccatccccggggactttctccaaaaccc

SEQ ID NO: 251217 - DNA, 1188 bp, Homo Sapiens
  misc_feature (11)..(11): n is a, c, g, or t
  misc_feature (27)..(27): n is a, c, g, or t
  misc_feature (35)..(35): n is a, c, g, or t
  misc_feature (50)..(50): n is a, c, g, or t
  misc_feature (62)..(62): n is a, c, g, or t
  misc_feature (126)..(126): n is a, c, g, or t
  misc_feature (128)..(128): n is a, c, g, or t
  misc_feature (149)..(149): n is a, c, g, or t
gaaaacactgnaatgattcaactcttntctttggnccatggaaccatccnaacgagtaaacncaaatccagaggctttaagtgtatttctattaagcaagaatgtttgtaaactgagaacaacccnanccttttatgtgggattctctnttcttaagtcagtcaatgcgtgcattagcgcattaatctttgaactggatgtccattccatatcagactttttctcactgtcacgtgctaattcttctggaggacattctaataaattatcttcatgtatatcatttctgcataaagggcatttagcatgtggctgctcattctgaatgacttggcaaatacagggtttacaaaatacatgtgcacaatgtgttatcacaggaactgttaaagaatccaggcaaattgcacattcctcatctgaacctgagctcagaattaacttcatcttccttattaacttctttctcagttcttcaggtgtatcatttcctgaggggccattggaagacactgcatttgtaagaaggtaagtatggcaacaaatttgccgcagtctaagcaaaagacccaggacatctgcataatgtgccaggacagtcccttcattaaaataccttccaatagtggctctgccttcatttttcacagactgataaatctttctctcttcatctgaaagtgtaatgtgctgaataaatactttacgttctggtaactccaaaacaggttttcctttaattttgcttgtctttgttcttctaagtgtaatatttttaattagggactgtaaacgcctaagtcctccttcatctcccattgtgacaggacgctgtattgttctatgccaccattccctatcaataaatggtttaagttttaaaaaggaaagaagagaccacaagtcctttaaagaattctggattggagtacctgtcaaaacccatcttctttctgattctaagtcaagtacagcttttgtctgctgagcatttggatttcgtatggcatgtccttcatccaggatcactcttagccaccttatgctatgtaatggactatctcctttagttccatagtcatgagttaaaatattatacgtagtcaaaacaatatcctgttttgaaagtaaggccggttctctaatacgatcaggaccataataaacataaaaattcaagtgtacatc

SEQ ID NO: 251218 - DNA, 431 bp, Homo Sapiens
ttctggaggacattctaataaattatcttcatgtatatcatttctgcataaagggcatttagcatgtggctgctcattctgaatgacttggcaaatacagggacaaaatacatgtgcacaatgtgttatcacaggaactgttaaagaatccaggcaaattgcacattcctcatctgaacctgagctcagaattaacttcatcttccttattaacttctttctcagttcttcaggtgtatcatttcctgaggggccattggaagacactgcatttgtaagaaggtaagtatggcaacaaatttgccgcagtctaagcaaaagacccaggacatctgcataatgtgtcacagactgataaatctttctctcttcatctgaaagtgtaatgtgctgaataaatactttacgttctggtaactccaccacaggcc

SEQ ID NO: 251219 - DNA, 993 bp, Homo Sapiens
aaggtgcagcagcaagccctgcattctcagcagcagcttgaggctgaggctcagaagcactgtgaggcgctcaggagagagaaggaggtaagtgccacactgaagtcgacggtggaagccctgcacactcaaaaacgagagctgagatgctctctggagagagagagggagaaaccagcgtggttgcaggcagaattagagcagtcacacccacggttgaaagagcaagaaggacgcaaggctgcgaggaggagcgcggaggccaggcagagcccagcggctgcggagcagtggaggaagtggcagagagacaaggagaagctgcgagaattagaactgcagcgtcagcgtgacttgcataagatcaagcagcttcagcagacagtgagagacctggagtcgaaggacgaggtgcctggcagccgcctccacctaggttctgcccgcagggctgccggctcggatgcggaccacctccgggaacagcagcgagagctggaggcgatgaggcagcggctgctctctgccgcccggcttgctcaccagcttcaccagccaggccgtggacaggacagttaatgattggacgtcatccaatgagaaagcagtgatgtctttactgcacacgtttggaggagctgaagtctgacttgagcaggcccacctcctcccagaaaaaaatggcagcagagctgcagttccagtttgtggacgtcctgctgaaagacaatgtttccctcacaaaagcgctcagcacggtgacccaggagaagctggagctgagcagagccgtgtctaagcttgagaagttgctgaagcaccatctgcagaagggctgcagcccaagcaggtcggaaaggtctgcttggaagccagacgaaacggctccacagagttccctgaggcgcccagaccccggccggcttccaccagctgccagcgaggaagcacacaccagcaatgtcaagatggaaaaattgtacctgcattact

SEQ ID NO: 251220 - DNA, 866 bp, Homo Sapiens
gattttatcttgttcctttaaaatcacaacacagagctgctattaaattaatattgatatattcagtattctcttcaacttgtcacgaggaagaatttcctgtagttaagctttaactcttccttcatctacatctgttgcataaaactagtcccttagtgccagttgggaagcttacttgcaattgtttggaagatttgcaggtcgctgacctcatcatttcactctaagtatatgtggtaggctaagctcagaaaaaggtatgtatgctttacacgtgataggcaccaaatttagtattgtatcctaagtatttttcctcttctgtattttctgtgctctacccctgaaactatatttaggaataaaagaagatataaaataaaagtgatattggggtatgttcagcttgtaagtgtcagaaatggaagttggacaaattggattaaacatatttaaagtagaatgttatcataggatacccccaaaaattgtgagtaataaatctcttaatggagcttactggccagatccttcagggcctactcggagaagcgtgaacggcaaagcgcgaaaggtccgtacacttatccaacggcttcaaacatccaaacttgggcacgcataacagccattcagacaacacagatttcaacggtcaaagcagggtagcatataccccatgacgcatataccagatgaccagaaaccaatgagatacagacacatatccgtgctgatagaagggataaaacaacatttcggaaaaccaagagacaaagagaaagtcaggccacagaaaaaaacaccatacacaacacacgcaccgccaaagaggccaacaaaaggagaaccacagacaacac

SEQ ID NO: 251221 - DNA, 781 bp, Homo Sapiens
ggaacgctcgtccaacactcaccagccaagaaccgccaagtgcagaaacacttgtggtctttgcccacaaacttgaagacagggacctgaaagtgctttgctaggtgatcccggaatgtgtactgcttaaccgagtcatctgaaacacagctcgtcgatcttgaaggtgtgggtggcaaagcagctctccaccaagctttccaagccgctcacgtgcaccacgggctcaatgccaaagtagagggagtcacgaagcttgagggtgggcagagcttcccggtaaggctcttcaaactcattgtccttgaagatctccagagtgaatgggaagatcccatgatttcggctcatgatttccagtggggagtttcgaaggttgggaacgtatccttcagaaatggtgtacaggcgtggaaactcgcaggtcaccgggatcagcagcttgctggttcggatgatgaagtccccgctgctccccggggtctgcttgggtagacctgtcacgaggttgctggccacaatcttgtcattcaccacatcgaccactgtaccacatgtcttgagagagaagaggatgttgacatgggtgccgttggacactcctcggcaggaggtgttggtcaggaagagctccaggccaccaaccagctccctggggatgttcacttcaatggcatttgatttgcacaacacagggacttggcaagtgtggttatcctcagacagcaccaggccccggggacattcacactggtagcctttctcagatccaaggcaagag

SEQ ID NO: 251222 - DNA, 953 bp, Homo Sapiens
tttgtccagctccagccagaataaagaagtgggttttttaatcctcatgtgcttaaatcaactttcccccttttttattaaagtgaccattgggcaattccttaacctctctgtttccttatctgtaaaatggggatgataaactctacttgtggatgtccttgttaagattacatgacttaatgtttaggaacatttagtattgtgtcttgtaagtgccccacaagtggcagcagttattgttgttattaacagtcgtgatcatctcttcaggaagtgtttctgcactgccgggttcttgtctgtggagtgttggacgagcgttcccgctgtgcccagggttgccaccggcgaatgcgtcgtggggcaggaggagaggactcagccggtctacagggccagacgctaacaggcggcccgatccgcatcgactgggaggactagttcgtagccatacctcgagtccctgcattggacggctctgctctttggagcttctccccccaccgccctctaagaacatctgccaacagctgggttcagacttcacactgtgagttcagactcccagcaccaactcactctgattctggtccattcagtgggcacaggtcacagcactgctgaacaatgtggcctgggtggggtttcatctttctagggttgaaaactaaactgtccacccagaaagacactcaccccatttccctcatttctttcctacacttaaatacctcgtgtatggtgcaatcagaccacaaaatcagaagctgggtataatatttcaagttacaaaccctagaaaaattaaacagttactgaaattatgacttaaatacccaatgactccttaaatatgtaaattatagttataccttgaaatttcaattcaaatgcagactaattatagggaatttggaagtgtatcaataaaacagtatataattttaaaa

SEQ ID NO: 251223 - DNA, 481 bp, Homo Sapiens
  misc_feature (43)..(43): n is a, c, g, or t
  misc_feature (390)..(390): n is a, c, g, or t
  misc_feature (437)..(437): n is a, c, g, or t
  misc_feature (452)..(452): n is a, c, g, or t
ggcaggaggagaggactcagccggtctacagggccagacgcanaacaggcggcccgatccgcatcgactgggaggactagttcgtagccatacctcgagtccctgcattggacggctctgctctttggagcttctccccccaccgccctctaagaacatctgccaacagctgggttcagacttcacactgtgagttcagactcccagcaccaactcactctgattctggtccattcagtgggcacaggtcacagcactgctgaacaatgtgggcctggggtggggtttcatctttctagggttgaaaactaaactgtccacccagaaaagacactcaccccatttcccttcatttctttcctacacatttaaatacctcgtgttatgggntggcaattcaggaccacaaaatcaggaaggtggggtataatattttnaagtttacaaaaccntggaaaaatttaaacagtttactggaagt

SEQ ID NO: 251224 - DNA, 421 bp, Homo Sapiens
  misc_feature (244)..(244): n is a, c, g, or t
tgtacaccatttctgaaggataccttcccaaccttcgaaactccccactggaaatcatgagccgaaatcatgggatcttcccattcactctggagatcttcaaggacaatgagtttgaagagccttaccgggaagctctgcccaccctcaagcttcgtgactccctctactttggcattgagcccgtggtgcacgtgagcggcttggaaagcttggtggagagctgctttgccacccccacctnccaagattcgacgaggtcctggaaatactacctcatccgggatggctgtgtttcagatgactcggtaaagcagtacacatcccgggatcacctaggcaaagcactttccagggtccctgtctttcaagtttgtggggcaaagaccacaagggaagtgttttctggcattgccgggtt

SEQ ID NO: 251225 - DNA, 700 bp, Homo Sapiens
  misc_feature (443)..(586): n is a, c, g, or t
  misc_feature (588)..(633): n is a, c, g, or t
  misc_feature (653)..(653): n is a, c, g, or t
  misc_feature (673)..(673): n is a, c, g, or t
tgcccgcattggtttcccaaagtgctggcacttacaggcatgagccactgcctggctgcatgatttttatctttatcttctattttttttgtctttcagaattatgggagaataaatggccatacaagcccaagcccacttatgccatcttttggtagagagaatagctttgtgtgatctgttaaagtttataaattgaaagttgttaaatgcatgaatttctggggttgaaataggttcagtgagctatttgtaataatgttatgagggtgagtacagtaggattgattttcaaaatatactaccaaattcatctgttctgagacacttccattggtctctaatctaaataggcaattaatcttccttttgcttttttggtcttaaaatttgagggctccttaacccattaacatcttcaggagaccaacctaggcaacacnnnnnnnnnnnnnnnnnnnnnnnnnnnnnnnnnnnnnnnnnnnnnnnnnnnnnnnnnnnnnnnnnnnnnnnnnnnnnnnnnnnnnnnnnnnnnnnnnnnnnnnnnnnnnnnnnnnnnnnnnnnnnnnnnnnnnnnnnnnnnnnncnnnnnnnnnnnnnnnnnnnnnnnnnnnnnnnnnnnnnnnnnnnnnnaaaattaagttaaataaagntaaataaatatatctatatnctttattctggtgtttttggggggacc

SEQ ID NO: 251226 - DNA, 743 bp, Homo Sapiens
gcacagtcccggcaaactgcaatttagagatgaactgaatcaaacgatcacgtatgataccaaccagtaagagtctgagtcctgtatccaggcttctgtcccaccatatgtctgtactggagatcaagtgtactgttgatacaatgactgtctccaataaagcattttctgtattctgccataccattctaaaggctcttgtgaatccaatacagacagacactgagtggagcccttgtaaggaactgtccaatgaaagaaatgctatcatggcaaaaggtgatactaaagttagcaaaatccgtctgacaataccaatcttcatgagcctagtttgcttctcaaagaatacagtcacagtttgcacatccttcggataaaagggatttaggaaaattccaatgatatatatgctttgaatttctctaagtatccacagtattataagtaatatcatcaaaccatagcccacaatagcctgggaattgcttattacaggatatgatttgtaacacaaggttaatagactttatcttcctacctaaagttagcaaaatccgtctgacaataccaatcttcatgagcctagtttgcttctcaaagaatacagtcacagtttgcacatccttcggataaaagggatttcggaaaattccaatgatatatatgctttgaatttctctaagtatccacagtattataagtaatattcatcaaaccatagcccacaatagcctgggaat

SEQ ID NO: 251227 - DNA, 643 bp, Homo Sapiens
aaggtcatctataaaacagtatcatgcaaaatactgcaattgttcacgtcaataccctactcttaaagataacaaatagctaactccttaactattaaacttcatactagaactatatatgcagatctaaataagggtaagggaagtcactctaggttatataaaacaatcaaaaacatttcaaaatatctacaatgaactgtactgctatttccatcctgtaggtaatctcaacatttatgtccttgtacctcctcctttaaagtatattcaaaacaacaaatggtgctctccaccaatgacaaaatatatatttatgaaatgtgttaaaattgctacattgctcattatttgcaaactgaaatccccttctgtctgatacatttcaagactttcatattaaatatagaagatatgcatattttacactgaaaaacaatattttaggagcaccagtgtataatactattcaactttgttaagtatcagctttctttagctatagctaaagcatataaaaaatacttacccattaagctcactttaaaaaaaatacagaactatgtattattctatgttaaattaagaggcagttatggttttccaagatatcagcactgtattccaacataatattcacaca

SEQ ID NO: 251228 - DNA, 585 bp, Homo Sapiens
  misc_feature (57)..(57): n is a, c, g, or t
  misc_feature (59)..(59): n is a, c, g, or t
  misc_feature (92)..(92): n is a, c, g, or t
caacaccaacatagagcaataaccgaagaaatgtgtaaaagtaaagaataaatgaananacgtcgtaaccacattgcactggttctttacanacgtttgaaagaggggcagcaccggacgatgacccagagaagggtcttgggggtcactccccggctctgccatttgcatgtctgtccctgtgcaaactctttaacatatatttgcctcagtgtcctcatctgtaaaatgggaatgaaaatcctagtcatcatctcatagggtagttaaaggtcatagaatgcctgaaagtattagcaaaaatgtagctatatttttctccctagccttatccatacctgacataataatttcatttgtatctttgcttattatcttctccaactataatgtacatgctctgaaagcaagaaatcagtctatattttgcttctctactctcagcacagaggacagtgcttagcactacaggggtctataacgtttgttaacctaacaaccgattcaatgagtgtgcgcctgcaatcacagcatgcacggaggctttgtctggtgtctatgaagtttaaaatcatcaaatggatc

SEQ ID NO: 251229 - DNA, 1373 bp, Homo Sapiens
  misc_feature (778)..(778): n is a, c, g, or t
  misc_feature (811)..(811): n is a, c, g, or t
  misc_feature (820)..(820): n is a, c, g, or t
  misc_feature (845)..(845): n is a, c, g, or t
  misc_feature (889)..(889): n is a, c, g, or t
  misc_feature (913)..(913): n is a, c, g, or t
tggttagaataacttaagtttccgtgtttaacatcagaatgctttaagaatacattgttaaccccaaggaagggacttgactcggatttaagaccctttgccttgacgatatgacgaaatttcttttaaacttatcagctgtccattctttgaagctgtcaaagccaagaacccataacaaatcacaaatagcaataacctacattagttaacattccccctgttaacatgttgacatttttactaaaggattagttatttttgcatgttccatttctcatatcccatgacattccatataaattgcattattgctttataggccacacaacattcaaaagtatgtttatatgcattgcctgtttttccttgatctgataagactttgatactgattttactacagaaatttaagtttgaaaataccacagttagtatttcttctcagaacgttaattgttcacatcactaatcactacatgcatatttagctctgattatattgctcaaaaactgcacccattatcagaacagtgcaaatgatatttaattttaaaagtaattataatggcttgaattcaaagtcattcaaatgaacactgtcaagtaatttcacttgatgtgtatatatttcatcaccactgtttacattacccttctttaagtataaccatcaattcttcaatttctttttatcagtttccctcccaagtccccaaattaagatgccaaatagtcttgaaaacccagagctccatattttaatgttttcttaagnacacatttgtgaactcacaaaagtgttcctctntcaacttgnacaatgcagttcttactttaagtanacaaacctgtcctaaattcccaacaagtaattctgagaacttanacaccttgacagtgtcccttaaanatgctatgacagtaaagtgccaataggcatggcaatgacctcttagatgggatcatttaactcctcggaactgagaaatgccagcaccaaggattacactgagattcaattttactgaaggctacatttagtttacccactttccacaacctattatattcattatgttagaatgaaatgtaaatgttttgtgtagccctcaaacttacactaagttttgagagagatgtactttaaaaaagcacggggtaatatataaaatcagtggcagaaagtttcattaagcaccaggaactaatttttgtcaccccatactcattttgtagataagtttcaataaccggcaaggcacatttacatatattccaatgaatacttattgacaaattttaaattacactctatgtcccagctatcccagtaactgacatacaacatactaaaatgatttatttagata

SEQ ID NO: 251230 - DNA, 599 bp, Homo Sapiens
gtcgggtggtggtggctgtagcgcttcggagagactgcctccgcccttccccggcctggagccggagtccgagggggcggccgggggatcagaacccgaggctggggacagcgacaccgagggggaggacattttcaccggcgccgcggtggtcagtaaacatcagtctccaaagataactacatcccttcttcccatcaacaatggctccgtgggatccatgaagaacaagaccaagagccacaggatctctttgcagatgccacagtggagctatccttggacagcacacacaataatcagaagaaggtgctagccccaacctatgaggagctagaggaagaagaacaggaggatcaatttgatttgacagtcagcataactgatcctgagaagatagctgatggattgaatgcatatgcagcctacaaaggtacatcacaggcaagcttaccattgcttagatgcaacaggttgcagtacaacgtagatttagtgactgtgtggagcgttatgagacgctatgcgagcagcactctcagaatgcttcattgtgctgcaccgctgaggagagtctcatatgcatgacagagtggttg

SEQ ID NO: 251231 - DNA, 1445 bp, Homo Sapiens
ggggccgcgggtggaagaagatggcgtcgggtggtggtggctgtagcgcttcggagagactgcctccgcccttccccggcctggagccggagtccgagggggcggccgggggatcagaacccgaggctggggacagcgacaccgagggggaggacattttcaccggcgccgcggtggtcagtaaacatcagtctccaaagataactacatcccttcttcccatcaacaatggctccaaagaaaatgggatccatgaagaacaagaccaagagccacaggatctctttgcagatgccacagtggagctatccttggacagcacacaaaataatcagaagaaggtgctagccaaaacactcatttctcttcctcctcaggaagccacaaattcttcgaagccccagccaacctatgaggagctagaggaagaagaacaggaggatcaatttgatttgacagtcggtataactgatcctgagaagataggggatggtatgaatgcatatgtagcctacaaagttacaacacagacaagcttaccattgttcagaagcaaacagtttgcagtaaaaagaagatttagtgactttctgggtctttatgagaagctttccgagaagcactctcagaatggcttcattgtccctccacccccggagaagagcctcatagggatgacaaaagtgaaagttgggaaggaagattcttcttctgcagaatttcttgaaaaacggagggccgctttagaaaggtaccttcagaggattgtaaatcatcctaccatgttacaggaccctgacgtcagagagttcttggaaaaagaagagctgccacgtgccgtgggtacccagacattgagtggtgctggtctcctcaagatgttcaacaaagccacagatgccgtcagcaaaatgaccatcaagatgaatgaatcagacatttggtttgaggagaagctccaggaggtagagtgtgaggagcagcgcttacggaaactgcatgctgttgtagaaactctagtcaaccataggaaagagctagcgctgaacacagcccagtttgcaaagagtctagccatgcttgggagctctgaggacaacacggcattgtcacgggcactctcccagctggctgaggtggaagaaaaaattgagcagctccaccaggaacaggccaacaatgacttcttcctccttgctgagctcctgagtgactacattcgcctcctggccatagtccgcgctgccttcgaccagcgcatgaagacatggcagcgctggcaggatgcccaagccacactgcagaagaagcgggaggccgaggctcggctgctgtgggccaacaagcctgataagctgcagcaggccaaggacgagatcctcgagtgggagtctcgggtgactcaatatgaaagggacttcgagaggatttcaacagtggtccga

SEQ ID NO: 251232 - DNA, 838 bp, Homo Sapiens
  misc_feature (51)..(51): n is a, c, g, or t
  misc_feature (63)..(63): n is a, c, g, or t
  misc_feature (183)..(183): n is a, c, g, or t
  misc_feature (368)..(379): n is a, c, g, or t
attcccatacacaagcaacaggcaagcagggagacaaatcatgaatgactntcattcacattngctacaaagagaaaaaaaatacctaggaatacagctaagaaagaaagtgaaggacctcttcaaggagaaccacaaacaactgctcagagaaatcagagtggacacaaaacagatggaganacattccatgctcatggagaggaagaatcagtatcattaatatgggcatattgccctaagtaattcatagattcaatgctattcccattgaactactgacattcttcagagaattagaaaaataaaaacctttaaagttcatatggaaccaaaaaagagcccaaatagccaagccaaccttaagnnnnnnnnnnnngctggaagtgtcactctacctaacttcaaactatactagaagagtacagtaacaaaaacagcatggtactggtatagaaacagacacatagacaaatgaaacaaagtagagaacctagaaataaagccaaaaccctacaacaacctgatttttgacaaagtcaacaaaaacaaggaattagggaaatgtctccctattcaaaaaatggtgctaggagaactggctagccatatgcagagaatttaaactggaacccttcctaacaccatatacaaaaattaactcaagatggattaaagacttaaatgtataacccaaaactataaaacccttagaagaaaaaatccagataataccattcaggatataggcatgagaaaagactttatgacagaaagacaaaaagctatagcaacaaaagcaaaaattgactaatagggtctaattaaactccagagc

SEQ ID NO: 251233 - DNA, 1541 bp, Homo Sapiens
  misc_feature (70)..(115): n is a, c, g, or t
  misc_feature (134)..(174): n is a, c, g, or t
  misc_feature (425)..(437): n is a, c, g, or t
  misc_feature (782)..(791): n is a, c, g, or t
gacggctgcggcggcagcaggagacgcagcggcggccgcagcagcagcagcaagacggactcgtggagannnnnnnnnnnnnnnnnnnnnnnnnnnnnnnnnnnnnnnnnnnnnnaggctgggggggagtcgtnnnnnnnnnnnnnnnnnnnnnnnnnnnnnnnnnnnnnnnnnaggtgactgaggagagaggcgcctcctcgctcccgccaccgccggacttcaatgcccagtccccagctcgccagcgtttttcgttggaatatacgttgcacatttatggcgattctgagtgtgagggcagacttctgccaggctcagcacagcattttcgctgacaagtgagcttggaggttctatgtgccataattaacattgccttgaagactcctggacaccgagactggcctcagaaatagttggcnnnnnnnnnnnnnaattgcaagcatatttcttttaatgactccagtaaaattaagcatcaagtaaacaagtggaaagtgacctacacttttaacttgtctcactagtgcctaaatgtagtaaaggctgcttaagttttgtatgtagttggattttttggagtccgaaggtatccatctgcagaaattgaggcccaaattgaatttggattcaagtggattctaaatactttgcttatcttgaagagagaagcttcataaggaataaacaagttgaatagagaaaacactgattgataataggcattttagtggtctttttaatgttttctgctgtgaaacatttcaagatttattgannnnnnnnnnttcactttccccatcacactcacacgcacgctcacactttttatttgccataatgaaccgtccagcccctgtggagatctcctatgagaacatgcgttttctgataactcacaaccctaccaatgctactctcaacaagttcacagaggaacttaagaagtatggagtgacgactttggttcgagtttgtgatgctacatatgataaagctccagttgaaaaagaaggaatccacgttctagattggccatttgatgatggagctccaccccctaatcagatagtagatgattggttaaacctgttaaaaaccaaatttcgtgaagagccaggttgctgtgttgcagtgcattgtgttgcaggattgggaagggcacctgtgctggttgcacttgctttgattgaatgtggaatgaagtacgaagatgcagttcagtttataagacaaaaaagaaggggagcgttcaattccaaacagctgctttatttggagaaataccgacctaagatgcgattacgcttcagagataccaatgggcattgctgtgttcagtagaaggaaatgtaaacgaaggctgacttgattgtgccatttagagggaactcttggtacctggaaatgtgaatctggaatattacctgtgtcatcaaagtagtgatggattcagtactcctcaaccactctcctaatgattggaacaaaagcaaacaaaaaagaaatctctctataaaatgaataaaatgtttaag

SEQ ID NO: 251234 - DNA, 482 bp, Homo Sapiens
attggtttaaaccctgttaaaaacccccaaattcccttgaaaaacccccggttgcctgtgttgccagtgccattgtgttgccaggattggggaagggcaccctgtgcctggttgcaccttgcctttgattgaatgtggaatgaagtacgaagatgcagttcagtttataagacaaaaaagaaggggagcgttcaattcccaaacagctgctttatttggagaaataccgacctaagatgcgattacgcttcagagataccaatgggcattgctgtgttcagtagaaggaaatgtaaacgaaggctgacttgattgtgccatttagagggaactcttggtacctggaaatgtgaatctggaatattacctgtgtcatcaaagtagtgatggattcagtactcctcaaccactctcctaatgattggaacaaaagcaaacaaaaaagaaatctctctataaaatgaataaaatgtttaaagagg

SEQ ID NO: 251235 - DNA, 825 bp, Homo Sapiens
  misc_feature (195)..(205): n is a, c, g, or t
ggggcttacacagtatggccggcgacattagctagcgctcgctctactctctctaacgggaaagcagcggaatacaagagactgaactgtatctgcctctatttccaaaagactcacgttcaactttcgctcacacaaagccgggaaaattttattagtcctttttttaaaaaaagttaatataaaattatagcnnnnnnnnnnnggaacctgaactttagtaacacagctggaacaatccgcagcggcggcggcagcggcgggagaagaggtttaatttagttgattttctgtggttgttggttgttcgctagtctcacggtgatggaagctgcacattttttcgaagggaccgagaagctgctggaggtttggttctcccggcagcagcccgacgcaaaccaaggatctggggatcttcgcactatcccaagatctgagtgggacataccttttgaaggatgtgcaatgttcaatcataagtgtgacaaaaactgacaagcaggaagcttatgtactcagtgagagtagcatgtttgtctccaagagacgtttcattttgaagacatgtgggaaccaccctcttgctgaaagcactggttccccctggtgaaccttgctaaggattacagtgggtttgactcaattcaaagcttccttttattcccggaagaaatttcatggagccttcccccccaagggtacccacaccgggaatttccaggaaaaaaataaagtttcctaaaggccattttccccaatgggagccaccttttggaatggggactaatgaattcctgactggtgggaacttataaacctcgg

SEQ ID NO: 251236 - DNA, 772 bp, Homo Sapiens
  misc_feature (13)..(13): n is a, c, g, or t
  misc_feature (399)..(423): n is a, c, g, or t
  misc_feature (721)..(721): n is a, c, g, or t
aaattaccccccnggaggagaagattgcccagcctcagtaatatagtttggaatctgacacccagcgcccattgacctcctacacctcctttgaggtcatagcccaaaccaaagggtacactcatatttgtgcactttactgaaatagatgaacatttcagtaggttctcaacttaaaattaagcctaacctaaaactgccagcaacacaactggagtttccatttatcataattagtttttctaaatagacccttatgggagtttgaaaataaatactcacatatttcactacttaaattattcccaagatttgaatttattttaaaattttaatagccaccaagaatgtggacatatgaaaattcaagaacctaaaaaataccagttttgaatgagnnnnnnnnnnnnnnnnnnnnnnnnnaattattacaaatctatgtgtaaaatctagatatttgaagtttgagatctgatgagaatggttgttataaactttattttaaaaccaaatttaggtgttcttacatatttaaatactggaaagtcattataatagttttggttctttgaattggtagacaattagtagagtataattggttaggaggcagggcttattcagtggttattaaccgctgacatcagacaaacccgaatctgtagaattctaaccttctaacacctgtgacagtattaccactcttcttgtattatagatntagaactgatttactcaattgcactcttaactaatggttaaagcttacttg

SEQ ID NO: 251237 - DNA, 1032 bp, Homo Sapiens
  misc_feature (362)..(362): n is a, c, g, or t
  misc_feature (364)..(365): n is a, c, g, or t
  misc_feature (371)..(371): n is a, c, g, or t
  misc_feature (378)..(378): n is a, c, g, or t
  misc_feature (382)..(382): n is a, c, g, or t
  misc_feature (385)..(385): n is a, c, g, or t
  misc_feature (395)..(396): n is a, c, g, or t
  misc_feature (398)..(398): n is a, c, g, or t
  misc_feature (404)..(405): n is a, c, g, or t
  misc_feature (407)..(407): n is a, c, g, or t
  misc_feature (411)..(412): n is a, c, g, or t
  misc_feature (416)..(416): n is a, c, g, or t
  misc_feature (421)..(421): n is a, c, g, or t
  misc_feature (423)..(423): n is a, c, g, or t
  misc_feature (433)..(450): n is a, c, g, or t
  misc_feature (452)..(452): n is a, c, g, or t
  misc_feature (471)..(471): n is a, c, g, or t
  misc_feature (481)..(481): n is a, c, g, or t
  misc_feature (487)..(487): n is a, c, g, or t
  misc_feature (491)..(491): n is a, c, g, or t
  misc_feature (494)..(494): n is a, c, g, or t
  misc_feature (496)..(497): n is a, c, g, or t
  misc_feature (502)..(502): n is a, c, g, or t
  misc_feature (515)..(601): n is a, c, g, or t
  misc_feature (614)..(614): n is a, c, g, or t
  misc_feature (617)..(617): n is a, c, g, or t
  misc_feature (625)..(625): n is a, c, g, or t
  misc_feature (629)..(629): n is a, c, g, or t
  misc_feature (632)..(632): n is a, c, g, or t
  misc_feature (676)..(676): n is a, c, g, or t
  misc_feature (691)..(691): n is a, c, g, or t
  misc_feature (700)..(700): n is a, c, g, or t
  misc_feature (719)..(719): n is a, c, g, or t
  misc_feature (1004)..(1004): n is a, c, g, or t
tatgagatatgaagtctaccagctggctcggaaatgtaattaaaacttttttttcttacacatggagatacttattcacatatcaaaaacactattgtcttcaatgagaatttaacttgattaggaggttatgtagatttacttaattttaaaagctagatgttcagtattgcaaatggagtttttcctactataattgtcataatttgtctaatatatgtttatttcatattttggaaaaagagtataccagtaattctatcattttaaactgttttcagattcattgggcttttgccagctctttttagattgtcctcttgagacctgtttacagaggtaatggccagagtgcacaggcncnncccccngagaccncccnccngatgggaagnnanccagannancccnncccngacananatgcctgggnnnnnnnnnnnnnnnnnntnccgcgtcccccctgtcccncggcggcccncctggnagtnccncnnttctngccccctgctttnnnnnnnnnnnnnnnnnnnnnnnnnnnnnnnnnnnnnnnnnnnnnnnnnnnnnnnnnnnnnnnnnnnnnnnnnnnnnnnnnnnnnnnctgctccgccccnccnccgcttgnctcnccncccctgacggccgcccccggtcctccggccgccttctccgcccngccctttccgccccnctgggtccncccccccctgccgctctcngcgcgcgtccttctaggcaatgaacacatcaagtgcagaagcgcaaaggttggctggttgcagtgttgcagaatcgagaagaggccattgagcacggggtgagatgaaaaagagcttcctcacaacttgaagcttctagcagaagaacttaaaaagctcaaagcagagtttttggaagacctaaaacaaggaaacaaaaaatataatgtgctttcagcaaaccattgacataccagatgtcatttctttttttcattatgagaaagataatattgtacagaagtntttttcaaagcagcattaaaatttctga

SEQ ID NO: 251238 - DNA, 829 bp, Homo Sapiens
ggcctgggtggcgaattcggcacgagggtgggctgaggggcagcggcttaggctccggcgtctgcaggggtcgccgagctaacccgtggctaggcgagtggggcggggcggccggcaccatgtcgaggcaggcgaaccgtggcaccgagagcaagaaaatgagctctgagctcttcaccctgacctatggtgccctggtcacccagctatgtaaggactatgaaaatgatgaagatgtgaataaacagctggacaaaatgggctttaacattggagtccggctgattgaagatttcttggctcggtcaaatgttgggaggtgccatgactttcgggaaactgcggatgtcattgccaaggtggcgttcaagatgtacttgggcatcactccaagcattactaattggagcccagctggtgatgaattctccctcattttggaaaataaccccttggtggactttgtggaacttcctgataaccactcatcccttatttattccaatctcttgtgtggggtgttgcggggagctttggagatggtccagatggctgtggaggccaagtttgtccaggacaccctgaaaggagacggtgtgacagaaatccggatgagattcatcaggcggattgaggacaatcttccagctggagaggaataaccatccctacaactcgaggatagccatcaggagcactgttggaatcagcaggcctctgtgctccctctgccctccagaactcagtgactcttggaacatgggatggtatatattccttataacctgtttccattctccattccaataaagagcagactgcgatatag

SEQ ID NO: 251239 - DNA, 1071 bp, Homo Sapiens
  misc_feature (336)..(410): n is a, c, g, or t
  misc_feature (449)..(537): n is a, c, g, or t
  misc_feature (577)..(637): n is a, c, g, or t
gggagtgccggtcggtcttgtgggctgaggggcagcggcttaggctccggcgtctgcaggggtcgccgagctaacccgtggctaggcgagtggggcggggcggccggcaccatgtcgaggcaggcgaaccgtggcaccgagagcaagaaaatggtaacttggagcgcgtgacctcggcgggcggggcgaaattgaggcgtacagggaaggggcccggcgccgagcgcgaggtgcgtttggaaaagggccttcctgtgagctctgccaaggggaagcctcttgctgggtcactccgggggcgttccaggcaggtgaggggacccgtcggagaagttnnnnnnnnnnnnnnnnnnnnnnnnnnnnnnnnnnnnnnnnnnnnnnnnnnnnnnnnnnnnnnnnnnnnnnnnnnntccgcctttttcccggtcttccctctctggtgccccacnnnnnnnnnnnnnnnnnnnnnnnnnnnnnnnnnnnnnnnnnnnnnnnnnnnnnnnnnnnnnnnnnnnnnnnnnnnnnnnnnnnnnnnnntgtcgacgccgcgacgcgcgtacagcgtagcggacaccgnnnnnnnnnnnnnnnnnnnnnnnnnnnnnnnnnnnnnnnnnnnnnnnnnnnnnnnnnnnnngcccataatcacgccctcctagactcacctctccctcttcccacaccctcctactatttatacctctcacccgctcaccatcgcttcttcctctctacgcgccccttgttcgcgccgcaatggcactcccgccccctttaccttcacacctagccccgcgcttacaccttgctgcctcatggcccacgcccccgtcggcctctcgtcgctcaccctttgcttctcccctcggcctgttgtccttcgcgcgccgcgcgccgcttgccatctgtatattcaccgcgccctgctaccccccaccactctattttcgcctctccccgccgcccacgcgtatcgcgcctccgccgtccgccctctctggctgcttcccccttgttgcgcccttctccctcgcgccccgtctgattccccgtctccactctcttcatgcg

SEQ ID NO: 251240 - DNA, 947 bp, Homo Sapiens
  misc_feature (75)..(76): n is a, c, g, or t
  misc_feature (82)..(82): n is a, c, g, or t
  misc_feature (799)..(799): n is a, c, g, or t
gctaagtttctccttaagggttggagccattgtcttatgcaacagaatgttggcgctgtcaatcttgtccttgtnngaaacnagccccccttttttggatgctgtggatgagtcagttatgccccatccccactggttccctagaggctgtggccaggcagctaccccttcattttcccactgtcccccaggtccagatggctgtggaggccaagtttgtccaggacaccctgaaaggatgacggtgtgacagaaatccggatgagattcatcaggcggattgaggacaatcttccagctggagaggaataaccatccctacaactcgaggatagccatcaggagcactgttggaatcagcaggcctctgtgctccctctggccctccagaactcagtgactcttgaacatggatgttatatattcttataacctgtttccattctccattcaaataaagagcagactgcgatatagtccatttaccccatgtgtgcacattcaggagcgacagtctctgcccccattcccttgagaggggctggatgtaatcacctttggttggactagaaagagctcaaaccattttacattcctgtttgaatttttccaaagcaaaactcactttgaccccattaagaggcaagcctggcacatctatccctgggcctttagaaagccatttgcctcaaatggctatagggttgtgggggtggagggaaggaaaggctgggagggagtggggaggaattgctagctgtagtgtgacacattgtagtgtttgccaggaaaggagccnagtcatgccggaaacactgacttctgggaagccacccaggtctcattcctccctgctgttggaggcaacatctcctctttttacagagggtacatccttttttcttacaaattcttcaataaagacacattcttgagtgaaatcccaa

SEQ ID NO: 251241 - DNA, 653 bp, Homo Sapiens
  misc_feature (525)..(525): n is a, c, g, or t
  misc_feature (552)..(602): n is a, c, g, or t
  misc_feature (641)..(641): n is a, c, g, or t
attgggggtgaatatcagggtcaagctacttgcagtggacagtgcaggcagctctggggcaatatagccttgaggccttggatgagtgcactggggagtcccatgcctcattatcaggttgtggtggtggtgagtgctaggagacgttcttgcacactgtaaggaatgttatgttgtagggagaaggagaggcagctgctcaaggcacctcagaccctcgttagtgttagtggctgggagggtgctaaacctttaaccgtaactggagttcatacatagaacatacatacatatgtgtatagatatttccaaagttgtagatttacagtttttaaaatttgtttgcatatgaaaaaatattttttaaagtgaacaaaaaataatttaaatttactacactgtcaaaatactagattctttttgctttatttgataatattgatagcaattaaaacagccaaaatactagattctttttgcgttatttgataatactggtagaaattaattaggtataagtgtatnttttctaattgctattttactgaaagnnnnnnnnnnnnnnnnnnnnnnnnnnnnnnnnnnnnnnnnnnnnnnnnnnngggcaatgaaatctctaatccagaatggggtagtcttanaatagcgcaaaa

SEQ ID NO: 251242 - DNA, 706 bp, Homo Sapiens
cgcccacagtgaatgccacatctctgcagtcaaacatccttccaccacagcggccttccaggtggatttctactgttgctccttcgtttggatttgaatatccctctcctttccgtttggttctccggataatgcctccatcttcaaataaatcctctcctttgaaatcaaggagctcaatctcaaaaaagagagttgcattcgagggaattttagggagactgccagccgagccatatgcatattctggtttgcacagtaaatggcatatctctcctttcttcatggtagccaccccaatgtcccatgccttgatgacttggcctttgccaagactaaagacaaatggttcatttctatcatgactggaatcaaacttctttccatttgacaattttcctttgtaatggacataaactttgtctccaatcatcggcgtttcctcaccattccccactcttttgacaatctttaatactcccctgtcttttttggaggtaatatcctctccctgctcagcaacagtggctgtggggctttcttcattgttcttggcaccttcatcagtagtcattgtcttttaagtagagaacctgtcgccgcgggggctcgccgactccgtcactctccgccttgcccgtgctccgctaacccttcagcccgcccagcaggccgcccgcgcgccggacaccgccgcccgagactc

SEQ ID NO: 251243 - DNA, 916 bp, Homo Sapiens
  misc_feature (628)..(628): n is a, c, g, or t
  misc_feature (648)..(648): n is a, c, g, or t
  misc_feature (657)..(657): n is a, c, g, or t
  misc_feature (742)..(783): n is a, c, g, or t
gggagtcacccgagcagctattcaatggcagagactgcctggcagctctttagaaagttgtgtgacgtatgaaccagttcttccctatatgagagtgtaccgtacatcgcaggctgtccagcatcgaccccactgatggatgctagtagtcctccccgccagcactcaacattgtgacagtcaaaaacatcctctctacattttcaatgcccctgttggggtagcaggactcccactgagagaccccagtagagatggtaagtggaggcagagcagcacctctcacacttccatgtgcccttgaatgcccccacggatcttgctaacatgcagatttaggatgtctggggtggagcctgagaatctgcatttctaccagctgttcttggacccaggctggcgagatcagaggaagaagaaatgaccttgggtttaggtagcaaagacttcacagaaaagaagggaacataaacaaggttttgaagaatacatggaggtggagctgatgacatcccacgaggtgcaggctgctgggaggcaggcacactggaccagcggagagggatccgtacgtagcaaactgtgcccatagtgagcaaacagccttgagccaacagcaacagcactnctgggcacagagggtaaaantaacaactncctactggggttgagtctgccagaccctggcaaagttcatttctttcaataaatccagcagcgtcccctttgataaatactgtcnnnnnnnnnnnnnnnnnnnnnnnnnnnnnnnnnnnnnnnnnnggggcccacttgcgcttcatggttaaatactgcatgtgtgtatacacaaggcagactcacagcggggccaagtttaattttgccgggggttgaggatgggctaaacccttaagggtttcgtttttaccggttt

SEQ ID NO: 251244 - DNA, 1765 bp, Homo Sapiens
accttgtacaatagagcttataggctaatgagaagacaggaagaaacaacaggaacacatatagctggaatgcagatgggatctgtgctacttacgctagccatgggatgattagaacaagataagagacatgaggaagacttcttcaaggaggtgctcaagccatgttttggaaaagagaactcaaggtctggcagggagaaaggagcaagagtagactttgagtctttgcttcagatgcagatcaagatgtggcaacctgttgtggagaactgggtcccttgagcctgtgctgtctctttttttctggtggctttgtcatttggaacaatgcataatgggctggaagctgagaaactctgagctgagggcaagtagaactgcagctgtctggcgccactgtaatgctgtctcctcctctgagtgagttcatcctggaaacattttctcccataagacatgcacaggtcttacgtttacatgtttcactgaaagaaatttgattccactgctgggatgacaaggaagactgaagaaacctaatcctaggtgctgccactgggacaaacaagaagcaccagacacagtgctgttttagggtggggcagaattatgctgagggaaaagttattatcactctttaaggccaaggaaaccacaatttttaaagaagcttctagaaattctacccagtagaaaataaagataaacttctgtaaggaatttcattcttttcagaattcgcaatctgaaatgtagaagcccattccttcatggtcctcatagatatttagtgtgactgaggggtcagtggactcatagcactcaggccaggcttctcctgagtccctttctttggcacagagggagtgattcacagatcctctacccccaaaggcattgtttcctcatctcaacaagaatccagcacccgtcattttatcagcaacacgtcactagcttctcaagtggagactactctgaagtgatctgtgtttggaagaatgccttttccccttccccttacgtaactaagaggatgaaaaagggacactcactccctatatgaaagctgtgtattgtaagcagtcatcttgcctggctgagaactctaggatctttttctctgctctcctttaggctgacactcatagccagaccttctgtttattagccccctgaatctatttgaaaatatttttgctttcattataatataagtcacattcttcttgatctgccgctgcattttccaaaagggttatgtcaagggaaattcaacactcacttttctcattatttgcttaccagcttgctcactcatcaaaataccagagttatttgatacttcagaagattatttccccctttagatgatgtgtcaagggaaggggagctggccccagtatcaggtgacagaattttcttcgcatttctactgttgactcaataaatgcccttgggcaagtcatggagcctcttcatactttggtctctagggataaaatctgccaaccgcagcatgtgtatttgaacctcagtgtcctctggaataaaaataggaggggaccaggtgtccatgtgaccccaagctgatgggaagaggatgaccataggacttcaaaatgtccttgagctgtaaattctgtaatagggtcaggcccaccagtggccttcaggcatttgtccagtggtgtatggataagttctagcacttgagttttttcagcacaaaggaggcactatgtcaacctcccacccatgg

SEQ ID NO: 251245 - DNA, 571 bp, Homo Sapiens
gtagacttcatacaatagagcttatacgctaatgagaagacaggaagaaacaacaggaacacatatagctggaatgcagatgggatctgtgctacttacgctagccatgggatgattagaacaagataagagacatgaggaagacttcttcaaggaggtgctcaagccatgttttggaaaagagaactcaaggtctggcagggagaaaggagcaagggcaagtagagctgcagctgtctggcgccactgtaatgctgtctcctcctctgagtgagttcatcctggaaacattttctcccataagacatgcacaggtcttacgtttacatgtttcactgaaagaaatttgattccactgctgggatgacaaggaagactgaagaaacctaatcctaggtgctgccactggggacaaacaagaagcaccagacacagtgctgttttagggtggggcagaattatgctgaggggaaaagttattatcactctttaaggccaaggaaaccacaatttttaaagaagcttctagaaattctacccagtagaaaataaagataaacttctggtaagg

SEQ ID NO: 251246 - DNA, 731 bp, Homo Sapiens
  misc_feature (685)..(685): n is a, c, g, or t
agtgtgtagaccttgtacaatagagcttataggctaatgagaagacaggaagaaacaacaggaacacatatagctggaatgcagatgggatctgtgctacttacgctagccatgggatgattagaacaagataagagacatgaggaagacttcttcaaggaggtgctcaagccatgttttggaaaagagaactcaaggtctggcagggagaaaggagcaagactgcctggcagctctttagaaagttgtgtgacgtatgaaccagttcttccctatatgagagtgtaccgtacatcgcaggctgtccagcatcgaccccactgatggatgctagtagtcctccccgccagcactcaacattgtgacagtcaaaaacatcctctctacattttcaatgcccctgttggggtagcaggactcccactgagagaccccagtagagatggtccccaagcatgctaaccatgaagcagtgatatcgcacagcacctgcttccagcagccccgagccaaggggcgcttttaacccccactacgcgtcttccgtccaattctcctcagtccccatttagtgagcttctggtgtttctgcccaggatatctctaacaaagaccaagatattatcaggagacttttccacatttctttagcccttgggactgatgaatgacacttctggactgngggtggagcttgtagtacacctgggccatcaattaatctaatccgg

SEQ ID NO: 251247 - DNA, 1089 bp, Homo Sapiens
  misc_feature (606)..(606): n is a, c, g, or t
  misc_feature (624)..(624): n is a, c, g, or t
  misc_feature (641)..(641): n is a, c, g, or t
  misc_feature (648)..(648): n is a, c, g, or t
aaatgaaaagataatttatcaaccagcttaggttaaaaattccacagtaagactggctccaggcatagctggcatttagggctcatatatagtgttattagaacacaggttttttgcttttttgttctcagctttcagatctgccaattgcgttgttacaattaatcccagcttcctgtagccacaagaggatggtagcagcttcagccacacaccttctctggtgtacattatagagggaaaagtgagaccctctttcctggaagtacctggaaagatctcactgcctctcataggttccacctgggtcatgttcccatccctgaattggtcatgtggtcacgaaataggataaaatgattggcccaggtgtgactcacatgctccaccccacagtccgagaagtgtcatttcatcagatccccaaagactgagaggagagtgggagaagttctcctgataaatatcttggttctttgttagagatatcctggggcaaaaacaacagaagctcactaaaatgggtactggaggagaatggaacgaagacgcgtagtgggggttaaaagcttacacactagagaggcagagaacctaaaagagaantgctgactctttccattntgccccttggctccggnctgctgnaagcaggtgctgtgcgatatcactgcttcatggttagcatgcttggggaccatctctactggggtctctctgactgtcacaatgttgagtgctggcggggaggactactagcatccatcagtggggtcgatgctggacagcctgcgatgtacggtacactctcatatagggaagaactggttcatacgtcacacaactttctaaagagctgccaggcagtcttgctcctttctccctgccagaccttgagttctcttttccaaaacatggcttgagcacctccttgaagaagtcttcctcatgtctcttatcttgttctaatcatcccatggctagcgtaagtagcacagatcccatctgcattccagctatatgtgttcctgttgtttcttcctgtcttctcattagcctataagctctattgtacaaggtctacacact

SEQ ID NO: 251248 - DNA, 463 bp, Homo Sapiens
  misc_feature (48)..(48): n is a, c, g, or t
cccgggtaactatatatgtcctgcccttgcctgaactccctccctacnctttagtccatgccatggggagtgtagaggaggaaaaaacttttttccctccttcccccccgggttcctcccagctgggggccctgccaaatgaagactgaacaaaaggcagtccagcgccctgggtgcctgcagtgcccctctctctctgcacaggaactgtgacagccttcagggagaagaggacctaggaggaggagaaagatcccagaaattgactattgattcaaggagtcgtgagttttaaagcaaaagttatcttgaattgataggttcagttttgtggaaataaatagtcacattttatttttacccctgagatactgaactatggtggttatataaatttcatatccactatacaacttttagtttctgcagactggatttcagtagtagaataaaatctgttgag

SEQ ID NO: 251249 - DNA, 574 bp, Homo Sapiens
cgggagtgaaagttgatctattaaatactggtaacatttgttttgcagggaaattggctaaagaagtaccatctctatttcatcactgtttcctcaagtacatgattcgttagtttttcttttcgactaagcatagaataagaattttctcatttgattattataaaagtaggcaaggcaagtatgtattgtgtaaagtaaaccgaggcatggaaggttgaggtgactggtcctagggcagacaactaataacccagctggggctatatacccggagttagccaaactgcaagatttacagggccagtcctctgcacaagctcaccttcacttctgtatattcagtagtattactgaatactgaagtaatactgaagaagtattactgaatagttgtcgaagctattagttatttttaatttcctaaaaacacatgtttcaggtcaaggttgagaaaaaattcatcctatggatatttttataccattattgtttgaaattaacatctcttgagaaaatgaaatttaacaattagaagtttattatttctcaatgaaataaaattaaaagatta

SEQ ID NO: 251250 - DNA, 774 bp, Homo Sapiens
  misc_feature (657)..(705): n is a, c, g, or t
ggggctgaaggcggggaaagatgataaaggaaaaaggaaacgaaaaagttctacatctggctcagattttgatactaaaaagggcaaatcagctaagagctctataatttctaaaaagaaacgacaaacccagtctgagtcttctaattatgactcagaattagaaaaagagataaagagcatgagtaaaattggtgctgccagaaccaccaaaaaaagaattccaaatacaaaagattttgactcttctgaagatgagaaacacagcaaaaaaggaatggataatcaagggcacaaaaatttgaagacctcacaagaaggatcatctgatgatgctgaaagaaaacaagagagagagactttctcttcagcagaacgcacagttgataaagacacgaccatcatggaattaagagatcgacttcctaagaagcagcaagcaagcgcttccactgatggtgtcgataaactttctgggaaagagcagagctttacttctttggaagttagaaaagttgctgaaactaaagaaaagagcaagcactctcaaaaccaaaacatgtaaaaaagtacaggatggcttatctgatattgcagagaaattcctaaagaaagaccagagcgatgaaacttctgaagatgataaaaagcagagcnnnnnnnnnnnnnnnnnnnnnnnnnnnnnnnnnnnnnnnnnnnnnnnnntaattcaaatggaacaacagtatgaatcttcatctgatggcactgaaaagttacctgagcgagaagaaa

SEQ ID NO: 251251 - DNA, 1468 bp, Homo Sapiens
  misc_feature (694)..(749): n is a, c, g, or t
  misc_feature (1271)..(1329): n is a, c, g, or t
gggaaaggagatagttgtgactcttcagaggataaaaagagtaagaatggagcatatggtagagagaagaaaaggtgcaagttgcttggaaagagttcaaggaagagacaagattgttcatcatctgatactgagaaatattccatgaaagaagatggttgtaactcttctgataagagactgaaaagaatagaattgagggaaagaagaaatttaagttcaaagagaaatactaaggaaatacaaagtggctcatcatcatctgatgctgaggaaagttctgaagataataaaaagaagaagcaaagaacttcatctaaaaagaaggcagtcattgtcaaggagaaaaagagaaactccctaagaacaagcactaaaaggaagcaagctgacattacatcctcatcttcttctgatatagaagatgatgatcagaattctataggtgagggaagcagcgatgaacagaaaattaagcctgtgactgaaaatttagtgctgtcttcacatactggattttgccaatcttcaggagatgaagccttatctaaatcagtgcctgtcacagtggatgatgatgatgacgacaatgatcctgagaatagaattgccaagaagatgcttttagaagaaattaaagccaatctttcctctgatgaggatggatcttcagatgatgagccagaagaagggnnnnnnnnnnnnnnnnnnnnnnnnnnnnnnnnnnnnnnnnnnnnnnnnnnnnnnnntcaagtcaattctgaatcagattcagattctgaagaatctaagaagccaagatacagacataggcttttgcggcacaaattgactgtgagtgacggagaatctggagaagaaaaaaagacaaagcctaaagagcataaagaagtcaaaggcagaaacagaagaaaggtgagcagtgaagattcagaagattctgattttcaggaatcaggagttagtgaagaagttagtgaatccgaagatgaacagcggcccagaacaaggtctgcaaagaaagcagagttggaagaaaatcagcggagctataaacagaaaaagaaaaggcgacgtattaaggttcaagaagattcatccagtgaaaacaagagttttacttctttggaagttagaaaagttgctgaaactaaagaaaagagcaagcatctcaaaaccaaaacatgtaaaaaagtacaggatggcttatctgatattgcagagaaattcctaaagaaagaccagagcgatgaaacttctgaagatgatannnnnnnnnnnnnnnnnnnnnnnnnnnnnnnnnnnnnnnnnnnnnnnnnnnnnnnnnnngtaattaaaatggaacaacagtatgaatcttcatctgatggcactgaaaagttacctgagcgagaagaaatttgtcattttcctaagggcataaaacaaattaagaatggaacaactgatggagaaaaacagaaaagag

SEQ ID NO: 251252 - DNA, 816 bp, Homo Sapiens
  misc_feature (616)..(616): n is a, c, g, or t
taaattcaaggaagtgcttgaatttcttacagactgccaaattgaacagacaagcaggttgtcttgtgttaaagaaaatgaggtgtgagtcagttactcccggaggcaatgctgctgttcagctcttctgtttttgtggccagggtcttcatgaacactaataggggtaccaggccctcttcctcgttagaagaaatcaggataacaaaggcatattgggcacccctacaaaagggaaaacagttcctcctgaggatttcagagaagagctggacttcctggctgactctcacattctcttcttctgaactgcttcttctggtagctccctgtcactttggacaagctcgcactgccctccttggctgttctggaactgtgtgatggacttcatcctactaggacacagttgcttcttgaattccccagataaacacccacccgtgtgaatgacaagccataataaaaattaattgtcaaaattaatcaacaaggtcccaaacaagattgagagccaggggacagaagtgccaccggtaattatatagtcacaggcagacctacgaggatgttcatctttcctcttaaggacaacttggaagttacagacgtttcnttagaacttaaaaagtttgatagccccttacccaaagaaatagaagcattggaaaatatgttaaagaaatttctatgaaattagaacaaaatgacttattttgcaagagaaaaaataagtaaaagcctaactctgggaagtccacatccatctaataggtgttccagaatcagaaaaagagatgaggtgaagacattatc

SEQ ID NO: 251253 - DNA, 494 bp, Homo Sapiens
atgaaccactgtgcccagtctatatataatagattttagaagaaatttctgccactcagtgactgctttaaattctagagacagaggctgagagaaaccttagtagcccgcctgcgcatacggcaagtacagactatataacaagttgaaagagaatcacccctggtatataatattttaaaacatgaaaaaggcattactattgttctggtctaagtactctaacaggacgatgatttctaaccctagcatcatgacatgtatatagtgtgttgtaagacatttgccagctaatagttacagtactgaagcttgtgaatacgttaattgagaaaactttaagcaggttcaaagttatcccatgatagtggcattcttatttgtatatatgtgctttccttttttatttgtatcaaggcatttaaaatgaatatatgtaacatgtacctaagttttaaaagcataataaaatgaacacatctgaaaccaccaaa

SEQ ID NO: 251254 - DNA, 806 bp, Homo Sapiens
  misc_feature (29)..(29): n is a, c, g, or t
  misc_feature (437)..(455): n is a, c, g, or t
ctgggatttctctgataagcctagcttcntaagggatttaaaatttctttaacttatgcttattcaaatacacatttatctcatctataaaccaaggcacaactctacttatctgatcagacaggcacaagagagagcctcaacttagaaatcagtggaagagcagaagtcaaataattgtttaactgaatgtatgttcctggtaaggaataaaatgacaatctaattccctgcatggagcattgcacagctgttaccctgaaacatctacttaccagatcaccgtctacttaattctgcctatattatttaaaaatgtcttaaaagaaaatcactgtctcattggggaatgccggtgcaatagcaataataatacttagttctctgtgcctggggtgaattgaaaataatatttttgatattaacatttagaatannnnnnnnnnnnnnnnnnncttctgcctttggttaataacatccactaaggggaattaagaatgaaatttcttgaagtgtagtttttaccaattgccttgaaatgagaatatttagtggccatctggtccacaaggaaccacacaagtcaagtcaattcccaattaatggtgtctgtgtctctcaggcagatggagagtatcctcagcaaggcagccaagtttactgaggatcatgttagaaatttcataccccggggcataactgatgacttaaagaaaaagttgttgtcaaatctctcggaaactctctagagaggtcagctaggacctccatgctgatatttctcaacctacataaaaatcaccttc

SEQ ID NO: 251255 - DNA, 321 bp, Homo Sapiens
  misc_feature (289)..(289): n is a, c, g, or t
agggtggtaatttttcctcagaggaaaattaatcaccaagaaacgaaaaactggtatgaataaatctgtcgcttctgctgaagttcagcatattgtaaaccacccaagttcaacaccattcaaataccaataaggtttgtacggtattctatggagctttttttatttccctgctttatactttctacctcattaaattctcatcacatccttgtgaagtatatatgttacaataaaaaaagggaaactgaggctcaaaagctaagttacctattccaaggtcacaaanccaatgtgtggcaggcctgagattcaagccca

SEQ ID NO: 251256 - DNA, 2039 bp, Homo Sapiens
  misc_feature (1531)..(1550): n is a, c, g, or t
ctaatggaaaggactttgatggaaacctggagaagctctttgctgagtgtcatgtaattaatccaagtaaaaagtctcgaacacgccagatgaatacaaggtcatcagcacaggatatgccttgtcagatctgctacttgaactaccctaactcgtatttcactggccttgaatgtggacataagttttgtatgcagtgctggagtgaatatttaactaccaaaataatggaagaaggcatgggtcagactatttcgtgtcctgctcatggttgtgatatcttagtggatgacaacacagttatgcgcctgatcacagattcaaaagttaaattaaagtatcagcatttaataacaaatagctttgtagagtgcaatcgactgttaaagtggtgtcctgccccagattgccaccatgttgttaaagtccaatatcctgatgctaaacctgttcgctgcaaatgtgggcgccaattttgctttaactgtggagaaaattggcatgatcctggtaaatgtaagtgggttaaagaaatggattaaaaagtgtgatgatgacagtgaaacctccaattggattgcagccaacacaaaggaatgtcccaaatgccatgtcacaattgagaaggatggtggttgtaatcacatggtctgtcgtaaccagaattgtaaagcagagttttgctgggtgtgtcttggcccatgggaaccacatggatctgcctggtacaactgtaaccgctataatgaggatgatgcaaaggcagcaagagatgcacaggagcgatctagggcagccctgcagaggtacctgttctactgtaatcgctatatgaaccacatgcagagcctgcgctttgagcacaaactatatgctcaggtgaaacagaaaatggaggagatgcagcagcacaacatgtcctggattgaggtgcagttcctgaagaaggcagttgatgtcctctgccagtgtcgtgccacactcatgtacacttatgtcttcgctttctacctcaaaaagaataaccagtccattatctttgagaataaccaagcagatctagagaatgccacagaggtgctctcgggctaccttgaacgagatatttcccaagattctctgcaggatataaagcagaaagtacaagacaagtacagatactgtgagagtcgaacaaagggttttgttacagcatgtgcatgaaggctatgaaaaagatctgtgggagtacattgaggactgagaatggccctgcataaaatgaactctgaaaactttaccatctagagtgctcatgcaattaaaacaaaacaaacacaaacaaggaggcactaagcctattctgacaccactggtctgtagtaccagaattgttttgttaatggaaagtttaagtaaattatattgtaataaaaaggtagataaaccattgtacaacagtattctaggccgccaacaaaagtgtgacagacacactaaaagccctccaactttaacttgtaacgtagcttcattctcaaagctgactccnnnnnnnnnnnnnnnnnnnncctgagtgtagtacagttaaaatttcaaacagctccttgacactgcttttcatgttcaaaccagccattttgttgtactttggtaaaggacctcttccccttcctcccctacacatacagatacacccacacacagactgactctctttctctcataccccaaggtcatgagtgaatgatgcttagttccttgtaaagaaaatcttgggatgcggaaaggggtaggcagcaagaggattcaacaaacgaaaaacataaaaacctttggatatgactttttaaaacaagaggacaacacagtattttttcaaaattggatataccgcatatgcatggacaaagcaagcgtggcacgtgtttgcataatggttaattaccaaaaaatatttattctttatttcccgggttggggttgggataaaggtgtgtcggtttagcacctctggaagacctatctagagctctttcactttcctgagggtattttgc

SEQ ID NO: 251257 - DNA, 932 bp, Homo Sapiens
  misc_feature (28)..(28): n is a, c, g, or t
aactgtaaagatttctcactgatctgancccattctcagtaacagttttgaaatataaggaaaagtacatgaatggaggaaaataaattaatactaactaaaaactctgctctactctaagaatgtaatactatatgcataagcaactatctcaaagaactacacagtattttaataaaaatgctttttttatactgtaaatagccagactaaaacaatggaataaatatgctttggaaataatttccaactccatatggctttaagcattatgatattcaggtgaaattaaacaattacacaaaagagccatttgtgattatggaactaatttttagtataggttggcttgaaggatttgacctaaaatttatacaagttaaaaatgtaataaaatattgtggatttaatataaacagaagtgtaataggatctaccagattttcatactaaaacaaaatattgtacctttgttattaaaagcaagaatttggatggtatcatgtatgtgtttataaaattctaccatatgagtgattaaaaaaatccaagttcatgcagttataaagtctttagtattctgaaaagtaaactgtagtgtaatatgtattaacattaagtacctatacaaaagacatgattgctaaggtccaaatttggactgcttttatacagcgacaacatctacaacgacgacgacaaataaagttccgtacattaaatcagaaccagtaattgaaggaggtactattttatataaagtagtaaatcaggcaatacctgtcttatatacattgaataaaaactatcccttgaaattttattatttaaatacccaaaaacacaagtcaccgtatgttattaaatgtatgtctgaacttatttataaggagaaggttgacaaatataattctcattttgtggctaacgcc

SEQ ID NO: 251258 - DNA, 1362 bp, Homo Sapiens
  misc_feature (1277)..(1277): n is a, c, g, or t
cggcacgaggaaaatgaatactaatacatcttcatagatttgctgtgacaactcaatgaaataatgcatataaagcacttagccagatacctggaatgtagtaagtactcaagatttgttagccgtgttactggaacatttttccccacattataattgtttttatagtaaagaaatagaaggaacttgttctgcttttaatctgattttctcttttttattttgtcttcatcttattcagtgtctttttccttggagccatccttgtaataacagctacttttttgtatggttatgatcccaaacctgcaggaaatcccactaaagcatagttgtatactatctttaactggtttttcacgatggggcactaggaatctcgacattaatcttgcacagaggacttctacagagtctgagaagatatcatcatgctgaatctgatcatactgtgttttaaaagtttaaggataagacatgtgtatatgtaacaaaacacattgcatctagaaatcaaaacttgaaagtatttccagggattaggattagaaggaatattagaggaaacttgaaatctgagtttaaaaagattttacctttttgattgctgcagaaatgtcctatgcactctttgcaagagcacacaacaaatgtcagataccaatttttgcaaattagatttaatcttattaaatgtttttatcttactctttctgtacagatatatcaaatcacatgaaatatttaaagtttgaaaattataattacctataaagctgtgaaaaatagaagtataatttgaaaaaacatttcacttatcagagatttttatatttatacaaaagattactaaatgaaggattgctaaatgtttttggttcaattacataaaaattaatattctgggtctgatctgtcagagaataaatatcaaatctaaatttaatgtagagatacatactatttctccatatgaattttaagatattttagtgcttcaagactgctgaaagcaatccagttgctcctgtgctagatggtagccagagaattttatagtaatggaggttagcccttaatctcttcattgcatttcatttctgtaaatcagattaagtccttaatattattttaaattaaaatttgtgtgtaattgccattaaattttcaaaatgtaatttttaaggattaaatactcatttaataatttaaaataattattgtataatatctacatttggagaattttgaactatcaagcatatactgtatacagntagaaagttattaaatgaacattttactcattgatctgtaaaaacttctttaatctacaactgtttacaaaaacaacattcaaac

SEQ ID NO: 251259 - DNA, 968 bp, Homo Sapiens
ccaaatatatgtgccgatacagctgttgcccattatttttcatgaaacttgtgtcttgtctgcaaattttttctctttttatctttaggtcagctacatccggtattattctgatccctcgaagctttgccctattgtcatgacgatccatgagattatgcattacttccaagaccaactgtctcagttcgtagtcctccatgagagatggtgataacaaaggatccaggaaagaccctggcagtgcagtaacaatcgtcttcgctttatatcccagaggtcaccataagcaaagatctcagcaacattatctgaattctcctggttcccaaatcccctagttgactgatatccaaagtatgggtagatgttccaaagacaggtactttcccccataatgaacatcatggatttctgacctcttgataatctggtaggttacttccaaaaaatcctattgtttgggatgatagcattctgcacaatcttctcatcattgtcttttggaacttgtatttaagtcgacactgcctacagatcccccctgtaaatcatttgcttcgaattcaacgctgagacgcagatgtttcaaaagggtattgaagacttccagcactgtcggacctatggaacctttagcagcaatggcaacagcctctaacagaacctgaataatacctgctcgaacccggggagcatcttttttacgagcatcaaggtgtcctagaatctcctggatcacatggtgagaatactgagcctgaatggaatacattataattttaaagcagtgaactgcaaattcattgggatcccacagtttgtgatgatctaaatgcgcaaaaactggtctaacagcattattcatattcccaaaagtcactcaaccagtaagtagcaaactggggattaaaatccaggtaggtctccatgcaaagcccctgctcttccttctatagtatggtact

SEQ ID NO: 251260 - DNA, 368 bp, Homo Sapiens
caggggaagcgttgcaacatagccccctccatcatccttcacctcctatcccccactccaaaccaggacgacctgcaaggtcccagccagcaggacgacgcgtgggcactctggcaaatgaaaaaatggaacctggtcttgagctgaatcaatgtgttattgttacccccacccccggtttacctgatcagtgttaacctttactgggacactcatctgttacactggaacaccttcttctttttgtcaatcggcacagaccactgtaaggaaatgcagtgtgttgcagtggccttttctccccctcaccttctaaggtcagctctagctgagcatcagtgctctcttaaggaggaaaaaaacggtgc

SEQ ID NO: 251261 - DNA, 672 bp, Homo Sapiens
gggagtgctcgcgaggtttcgtcttcccggaagcgttggaggacattccctgttgactgcgtcgcgatgtgtggcgactgtgtggagaaggaatatcccaaccggggtaatacctgcctggagaatggatctttcttactgaactttacaggctgtgcagtgtgcagtaagcgggattttatgctgatcacaaacaaatccttgaaagaagaagatggagaagaaatagttacctatgatcatttgtgtaagaattgtcatcatgtaatagccagacatgagtatacattcagtatcatggatgaatttcaggagtataccatgctgtgtctgttatgcggcaaagccgaagatactatcagtattctccctgatgacccccgacaaatgactctcttattctaaggatccttctacagatctgttataactatattgtgttggtttacaatacagcaagcctgatggtttgtcttatttcattcatactgaaaattctttgcatattttttttctgcttagacttacttattctttgaggaaaaaaggtaatgtaggagctcattgttctctagagctgagctcttctgctaaagttcaaagttcacatcagtgtagccagagtgaagcatctttgttagcagttatgtggtcagaaaacaactagaatgg

SEQ ID NO: 251262 - DNA, 481 bp, Homo Sapiens
  misc_feature (31)..(31): n is a, c, g, or t
  misc_feature (118)..(130): n is a, c, g, or t
  misc_feature (430)..(430): n is a, c, g, or t
  misc_feature (461)..(461): n is a, c, g, or t
tatatagtttgggttataacccaatactacntttattttgttactcaaattgctccagctgtggcctttcagagatccttcagttcgatcatgctgacatactcccaatcactatgannnnnnnnnnnnnaatttcagtacttcatttttctgtggcacaagatactctaggctcatcttgtatagttcatatcccagctctagaatcagttcattttctaaggagccctggttgcttttattggaaaccaaaatctgggcaccaggtgtgctcccattctagttgttttctgaccacataactgctaacaaagatgcttcactctggctacactgatgtgaactttgaactttagcagaagagctcagctctagagaacaatgagctcctacattaccttttttcctcaaagaataagtaagttctagncggaaaaaaattatggcaaggattttccgtntggatgaaataggacaaacc

SEQ ID NO: 251263 - DNA, 1006 bp, Homo Sapiens
gcgaggaagtgttaattgatatcccgcgcaaaagccccttttacgaatggagggtttgggaaagggcttccagggagttgtataagggtggatgggcgcacccccgggggggccaggacccaccatgggccacttgggtttttatggggagggctgtccaggcttccaaagggattgtttcaaaatcaagggccaagcattcgtgccacattcttcttgctctggggggtggcctgtagcaccccggatgccccagtggatgtcgggaaaggcttcgggcctcctccaagggacacccacaaccactgactgctccttccctgcagaagccaggaacccaactttcagggttggaggtaggctgggtgtggaaaactgtgccaccatgaggtcctggtcaattgtgagcaacttccagctcccacctgaccctccagctgtgagggaggtcacagtgcccacttgggtgtccacagcaaacaggtcctgccggctgcgctgagccgagtcaaagaccactctctggctgtcagctgaccagcatcccaaaggcagaaggctgcagtagatcccagagaagttctctcccagctgccgaggcacaacatctaccaccactgaggtaaccttggtataccagtcatacaggcacagctggctgcattggtgatgggggatcagagatgggtactgcaggtagacaatgcgacattggtctgggctcagccggggagaagagacagccagggagtcatccgagaggagctcacacttccccccgatgaggtccacgtaatacagggctgacctgcgattggtgcaaaagcggatgcccaaccggaagggctcatgccaccagcccacaaacaccacaccagcatctccaggggcccaaaatgcctgtccaggggacacattctcagggaccccctcaagcacagagatgttgccactctcgacatccagcacgcagagcacaggcctcgtgccgaattcgccacccagg

SEQ ID NO: 251264 - DNA, 2004 bp, Homo Sapiens
attcggcacgagggagaagaaccggaagctcaagagcttcaacctgtcagcgctggagaaacatgggcctgtttatgaggatgactgctttggctgcctgtcctggtcgcactcggagacacacttgttgtatgtggcagagaagaagcgccccaaggccgagtccttctttcagaccaaagccttggacgtcagtgccagcgatgatgagatagccaggctgaagaagccagaccaagccatcaagggggatcagtttgtgttttatgaagactggggagaaaacatggtttccaaaagcatccctgtgctctgcgtgctggatgtcgagagtggcaacatctctgtgcttgagggggtccctgagaatgtgtcccctggacaggcattttgggcccctggagatgctggtgtggtgtttgtgggctggtggcatgagcccttccggttgggcatccgcttttgcaccaatcgcaggtcagccctgtattacgtggacctcatcggggggaagtgtgagctcctctcggatgactccctggctgtctcttctccccggctgagcccagaccaatgtcgcattgtctacctgcagtacccatctctgatcccccatcaccaatgcagccagctgtgcctgtatgactggtataccaaggttacctcagtggtggtagatgttgtgcctcggcagctgggagagaacttctctgggatctactgcagccttctgcctttgggatgctggtcagctgacagccagagagtggtctttgactcggctcagcgcagccggcaggacctgtttgctgtggacacccaagtgggcactgtgacctccctcacagctggagggtcaggtgggagctggaagttgctcacaattgaccaggacctcatggtggcacagttttccacacccagcctacctccaaccctgaaagttgggttcctgccttctgcagggaaggagcagtcagtgttgtgggtgtccctggaggaggccgagcccattcccgacatccacctggggcatccgggtgctacagccacccccagagcaagagaatgtgcagtatgctggccttgactttgaagcaatcctgctgcagcctggcagccctccagataagacccaagtgcccatggtggtcatgccccacggggggccccattcatcctttgtcactgcctggatgctgttcccagccatgctttgcaagatgggctttgcggtactactagtgaactatcgtggctccacgggctttggccaggacagcatcctctccctcccaggcaatgtgggccaccaggatgtgaaggatgtccagtttgcagtggaacaggtgctccaggaggaacactttgatgcaagccatgtggcccttatgggtggttcccatggtggcttcatttcctgccacttgattggtcagtacccagagacctacagggcctgcgtggcccggaaccccgtgatcaacatcgcctccatgttgggctccactgacatccctgactggtgcgtggtggaggctggctttcctttcagcagtgactgcctgccagacctcagcgtgtgggctgagatgctggacaaatcgcccatcagatacatccctcaggtgaagacaccactgttactgatgttgggccaggaggaccggcgtgtgcccttcaagcagggcatggagtattaccgtgccctcaagacccggaatgtgcctgttcggctcctgctctatcccaaaagcacccacgcattatcagaggtggaggtggagtcagacagcttcatgaatgctgtgctctggctacgcacacacttgggcagctgaagccctgccattctgcatgagctgatcagcctgtgccacacttcgctcttgaggagctcaacggtctggcagggcagcaggaggctttctgggctctggactccacggatgcgtgggcagaggaatgtgggctatgtagtcataataaattaggacacagaaa

SEQ ID NO: 251265 - DNA, 1446 bp, Homo Sapiens
aagcaggcggtaccggtccggaattcccgggatatcgtcgaccacgcgtccggcaactatcaccagaagcacaggcaaggatcaatgcccggcttcagcagtatcgtgccaaagcagaactagctcgatctaccagaccccaggcctgggttccaagggaaaaattgcccagaccactcaccagcagtgcttcagctattcgtaaacttatgcggaaagcagaactcatggggatcagtacagatatctttccagtggacaattcagatactagttctagtgtggatggaaggagaaaacataagcaaccagctctcactgcagattttgtgaattattattttgagagaaatatgcgcatgattcaaattcaggaaaatatggctgaacaaaagaatataaaagataaattagagaatgaacaagaaaagcttcatgtagaatataataagctatgtgaatctttagaagaactacaaaacctgaatggaaaacttcgaagtgaaggacaaggaatatgggctttactaggcagaatcacagggcagaagttgaatataccggcaattttgcgagcacccaaggagagaaaaccaagtaaaaaagaaggaggcacacaaaagacatctactcttcctgcagtactttatagttgtgggatttgtaagaagaaccatgatcagcatcttcttttattgtgtgatacctgtaaactacattaccatcttggatgtctggatcctcctcttacaaggatgccaagaaagaccaaaaacagttattggcagtgctcggaatgtgaccaggcagggagcagtgacatggaagcagatatggccatggaaaccctaccagatggaaccaaacgatcaaggaggcagattaaggaaccagtgaaatttgttccacaggatgtgccaccagaacccaagaagattccgataagaaacacgagaaccagaggacgaaaacgaagcttcgttcctgaggaagaaaaacatgaggaaagagttcctagagagagaagacaaagaccagtctgtgttgcaaaaagaaacccaaggctgaagatttaagaactgaatgtgcaacttgcaagggaactggagacaatgaaaatcttgtcaggtgtgatgaatgcagactctgctaccattttggctgtttggatcctcctttgaaaaagtctcctaaacagacaggctacggatggatatgtcaggaatgtgattcttcatcttccaaggaagatgaaaatgaagctgaaagaaaaaatatatctcaggagctcaacatggaacagaaaaatccaaagaaataaaagattttctgtagtgtttttgaaaagtttgcagcttatgtaatagcagataaaatttctaattgtaaaatgttaaattgtaaaatctaatttgcaaaatgttctcaataaagtcattcaaaatg

SEQ ID NO: 251266 - DNA, 1086 bp, Homo Sapiens
  misc_feature (126)..(126): n is a, c, g, or t
  misc_feature (894)..(1030): n is a, c, g, or t
  misc_feature (1033)..(1033): n is a, c, g, or t
  misc_feature (1036)..(1036): n is a, c, g, or t
  misc_feature (1040)..(1040): n is a, c, g, or t
  misc_feature (1042)..(1042): n is a, c, g, or t
  misc_feature (1051)..(1051): n is a, c, g, or t
  misc_feature (1072)..(1072): n is a, c, g, or t
  misc_feature (1077)..(1077): n is a, c, g, or t
tgggaattgaatgtttctgtggaaggaagcgtgaccgtaaccaggccaacccagaaaggctttctttctgagatttcacttccctgtcaactcttcagctcggtaagtgtcctggcactggttggngctcccccgcactatggtattctctggacgcaaaggggcgcgtgccatgcagccccctactagcaacaagggcttccgggggagaggggagcagtggtgtggaagtggtttcctgcggcgctcttgctgaaggaaatgacgtcgatgacaggcgccccccgcggcctacccagctgctccctggttcgccagagacagcttaatcccgtctctgaaatgcgtttgctggctgggagcctagaagggatagtgggcgaggctccgccccgtggtggggcgctttccgtcggcgtgtgttttggggttgccatcggcccgtagtatgtgaaaagtgagtttgcaaagaatcagtgggaaatctgtactctaaagggccggaaagcgtgttatggacccgccacttcgtggctagagaccgtgggctttacctctttaaagctgccttacctcatttttcctgcaaagggctgacgtcgctgaactctctgaaatgtagagagcctgaggggaagttgctgcaggtgctgtgagctgaggacagttttataaagatcgaagtgttacttgatttcactgaaatactttaaatttgggaatttttctacagatatgaagaggatggcaacacattacttgtcactttctgaaagaatttcatctgccccttccattcccaaccctctgcccaaaaggcttgacaacttgaagtgaacaaagggcttttcgctcatccacgtttagtccgcatgtcttttagaagggcattcnnnnnnnnnnnnnnnnnnnnnnnnnnnnnnnnnnnnnnnnnnnnnnnnnnnnnnnnnnnnnnnnnnnnnnnnnnnnnnnnnnnnnnnnnnnnnnnnnnnnnnnnnnnnnnnnnnnnnnnnnnnnnnnnnnnnnnnnntgnggngatncngttatccantactggggggtgagcagagantattnaccagaagg

SEQ ID NO: 251267 - DNA, 945 bp, Homo Sapiens
agtgatggatttagagaagaaaaaaattataaacttaaagagactggatatgtagtggaaaggcctagcactacaaaagataagcacaaagaagaagacaaaaattctgaaagaataacagtaaagaaagaaactcagtcacctgagcaggtaaagtctgaaaagctcaaagacctctttgattacagtccccctctacacaagaatctggatgcacgagaaaagtctaccttcagagaggaaagcccacttaggatcaaaatgatagcgagtgattctcaccgtcctgaagtcaaactcaaaatggcacctgttcctcttgatgattctaacagacctgcttccttgactaaagacaggctgcttgctagtacacttgtccattctgtcaagaaggagcaagaattccgatccatctttgaccacattaagttgccacaggccagcaaaagcacttcagagtcatttattcaacacattgtgtccttggttcatcatgttaaagagcaatacttcaagtcagctgcaatgaccctaaacgagcggttcacttcgtatcagaaagccactgaagaacatagtactcggcaaaagagccctgaaatacacaggagaattgacatctcaccaagtaccctgaggaagcatacccgtttagcaggggaagagagagtttttaaagaagaaaatcaaaagggagataaaaaattaaggtgtgactctgctgaccttcggcatgacattgatcgccgtagaaaagaaagaagtaaagaacggggagattccaagggctccagggaatccagtggatcaagaaagcaggaaaaaactccaaaagattacaaggaatacaaatcttacaaagatgacagcaaaaatgtatttgtcttttacacggcttatggtggatgaggacaaaaactttggaatagcaagctaacactg

SEQ ID NO: 251268 - DNA, 1253 bp, Homo Sapiens
  misc_feature (1007)..(1118): n is a, c, g, or t
  misc_feature (1127)..(1141): n is a, c, g, or t
cggccggggggaaataggaaagctgcaaaacactgtggagtgctcccgtgtaaataaaaagaggaaaaaagtttctcaagtcgccgctgcacgacgtctggccggcgctggagcgggggtctgcgctctcccgagcggccgcgcgcttggactttattgtgccgcaaccagccccagttcccattgtttgtgtttttttcaaaatatggcaaaggttcaggtgaacaatgtagtggtgctggataacccttctcctttctacaacccgttccagttcgagatcaccttcgagtgcatcgaggacctgtctgaagacttggaatggaaaattatctatgtgggctctgcagaaagtgaagaatacgatcaagttttagactctgttttagtgggtcctgttcccgcaggaaggcatatgtttgtatttcaggctgatgcacctaatccaggactcattccagatgcagatgcagtaggcgtaactgttgtgctaattacttgtacctatcgaggacaagaatttattagagttggctattatgtaaataatgaatatactgagacagaattaagggaaaatccaccagtaaaaccagacttttctaagcttcaaaggaatattttggcatctaatcccagggtcacaagattccacattaattgggaagataacacagaaaaactggaagatgcagagagcagtaatccaaatctacagtcacttctttcaacagatgcattaccttcagcatcaaagggatggtccacatcagaaaactcactaaatgtcatgttagaatcccacatggactgcatgtgaccacctaccatccctttagtacaaattaagctattaaaaatacacagaactatttccctgaaattccgtaagtacatagtcaaaacacaatgtgaagaatttgtttaaaaacatcctgtagaaagtttataagaaaaccagtatttgaacaaattgtggaatataaatacaactatttttaagtaannnnnnnnnnnnnnnnnnnnnnnnnnnnnnnnnnnnnnnnnnnnnnnnnnnnnnnnnnnnnnnnnnnnnnnnnnnnnnnnnnnnnnnnnnnnnnnnnnnnnnnnnnnnnnnncctggcggnnnnnnnnnnnnnnnaaaaagttttaaaaacctttctttggggccggggccccaaaaggaagggaaacggggcaaatactggttcccaagagaaaaccgggcaaggaaaagggttgggattccccac

SEQ ID NO: 251269 - DNA, 459 bp, Homo Sapiens
aacactgtggagtgctcccgtgtaaataaaaagaggaaaaaagtttctcaagtcgccgctgcacgacgtctggccggcgctggagcgggggtctgcgctctcccgagcggccgcgcgctggactttattgtgccgcaaccagccccagttcccattgtttgtgtttttttcaaaatatggcaaaggttcaggtgaacaatgtagtggtgctggataacccttctcctttctacaacccgttccagttcgagatcaccttcgagtgcatcgaggacctgtctgaagacttgggaatgggaaaattatctatgtggggctctgcaggaaagtgaagaatacgatcaaagtttttaagactcctgtttttaagtggggtcctgtttccccggcaggaaagggcatatgttttgtaattttcaaggctggatggcacccaatccaggggttcatttccagatg

SEQ ID NO: 251270 - DNA, 417 bp, Homo Sapiens
acttaaaaatagttgtatttatattccacaatttgttcaaatactggttttcttataaactttctacaggatgtttttaaacaaattcttcacatatgtgttttgactatgtacttacggaatttcagggaaatagttctgtgtatttttaatagcttaatttgtactaaagggatggtaggtggtcacatgcagtccatgtgggattctaacatgacatttagtgagttttctgatgtggaccatccctttgatgctgaaagggaatgcatctgttgaaagaagtgactgtagatttggattactgctctctggcatcttccagtttttctgtgttatcttcccaattaatgtggaatcttgtgaccctggggattaagatggcaaaatattcccttggaagcctaagaaaaggtc

SEQ ID NO: 251271 - DNA, 830 bp, Homo Sapiens
atcgttttctctcgtgcaatggcgtccgggctggtaagattgctgcagcagggacatcgctgcctcctggctccagtcgcccccaagctggtccctccggttcggggagtgaagaagggattccgcgccgccttccgcttccagaaggagttagagcggcagcgccttctgcggtgcccgccgccgcccgtgcgccgttcagagaagccgaactgggattaccatgcagaaatacaagcttttggacatcggttacaggaaaacttttccttagatcttctcaaaactgcatttgttaatagctgctatattaaaagtgaggaggccaaacgccaacaacttgggatagagaaagaagctgttcttctgaatcttaaaagtaatcaagaactatccgaacaagggacatctttttcacagacttgccttacacagtttcttgaagacgagtacccagacatgcccactgaaggcataaaaaatcttgttgactttctcactggtgaggaagtcgtgtgtcacgtggctagaaacttggctgtggagcagttaacactgagtgaagaattcccagtgcccccagctgtgttacagcagactttctttgcagttattggagccctgttacagagcagtggacctgagaggactgcacttttcatcagggactttcctaattacctcaaatgactggaaaaagagctcttttgagatgtggaagataataaatcccatggggctatttgcgaaaataactggagcaacagggaaggttttaagttcccggaatccagacttaacttaggccgcccggttggcaccacagcctt

SEQ ID NO: 251272 - DNA, 921 bp, Homo Sapiens
gttacaagttaaatatttgctcaaccagggaattgtactgccccagatcgtaactggagttgcagccaaccttgtcaatgccctcgccaactatctgtttctccatcaactgcatcttggggtgataggctctgcactggcaaacttgatttcccagtacaccctggctctactcctctttctctacatcctcgggaaggcctccttcctccgcctggccatccccagcatgctcatgctgtgcatggagtggtgggcctatgaggtcgggagcttcctcagtggcatcctcggcatggtggagctgggcgctcagtccatcgtgtatgaactggccatcattgtgtacatgagacatcattaatctggtggctcaagtggttccaatttatgctgtttcccacctctttgaagctcttgcttgcacgagtggtggtgttctgaaggggagtggaaatcagaaggttggagccattgtgaataccaatgggtactatgtggttggcctccccaatcgggatcgcgctgatgtttgcaaccacacttggagtgatggagcaatgccccatgtgctcaccaagcaccatggctggatccttggagggcaatgggtggccagtgcccttctcatcaccctcatcgcactccgcagcctccacctccctccttgtgcagccttagctctgtgcccccacagagctccccacaaggccatacacgtggtcggtgtgaacagcacagaaggaagggggcggacttgagcaccttcccacatttggaagaaaaaacttaatccacagcatctgaaattaccagagctaatctttttaaaaagtacggaaataaatgactgcccagctttgatttctaaaataataatttggaacatattggcagttaataaatgatgatatgaaaacc

SEQ ID NO: 251273 - DNA, 276 bp, Homo Sapiens
catattaatatttgagaagtaaaaaataaaactacaaggaggtattacatctttaccttatttgcaaaaatgaaatgatctaatgatactaagttttggtgatgatgtcagctcttacattgaaaacaatcactgtggaaaaatttgtccctcagtaaatttaaagataaacatgctcaaaacctagcaattgcactctgaagtatacatctttgcaggttatctttcattacagttatttttttccctgtcaggaccctaactaatacaatgcct

SEQ ID NO: 251274 - DNA, 735 bp, Homo Sapiens
  misc_feature (92)..(92): n is a, c, g, or t
tgtgcgttccaagtctccttcaatgatcaccaacttacgagccacctcttcatacttcctatctgcctcttctgcaatgtgcttagcttctntgagttgggatttcctggagttccatcttttcttcatcttttaaggcccggttttcaataaccttcatacctctctcactctcatcagcagctttttcagcttcttccagcttttgcagggcagtggccaggcgctcctgagcacggtccagctcttcttcaaccagctggatcctacggttcaaggaggccacctcagcctcagcatcagcagccttcttctctgccagttccagcttctcctgggcatccttcaaagcttcagaatacttgtccagctcatcctctgtccctttcagcttcttctgcatggctgccagctcatcctccagctgtttacttctttcttctgcctgcttctgctcagcttcagcttgctctgcccgatccagagcattctccttgtctaacttcagcatctgcatctttttcttgatggcctccatcatgagcagtggctgttggtaggctcacctgtgaacactggagaactggagactggggcaagaaagaaggggctgctgcctgagtgaccaggaggtccccagacttgagtctttatctgtgctcatagctccaccttttgttcctaatatggtctttccagctccctccgccccatcattgttctcctgggggaacc

SEQ ID NO: 251275 - DNA, 632 bp, Homo Sapiens
  misc_feature (97)..(109): n is a, c, g, or t
cgtctctaagcatatgtggacgggacaacattttcccccacgggaaacacgttatgccctatgttctcccacaaggctccagagtttggaccaagcnnnnnnnnnnnnncctcggaaaggggccattggtgttgggacccgggaaatcggcccattagggcggggacgtggtttttgcccttgtttaaccatgtaaaactcatcccataaccctttttggggtttaaaactccggctcaagaaggcccatctcaattgtgttttgaacaagtaagtgctggaaaaaatcttgaaaagcttatggaaaaaactttttaaatttaaaattattttaaaactttgctttgggtttgtggcacccgggccaccccatttggttgtgaaagcctttacagtccgtgggctggcagtttgttgatcttttaagtttccttcccaacccagtccccattttttggtaaggtttttagaaggtttgttaggtggacatcctgcagcttattggcttaaaaaggactcccctttaagggggtctctttggggccgattgggaaaaaaagaaatcaaaagggcaactgttttgaaactgaaaattgacaagggtctttttgaaataaaaaaccagtcccccc

SEQ ID NO: 251276 - DNA, 1836 bp, Homo Sapiens
  misc_feature (1402)..(1402): n is a, c, g, or t
  misc_feature (1458)..(1471): n is a, c, g, or t
  misc_feature (1641)..(1641): n is a, c, g, or t
  misc_feature (1784)..(1784): n is a, c, g, or t
cggaattcccgggatggaggctgcaacgccgagcggaggaggcaggaaccggagcgcgagcagtagctgggtgggcaccatggctgggatcaccaccatcgaggcggtgaagcgcaagatccaggttctgcagcagcaggcagatgatgcagaggagcgagctgagcgcctccagcgagaagttgagggagaaaggcgggcccgggaacaggctgaggctgaggtggcctccttgaaccgtaggatccagctggttgaagaagagctggaccgtgctcaggagcgcctggccactgccctgcaaaagctggaagaagctgaaaaagctgctgatgagagtgagagaggtatgaaggttattgaaaaccgggccttaaaagatgaagaaaagatggaactccaggaaatccaactcaaagaagctaagcacattgcagaagaggcagataggaagtatgaagaggtggctcgtaagttggtgatcattgaaggagacttggaacgcacagaggaacgagctgagctggcagagtcccgttgccgagagatggatgagcagattagactgatggaccagaacctgaagtgtctgagtgctgctgaagaaaagtactctcaaaaagaagataaatatgaggaagaaatcaagattcttactgataaactcaaggaggcagagacccgtgctgagtttgctgagagatcggtagccaagctggaaaagacaattgatgacctggaagataaactgaaatgcaccaaagaggagcacctctgtacacaaaggatgctggaccagaccctgcttgacctgaatgagatgtagaacgccccagtcccaccctgctgctgctcctccctctgacccagactccgcctgaggccagcctgcgggaagctgacctttaactgagggctgatctttaactggaaggctgctttctcctttcaccaccccctccttccctgtgtctttttcgccaaactgtctctgcctcttcccggagaatccagctgggctagaggctgagcacctttggaaacaacatttaagggaatgtgagcacaatgcataatgtctttaaaaagcatgttgtgatgtacacattttgtaattaccttttttgttgttttgtagcaaccatttgtaaaacattccaaataattccacagtcctgaagcagcaatcgaatccctttctcacttttggaaggtgacttttcaccttaatgcatattcccctctccatagaggagaggaaaaggtgtaggcctgccttaccgagagccaaacagagcccagggagactccgctgtgggaaacctcattgttctgtacaaagtactagctaaaccagaaaggtgattccaggaggagttagccaaacaacaacaaaaacaanaaatgtgctgttcaagttttcagctttaagatatctttggataatgctatttctannnnnnnnnnnnnncattagacgttaccaaattaaaaatggaagacctctgagaccaaaattttgggccatctcttacccccctcacaactgcttacaggaatggaatatgtcccccttatgttggagggaccacttaattgctttcctgccttcttggaaagaaaaaagaaaggaaactgggnttttgtcccttgatttaaccatgtgaaactaaactcattacccttttttgggttgaaactgctcgctctaaagagccccccaaatgggctttgataaggacaggcggaagaatttgataagcttagtaccaaatttgtaattnaaattattttgaacctttgtttgggtttgggccccctgccacccactgggtg

SEQ ID NO: 251277 - DNA, 1729 bp, Homo Sapiens
  misc_feature (547)..(644): n is a, c, g, or t
  misc_feature (1273)..(1286): n is a, c, g, or t
  misc_feature (1339)..(1361): n is a, c, g, or t
  misc_feature (1615)..(1615): n is a, c, g, or t
  misc_feature (1642)..(1643): n is a, c, g, or t
  misc_feature (1715)..(1715): n is a, c, g, or t
  misc_feature (1723)..(1723): n is a, c, g, or t
ggtgggtggcgtgggggtccccgcgctcgcgcccccctaccttgcgtgtcgcagccgggcctgtgcggtctggttgttcgttctcttcctcccttttcgtttcttttgcgcgcggtctggtcttgctctgtctgtctctttcggccctgggttttatctctagttccccgtgtctacttctgatttcgctcgttaggcggtctccgctgctctcgtccccctcccctgtcctcgttccgcgctccttctcgttctgcctgtctttcggttgtcttccgtcttgcgtccgcttgccgtttgctctgagtgatcgccgcgcgggtgccggcgtacggctctctatcgaccgctgtcgtttctgtctcttcttctgtcgcatgttccgtgcggcttgtgtgctctgcccttcgttcactggtagtggctctgttcttctcctgtttctcccgtctcttctgttttgtgctttctgctgtccctgtggttttgtgtatgtcttgtgctcctgtgtgggccttcgtcgtgtaccactagatccgtgggttcnnnnnnnnnnnnnnnnnnnnnnnnnnnnnnnnnnnnnnnnnnnnnnnnnnnnnnnnnnnnnnnnnnnnnnnnnnnnnnnnnnnnnnnnnnnnnnnnnnggagggactggttctttatttcaaaaagacacttgtcaatattcagtatcaaaacagttgcactattgatttctctttctcccaatcggccccaaagagaccacataaaaggagagtacattttaagccaataagctgcaggatgtacacctaacagacctcctagaaaccttaccagaaaatggggactgggtagggaaggaaacttaaaagatcaacaaactgccagcccacggactgcagaggctgtcacagccagatggggtggccagggtgccacaaacccaaagcaaagtttcaaaataatataaaatttaaaaagttttgtacataagctattcaagatttctccagcactgactgatacaaagcacaattgagatggcacttctagagacagcagcttcaaacccagaaaagggtaatgagatgagtttcacatggctaaatcagtggcaaaaacacagtcttctttctttctttctttcaaggaggcaggaaagcaattaagtggtcacctcaacataagggggacatgatccattctgtaagcagttgtgagggggtagagatgggacaaaattttggtctcagaggtcttaccatcttaatttggtaacttctaatgnnnnnnnnnnnnnntagaaataacattatccaaagatatcttaaagctgaaaacttgaacagcacannnnnnnnnnnnnnnnnnnnnnngctaactcctcctggaatcacctttctggtttagctagtactttgtacagaacaatgaggtttcccacagcggagtctccctgggctctgtttggctctcggtaaggcaggcctacaccttttcctctcctctatggagaggggaatatgcattaaggtgaaaagtcaccttccaaaagtgagaaagggattcgattgctgcttcaggactgtggaattatttggaatgtatttacaaatggttgctacaaaanacaaaaaggtaatacaaatgtgtacanncaacatgctttttaagacatatgcatgtgctcacattccttaaatgtgtttcaaggtgctcagctctagccngctgattntcggga

SEQ ID NO: 251278 - DNA, 1170 bp, Homo Sapiens
  misc_feature (31)..(31): n is a, c, g, or t
  misc_feature (58)..(58): n is a, c, g, or t
  misc_feature (599)..(612): n is a, c, g, or t
  misc_feature (665)..(687): n is a, c, g, or t
  misc_feature (1032)..(1032): n is a, c, g, or t
  misc_feature (1066)..(1066): n is a, c, g, or t
  misc_feature (1070)..(1070): n is a, c, g, or t
  misc_feature (1095)..(1095): n is a, c, g, or t
  misc_feature (1104)..(1113): n is a, c, g, or t
  misc_feature (1125)..(1126): n is a, c, g, or t
  misc_feature (1135)..(1135): n is a, c, g, or t
  misc_feature (1139)..(1140): n is a, c, g, or t
  misc_feature (1154)..(1155): n is a, c, g, or t
  misc_feature (1159)..(1159): n is a, c, g, or t
gacacttgtcatattcctatcaaacagttgntctattgatttctctttctcccaatcngccccaaagagaccacataaaaggagagtacattttaagccaataagctgcaggatgtacacctaacagacctcctagaaaccttaccaaaaaatggggactgggtagggaaggaaacttaaaagatcaacaaactgccagcccacggactgcagaggctgtcacagccagatggggtggccagggtgccacaaacccaaagcaaagtttcaaaataatataaaatttaaaaagttttgtacataagctattcaagatttctccagcactgactgatacaaagcacaattgagatggcacttctagagacagcagcttcaaacccagaaaagggtaatgagatgagtttcacatggctaaatcagtggcaaaaacacagtcttctttctttctttctttcaaggaggcaggaaagcaattaagtggtcacctcaacataagggggacatgatccattctgtaagcagttgtgagggggtagagatgggacaaaattttggtctcagaggtcttaccatcttaatttggtaacttctaatgnnnnnnnnnnnnnntagaaataacattatccaaagatatcttaaagctgaaaacttgaacagcacannnnnnnnnnnnnnnnnnnnnnngataactcctcctggaatcacctttctggtttagctagtactttgtacagaacaatgaggtttcccacagcggagtctccctgggctctgtttggctctcggtaaggcaggcctacaccttttcctctcctctatggagaggggaatatgcattaaggtgaaaagtcaccttccaaaagtgagaaagggattcgattgctgcttcaggactgtggaattatttggaatgttttacaaatggttgctacaaaacaacaaaaaaggtaattacaaaatgtgtacatcacaacatgctttttaaagacattatgcattgtgctcacattccccttaaatgttgtttcnaaggtgctcagcctctagcccagctggattctcngggnagaggcagaaaagtttggcgaaaanaaaagggannnnnnnnnntgaaagagaagnncttccagtnaaannaccctcagttaagnnactnccgcggctggc

SEQ ID NO: 251279 - DNA, 1215 bp, Homo Sapiens
cttgttggcctactggagggtgagaggaggctgcaacgccgagcggaggaggcaggaaccggagcgcgagcagtagctgggtgggcaccatggctgggatcaccaccatcgaggcggtgaagcgcaagatccaggttctgcagcagcaggcagatgatgcagaggagcgagctgagcgcctccagcgagaagttgagggagaaaggcgggcccgggaacaggctgaggctgaggtggcctccttgaaccgtaggatccagctggttgaagaagagctggaccgtgctcaggagcgcctggccactgccctgcaaaagctggaagaagctgaaaaagctgctgatgagagtgagagaggtatgaaggttattgaaaaccgggccttaaaagatgaagaaaagatggaactccaggaaatccaactcaaagaagctaagcacattgcagaagaggcagataggaagtatgaagaggtggctcgtaagttggtgatcattgaaggagacttggaacgcacagaggaacgagctgagctggcagagtcccgttgccgagagatggatgagcagattagactgatggaccagaacctgaagtgtctgagtgctgctgaagaaaagtactctcaaaaagaagataaatatgacgaaaaaaatcaagattccttaactgataaactcaagggaaggcagagacccccggcctgaggtttgccttgagagaaccggtagccaaagcctggaaaaaagaacactttgatgcacctggtgaagaaaaccccttgaaaatggccccccacaagaaaggaagccaccctccttgggtcccacccacaggggattgctttgtggaacccacacacccccttggcttttgaacccttgaaattgggagaatggtagaaaatgcgccgcccaagatcccccagcgcccgtggctgtggcgtggttccttttgccctccggaacaactaaaactttcggtgacgtggaagggccccagcccttgtggggagcaaacctcgggaaccctttataaacttgagacggggcttgcactcctttcaaaacttggaaacgcgccgcctctttttgttccttttgttcacactatcccccgcgttttttttccccgctgtgggttctaattttcttgcacgcaaaactgcgcccctgcgtcccatttttgtccgcgggggagaaatcatcatcgctg

SEQ ID NO: 251280 - DNA, 784 bp, Homo Sapiens
  misc_feature (309)..(309): n is a, c, g, or t
  misc_feature (563)..(576): n is a, c, g, or t
  misc_feature (638)..(638): n is a, c, g, or t
ccccaatcggccccccaaggggccccccataaaagggagagtgcattttaagccaataaagctgcagggatgtacccctaccagacctcctagaaacctttccagaaaatggggactgggtaggaaggaaacttaaaagatcaacaaactgccagccccacggactgcagaggctgtcacagccagatggggtggccagggtgccacaaacccaaagcaaagtttcaaaataatataaaatttaaaaagttttgtacataagctattcaagatttctccagcactgactgataacaaagccacaattgnagatggcacttcctagagacagcagcttccaaacccagaaaagggtaatgcagatggagtttcacatggctaaatcagtggcaaaaacacagtcttctttctttctttctttcaaggaggcaggaaagcaattaagtggtcacctcaacataagggggacatgatccattctgtaagcagttgtgagggggtagagatgggacaaaattttggtctcagaggtcttaccatcttaatttggtaacttctaatgnnnnnnnnnnnnnntagaaataacattatccaaagatatcttaaagctgaaaacttgaacagcacattttttgttnttgttgttgtttggctaactcctcctggaatcacctttctggtttagctagtactttgtacagaacaatgaggtttcccacagctgagtctccctgggctctgtttggctctcggtaaggcaggcctacaccttttcctctcctct

SEQ ID NO: 251281 - DNA, 960 bp, Homo Sapiens
gcctgcgggggcagctcctgtgcccctgcagccagcgaacaggcacgtccttggggctgaagccgcgtgccaggcacgtcagcgtcaccagctcgttcagggccagctccgagagggtggcggttagcgaggtcttggactcggggtaggcagcagtgcaagtgaaggtcttcccatggttccatggctcggcacagcccggcaggacactggacacgctgtagcagccacagaggtcacgctcaggtggtccttgaacagcgctcttcccacttgagggcgtccaggtgaaggtgacacctgaggcatctctcaggccggtcagtgtgcacgtgaggttcgcttctgaacctaagagcaggtcctcgagggccggtcggtgcagtgacagtcgggggtggcagcatgagggagatggggtaggtggagttgagggagatggggtaggtggagttgagggaactgggcagggcacagtcacatcctggctgggattcgtgtagtgcttcacgtggcatgtcacggacttgccggctacacactgtgtggccggcagggtcagctggctgctcgtggtgtacaggtccccggaggcatcctggctgggtgggaagctggcggtcacgccctgtccgctcgctccaggtcacactgagtggctcctgggggaagaagccctggaccaggcaggcgatgaccacgttcccatctggctgggtgctgcagaggctcagcgggaagaccttggggctggtcggggatgctgaggagacggtgaccagggatccctggccccaggggtcgaactcgccgacggaggatagattgtccccgagccacagtacctccgccatcgcacagaaataaacggccgtgtcagcgacggtcacagagttcaacttcagggagacctggttcgtggacgtgtctagagatatagtgagtcgatgcttgagagag

SEQ ID NO: 251282 - DNA, 1091 bp, Homo Sapiens
  misc_feature (663)..(663): n is a, c, g, or t
aggtctcctgcagggcctctggagtcaccttcagcacctatgctatcagctgggtgcgacaggcccccggacaaggacttgagtggatgggaggcatcatcgttaactctggtctcgactacgcacagaggtttcaggggagactcacgattaccgcggacgaatcaacgagcacagtcttcatggaactgcgacgcctgtctgaggacacggccctctactactgtgcgggggcgagagggactgatagtagtaattattggggctattggggccagggaaccctggtcaccgtctcctcagcctccaccaagggcccatcggtcttccccctggcgccctgctccaggagcacctccgagagcacagcggccctgggctgcctggtcaaggactacttccccgaaccggtgacggtgtcgtggaactcaggcgccctgaccagcggcgtgcacaccttcccggctgtcctacagtcctcaggactctactccctcagcagcgtggtgaccgtgccctccagcagcttgggcacccagacctacacctgcaacgtgaatcacaagcccagcaacaccaaggtggacaagagagttgagctctcttgtgacacacctcccccgtgcccacggtgcccagagcccatatcttgtgacacacctnccccatgcccacggtgcccagagcccaaatcttgtgacacacctcccccgtgcccaaggtgcccagcacctgaactcctgtgaggaccgtcagtcttcctcttccccccaaaacccaaggatacccttatgatttcccggacccctgaggtcacgtgcgtggtggtggacgtgagccacgaagaccccgaggtccagttcaagtggtacgtggacggcgtggaggtgcataatgccaagacaaagccgcgggaggagcagtacaacagcacgttccgtgtggtcagcgtcctcaccgtcctgcaccaggactggctgaacggcaaggagtacaagtgcaaggtctccaacaaagccctcccagaccccatcgagccatctacgaggagatgaccaagccaggtcagcctgcctgtctggtcggcttct

SEQ ID NO: 251283 - DNA, 424 bp, Homo Sapiens
gcccggtgaaggttgagaagacggtgaccagggttccctggccccaatagtccaataccccgacactgctatcaactgttgcacagtaataaacgcccgtgtcctcagatctcaggctggtcagctccatgtaggctgtgtctgcaccatcttcaggatcaacaagtcccatccactcaagcccccaggggcccgttgcacccagtgcatgtagtagtcggtgaaggtgtatccagaaaccttgcaggagattttcactgtagccacaggcttcttcacctcagccccagactgtaccagttggacctcggcgtgggtgcctgtagctgctgccaccaagaggaggatcctccaggtgcagtccatggtgaggtgctgtgctctgggggcttctgtagggctcgtgccgaattcctgcagcccg

SEQ ID NO: 251284 - DNA, 1447 bp, Homo Sapiens
cagattcctcctctcaagaagcccctgggagcacagctcatcaccatggactggacctggaggttcctctttgtggtggcagcagctacaggtgtccagtcccaggagcagctgctgcaatctggggctgaggtgaagaggcctgggtcctcggtgaaggtctcctgcaagccctctggaggcaccttcggcacctatgctttcagctgggtgcgacaggcccctggacaaggccttgagtggctgggaagaatgaccccaacatttcatactacctacgcagagaagttccgagccagactctcgattaccgcggacgactcaacggatcttctacatggacctgagtggtctgcgatctgaggacacggccctatatttctgtacgagagatggcggcagtgcctcgcactttggttttgatatgtggggccaagggacaaaggtcaccgtctcttcagcctccaccaagggcccatcggtcttccccctggcaccctcctccaagagcacctctgggggcacagcggccctgggctgcctggtcaaggactacttccccgaaccggtgacggtgtcgtggaactcaggcgccctgaccagcggcgtgcacaccttcccggctgtcctacagtcctcaggactctactccctcagcagcgtggtgaccgtgccctccagcagcttgggcacccagacctacatctgcaacgtgaatcacaagcccagcaacaccaaggtggacaagagagttgagcccaaatcttgtgacaaaactcacacatgcccaccgtgcccagcacctgaactcctggggggaccgtcagtcttcctcttccccccaaaaaggacaccctcatgatctcccggacccctgaggtcacatgcgtggtggtggacgtgagccacgaagaccctgaggtcaagttcaactggtacgtggacggcgtggaggtgcataatgccaagacaaagccgcgggaggagcagtacaacagcacgtaccgtgtggtcagcgtcctcaccgtcctgcaccaggactggctgaatggcaaggagtacaagtgcaaggtctccaacaaagccctcccagcccccatcgagcccccatcccgggatgagctgaccaagaaccaggtcagcctgacctgcctggtcaaaggcttctatcccagcgacatcgccgtggagtgggagagcaatgggcagccggagaacaactacaagaccacgcctcccgtgctggactccgacggctccttcttcctctacagcaagctcaccgtggacaagagcaggtggcagcaggggaacgtcttctcatgctccgtgatgcatgaggctctgcacaaccactacacgcagaagagcctctccctgtctccgggtaaatgagtgccagggccggcaagcccctgctccccgggctctcggggtcgcgcgagga

SEQ ID NO: 251285 - DNA, 1180 bp, Homo Sapiens
ctggtcaaggactacttccccgaaccggtgacggtgtcatggaactcaggcgccctgaccagcggcgtgcacaccttcccggctgtcctacagtcctcaggactctactccctcagcagcgtggtgaccgtgccctccagcagcttgggcacccagacctacacctgcaacgtgaatcacaagcccagcaacaccaaggtggacaagagagttgagctcaaaaccccacttggtgacacaactcacacatgcccacggtgcccagagcccaaatcttgtgacacacctcccccgtgcccacggtgcccagagcccaaatcttgtgacacacctcccccatgcccacggtgcccagagcccaaatcttgtgacacacctcccccgtgcccaaggtgcccagagcccaaatcttgtgacacacctcccccgtgcccaaggtgcccagcacctgaactcctgggaggaccgtcagtcttcctcttccccccggtggacgtgagccacgaagaccccgaggtcaagttcaactggtacgtggacggcgtggaggtgcataatgccaagacaaagccgcgggaggagcagtacaacagcacgtaccgtgtggtcagcgtcctcaccgtcctgcaccaggactggctgaatggcaaggagtacaagtgcaaggtctccaacaaagccctcccagcccccatcgagaaaaccatctccaaaaccaaagggcagccccgagaaccacaggtgtacaccctgcccccatcccgggatgagctgaccaagaaccaggtcagcctgacctgcctggtcaaaggcttctatcccagcgacatcgccgtggagtgggagagcaatgggcagccggagaacaactacaagaccacgcctcccgtgctggactccgacggctccttcttcctctacagcaagctcaccgtggacaagagcaggtggcagcaggggaacgtcttctcatgctccgtgatgcatgaggctctgcacaaccactacacgcagaagagcctctccctgtctccgggtaaatgagtgccacgggccgcaagcccccgctccccaggctctcggggtcgcgcgaggatgcttggcacgtaccccgtgtacatacttcccgggcgcccagcatggaaataaagcacccagcgctgccctgggcccctgcgag

SEQ ID NO: 251286 - DNA, 607 bp, Homo Sapiens
aatactttctgagactcatggacctcctgcacaagaacatgaaacacctgtggttcttcctcctcctggtggcagcccccagatgggtcctgtctcaggtgcagctgcaggagtcgggcccaggactggtgaagccttcggggaccctgtccctcacctgcgctgtctctggcggctccatcaccagtactaactggtggacttgggtccgccagcccccaggcaaggggctggagtggattggggaaatctatcatagtgggaccaccgactataacccgtccctcaagagtcgactcatcatctcacttgacaagtccaagaaccagttttctctgacgctgagttctgtgaccgccgcggacacggccgtatactactgtgcgagaaaacgatcgcctcgggactggtgctttgacctctggggccagggaaccctggtcaccgtctcctcagcatccccgaccagccccaaggtcttcccgctgagcctctgcagcacccagccagatgggaacgtggtcatcgcctgcctggtccagggcttcttcccccaggagccactcagtgtgacctggagcgaaagcggacagggcgtgaccgccag

SEQ ID NO: 251287 - DNA, 836 bp, Homo Sapiens; identical to SEQ ID NO: 167800
  misc_feature (702)..(702): n is a, c, g, or t
  misc_feature (704)..(706): n is a, c, g, or t

SEQ ID NO: 251288 - DNA, 492 bp, Homo Sapiens
tcatttgactgtgcctaccccgagccaagaccccgtaaccccaccctctcaaaatcagaaaacacattccggcccgaggtccacctcgtgcgccgccgtcggaggagctggccctgaacgagctggtgacgctgactgcctggcacgtgcttcagccccaaggacgtgctggttcgctggctgcaggggtcacaggagctgccccgcgagaagtacctgacttgggcatcccggcaggagcccagccagggcaccaccaccttgcgtgtgaccagcatactgcgcgtggcagccgaggactggaagaagggggacaccttctcctgcatgggtgccacagagcccctccgctggccttcacacagaagaccatcgcacgcttggcggtaaacccacccatgtcaatgtgtctgttgtcatggcggaggtggacggcacctgctactgagccgcccgcctgtccccacccctgaataaactccatgctccccc

SEQ ID NO: 251289 - DNA, 2150 bp, Homo Sapiens
  misc_feature (1129)..(1146): n is a, c, g, or t
  misc_feature (1165)..(1222): n is a, c, g, or t
aagtagagtgtaaaaactcaaagagacaagctaacttgaatttggaaatgctctaggttttcccaagtttctgaattgcttcaaggcagggggcagggcatggagacacagttccttttgcaaagctgagaggagagtgtaatggcctcatgcccttaagcagaaagtcaaggctggggagcagctgacccagcccctacccctctggccagtccacagtagacacaaaatacaattgcttggcctcaattatcaatagaatttaagagaaaaatcaaagttacacatccctctccacatcagtttcttggaatctgctactcatgactgcccctcctctccccacgcgcccctaccaaagtcacaggagtcatcctcaaatgtcagggtactggggtgaatgtactccacgcctctctgagtttgtctctgctcactcttcatcttcccactggtttcttttctgcactagagatgatccctgccctcagctcccttcatggaggcagttcagatacttggccctacctgtgatgagcacacacacagaattctcaactgacagtggcatcctcagaagagtcggtgcccactattttgttttattttgctgaaagaagttgccctcactacacatcataaacccatagatgtaaatactttccctctcaacatacaaattttacctttctctttccctcccacaggggtgactgtggtggggaaggaaagagagggcttagacttcaggtcaaatgttacattttcttaggaacatttttatactcattatgtattttaatagggcaataaatctgctttgggttgcaggatcactcagtgttctgttggaaagcattgaccaatgatttgtttttaatacaaatgctgtgcgatgagttatagaaacctaggacaatggttgagggagtcgactcctacatcagcagtgaagcgctgagcggcgttgtattcacaaagtcacatcttctgtttctgtgttagtctcgatttgttgtggtacgttctgcatttattacataatcattgtgggctcattttagatttgccatctgaaccaagtgacaagtatttttcaatacaataaagttgaaaaccttgtcttccnnnnnnnnnnnnnnnnnnctcgagactagctcgtgcnnnnnnnnnnnnnnnnnnnnnnnnnnnnnnnnnnnnnnnnnnnnnnnnnnnnnnnnnngtgcggtgggaattctctaattgtatcatgtgggccttttgaaagtaacaaacagaaggccagtctgttgcaagtttgctgctgaacatcacattccaccctaagaaaacacaaggtggattgcatcgagggtggataccttaccttagcacagaaggaaaaagtatgtcagtgcaaagtatggactaaactgctttcaggaaaaaagttgtaaaaattgatacaggttggaaaagggaattttccttcccggcttggagtcctcccaatttaaggcagaacccatccattccaatttctgcagtttaaacctttctctactaattaagctcctctgagttcaaccgctgctggattcgtttggcataactttgtgccatggagttaatgatagataggatgaagtaacacaccatgacaacgaccaacttttcaaacatccaggacaaccagttttctccctgtggtgtgcccatttcgcttttgtggtgaagcttctgccgttgagcctccaggtactcctgaaatggcttctgcagagatggacctatgccggggacagcactggaagcagggtacagtagcccaaagaaaaagacacatttgggaagaaaagcaggaaaaacgttaaagaaaatgtacttaccacctggactcaaaaggcagggattggataggaagaggaataaaatataaaaatcagagaactgctgaaattctgtgacccctttttagttaaaagaacaaaccacaaaaaggaaaatttactccatctaacaaccccttaaaaaccaaaatctctcccaccaacatgtctgggagaaaccaagagctgtaaatcagaaaccgcttccagcaaaagagttagtcctcagagtaaggtcagctcagctgatactgtactctggtatggcacaaagaataaaat

SEQ ID NO: 251290 - DNA, 374 bp, Homo Sapiens
  misc_feature (176)..(190): n is a, c, g, or t
cggagccccaggtactcctgaaatggcctgcagagatggacttatgccggggacagcactggaagcagggtacagtagcccaaagaaaaagacacagggaagaaaagcaggaaaaacgttaaagaaaatgtacttaccacctggactcaaaaggcagggattggataggtagtttnnnnnnnnnnnnnnncataggaaaatttactccatctaacaaccccttaaaaaccaaaatctctcccaccaacatgtctgggagaaaccaagagctgtaaatcagaaaccgcttccagcaaaagagttagtcctcagagtaaggtcagctcagctgatactgtactctggtatggcacaaagaataaaatctcgtgcag

SEQ ID NO: 251291 - DNA, 650 bp, Homo Sapiens
  misc_feature (460)..(477): n is a, c, g, or t
aaaataagggaaaaaggaacctcccggcttgaagtctcccaatttaaggcagctcctctaagctcaaccgcttgctgcattcgctgggcatacgtgccatgaagttaatgaaagataggataaagtaacaccccattgacaacgaccaacttttcaaacatccaggacaaccaagtttcctccctgtggtgtgcccatttcgcttttgtggtgaagcttctgccgttaagcctccaggtactcctaaaatggcttctgcagagatggacctatgccggggacagcactggaagcagggtacagtagcccaaagaaaaagacacatttgggaagaaaagcaggaaaaacgttaaagaaaatgtacttaccacctggactcaaaaggcagggattggataggaagaggaataaaatataaaaatcagagaactgctgaaattctgtgacccctttttagttnnnnnnnnnnnnnnnnnnaaagaaaatttactccatctaacaaccccttaaaaaccaaaatctctcccaccaacatgtctgggagaaaccaagagctgtaaatcagaaaccgcttccagcaaaagagttagtcctcagagtaaggtcagctcagctgatactgtactctggtatggcacaaagaataaaat

SEQ ID NO: 251292 - DNA, 721 bp, Homo Sapiens
  misc_feature (441)..(461): n is a, c, g, or t
aaagccagaaacctttctcacttaattagtctcctctgagtccacccgttgctgaattcgttgggcaaaacttttgtcccatggagtttaatgatagataggataaagtacccccccatgccacggccaactttttcaaacatcaaggacaaccagttttctccctgtggtgtgcccatttcgcttttgtggtgaagcttctgccgttgagcctccaggtactcctgaaatggcttctgcagagatggacctatgccggggacagcactggaagcagggtacagtagcccaaagaaaaagacacatttgggaagaaaagcaggaaaaacgttaaagaaaatgtacttaccacctggactcaaaaggcagggattggataggaagaggaataaaatataaaaatcagagaactgctgaaattctgtgacccctttttagttnnnnnnnnnnnnnnnnnnnnngaaaatttactccatctaacaaccccttaaaaaccaaaatctctcccaccaacatgtctgggagaaaccaagagctgtaaatcagaaaccgcttccagcaaaagagttagtcctcagagtaaggtcagctcagctgatactgtactctggtatggcacaaagaataaaatgaatgacttctcagaagtcccacatttatcaccactagttcctgtaagaactggtttgaaccaattaataaggaaatgacttatgcttgt

SEQ ID NO: 251293 - DNA, 2566 bp, Homo Sapiens
  misc_feature (1011)..(1011): n is a, c, g, or t
  misc_feature (2024)..(2168): n is a, c, g, or t
  misc_feature (2177)..(2190): n is a, c, g, or t
  misc_feature (2216)..(2224): n is a, c, g, or t
  misc_feature (2300)..(2392): n is a, c, g, or t
  misc_feature (2409)..(2418): n is a, c, g, or t
ggggggttccggttgtctggagcccagcggcgggtgtgagagtccgtaaggagcagcttccaggatcctgagatccggagcagccggggtcggagcggctcctcaagagttactgatctatgaaatggcagagaatggaaaaaattgtgaccagagacgtgtagcaatgaacaaggaacatcataatggaaatttcacagacccctcttcagtgaatgaaaagaagaggagggagcgggaagaaaggcagaatattgtcctgtggagacagccgctcattaccttgcagtatttttctctggaaatccttgtaatcttgaaggaatggacctcaaaattatggcatcgtcaaagcattgtggtgtcttttttactgctgcttgctgtgcttatagctacgtattatgttgaaggagtgcatcaacagtatgtgcaacgtatagagaaacagtttcttttgtatgcctactggataggcttaggaattttgtcttctgttgggcttggaacagggctgcacacctttctgctttatctgggtccacatatagcctcagttacattagctgcttatgaatgcaattcagttaattttcccgaaccaccctatcctgatcagattatttgtccagatgaagagggcactgaaggaaccatttctttgtggagtatcatctcaaaagttaggattgaagcctgcatgtggggtatcggtacagcaatcggagagctgcctccatatttcatggccagagcagctcgcctctcaggtgctgaaccagatgatgaagagtatcaggaatttgaagagatgctggaacatgcagagtctgcacaagactttgcctcccgggccaaactggcagttcaaaaactagtacagaaagttggattttttggaattttggcctgtgcttcaattccaaatcctttatttgatctggctggaataacgtgtggacactttctggtacctttttggaccttctttggtgcaaccctaattggaanagcaataataaaaatgcatatccagaaaatttttgttataataacattcagcaagcacatagtggagcaaatggtggctttcattggtgctgtccccggcataggtccatctctgcagaagccatttcaggagtacctggaggctcaacggcagaagcttcaccacaaaagcgaaatgggcacaccacagggagaaaactggttgtcctggatgtttgaaaagttggtcgttgtcatggtgtgttacttcatcctatctatcattaactccatggcacaaagttatgccaaacgaatccagcagcggttgaactcagaggagaaaactaaataagtagagaaagttttaaactgcagaaattggagtggatgggttctgccttaaattgggaggactccaagccgggaaggaaaattcccttttccaacctgtatcaatttttacaacttttttcctgaaagcagtttagtccatactttgcactgacatactttttccttctgtgctaaggtaaggtatccaccctcgatgcaatccaccttgtgttttcttagggtggaatgtgatgttcagcagcaaacttgcaacagactggccttctgtttgttactttcaaaaggcccacatgatacaattagagaattcccaccgcacaaaaaaagttcctaagtatgttaaatatgtcaagctttttaggcttgtcacaaatgattgctttgttttcctaagtcatcaaaatgtatataaattatctagattggataacagtcttgcatgtttatcatgttacaatttaatattccatcctgcccaacccttcctctcccatcctcaaaaaagggccattttatgatgcattgcacaccctctggggaaattgatctttaaattttgagacagtataaggaaaatctggttggtgtcttacaagtgagctgacaccattttttattctgtgtatttagaatgaagtcttgaaaaaaactttataaagacatctttaatcattccnnnnnnnnnnnnnnnnnnnnnnnnnnnnnnnnnnnnnnnnnnnnnnnnnnnnnnnnnnnnnnnnnnnnnnnnnnnnnnnnnnnnnnnnnnnnnnnnnnnnnnnnnnnnnnnnnnnnnnnnnnnnnnnnnnnnnnnnnnnnnnnnntttggcggnnnnnnnnnnnnnnaaaaaattttttaaaacttttgtttnnnnnnnnncccccggaggaaagggaaaaggggctatcgtggtcccaaaaaaacccgggtaaaagctgggggttggtttccccannnnnnnnnnnnnnnnnnnnnnnnnnnnnnnnnnnnnnnnnnnnnnnnnnnnnnnnnnnnnnnnnnnnnnnnnnnnnnnnnnnnnnnnnnnnnggtcttatttaaaattnnnnnnnnnntggctttttttggagaactggggggaatctttaaaagttttcccgcccggtggggaacccccccacaacgggtttaataaacccttaaaacccccccgggatataaaaaacccttggggcgcgttggggaaaaataatttttccccca

SEQ ID NO: 251294 - DNA, 497 bp, Homo Sapiens
  misc_feature (66)..(89): n is a, c, g, or t
tgtctttttttcattgctaaggaagaactccctctgctcttggaagattttctactctactgatcnnnnnnnnnnnnnnnnnnnnnnnncctgatgattgtcttaggcaccctccttacataataaaccatcaagctaacttgaacagggaaactgagtcacactcaaacaatagctaaggtcaaaagtgtagtgaaagtagaaaaagtggggaagggataggtctaagtgagtgacagatgggctgattcagacagggcaataagcacagggagatatgaagacaactaccaaagcaagtggaagacaaggttttcaactttattgtattgaaaaatacttgtcacttgggttcagatggcaaatctaaaatgagcccacaatgattatgtaataaatgcagaacgtaccacaacaaatcgagactaacacagaaacagaagatgtgactttgtgaatacaacgccgctcagcgcttcactgctgatgtaggagtc

SEQ ID NO: 251295 - DNA, 715 bp, Homo Sapiens
  misc_feature (25)..(25): n is a, c, g, or t
  misc_feature (115)..(115): n is a, c, g, or t
  misc_feature (526)..(526): n is a, c, g, or t
  misc_feature (569)..(569): n is a, c, g, or t
  misc_feature (580)..(580): n is a, c, g, or t
  misc_feature (597)..(597): n is a, c, g, or t
  misc_feature (627)..(627): n is a, c, g, or t
  misc_feature (680)..(680): n is a, c, g, or t
  misc_feature (704)..(704): n is a, c, g, or t
gtacacatccctctccacatcaggntcttggaatctgctactcatgactgcccctcctctccccacgcgcccctaccaaagtcacaggagtcatcctcaaatgtcagggtactgngggtgaatgtactccacgcctctctgagtttgtctctgctcactcttcatcttcccactggtttcttttctgcactagagatgatccctgccctcagctcccttcatggaggcagttcagatacttggccctacctgtgatgagcacacacacagaattctcaactgacagtggcatcctcagaagagtcggtgcccactattttgttttattttgctgaaagaagttgccctcactacacatcataaacccatagatgtaaatactttccctctcaacatacaaattttacctttctctttccctcccacagggggtggactgtgggtggggggaagggaaagagaggggcttaggactttcagggtcaaatggtaacattttccttaaggaacaatttttaatacccantaatggtatttttaataggggcaataaatctggctttggggtngcaggatcacntcagtgttccggttggnaagcatttgaccatgatttggttttaaaanaatggctgtgggatgagttatagaacctaggacaatggttgaagggggtcgancccacatcagcagtgaacgctgangggcgtttgta

SEQ ID NO: 251296 - DNA, 622 bp, Homo Sapiens
  misc_feature (64)..(135): n is a, c, g, or t
tttggtcttgctccccttcctcacagcctgagagcaaagcaaaagagaagaaaaagcctgaagnnnnnnnnnnnnnnnnnnnnnnnnnnnnnnnnnnnnnnnnnnnnnnnnnnnnnnnnnnnnnnnnnnnnnnnntggccttttggactagcaccccttcctcacagcctgagagcaaagagcctccattatggcatgctgaatttaccaaagaagaattggttcagaagctccgttccaccacaaaaagtgcagatcacttaaacggcctgcttcgggaaatagaggcaaccaatgcagtccttatggagcaaattaagcttctcaaaagtgaaataagaagattggaaaggaatcaagagcgagagaagtctgcagctaacctggaatacttgaagaacgtcttgctgcagttcattttcttgaagccaggtagtgaaagagagagacttcttcctgttataaatacgatgttgcagctcagccctgaaaaaaatcaagagcgagagaagtctgcagctaacctggaatacttgaagaacgtcttgctgcagttcattttcttgaaaccaggtagtgaaagagagagacttcttcctgttataaatacgatgttgcagct

SEQ ID NO: 251297 - DNA, 913 bp, Homo Sapiens
  misc_feature (27)..(27): n is a, c, g, or t
acacagtagataataaaaaggaataangtatacacattattaatcataaatgaaaagagaaaaccagtgcaaaatgcggcagacagtacatctctaacatattgcaaaggctgataccgggacaacactacttcagaaaggtgccagcaaaatggtgaatgtgtgaaaacaaagaaaaatattgtgtttatagggtgcagaaagtttcccagaaactgacagagcccatgcatctctgcacccagaatacacttagagaataatttaaccatgacaatagggactacagaaaatggtatattgtgtataaacctggcctctctaatcgcctccttatgtgcctggaacatcttgacgttgttcatgttcgactgccaatatttcacatatcctccgtggtctgctgtcaacatccacatgtcattatgtgaccacgtcatggccctcactgggctgtcgtgagcctgtaatattgtttcaaaattgaaagtgagtccattccacagggtaaactccccactagaagctccagtgaccaagcgtcttccttctggagtccacctaacaacaaatacaggacactttactttatttgttgatgtccgaacaaattttgttgttactgcattcataggattattcaacattcctataggtgggaccagatcattgtaataacctgcatcaggctgaattgcccgcatatctctctggtctctttgccatattctgttcgtctggctttgagcagagctcctaaatggccagcgaagcgttcgccttcagagccagaaatgtctctcttgtttggtctccccaccccgatcctctcaatcccgctcctccaaaggagcagccgccatcttcccctatgggccaccgaacgcacgctctggggtcatcacgcactccc

SEQ ID NO: 251298 - DNA, 789 bp, Homo Sapiens; identical to SEQ ID NO: 178410

SEQ ID NO: 251299 - DNA, 1360 bp, Homo Sapiens
  misc_feature (813)..(1066): n is a, c, g, or t
  misc_feature (1077)..(1096): n is a, c, g, or t
gtcagcataaataatgctagctgctgtaacaaacagtccccagtcttctgtgtctttagacgacagtattgtttcccactaaatcactgggggagaggatgcagttctgctccatgtagtcgttaggagctcaggcttctactaccttctggtaacttctggtaactccactatcccctgcaagtcctatcttggatcctctgcatctgctccctagatggtcgatgagagagcaacaggatatataggaggctttaaggatcagacctagaaatggcacagatgacttctatgcacatttcattgaccagattcggtcacatggccccacctagttgcaaaggacactgggaaaaattgcattcctgtgtgtccagaggaaaatgaaaaaaatggttggtgattagattgcctctaccgtgtgagtcccagagactataactaggccagatatcaaagatgctttgcctttctcatccttgtgttgtgaaagacaaagaggccaacttatgtttgctcctgactcccaaagcccaacacttgacagtcatatttcttgtatctcagggttcctggtggcctggcctatggtcctcctgactgtcctcctggcttggctgttctgagagctccgctgagcatctggccttgaagtttgtgttcttccctctggcaatggctcccttcagcacttctgctttccactccaattcacacaggcttggtattaacagaatcaaggccaggctaggttaggaaaagggaagagctttcaccttctttaaaactctcggctgggcgcagtggctcatnnnnnnnnnnnnnnnnnnnnnnnnnnnnnnnnnnnnnnnnnnnnnnnnnnnnnnnnnnnnnnnnnnnnnnnnnnnnnnnnnnnnnnnnnnnnnnnnnnnnnnnnnnnnnnnnnnnnnnnnnnnnnnnnnnnnnnnnnnnnnnnnnnnnnnnnnnnnnnnnnnnnnnnnnnnnnnnnnnnnnnnnnnnnnnnnnnnnnnnnnnnnnnnnnnnnnnnnnnnnnnnnnnnnnnnnnnnnnnnnnnnnnnnnnnnnnntctgtctcagnnnnnnnnnnnnnnnnnnnngaaaagcaacatagtggggtttctgtcaatctgtcctcggcagcccttctcatctgtcgatgggaccttgaaagcaagcttgctaggtgccctctgtggctccagcctttaccggaagtgtggtgcgtgtttttaacttcagggaagcggtatcctgtcactggggtatgggatgagcatggagaagaggcaccagccacgattccttcctaagcatctcctgttctgactgctcatgaattgaagaaactgacccttgtgttc

SEQ ID NO: 251300 - DNA, 973 bp, Homo Sapiens
ttgggagccatcaatcaggaaagccgggttagtaaagcagttgaagtgatgattcagcacgtagaaaacttgaagaggatgtatgccaaagagcacgctgaattagaagaactgaaacaggttcttctgcagaatgaaaggtctttcaatcctcttgaagatgatgatgactgccaaattaaaaaacgttcagcttctctaaactccaagccatcttctctacgaagagtgactattgcctttttacccagaaatattggaaatgcaggaatggtggctgggatggaaaataatgatcgattcacgtagaaggtcaagcagttgaactaaagatgactcagagccatctggagaagaaacagtagaaaggacaaggaagccaagtctttctgaaaagaaaaataatccatcaaagtgggatgtctcttcagtttatgacacaatagcttcctgggcaacaaatctcaagtcctccatcagaaaggctaataaggccctctggctctctattgcattcattgtactgtttgcagctttgatgagcttcctcacaggccaattattccagaagtctgtggatgccgctcccacacagcaagaggactcatggacgtctctagaacatatcttgtggccatttaccagactccgacacaatgggccaccaccagtgtgacagcaggacatcctaatatatggatcttgatttttaagtttcagtatctgaacttcgtaaattagtaacttttagctgggaaagtatagcatgaaaccagaggttctcagaatgactgtaagatagcttacatttcctctttttgcctttatctccccaactaaaatacaatggggaagaagtctgcctatgatctttgaatgagctttttaaggaagaaatattatatattgtttgttaaagtttattgaaataaagaatcatttaaatcttagaacccgcaaacccataaaaacc

SEQ ID NO: 251301 - DNA, 1090 bp, Homo Sapiens
aactccctaaacattacatgagaaattgctgtacttaaattaacctaaaggaactctttcaaaaatattaattggtatactgatacattacacctaatcatgactggaatggcttaaagagtgtaagttcccaagtgcctatccaggatagagtgagcaagtcagaacttaatttagtaaggttggccatacaaaaaactatgctttaatgctttaagatgttctcccaaccccaagtctgcaaaactcaaacagtcctaatgcagactactgccttaagtttttttccctttttatatttatggatgaattgatgactcctgttaaagttgtatcatacctctgtgccaaggtttgattttaggccaagtttagtaaatttattttgtcaaaacaattgatatcttgagcattactgagccaacaggacatcaaaatagaaagttgtctaaagttaaaggcacagtacattaacaaacaaacgatcctcagtcacaaaattataaatgcagtttggggtggcactaaagcaggaggggaagagttaatccaaactacagcaatgacatcttcaaaccaacttctgaacagggctgctgattgttcctttcatttcttcttgtgaccttgagctccctccaccaaatcctctgctgctaccgtggccacctccgccactgcggctgctgcttgcgcggctgctgctgaagctggaactgctggcaccgctactttgtcggtagtctctggcaccaaaccctccactaaatctgctactcttagaacgtccacgactgctacccttgtagtggtgttcataagccatgttttctaaccaagacggcacttcttgtttagcttcaacaagaagatccaacaaatccttagtaatatttatgttcctctcgttaaagaatgaggttgccaggccaaggtttcctacacgtcccgtacgaccaatacgatgtacatattcttcaatatcacttggcaagtcaaaattgataacatgtttcacatttgaaatgtccagtcctcttgctgctactgctgtagccactaaaattgggctttttcctgagcggaactg

SEQ ID NO: 251302 - DNA, 369 bp, Homo Sapiens
taagtcttcaaaccaccttctgaacagggctgctgattgttcctttcatttcttcttgtgaccttgagctccctccaccaaatcctctgctgctaccgtggccacctccgccactgcggctgctgcttgcgcggctgctgctgaagctggaactgctggcaccgctactttgtcggtagtctctggcaccaaaccctccactaaatctgctacctaaccaagacggcacttcttgtttagcttcaacaagaagatccaacaaatccttagtaatatttatgttcctctcgttaaagaatgaggttgccaggccaaggtttcctacacgtcccgtacgaccaatacgatgtacatattcttcaatatcac

SEQ ID NO: 251303 - DNA, 754 bp, Homo Sapiens
gggtgtgtaagattgtggaaagctaattatatggacaattggaagtgtactggtattttgaaaggtaatgggagcccagtcaatgggagttctcagcagggaacctcaaatccttccctaggttcaaatattccaagtcttcagaattcattaaatggatcttctgctggcagaaagcacagctgagtacaagctaactggagtaactttgctgttttgctgcttgttgcatgcacacaggaatggaaagcgagctccttttccccttccccaggcgccgtttgacctctcccaagatacaccagcagcctgcttactactaaacgcaatccaaaaggcctttaaaaatacagtgtatattttttgtactagtcagtttattgacactatttgaaacttttgaaatataaacggagaggctttctgttgagacattgtcaccaaaacaattttttgaaatgttcctgaaactaatttgggtttaaagattaaaagggttgttaccattcttatctgagtagttgggaggaggggaataccactttagttcatttggaaaatatagacatatttcttttgctttcttaaaacagcttaaaatgatgaacttttataattttaatttgaagattgaataaatattttttataaagattgttttgagtgctgatttgtttactttttgtagatttgctttatccatgatattcagtacaactctgtcatttctttgtaatatttaaaaaatattagt

SEQ ID NO: 251304 - DNA, 508 bp, Homo Sapiens
  misc_feature (88)..(88): n is a, c, g, or t
tcaaactacaaacactttaaagacaaggattctcctctatacttattttgtagtactagcaccaagaataatgcatagtacatagctnatacttaataaattcaatacttgtatgaataaactgaaaaattctcacaagaccattgggggcagttctactaatctccctgtagccctgcaattttcaaaggcttcatcacgcaattcccctcacaactttttggttcactaatcataaagccacacggacagaaaggaaagaaatcccagagaccaaaaagccgtttgttttgtccatctggtcacatatttatagcgtttcagagctaaaagtggtattagaagttgcctttgaacagtcccattttacatgtgagaaaactaaagtctaacatcttgggtgaagtgactgagccttgatcacccagctgacaagcaccaaagcacttcccgatattatttcctccatattcctctgcagttagcccccaccaactccaccagaaag

SEQ ID NO: 251305 - DNA, 2051 bp, Homo Sapiens
  misc_feature (1296)..(1304): n is a, c, g, or t
tgactcgccgtccgcgctgcagtgcgaagggctcgaagatggccggttggcagagctacgtggataacctgatgtgcgatggctgctgccaggaggccgccattgtcggctactgcgacgccaaatacgtctgggcagccacggccgggggcgtctttcagagcattacgccaatagaaatagatatgattgtaggaaaagaccgggaaggtttctttaccaacggtttgactcttggcgcgaagaaatgctcagtgatcagagatagtctatacgtcgatggtgactgcacaatggacatccggacaaagagtcaaggtggggagccaacatacaatgtggctgtcggcagagctggtagagtcttggtctttgtaatgggaaaagaaggggtccatggaggcggattgaataagaaggcatactcaatggcaaaatacttgagagactctgggttctagctgctaggcagactgttaagtattaggggaaaattgctcttaaactttcctagctataagcttaagtcttaattctggaaattttattagcaatgcagggtgatggggtatgaacctgtgtctcctttgtatccctctgttggtggggaaaggtgtctttctttctgccctccccccccaaaataattctgttcacttttgttttgtttccttgtgtactccagcattggttatagtcatgggaaaggaaggtgtccacggaggcacacttaacaagaaagcatatgaactcgctttatacctgaggaggtctgatgtgtaagcagcctctccccatctacctagcaactgtcttcatcaacaaccctaattatggtcacaatgctaccaaactgtagatggtagctaatttttctttacctattttctaatgtcatgattcctgtttgcccaatggatcatttgtatgttaaccactgtatgtaaccaacccttatctggcaacataattgcagcacaataatgatttgcatgataccttgaaattggggggagggggcatgccaagttgggcatcactttgtcttagcaattaatgggatattgattactaaaataagttaatattaagcaaggtgccggttgtacaatctctgatcagtgtcttttcagcactttgagcatttacttggctcatttagtcttccttttgtagcgcatggttgggaggaaaaagtgcatgcatcattccttcactcttctctttttcccgcccccccctcccttcgcacataggcatttggtttgcttccatctttttttatgcagtgcctgnnnnnnnnnaaccaattaaaatccccttttgttgatgagctattgagagctgcagtagtttgcttttagtattgttgttgcacttgagcagagacaaacctttattcatagtgtctacaggacatatgaagagtgcaatggcaaaacaagagcaaaaagcacattcctcccatgaccttacagtaaccatactgattgaatccccaggggacattccatcattgcaatagctcagatttttcttcctttttctttgcacaccagctctactctttagtaaaattgtaaaaggctgccattatggacattaggtatcccaacataaccatctggagtgtgtccagtttgttcttcataggaccaatttttatttgcagcttgagtttttatatgaagttgcattattgtggacttggctgtcttgtgatgaatttttttcatatgtattctgtgccatactattgttaaaatgaactgttgctattgtgagatggattttaactgacctattaagggtttctttcgaatggcactactttagggacattctagtatttgcttctattgtttgggccttgtggataatgtacagatttaaaaacaaatcttgttgctgatttgtccatttctttccctgcactttgttacatctgggatacagtctaactcatctgatttaatatgcatttaaaaaaatgccataactattaaacaccttgtttacagacagatgaaataaatttattccaaccaaat

SEQ ID NO: 251306 - DNA, 611 bp, Homo Sapiens
gggggcgatcccggcgagcaccttggcgcgcggagctggcaccttggcgctgttggtggcggcggagacagctgtgaagtgtgaggttctttgtctgctggcagctaggggcgacgaggcgggacgtcatggaagtgaaggatgccaattctgcgcttctcagtaactacgaggtatttcagttactaactgatctgaaagagcagcgtaaagaaagtggaaagaataaacacagctctgggcaacagaacttgaacactatcacctatgaaacgttaaaatacatatcaaaaacaccatgcaggcaccagagtcctgaaattgtcagagaatttctcacagcattgaaaagccacaagttgaccaaagctgagaagctccagctgctgaaccaccggcctgtgactgctgtggagatccagctgatggtggaagagagtgaagagcggctcacggaggagcagattgaagctcttctccacaccgtcaccagcattctgcctgcagagccagaggctgagcagaagaagaatacaaacagcaatgtggcaatggaccgaagaggaccccagcatagaagagcacacctggccccggcgtttcatgaagtc

SEQ ID NO: 251307 - DNA, 1247 bp, Homo Sapiens
  misc_feature (483)..(483): n is a, c, g, or t
  misc_feature (1084)..(1084): n is a, c, g, or t
  misc_feature (1136)..(1136): n is a, c, g, or t
  misc_feature (1163)..(1163): n is a, c, g, or t
  misc_feature (1173)..(1173): n is a, c, g, or t
  misc_feature (1195)..(1195): n is a, c, g, or t
  misc_feature (1200)..(1200): n is a, c, g, or t
  misc_feature (1212)..(1212): n is a, c, g, or t
  misc_feature (1228)..(1228): n is a, c, g, or t
tgctctcacagggaatgacagaggaagaggaagacaaacttctggcactgaaagacttcatgatgaaatctaataaagcaaaggccaatatagtggaccagagccatcttcatgatagtagtcagaaaggtgtaattgacttggcagctttaggcataactgggagacaagttgatcttgttaaaaccaaacaagaaccagatgacaaacaggccagaaaacatgtaaaacaagactcaaatgtaaatgaagaatggaaaagcatgtttgggtcactggacccaccaaacatgccacaggccctacctaaagggagtgatcaggaggtgattcagactgggaaacctcctcgttccgagtcctctgccggcatttgtgtccctttgttcaacttcttcacaggttccagaagtgacaactgtccaaaataaaaaaccagtaataccggttttaagtagtacaatcttaccatccacctatcanattcgaattacaacttgtaaaactgaacttcagcaactcatccagcaaaagcgggagcagtgcaatgctgagagaacagctaagcagatgatggaaaatgctgaatgggagagtaaaccaccaccacctggatggcgtcctaaagggctgttagttgcccatcttcatgagcataaatctgctgtgaatcgaattagagtctctgatgaacactcactttttgcaacatgttcaaatgatggcacagtgaaaatccggaacagtcaaaagatggaggggaagaccaccactaccagatctattcttacatacagccgaattggaggacgagtcaagacgctcacattctgccaaggctcccactatttagccatagcatctgataatggtgctgtccagcttcttggaattgaggcttctaagctgcccaagtctcctaaaatccatcctctacaaagcagaattctagatcagaaggaggacggttgtgttgtggatatgcatcacttcaactctggagcacagtctgttcttgcctatgccactgtgaatggctctctgggttgggctggggaccttaggtctttcaaggcaatgcgtnggactttaaaggcatggatttaaagtcggggcctcatcacttcctttggctntggggacatccacccaatggcttggcntctgcatttnggtacaagcagttgggtacccnggggntttttttggggncatgaggggtttcccntttgcccaatttttaaagg

SEQ ID NO: 251308 - DNA, 2300 bp, Homo Sapiens
gctgcaggattcggcacgaggcgacccggacggagggccggcgaggtgcggggtctggtgatgcgagctgcgcctctcggcaagatttcgcgctgcccatcccgggccctttcatcagtaatcggtagtggatcactctgccaagcggcaggaagaattaaggaaacgacaaggagacgctcggctctctcccgcttggctccttgcggcctcctcttcccttcgctccggcccggtgaaactgaacttataatcgtcactggattgtaagtacccgaggcgaagagagctcgctgagccctgattttttgagtgtctttgttccgggagagtttgtgagttgaaagtatctctgctgggctttctgggccgaaaaccgttccgggggagccgccatttgctttcctgttccctagctagctagctagctctctccgcgttgtccggcagcggcacctagaggttgggacttggcattgcatctgatttaatgaacttaagtctgtgaataagcctttgtgttaacgactggtattcggtcacagcatatttagagaaaagacttggagcttaaataaaaactaaggcaaaatagacgcttagctgctgacctacagagaacttcttgtaattaaaagatttcaattcatagcaaactggtgttttaaactattgcagtagctggaactttttagtgtaaccagcatttattggagaagtgaatcacaaggaaataaagatgagtaaaagcaaagatgatgctcctcacgaactggagagccagtttatcttacgtctgcctccagaatatgcctctactggggagaagggcagtacagtctggtcatgtcaacctcaaggacagactgacaattgagttacatcctgatgggcgtcatggaatcgtcagagtggaccgtgttccattggcctcaaaattagtagacctgccctgtgttatggaaagcttgaaaaccattgataaaaaaactttttacaagacagctgatatctgtcagatgcttgtatccacagttgatggtgatctctatcctcctgtggaggagcccagttgctagcactgatcctaaagcaagcaagaaaaaggataaggacaaagagaaaaaagtttatctgggaaccacggaattactctgcctctaaagaatgtcaggaagagaaggttccggaagacagcaaagaagaaatatattgaatctccagatgttgaaaaagaagtgaaacgattgctgagtacagatgctgaagctgttagtactcggtgggaaataattgccgaagatgaaacaaaggaggcagaaaatcaaggcctggatatctcttctccaggaatgtctggtcacaggcagggccatgactcattagaacatgatgagcttcgggagatattcaatgacctcagcagcagcagtgaggatgaagatgagacccagcatcaagatgaagaagatataaacatcattgacacggaggaagatctggagagacagctacaggacaagctaaatgaatcagatgaacagcaccaggaaaatgaaggaaccaatcagctggttatgggaattcagaagcagattgacaacatgaaaggcaagctccaagagacccaggacagggcaaaacgacaagaggatctcatcatgaaagtggaaaatctggctctcaagaacagatttcaggctgtactggatgagctcaaacaaaaggaagaccgagaaaaggagcaactcagctctttgcaagaggagctagaatcactcctagagaagtaaaaagaactgatatttaatttcagtcttcagactggtcagcattagaaaattcttggctttattgtactgggtattaagaccttgctcttcctagtccttttaatgctgtgtgttctgttaagttctttcatttgtttgtaattttgtttttcagcaaatttatattgttttgctaggtgttcatcctataagaagcaggattgtataggcagaaaaatgattgtaggaaagttgcaggattagcggaatgtatggttcaaccttaattatagcttcattgcaggactttactgtttctccattttctagaagctgctgttgctgctttgtgatgacgtgagatcaataagaagaacctagtctagagacaatgatgctagtttgcatatgttttcctatgcaatagttgttttcccagttattcaaagcagctttctatatgtagagatgcaaattattaagttgtttccaatacaataaataaaagcatctgtttttcactcaaaa

SEQ ID NO: 251309 - DNA, 1738 bp, Homo Sapiens
ggggcagcaggccaagggggaggtgcgagcgtggacctgggacgggtctgggcggctctcggtggttggcacgggttcgcacacccattcaagcggcaggacgcacttgtcttagcagttctcgctgaccgcgctagctgcggcttctacgctccggcactctgagttcatcagcaaacgccctggcgtctgtcctcaccatgcctagcctttgggaccgcttctcgtcgtcgtccacctcctcttcgccctcgtccttgccccgaactcccaccccagatcggccgccgcgctcagcctgggggtcggcgacccgggaggaggggtttgaccgctccacgagcctggagagctcggactgcgagtccctggacagcagcaacagtggcttcgggccggaggaagacacggcttacctggatggggtgtcgttgcccgacttcgagctgctcagtgaccctgaggatgaacacttgtgtgccaacctgatgcagctgctgcaggagagcctggcccaggcgcggctgggctctcgacgccctgcgcgcctgctgatgcctagccagttggtaagccaggtgggcaaagaactactgcgcctggcctacagcgagccgtgcggcctgcggggggcgctgctggacgtctgcgtggagcagggcaagagctgccacagcgtgggccagctggcactcgaccccagcctggtgcccaccttccagctgaccctcgtgctgcgcctggactcacgactctggcccaagatccaggggctgtttagctccgccaactctcccttcctccctggcttcagcagtccctgacgctgagaactggcttccgagtcatcaagaagaactgtacagctcggaacagctgctcattgaggagtgttgaacttcaacctgagggggccgacagtgccctccaagacagagacgactgaacttttggggtggagactagaggcaggagctgagggactgattcctgtggttggaaaactgaggcagccacctaaggtggaggtgggggaatagtgtttcccaggaagctcattgagttgtgtgcgggtggctgtgcattggggacacatacccctcagtactgtagcatgaaacaaaggcttaggggccaacaaggcttccagctggatgtgtgtgtagcatgtaccttattatttttgttactgacagttaacagtggtgtgacatccagagagcagctgggctgctcccgccccagcccggcccagggtgaaggaagaggcacgtgctcctcagagcagccggagggaggggggaggtcggaggtcgtggaggtggtttgtgtatcttactggtctgaagggaccaagtgtgtttgttgtttgttttgatcttgtttttctgatcggagcatcactactgacctgttgtaggcagctatcttacagacgcatgaatgtaagagtaggaaggggtgggtgtcagggatcacttgggatctttgacacttgaaaaattacacctggcagctgcgtttaagccttcccccatcgtgtactgcagagttgagctggcaggggaggggctgagagggtggggcctggaacccctccccgggaggagtgccatctgggtcttccatctagaactgtttacatgaagataagatactcactgttcatgaatacacttgatgttcaagtattaagacctatgcaatattttttacttttctaataaacatgtttgtc

SEQ ID NO: 251310 - DNA, 1009 bp, Homo Sapiens
  misc_feature (253)..(253): n is a, c, g, or t
  misc_feature (569)..(583): n is a, c, g, or t
  misc_feature (647)..(647): n is a, c, g, or t
  misc_feature (693)..(693): n is a, c, g, or t
  misc_feature (889)..(903): n is a, c, g, or t
tgccacacttgaaagggaaacatcctactacctttctttcctctccatttcccacaaaccctttccttcatcatcactccctgcattcttacttctcagcatataaatacaagacccttctttctattatttgttgaaagctaggcctgtaaaatagagatggacagaccatgcatgtttccatgaagctatttaatgctgctcccagtcttctgtccataccattccttccctgcccctaggagtggggttnaggtctgtcacatgcagactgtaagcacagtcagaacctctgcagctctcaacccaacacaggagactgtggcttcaacatgccaacctgagcaggtctcctctgcattaccttcctcccatttctcttcctgggtcctgatgaggtgagctggaggaaccaatagtcaggatgccctggaattgatgttgctctgttttgtgctcacaaaacagccatgtaacacatgagcacctgagttgaagccatccagtcgcaagtcagcagacagcagttgatggaattctcagtagaaattcagtaagggtgcccaaannnnnnnnnnnnnnncacctatactctaccaatatatggtatttacggaaaacttcttttatccaagcacaaagaaaangcacacacattttttataatccatctgcttcatccagggtaaatanaataatttaacaaatttggatcaggcatctctagtttaccagtaactttaatattagttttcttacaaattaatgtattttgcaatatttccagaaaatcactgtgggagaataatgtaatatactttaggatatatttcctgaccttttcttaaatggcttcatgtgctattcccccaaattctgctttctctannnnnnnnnnnnnnnaacctataattatactttctagtatattctgagtctatcttctaagccaccttacatttttcctggaacaagggagggaataaatagttgcctccactaaatcagg

SEQ ID NO: 251311 - DNA, 1244 bp, Homo Sapiens
gttgccagcatctttttctttttcatcctaccagtgaatagtttaaaattcatgttgcacctataatttatcccacataaataattcaggctatttattttggcattcaattgatttttttctcactttaaaaaactgaggtatggagaccggtgctagcgacacgggagtggcaaacgcatcctcttgccgttcccggtgtttgggccttgcctgtgacggtgggaaaagaaaatggccttgctgtgctacaaccggggctgcggtcagcgcttcgatcctgagaccaattccgacgatgcttgcacataccacccaggtgttccggtctttcacgatgcattaaagggttggtcttgctgtaagagaagaacaactgatttttctgatttcttaagcattgtaggctgtacaaaaggtagacataatagtgagaagccacctgagccagtcaaacctgaagtcaagactactgagaagaaggagctatgtgaattaaaacccaaatttcaggaacacatcattcaagcccctaagccagtagaagcaataaaaagaccaagcccagatgaaccaatgacaaatttggaattaaaaatatctgcctccctaaaacaagcacttgataaacttaaactgtcatcagggaatgaagaaaattagaaagaagaagacaatgatgaaattaagattgggacctcatgtaagaatggagggtgttcaaagacataccagggtctagagagtctagaagaagtctgtgtatatcattctggagtacctattttccatgaggggatgaaatactggagctgttgtagaagaaaaacttctgattttaatacattcttagcccaagagggctgtacaaaagggaaacacatgtggactaaaaaagatgctgggaaaaaagttgttccatgtagacatgactggcatcagactggaggtgaagttaccatttcagtatatgctaaaaactcacttccagaacttagccgaatagaagcaaatagcacattgttaaatgggcatattgtatttgaaggagaaaaggaatttgatcaaaatgtgaaattatgggggtgtgatttgatgtaaagccgagttatgtaactatgactgcaacaaagattggaatcactatggagaaaagctgaaaccgaagcagtgggccaaaccttggaactggcctggcgctaaaaaagcaggaaaaaccaaaagatgcccccaacggaattggg

SEQ ID NO: 251312 - DNA, 642 bp, Homo Sapiens
  misc_feature (42)..(42): n is a, c, g, or t
  misc_feature (556)..(565): n is a, c, g, or t
tataatttaacatccatgtaatctcgatgtttgacccttttnttctctatccatttgtccctgaatttggttttaagtcttgtgaaagagatttgggtcattgtcaattaataaacacatgtctacactcatgtgtgtgtatgtgtatatgcacttacatgactaagtgggtacatatatacatggagataatacctatcatttacatgtgggtctttgtattctctagataaatattcaatattcctctctatattaaaaataaatgaaccataaaaaatgtcaaacggcaaaataaccaccggaacctgttcattctgattgaatatctgcttaacatatatcagctcaactatttttattcaacagatcatttgtagttatttgatcatttcaggccaataaccaatgaatacccagactttgagtgcaaatagtcaattcaaacagcacactgtctggaagtgtgcggccgacttgctcatgcagccaaatgtacaatccatattgctaagtcttaggatggcttcactgggcaaggatacaatcaagtgannnnnnnnnncaaatagaaaacttatttgaatcactacagtatctaataaaaccatgtcagcaacaaatacattgatgactctatga

SEQ ID NO: 251313 - DNA, 1091 bp, Homo Sapiens
  misc_feature (977)..(977): n is a, c, g, or t
tacggccgggctctttaagtccttgaaaatggagttggttttttttgtttctaaatgctatctgcttttaactagtagttgcctacatctggggacttcagagaagaattatattttgttagttaagtagacacagtggttatggaagcatttctttacagtaccctttacatgtttgggttctgaacttaaaattgccctcatacttaataatatggtctgcatttaatatgaaaggtgttttattgataaatctattgtactatttggatacatttgtgtattccttgcagccaacctgtattcgtgggattggtgtagggttaaatcatcaacattatttcataaaataagaatttgttctgtgttatctaaagatgtatcagtatattgtcacagttgtgctgttaactaaaaatgctgagacccctttttatagaaaaacaaaaagacatcaagtcttcttaattcaacccataatcattaagtacttaacaaagaatattttacaagtgatagtatctcaacaatgtgtaattaatatttttgatacagtgatttcatattggaatcattatttgtgcaaagggacagacagatcacttagattgctatactagtggacataggctaaatgtttgcacattcacattcttatcacgtgtagaatacttcacaaaatagtcaacatctaaggccctaatttatgttttgaaagatcatgtgttcccaaagtattccctattgttggctccacagccttaaagtgctatagatttaaattcattgattagttttaatttttaattttagactgtgtatttccataaataccctacgtactggcatatttgaaactctttttccaggttaggtccttttctttctcattgaatcatcttaaatagttcttggccctgaatttagctgatttaaaattcttaatattcaagaatttatacttattttttccttanaagccacaggggacagttaaatatcttaaaatatctaaaacattttttaaagcacttagattgtcttacgtatgtgcatactatacctttacagcgtttattgtcttgtctctt

SEQ ID NO: 251314 - DNA, 757 bp, Homo Sapiens
  misc_feature (220)..(229): n is a, c, g, or t
  misc_feature (658)..(658): n is a, c, g, or t
gggttgacttatgcccagcagtacagggacacagcttcattagagtgttagtgtaaactaactccaaagttaggagttaatgtgaaaggatcatccttgaaacaagtctgctgtttgccatgcttgtagtacagaaacttcacatggagttttgggtgggatttgtgttttcacaagtaaaaaatccctcacgattataaaactcagagcatcatctaannnnnnnnnnaatgactacaagttccagcacaaaactggcatttctttgccatttcttgccagtaagaagttgacacggaggtatttgaaagcaatgttatgtgagtcattcttaagtgttccaagtaagtttagaaacagaaaaggaacttgggattcaaattgatttttcaaatcatttttaaagagacatcatcctgactaaatcttagcctgaaccttcctcccctgtgtgtattccccggtagtcaccgcagcgagatgctggtgagactgtcgtggtggcatttagcatcgttaaaactggaaaactctcaagctctttgccactttcctactattttttgattcttgccattttaccaagcttaggttgtgaaacttgacagaaatgtattacaggaaaaacttataattgtatttgactttctaacacatntgcaaagtttcaaagtgactttcactttcaacaacatattagaagtaaccacttttgctttcacagcctgaagagttagagcctgatctgatgccccct

SEQ ID NO: 251315 - DNA, 588 bp, Homo Sapiens
  misc_feature (101)..(101): n is a, c, g, or t
acctctgcaatgtccagtgtccactagtaggaagaatagcacacctagggtccaggtaaaagtcttcattttgaaatgaggttgtaaaatgatgtgcttanatttaagtctttacttagttgtttttagaagagaaaaaaaagtcttctatgcgttgggttaattttattagtagcttttctcttcatagttgctatattgccagctttttgtgtctgttgattcagtgaatccagaaacttgctgcccttattcttgattttaaaaatcagtgtagaagtttgttcatctgtgactttaatggcagctgcatttttgttttggaccgttgaatccaagctgtaagaaggaacttctttttccttttacaatactaatcaattgaatttgacaagccacctatgtaattttaagtagtatagtggaaattctggtctgtgggccctctttaatccagcagagaaagcgttgtggctttgctctgtctgccacatggagaaatgcagtaaccagctgcagctgacccagattgtatatacagtacaccctgaatagtgattccctatttatcagtagactcaagttcac

SEQ ID NO: 251316 - DNA, 693 bp, Homo Sapiens
  misc_feature (632)..(633): n is a, c, g, or t
cctctgcttaccccaaaataactgtcagctccaaatcaacatgaatggagtgacattgaaaatatcatactattcccgataaaaagagtttaatgcaaaataattattacctggtatttcacattcggtttgtgtctttatctctactcccaggcaaatattctcacttaagaccagtgccttcactgcttcttgtaaagacatttaatttaatgttattgcatatttatttattttttatgcttattcatacagaatttattactttctagaattttgggataagaatcataatcactaatgcaaaatactcttaattttttaaatgttgtatttctcgtttttaaatattaatagttcactattctaagtttttcatgaataaaaaacacatcctaagttcatgaaatctgtgcggttcactactgtaccaggtattaaacaccttaagggctaatcctcttcacttatgagaatttctcaagaatgagtcaaatgcgccacatttaaatttgcagattattttgtctagctgctcaatcaagagaaataccactcaaagaaatcaattctaaattcatgtctttaatgaatactatgttttgcaaccctgtataaaaactgatcacccnnaagcacatgcaaaaggaatatagttatctttagtgggcttgctaaagtattgacaactaa

SEQ ID NO: 251317 - DNA, 1173 bp, Homo Sapiens
  misc_feature (35)..(35): n is a, c, g, or t
  misc_feature (71)..(71): n is a, c, g, or t
aaagcacccagagagtgagctgatttatcaagtanacaatcacactcacttcttaaaagacacaactacanacgccatagaaagcggtgactgatggagcctgcaggaccctgtgggcgaggacaactgggctcgcctggacgttttctcttttgcagtccccacaacactgccctgttcaagggcaaacaaaaggcagtgccagtcagacctgtggtagggctggagcgacctcttttgtataaattgattggaaagaaagagttaactgttttggtaagaatgaaaatttaaacacagaagtatgtaagaatgatactagcttttacattacttgtaaaacattttacaatcattattttaaaaacaaaaatactcaaaagggcaacagcactgggtaagaagctctttcattttaatattacacatgcaaatgctaactgaaacttacaagaataggcccatggtaagcggatcgattttaaagataagactttcagaatttcactggaaggtgggaaatcaataggaaagggatctacaaggatgaaggccaaaactcaacccccaaaacctggttatcccagatatgctaatgcacagtatgtgataatgtgtgatgagaaaaccggaatgtttcatcttaaatatggaggggaacgccaggttgaataaagcctgtatgaacgtactacattcatggaaaccaattatgaagaagtacacaacccgtgtaggtggcatttcttcaagcactctaaggggaaaatgacttatgtaacagaacaaaataaatgaggctaaggtttggggctcattctagctatacttctaattataatttactctgggtgacatctgaaataaagatacacatacctctatagaggccacccaatctctatagaagacaattcaactacaaaaagagcctaactggccattttaatatatcaggaacaaagagaagtaagattctgtatacaatgtctgcttcaaaaagattacgtgtattaaaaaatcaagaagaaaaaatcttaacattcaatgataacttcatggtcatttaaaagtccagcacttaaaaaggtctgtctgtgtaacacgtcttggaaagggtatgaaggatcatcctcacagtcactcaacagctgtcttctaccagaacctgac

SEQ ID NO: 251318 - DNA, 2224 bp, Homo Sapiens
  misc_feature (96)..(126): n is a, c, g, or t
  misc_feature (1546)..(1546): n is a, c, g, or t
  misc_feature (1549)..(1551): n is a, c, g, or t
ggctttttcttcctaatgtaaaataaagtaaaacacatctgccttcttgatatttatagaattagagaataaactttttaatgggggagtcaaagnnnnnnnnnnnnnnnnnnnnnnnnnnnnnnnattcaaactgtatgaaatggcaaagtgaggctctggggttagatttcagcattcagcagttgacacaggctaagaaatggaaagaagtagatctgttttttctcaatgttgctgagcaaggtctgcttctcatcagatgacgtggctttgtctagacagcacgcagttcagaaagaaatgtctttatacaaaagacatgatagagaaaagatgagagaggggactaattattttgtttatgaaaatggcaagtaaattacttgatctttttggtgcttaatttgcaaatgttttgttcctttgtcctgacttaaaggcagttttctgaagaactcttgactcttgctcctatggttcccataggcacacctattcccaggccaaggagagtccttcctctccccttttgaggcatccccgccatccccccacttagagctatgtgctcaaaaagccaacatgaatgcagtggtaaaaatttgttagtttcttatactttttagaatctctcaataaaatttttctaaataaattccacaaaaacaaagggtgaagatggtctctccctttcgttccccttcactcagttgtgctgaggtcaatagagtgtagagtttcagaaaggattccagcaggtttatatgtgaatataagtgtccctgaatggggcaggcattaaatagaagaatccctgctgtttaaatttcccgcatattccaattcacttttaaaaaataccatttgaatttgtatttcataaagtgactctggggtgcttactttagtcaattcttaaaattttttatttgttccctaagaaagtaattactgtttctgttgcctggacagttacagtttccaggaaacatcaggaagtaggaaactgtagggccagagagtagtacaacgttaaattgtccgatttatgtgtattacttaaagctataaattgaactagatcttgccgtgctctgtattgagtataatttgtatacttttttataattaatgactaaatgatcactttggaggcagggtggtgggggtgtattagcagccaaataagcacatctgatcaaaaagaaccaggcttagattttttttaagtacattgatgttgatgttccaccagaaacaccttaagtgtatactgttgtgtaatgtctctagaaaggaatcctgtcttaaaactgggttttgctgttttttgaagtttctacctaaaatcatttttggtatatcctgataatctctataatactagaattgtctgcaaaatatactaagaagaattggagcctaatagctgattcctcccaatttatctgttatgttttgtcactattcacattttagtcttttctacgataaaaattgtatgtgtactttcatgccagtataggaaacctcaatctttttnttnnncgcctttaagaaggttttcagtgattatacctcaggtatttctgagtgtcctatggtctaataggagaaatatcttcccgagctcagaattaaaagttctcctaaattatgaagatcccaaatcttatgtaaataaccttaggcatgagtccttagggagaagttaatgaccattgttaaagtgcttttttagaaaatgttgtgctgtatgttcttgatttgacataaatgaatagactttggcaagggaggaaataagttaaaaggcagcttacaagagcctattccctataaagggtataattttacacagtactcaaagcttgttatcttttctgaccattttagtacagaattagtacttggtggttactaacatcaacttgtgacatctagaactagggctcttagtgtttagtgggccacttctctgatgtcagatgcatgcagacctgtactccacatgcagcccaacagcagtgcagtgtgataactgagcggtcgcatggcagaggacatccccctcagaagtggacaaagtgcctctagggcagccaggggaatactattgttcgatacctgggatttgactttgtcaaacagctctttgtgcccctatctttgttttgtcaaatgtagatcagttaataaacatgagtagcttgaattttaa

SEQ ID NO: 251319 - DNA, 790 bp, Homo Sapiens
  misc_feature (477)..(507): n is a, c, g, or t
caactgggtagagggtgggagggatttacttttaagaggcaaaatgtgagtaaattgaaaccaagaaaacttgtttttaaaatatttcgtctgaataagtacagtagccaaggaatacaaacataattgcatgtttttaaaaattccttggaggctggaaggggttaagccagaagtgcaatcaataggaattagggaatgttgtatatttatatatgtaaactttttttgtaagaaaagttggtgacaactaaaccaactttttccaaagtgcgctatgcatatttttaatgaaagatgacatgtatttgcacaaaaattctcaggcacattaaattattgtaaactgaagtaaaacccgggtgcttgctttgagattgtggttttttcttcctaatgtaaaataaaataaaacacatctgccttcttgatatttatagaattagagaataaactttttaatgggggagtcaaagnnnnnnnnnnnnnnnnnnnnnnnnnnnnnnnattcaaactgtatgaaatggcaaagtgaggctctggggttagatttcagcattcagcagttgacacaggctaagaaatggaaagaagtagatctgttttttctcaatgttgctgagcaaagtctgcttctcatcagatgacgtggcctttgtctaggacagcacgcagtttcaggaaaggaaatgtcctttataccaaaaggacatggattaggaggaaaaggatgaggaggagggggaccaatttatttttgttttatggaaaatgggcccagttaaattac

SEQ ID NO: 251320 - DNA, 1334 bp, Homo Sapiens
acaccccctcttactaaccaacccaaccaggcctgggtggcgctggggcgtaggtgtcggggacgcgcgcacgggcgcgcgcagctgttgacgcgcttcttagctggtgcgcgccggagcccaaattccaagtggaaactgcaggcgcacgagggaggaacgcgtggagcatgaaaaggagcagcaaatggatttctcatggaagtttgtgttgattcagtggaatcagctgtgaatgcagaaagaggaggtgctgatcggattgaattatgttctggtttatcagaggggggaactacacccagcatgggtgtccttcaagtagtgaagcagagtgttcagatcccagtttttgtgatgattcggccgcggggaggtgattttttgtattcagatcgtgaaattgaggtgatgaaggctgacattcgtcttgccaagctttatggtgctgatggtttggtttttggggcattgactgaagatggacacattgacaaagagctgtgtatgtcccttatggctatttgccgccctctgccagtcactttccaccgagcctttgacatggttcatgatccaatggcagctctggagaccctcttaaccttgggatttgaacgcgtgttgaccagtggatgtgacagttcagcattagaagggctacccctaataaagcgactcattgagcaggcaaaaggcaggattgtggtaatgccaggaggtggtataacagacagaaatctacaaaggatccttgaagggttcaggtgctacagaattccactgttctgctcggtctactagagactcgggaatgaagtttcgaaattcatctgttgccatgggagcctcactttcttgctcagaatattccctaaaggtaacagatgtgaccaaagtaaggactttgaatgctatcgcaaagaacatcctggtgtagccagacctctctgagagacatggatatcacaggatgaaggtagaactataatctgcaattctctatgacacagctttaaccttcttctctggccaggacagtcgcaatctttgttttaagtttcacatggccatggagaatgtgcccaagaagaaaaagaatttgaaacagagatacagtcacttcctttgcttagtcttaccagtgattgtcatcatggttaaagctggtctgtgcttcttccatagacagaagcttagtctgttttcagtggaataaattgatgaactgggaaaattttaactgcatggtatgaattcagagtgtgacttaagggtcaattcaaagcagtattttgacttttcatttgtaaaataaaaatttccactattac

SEQ ID NO: 251321 - DNA, 911 bp, Homo Sapiens
  misc_feature (20)..(20): n is a, c, g, or t
cccctaacttgggtcaacancggttaccctttggggaaaaaattcctgaagcaaagaaaagtgaggctccccagggccaaacaagatgaaatttcgaaaacttcaattccccgagtctcctagtagaccgagcagaaccagtggaattctgtagcacctgaaccctcaaggatcctttgtagatttctgtctgttataccacctccctggcattaccaacaatcctgccttttgcctgctcaatgagtcgctttattaggggtagcccttctaatgctgaactgtcacatccactggtcaacacgcgttcaaatcccaaggttaagagggtctccagagctgccattggatcatgaaccatgtcaaaggctcggtggaaagtgactggcagagggcggcaaatagccataagggacatacacagctctttgtcaatgtgtccatcttcagtcaatgccccaaaaaccaaaccatcagcaccataaagcttggcaagacgaatgtcagccttcatcacctcaatttcacgatctgaatacaaaaaatcacctccccgtggccgaatcatcacaaaaactgggatctgaacactctgcttcactacttgaaggacacccatgctgggtgtagttcccccctctgataaaccagaacataattcaatccgatcagcacctcctctttctgcattcacagctgattccactgaatcaacacaaacttccatgagaaatccatttgctgctccggccttcccggacggtatccgcgctcgttttcgctcagaggaggccccctgccttttcatgctccacgcgttcctccctcgtgcgcctgcagtttccacttggaatttgggctccggcgcgcaccagctaagaagcgcgtcaacagctgcgcgcgcccgtccc

SEQ ID NO: 251322 - DNA, 491 bp, Homo Sapiens
  misc_feature (18)..(18): n is a, c, g, or t
  misc_feature (32)..(32): n is a, c, g, or t
  misc_feature (49)..(49): n is a, c, g, or t
  misc_feature (74)..(74): n is a, c, g, or t
tggggccccaaaggtaanggacctttggaaancgatccgcaaaggaacnatcccccggtgtaggcccagacccncctctgagaggaccatgggatatccaccaggatggaagggtaagaaacctataaatccggccaattccctcctatggaccaccagcctttaaccccttccttcctctgggcccaggacagtccgcaatcctttgttttaagtttcacatggccatggagaatgtgcccaagaagaaaaagaatttgaaacagagatacagtcacttcctttgcttagtcttaccagtgattgtcatcatggttaaagctggtctgtgcttcttccatagacagaagcttagtctgttttcagtggaattaattgatgaactgggaaaattttaactgcatggtatgaattcagagtgtgacttaagggtcaattcaaagcagtattttgacttttcatttgtaaaataaaaatttccactattacaa

SEQ ID NO: 251323 - DNA, 880 bp, Homo Sapiens
  misc_feature (11)..(11): n is a, c, g, or t
gcacagcagtngctggaagatgaccatgacccaagcgagaagagccgccatgaactgtggtcataccagccagggcgttctaggacaagacttcctaacccgacagcaatgacatccacagtgtatggactgggctcttgaggagcacgagggagaggccaggcagccctgtcaggggtcctgggacatattaaggcaaccagccacgccatctggccagcacaagggacttaagtgcaatctgctaagtgacagtgctaagactgtcttcctgctgagaacatctctacgagttagttcactagaaaaggcaataaacatttgctttaaccttctttaaccaggaaaatgcagtctaaatgccctcttctctaaaaaggaggcaaggacaaaaactcaagccaaggctactttgggtactttgaggggaaactgaccatttccaagagaaacccaggggctgccaagctgcggcattcaccctcctgcagaaagctttggcaatgggacttcttagactggacaaatcaaacaaagctgaccctgtagagctccttcttcttcccacttcttctaaggtcaaactgcaagcattttcaactttggaaccaaccaccaaagccacctcctgcccaggacttcctttagaagcagtgggactcctcacgcgcaggcccagcaagggcttgggcacccgcagctgtctgcttggctgggtgtcaatgatcacctcccagggcctcccaggaaggagagggtgagaggtgaggacacaagagccagtcagggggtaggagcagggggctatggctgaggaggcccagcatctgataggaccacatcctcttcaccctccaagcccacacccctgctcatgtcc

SEQ ID NO: 251324 - DNA, 923 bp, Homo Sapiens
  misc_feature (373)..(625): n is a, c, g, or t
  misc_feature (634)..(672): n is a, c, g, or t
gactaagcatctacagtcgctagagcgcgagaacatgaaggagagaagatgtcgggaaaagacagaagacatgcgtatcttttaacttctagaccccatacccctcaaatagttcacctgaatagtccaaaaatcaagaatgggttagatatacttgttccaggagtgccaaataaatataatgcctgtaaacagatgatcccagtgcctgactgaatgtatagaaagaaaaacctaaaggtaaagggtatgaatgattaaaattttctacagagaaaactttttaaaaacaaactaagtatgaaatataactatatttagggattatatttagggattaaaataaaggagcagctgggcatggtggctcatnnnnnnnnnnnnnnnnnnnnnnnnnnnnnnnnnnnnnnnnnnnnnnnnnnnnnnnnnnnnnnnnnnnnnnnnnnnnnnnnnnnnnnnnnnnnnnnnnnnnnnnnnnnnnnnnnnnnnnnnnnnnnnnnnnnnnnnnnnnnnnnnnnnnnnnnnnnnnnnnnnnnnnnnnnnnnnnnnnnnnnnnnnnnnnnnnnnnnnnnnnnnnnnnnnnnnnnnnnnnnnnnnnnnnnnnnnnnnnnnnnnnnnnnnnnnntccatctcnnnnnnnnnnnnnnnnnnnnnnnnnnnnnnnnnnnnnnnggagcaacttaggtaaaggtagaggaggtatttaactgggggcattctctggagagcttgctttcctgctggccaatacaatctgccaaagaaaattagcagcctttccctttatgtttgtgccatttccttatcaaagaatgtctctgtgacactgaaacatgggggtgagtcgagggtccttgcgcgcagagaatcgtgcattgtatcagaaaaaaggggtctccagtggcttgtaaatctgggaaaac

SEQ ID NO: 251325 - DNA, 994 bp, Homo Sapiens
ggggaaccccggaagtgcgagctggcgcgcagctgcagtctgggagtctttggagtaagaatggccttggaagggatgagcaaacggaagagaaagagaagtgtccaggagggagagaatcctgacgacggcgttcgcgggagtccgccggaagactacaggcttggacaggtcgccagtagcttatttcgcggcgaacaccattccagaggtggcaccggtcggctggcgtccctcttcagttctctggagccccagattcaacccgtgtacgtgcctgtgcctaaacaaaccatcaaaaaaacgaaacggaatgaggaggaagaaagtacatcccagattgaaagaccactttcgcaagaacctgccaaaaaagtgaaagcgaagaagaaacacactaacgcagaaaaaaagttggcagacagggaaagcgctctagcgagtgctgatttagaagaagaaattcaccagaaacaagggcagaaaaggaaaaattctcaacctggtgttaaagtagcagatagaaaaatacttgatgacacagaagacacagttgtcagtcaaagaaagaaaattcaaatcaaccaagaagaagagagattaaagaatgagagaactgtgtttgttgggaatttgcctgttacatgtaataagaagaagctgaagtcgttttttaaagagtatggacaaatagaatctgtacgatttcgttctctgattccagcagagggaacgctatccaaaaagttggcagcaataaaacgtaaaattcatcctgatcagaaaaatattaatgcctatgttgtgtttaaggaggagagtgctgccacgcaagcattgaaaagaaatggggcccagattgcagatggatttcgtattagagttgatctcgcatctgagacctcatctagagacaagagatcgggtttttgtgggggaaatctcccttataaagttgaaagaatctgccattgaagaaacacttttctggaaa

SEQ ID NO: 251326 - DNA, 1042 bp, Homo Sapiens
  misc_feature (781)..(842): n is a, c, g, or t
  misc_feature (987)..(987): n is a, c, g, or t
  misc_feature (1000)..(1000): n is a, c, g, or t
  misc_feature (1028)..(1028): n is a, c, g, or t
gagacagggaagagaagtgcaagaattggttgctggtgctacatggcggcagctttgacattttctctgggttctactttattttttaaaatctttacagttctcaccatttcacgtaccttaatccaatctttataaaagaggcagtctagagaactaggactgctcagccttatcctggagtggagcatttagcccaggtcttaattctccaagaggaggaatacatagtatggtaaggcaaggaactgggtggaatgtcaggttgcctgcccaatgggagaggtagggtttttctagcttgtgtgacagaagtagcaaaatctggtcctcccccctcccagtgtagctgtggctcagagttttttctttttgttgtcacttactcccttgtgattgaattttttctcctgcatccatggcaggatccccagccagtatagagacttggttggcatcttctgctgcagggactaaaagtatttgactggggcacatgtggctgttgtcattctttctgcatcccactgttcccctccaatttatgttattttctaccctgtttttcagttccatctctgctctgtcctatagctttataaaaccagagtgtgtggggctgaggtcaggagtataagtacctgccttaggcactattccttatataacaaaaatattaaatatttttttcctcagtaaaaggatgaaaattggtttcagttgtcttactctattccagtctttgcccactttcacacaaatgacaaggccaatatgtttnnnnnnnnnnnnnnnnnnnnnnnnnnnnnnnnnnnnnnnnnnnnnnnnnnnnnnnnnnnnnnaaaacaccagggctgtggggggaggggatgcaaacaaataacaaaaaaggatgcttttgtaacattattttccctgtttaggaaaggaaaaaaatcactcccaattagtatttgaaaagtcccaaaggatggaaataggtttccntttccttttcccnaaggggcttattaaaggggcccctggcncgttggatttccct

SEQ ID NO: 251327 - DNA, 772 bp, Homo Sapiens
gggggctaaggactgtggtcttatctgtccacatagccaaaatgcctatccagaaatccagttcgttggaaaggaaaattggcactcctgtgccacaggggttccagaaaagggaagtcactttaccttgcggaggtgggatcctgatgtctttcatccatttgtagtaaaagctggtaaagcttttcttactcctggttccctaccagtatttctaaacatgtcgcactttctccacaggcatgtggttttgacctttttttcaatcttctagaaagggaacggaagcagaagtgggacatcgagggctctgctgtcctctgcgctgggtgtggaatgctgctgcacctgtcccttctgctggctcagggaagtgtcttcttgcccacatttctgtggggaaaggtttttaatcctctgatgcttccatcttcctgtttaggccatgtgcccagaaacctggactgatctttctttaatagtgaacccctgggccactgaagagtaacatggctccactggacacaaaagagggatggaatcaacaggcagggggccttttataagccttaggaaaagaaaatgaaactatttcatctttggacttttcaatactattggagtgatttttttctttctaaacagggaaaataatgttacaaaagcatcttttttgttatttgtttgcatccctcccccacaccctggtgttttaaaatgaagaaaaaaaaccatcactttttgtacaaaaactcttaatgattaaaaaaca

SEQ ID NO: 251328 - DNA, 608 bp, Homo Sapiens
acacccagcgcagaggacagcagagccctcgatgtcccacttctgcttcccgtcccctttctaggaggattgaaaaaaaggtcaaaacccacatgcctgtggagaaagtgcgaccatgtttagaaatactggtagggaaccaggagtaagaaaagctttaccagcttttactacaaatggatgaaagacatcaggatcccaccaccgcaaggtaaagtgacttcccttttctgggaacccctgtggcacaggagtacccaattttcctttcccaacgaactggatttctggataggcattttggctgtatgtggacagataagaccacagtccttagcccaatcccagctatacagtcaccccaatttccacaaatgatgtgatggtaccgtataatcctgtaattgggaaatttcacatttttcctgtcctaatctcagaggtgggagaagcaagtctagaacatctccaggctcagactaaacgagagtacttggactgcaaccaagtaatcactgcaaagtagttccaagcagcaagaaataccagattctcatggaggctactatagggtacagaataacaacatgaaagcaatcaaccctgta

SEQ ID NO: 251329 - DNA, 366 bp, Homo Sapiens
  misc_feature (62)..(63): n is a, c, g, or t
  misc_feature (69)..(70): n is a, c, g, or t
  misc_feature (72)..(72): n is a, c, g, or t
  misc_feature (83)..(83): n is a, c, g, or t
gtcacttactcccttgtgattgaattttttctcctgcatccatggccaaaaaaggggggggnnaaattnncncccaagccagntatagagacttggttggcatcttctgctgcagggactaaaagtatttgactggggcacatgtggctgttgtcattctttctgcatcccactgttcccctccaatttatgttattttctaccctgtttttcagttccatctctgctctgtcctatagctttataaaaccagagtgtgtggggctgaggtcaggagtataagtacctgccttaggcactattccttatataacaaaaatattaaatatttttttcctcagtaaaaggatgaaaattggaaaaaaa

SEQ ID NO: 251330 - DNA, 983 bp, Homo Sapiens
  misc_feature (48)..(48): n is a, c, g, or t
  misc_feature (466)..(475): n is a, c, g, or t
  misc_feature (584)..(584): n is a, c, g, or t
aattttaagatgaaaaggaacatattcatggaattttacattgcttanaccatatatattaggtattatactttcctcagcatatgtgctgtttttttggaattagcaactccatttcctacattctgcacaggtaccaatggatttagtatttacacaaactactaccttgtattttaaaaaactcactcaaaaaagcctgatgaaagggtcctcattatttaattcattctttcgtggattctcagcaataagaatatatgtaacacatacaatgtactcactacacagggccaggtacttttgcctgagtcacctcattttatcttttgacttactcttcacaacaatcctggggagtgaagataactatttcattttataaattggggaaaataagggtcaaaaaaataagctacccagggccaggaataaaactcaaaaccaaagtaaatttgttctcttnnnnnnnnnntacaaaagaaaggcttggcttatctttaactgaataagcacgtgccaagaggagaagagttcttagcgatgagaatgataggataatgccctctttggctttagtaagnggtgacatcatcatgtattgaatattaactctaggatttatttttcttctttatcttgataaatctctcactgtctaccctaaagaaacagaagcttaacatttcctctaacaggtcacctaattaaaacccaaacctccctttgccaatataaccccaaatttcaaactcagagatgaaaatacacaagggctaagcataacattataaaaacatacaccccaccttggaaaatagaggctcaaaagccaagctcaaaatgaatttaaaaaggtagaaaataatatactaaagcacatctttgcataacttcctagaactgcatatctggcctagcaattttactcaccattacataatcatacaggcttacagcagaaaatacaaaaagaccaaaac

SEQ ID NO: 251331 - DNA, 520 bp, Homo Sapiens
attatatataataaacataaatatgtttagctatatagttagtataatttttaaaacttttaaatacagcatatggtaaaccaacgggaaaattagctattttacttcattattttaaagagttctttttatttctttcataattggatcaacaactgttaacctaaccctgggtgggcatcatgcaatatatagaagtacgtgaaattttctgtgtatgaatagctgatactttgcaaggcattttcaaatccatcaccttatgagagcttcacagctagtctgaggtagttacttcattggaggtaaaacttaaaacacaagaaagagcccacatgatttgcctagggtcattcagtaagtccgtgatggagctagaacttggtcttgtcaggtttttggtctagacttccctttcatggaggcaagaataaccattatgaaacagttagataatcataaaaatcagcatacaataaaagacttaaatgtcacaagaaaaattcaaaacctttagctt

SEQ ID NO: 251332 - DNA, 711 bp, Homo Sapiens
  misc_feature (695)..(695): n is a, c, g, or t
taagaaattaagtgaaagttgcagtagtgagtatcttagataacatgcagtctgaatgcaagataactaattagccagcccagaatctcaagattctttaaaccaactgtgcctaatttacagagtttataactcacatgttaaaccctgaaatacttatggtgatggctatgtgggaactttgaccttttgtagttatctaaatgaccttgtggctttcatgttaaataaacatttttaaatattctattatgccaaatctaattcccatttatttttcttatatttcccttggtttaccactttttagggaatctttggattttaacccctcgtcaatagtagaagcaaagtctgaatttaacctaaacattatgataggcagaagtcaagcaaagactgtttttactctttagtgttaggataactaaaaggggtgtttagccaacaagatgtggttcctttcagatttgaaaatattatttccaaattctaaattaatgaaacaatttttcatctttaatgaacaaaagccacaagccttattttatttcagcctctaaaattaaattgattgtggctgctgtcaaacacagacgacttcactttgggtatccttgggatgagtgtagttgtggaatgaaaaactattggttcatttctttaatattaatataagtttttgctattatgtncaaagtactttccaat

SEQ ID NO: 251333 - DNA, 1107 bp, Homo Sapiens
  misc_feature (80)..(80): n is a, c, g, or t
agccaaacccaggggccaatcccccaccttgtaaagggaaaaagggaacaggaagtttatgtaacatccaagtccctttnagtttgcccaaccaatccagggcagaggcaagggacaggcctataaggataggaaaaggagaaacgggggagtggggaagccagtttcagactaattgcttcatgtacattcctactagctcctcctagaggtcttcttcttcccaaaaacacatctttctgctccttctctaccaaaagtcttccttgacattctcccctttctacagcctcttggaaatggccaggccaactcagcagacatatcacagggcaggagaggtgggttaaggacagcctgtgtttaaggggcagcagcaatagcccagggttggcatgaggcttgcagaagagatggagtctgtaggttcttgatggtccctgccttggagatgaggagagcaaggtttcttaatcccagttttaggagaccttcacttactcaagggtcctttgccaggtggcatgtgccaatgttgctggccttctttgcttcaaaaatagccattaggaataagggaagagctcacactttcccctctctaaaagaaaataaaagtcccttccccatcaggaaaaaaatcttgattaagaatcgtcagtttatcagactgctggacattgcatatacagcatgtaacttccaattcttcccacggcttctagtgaagattcctattctctccatccctcccctccacaaaaggacaggagttccagggaaaactggcaaaaagaaataatctgcagcagtttctcaaaatatgcaaataattgagtcaggattcttgggagaaaaatggagggaatgggggagggggaggcgttgagacaattaaacttcacaggaagaagttgggagttgatggaaagaaggcagccacttagggctgtaagggtaggaggcagcctggcagttggcacaatagtccagcgaagagaaaggaaaatcatcagtcaatttcaccaccataatataaagtacatataagcccagatggaacggggatagtggtgctaaatcttctgcatcaagggtgttgttccc

SEQ ID NO: 251334 - DNA, 597 bp, Homo Sapiens
  misc_feature (77)..(96): n is a, c, g, or t
gcgaaacgcctcctacctcaaaacacaggtcctctcccccgactcgctgttcactgccaagtttgttgcatacaatnnnnnnnnnnnnnnnnnnnnctgcagcctagcaggtcaggataagtactccagcacaagaaagtctcatggggaccttcttcctgcccctcttaaaccacggtcacccccctgccagccacgcccggcctccgatggcgtctttctctccaactcattccagccaccctcagccaaagccaacagtactgctcacaaaaaaggccagcccctgccccctccaaaaaaatccagctcctaccatcccagccactgcaaaggaccaaactcttacccaggatctactggagcagctgttggagcccatgacgcctgtcgggatgcaaaagagaagcgctctaaaagccaagatgcagattcacctggaagttctggggcccctgcttgacattcaaggaacgccagcgtcttttttcacaaggtcaagatgtatccaataaagtgaaagcttctcgtaaattaacagaactggagaatgaactgaacacacagtggagaatgaggagcactctgtatttcccc

SEQ ID NO: 251335 - DNA, 1395 bp, Homo Sapiens
  misc_feature (53)..(95): n is a, c, g, or t
  misc_feature (177)..(196): n is a, c, g, or t
  misc_feature (1010)..(1010): n is a, c, g, or t
  misc_feature (1027)..(1027): n is a, c, g, or t
  misc_feature (1311)..(1311): n is a, c, g, or t
  misc_feature (1318)..(1318): n is a, c, g, or t
  misc_feature (1336)..(1336): n is a, c, g, or t
  misc_feature (1352)..(1352): n is a, c, g, or t
  misc_feature (1369)..(1369): n is a, c, g, or t
gggtggcgaattcggcacgagggtgccgccctccgcttccccgggactacgannnnnnnnnnnnnnnnnnnnnnnnnnnnnnnnnnnnnnnnnnncctcagcgaaacgcctcctacctcaaaacacaggtcctctcccccgactcgctgttcactgccaagtttgttgcatacaatnnnnnnnnnnnnnnnnnnnnctgcagcctagcaggaccaaactcttacccaggatctactggagcagctgttggagcccatgacgcctgtcgggatgcaaaagagaagcgctctaaaagccaagatgcagattcacctggaagttctggggcccctgaaaacttgacattcaaggaacgccagcgtcttttttcacaaggtcaagatgtatccaataaagtgaaagcttctcgtaaattaacagaactggagaatgaactgaacacaaagtgaaagaaaatgaggagaacactttgtatttaccccaaaatcttttcagttgtgggtttgtaggtgcgagtttgaagaggaaaagaggaagggggttatatttctaagtgatttacaatttctgtttctaaaattgttgggatttagaaatgtttcaattccaagaaattttattttactttaccatgagattgccatttatgtaatttaaacactgtctagtttcttaattatctaactcacacgagggtaagtttttttgttgggtttcttttttggaggcctgaattcaaaggggacagaactaagggcaggagaagagaatggatgtgtcttctcccccatcctcccctcatcatcgaccgaggagcacaaagaagttctgtttctgtttttttcagaaactttattttagctgtcaagcagagaatagcttgaactattcagactattgttggcactgtttagtagtgaccacacgctcttctacccgggaaggaacatatgacgacatgctcctcccatgtcccctgatggtgtctgttcccacaatatccttctagntctgcatcgtgaaagtnggcttaggcaaagcttcctgtgtgatgacgcacgtccgagactgttccatctcattcctcgcaaatttgagctcttctgatcaattctaaatatttgattaattttaattctgaaagaaaattttgaggatttaagcttaggggattttatttttataaataccagattattgttagacttaataaatcactgttaaatttaaagatgacagttaccttggaaagttcactaatacttcgctccaaggcgtctgttaaaagaagatatctttattggggggcanggttccngtggactggggatggacnggaggatgggggaggnggagttgggggaccccntccaggcacagctgttcactccggaa

SEQ ID NO: 251336 - DNA, 990 bp, Homo Sapiens
  misc_feature (65)..(107): n is a, c, g, or t
  misc_feature (189)..(208): n is a, c, g, or t
ggggcgaggcctgggtggcgaattcggcacgagggtgccgccctccgcttccccgggactacgannnnnnnnnnnnnnnnnnnnnnnnnnnnnnnnnnnnnnnnnnncctcagcgaaacgcctcctacctcaaaacacaggtcctctcccccgactcgctgttcactgccaagtttgttgcatacaatnnnnnnnnnnnnnnnnnnnnctgcagcctagcaggaccaaactcttacccaggatctactggagcagctgttggagcccatgacgcctgtcgggatgcaaaagagaagcgctctaaaagccaagatgcagattcacctggaagttctggggcccctgaaaacttgacattcaaggaacgccagcgtcttttttcacaaggtcaagatgtatccaataaagtgaaagcttctcgtaaattaacagaactggagaatgaactgaacacaaagtgaaagaaaatgaggagaacactttgtatttaccccaaaatcttttcagttgtgggtttgtaggtgcgagtttgaagaggaaaagaggaagggggttatatttctaagtgatttacaatttctgtttctaaaattgttgggatttagaaatgtttcaattccaagaaattttattttactttaccatgagattgccatttatgtaatttaaacactgtctagtttcttaattatctaactcacacgaggggtaagtttttttgttggtttctttttttgggaggtcctgagttccaaagggggacagaaactaaggggcagggagaagaagaatgggatggtgtcctttctctccccatctttcccctcatcatcgacccgaggaggacaaaagaaggtccggggttccgggttttttccaaaaactttatttttacctggccaggccagagaaaaccttggaacttattccgaactatttggttgggccctggtttaaataagggacccaaaggttctttcttacccgggg

SEQ ID NO: 251337 - DNA, 547 bp, Homo Sapiens
gattaagggatgggccactgcgcctggccctgtgtgtaaattcatgtgactaccaccacaggcaagacacggaagacttccattacaagcatccccctgtgttgccctctcataatcattgccacctctctccctggccctctccttaatccctgacaaccacttactgttctccatctcagtcattttgttattttgagaatgttatataaatggaatcaatatataccctcttgagactggcttttttttcactcagcataattcccttgagttccatccaaggctttggatgtatcactagtttgttcctttttattgttgagcatatagtgcagatatatcacttagttttaacagctaaggtatctatttaaagatatcatcttaaaactaaatgttacacaaatttcatgcaactttcatataagcattaaaccatacagctgcatctacgtaagtataattagcaaaatcactgaacatgccacttcctgcctccgtctgcggtgttgacatatgaggtacagcaatccgagagtcaact

SEQ ID NO: 251338 - DNA, 698 bp, Homo Sapiens
agtcaatgggaaaatttaaggaagctgaagaaatgcacatcaaagcaattcagattaaagaacaacttcttggtcaagaagattatgaagtagccctttcagggggacatctggcttctttatataattatgacatgaatcagtatgaaaatgctgagaaactttatttgcgatctatagcaattgggaagaaactttttggtgagggctacagtggactagaatatgattatcgaggtctcattaaactttacaactccattggaaattacgagaaagtgtgtgaatatcacaatgttctgtctaactggaaccggttgcgagatcggcaatattcagtgacagatgctcttgaagatgtcagcaccagcccccagtccactgaagaagtggtgcagtccttcctgatttctcagaatgtcgagggaccgagctgctgagggaggacctcagttaaccaattaccttttcccggattccagggaattcatactgtgaaatcaaaaccatgttgttttggggggctggaatttgcattgaaacactggtccagtccattgaagaccctattttgggtgatccctatcttgcagaatgtctgtaggaataagcatatattcagttatattcagcatgtaccgcatgtgtaagtagtctggcccacattttcaacctagtagaacaaacaacaggaaatc

SEQ ID NO: 251339 - DNA, 1062 bp, Homo Sapiens
  misc_feature (981)..(981): n is a, c, g, or t
gggacctcagcgggaagcggagacgcaagcagctggatctccggtaactgagacatagggtataactgttgtcgcggcggaggaagtgaggacggcgccaagggccttccgggccagtgttggatccctgtagtttgtgaagatggtgttgctaacaatgatcgcccgagtggcggacgggctcccgctggccgcctcgatgcaggaggacgaacagtctggccgggaccttcaacagtatcagagtcaggctaagcaactctttcgaaagttgaatgaacagtcccctaccagatgtaccttggaagcaggagccatgacttttcactacattattgagcagggggtgtgttatttggttttatgtgaagctgccttccctaagaagttggcttttgcctacctagaagatttgcactcagaatttgatgaacagcatggaaagaaggtgcccactgtgtcccgaccctattcctttattgaatttgatactttcattcagaaaaccaagaagctctacattgacagtcgtgctcgaagaaatctaggctccatcaacactgaattgcaagatgtgcagaggatcatggtggccaatattgaagaagtgttacaacgaggagaagcactctcagcattggattcaaaggctaacaatttggtccagtctgtccaagaaataccgccaggatgcgaagtactttgaacatggcgttccacttatgccaaacttgcagcagtagctgtatttttcatcatgttaatagtgtatgtccgattctggtggctgtgaaataatgaatacagtcactggtaagggagaacctagaacccagtaggtgtatattttcaggaaactgagctcacagagatgtgtattagaatccaagtggaacttctgcctctaaagaccttgcaagaaaagagatgccctgaaaaatgaaaggtgcacctcatttaatgaagcttacccctatgtanaaagtctcttttcgggggcagaagcttttctctggggtgcccagccatatatattaggggaaatagtagaatggttaaatt

SEQ ID NO: 251340 - DNA, 899 bp, Homo Sapiens
tggaaaaatttatgaacttgatcttcggccggttgatgccaaatcgccttactttttgagtcggttatggactgccgcctttaaaccacatgggtgcttctgtgtatttaattccattgagtcattgagttttattggggaatttattgggaaaataagaactgaagcttctcagatcagaaaagataaatacatggctaatcttccatttacattaattctggctaatcagagagattccattagtaagaatctaccaattctcaggcaccaagggcagcagttgggaaacaagttgcaatgtccttttgtagatgtacctgctggtacatatcctcgtaaatttaatgaaacccaaataaagcaagctctcagaggagtattggaatcagttaaacacaatttggatgtggtgagcccaattcctgccaataaggacttattcagaagctgacttgagaattgtcatgtgcgccatgtgtggagatccatttagtgtggatcttattctttcacccttccttgattctcattcttgcagtgctgctcaagctggacagaataattccctaatgcttgataaaatcattggtgaaaaaaggaggcgaatacagatcacaatattatcataccactcttcaattggagtaagaaaagatgaactagttcatgggtatatattagtttactctgcaaaacggaaagcttcgatgggaatgcttcgagcatttctatcagaagttcaagacaccacctccttatagtccaattggggatgatgtacagttgcttccaacacctagtgaccgttccagatatagattagatttggaaggaaatgagtatcctattcatagtaccccaaactgtcatgaccatgaacgcaaccataaagtgcc

SEQ ID NO: 251341 - DNA, 1108 bp, Homo Sapiens
ccaaaatgctgggattacaggcgtgagccaccgagcctggccggttaacatcttttaattgtttccaggattgagcaggttctcagttgggctctgatatcccgtgcggagttggacaagtgggcagcataaagtcactcatttcttaccattttattcccctcaattctcaatatattcagtaatgaagaatggtgccaccactcaagcaacaagcctcaaactcacccatgtcatctttttcttggatgattgcagttatttcaaaaatttgcatgcaaaatatacactcatcctacttcaagatggtggtggcaatagtcaggagaaggtagcattggagtcctggtttgattcgaaggatgaagacgaagaagcaagggaggaacaaatgaagaaccatctttgttcatgaataggaatattcaagattataaaggtaccaggtctcctaaaattgacctatggatttaataccattttcaatggaaattccaacagattttattgaatgaaacaagcaggtgtttatatggagtagcaaaggacttaaaattaccaaatgcttctaaatatgaaggagaggttggggacacgcaccctatgtgataccaagttttattgtcaagacagtgtcatggtgcagaggtaggcattctgagcaggggaacaaaataagggcctagaaactcacccgtgcatatgttgacctttgcaaaatgacctggtgacatggcaagtcagtggggacaggaaggaccactccctaagtaatcccagaacaatggcctattccatgtgggaaaaaaagaaattttactttctctcaccttacccgggtgataagttcccaaatatgttaagggctttaatacaaaaagcaaaaattgtcagtgtttgggatgaaaaaagccttagggcaggaaagaatctcttgagacataaagtagtaatcataaaggacaagatggttaagtcaattctgttaaaactcaaggcttatattaagcaaacacttgaagtgagaagatgatccacaacttgagaagacatttataatacaaataactgatgaaggattcataatcacaaatatagagaattcctg

SEQ ID NO: 251342 - DNA, 355 bp, Homo Sapiens
  misc_feature (25)..(25): n is a, c, g, or t
  misc_feature (31)..(31): n is a, c, g, or t
  misc_feature (52)..(52): n is a, c, g, or t
ccccataaaaaacaccggcttggtntcaatncaaataaaaccggttgggaantcccattggaaaagggtattaaaacccatagatcaaattttaagggagacctgaatacctttaataatcttgaaatattccctattcatgaacaaagatggttcttcatttgttcctcccttgcttcttcgtcttcatccttcgaatcaaaccaggactccaatgctaccttctcctgactattgccaccaccatcttgaagtaggatgagtgtatattttgcatgcaaatttttgaaataactgcaatcatccaagaaaaagatgacatgggtgagtttgaggcttgttgcttgagtggtgg

SEQ ID NO: 251343 - DNA, 899 bp, Homo Sapiens
  misc_feature (847)..(856): n is a, c, g, or t
ggggagatcgatctaagatggcgactgtcgaaccggaaaccacccctactcctaatcccccgactacagaagaggagaaaacggaatctaatcaggaggttgctaacccagaacactatattaaacatcccctacagaacagatgggcactctggttttttaaaaatgataaaagcaaaacttggcaagcaaacctgcggctgatctccaagtttgatactgttgaagacttttgggctctgtacaaccatatccagttgtctagtaatttaatgcctggctgtgactactcactttttaaggatggtattgagcctatgtgggaagatgagaaaaacaaacggggaggacgatggctaattacattgaacaaacagcagagacgaagtgacctcgatcgcttttggctagagacacttctgtgccttattggagaatcttttgatgactacagtgatgatgtatgtggcgctgttgttaatgttagagctaaaggtgataagatagcaatatggactactgaatgtgaaaacagagaagctgttacacatatagggagggtatacaaggaaaggttaggacttcctccaaagatagtgattggttatcagtcccacgcagacacagctactaagagcggctccaccactaaaaataggtttgttgtttaagaagacaccttctgagtattctcataggagactgcgtcaagcaatcgagatttgggagctgaaccaaagcctcttcaaaaagcagagtggactgcatttaaatttgatgtccatcttaatgttactcagatataagagaagtctcattcgcctttgtcttgtacttctgtgttcannnnnnnnnnggctagagtttccactatcccaatcaaagaattacagtacaca

SEQ ID NO: 251344 - DNA, 1260 bp, Homo Sapiens
aagagtcggttgccgtagcagagccctctagctgtgtgtgtctgaggctcggccgcctgagccgcggacggtttgctgagcccgttagtgcgcccggccgagacacgccgccgccatgtcccgctacctgcgtccccccaacacgtctctgttcgtcaggaacgtggccgacgacaccaggtctgaagacttgcggcgtgaatttggtcgttatggtcctatagttgatgtgtatgttccacttgatttctacactcgccgtccaagaggatttgcttatgttcaatttgaggatgttcgtgatgctgaagacgctttacataatttggacagaaagtggatttgtggacggcagattgaaatacagtttgcccagggggatcgaaagacaccaaatcagatgaaagccaaggaagggaggaatgtgtacagttcttcacgctatgatgattatgacagatacagacgttctagaagccgaagttatgaaaggaggagatcaagaagtcggtcttttgattacaactatagaagatcgtatagtcctagaaacagtagaccgactggaagaccacggcgtagcagaagccattccgacaatgatagaccaaactgcagctggaatacccagtacagttctgcttactacacttcaagaaagatctgaaagcggaaaaagaaccaaagaagggcagttcaagcgaccaaagggtgggtggaaggtgctgcagtatgaatactgtacgaatattttgactctggtctgaaaagataaaagaatgttatcgaaaactacatggaataattgaagtcccttcaagtttgaaagtaagcattttaggacaaataaaaggaaattcaactttgtacttgtggaaactaatccctaaatatgaataggtttatattgattcatgggtaacaggtccataataaattattggaaactaggatgtctgaatatcaaggaagacagccatagtctcttacagtgcctctgttggtctgtctcaactgaattgggtggggaaaaaggatggtcccaatataaaagttccatttttgccattattggcaaatcttgcctttggtttatttgggtgccaggggttttctggcttatcattttgctttggtgggcatcccggggttaatttaccttgggcaccacatggcagtttaccttcggcccttaaactactccttccccgggtaaaattccaattaatatttgaacttccccgcctaagaaggggccca

SEQ ID NO: 251345 - DNA, 434 bp, Homo Sapiens
gcccgcagagatcctctttgagtgtctgtctttgtccaggtttcagacatttctaggttggggaagatgctattgcgaaacctcctctccgcgacacagaatgttctgggtgggagccgcccttcttcatcttagagaaccaagtgcctcctgtctgaaaggtgagggtggcctgacctgggcctctccctgcccctccataggtgggtttgtagggtcttgtgttgcttctggtctctccaggcttggctgagacggacggtagacttccaccatgtaccgatcacatcccagctctgcatggcccctgctaaggctcaggtataacctcaccttccctggctcatcttggccttggggagttgcctttaagcttgagtcctcaagcctctccttttcgtccataataaaatgtttaaattattaagatcctt

SEQ ID NO: 251346 - DNA, 914 bp, Homo Sapiens
  misc_feature (737)..(747): n is a, c, g, or t
gagggtggtgagagtagagttgggtaggagacatactcaatatgggatgtccagatggcatctagatcagtggctcccacatttaggggtttttaaatgttgatgatggtgttttcaatggtctgcagtggaaactttaaatgaagatgcatttcttttaaataagaccattctctttctagtattttttaaatttcgaacatccataaattgtaaagaaagaattgtacagtacattttaacatatttgcttgttacaatctatacattttatgttttttaaccacttcaaagtaagtttcagacaccaacacattttttaaatgatccctaccattttttaaatgatccctaccaaaatggaaggctggtatcccaaggttttgttccatttctcaattctagtctgtgaaattgaagtctgatgaccactcttaagagggctgttcattagggtgcgggctgggcattatgagtgtgtttttcatgagtcagtggaaggaggggcttgttgtgagcagtgcatgagaaaaacggcttggctttgcttctttttccagctctgtggccttggtcaggttacgtctcttcagtatcgtaactgtaatgtggagataaagccttcattagttaggggcacacaccgcagtattccttaagtcatcttgatgacaagtgaatgcaaggcagctggtacctttcaggtagtagttgaattcaggtagtatttgttcagnnnnnnnnnnncccttcatgttctaagaccagcttgagaggcaaaggttgtaccactgagctctagttgttgttacctaaaaaggccttgttttaaatttctgtgatacctaagaatttcaaatctgggttgtcatggattctttattctttttttctcccttaaaaagttacatttt

SEQ ID NO: 251347 - DNA, 721 bp, Homo Sapiens
ccgggctgcaggcgaacacggcacccgcactgtgcgtcatggtgcaggcctggtatatggacgacgccccgggcgacccgcggcaaccccaccgccccgaccccggccgcccagtgggcctggagcagctgcggcggctcggggtgctctactggaagctggatgctgacaaatatgagaatgatccagaattaggatccgaagagagaggaactactcctggatggacatcataaccatatgcaaagataaactaccttatgaagacatcctggatggcagtgggtacttcgatgtgagggacaaggaggaccagtggatccggatcttcatggaggggagacatggtgacgctccccgcggggatctatcaccgcgtcacggtggacgagaagaactacacgaaggccatgcggctgtttgtgggagaaccggtgtggacagcgtacaaccggcccgctgaccattttgaagcccgcggcagtacgtgaaatttctggcacagaccggctagcagtgctgcctgggacttaaccacgtgcctcggaaaggtcccaatgtaatgactgagcagaaatcaatcactttctctttgctttagaggatagcctgagctagatatcttcctttgaagataatttgtcagaatttttgtatggaaggtctaaaggacttggagtgtaagagcacctcatttttggactcataagatggggggcct

SEQ ID NO: 251348 - DNA, 1693 bp, Homo Sapiens
atgcgcgtccacgcctccctataagacaaagcgcggccgacgggctccgagcgcggcccctgggttcgaacacggcacccgcactgcgcgtcatggtgcaggcctggtatatggacgacgccccgggcgacccgcggcaaccccaccgccccgaccccggccgcccagtgggcctggagcagctgcggcggctcggggtgctctactggaagctggatgctgacaaatatgagaatgatccagaattagaaaagatccgaagagagaggaactactcctggatggacatcataaccatatgcaaagataaactaccaaattatgaagaaaagattaagatgttctacgaggagcatttgcacttggacgatgagatccgctacatcctggatggcagtgggtacttcgacgtgagggacaaggaggaccagtggatccggatcttcatggagaagggagacatggtgacgctccccgcggggatctatcaccgcttcacggtggacgagaagaactacacgaaggccatgcggctgtttgtgggagaaccggtgtggacagcgtacaaccggcccgctgaccattttgaagcccgcgggcagtacgtgaaatttctggcacagaccgcctagcagtgctgcctgggaactaacacgtgcctcgtaaaggtccccaatgtaatgactgagcagaaaatcaatcactttctctttgcttttagaggatagccttgaggctagattatctttcctttgtaagattatttgatcagaatattttgtaatgaaaggatctagaaagcaacttggaagtgtaaagagtcaccttcattttctgtaactcaatcaagactggtgggtccatggccctgtgttagttcatgcattcagttgagtcccaaatgaaagtttcatctcccgaaatgcagttccttagatgcccatctggacgtgatgccgcgcctgccgtgtaagaaggtgcaatcctagataacacagctagccagatagaagacacttttttctccaaaatgatgccttggggtggggagtggtagggggaagagctcccaccctaaggggcacacactgagttgcttatgccacttccttgttcaaaataaagtaactgccttaatcttatactcatggcttggagttaccttatattcaggtatatgtgatattttgcctggtttgttaaaattgccccatttagattccttctataattgttcttatagataagtaatttatatatgagctgtgttagtattttttccagtgtgagatctctggattctttcacaataaagctgttgaattttaacaggagtattagtacataaattttctactcaacaattccgagataggattatgcctagtttgtcatatcacagaaaaactccaagttaacttcatgttttggaagggcaggtcgtttttaaagtatttctttttttaactggatgaaaaatcttcatgttaggattaattttcttaatcacctccacactgtacagaggaaactcaagccttaaatgtttaagtaaactctgtctcagttttaggattaaaatacccaccggtggtgtgatgatgccatataccgcagggcttgcttctgtcaagtgtgactctatctcagtaattaaaataagtgctgatctactgattttttttaaatggag

SEQ ID NO: 251349 - DNA, 587 bp, Homo Sapiens
ggaaaagattaagatgttctacgaggagcatttgcacttggacgatgagatccgctacatcctggatggcagtgggtacttcgacgtgagggacaaggaggaccagtggatccggatcttcatggagaagggagacatggtgacgctccccgcggggatctatcaccgcttcacggtggacgagaagaactacacgaaggccatgcggctgtttgtgggagaaccggtgtggacagcgtacaaccggcccgctgaccattttgaagcccgcgggcagtacgtgaaatttctggcacagaccgcctagcagtgctgcctgggaactaacacgtgcctcgtaaaggtccccaatgtaatgactgagcagaaaatcaatcactttctctttgcttttagaggatagccttgaggctagattatctttcctttgtaagattatttgatcagaatattttgtaatgtggaagtgtaaagagtcaccttcattttctgtaactcaatcaagactggtgggtccatggccctgtgttagttcatgcattcagttgagtcccaaatgaaagtttcatctcccgaaatgcagttcc

SEQ ID NO: 251350 - DNA, 1574 bp, Homo Sapiens
  misc_feature (107)..(107): n is a, c, g, or t
  misc_feature (970)..(970): n is a, c, g, or t
tgtcacaatcaggcaaagtgtcttcactttaaaactcctgtgttcaatattgttaagtaaatccctatttcaaatgcctttgataccagagaaaccgcctgtagacnaactctttgaggaagcattcttcctgaattgaagtcactgtgaatatcctttagatttcgtcttgttaactcagttttcagtcagagcagcacttgggcctgctgcccttcaaggcacagtgcaacaaatagtggttacgggatttccatcagccaaggttgacaactaacaatgtaaagagagctcgagtgtgggccaaggcatcggaccttacacctaacttaggacataggtcgacctatggattattagccagtgaatgcttttcttgtctaacagtctttaagggcacataagaaactcacgttaaattatatcctgacatattattattccatgaaaacaaaacaaatcttccaaagtgcttgttttccagtagctctgggtcttgtctcaccacgggtacagaaaggtattgctccgaggctctgacagggctactgctcttgactaattgttcttgtctttctgcttttcatttgatgaggacttacacatagttacttgctgcagtttactatctctcagatgcttcctatgggaagttcataaaccattcttccataaccttttgttgatcaccatttccattagggactcaataagacatgctcagtatctccaccaagaaccatttattgcaaaccagctgtgaaaccaacaggggtgctttagccaaattaaatcccatgtcgcagaagtcacagatttacagctcaaggaaaaaaatcatcagcaagaagaatccagaagtctctgtcgggcattcttctctccattatttgctttagtttcactgtctatgttcataccttggaggccatcaacaacatccatcttgatcatgccaaggtttgtcagngagtagcattgggtcgatcccctgaccactgctcttaatattctccagtacctcaagacacttgtatgacttgacctcacttatattttcctccaagaagagattgtagaggctcaaatcgttgtacccttcagatttgaaatgcagaacatcaaaagtggggaggatttcgtacactttgagaacatctgtcttctgtcggaatggaacaaacagcgtgtagacaaccacgggagccagcaggacataaaccacaaggttaatgacactgagcaactggaagatgcccacggcaatgagtctgcactgaaactgatcgggcacggtgctgtcgtttctcaggatccctgatttgatgctgcacacaaactcgtctgagagtgaggagaggctgaagtaatagcccaggtagatacacgctaacagtataatgatgagtgtcagcaggcggcagctaatgtacttgatgattaaattattagaatttttctttgtcttcaagtactgctccacaattgggtacttgaagtggctttcagatacctcccacaaactttgccctaagttctcggtaacacctggaactgagcaggctccatctctc

SEQ ID NO: 251351 - DNA, 720 bp, Homo Sapiens
  misc_feature (32)..(32): n is a, c, g, or t
  misc_feature (41)..(41): n is a, c, g, or t
  misc_feature (128)..(128): n is a, c, g, or t
ctacagattcttccactagagtagaggagatnatttcacanacagactcatttgtttctagcttatatgtaaactattagccttataaccaatgcattcatcagatgtattcattaagtattctcttntataaaataatgattaatatctaatatcatcattctagagatgactctagaatgccattgtgaaaaaactttcaaaatttcttgtcagatttagaaaagatccttatttaggtagctagaaactatcagttactctgaaagaaaatgtttagtctccaatgacgctgaaatgtattaaaactatgtaatggtaaatcctcctacacatctcattattggagtaaatttatagtaaaaataggtctccctgggggatcaaaaatgagtcctctacatttcttcacactcagcatcattttcaatgccatatttcttcgcttctgaaaaaccaacaagccaaaacttgtcatgtgtaagagggtagtgatttattattcagagctgaattcctttaatttaggtctaaaaatatcttaggaatctatctggaaagaaccaaagttttaaacacttattctaatgcatagagcttactctgataatgctttctggtcatctgggcttttctcatggattccaccaaatccatcaggctctgtatatacctgtaaagaaacaggtatgctttaagttttaaaattaatagtcagat

SEQ ID NO: 251352 - DNA, 491 bp, Homo Sapiens
gccagctcatatactaaaccctcaccacttagagggagatatgatgtgtgccttgttaaatagcatatctgatacgcaccaaagaatgtgacagtgatgataacatgggtgccaaaaatacttcaataggagaagaatttatatccacagaagatgtggaattagaagaagctattagaagaagtcttgaggaaatgtaattaaagatattaccacacaacatcaagtggccttgaagagactgagataacgaattcttgagtttgctttctaaaggagaccagaaatccactattacaaatgtatttgaaaacatgtttttgctttcatatgttcaaaatctgatctttgttttgtatttttgtgctaatgtgcaaacatgtacagaagaaatagaatacatgttcatgcaaatataaattatgtattctaatataggtgtaacagtttcccagttaactttgaatttatatatttagatttaaaggatt

SEQ ID NO: 251353 - DNA, 761 bp, Homo Sapiens
  misc_feature (294)..(355): n is a, c, g, or t
agcttgcaaggggggaaatcccaaaattaatattccagaagtggccaaatcaataactgaacatagttttaaaacttgaacaaatttaaaacttttgccctcttttcagcagcccagaagaagtctggttattttaagtcaaaatctctgccccaaaacctcctttccctgcactcccatgaacacctctctcccttttccccaaaggcaacattttggcttggcaagcaatacacatcaatgaacccttccatttaaatgtcccacaaagattgcatccgatcacagcttgcnnnnnnnnnnnnnnnnnnnnnnnnnnnnnnnnnnnnnnnnnnnnnnnnnnnnnnnnnnnnnncagacataggcagtgtcaaatgtcttatacgtccgccccctctgttcttccattctctccctcaccatcctcttgtaaaataaaagagagccgagcataacttgttccagtaaaggcaccccgagatttagggggataagtacggcctacttgttatctgcaatgctgcagctgtgcttttatccggccaaaggagacaggggacaacaaaagatcccaaagaagggacagtggacgcatgggaaaaccactaccccagcattgtggtgcctttctgctgagcaaatagttcaaactgttcattcccatcttgtattctctccctggtacattgtttgccgcccttgcatttcattctgcaaggaaggttgctctctgggcctataagcaaacagtccagaaaagg

SEQ ID NO: 251354 - DNA, 1317 bp, Homo Sapiens
  misc_feature (30)..(30): n is a, c, g, or t
  misc_feature (55)..(115): n is a, c, g, or t
atggaagaacagagggggcggacgtataanacatttgacactgcctatgtctgannnnnnnnnnnnnnnnnnnnnnnnnnnnnnnnnnnnnnnnnnnnnnnnnnnnnnnnnnnnngcaagctgtgatcggatgcaatctttgtgggacatttaaatggaagggttcattgatgtgtattgcttgccaagccaaaatgttgcctttggggaaaagggagagaggtgttcatggagtgcagggaaaggaggttttggggcagagattttgacttaaaataaccagacttcttctggctgctgaaaagaggcaaaagttttaaattgtcaagtttaaaactatgttcagttatgatttgccacttctgaatattattttggatttcccctttcatgcttattttgttcagaatcctaatgaatagaggttgctggactcagggtaaaagcaggatgaactggagatgggacatacaaggtacttttggaattgccatagattacacctataatcagagtaaatgtcatcaacaaataatcaaaatattttttacatttgctcttctaaaatcagagcctattttaaatataaaagaaagtagatgtgataataatataaactacagtcacattaagttgatattaaattcaaaatctaacatagatttgcactgttgggtgtgtgttccgaatcagtgggttttcccactgatgttgatttcgggagccaggcttcaatgtttaattctattgtaatgtggttatttagcctgaatggttttataaggtggaaaggcaaaaaatttaattccgaagaaaactagtgttttactatgactgtggtaaacatttccaaagcccacctgtgggaaatacaaagttttaatgctgtgtgtttttttgtttttgtattttgtctcatcgacaaaactggcagaaaaaaacgctttcgtatatttttcctgctgggtggtcagaaggaaaggccgtgaagctaaaggtctcccactgagacgctgttctgcaaggagccgacctcacgtgccgccgccgccagagaagagagcacctgttcatctcggctcactgtgaggctgagctcagcgctggcaggcgaggggccgcaagcatcccccacagccaccgagagggcatccctgcagggaaatcatatccgacatgcctgtgcccacagcagacttaagactgcctctaaaatgtccatgaagccattgtccagtagagcttgttagttttaacaccagtgaagtattaccttttggttaaaaggatgcatgtgtataggtgtatgtgtgtgcg

SEQ ID NO: 251355 - DNA, 439 bp, Homo Sapiens
  misc_feature (28)..(28): n is a, c, g, or t
  misc_feature (35)..(35): n is a, c, g, or t
  misc_feature (71)..(71): n is a, c, g, or t
  misc_feature (217)..(217): n is a, c, g, or t
  misc_feature (252)..(304): n is a, c, g, or t
cctcggcctcacctgtgagggcctgaancctcagncgcctggccagggccgagggggccccgcaagccatncccccccacagcccacccgagaggggccatccccgcagggaaatccatatcccgacatgccctgtgccccacagcagaccttaagacctgccctcctaaaatgtcccatgaagcccattgtcccagtagagctgttagttttaacncccagtgagtattacctttggttaaaaggatgcannnnnnnnnnnnnnnnnnnnnnnnnnnnnnnnnnnnnnnnnnnnnnnnnnnnnagaatgaagaaagggttccatttaggcatttgcaaatattcgatggcatcatgaaaagacaaaaaaatcctataaaatatatcatattttgctatgattttgtgtgtacatgtaataaaattattaagtataaaa

SEQ ID NO: 251356 - DNA, 710 bp, Homo Sapiens
  misc_feature (685)..(685): n is a, c, g, or t
caattgcaattggattgatctgtttataaggctgtattaaaattagctttagcatttataatacactggcacaaagttagaatttggatttctcttttgaacaagatttttgtatacattaataagaaatagtaaaagatttttgtttaccttttgagtaaactgcaaaaaatattagtaataagaggagagaatttccctaatgctgtttttattatgtcttttgattgtttggaaaactgaatctcccctctgtcaaagagtaaaatttttgctttttgaaatttttgaattatcagtttggctaaatgaataactattatcttacagtgacctgtaatcttattttgatcaagtgttttaaacctttgatatttgacaaactttccaaaatcaaatgtaaaattctaacttaaatgttttcgacctcaagctaacttttgggcattaaagcccttggaagtccaaatagggcccctggaagtccaaaagaaacatattaggctaatttggtatattaaaatcatacaggaagctgatcaaataaaaatgttgtttaattttctttgagttgtatttgataaatctgttattaatatgcatcccaaaattgtatcatattgcttaaatgttgatagaatcttgtatatgttatttgtaataaattgtatcctgttaattattngataccactgcattacagagattat

SEQ ID NO: 251357 - DNA, 472 bp, Homo Sapiens
  misc_feature (77)..(77): n is a, c, g, or t
acctcccggtgctggggacatgttcatgaacatgcagagtctgaatggggattcttaccaagggtcccaagtcgganccaatgtgcaagcacaggtggataccgtccgtcatgttatcaatcagacgggaggctacagtgatggccttggaggaaattcactgtacagtccacataatttaaatgcctaatggaggctggcaggacgcaacaactcccatcttctgtgacttctcctacagaaggcccaggaagtgtgcactcggatacctctaactaatctctggccacacttttccctgagctacatgccttgataagtgcattcagagcaataggaggaaaaggaaagcgtttttgtagcccaccatctacagctttactgtaaaaccttgtcttattcgagaacttggtaaatctgttttttaaggaatcataatcatttgtatttatacttaaaaacacacaatgtt

SEQ ID NO: 251358 - DNA, 507 bp, Homo Sapiens
gtagagtgaaaccctgtctccaaaaacaaacaaaagttcattatacagtagtagtttctttatggtttagggctctgctatttttgaaactctttctccagtcaaataattttaaaaggcagaaaatgcctaatcactgaacaatgattttaaatattaactgggtaaatcttactttcttttggtgtcttattgaatccatatctacactttatgtgaatgagggagatgaaataaatggcttaacattcaagtcaaataatgagaaaataatggcaactatgaaatgacattaaccacaaattccttgtatgaaaagatttaatgaattatgagccattgatcattacaaactttaagccttaatatttcttctttcctatgtaaaaccaggtaattaaaacagcctgtctcagtatgacagaagaccatagtagggataatagtaacgtctgcttccacatctgcatgcttcgttaaccaaccaaagaaagtgctccaggttcc

SEQ ID NO: 251359 - DNA, 676 bp, Homo Sapiens
  misc_feature (608)..(608): n is a, c, g, or t
  misc_feature (616)..(616): n is a, c, g, or t
  misc_feature (650)..(650): n is a, c, g, or t
aaaatttaaaattaccagttgtggaataaaaatagttgcatgtccaaataaggcttagaatgattgtgcatatgcagttggctcacataagcagcatgaacagtctctccccaaatccattagtgattcactaccccccgccaagcacaggcctaaaacaattctcgtccactttcctgttaagaaacacagcagcaatatactttggcagcaaaccagagcatatgatgtaacttgctcaaccttatcttcctttccaaattctatactaagcatctgatgttttttagaataatttcctttggaaagccaatgagaaaacaaattaggaagagagagaagtgagaaattgttgcatggctgaggaacaagatgcttaaaatctgaatggaagtattttgagagcagtatttcatgtgctaagggttataagaattcttttagaaagggattagaattttactctgctagttacaagttttaaagtcacgctacggcattatcaccctggcaggtaggttttgttattgttttacattttgtgaaaaaaagttttgtagaagttacagctagtgggtcttttccctccagagccagtgatgagtgtngggagcanttcagctctgttaaggggccagcgtttctgaccnttaaccacatgaactaacctgcgtca

SEQ ID NO: 251360 - DNA, 534 bp, Homo Sapiens
aagtggcgcgtccccaaagcgcttaatagattcttctggatctgcctcagtcctgacacacagcagctcgggaaatagtctaaaacgcccagataccacagaatcagttaattcttccttgtccaatggaacaagtgatgctgacctgtttgattcacatgatgacagagatgatgacgcggaggcagggtctgtggaggagcacaagagcgttatcatgcatctcttgtcgcaggttagacttggaatggatcttactaaggtagttcttccaacgtttattcttgaaagaagatctcttttagaaatgtatgcagacttttttgcacatccggacctgtttgtgagcattagtgaccagaaggatcccaaggatcgaatggttcaggttgtgaaatggtacctctcagcctttcatgcgggaaggaaaggatcagttgccaaaaagccatacaatcccattttgggcgagatttttcagtgtcattggacattaccaaatgatactgaagagaacacagaactagtttcaga

SEQ ID NO: 251361 - DNA, 775 bp, Homo Sapiens
tcagaatcaatcagctttacgagcaggccaaatgggcacttctcctggaagagattgaatgcacagaagaagaaatgatgatgtttgcagccctgcagtatcatatcaataagctgtcaatcatgacatcagagaatcatttgaacaacagtgacaaagaagttgatgaagttgatgctgccctttcagacctgggagattactctggaagggggtaaaacgtcaacaattttgggtgacattacttccattcctgaacttgctgactacattaaagttttcaagccaaaaaagctgactctggaaaggttacaaacaatattgggtgcacctttcaaagacacatgccatttcttgttataagagcaaagaagaatccagtggcacaccagctcatcagatgaacctcaggggatgtgaagttaccccagatgtaaacatttcaggccaaaaatttaacattaaactcctgattccagttgcagaaggcatgaatgaaatctggcttcgttgtgacaatgaaaaacagtatgcacactggatggcagcctgcagattagcctccaaaggcaagaccatggcggacagttcttacaacttagaagttcagaatattctttcctttctgaagatgcagcatttaaacccagatcctcagttaataccagagcagatcacgactgatataactcctgaatgtttggtgtttccccgctatctaaaaaagtataagaacaagcagataacagcgagaatcttggaggcccatcaaaat

SEQ ID NO: 251362 - DNA, 1129 bp, Homo Sapiens
  misc_feature (433)..(433): n is a, c, g, or t
  misc_feature (441)..(441): n is a, c, g, or t
  misc_feature (948)..(957): n is a, c, g, or t
accacaagttatagtactggggaaaaccattaccagtgctgtcactttactattggcacactttcgtgtaaaaagtgagcctaagaataatgaatgacctgtatcttaaactcaagtaaacgtatccttaaacataaaaccaataacctcccatatactcctaagtccttaagcacaatttctgcacatcatttatgctctcaatttaaggaaaataagaacatgtttcattttcaattatcacatgtataaaactaatgtgtcccaaagctgcatgactataatgtcattcttgaaaacaggacttccttctcattataggtgaaatcagtaagaagctcttctgacatatcacttacacacttctctatgggtatgcatgaaacatccatctagattccatatgaatggagaatgactagcacatataaanttctaganaccagtataccacattgtagaaggcactaaagcttcagcttgtgctcccatagcccatttgaaaagccagtttccttttttataagggcacctttgccacctacagctgacaagacacactgcaatattattcataataagcttggaaatgtcaagaaaatttaaaaagaaatgctcactttgtgggtagtcccaatgattctaaacactgaatactaattcatcattattagtattcaacacggttgctcttccttttgaaagagaacagtagcatgcattgtcagttttttaatccacttatttaagcaattttaatctgcaaaactattttaaagaaaaattgtcctaaacagtgagcaaaagaaaacacaatagtgagaatttaacacaatcacaagtcctgtgaagtaaatgttaaaacttcttacatactttgcacttacaagggtgtgtatatatttgcaccaatttcaagcacatcatcaaactgtatatattgaaatnnnnnnnnnngtaaaacaatacaaaattcagtaactagcattttttaaaagagcctccaatgcttatctccagtctttagggatagtacaaacttggatctttgatgttcaatttatttgcaatggttcttggcaaacactaacagaccacatgacaagtgtgtcagccaccatggaaatcc

SEQ ID NO: 251363 - DNA, 407 bp, Homo Sapiens
tcttaaagggaagaaggaaatgataaaaagcccacatcacacatgtagtaaaggcacctcgcccactctctccccacaatccccatccccttccctttttaggtcttgttttccaaactgattttaggtgatagtttcccctctagtcttggctcatttaaaaagcacaaacattcaaattaaaaatacaataaattattcattctaaccttagcaaaggtacatggattctgtctaccaaatattaattttacagtgaccacaaaaggttatttggttgttacaaagactacaatttgaagatactagataggcaaaaattttgccattattaatatcgaccaaacacagaaaagacaacagatgtgtttctaaggcacgatttacatactaaattcccttgaatt

SEQ ID NO: 251364 - DNA, 880 bp, Homo Sapiens
agttcccctctagtcttggctcatttaaaaagcacaaacattcaaattaaaaattcaattaattaacagtgaccacaaaaggttatttggttgttacaaagactacaatttgaagatactagataggcaaaaattttgccattattaatatcgaccaaacccagaaaaggcaacagatgtgtttctaaggcacgatttacatactaaattcccttgaaattcaatgcaatttcacttcgctcatgattttcaatcccaagacacctgtgacaaatgaggaacaaatccagaagagcccatctaatctcgtattaagtggtcccttaaatacgttaaaagcccacaatataggcaacaaggctttcttaagacttccagctcctgaaaaaatcacaccttcacagtttcaaatcaaccacctaagttgctaagggacagcgaagaatgctgatctgctgcgtatgcaagtctgacgcccatctttcaagtgactaattcacttgataacacccacaccccaaacaaaacaaccctctgaaacaggctgtcttggccaccaggaggaagctggtaaagacatttcccctgcctgtgagatggcatccagttaacacttcttcagtcttccccaccttgtagcaaagcaaaacaatttttgtttgttagtttgtctgtttgcacttaaagttctaagcactttggaaagtttctaagcaacttctcacttccaagcaacaacttaaccaacactaacaacttactattattaattagtattttcttggctcacccacgcactaaattccccaaagccccagagaattcccttcaacctgcatttcctaccacccccaccacccacactgtatctctaaccaac

SEQ ID NO: 251365 - DNA, 415 bp, Homo Sapiens
attgtggggagagagtgggcgaggtgcctttactacatgtgtgatctgaaaaccctgcttggttctgagctgcgtctattgaattggtaaagtaataccaatggctttttatcatttccttcttccctttaagtttcacttgaaattttaaaaatcatggttatttttatcgttgggatctttctgtcttctgggttccattttttaaatgtttatatgttgacatggtagttcagttcttaaccaatgacttggggatgatgcaaacaattactgtcgttgggatttagagtgtattagtcacgcatgtatggggaagtagtctcgggtatgctgttgtgaaattgctgtctgttacgtcatgtacataattactaatcacttttcttcccctttacagcacaaataaagtttg

SEQ ID NO: 251366 - DNA, 1295 bp, Homo Sapiens
  misc_feature (70)..(70): n is a, c, g, or t
tttcacaccagcataccgagactactttccccatacatgcgtgactaatacactctaaatcccaacgacnagtaattgtttaaacatttaaaaaaatggaacccagaagacagaaagatcccaacgataaaaataaccatgatttttaaaatttcaagtgaaacttaaagggaagaaggaaatgataaaaagccattggtattactttaccaattcaatagacgcagctcagaaccaagcagggttttcagatcacacatgtagtaaaggcacctcgcccactctctccccacaatccccatccccttccctttttaggtcttgttttccaaactgattttaggtgatagtttcccctctagtcttggctcatttaaaaagcacaaacattcaaattaaaaatacaataaattattcattctaaccttagcaaaggtacatggattctgtctaccaaatattaattttacagtgaccacaaaaggttatttggttgttacaaagactacaatttgaagatactagataggcaaaaattttgccattattaatatcgaccaaacacagaaaagacaacagatgtgtttctaaggcacgatttacatactaaattcccttgaaattcaatgcaatttcacttcgctcatgattttcaatcacaagacacctgtgacaaatgaggaacaaatccagaagagcccatctaatctcgtcttaagtggtcccttaaatacgttaaaagcccacaatataggcatttacaaggcttttctaagacttccagctcctgaaaaaatcacaccttcacagtttcaaatcaaccacctaagttgctaaggggcagcgaaggatgctgatctgctgcgtatgcaagtctgacgcccatctttcaagtgactaattcacttgataacacccacaccccaaacaaaacaaccctctgaaacaggctgtcttggccaccaggaggaagctggtaaagacatttcccctgcctgtgagatggcatcacacacccctccctttggttctcggaaaactggtgactctgtgtcacctgttttcagttaacacttcttcagtcttccccaccttgtagcaaagcaaaacaatttttgtttgttagtttgtctgtttgcacttaaagttctaagcactttggaaagtttctaagcaacttctcacttccaagcaacaacttaaccaacactaacaacttactattattaattagtattttcttggctcacccacgcactaaattccccaaagccccagagaattcccttcaacct

SEQ ID NO: 251367 - DNA, 447 bp, Homo Sapiens
ggatcccccgggctgcaggattcggcacgaggaaaatactaattaataatagtaagttgttagtgttggttaagttgttgcttggaagtgagaagttgcttagaaactttccaaagtgcttagaactttaagtgcaaacagacaaactaacaaacaaaaattgttttgctttgctacaaggtggggaagactgaagaagtgttaactgaaaacaggtgacacagagtcaccagttttccgagaaccaaagggaggggtgtgtgatgccatctcacaggcaggggaaatgtctttaccagcttcctcctggtggccaagacagcctgtttcagagggttgttttgtttggggtgtgggtgttatcaagtgaattagtcacttgaaagatgggcgtcagactttgcatacgcagcagatcagcatccttcgctgcccctttatgccaaa

SEQ ID NO: 251368 - DNA, 733 bp, Homo Sapiens
atgaaggttgtaggtttggggtttagaactcaaactttatttgtgctgtaaaggggaagaaaagtgattagtaattatgtacatgacgtaacagaattagttcttaccatacagagcaacataccagtactttcaaccatctacttttacagtttcaatttcacaacagcatacccgagactacttccccatacatgcgtgactaatacactctaaatcccaacgacagtaattgtttgcatcatccccaagtcattggttaagaactgaactaccatgtcaacatatttttaaacatttaaaaaatggaacccagaagacagaaagatcccaacgataaaaataaccatgatttttaaaatttcaagtgaaacttaaagggaagaaggaaatgataaaaagccattggtattactttaccaattcaatagacgcagctcagaaccaagcagggttttcagatcacacatgtagtaaaggcacctcgcccactctctccccacaatccccatccccttccctttttaggtcttgttttccaaactgattttaggtgatagtttcccctctagtcttggctcatttaaaaagcacaaacattcaaattaaaaatacaataaattattcattctaaccttagcaaaggtacatggattctgtctaccaaatattaattttacagtgaccacaaaaggttatttggttgttacaaagactacaatttgaagatact

SEQ ID NO: 251369 - DNA, 697 bp, Homo Sapiens
  misc_feature (105)..(156): n is a, c, g, or t
gttcctaacacctccaacgtttctatacataaaaaaattatactagtgtgaaactgtagaaaagtataaaatgtgacaaagcctttatttggtggccacacttgnnnnnnnnnnnnnnnnnnnnnnnnnnnnnnnnnnnnnnnnnnnnnnnnnnnnggagatttttggaagcattgtaattacattaaaagtatacttgttttcttgaaaaaaagtttttcaaaagtgaataatgatgtcatacagctttcaaattactttatgctgttattttattcctattgtattcacatgtgaaaacatatgagcaatttttgctgcatcagagataccagagatagtcttttattaattgggcattatttataaccttttctataaaagtaaggacactaaaatgtaagatgcatgatgaaaagataagtggagaggctcattgtagttaacctatatgaagtaatgtataagctaggtcagagtaatacttttctacattatagtgcaagaaataattattgataaaagtatattaaactaaattcgtatattttacttattgtacttttatgtaataaaatgcagtgcatttaaaaattgttagattatgtgtgaatttaattttatgttttttaccatgttaagactattgtgcatttaatgaagcattattatgccactaacctatcccaccttactc

SEQ ID NO: 251370 - DNA, 782 bp, Homo Sapiens
  misc_feature (447)..(519): n is a, c, g, or t
gggttgcttttgttcagagttaaaacggatctttgttaaatgaactgttaacacaatctaagcaagctgaacagtaatgttaagagtctttgcaaggtcttgcttcaaatcttttgaacaaaatttaaatatgccacagcaaatgcatcaattccatgagatgcccatgaggctattcactgaactcaggctcaaagctgatcccagatcaatccgatcctttctcgccctttcccccacttctctatggattggaacacacataaactggttacctcggtcaaaacaaaaagattttccttgcgttccatcttgattcttgtgtgttgtgaaagaaccatctcaagaaatgaacactttgccatgaatatgactaagcatttacaatacagacaatatctacttttcaaagagccattttatcactcaattcatgtcatagttgcnnnnnnnnnnnnnnnnnnnnnnnnnnnnnnnnnnnnnnnnnnnnnnnnnnnnnnnnnnnnnnnnnnnnnnnnngcccaattaggatgttttagtatcctaaagaagttttgcagtgctttaaaaaaaggaaaatcaaacccaagtgccaagataacacatttctttgcatttcttaactacatttctttacagctggttcacagggcggatgagtgggacctcttagcctcttaggtgcacagtccctacaacttttattaacacagtgccatcaaagcaagctccccacacaattcacaggctccggaatcactcattcacagatgttttaaaaa

SEQ ID NO: 251371 - DNA, 362 bp, Homo Sapiens
  misc_feature (352)..(352): n is a, c, g, or t
aattcatacatagaaatgtcattggtcctgaatttgaagaaagtgagcaacagtagttaaatgtgggtgcatataaccaaattccccttcatcaagaatggaggagaagagagaagaatgaaatcctgaagattcatcccagccgcaactcaggatccaacacaactttaactgggaggaatacattggttgatcatttttcatctgtgaatgagtgattccggaggcctgtgaattgtgtggggagcttgctttgatggcactgtgttaattgtgaaccagctgtaaagaaatgtagttaagaaatgcacagaaatgtgttatcttggcacttgggtttgagtttcctttntttagcctgc

SEQ ID NO: 251372 - DNA, 439 bp, Homo Sapiens
  misc_feature (44)..(44): n is a, c, g, or t
  misc_feature (183)..(183): n is a, c, g, or t
cccacctccctttaaaactcccagccttggcaaaaatcaccctncccctttacccagggaaatcaccttccctttaggaactgaaaagcctaggcgtccctctccccacaaaaaagtccctgcccctcatcctgagaatactgtctttcccatatggctaagtgtggccccaccaccctctcntgcctcccgggacattgattggtcctgtcttgggcaggtctagtgagctgtagaattgaatcaatgtgaactcagggaactggggaaggctgagcctcctctttggtgttgcggtaagataaccgacagggctggtgaaagtccccagatggcaggatatttggtttcagagtaaggactaggtgcaccaccatgactgactatcaatcaaaatgtttgtaacttaaaatttttaatgaaggataatgaataaaaa

SEQ ID NO: 251373 - DNA, 1893 bp, Homo Sapiens
gctgcccgccgcctcccacacaccctatgtgtccttaccacacccaactaacccgcggcctgggtggcgaattcggcacgagggaggagtctagctgccagggtcgcggcagctgcggggagagatgactggggagcgacccagcacggcgctcccggacagacgctgggggccgcggattctgggcttctggggaggctgtagggtttgggtgtttgccgcgatcttcctgctgctgtctctggcagcctcctggtccaaggctgagaacgacttcggtctggtgcagccgctggtgaccatggagcaactgctgtgggtgagcgggagacagatcggctcagtggacaccttccgcatcccgctcatcacagccactccgcggggcactcttctcgcctttgctgaggcgaggaaaatgtcctcatccgatgagggggccaagttcatcgccctgcggaggtccatggaccagggcagcacatggtctcctacagcgttcattgtcaatgatggggatgtccccgatgggctgaaccttggggcagtagtgagcgatgttgagacaggagtagtatttcttttctactccctttgtgctcacaaggccggctgccaggtggcctctaccatgttggtatggagcaaggatgatggtgtttcctggagcacaccccggaatctctccctggatattggcactgaagtgtttgcccctggaccgggctctggtattcagaaacagcgggagccacggaagggccgcctcatcgtgtgtggccatgggacgctggagcgggacggagtcttctgtctcctcagcgatgatcatggtgcctcctggcgctacggaagtggggtcagcggcatcccctacggtcagcccaagcaggaaaatgatttcaatcctgatgaatgccagccctatgagctcccagatggctcagtcgtcatcaatgcccgaaaccagaacaactaccactgccactgccgaattgtcctccgcagctatgatgcctgtgatacactaaggccccgtgatgtgaccttcgaccctgagctcgtggaccctgtggtagctgcaggagctgtagtcaccagctccggcattgtcttcttctccaacccagcacatccagagttccgagtgaacctgaccctgcgatggagcttcagcaatggtacctcatggcggaaagagacagtccagctatggccaggccccagtggctattcatccctggcaaccctggagggcagcatggatggagaggagcaggccccccagctctacgtcctgtatgagaaaaggccggaaccactacacagagagcatctccgtggccaaaatcagtgtctatgggacactctgagctgtgccactgccacaggggtattctgccttcaggactctgccttcaggaacacgggtctgtagagggtctgctggagacgcctgaaagacagttccatcttcctttagactccagccttggcaaaatcaccttccctttaccagggaaatcacttcctttaggactgaaagctaggcgtcctctcccacaaaaaagtcctgccctcatctgagaatactgtctttccatatggctaagtgtggccccaccaccctctctgccctcccgggacattgattggtcctgtcttgggcaggtctagtgagctgtagaattgaatcaatgtgaactcagggaactggggaaggctgagcctcctctttggtgttgcggtaagataaccgacagggctggtgaaagtccccagatggcaggatatttggtttcagagtaaggactaggtgcaccaccatgactgactatcaatcaaaatgtttgtaacttaaaatttttaatgaaggataatgaatatttaaaa

SEQ ID NO: 251374 - DNA, 946 bp, Homo Sapiens
  misc_feature (909)..(909): n is a, c, g, or t
  misc_feature (934)..(934): n is a, c, g, or t
attgggcccacgggagatgcttctcgggggtaagtggtttccggccctttctccattccaggactgtagaggctggggggggcctgctccctctccaatccaatgctgccctccaggggttgccagggatgaatagccactggggccctggccatagctggactgtctcttcccgccatgaggtaccattgctgaagctccatcgcagggtcaggttcactcggaactctggatgtgctgggttggagaagaagacaatgccggagctggtgactacagctcctgcagctaccacagggtccacgagctcagggtcgaaggtcacatcacggggccttagtgtatcacaggcatcatagctgcggaggacaattcggcagtggcagtggtagttgttctggtttcgggcattgatgacgactgagccatctgggagctcatagggctggcattcatcaggattgaaatcattttcctgcttgggctgaccgtaggggatgccgctgaccccacttccgtagcgccaggaggcaccatgatcatcgctgaggagacagaagactccgtcccgctccagcgtcccatggccacacacgatgaggcggcccttccgtggctcccgctgtttctgaataccagagcccggtccaggggcaaacacttcagtgccaatatccagggagagattccggggtgtgctccaggaaacaccatcatccttgctccataccaacatggtagaggccacctggcagccggccttgtgagcacaaagggagtagaaaagaaatactactcctgtctcaacatcgctcactactgccccaaggttcagcccatcggggacatccccatcattgacaatgaaccctcgtgccgaattcgccacccaggcctcgctgcttaggngggtagggggcgtgtgggggaggangaagaaaaagaa

SEQ ID NO: 251375 - DNA, 917 bp, Homo Sapiens
  misc_feature (677)..(736): n is a, c, g, or t
gactctatgtattactcaactaatatatgtatggtcacaggttcctggagttgttttatttctttatgacagacacatgagtatgcacctctctctaatcctctgatgtcactgcagcttcagtctctctcactctgtttttgagtgccttcaaaatgccagcatcctggaacattcttttcctgatctaaatcctacctctgactatttcattatccatgaatattggaattcacccatattccaatgggcttaactctacaaactagctaaaaccttggacaagaattttgaccgtatttctgttttgttcctccatgtcatttttaggttatatttttaacttttatttatatcttatttcttcacatatttcagtctctctgttgaaagattttatccttatttgactcttcactttttttactttcaccacgaaatttgaccgttcctttaaaattaaacggtcattgaatgtcttttgaacacctttttctcaactgaagtcttcctgaatgcctcccctttctgatgaaaggatcctgagtgctgctggttgctctgccctgttcccatgtgcccactcccttccgtacacattttgcaagactatactctttattttagtcaaattaatttaaaattgctccctgggtttctgctctctcatggccctnnnnnnnnnnnnnnnnnnnnnnnnnnnnnnnnnnnnnnnnnnnnnnnnnnnnnnnnnnnnatgatggatccataatatatgaaggatgtaatgaaaaggaggttgcagtgttttatataatatgatcgagcacctccgtgatgaaacatttagcaattggctagtccttcacagccagagtggaagtttgtgctgtggacaggtctttttactcccttccagttctcctccaaaactggag

SEQ ID NO: 251376 - DNA, 414 bp, Homo Sapiens
  misc_feature (30)..(30): n is a, c, g, or t
cctggaaatgccttccccctttcctgatgnaaggatcctgagtgctgctgttgctctgccctgttccccatgtgcccactcccttccgtacacattttgcaagactatactctttattttagtcaaattaatttaaaattgctccctgggtttctgctctctcatggccctgtcccgtcaaaaacttctgtttacgtttttctagctgttttcatctaatttgtttaaaatgtatgatggatccataatatatgaaggatgtaatgaaaaggaggttgcagtgttttatataatatgatcgagcacctccgtgatgaaacatttagcaattggctagtccttcacagccagagtggaagtttgtgctgtggacaggtctttttactcccttccagttctcccccaaaactggag

SEQ ID NO: 251377 - DNA, 706 bp, Homo Sapiens
ttacatcattagcgaatcttggaaaaactaaagatctttctcaaaatagtaatgaaatgtctatgattgaaagcttaagcaatgatgatacctctttgtgtgaatttcaagaaatgcagaccaacggtgatgtttcaagggcatttgacactcttgcaaaagcattgaatcctggagagagcacagcctgccagagctcagtagcgggcatggaaggaagtgtacacctaatcactggagattcaagcataaattacaccgaaaaagaggggccacttctcagcgattcacatgtagctttcaggctcaccatgccttctcctatgcctgagtacctgaatgtgcactacattggggagtctgcctccagactgctgttcttatcaatgcactgggcactttcgattccttctttccagggctctaggggcaaggaaaacaggcatatcactggtggaaagcttactggaatgaactttttactcttggtcttgcccagtgctggcaagtgatgaatgtagcaactatattagcaacatttgtcaattgtcttcacaatagtcttcaacaagataaaatgtcaacagaaagaagaaaattattgatggagcacatcttcaaactacaggagttttgtaacagcatggttaaactctgcattgatggatacgaatatgcctacctgaaggcaatagtactcttcagt

SEQ ID NO: 251378 - DNA, 1524 bp, Homo Sapiens
gcaggatggtttgatgaatccctttagtgtaaggtttagaaaaacacggagaaggaaaaaaaatacatgcatactggcagtcatgaagcaaaatacatcaaacacctgttccttgctaggtgcaggtgggggcaatggtgaacttcagacacatgcacactcactcacactcccattttcttctgcttccctcccagccccaacacattcattcccgccccttcccaaaaaaaagatcaggcactaaatcctagtgaaccccacaactgccttgctggagaaggttaagtgactgctaaagtaagagtgtatgtaggtcctcacccataacatgaaacaaagcatgtgctgtaagccaattccagctgcttttgcctctttggaagtaaatgaagcatatgcccactacagcttgaaactgcagtggaaatgtcttgaaaacaaaattttgtttctcttgctatgtcttgaagtaaaatcaacagtggaaaattcatcctaaaactgcctcatctgctattaaaatacatttgtcattctatttttggtatctattcaattatagttcattaagaacggttcatgaagcttgtacctgcttatggtaaacatcagtgtaccacacaaaacctgccacacctagacaggcttatgaaacaccaaatcttctatgtgttccttgctaacattccctcaagaccacagcattctagtgttaccagagataaagtacgtatagttaagtgatgaaagaaaggtatttggtttgtgtcgtcaccttatacatcctagtgatgaaactaaccaaactatgcctccatgccttccctgaaaataacctgagtcggctgacgaaacagactgagcagcgtggctctcagtccactttatcagaggttgagctggaaaaccagagggctaatgtagtctaccagcagcttgtgcggataaccaagagttcttggctgttgcagtatccactgtcccaaaggctaagccactgaggtggaaatcaatcgcagcataaagaagactgaacttaagctgcataacctgcgagactacctggagaggacaaaagaggatcaggatcctcatttcccacaaaatgtggtgtgggttttagtgtctctatgcattagctgctacagagaagttaacatttacttcatagctttcttattttcaattaaatgctcacactcaaaaaatacacaccctatgaatatgaggtggctcttttcttcaaattttttaaaataaagaggcaccaatacccgttcatttatgtattagaagtctcgtataatcaccaataaaacagaatagcatctgtgatcacacaacggagaaaaaagatcaagagacaaccttagccactgtaaaactgtacttgaacactcagatgctctggctaagtcagaatctaaagatttgctaataaggttttattggtttagcatagtcccatggcctttgtctataactgatatgtggaaacggttcccaaggaaatttaagaaa

SEQ ID NO: 251379 - DNA, 1416 bp, Homo Sapiens
tgggaaggggcgggaatgaatgtgttggggctgggagggaagcagaagaaaatgggagtgtgagtgagtgtgcatgtgtctgaagttcaccattgcccccacctgcacctagcaaggaacaggtgtttgatgtattttgctcatgactgcagtatgcatggatttttttccttctctgtgttttctaaacttacactaaaggattcatcaaatcatcttgttcagatggctcaggatcgtatttattttgcttaccccgtgctcttgggttctatagtatttctataattatgtaacgagaatagtgttgcactgtaatctatcatatagagctatatgtatggaaaattttgatcaattttttaagaaatgtatcctgtttgcaaaggcacagtaaagttgcatcttatagactataggcaataaagctaacaataaaccttatttaacacaaaccacatccatatcctctgttcatttgattttggaaaaagtagcatatccagtagtttcagggaattcattttaactttaagaattctgatatatttaatttataaatttcggactgatataatagagttttggaaaactataagaaatgctttgttaatgtgtgtattcctatgtaaaacacatggcttttcctgtgtatatttttaaaaattaaagaaatgcacatttaccagaacaccaccctctttgtcccccccttatctcacttattacacaccaccacccatcccttccctaccctcccgccctctcacccgtccttttctttacttgtattcccccccaacaccacctctccattcccaccgccccgtacaacaactccctagtaccccaccctctacatatcctctccacccacaaacaaactccctctaaccgattcagtagaacgcgtgtaaatcaccaccaccaccaatttataacatacttctctccctgttgccctttcctccccgcctgccccctactgccgtgcgtattaggcgcggacccgacatgactcactctagtcatcctcccgcccactatcacagcaccacataccactactcgaagacgaatatccataactgtgtggtgtccgcgcctgttaccctcgatggcgcccctgcggtatgctccagtcccgcgcttgtcttcctcccctgtgcctccgcgcccccgtccgtactaagtgccccacccccccgctgaggtgccgctatagattatctcgcaatgattgcagacagttttcccgcgctgctgtctgccacattatcccctatcaatggcgcgcccccgtcatcgtgtggacgagcaccgcatcgccgccgagggctgttgtgcctcctcccccatgtttttaggcccccacaagagatggcgggcccccccgcgccggccccgcgcatctta

SEQ ID NO: 251380 - DNA, 2019 bp, Homo Sapiens
ttttcctgtttttagtttttattaaataaaagcagaggaagaggaaggcccctggtctcccgggctaggggggagagccatgggtcctcccctccctctgttcaaggtgcactgcgtgctgggcttgaggtgtaagctggggagggagggcagccgggaagggtcagtggtcgggacctgcaaccctttcaccccttctggaagactcgctgggcagggagggagcctcctggacctggactggggcttatcccaagggatgagagccgataggtctacaggctcggcccagggccccttccaccctaggaagaggaaggggtgccggcgtctatctgctggagggtggtcaggcaaggctgtggggctgggtggccagcccctcactcgtggacgtcccagatctccgacagcagaggcggcagcttcttgtcctggagccgcaaggcaaagacctgctccgagtgcacagagctcagcgtgcgcaggctcaccagcttcatgagcatgcgcgggaagcgcagctggtcctgcggcctcttgatgcgcgtgtaggacagcagcgcctccacgtagggctgctgcaacgcctccacgcggcccggctcctgcacggttgggccggtcggccgagaagatgttgatggcgatgagcagggcgtactcagcgtcatccaggcccagccgccgcatggcccgcgagaactcgaagatggggttgatgaactccacctgcaggcctgcacggtggaagtcgtccttgctgtaggtgaagtccttcaagaaggtgatacactctgtctcgtggttgtagcgcctggctgtctctagcagcatgatctcgatagtggatgccttcaggagggcgatctggtcctcccggcccagctgcaggaaaccaggcacttgcttagcgaagtccacgatctcctggactgagatgatggccagctccgtgaagtgggcaaagcgttgctggcgggcatctcgggactgggggtctgcgcccaggggccagggcgtgactttgggctggtcggagaaggagcgtttgttgcactgcagttgggccgccaccaactgctggatcattagttcttgagccgctgttagctggacaccctcgccttccccggagccctggctgcctgcctcagatccaccaggggaagccccaggcccagaggctgagctgctgctgcctgcggccccacaggtgactgcgactgtgactgtgactcctgctgctgctgtttccgaatcttcttcttccggatctgttcttcagaaaggacgcactgctccctcatccctgcctccttgcacttgcgcagccggcactgctggcacttgcgccgcatgaaagcgtccatctggcaggttccgccaccccggcaggcatagcgcctggccccaccacggaccacactgcgccggaagaagcccttgcagccttcgcagctgagcacgttgtagtggaagccggaggccttgtccccacagacacggcaaagctcgtggcccagcatcttcggggctgggcccttctttcgcttgcgctctggttcctcttcgggatctgggatgacccagtctgtgctgcaggctgagctggcctcatcagtgcctgggacatcagggtccggacccccgggccacggctccggaccctcctcctttacagtgggtgaagaagaaggggcgccaggctgaggggggccatttccaggcaggggggtatccagggaactcgtggtaggagaggacatggtggggtcacggagcagcctctctccaggtcccgcccctctccaagcaacagcggggggcggggctcatggctgcgcgcgggggtctcgtggacggcctctcgcggagtgaactactcctgttgccctgggttcccttgctctgcttttcttcgtcctcctctttagcccctgacacaccgccgctactcaaataccctcaaaagtaacttcgccacttcttccggcaaccccgcccttgcgtcacccc

SEQ ID NO: 251381 - DNA, 1118 bp, Homo Sapiens
gcattagtactataaaacctctgataaaaagcaggctggtaccggtccggaattctttcgggatatcgtcgacccacgctgtcggacgcaagggcggggttgccggaagaagtggcgaagttacggtgggttgagggtatttgagtagcggcggtgtgtcaggggctaaagaggaggacgaagaaaagcagagcaagggaacccagggcaacaggagtagttcactccgcgagaggccgtccacgagacccccgcgcgcagccatgagccccgccccccgctgttgcttggagaggggcgggacctggagagaggctgctccgtgaacccaccatgtcctctcctaccacgagttccctggatacccaccctgcctggaaatggcccccctcagcctggagcaccttcttcttcacccactgtaaaggaggagggtccggagccgtggcccgggggtccggaacctgatgtcccaggcactgatgaggccagctcagcctgcaagcacagactgggtcaatcccagatcccgaagaggaaccagagcgcaagcgaaacgaagggcccagccccgaagatgctggggccacgagcttagccgtgttctgtggggacaagggcctccggcttccactacaacgtgctcagctgcgaacgctgcagggcttcttccggcgcagtgtggcgtcctttctgaagaacagatccggcacgaagagattcggaaacagccagcaaccaggagtcacagtcacagtcgcagtcaactgtggggcagcaggccagcagcagctcagcctcaggcgctggggcttacccaggtggactctgacgcacagagacacgaacacaccggacaagcaacccgggtccactaccaccgactccacgaacccctgataccacgcagatgcagaggggacccaacatgaagtgcaccaaagggcaacctactccgaacacgagccgaagctatcggcccgtcgccccgggggcatcacaccacaataccgaaatcgcagaacaacacagatacgccacaacgagacggagcacaaacacgccaacgaactagcacgtccaaacaaagcgcagaaccgcccagcgccgcgtgacac

SEQ ID NO: 251382 - DNA, 806 bp, Homo Sapiens
gtggaatttcacgcatagtaacctgagaagttttccttcgtatgtatttttgttgtcatggaacccacactaaataatactgtgattaccagttggttctattttgacattagatgctatgcagaacttatgcagggccaaaattttcaaaactaacactgacttagaagaccacgaaggaggatcccaggaaaaaagttgctgctaaaaaggactcagatttaaggctgaatgggaatggttgtaccagaaagataacggaatgtaaaaactggaattatgaaatctggagttattatttgggaaatggcagaaaaaaagacagtaaatacgaaacatacttgaaaagaacaatgcaaaatttagtaagatgaaagggaaatctatataaatgtttgagaacattttagagcacgggatttgtaaatttccccataggacagatggaataaaaatgtcctactgatcctctaacctcaatctgttgtcttgccaaaaacatgttattaattaggagtcagacaagctcaaaaaagcatggtttatcacagctctttgctcctgttaaagacagtagcggaactaagagtgctaacgtatggcaggtcaatattatctgacattatggaggacctccaaatttaaaaataagcaaaactaaaacatgcaagacaaaataaggaacttcattaaaaaatacattcttgcagcactagtttctcttactgctgcaaaacaggtgaaacaaaacctcatttccttcattcacaaaacattaaaaacactctccactcacttggattaca

SEQ ID NO: 251383 - DNA, 520 bp, Homo Sapiens
  misc_feature (487)..(487): n is a, c, g, or t
  misc_feature (490)..(490): n is a, c, g, or t
  misc_feature (494)..(494): n is a, c, g, or t
gagggcccagtaatgacatgaatatccccaactgtcattcaagtccaatttctcatcatgattgactgcaaaccttagtttctggatcactgcgaggttgccacttactctgtatatcccatcaatatccaaaccatgttcttcaacatgttcaatacataacttcacaaactttggtactgtgccattctctctctgacacagattagcgagattggatccaaatacctgatctttaatataacctcacgaacagcttgcaaagtggggcgtcgtgtaagaaacttctttaagtttttcttggtttttttctgttctgaagaatctatgctagatactttaaaggaacgaagctttttgggatccttttgttccttttctttatcatgcttttctattcctggtgaatccggtatctcctcttcaattccttcatcagtttctactgcctgattattgattgtactactaagaacgggaaaccaanaanaaanaacagtgtcattggcagacggaaggc

SEQ ID NO: 251384 - DNA, 351 bp, Homo Sapiens
caggaatagaaaagcatgataaagaaaaggaacaaaaggatcccaaaaagcttcgttcctttaaagtatctagcatagattcttcagaacagaaaaaaaccaagacttaaagaagtttcttacacgacgccccactttgcaagctgttcgtgagagagagaatggcacagtaccaaagtttgtgaagttatgtattgaacatgttgaagaacatggtttggatattgatgggatatacagagtaagtggcaacctcgcagtgatccagaaactaaggtttgcagtcaatcatgatgagaaattggacttgaatgacagttgggaagatattcatgtcattactgggccctc

SEQ ID NO: 251385 - DNA, 715 bp, Homo Sapiens
  misc_feature (30)..(30): n is a, c, g, or t
  misc_feature (79)..(79): n is a, c, g, or t
  misc_feature (84)..(84): n is a, c, g, or t
  misc_feature (87)..(87): n is a, c, g, or t
ggaagtcgcatcatggagaagggagaagcncttataaaaaaatttactgttgtaatttgtgtccagtttgcatagaaanaaaancancaccaaatccggttcattcttagtcaatgggtaaattcagttaaaataccgataatttggtgtcactaggtaaacctcaggttttgcttgttagtttggttaactacttctgttcctttgaaagtaatgacatttttaaaaacttccctgggttcccagaatattgaaaggatttgatattaactgtctgtttagcaaatgtaaggtactattctgtgttcatgtcataaatatcaatatggatcataaacagaagtacacataggttttaagttgcttcaggagttctttgaaaggtatagagaggggcatgaaaccacagatacttgattcatgatcagaaaagaaagttttatctagagcttttataaaacaaaagtacctttaacttaagaagatcacgggttaagctgaatttactatacatggtttttaaacaatttattgatgcttccatgcataaagaaaaaaggaaagtcttcttataccagtttatattagggtaatagaaagctagataatatagactcatcattttaaggatagccctaaatacaaatgtgaagccagaatttggcaagtgaggttttaacacaataacatataattcaccactattattttaatg

SEQ ID NO: 251386 - DNA, 951 bp, Homo Sapiens
  misc_feature (20)..(20): n is a, c, g, or t
  misc_feature (36)..(36): n is a, c, g, or t
  misc_feature (61)..(61): n is a, c, g, or t
  misc_feature (76)..(76): n is a, c, g, or t
  misc_feature (87)..(87): n is a, c, g, or t
  misc_feature (126)..(126): n is a, c, g, or t
aaaatgtaccctaaccctcncaaaggtcccttaaanaccctccctgtgtgcctgcccaggnaaacacctgtgaaantcccaaagggnaggaaaggctctgacttaaagtggaaaaaattcctctgncatggttgtcagcaggaaaggtttcacgtaaggttatccttatgtggagaacatgggttatcctgctgttcacgccagatacattttattgacaacagtcagatggtgattccacccatctggccttgggacagcagaaaacgaagtggaagaacaatagctggccagggacagaattaaattttcctagagatggtgttctagacagctatgccaaggccactgggaatttctcaggctctccaagttaatttctgtggggtgccttactctgccatgtgggatttaccccaacaactgaggactgcagtggatagtaaccatataattgctaccaaaaacagtggtccttaggttttagttaagcaagagagaaagccttgagactacaactccagcaagttaggctttatgttgatctgaaccccccgccctcacagcattctaggaactacagtaacgtcagtcggttgcagtggtacaacgagcctgcaccagtctagctacggaacactttggaatacttgtcagagcgcactggcatctgttaatacatggcctgacccatgtacccattaccataaacccaaccacagacgagacatccagaggttaaaaaaaaccctattacttcaacatagcaatagagagaaaggataaaagctgcctccagaaggtggctgcatcagaaatgaaaatgtgccttccaatagattacacaggctgggagttctgtcttggctcccttcaaggcctctggttctatccttaaaacaataatacacttccactgagacaggcagggcactctcctgggttctgctg

SEQ ID NO: 251387 - DNA, 701 bp, Homo Sapiens
  misc_feature (24)..(24): n is a, c, g, or t
  misc_feature (80)..(80): n is a, c, g, or t
  misc_feature (111)..(111): n is a, c, g, or t
cccaaaacaccatttaccccctangaccaatgttaaatggcaaatgccaggacaaaccctatggaaaaggggtgaccccnagtagagtgtaatggggaagggaggattccntttcctggttttccctttgtgcggtgaaactttgtgttgctgttgctttggctgtctgtgctgtagtggagtatttgtcagtctggggtggggaagatattgatgtatctgctactgctttatgagttcatttgttacattatcttttaagaataacatccatttaaacagttgacttacagtttgttaatgctgagatgtaaagctgccacctttatattttcctgcttctgattttattgtgagggaaatatacaattgtggttaccttcaaattttgaaattaaaaatatacaaccgtttgtataaatgcccgatgaagctttattcctgttgcactgactggctctaattttacgtatgtatcaggtacccacatttttgctcccttgaatctccttgactctgtctaactggtgggataaagggagttcaaagtgactatctttgcagctaccataatcaccctctctctctctttgcctgtgccttccatagaataaggatgccactgacccgtgcccgtcctctcagtcctctgtttcatatccaactgtttcatttgaatgcagagctgcttcccttgtttt

SEQ ID NO: 251388 - DNA, 1210 bp, Homo Sapiens
ggcctgggtggcgaattcggcacgaggcagccactgactacttgatcttggagaccacatttagatggaaatgagaggacctccacagccccgcctccctgccaggatgctagattattggctgggaggtgggcaagtggcagcccagctgaagcaagaggctgattgactggctgctcactcaggcaggtggcctgccctggcatcctgtagattctgagcaggttgagatgtggatatctccatgggaagcttgaaccaggctagaacagctgtctgccaaagatacaagaatatgcaaagtccctcttacccccctccttccctcaagtcttagttggtttgagagccagggatatggatccagggtgctgttgcagggtcacctgcctgttaccacacccccatccagctgggtggtgggtgagggtgtgagacaggcagggagaccaggtaatgagtggctgcaaggagtcatatagcctgggtgtgggtgagggtctgcctgcctgtttctgtctgggtgtctgagttccaaaaaatgtgtgttgtttgttcctcctcatcctcttctgagactgttgtttttttagagcttgattgtgggagaaaagcttgtgtgaaattccctcttcacctccccaccccccaaaaaataaaagggggcataaactttattccactggagaagccctgggggggtggctggagccagcctgctgagaagcgtggtgcagctgggtctgggacttcactagagcttactctggagcacctattttctgtgcacatgggagtgctccactccctagcagagcagagggaagtctctgccaggtacccacgccacaggcctcaggatggctttttgtctgagggcctcattaggcccagactgctgctgctggtaccagtctcctgagacactgcctccctggagcccatgcatgcccagctgttcttactgcttagtagccttgaagcagcacatctccactgtccctggcaggattgtgggaggcttcacaacccctgctttcctgacttcctcttctgccccactgggtgccccttcccagtttcccagcaggggcttcatgggccaccgtcagtgggtctgggcctgccagagtcgtcttgctcttcctcttgcttctaggcaaccacacttggcaagttaaatgtcccaagcaccttgtctcccttccca

SEQ ID NO: 251389 - DNA, 735 bp, Homo Sapiens
gggtcctcctgggagggagctgaagccgctcgcaagactcccgtagtccccacctctcagcttccggctggtagtagttccgcttcctgtccgactgtggtgtctttgctgagggtcacattgagctgcaggttgaatccggggtgcctttaggattcagcaccatggcggaagacatggagaccaaaatcaagaactacaagaccgccccttttgacagccgcttccccaaccagaaccagactagaaactgctggcagaactacctggacttccaccgctgtcagaaggcaatgaccgctaaaggaggcgatatctctgtgtgcgaatggtaccagcgtgtgtaccagtccctctgccccacatcctgggtcacagactgggatgagcaacgggctgaaggcacgtttcccgggaagatctgaactggctgcatctccctttcctctgtcctccatccttctcccaggatggtgaagggggacctggtacccagtgatccccaccccaggatcctaaatcatgacttacctgctaataaaaactcattggaaaagtgaaaaatccctgacttttgcccgttccgccccctggtcggccggcttcggccctcgaaaagctttccaaaacatccctgttgggggcgggggctccagtaggttaattgacaccgggcccaaagctggttccctaaggagacccctggccatgacctatggctctgggctctcaccc

SEQ ID NO: 251390 - DNA, 3007 bp, Homo Sapiens
  misc_feature (795)..(812): n is a, c, g, or t
  misc_feature (2178)..(2186): n is a, c, g, or t
  misc_feature (2337)..(2347): n is a, c, g, or t
  misc_feature (2351)..(2351): n is a, c, g, or t
  misc_feature (2353)..(2354): n is a, c, g, or t
  misc_feature (2356)..(2358): n is a, c, g, or t
  misc_feature (2364)..(2364): n is a, c, g, or t
  misc_feature (2377)..(2378): n is a, c, g, or t
  misc_feature (2391)..(2391): n is a, c, g, or t
  misc_feature (2600)..(2600): n is a, c, g, or t
ggggcgcactgcgccgccggctggggtgctgggggcggggcaggggcaggtgtagcctctgtgcctcgttgtcccctggcgctacccggacatctctcagggtgccggcaccatgaagatctggacttcggagcacgtctttgaccacccgtgggaaactgttacaacagctgcaatgcagaaatacccaaaccctatgaacccaagtgtggttggagttgatgtgttggacagacatatagatccctctggaaagttgcacagccacagacttctcagcacagagtggggactgccttccattgtgaagtctcttattggtgcagcaagaacgaaaacatatgtgcaagaacattctgtagttgatcctgtagagaaaacaatggaacttaaatctactaatatttcatttacaaacatggtttcagtagatgagagacttatatacaaaccacatcctcaggatccagaaaaaactgttttgacacaagaagccataattaccgtgaaaggagttagcctcagcagttaccttgaaggactgatggcaagtacgatatcctcaaatgctagtaaaggccgagaagcaatggaatgggtaatacataaattaaatgctgagattgaagaactgacagcctcagcaagaggaaccataaggactccaatggcagcagcagcgtttgcagagaagtgatcgtgacagttggtagacaacatcgggtactccaggtctctccaaactgactatatatttatttgttattttaaaaatacaactatattttgggtagnnnnnnnnnnnnnnnnnngataagttggtgtaaggctatgtgacttgatcaaaacagatgcagggcctctaaataaaagggatcatctgaaattaatgttgtttgaaattactatctgattttgagggttccagtatttctgtgaaaattcaacaagaactccttggaaactggtattgatattcagtctccttaaggtagatttttcaagcttttcatacattggaactccacctgactttggaccaaccccagaacagagcagagccacctcctatagacgcccattgccctgctgctgtacacttcagcagcttgcacaagggagctcacttaaaaggagaaattgtgtagttttaaaatatattttgtgtaaaataccttactatgctataaaccaccattaaaaaccagtgttttgatttggtacttaaatatttttggagtgaaaattatcactaaagtaacatgactccaacaaaagtatggtttcattataaaagagtactgtattgatttgcccaagttttgtaacttagtaaaggtattaacttccttggatttgtactttgtgatttagtatgctgtatcgtgggctggttatgttaactgaaaaaaataaagtcattacctgagttttgcagtgctctaacttaaacagaagaacagctgttcacatcttttagcattttacatttgcctaacttaaaaattgccatgtgtcaaaatcatggttttgtaattgctaaggcatgatatgtcaggttatttgaatataattactttttgaagtaattgtgaccacaaaacatcttttttacatgaaggagctgtgtatcatttgaaattactcaaatgatgtcttgctctgaggcataaatcccaggtacttagtgtttttaataatatggtgccactgcaggatttgggggcggtggggaagaacaagcataatggtagggggaggcttggcctgaaactaaccactgagtgaattgcactgcaggttttacttaacgggaattccttatttgggatgtcaagagggcagctgcaaactgaaaaacaatccagtaaatgtactttgttttatgtattgtagcaggcaattaactactaaataatagctttgacatttgcaattgttgcatagagactatttttgctagaagatgattagctcttgcctttattttacagtgcttagtgtgataaacttctagtcatgtttcctatccaagagaccagttaatatatgtacataaaccacagaaatagtataacacactatttttaaattatcgttttcctacttaaattttgtttagcttaagacttcttaggacatttgtaaaagcaggttaaatttaataaggtttctgannnnnnnnngaaccggagatagttttacaagtgaataactttcagctaaaaaaaatcgctaataatgatattgatgaaactgcttgataatctgaaatatctgtctgaaaagttatgccatatttaaactatcttgttttaaatgcatgacattggagcnnnnnnnnnnngggngnnannngggccnccgaaatagggtnnggaaaacagcccnacgaaaccccgcgaggaactattctagagaacaaacgtgggaccccctattgggtggcaagcacaacttactgagagtttcttctggccatttttgtcaccacagggggcaaggagtattagcgtgatagcccgtgttgtttgtataacacctaactaacagagggcggcacaacacacaccataggcgaagagtaaactgggaacttnttctaggggaaaagcacaagccaaaggtgcgccggacgaaagagacatatctggccctctgacaaaacaacataaaaaccgccgccggtcggagaagcggggcgctgagcaaatagaaggggggacgaacgcgcgccgtggcgagtacgagaagttacacaccctgtaggtgctctggaaaagaggaagagatattctttgcagagaaaacagtctctctagggcttagaagggcaaaggacactctttgttattgatccgcggcggaggcaacccgcgtgctctcctgcgtcagggggcgaggtggtttgtcagcagcgcgcgcctaggcgcggacaccgctgccggaagaagaggtgttgtgcaaggcacgctagtctattggcgggggcgcgggcgccccgcac

SEQ ID NO: 251391 - DNA, 561 bp, Homo Sapiens
  misc_feature (485)..(485): n is a, c, g, or t
  misc_feature (518)..(518): n is a, c, g, or t
gatacagaatacagcaataacctccaagaggacatttattcagtagaacctcgggacacttcagagatactctcatgaacttggtccaggggaccagagaggaaggatatacagaccctgcgatggctgctcaggatgcaatggtcctatgggaagcctgtcagcagaagacgggggagcacaaaaccatgctgcaaatgatcctgtgcaacaagagctaccagcagctgcggctgggtaattattaactgggtttcgttccagctacttgaccaattatataacaaaaagaaggtggttaactagaaacaaaaatgaaatattacaaggaaatagcggaaagtcagttatctcaaaggtacttattttgaattttgtttataagatgtgccttatttaatgacattactaaggaataaatatttccttaatattttttccaataactttcaaaaactgagcattttaaaaataatctctgtatntgatggagtacttattcaaatatattagctgtntcctattaggtatattatatgttgtcttgcaaaatgcatagta

SEQ ID NO: 251392 - DNA, 896 bp, Homo Sapiens
  misc_feature (138)..(138): n is a, c, g, or t
  misc_feature (824)..(824): n is a, c, g, or t
agaatacagcaataacctccaagaggacatttattcagagacctcaggacacttcagagatactctcatgaacttggtccaggggaccagagaggaaggatatacagaccctgcgatggctgctcaggatgcaactgncctatgggaagcctgtcagcagaagacgggggagcacaaaaccatgctgcaaatgatcctgtgcaacaagagctaccagcagctgcggctggttttccaggaatttcaaaatatttctgggcaagatatggtagatgccattaatgaatgttatgatggatactttcaggagctgctggttgcaattgttctctgtgttcgagacaaaccagcctattttgcttatagattatatagtgcaattcatgactttggtttccataataaaactgtaatcaggattctcatttgccaaaagtgaaatagacctgctgaccataaggaaacgatacaaagagcgatatggaaaatccctatttcatgacagcagaaattttgattcagggcattataagaaagcactgcttgccatctgtgctggtgatgctgaggactactaaaatgaagaggacttggagtactgtgcactcctctttctagacacttccaaatagagattttctcacaaatttgtactgttcatggcactattaacaaaactatacaatcatattttctcttctatctttgaaattattctaagccaaagaaaactatgaatgaaagtatatgatactgaatttgcctactatcctgaatttgcctactatctaatcaggcaattaaataaattgtgcatgatgggnataataggaaaaattggcattgggaataggattttattttaaatgtggaaccatccaacaacctaccaacca

SEQ ID NO: 251393 - DNA, 844 bp, Homo Sapiens
  misc_feature (672)..(672): n is a, c, g, or t
taggagcgaggcctgggtggcgaattcggcacgaggctccagaacttgaagcgtgtccgagatgacctgcgcttccggggagtaaagggtaccactggcactcaggccagtttcctgcagctctttgagggagatgaccataaggtagagcagcttgacaagatggtgacagaaaaggcaggatttaagagagctttcatcatcacagggcagacatatacacgaaaagtggatattgaagtactgtctgtgctggctagcttgggggcatcagtgcacaagatttgcaccgacatacgcctcctggcaaacctcaaggagatggaggaaccctttgaaaaacagcagattggctcaagtgcgatgccatataagcggaatcccattgcgttcagaaacgttgctgcagtcttgcccgccacctgatgacccttgtcattggacccgcttacagaacagcatctgtccagtggtttgaacgcacacttggatgatagtgccaaccgacggatctgtttggccgaggcattttcttaccgcagatactatattgaatacgctgcagaacattttctgaaggattggtcgtgtaccccaaagtaattgaacggcgcattcggcaagagctgcctttcatggccacagagaacatcatcatggccatggtcaaangctggaggtagccgccaggattgccatgagaaaatcagagtgctttctcagcaggcagccttctgtggttaaacaaaggaaggggggtgacaatgaactcatagagcgtatccaggttgatgcctacttcagtccattcacttccagttggatcatttactggatcttcttc

SEQ ID NO: 251394 - DNA, 1818 bp, Homo Sapiens
gggccagtccaccctggcggggtcgcagggttgggatggcggctggaggcgatcatggttcgcccgacagctaccgctcacctcttgcctcccgctatgccagcccggagatgtgcttcgtgtttagcgacaggtataaattccggacatggcggcagctgtggctgtggctggcggaggccgagcagacattgggtttgcctatcacagatgaacaaatccaggagatgaaatcaaacctggagaacatcgacttcaagatggcagctgaggaagagaaacgtttacgacatgatgtgatggctcacgtgcacacatttggccactgctgtccaaaagctgcaggcattattcaccttggtgctacttcttgctatgttggagacaatactgacttgattattcttagaaatgcacttgacctgcttttgccaaagcttgccagagtgatctctcggcttgccgactttgctaaggaacgagccagtctacccacattaggtttcacacatttccagcctgcacagctgaccacagttgggaaacgttgctgtctttggattcaggatctttgcatggatctccagaacttgaagcgtgtccgagatgacctgcgcttccggggagtaaagggtaccactggcactcaggccagtttcctgcagctctttgagggagatgaccataaggtagagcagcttgacaagatggtgacagaaaaggcaggatttaagagagctttcatcatcacagggcagacatatacacgaaaagtggatattgaagtactgtctgtgctggctagcttgggggcatcagtgcacaagatttgcaccgacatacgcctcctggcaaacctcaaggagatggaggaaccctttgaaaaacagcagattggctcaagtgcgatgccatataagcggaatcccatgcgttcagaacgttgctgcagtcttgcccgccacctgatgacccttgtcatggacccgctacagacagcatctgtccagtggtttgaacgcacactggatgatagtgccaaccgacggatctgtttggccgaggcatttcttaccgcagatactatattgaatacgctgcagaacatttctgaaggattggtcgtgtaccccaaagtaattgaacggcgcattcggcaagagctgcctttcatggccacagagaacatcatcatggccatggtcaaagctggaggtagccgccaggattgccatgagaaaatcagagtgctttctcagcaggcagcttctgtggttaagcaggaagggggtgacaatgacctcatagagcgtatccaggttgatgcctacttcagtcccattcactcccagttggatcatttactggatccttcttctttcactggtcgtgcctcccagcaggtgcagagattcttagaagaggaggtgtatcccctgttaaaaccatatgaaagcgtgatgaaggtgaaagcagaattatgtctgtagagttggaagagaattaaacgaaaatcattgttaattgctgaggcatgaacacagaagacaacccgaagggcgccagcggagagggagaggggaacagggagcgggcgcgggtccggccgtagggagccgaagaacagaagacgcttgtggggccccccgggcccctgaaaggtttttcaaaaccatttcgttgggccgcgcgggccccataagggaaggggaccatggcccaagcttgtttccaaggaaaaacctggcccatggactaggggcttggaattcctcacccaataaaaaaagcccccgggggggaaacgcaggggtttct

SEQ ID NO: 251395 - DNA, 540 bp, Homo Sapiens
  misc_feature (11)..(11): n is a, c, g, or t
  misc_feature (48)..(48): n is a, c, g, or t
  misc_feature (92)..(92): n is a, c, g, or t
accatttgacncaggaatcccattactgggtatatacccaaaagaatntaaatcattctgttataaagatacatgcatgcgtatatacatgngagcactatccacaatagcaaagacatggaatcaacccaaatacccatcaacgatagactaaataaagaaaatgtggtacatatataccatggaatacgatgcaggcgtagaaaggaagatcatgtcctttgcagggacatgcatgaagctggaagctattatcctcagcaaactaacacaggaacagaaaaccaaataccacatgttctcacttgtaagtgggagctgaacaatgagaacacatggacacagggatgggaacaacacacactggggcctgatgcatgggctgcggggagagagagcatcaggaagaatagctaatggatgttgggcttaatacctaggtgatgggttgataggtgcagcaaaccaccatggcacacgtttacctatgtaacaaacctgcacatcctgcacatgtaccccagaacttgaaataaaagc

SEQ ID NO: 251396 - DNA, 562 bp, Homo Sapiens
gggtaatgaaaacatggagttccattatccttttctccccactttggtttatgttaaaatttttgtgggagctaaatattgagaccccatggacacatgatggggaacaacacacactagggcctgttgagggcagggagtcggcagagagagagcatcaggaagaatagctaatggatgctgggcttcatacctgggtgatgagatgatctgtgcagcaaagcaccatggtacatgtttacctatgtaacaaacctgcacatcctgcacatgtaccctggaacttaataaaagttggaaatttttaaaaagaatgaataagacctggtatttgatagcacaacagggagactatagtcaacagcaatttaattgtatattttaatatgactaaaagagtataatggattgtttgtaacacaaataaatgcttgaggggatggacaccccatattacatgatgtgattattacacattgcatgcctatatcaaaacatctcatgtaccccataaatatatacacctaatacccacaaaacttaaaatataaaatgttttaaa

SEQ ID NO: 251397 - DNA, 571 bp, Homo Sapiens
  misc_feature (23)..(23): n is a, c, g, or t
  misc_feature (96)..(182): n is a, c, g, or t
tgaactgtgcagctggaagagtngttttccgagaggcagagtggcacgggtttctttggagttagtcagatcgaggtctgagtcttgactttttannnnnnnnnnnnnnnnnnnnnnnnnnnnnnnnnnnnnnnnnnnnnnnnnnnnnnnnnnnnnnnnnnnnnnnnnnnnnnnnnnnnnnnaactgcccaaaggaatcgcgattgtgatgcaggtaaaatgcctaagcatagcatttggcatagtaagcataatgttaattggttgctgctgtcattatttcagaagaccctggtgatcggatgcttccagatccaacaatttgattgactccaggtaaatctctcagcctccctgagcctcagtatcctcatctgtaaaatagactactatggtgtggagtaatgagaagtaatctcattacatgtgagtttaattgtgtgttaagagtgctgctaatgcatgctgagcttaatacctaggtgatgggttgataggtgcaataaaccaccatggcatacatttacctacgtaacaaacctgcacattctgcacatgtaccccagaactt

SEQ ID NO: 251398 - DNA, 656 bp, Homo Sapiens
  misc_feature (210)..(238): n is a, c, g, or t
  misc_feature (629)..(629): n is a, c, g, or t
ggccgcttaattaaaagagattcaccagggttaagaaaaaaattattttctgtcatgaagtgttttattttctgcaaaatgattttgttttatttaggagtggtatgctgcttaagatggaaaaatacatgatgatggtgcatagtgcctccatcccaagcttgctaacattaacccttttgtggcattatccagctttccatatgttcnnnnnnnnnnnnnnnnnnnnnnnnnnnnnagttctggggtacacatgccagatgtgcaggttcgttacttaggtaaatgtgtgccatggtggtttgctgcacctatcaacccatcacctaggtattaagcccagcatgcattagttatttttcctaatgctctccctccccataccccaacccccgacaggccccagtgtgtgttgctcccctccttgtgtctggaacattcttaccaaaccaagaaacagggtggccagtctccaagctgcctagggagaggggaagttatttctagtttcaacctgtgatttgttttcagggcaatttctggggggacagggtgatccaggaaaacagggcgggagtatgggggaaattcttttggcatcacatggaaacccacccaatcatttctgnccgtgtcttcaacattcttaaacacct

SEQ ID NO: 251399 - DNA, 906 bp, Homo Sapiens
  misc_feature (88)..(88): n is a, c, g, or t
attttctctttaaagctagcactagatttcaccttgcaccctaggccacttgcccatgtccttgccatcttttaactcctgtctcagngagggggcagcagaaagtagtcttgagagttaatgggattgctactagtttttacctgccgggaggatttggtctccatcgagaaacaggggaagatgtcatctgcttaagaaggtatttatgtttgtttttctgcccggtgatatacatgaacccggtagtgtgtgaaataaagcatcttagtcctcatttcacgtgaatcagaagaaactaaaaggcatggttatttctccctcggtatgatgaagtctatataatatttgcaaaatctcctttggtgaatttgtataaacaatctatcacaaagaaagtattgttttctatatgggcttaaaggatttttggaaaatgggcagaggattttcccatgtattccctgagcctggggaatggaaatcatctcatggagaccagatgaccaccaggctttccacccagtccccgtggcccactagaattgtccagcatgtttcagtggttatttgattgggctcaagaccaaagttggaactgaatcaaatgatgggtttggttcagaatatttttccgttttggtacgttttgaaaacctaggtttgatgctggttgcagttgttcaacagattttttaaaaaaaaccttgagtacaacacacactgaggccttttgcgggtggaggtagggaaagcatcaggataaatagctaatgcatgtgggacttaatacctaggtgatgggttataggtgcagcaaaccaccatggcacttgtttacctatgtaacaaaactgcacatcctgcatatttatcctagaacttcaaataaaataaaaacatttt

SEQ ID NO: 251400 - DNA, 899 bp, Homo Sapiens
gccaactctcgaaagttatgattattgagaatcacacgtgaagaaagatgacatctggccctcagggggccaaatgactgtcaaagatctcgcagcaaaatacacagaaggtggaaatgccatattagagaacatttccttctcaataagtcctggccagagggtgggcctcttgggaagaactggatcagggaagagtactttgttatcagcttttttgagactactgaacactgaaggagaaatccagatcgatggtgtgtcttgggattcaataactttgcaacagtggaggaaagcctttggagtgataccacagaaagtatttattttttctggaacatttagaaaaaacttggatccctatgaacagtggagtgatcaagaaatatggaaagttgcagatgaggttgggctcagatctgtgatagaacagtttcctgggaagcttgactttgtccttgtggatgggggctgtgtcctaagccatggccacaagcagttgacgtgcttggctagatctgttctcagtaaggcgaagatcttgctgcttgacgaacccagtgctcatttggatccagtaacataccaaataattagaagaactctaaaacaagcatttgctgattgcacagtaattctctgtgaacacaggatagaagcaatgctggaatgccaacaatttttggtcatagaagagaacaaagtgcggcagtacgattccatccagaaactgctgaacgagaggagcctcttccggcaagccatcaacccctccgacagggtgaagctctttccccaccggaactcaagcaagtgcaagtctaagccccaaattgctgctctgaaagaggagacagaagaagaggtgcaagatacaaggctttagagagcagcat

SEQ ID NO: 251401 - DNA, 673 bp, Homo Sapiens
  misc_feature (448)..(595): n is a, c, g, or t
  misc_feature (635)..(635): n is a, c, g, or t
  misc_feature (648)..(648): n is a, c, g, or t
tctgataaaagagataaaggtcagtagagaaattatggtttatgatggtagtcagctccttcttccccctcaagccacgacactgaatttagcctcagtttgttgttgccattcagtctagctagagcttacaaaaaatacaaaacccccaaatttggattcaaatttcaattcttgtacccatcaccagacacacccccacatggtgattactaatgattattaaaatactctttgggcccagtatgcaaaaaggacatctttttcctgggaccagcacaatctttagcctgtaggagaagcctctgtttaatgcagagctgtggaaggtttacaattaaatgatggtaggtgttattatattcatttattgaaaaggaagccttgtgggattaagcttagaggaaagaatttttgttgttgctgttcagcccagtctttttcatannnnnnnnnnnnnnnnnnnnnnnnnnnnnnnnnnnnnnnnnnnnnnnnnnnnnnnnnnnnnnnnnnnnnnnnnnnnnnnnnnnnnnnnnnnnnnnnnnnnnnnnnnnnnnnnnnnnnnnnnnnnnnnnnnnnnnnnnnnnnnnnnnnngcttgcctcctttcttactgagtattcatcagttataatntgacagtctgtgnttgaaataatgaaagacttctctag

SEQ ID NO: 251402 - DNA, 862 bp, Homo Sapiens
  misc_feature (78)..(89): n is a, c, g, or t
  misc_feature (145)..(145): n is a, c, g, or t
atcccagcatgacaaatatctgtaatatacagtacatgcaggccacatcctactgccttcctaactaagcacaaaggnnnnnnnnnnnntcaactctgtcccattcagtcattcgcacaacagacgaacttgctttttcctacanattagtgagaagtaaggccgattgggaaaggtggatggaatcatttggaacagaaacaaccagagcagaactgtatttcccccctccctacttcccctcctgtggcaactcaaaatttgtccacttatataaaaggaacagacctcacctgtcaggtctgtttagggcatggaaaaaggaggagtcctttctgccccaaacctttctggacagcgtagggtatctatactgagccgtctacagatacagaattaaagacagtgaaattcaatctcattgtgacacacctcacttgcagataaccctgtacagtaatgtagttccacagcaaacagaacattttctgaatcacagtctaattttctagtcttcactgctctaagtatttgaaacatgggcagcagcaaagagttttcattgtttgttcacccaaatctttacgacaacagagaagaatgcattatggatacactaaattctgaactatgaaatctaagctgtgctggttctccttttatgaaactgaatttggaacagaaagcagttaccataaaaataaacaaaagtaaaaaactagaacagaaaagggaaggaaaagagtctaaggaatcccagcaggcaaattccaaaatgggagattttggaaaaaatccgaaattggggtagagggaggaaataaatgtgcacaaagggggaaaagaaaggaacgcaacaaac

SEQ ID NO: 251403 - DNA, 1574 bp, Homo Sapiens
  misc_feature (1230)..(1230): n is a, c, g, or t
  misc_feature (1232)..(1232): n is a, c, g, or t
  misc_feature (1266)..(1266): n is a, c, g, or t
  misc_feature (1281)..(1303): n is a, c, g, or t
  misc_feature (1522)..(1522): n is a, c, g, or t
  misc_feature (1542)..(1542): n is a, c, g, or t
  misc_feature (1552)..(1552): n is a, c, g, or t
gagcctggacaaaaagggaagctgactctcactgcattccttaaactgatatgtatattttttttgttaggaggcttaataaactttagtctgttattttgtttctttttatacaaagaaaaaaaattcagctttcatgtttctgattccagattggaaaatatttttatatggtctgttgtattttgttgaaatgaaaatactgtgtattactttattttacaggccacaattgattatgaaagtcacccctgtgattcctctttgcccccacatgacccaccgagcattattacgtaattagagggttatcccttttgttgtgaaaggaaggaggggactgaaatctcccaaagtgcaaattggagagtgtttaatctttgttctgttgaataacatcggtgtaattacaaagtcaactccaagaatgtgtatttacaatatttgccatgttaagtgctggtaattatatggttatatgtgccatgtaaaatatagtgatatcaaatattctgttgtttccaatgtctagtttcaagaggacaatctttataatcattagaagggcttattaaatcccagcattatccagggcaaactcactggtggacctgaatacataagataccattagtgcgctggtgttcggattgctgtattagggtttacatctctcagtattccttgaacttgccatgcttctgcatgcagattcttcactgacttgaattgagatgggcaagggaaaaggtccctggactccctcctgccatctacaggcttgtcacatctcaccaccagaaacaggcttcctcaggcttctcacctgtggccaacttcactttgtaagacccatatttttaactcttcccagggaaaattcatgttgctgcagaagtaggctaaggcagaccacccacttctgctgaaatgcattgggagcctgtgaaagcacaaagctggaggctgggcgcctgcgtttcttcctacacggaaaggaatctaattccaagagtataggaaatggtgctattgtgagttcgttctgactctttctcattctgagttttcagtgttaaactaggaagtgtgacagcaggggagctttcgtgaggcagtcagtcattgcttctctgtaaattaaaatgttacagcacacacatacacacacagagagcatttcaaggccacagctccacacctgccatgggatgttaatgtggcaggggntngggctcattctgttgggaggtcaaattacctgtnccacggactgttgannnnnnnnnnnnnnnnnnnnnnncttctagcttttcagaagatggaaatgagacagttgagtccaaaccccaatgctgacagccatatgcatttgaaaatctatctaggattacagatggggcatttattactgggcagtgggaaacaccaggataggaaggatcttagggaggagggccccaggaaatggcattcaccttgttcatggaccaaaaggaggagggccagtaggagtaggggntagtttaccaatggcttccntctttaattnttttttccatggggctttgtta

SEQ ID NO: 251404 - DNA, 698 bp, Homo Sapiens
gtctaaattgatataagtaagctcaaaagagataacagatcacaagctagccccctttggttttgtctgacaaactgtcattactacattgcaccagtaaatatattgagagacttgaaagacaatcaatcaacacacgagtccaatagataatgacaatgactattaaatcttctctagtcttcgtaactttatatgtttggaactaatattgaagaatcatatttctactaactaaaaataataattcaaggcttaaggaaaaattgaagtaaagcctgaagaaggcaaccagggaaggaataagaattctttaagatcagaggttctgcctttcagataaataactaactggagatttcctttgataaatggcaagataaagaaattgtagaatggtagaaaatatcatgtttacctacaaaaagaactattgcctcaccatgtttcacatctctagaagatggttttaaatctattatgagcattatgtaatgtttaactggttctggtttcaattggcagtggaacctaagggtttaaacaaagggttaaaaaaatctaaatctagtgtcttcgttacaataagattaaacaagaggagcaatatatttaggccacaacagtaaagatttcatgcagttagagaaagcatgtcttagtttatcagtttagaaataggaaaatggaaccctaaa

SEQ ID NO: 251405 - DNA, 1086 bp, Homo Sapiens
  misc_feature (892)..(892): n is a, c, g, or t
  misc_feature (1006)..(1006): n is a, c, g, or t
  misc_feature (1012)..(1012): n is a, c, g, or t
  misc_feature (1018)..(1018): n is a, c, g, or t
  misc_feature (1037)..(1037): n is a, c, g, or t
  misc_feature (1040)..(1040): n is a, c, g, or t
  misc_feature (1043)..(1043): n is a, c, g, or t
  misc_feature (1047)..(1048): n is a, c, g, or t
  misc_feature (1062)..(1062): n is a, c, g, or t
  misc_feature (1065)..(1065): n is a, c, g, or t
  misc_feature (1071)..(1072): n is a, c, g, or t
  misc_feature (1074)..(1074): n is a, c, g, or t
tgaaactgagtggcccacgatgggaagaggggaaagcccaggggtacaggaggcctctgggtgaaggcagaggctaacatggggttcggagcgaccttggccgttggcctgaccatctttgtgctgtctgtcgtcactatcatcatctgcttcacctgctcctgctgctgcctttacaagacgtgccgccgaccacgtccggttgtcaccaccaccacatccaccactgtggtgcatgccccttatcctcagcctccaagtgtgccgcccagctaccctggaccaagctaccagggctaccacaccatgccgcctcagccagggatgccagcagcaccctacccaatgcagtacccaccaccttacccagcccagcccatgggcccaccggcctaccacgagaccctggctggaggagcagccgcgccctaacccgccagccagcctccttacaacccggactacatggatgccccgaaggcggccctctgagcattccctggcctctctggctgccacttggttatgttgtgtgtgtgcgtgagtggtgtgcaggcgcggattccttacgccccatgtgtgctgtgtgtgtccaggcacggttccttacgccccatgtgtgctgtctgtgtcctgcctgtatatgtggctacctctgatgctgacaaggtggggaacaatccttgccagagtgggctgggaccagactttgttctcttcctcacctgaaattatgcttcctaaaatctcaagccaaactcaaagaatggggtggtggggggcacctgtgaggtggccctgagaggtgggggcctctccagggcacatctggagttcttctccagcttaccctagggtgaccaagtagggcctgtcacaccagggtggcgcnttttctgtgtgatgcagatgtgtcctggtttcggcagcgtacaagctgctgcttgaggccatggctcgtccccggagttgggggtaccgttgcagagcaaggacatgatgcagngaattngggatntggcaagttgactttatcnttnggngatnncattgctcctgganctntatgcnntngggatagggagc

SEQ ID NO: 251406 - DNA, 1140 bp, Homo Sapiens
  misc_feature (14)..(14): n is a, c, g, or t
  misc_feature (23)..(23): n is a, c, g, or t
  misc_feature (33)..(34): n is a, c, g, or t
  misc_feature (36)..(36): n is a, c, g, or t
  misc_feature (63)..(64): n is a, c, g, or t
  misc_feature (73)..(73): n is a, c, g, or t
  misc_feature (129)..(129): n is a, c, g, or t
ccaaagatcaatcnactggcaancccaatcgcnncntattccctggttgcaacgtaccccaanncgggacgancatgcctcagcagcagctgtacgtgccaaaccagacacatctcatcacacagaaantgcgccaccctgtgtgacagccctacttgtcaccctaggtaagctggagaagaactccagatgtgccctggagaggcccccacctctcagggccacctcacaggtgccccccaccaccccattctttgagtttggcttgagattttaggaagcataatttcaggtgaggaagagaacaaagtctggtcccagcccactctggcaaggattgttccccaccttgtcagcatcagaggaagccacatatacaggcaggacacacacagcacacatggggcgtaaggaaccgtgcctggacacacacagcacacatggggcgtaaggaaccgcgcctgcacaccactcacgcacacacacaacataaccaagtggcagccagagaggccagggaatgctcagagggccgccttcggggcatccatgtaggccgggttgtaaggaggctggctggcggggtagggcgcggctgctcctccagccagggtctcgtggtaggccggtgggcccatgggctgggctgggtaaggtggtgggtactgcattgggtagggtgctgctggcatccctggctgaggcggcatggtgtggtagccctggtagcttggtccagggtagctgggcggcacacttggaggctgaggataaggggcatgcaccacagtggtggatgtggtggtggtgacaaccggacgtggtcggcggcacgtcttgtaaaggcagcagcaggagcaggtgaagcagatgatgatagtgacgacagacagcacaaagatggtcaggccaacggccaaggtcgctccgaaccccatgttagcctctgccttcacccagaggcctcctgtacccctgggctttcccctcttcccatcgtgggccactcagtttcaatttcctccccttttggagaaaaagaaagcaaatctcctccagatgacgtcagccacaggaagcacagacgcgaagccccgttccacccctcgtgccgaattcgccacccaggcctcgctcttt

SEQ ID NO: 251407 - DNA, 1468 bp, Homo Sapiens
  misc_feature (1094)..(1095): n is a, c, g, or t
  misc_feature (1158)..(1158): n is a, c, g, or t
tggtaccggtccgcgaatctagggatatcgtcgacccacgcgtcgggcgcgcggatcactgaggctgtggcggcactgcgcccggcgctcgcgtccgtccgcccgtccgcccgcccagccatgactgcgccggtccccgcgccgcggatcctgttgccgttgctgttgctgctgctgctaacgccgcctccgggtgcacgtggtgaggtgtgtatggcttcccgtggactcagcctcttccccgagtcctgtccagatttctgctgtggtacctgtgatgaccaatactgctgctctgacgtgctgaagaaatttgtgtggagcgaggaaaggtgtgctgtgcctgaggccagcgtgcctgccagtgtagagccggtggagcagctgggctcggcgctgaggtttcgccctggctacaacgaccccatgtcagggttcggagcgaccttggccgttggcctgaccatctttgtgctgtctgtcgtcactatcatcatctgcttcacctgctcctgctgctgcctttacaagacgtgccgccgaccacgtccggttgtcaccaccaccacatccaccactgtggtgcatgccccttatcctcagcctccaagtgtgccgcccagctaccctggaccaagctaccagggctaccacaccatgccgcctcagccagggatgccagcagcaccctacccaatgcagtacccaccaccttacccagcccagcccatgggcccaccggcctaccacgagaccctggctggaggagcagccgcgccctaccccgccagccagcctccttacaacccggcctacatggatgccccgaaggcggccctctgagcattccctggcctctctggctgccacttggttatgttgtgtgtgtgcgtgagtggtgtgcaggcgcggttccttacgccccatgtgtgctgtgtgtgtccaggcacggttccttacgccccatgtgtgctgtgtgtgtcctgcctgtatatgtggcttcctctgatgctgacaaggtggggaacaatccttgccagagtgggctgggaccagactttgttctcttcctcacctgaaattatgcttcctannatctcaagccaaactcaaagaatggggtgggtgggggggcaccctgtgaaggtggcccctganaaggtgggggccctcctccagggcacaatctggagttctttctcaggcttacccctaaggtggaccaagtaggggcctgtcacaccaaggtgggcgcagcttttctgggtggatggcaaatgtggtccctgggtttccggaagcggtaacccagttggctggctgtaaggccatgggcttctcccccgggaagttgggggggaaaccccggtggcaaaaaccccggggaaattgtgatggaagggcgaaaacctttggggaaacctggggcccaaaggtgggaacattttgtgatccctttttggggggg

SEQ ID NO: 251408 - DNA, 2266 bp, Homo Sapiens
  misc_feature (1434)..(1447): n is a, c, g, or t
  misc_feature (1750)..(1762): n is a, c, g, or t
  misc_feature (1768)..(1768): n is a, c, g, or t
  misc_feature (1797)..(1797): n is a, c, g, or t
  misc_feature (1829)..(1837): n is a, c, g, or t
  misc_feature (1843)..(1843): n is a, c, g, or t
  misc_feature (1855)..(1864): n is a, c, g, or t
  misc_feature (1869)..(1869): n is a, c, g, or t
  misc_feature (1923)..(1923): n is a, c, g, or t
  misc_feature (1982)..(1993): n is a, c, g, or t
  misc_feature (2065)..(2066): n is a, c, g, or t
  misc_feature (2099)..(2107): n is a, c, g, or t
  misc_feature (2141)..(2141): n is a, c, g, or t
  misc_feature (2181)..(2196): n is a, c, g, or t
tagcgaggcctgggtggcgaattcggcacgaggcttacccagcccagcccatgggcccaccggcctaccacgagaccctggctggaggagcagccgcgccctaccccgccagccagcctccttacaacccggcctacatggatgccccgaaggcggccctctgagcattccctggcctctctggctgccacttggttatgttgtgtgtgtgcgtgagtggtgtgcaggcgcggttccttacgccccatgtgtgctgtgtgtgtccaggcacggttccttacgccccatgtgtgctgtgtgtgtcctgcctgtatatgtggcttcctctgatgctgacaaggtggggaacaatccttgccagagtgggctgggaccagactttgttctcttcctcacctgaaattatgcttcctaaaatctcaagccaaactcaaagaatggggtggtggggggcaccctgtgaggtggcccctgagaggtgggggcctctccagggcacatctggagttcttctccagcttaccctagggtgaccaagtagggcctgtcacaccagggtggcgcagctttctgtgtgatgcagatgtgtcctggtttcggcagcgtagccagctgctgcttgaggccatggctcgtccccggagttgggggtacccgttgcagagccagggacatgatgcaggcgaagcttgggatctggccaagttggactttgatcctttgggcagatgtcccattgctccctggagcctgtcatgcctgttggggatcaggcagcctcctgatgccagaacacctcaggcagagccctactcagctgtacctgtctgcctggactgtcccctgtccccgcatctcccctgggaccagctggagggccacatgcacacacagcctagctgcccccagggagctctgctgcccttgctggccctgcccttcccacaggtgagcagggctcctgtccaccagcacactcagttctcttccctgcagtgttttcattttattttagccaaacattttgcctgttttctgtttcaaacatgatagttgatatgagactgaaacccctgggttgtggagggaaattggctcagagatggacaacctggcaactgtgagtccctgcttcccgacaccagcctcatggaatatgcaacaactcctgtaccccagtccacggtgttctggcagcagggacacctgggccaatgggccatctggaccaaaggtggggtgtggggccctggatggcagctctggcccagacatgaatacctcgtgttcctcctccctctattactgtttcaccagagctgtcttagctcaaatctgttgtgtttctgagtctagggtctgtacacttgtttataataaatgcaatcgtttggaaggaccaaagcaacactcgcaccaaccgaaacctagacnnnnnnnnnnnnnnccttgttcggcccgccctccggcccctccaaaaaaactttttccaaagaacacatccagcaatgaggggggcccgggggcccccatctaacgggtaaaagcgggcaaaacatggcgccccaaataaagccgtggtgtttcccccataaggagaaagaactccgccgggtggctcccacgtgtgacaccacacaggtggcgccctctgggaggaaaattattcccgccgcccctcgcccccatctattcttataaagaaaaaaatagaccctcgcccccacccaggggagggagacgggggggnnnnnnnnnnnnncccctnaccaaaaacaaccggcagcgcgaattttnccatccccccatgttgtggagggtggcagaannnnnnnnnatttantcatgaatcttnnnnnnnnnnaacancgaacaaaaaaaatgtggatgggggccaacgaaaaataaattacccccccaccnatttaagaaaaaataaaggggcccggccctcgcacccttgtttttataaaaactattcnnnnnnnnnnnnaggaccaaatccttctcataatataatcttcccccaaaaaccacccctaaagggtgggggggagaaaagtcnnccccccttccccctcccaagccggcgttgcggnnnnnnnnncacccccccctccccgccgcgaacaataattgtnccttcccaccaacaagaaccttttaaatataacgggcggnnnnnnnnnnnnnnnnacttggtgacccctcccttggggttggaccccgcacaagacacttccatccaaaattttagggggcgccc

SEQ ID NO: 251409 - DNA, 823 bp, Homo Sapiens
tagagactcatctttttgcctttgagatttactttaggaaagaaaagttcttttgatgctacaatcagtaaagagggcatttgctattgattctagtcatccctggcttcatgagtgtatgattcgtctctttaatactgcagtgtgtgaaagtaaagatttatctgatacagttagaacagtattaaaacaagaaatgaatcgtctttttggagcaacgaatccaaagaattttaatgaaacttttctgaaaaggaattctgattcattgccatacagattatcagctgccaaaatggtatattacttagatccttctagtcagaagcgagctatagagttggcaacaacacttgatgaatctctcactaacagaaacctccagacatgtatggaggtattggaagccttgtatgatggtagcccaggagactgtaaagaagctgctgaaatttatagagcaaattgtcataagcttttcccttatgctttggctttcatgcctcctggatatgaagaggatatgaagatccacagttaatggagatagttcctgcagaagctgaagaactggcccaatgaaatttgaacatcactaaacaagcaaatggaatgactttggaccatatctagtatataatatttttgtcacgcacctgctgcattgctctaacttacacagaatgagaggagtaaatgttcttgccttcaaatagtgttttacgttttttatcctgctgaaaaagtatatataaaatatctaacattacaggatagaggttcagtttcttaaaaaattaaagctgctaaaattgagtggtta

SEQ ID NO: 251410 - DNA, 1464 bp, Homo Sapiens
  misc_feature (81)..(81): n is a, c, g, or t
tcatgaagcttgcccagtttcaccagagccattttctccacatctcccacggcgtaagctctccaataacacttttggctntccactagttgattgagtttctcgtaacattctcctaaagcaaccagcatgcgagaatcattgggtcgaagctggtgggcccgtctataataataaaggcagtaaaatggcatcttaaggatttcataggtctgcccgaggccataccaagctctgtagtcccgtttgttgacctcaatggcatgtctataagcctggatagcagcagacgtgttcttcatctccatgtactcatgtcccattagtgtccaggcaccaagataccgaggatttaatttcagggctctctggaaatataaggctgctttctcatgctgagaacgtaaactgtaataattgccaattacacagcacgtttctacacgatatttatcaatctcacagaggttatgagccagataactcaactccgatttcatgctcctgacataaagaaggttggagaatgtgtccatattttcaatcctgtaagggtcttgtttccttagctcattaaaaatggagagggctttgtcaatatctctgatattgtgataggcaactgcaatttgggaaacaatatacgagctcttagagaagcccacatcaatgagattctgatacttttgcagggcctcctctatcaactgcaactctgtgtatatatgagccagaaaaaactctttcatccaggtgtctggcaaagacaggaacttcagcatctctttgtctgtgatcaggttacagagttctaaccaggctccccaatgcaagggcaaaacatgagtagcttccacaaacacatcaatggcctctttaaccaagtccagttttcgaagcaccacaccatacagataaagtccaaatccatcaagttctcgagcttggtgttttttgctgagctccactctcaattctctaagcgcctcatttttcacttgtcctttttccagggggcctaagctatcaactgtttcatcgtccttctttttttctccagacagatatctggaatacatatacagaaaataggctttcttgctattgcagccatgcaggaaatgtgctgcccgatcatactctttaacgtcaaagtaggccttggccagggtataggcatccatatcctgggcatcttcctctgtaataggcggaggcggttgcagctcggccagaggcaatgcagggagagagaaagccaactccgccgaccatttgctactgtgtagtaggccccgctcccgggtaaggcccgcaataagcagcagttgctttttaatttcccgcaaatctgagaaatcgctgtttatggacaggacaggcgccactgccgccgtcacagccaccgggaccatggaggtactcgcagccattttcccgactcgggccactccagccaatccc

SEQ ID NO: 251411 - DNA, 1176 bp, Homo Sapiens
  misc_feature (35)..(35): n is a, c, g, or t
  misc_feature (977)..(978): n is a, c, g, or t
  misc_feature (985)..(985): n is a, c, g, or t
  misc_feature (1005)..(1005): n is a, c, g, or t
  misc_feature (1045)..(1045): n is a, c, g, or t
  misc_feature (1061)..(1061): n is a, c, g, or t
  misc_feature (1064)..(1064): n is a, c, g, or t
  misc_feature (1085)..(1085): n is a, c, g, or t
  misc_feature (1118)..(1118): n is a, c, g, or t
gaaaaagtgttaggatttgacagttactttttaanagggatgatcttttgtggtgtgtgtttttcccagtataagcctattgctggcgatgggcctatttaagaacagctgattttttccagtgaaaatatggtaattttaggaacacagtttgtaagttcacatttactataatgggccaaaaccataacctgccagtttgcaatacatcttgatcttttaatattcttatctgatattgtgtaattcaattcctaaactgatagttaccttgaattttgcgaaaaggtttgggtggttttttttaaacatgaaattgagggatctcatctgggcgaacaagaagagaaggctgtgaattgtactgtatcatgtacattcctgatttaatacttacagaacattttattcagatatcaatttgttacataaacatttcagcaatgatacaaagataactgataaaatatattacattcaatgaggttttctttacaaatgctctacttgaggtctgtgtcttaaagatggcatgacacctaagtacaagacatcaactgaatgaggattttaaaaaatggtatataagcataggacaagggctatgtttgtttgtttttcaaaagtgctttgaagataacagcctttaggtttgagttatttcacttttcataatttttaagtagcttatatataatggtggtaccataggattttcttttttcaaatgactgtcggcagaaacagtgggcactgactcaccttttgagttttagcagagaatgatttattgctttacaatgcactttctaacccattggagctatattagcatgatcgtggaaaaaagacatgcttttgtatttaaatattggaggatttaagtgtctttctcaaaatagcttattcctttctgaaagatgctattttataacactgcatcagttttaggagttgcatctcttctggctgctctnntatattngagcaagatcagtgtagaantatgtgttagaaacttgtctgtgctcagttagtgaaaggngtgctgatgtgctgantanacccaagaatttatgctagtnttctgaggtgctgattgaactatgactaactanaacagatctcaaacttgctgtgtgttacattaagacagtgtgatactaggtgactgaa

SEQ ID NO: 251412 - DNA, 1752 bp, Homo Sapiens
  misc_feature (1356)..(1356): n is a, c, g, or t
  misc_feature (1359)..(1359): n is a, c, g, or t
  misc_feature (1385)..(1416): n is a, c, g, or t
  misc_feature (1493)..(1493): n is a, c, g, or t
  misc_feature (1545)..(1545): n is a, c, g, or t
  misc_feature (1548)..(1548): n is a, c, g, or t
  misc_feature (1593)..(1593): n is a, c, g, or t
  misc_feature (1595)..(1595): n is a, c, g, or t
  misc_feature (1628)..(1628): n is a, c, g, or t
  misc_feature (1666)..(1666): n is a, c, g, or t
  misc_feature (1673)..(1673): n is a, c, g, or t
  misc_feature (1725)..(1725): n is a, c, g, or t
tgacggcacttagctgctgacaaacaacctgctccgtggagcgcctgaaacaccagtctttggggccagtgcctcagtttcaatccaggtaacctttaaatgaaacttgcctaaaatcttaggtcatacacagaagagactccaatcgacaagaagctggaaaagaatgatgttgtccttaaacaacctacagaatatcatctataacccggtaatcccgtatgttggcaccattcccgatcagctggatcctggaactttgattgtgatatgtgggcatgttcctagtgacgcagacagattccaggtggatctgcagaatggcagcagtgtgaaacctcgagccgatgtggcctttcatttcaatcctcgtttcaaaagggccggctgcattgtttgcaatactttgataaatgaaaaatggggacgggaagagatcacctatgacacgcctttcaaaagagaaaagtcttttgagatcgtgattatggtgctaaaggacaaattccaggtggctgtaaatggaaaacatactctgctctatggccacaggatcggcccagagaaaatagacactctgggcatttatggcaaagtgaatattcactcaattggttttagcttcagctcggacttacaaagtacccaagcatctagtctggaactgacagagataagtagagaaaatgttccaaagtctggcacgccccagcttagcctgccattcgctgcaaggttgaacacccccatgggccctggacgaactgtcgtcgttaaaggagaagtgaatgcaaatgccaaaagctttaatgttgacctactagcaggaaaatcaaaggatattgctctacacttgaacccacgcctgaatattaaagcatttgtaagaaattcttttcttcaggagtcctggggagaagaagagagaaatattacctctttcccatttagtcctgggatgtactttgagatgataatttactgtgatgttagagaattcaaggttgcagtaaatggcgtacacagcctggagtacaaacacagatttaaagagctcagcagtattgacacgctggaaattaatggagacatccacttactggaagtaaggagctggtagcctacctacacagctgctacaaaaaccaaaatacagaatggcttctgtgatactggccttgctgaaacgcatctcactgtcattctattgtttatattgttaaaatgagcttgtgcaccattagatcctgctgggtgttctcagtccttgccatgaagtatggtggtatctagcactgaatggggaaactgggggcagcaacacttatagccagttaaagccactctgccctcccnccnactttggctgactcttcaagaatgcnnnnnnnnnnnnnnnnnnnnnnnnnnnnnnnnaatacagtagctaacatgtattgagcacagattttttttggtaaaactgtgaggagctaggatatatacttggtganacaaaccagtatgttccctgttctcttgagcttcgactcttctgtgctctanttntgcgcactgctttttctacaggcattacatcaactcctaaggggncntctgggattagttaagcagctagtaagtcaccngaagagcacggatttacagaagacacaacgccttcccnggtgatnactgtcataaccagtggtctaccgtatcccatcactgaggactgatgttgantgacatcattttatcgtaataaacatg

SEQ ID NO: 251413 - DNA, 1445 bp, Homo Sapiens
ttccctcctttataagcccgccgcaccccccactgcacgaggcctgggtggcgaattcggcacgaggtacacttgaacccacgcctgaatattaaagcatttgtaagaaattcttttcttcaggagtcctggggagaagaagagagaaatattacctctttcccatttagtcctgggatgtactttgagatgataatttattgtgatgttagagaattcaaggttgcagtaaatggcgtacacagcctggagtacaaacacagatttaaagagctcagcagtattgacacgctggaaattaatggagacatccacttactggaagtaaggagctggtagcctacctacacagctgctacaaaaaccaaaatacagaatggcttctgtgatactggccttgctgaaacgcatctcactgtcattctattgtttatattgttaaaatgagcttgtgcaccattaggtcctgctgggtgttctcagtccttgccatgacgtatggtggtgtctagcactgaatggggaaactgggggcagcaacacttatagccagttaaagccactctgccctctctcctactttggctgactcttcaagaatgccattcaacaagtatttatggagtacctactataatacagtagctaacatgtattgagcacagattttttttggtaaaactgtgaggagctaggatatatacttggtgaaacaaaccagtatgttccctgttctcttgagcttcgactcttctgtgcgctactgctgcgcactgctttttctacaggcattacatcaactcctaaggggtcctctgggattagttatgcagatattaaatcacccgaagacactaacttacagaagacacaactcccttccccagtgatcactgtcataaccagtgctctaccgtatcccatcactgaggactgatgtcgactgacatcatgggctttatcgtaataaacatgtggctctattagctgcaagcttgaccaaataattggcatgacatctgagcacagaaattaaggcaaaaaaccaaagcaaaacaaatacatggtgctgaaattaacttgatgccaagcccaaggcagctgatttctgtgtatttgaacttatggcaaatcagagtctacacagacgcctacagaaagtttcaggaagaggcaagatgcattcaatttgaaagatatttatgggcaacaaagtaaggtcaggattagacttcaggcattcataaggcaggcactatcagaaagtgtacgccaactaagggacccacaaagcaggcagaggtaatgcagaaatctgttttgttcccatgaaatcaccaatcaaggcctccgttcttctaaagattagtccatcatcattagcaactgagatcaaagcactcttccactttacgtgattaaaatcaaacctgtatcagcaagtt

SEQ ID NO: 251414 - DNA, 316 bp, Homo Sapiens
actgcatagggccggcgtgggttcaagtgtagagcaatatcatttgattttcctgatagtaggtcaacattaaagcttttggcatttgcattcacttctcctttaacgacgacagttcgtccagggcccatggggggtgttcaaccttgcagcgaatggcaggctctgaaaagaagccacagtcaggaccaagaggcctgcagaaagcgatctccagggaaaactcgtgtccaaagaacactacagaatgtttcagagccatgaccctgtaaatcccaggaggggagagacagtctgccttggtcccagctgggtc

SEQ ID NO: 251415 - DNA, 2305 bp, Homo Sapiens
  misc_feature (1271)..(1308): n is a, c, g, or t
  misc_feature (1394)..(1394): n is a, c, g, or t
  misc_feature (1457)..(1457): n is a, c, g, or t
  misc_feature (1524)..(1524): n is a, c, g, or t
  misc_feature (1532)..(1532): n is a, c, g, or t
  misc_feature (1583)..(1597): n is a, c, g, or t
  misc_feature (1617)..(1617): n is a, c, g, or t
  misc_feature (1656)..(1656): n is a, c, g, or t
  misc_feature (1696)..(1696): n is a, c, g, or t
  misc_feature (1711)..(1711): n is a, c, g, or t
  misc_feature (1761)..(1761): n is a, c, g, or t
  misc_feature (1859)..(1859): n is a, c, g, or t
  misc_feature (1912)..(1912): n is a, c, g, or t
  misc_feature (1968)..(1968): n is a, c, g, or t
  misc_feature (2035)..(2035): n is a, c, g, or t
  misc_feature (2050)..(2050): n is a, c, g, or t
  misc_feature (2053)..(2053): n is a, c, g, or t
  misc_feature (2056)..(2056): n is a, c, g, or t
  misc_feature (2063)..(2063): n is a, c, g, or t
  misc_feature (2148)..(2148): n is a, c, g, or t
  misc_feature (2164)..(2164): n is a, c, g, or t
  misc_feature (2185)..(2185): n is a, c, g, or t
  misc_feature (2189)..(2189): n is a, c, g, or t
  misc_feature (2194)..(2194): n is a, c, g, or t
  misc_feature (2239)..(2239): n is a, c, g, or t
ataggctttatcatcatgggattcttcttttatatactgattacaagactgacacctatcaagtatgatgtgaatctgattctgacagctgtcactggaagcgtcggtggaatgttcttggtagctgtgtggtggcgatttggaatcctctcgatctgcatgctctgtgttggactagtgctggggttcctcatctcgtcagtgactttctttactccactgggaaacctaaagatttttcatgatgatggtgtattctgggtcactttctcttgcatagctatcctcattccagtagttttcatgggctgcctaagaatactgaacatactgacttgtggagtcattggctcctattcggtggttttagccattgacagttactggtccacaagcctttcctacatcactttgaacgtactcaagagagcgctcaacaaggatttccacagagctttcacaaatgtgccttttcaaactaatgacttcattatcctggcagtatggggcatgctggctgtaagtggaattacgttacagattcgaagagagagaggacgaccgttcttccctccccacccatacaagttatggaagcaagagagagagcgccgagtgacaaacattctggaccctagctaccacatccctccattgagagagaggctctatggccgattaacccagattaaagggctcttccagaaggagcagccagctggagagagaacgcctttgcttctgtagatgcccaggggcttggtcagtgtgcctcagctttggagttcatgcctggagtggttcaacagtctctggtgcaagtctaataagagatcaggcatatatatctgttctttgcataatattatggtgcccttattgatatatggtaagggtgtactaggggattaggatgattgtaagagaatgagaaagatgaccaaaaggttggtggtagggaggctttttcttatttccaaatacttgagaaattaccttttggtttacaaatctatgatcaacttattccattaaatagatacattaaaaaaattaaaatcccgaccaacacacccccctaccactaaccatacatgttccgcccgcctctagccctcaaagcactcttccctactaccttctcgtttcgggcgccgccgcggcccccgtaacgctcaagtgaaaccattggcaccctacccctggttctcgccctcacgcaaatatcccttgttctccatcgcgacctcacgacggctcacggacaattnnnnnnnnnnnnnnnnnnnnnnnnnnnnnnnnnnnnnngtgtggtctgtttacacctcgcgcagatccgcctgttctcgtaaacacacctacattcctcgcgaacaaatcgcgccccatgtatntactttgagcgacgcttatatcaccctctcacactcctgcgggtatatcactttatcattttngcacctactagcgcgcgtgtaccgcacgtctctccataataagattttaataatcatgagcatatantcccccgnaaccagacatcgcgcagccccgcataacaccttttttttcctcgcccgcgnnnnnnnnnnnnnnntacattatttatttaacacnacttctcgggcccccgcctgcgatattttttttgattanatactctcaccttgcgcactaataacattgataataattnttggcgtaggacaantggtgacgacgcaaccaacaatctaccttctcaacccgattgctcactancacgaccactgcactaatgtatttacatcgtacggcttacccccctcgacgaccatcattactcctggccgactccttgacactaatcctccaatttntgcccttgaccaagaatagaacatgccgcgcgggcactccgaccactgatgancttatggtgaggttatcatcccgcttccgcaacagctcactgtgcccccctcggtnttgatcctcgccgcgtgtaaaaacaccttgatatgaccacaacaccgcccctcatcgccgtgtgctncccccccgcccgccnctngangctgtgnagttccacatttcatgcggccggcccacgtgtatacacgcgggggaaacgaaacaaacatgtgctcgctgcgtcgtcccccgagnccatattaagaccgangaccgactgatgtgtttgttncgancacgngacgtctgttgctatcggcccccgccgcagctaacacccgccacnctttaccaccgccgcccggacgtctcaactcctatgctgttgctcctatcccgacccggcgccata

SEQ ID NO: 251416 - DNA, 869 bp, Homo Sapiens
ggataaagaagtcattagtttgaaaaggcacatttgtgaaagctctgtggaaatccttgttgagcgctctcttgagtacgttcaaagtgatgtaggaaaggcttgtggaccagtaactgtcaatggctaaaaccaccgaataggagccaatgactccacaagtcagtatgttcagtattcttaggcagcccatgaaaactactggaatgaggatagctatgcaagagaaagtgacccagaatacaccatcatcatgaaaaatctttaggtttccatcatacttgataggtgtcagtcttgtaatcagtatataaaagaagaatcccatgatgataaagcctatgaagaataattctgttttccagaatctgtgtccaaagaaacaaatgaagaaaccaagcagggcaaaaagagtgaagaacactttggaagacactcttcctagggaagcacaactaccctctcctgcctcaaagctgcaagcgtatgtgtgagcaggaatgtaggcagccagatgtatttaaaaaagggtccccaaacaatgaacattgtataatgacaccttgtcccgggagggaggagaaggaaacacttgtccttatcaattaagctgttagggtaaccaccttgagagcactggccttcacctggggcacactgaccatcctctgcagatgcttcagcaacatctcctcagtgaggtcattctcaggcagaaaatactgatagacatcatactgcaacctccacctggagtcctggtctgtcccagcgtcacatggtgggggatctacgcctctcgcatagcctagggtttgctggggcaaacttgatagtcgtttcaaagaaattatactccaagtaaatgt

SEQ ID NO: 251417 - DNA, 844 bp, Homo Sapiens
gccaacctccaaattctcgtctgtcacttcagacccccactagttgacagagcatcagaatttcaactccagtagacttgaatgtgcctctgggcaaagaagcggagctaacgaggaaagggatttaaagagttgttcttgggtgtgtgtcaaacatttattccctgtctgtgtgcagaggggattcaacttcaatctttctgcagtggctctgagtccagccccttacttaaagatctggaaagcatgaagactgggcttttttcctatgtctcctgggaactgcagctgcaatcccgacaaatgcaagattattatctgatcattccaaaccaactgctgaaacggtagcacccgacaacactgcaaaccccagtttaagggctgaagatgaagaaaatgaaaaagaaacagcagtatccacagaagacgattcccaccataaggctgaaaaatcatcagtactaaagtcaaaagaggaaagccatgaacagtcagcagaacagggcaagagttctagccaagagctgggattgaaggatcaagaggacagtgatggtcacttaagtgtgaatttggagtatgcaccaactgaaggtacattggacataaaagaagatatgagtgagcctcaggagaaaaaactctcagagaacactgattttttggctcctggtgttagttccttcacagattctaaccaacaagaaagtatcacaaagagagaggaaaaccaagaacaacctagaaattattcacatcatcagttgaacaggagcagtaaacatagccaaggcctaagggatcaaggaaaccaagagcaggatccaaatatttccaatgg

SEQ ID NO: 251418 - DNA, 723 bp, Homo Sapiens
  misc_feature (21)..(21): n is a, c, g, or t
acggggccgggggcgctcccnggagtatcagcaaaagggttcgccccgcccacagtgcccggctccccccgggtatcaaaagaaggatcggctccgccccgggctccccgggggagttgatagaagggtccttcccaccctttgccgtccccactcctgtgcctacgacccaggagcgtgtcagccaaagcatggagaatcaagagaaggcgagtatcgcgggccacatgttcgacgtagtcgtgatcggaggtggcatttcaggactatctgctgccaaactcttgactgaatatggcgttagtgttttggttttagaagctcgggacagggttggaggaagaacatatactataaggaatgagcatgttgattacgtagatgttggtggagcttatgtgggaccaacccaaaacagaatcttacgcttgtctaaggagctgggcatagagacttacaaagtgaatgtcagtgagcgtctcgttcaatatgtcaaggggaaaacatatccatttcggggcgcctttccaccagtatggaatcccattgcatatttggattacaataatctgtggaggacaatagataacatggggaaggagattccaactgatgcaccctgggaggctcaacatgctgacaaatgggacaaaatgaccatgaaagagctcattgacaaaatctgctggacaaagactgctaggcggtttgcttatctttttg

SEQ ID NO: 251419 - DNA, 1198 bp, Homo Sapiens
atagtagcaaatacgtgatattgcagtatataggaaagaatgagcactttcattattgtaaacatctgtacattgctacagattgcctattagaaaggtgctaaaaggcaactggtgagggaaaactaagatgaaatccaaagaaatatgaacacatcatctaaaaatgtaaattctcaattcctttcatctaaatttccttctaatcttaaaaaggaaggggaaactctattacctataagcagctttcttatttacttgatcagagttgtcaatttttttaacgaaatggagctctgtattcaaaaaaagtgttttgtggaactccaaaataaaaacacatgaaagatatgcctgtttagatcctggtggggaccgtgaagcctccagtttacactgtaagtttctggagagcagtgattgtgtcttgtttgtctcccatggttcccgaccctgtgcttgcatctaatatttggtattggcatttcaaacacgaatacacattctttaaacatatcatggtacagacataaaatactgtctttaaacatcagcccgtcttagagaagaagtattttcatcatcctagactccttatatttacttgtcagatagttcttatgcatcagcaggcactgtagatacaatgacaaagtttctacttttaaggagcttaccattttgtggagaaaggtgaacaagtaaaccaataataagcagtgtgctgtcagctgtgacaagctgctgggaccaccgagtgacatctacatcaggccctgggtgagtaccagggaaggcttctgggccgatccaagttgccatccttcacgtcagttctcttagtaaatcatcccaggcattcctaaagcaggttagtgcctgctgtctgtgttcccataatactttgtgcccatcaatggtcagtatcagttcctgcaccccactgttgtttacttatccatctttctgccaggctgggatgtctttaaggacagggattccatttattcattttcagcattttccagctactgtttgtttagaaaggcttttggggatcacattgtaaaggcagaaatggtagttatttttagctctttctttaaaaatatccgaaagtatttagcttctcctttcaaaataaaaagcattgccagtccgcagtccggcctgggagacagagcgagactccgtctca

SEQ ID NO: 251420 - DNA, 389 bp, Homo Sapiens
ccggaacgggagccaacatggcagcggggttcgggcgatgctgcagggtcctgagaagtatttctcgttttcattggagatcacagcatacgccaatcgacaacgtgaaccaggattaggatttagttttgagttcaccgaacagcagaaagaatttcaagctactgctcgtaaatttgccagagaggaaatcatcccagtggctgcagaatatgatatgaacacacacattccagagaactgtggaggtcttggacttggaacttttgatgcttgtttaattagtgaagaattggcttatggatgtacaggggttcagactgctattgaaggaaattctttggggcatgcctattattattgctggtgatcaacataagaaggttttt

SEQ ID NO: 251421 - DNA, 1274 bp, Homo Sapiens
agccaacatggcagcggggttcgggcgatgctgcagggtcctgagaagtatttctcgttttcattggagatcacagcatacaaaagccaatcgacaacgtgaaccaggattaggatttagttttgagttcaccgaacagcagaaagaatttcaagctactgctcgtaaatttgccagagaggaaatcatcccagtggctgcagaatatgataaaactggtgaatatccagtccccctaattagaagagcctgggaacttggtttaatgaacacacacattccagagaactgtggaggtcttggacttggaacttttgatgcttgtttaattagtgaagaattggcttatggatgtacaggggttcagactgctattgaaggaaattctttggggcaaatgcctattattattgctggaaatgatcaacaaaagaagaagtatttggggagaatgactgaggagccattgatgtgtgcttattgtgtaacagaacctggagcaggctctgatgtagctggtataaagaccaaagcagaaaagaaaggagatgagtatattattaatggtcagaagatgtggataaccaacggaggtgctaataaagcctttactggattcattgtggaagcagataccccaggaattcagattgggagaaaggaattaaacatgggccagcgatgttcagatactagaggaattgtcttcgaagatgtgaaagtgcctaaagaaaatgttttaattggtgacggagctggtttcaaagttgcaatgggagcttttgataaaaccagacctgtagtagctgctggtgctgttggattagcacaaagagctttggatgaagctaccaagtatgccctggaaaggaaaactttcggaaagctacttgtagagcaccaagcaatatcatttatgctggctgaaatggcaatgaaagttgaactagctagaatgagttaccagagagcagcttgggaggttgattctggtcgtcgaaatacctattatgcttctattgcaaaggcatttgctggagatattgcaaatcagttagctactgatgctgtgcagatacttggaggcaatggatttaatacagaatatcctgtagaaaaactaatgagggatgccaaaatctatcagatttatgaaggtacttcacaaattcaaagacttattgtagcccgtgaacacattgacaagtacaaaaattaaaaaaattactgtagaaatattgaataactagaacacaagccactgtttcagctcc

SEQ ID NO: 251422 - DNA, 782 bp, Homo Sapiens
  misc_feature (715)..(715): n is a, c, g, or t
gggaccagaggagtcccgcgttcggggagtatgtcaaggccgtgacccgtgtattattgtccgagtggccggaacgggagccaacatggcagcggggttcgggcgatgctgcagggtcctgagaagtatttctcgttttcattggagatcacagcatacaaaagccaatcgacaacgtgaaccaggattaggatttagttttgagttcaccgaacagcagaaagaatttcaagctactgctcgtaaatttgccagagaggaaatcatcccagtggctgcagaatatgataaaactggtgaatatccagtccccctaattagaagagcctgggaacttggtttaatgaacacacacattccagagaactgtggaggtcttggacttggaacttttgatgcttgtttaattagtgaagaattggcttatggatgtacaggggttcagactgctattgaaggaaattctttggggcaaatgcctattattattgctggaaatgatcaacaaaagaagaagtatttggggagaatgactgaggagccattgatgtgtgcttattgtgtaacagaacctggagcaggctctgatgtagctggtataaagaccaaagcagaaaagaaaggagatgagtatattattaatggtcagaagatgtggataaccaacggaggaaaagctaattggtattttttattggggcacgttctgatccangatcctaaagctccctgctaataaagcctttactggattcattgtgggaagcagataccccaggaaa

SEQ ID NO: 251423 - DNA, 396 bp, Homo Sapiens
cccgccacaaaaaggaacgtcaagaaagaagactctatgcatgacagtataacaccagtaacgcagaaatgcttctaaagaagagcagcagaatgcagttaaatttctttctaaacagcaccagatttaaaataaatgatgtttaaaaatacagactgaaatccatctttcctctaaagtgtttataagacttgtgactacccagtatacacgtacaacaaaattcaaatattcaagccatctcaaaaggactaaatattaaacaaaattctccctaatttacccatatatggcagttaaacaacagtaattgtgaacaattacttcgtgttctattagttcacagaggaacaaaaatttaaataacaatctaaggtatatattactacttatttc

SEQ ID NO: 251424 - DNA, 529 bp, Homo Sapiens
gtttgctgcatagattacaacggtgatggcgggcaagcggtccggctggagccgggcggctctcctccagctccttctcggcgtgaacctggtggtgatgccgcccacccgggcccggagtctgcgcttcgttaccttgctgtaccgccatggagaccgttcaccagtgaagacatatcccaaggacccctatcaggaagaagaatggccccaggggtttggtcagttaaccaaggaggggatgctacagcactgggaactgggccaggccctgcggcagcgctatcacggcttcctaaacacctcttatcaccggcaagaggtttatgtgcgaagcacagactttgaccggactctcatgagtgctgaggccaacctggctggactcttccctcccaacgggatgcagcgcttcaacccgaacatctcgtggcagcctattcctgtgcacactgtgcccatcactgaggacaggctgctgaagttcccgttgggcccatgtccccgttatgagcagctgcagaacgag

SEQ ID NO: 251425 - DNA, 707 bp, Homo Sapiens
  misc_feature (403)..(411): n is a, c, g, or t
tgtactctgtacatgtatattccggtagatcaaaaggaatcttatttaagatccccaacaaataagtcccccatggaaattgaaagtatcctctcagagactcaaattattaaagtctttcaaaaaagattaaattcatagattataaataatattagttcaaaatattaaacagttgaggacttcattggcaatgcaggcagactgcatgccagttaaacatgatgctctctcagtccttaaaagctaattaaaaatggttttggttacataagaggtattgaatacatatttcatgcctttttataccaactgtagcaaacaggattaggataatatacttaggaatcaattttactgaattcagaaacgtttatctccaccatacaccctcaaagggcannnnnnnnnacatgtcagtcagagatctgcttcatccttcagtttcatagatagaattattttaaacacttgaaatctaggaagcaaacctgacaaggcttcagaatttaaaaagcaacagctcactgtgtgtggtgtgctatcaggttgaaatctatgttgtcctgatgttttcagagttatttcaaaagacaaaaatacagttgccactgatttatcaaaaacatttggctgccttttgtcatcagctacaaaattacagtgctttataaaataaacatcaaggccgggtgcggtggctcacg

SEQ ID NO: 251426 - DNA, 947 bp, Homo Sapiens
  misc_feature (587)..(844): n is a, c, g, or t
ggaatgactatcacatgaatctgggccaattcttagaatttctcaagaagcacaaaagtgagcatgtttttcagatactatttggtattgaaagcaaaagttcagactcataaaaagcgattaagaggcctatgcctgtaatttcactaagtcagtatttctgttaataagaccaaattaaaaaggctagtggctgtgtagcatcctcagtgcaaaacccagctccagaattttcacctggtaacgaatttcaactgacagtgaaatgaataggcctttaaactttataacattgcaattgtgatgttatctctaggtttttgtgtgaagtcattcaaaaactatttcattgtaaattaataaaaacaatccatttaacttgtgaagctgatttgattgaagaggaatccaaagcccataactaacatcaaaaatcaaactgcaattatgaattgagaaatatgaatagcatttgtttcacattgctagcacacatgtgacacacccacttgtctttcattattggaaatctaaatcaggtttaaaatgagaacaggaaggacatgtttacttccttttttgagacnnnnnnnnnnnnnnnnnnnnnnnnnnnnnnnnnnnnnnnnnnnnnnnnnnnnnnnnnnnnnnnnnnnnnnnnnnnnnnnnnnnnnnnnnnnnnnnnnnnnnnnnnnnnnnnnnnnnnnnnnnnnnnnnnnnnnnnnnnnnnnnnnnnnnnnnnnnnnnnnnnnnnnnnnnnnnnnnnnnnnnnnnnnnnnnnnnnnnnnnnnnnnnnnnnnnnnnnnnnnnnnnnnnnnnnnnnnnnnnnnnnnnnnnnnnnnnnnnnctttaaactcctatttcgagtgttttagtaaaactagatcctaatagcagtggcaaaggactcatagacatgaagtcccacgagttaaaagatgacacacaat

SEQ ID NO: 251427 - DNA, 650 bp, Homo Sapiens
aagcttcaattgcggtgcagtacgcccagaaacatccatttcaacctctgaacatttggtttggaacacttatttgatgaatattcagttaaacatttggatacaagctcttgccaaaaggtcagatctctgccatttatcttggaatgtttctgaagacattctattccttctgttaactctacacacttctgtgcttggatctctaatgcaatgatagacaatgccaacacagaaggctttgctttagaaaatatgatcctgcaatgacatgccttcagttgagcttctagtctttcaaaattaatgctatttctcctttcaagtggcaagttctcttgaaggagtgaataatacagttgcagaaattccattctcatcaagtctgaaaccgtaaacctatattgacttattcggatcaagtcagttgccaatgggacattcctttcctcttctattgattttacagccaaataaaagcagctcagtccaacacacccaaggtgcttgggctgtaccttcattttagacaggaatctgtccagtaaattcacagctagagaaaatgtctctgtgtcaaagccaaagaactgagttagactaagaagatcttttacttcaaagtcccttagtcttgcagtcattctgag

SEQ ID NO: 251428 - DNA, 2289 bp, Homo Sapiens
aagaagcgaggcctgggtggcgaattcggcacgaggagtctctgtcaagatgatagaggtactgacaacaactgactctcagaaactgctacaccagctgaatgccctgttggaacaggagtctagatgtcagccaaaggtctgtggtttgagactaattgagtctgcacacgataatggcctcagaatgactgcaagactaagggactttgaagtaaaagatcttcttagtctaactcagttctttggctttgacacagagacattttctctagctgtgaatttactggacagattcctgtctaaaatgaaggtacagcccaagcaccttgggtgtgttggactgagctgcttttatttggctgtaaaatcaatagaagaggaaaggaatgtcccattggcaactgacttgatccgaataagtcaatataggtttacggtttcagacttgatgagaatggaaaagattgtattggagaaggtgtgttggaaagtcaaagctactactgcctttcaatttctgcaactgtattattcactccttcaagagaacttgccacttgaaaggagaaatagcattaattttgaaagactagaagctcaactgaaggcatgtcattgcaggatcatattttctaaagcaaagccttctgtgttggcattgtctatcattgcattagagatccaagcacagaagtgtgtagagttaacagaaggaatagaatgtcttcagaaacattccaagataaatggcagagatctgaccttctggcaagagcttgtatccaaatgtttaactgaatattcatcaaataagtgttccaaaccaaatgttcagaagttgaaatggattgtttctgggcgtactgcacggcaattgaagcatagctactacagaataactcaccttccaacaattcctgaaatgggtccccttaactggattattacaggcaccaaaaaacttctctgaagcctttctccacaaccttgttctatggattccataatgttacaatggatttaagctatgaagcctcaaaacatcacgagataagcatgatggtctcagacttgggaaaactgcctaatattatgctgtagtggaattatgtttagatttgaattcatctgtgaagcattcaaatcaaagctaaaagcctaaatgtgaaatgctaatgacaagcctgagaaggtaaactgtgaatcttcatttctatcattgatctaactttagatattggatcaatatatttaggtggtattgaaaatgctattggaggagtcacactaatactatcaactatcagtcttcccacagcttcaatcactgtcattattctaatcctactcctacttaaattttaagttatgaggtttatgtcaaaagcaacatttcacaaatgtacttttaaggcataataagggttaacattctaggcagtataaacacaccccataatgcaagtaataggtaatctagagatgtggactttattgctatatgggaattacatttaaatttgagggcattttatataaagaaaaatacagacctataaagtttggcatattcattaagttatcttttaatatttttttctagaaaacaggtgacatttgtatctacgataaaaatttttatacagaacctactgcctcaaactgaatcccatcaagaaaactagtttctattgtattagtaactcaaaataaattatcacttcgaaaacttgctttcccacactaaggtaagttcagactagattgaacactccagaattttttactacagactgtttttaagttagaagtgatggcaattttataaatagagaatatacttccactgatgcccttactgtgccaaaacaaaaatcttaagaaaagcaagtagacaccttcataactatgaatgaagctgctgaagtagtgtttaggatcctccatggcagttagtgaatgtaagaagtacagtgttaaagtgttgtaaacagttactcagtgcaatgtatagcctgagtctatccatgatggctatatccaatttgacatcacgttatggatcagtacacaatgaaaaaccaaagaaccacagtatatctaattcttaaactttttgtaaacacatgtcttatgggtaactttttagttttcccaaaaggctgataaatttcaatattttgaatacatcattgttaattttgagttggcagaggtaaactaaccaactaccattatgttttagtactaaaggatatacctttcaataaaagtaatgaaattcga

SEQ ID NO: 251429 - DNA, 1200 bp, Homo Sapiens
  misc_feature (1173)..(1173): n is a, c, g, or t
gggccttcggctccgagctgaccctgatcagggccgagttgtctcggcggcgctgccgaggcctccacccggggagggtggttaccgctgaggagctgcagtctctgtcaagatgatagaggtactgacaacaactgactctcagaaactgctacaccagctgaatgccctgttggaacaggagtctagatgtcagccaaaggtctgtggtttgagactaattgagtctgcacacgataatggcctcagaatgactgcaagactaagggactttgaagtaaaagatcttcttagtctaactcagttctttggctttgacacagagacattttctctagctgtgaatttactggacagattcctgtctaaaatgaaggtacagcccaagcaccttgggtgtgttggactgagctgcttttatttggctgtaaaatcaatagaagaggaaaggaatgtcccattggcaactgacttgatccgaataagtcaatataggtttacggtttcagacttgatgagaatggaaaagattgtattggagaaggtgtgttggaaagtcaaagctactactgcctttcaatttctgcaactgtattattcactccttcaagagaacttgccacttgaaaggagaaatagcattaattttgaaagactagaagctcaactgaaggcatgtcattgcaggatcatattttctaaagcaaagccttctgtgttggcattgtctatcattgcattagagatccaagcacagaagtgtgtagagttaacagaaggaatagaatgtcttcagaaacattccaagataaatggcagagatctgaccttctggcaagagcttgtatccaaatgtttaactgaaatattcatcaaataagtgttccaaaacaaatgttcagaagttgaaatggattgttttctgggcgtactgcacgggcattgaaacatagctactacagaataactcaccttccaacaattcctgaaaatggtccctaaactgggatattacggcccaaaaaacttctctgaaacctttctcccacaactttggtctatgggattccatatggttacaatggattttaagctatgaaacctccaaacctcccgagaataacctgatggtctcagacttggggaaaactggcctaaaattatggctggaangggaattaggtttaaaatttggaattc

SEQ ID NO: 251430 - DNA, 1013 bp, Homo Sapiens
  misc_feature (85)..(86): n is a, c, g, or t
gggtgcacgggggtcagggtcacccgagcgggtgtgacctttgaccctgtgtgtctgtcggggatctccagagtgagcgtctccnncatctgctaccaggggaacgggctcaacttctctttttccgaggactccgtgaccgtggaggtcacagctcgagcagggccctgggctcctcacctggagtgctgagctgtggccatcccagtcccggctctccctgttgccaggacacaaggtctcctttccccgctcggctggccggatacaaatgtcacccccgaagctgcctggaagttccagctccgagttccctgggaggactttttcagatgttagggacccgctccagagccccctctgggtcaccctgggttcctccagccccaccgagtcactcactgtggaccctgcctctgaataatcaggaacggtggcttcagagacgtctcttgggccttccctctggccacgtctgcacccacccctcctgggcaccctcctagcctgccatccctcacctgcagccaggctctcagggaaggtccatgctgcttggcctgagttcaaggctttctgcctgtagcctggactcccgtggacccccgatgggcaggtggcttccccgtggcatctccacaccgcctctgcctgcccctgtggactgatgctatcgcgcaccgtcccacgaccccgaccccgagctcctgaagccggggtctgagcctgcatcacctctggccatctcatcccccacatactcctgagagcagtggtcaccagcggccgtgccgctctgctgagaaggcagagaggcaggctcaggcctcagcgtggacagcagggataagggtgcacgataggacggtgtaactctggcccctttcagaagttcctcaggaactctcaaggtgcaagcttagccaacagcggaacttatcatggtcgtgccacgaacagaccgtcaagcgacagaccagttaggggcctatatattcgggcagtcggacacg

SEQ ID NO: 251431 - DNA, 557 bp, Homo Sapiens
cccttaaaaattttagtgcagctttgctttccttaaagtaatatttaattttccattattttctatttaagcccttcatcgtgggtgtaaatggtactgaagccccagaaagtcctacagagatttttcaccccacagtagctctatgcttcaagcctaaatatttataataacctgaatattatccctgcttcaaggaagactttcttgtctacagatcaccctagctatgattttatatctaaaagataatgccaacaacaaaacagcctatacctaaaattgatggtttattctgagttctgtgcagatcatctgatgaaatgaaactaacttacacaaaataaagatcgactgctcttgtaacagctggatagtcaatcaatgtgaataaatggggcacattataaaatttaaaacctaatacttgttcttctacagcctactgtctttagacacttgttaagaactgaggcaagtctaaccatttcctactgaagaaaccacttctgcagcaaacgcttttaaaatgtcacaattaatagtatttctgctgc

SEQ ID NO: 251432 - DNA, 525 bp, Homo Sapiens
  misc_feature (41)..(67): n is a, c, g, or t
agggaaattccaatccaaaacccattaatgtgctgaacgcnnnnnnnnnnnnnnnnnnnnnnnnnnngcaacaacaccttggacctctgtgttggggtttgactgacctcaagctgatattattggaccttgtgcagctttgataacccatgtgagagtctaggcaggaccagtggggcccaaatcttgctgctcttgtacttttaggcactgcccttgcagactcacctttctccacctgccctggagaaaggtagggtgtgctgggcctgccccttgcaaatgggattcaccagtttcatttatttgactctactgccacagtgaaaagagcaaacagctattgggttgcaaacctcctttgacattaggaaatgttgactttgtaacaataaaactttggtcctagaaagacacggttgtcctgggagtttgtagtgttaagttgcaacaacaacaacaaaaagcaacaaaaccagcttaggataacactttttgttgcttgttcttaaagatgtctcacta

SEQ ID NO: 251433 - DNA, 762 bp, Homo Sapiens
tctatacctcagaaaacagattcctattttaaccccaaaatgaaactaaatcggcagctaatattctgtacattggctgctttggctgaggaacgaaaacctttggaatgtctagatgcttttggagccactgggataatgggattacagtgggcaaaacatcttggaaatgcagtcaaagttacaatcaatgactttgaatgaaaattctgtgacactgattcaggaaaactgccatttaaacaaattgaaagtggtggtggacagtaaggaaaaggaaaagagtgatgatattcttgaagaaggagagaaaaatcttggtaatattaaggtgaccaaaatggatgccaatgtactgatgcatttgagatcttttgatttcatacatctagacccttttggaacatcagtgaattatctagattctgcattcagaaatataagaaaccttggcatagtgtcagtgacttctacagatatcagttctttatatgccaaggcacagcatgttgcccggcgtcactacggatgtaacattgtccgaactgaatattacaaggaactagcagccagaattgttgtagctgcagtggcaagagctgcagcccgatgcaacaaaggcatagaagtactgtttgcagtggctctggaacattttgtgttggtagttgtgagagttttgaggggacctacttcagcagatgaaacagccaagaagattcaatacctgatccattgtcagtggtgtgaagagagaatttt

SEQ ID NO: 251434 - DNA, 319 bp, Homo Sapiens
  misc_feature (173)..(187): n is a, c, g, or t
  misc_feature (266)..(266): n is a, c, g, or t
  misc_feature (289)..(289): n is a, c, g, or t
  misc_feature (291)..(291): n is a, c, g, or t
tcctataaattaatcaaaattaaatcctgtcttaactttcatataaggatatttggcttctgagttggtgataaacaaggttttgacttctgcatgatactgaagagtactttaagccaagaaagttctaattcaagtcagtactcatatccaggacaatcagatcgatatannnnnnnnnnnnnnnaaaattaaagttagactaaactaacttaaacttagactgaaataaagaaatctcatataaggccaggtgcgatgctcanacctgtaatcccagtactttggnanccaaggtgggcagatcacatgatggaca

SEQ ID NO: 251435 - DNA, 1698 bp, Homo Sapiens
  misc_feature (1282)..(1282): n is a, c, g, or t
  misc_feature (1307)..(1307): n is a, c, g, or t
gtctcacagaagacggatcgggaggcctgaggaggccgctctttcctgatacgaggcgaaagggcgtgtggttgcgcctgaggaagatacttttctgtgttttggggttgtacattgccattccatttctcatcaaactatgtcctggaatacaggccaaactgattttcttgaatttcgtaagagttccctatttcattgatttgaaaaaaccacaggatcaaggtttgaatcacacgtgtaactactacctgcagccagaggaagacgtgaccattggagtctggcacaccgtccctgcagtctggtggaagaacgcccaaggcaaagaccagatgtggtatgaggatgccttggcttccagccaccctatcattctgtacctgcatgggaacgcaggtaccagaggaggcgaccaccgcgtggagctttacaaggtgctgagttcccttggttaccatgtggtcacctttgactacagaggttggggtgactcagtgggaacgccatctgagcggggcatgacctatgacgcactccacgtttttgactggatcaaagcaagaagtggtgacaaccccgtgtacatctggggccactctctgggcactggcgtggcgacaaatctggtgcggcgcctctgtgagcgagagacgcctccagatgcccttatattggaatctccattcactaatatccgcgaagaagctaagagccatccattttcagtgatatatcgatacttccctgggtttgactggttcttccttgatcctattacaagtagtggaattaaatttgcaaatgatgaaaacgtgaagcacatctcctgtcccctgctcatcctgcacgctgaggacgacccggtggtgcccttccagcttggcagaaagctctatagcatcgccgcaccagctcgaagcttccgagacttcaaagttcagtttgtgccctttcattcagaccttggctacaggcacaaatacatttacaagagccctgagctgccacggatactgagggaattcctgcgggaagtcggagcctgagcaccagcactgagcctggccgtgggaaggaagcatgaagacctctgccctcctcccgttttcctccagtcagcagcccggtatccttgaagccccagggggccggcacctgcaatgctcaggagcccagtcgcacctggagagcacctcagatcccaggtggggaggcccctgcaggcctgagtgcccggaggcctgagcatggctgtgtggaaaacgtgggtggcacggcnatgtggctctccttgccgccccctnaacctgagatcttgtcgggagacttaatggcagcaggcagccatcactgccctggttgatgctgcactgagctggacagggggagtccgggcaggggactcttggggctcgggaccatgctgagctttttggcaccacccacagagaacgtggggtccagggttctttctgcaccttcccagaacatgcagaatgactccagtggttccatcgtcccctactgccctgtgtacctgcttgcctttctcagctgccccacactcccctgggctggcccactcacccacagtggaagtgcccgggatctgcactccctcccctttcacctacctgtacacctaacctggccttagactgagctttatttaagaataaaatcgtggtggtggtc

SEQ ID NO: 251436 - DNA, 863 bp, Homo Sapiens
ggtgagttcccttggttaccatgtggtcacctttgactacagaggttggggtgactcagtgggaacgccatctgagcggggcatgacctatgacgcactccacgtttttgactggatcaaagcaagaagtggtgacaaccccgtgtacatctggggccactctctgggcactggcgtggcgacaaatctggtgcggcgcctctgtgagcgagagacgcctccagatgcccttatattggaatctccattcactaatatccgcgaagaagctaagagccatccattttcagtgatatatcgatacttccctgggtttgactggttcttccttgatcctattacaagtagtggaattaaatttgcaaatgatgaaaacgtgaagcacatctcctgtcccctgctcatcctgcacgctgaggacgacccggtggtgcccttccagcttggcagaaagctctatagcatcgccgcaccagctcgaagcttccgagacttcaaagttcagtttgtgccctttcattcagaccttggctacaggcacaaatacatttacaagagccctgagctgccacggatactgagacctcagcagggcccaggttccagcccagatcccagcatgtggtcagagctggtgtgactgaagccaacaggtgacacggtcatcgaagagcagcagacaaaactaacccaaaggcagctgaaagtggagggcaggtgaattcccagccctcgccggattcaacttttgccaacggtgaagaactgccctgagctgcaaaccttacaaagtctgtaactctagataaaccataccatgggctaactgcactgaaataaaacactaactacattataatgtc

SEQ ID NO: 251437 - DNA, 1518 bp, Homo Sapiens
  misc_feature (457)..(457): n is a, c, g, or t
gagtgacaggagccgaagcagcagcgcaggttgtcccgtttcccctcccccttcccttctccgggttgccttcccgggccccttacactccacagtcccggtcccgccatgtcccagaaacaagaagaagagaaccctgcggaggagaccggcgaggagaagcaggacacgcaggagaaagaaggtattctgcctgagagagctgaagaggcaaagctaaaggccaaatacccaagcctaggacaaaagcctggaggctccgacttcctcatgaagagactccagaaagggcaaaagtactttgactcaggagactacaacatggccaaagccaagatgaagaataagcagctgccaagtgcaggaccagacaagaacctggtgactggtgatcacatccccaccccacaggatctgccccagagaaagtcctcgctcgtcaccagcaagcttgcgngggtaacctgagcccccctctcctccccttcctcaaccactggacgtttatatattataggcagggatgaaatgggcacctagtcagatcttctcagcttgctagccagaaatgactgtgattctgctgggggctgctgagaaggtaatgtaggttgaaaaggggctctaagtttatttatttcgttagattgacacttccacacactccctgtagtccaggtagggcccagaaataggaaaggctaggattggataatgctgcaaatgctttttttgtgtgagaaactggagagatgtgatttctccttttgggagagaatgtcccaaaattgattaggctgagccttgggaatagtttggcaggtttaacatcccaaggctaacctaacgtagttgggaaaggtagattgaatgagacatgttttctgtgcttctaagtgttctgtcccttaggctgctattgcttcatgtttccattatggcaggtttagagaatccttaaaaagaaaaattgacttgcttgcctaaaactacagtgcccccttagcctccattacttagtatctcttacagtttgctctggctctcaaataatataaagattgatgaacattattcacagaaaaatgggcaccttctctctctcttccagcatgatactttcaaaaagcaacatgctggaagagagagagaaggtgggacgagcactggttttaggagttcaagatatctggggttctcatctacttcaggtcccagcggagctgttgtattaacctgtattaagttaatgtagcccctcggattgttaattcctcatctggaaactgcagtgacggtgggtgcaaatggcgggtctgagacttaagggcggggaaaagccaggtgatgttacacacaaggagaggccgggggtgacctgcctggaggggaacgaggggaccgaggatagtggaagaatgagggggtaacccgacacagagagcggggaaaaaatagaggcggaagacacacgtgaaaggggcaaactgtgaggacgaaagaagtttgaagagagag

SEQ ID NO: 251438 - DNA, 962 bp, Homo Sapiens
  misc_feature (96)..(96): n is a, c, g, or t
  misc_feature (157)..(157): n is a, c, g, or t
  misc_feature (159)..(197): n is a, c, g, or t
  misc_feature (233)..(253): n is a, c, g, or t
ttccaacttacaaacccctttttccatttaggataactcccatttccttccccctcataccttacccccacatccaacccacttttttaaacaaanaatattccagaaatttttttacccaactcccaaacccttaattccaaactcctccaaattntnnnnnnnnnnnnnnnnnnnnnnnnnnnnnnnnnnnnnnngaatttcattgatatttctcccaactgttatttggnnnnnnnnnnnnnnnnnnnnngttcaaggtcttggtgctcagcccaaggggctccatgtgctgggacaccaacaggaaagggcttctgcctctccagcccacacccgagccacctcctgacccctggctgcaaaagcagaaaggggcaggagccagcacaggacccgggtggggcagggagggaaagcgtctcaggatctggcagagccccgggcagcatcattcaacttggccacccgcaagcttgctggtgacgagcgaggactttctctggggcagatcctgtggggtggggatgtgatcaccagtcaccaggttcttgtctggtcctgcacttggcagctgcttattcttcatcttggctttggccatgttgtagtctcctgagtcaaagtacttttgccctttctggagtctcttcatgaggaagtcggagcctccaggcttttgtcctaggcttgggtatttggcctttagctttgcctcttcagctctctcaggcagaataccttctttctcctgcgtgtcctgcttctcctcgccggtctcctccgcagggttctcttcttcttgtttctgggacatggcgggaccgggactgtggagtgtaaggggcccgggaaggcaaccggagaagggaagggggaggggaaacggggacaacctgcgctgctgcttcggctcctgtcactagggttgctcagtcaaaatggcggcccttgcccgtccc

SEQ ID NO: 251439 - DNA, 376 bp, Homo Sapiens
  misc_feature (52)..(109): n is a, c, g, or t
tgtctagaatacaaaaagtagtagtgcataacaaaatttcttgtacagatgnnnnnnnnnnnnnnnnnnnnnnnnnnnnnnnnnnnnnnnnnnnnnnnnnnnnnnnnnngcaattattaccaaaaagcctcaaaaaggggaggattctaaaataagcatttttaatccagtaaaaaactattttgtttttcctttttgaaaacaaactatagcttgagagccagtaattgcaactaaacatgggagaacaaaacaaaaacaagcaacactaacttaagtacagtacaaggacatcatcagcacagaaaacacagcgactgtaagatctacttctgcagtgtcatatccagtcagattgtccccagaattccaaaac

SEQ ID NO: 251440 - DNA, 776 bp, Homo Sapiens
  misc_feature (151)..(151): n is a, c, g, or t
cggccgggcaacctgatacttataagagacttgaattgaatttgacgcaagaatcatattaagtaaatgtttaaagtagcagcctagcaaatttttgggcatggctgtaagcactggtaaaaccagttaatttgtagagcactatcaagtntgcttaaaaaatattaggacaccatcctttaattgttatcagcatcaataagacagttcagtttacaattttatacgatattgtggttaatttttattgccattatacatattactattcttatgaattgtttgagaagtaatcataatttatttacaaagataatttcttcaggttgtggtataaattattggagatatgtttgtaatttggatagtttgaatgctttaaaatacactcgatagagtttattaactttgtttattgctaaatgtattatgatatataaacaggcaattgaatttagctttttatctgctatgatctgaatgtttatatcccccacaaattcatatgttgaaatcctaaccctgaaggcgatggtcttcggaggtggggcctttgggaagtgattgggtcaaggaggcaggcccttgtaaaagaggccccagagagcttgttcaccaattacaccatgtaaggacacataagaaggcaccatctacgaacaagaaggtgggccttcaccagacaccagagaccagaatctactggcatcttcatcttggactccccatcctccagaactgtaagaaataaatttctgtttttattaatgtaagct

SEQ ID NO: 251441 - DNA, 975 bp, Homo Sapiens
  misc_feature (761)..(806): n is a, c, g, or t
catttccatggctaataggaaagcttgaacccatttttccaaaagttccaatcttgtgttctgatttgaaatactgagtacacacccctgatgctttctctaaagtttctttttcaagattacttaagtcaattcatataactggtataaattccatgggagcatcgaattcccaagagatttaaatgtctgtagcgcctaccataggtgcttgcttatacattcaagtgacctaatgcatctccaattaagttaattatgtaacaccaatcagctgctaaggagccagtaggatcctgtgggtgtgtcctggctagtttttcaaaacatctctcatccttcatgggtagattcatactccaaggtaagctggtgttggaccctagaaacccctatcctgtctcctggctctatagggagttaacagccctcctgggacagcttctcctgggctccagttttacattcagaaggacctcacgactcttaagaatgcctttgctgagttgctggacaccatgatgtcttctcctgcccagaaacggcacggtcagcaatcttccaccaaccggagggtgcaacttgagttttattctggctacatcatcccaagtcctagtatgaaacagcaatgtggccaaaaatgaccatgttcaaataagatacctgataacacaaacttttaaatcagttatgactcagtctctcatctccagcccaggcacacaaaaaatacacaaatttgagctagaactgtgctnnnnnnnnnnnnnnnnnnnnnnnnnnnnnnnnnnnnnnnnnnnnnngttgacaaagacaatctaaactaccaacactgacgtaagccagactctagagtccctactttagcgactgccattttttagtctcaacaaaaatgtcacggacgcgtgggtcgacgatatcccaggattccggacctgtaccagccttgctttatagaccagctttata

SEQ ID NO: 251442 - DNA, 1249 bp, Homo Sapiens
  misc_feature (462)..(492): n is a, c, g, or t
  misc_feature (591)..(632): n is a, c, g, or t
tccaatatgtaaccggagccaagttaactatgtaccatcaactaactattccagaattgtagaacttcaatgccctcccctatccccgccccacaaaaaataaatggaaagaaataaagtatttccccaacaccccagaggccgcttaactcctggcaagacatgcaaatcatatccgctaaaaaaatacaccctgctaacttcaaggcatttatccagcattctcgcagggcttaattaaagtaaaaccaaaaagatcaagggaggagtggggggaaaatgttgaatcattctgggttccccgtgattagtgtatcacttcagtcacagaacaagatacagagatcttttaagtggatttgcctttccagtgggtcatttgttgcccaagttgatgacagcaggaactttagaaccacacttgttaagtctgtattcattaatcacttgcattcacacttnnnnnnnnnnnnnnnnnnnnnnnnnnnnnnntattcagtaccggagattaaataaccatgtgtagtctcttgaaataaatttgattccttaagaagtctaattactttcagttgccttttttaaataacnnnnnnnnnnnnnnnnnnnnnnnnnnnnnnnnnnnnnnnnnncctgtgattctacttatggttcctctgctgcgttgaagatctaggagcataaaagccttgtgtcccccatgaacgatggctctaatgctgcagaaaggttacgaataggcagtctggtccttcattgatctggactatccatggcttcattgtaagtgattatccttttgggatcttgcttctgcaaattccaaatagattccatttctttagtgtgatatacaatagcagccctcaggtcaaaagaaccccagctatcattcctttctaggcctctctggtatctctgttctttgcagagcctaacaaagtgttcgtaggagaggccagaggattttgactttctatctcgtagtcctttgagagaaacactaaagcaccttgactactggtgtctgctttctgcaggtcacctatatgactgggttccaaggataaggctccactctcactagtagtcccagattttagaatgctacccagaacttgaggactagtccgtttctccagctcgtaagccttgggaaacacaggatgctcagttcctgagggaattatttcagcaccctgtgaaaccaaagtagaaggatattctccttgaaatgtcacctccatca

SEQ ID NO: 251443 - DNA, 670 bp, Homo Sapiens
  misc_feature (430)..(492): n is a, c, g, or t
gtttggagacaggccactgaaaataaatcactccaacaatgcaatagtaaaaccccctgagatgacacctcaggctgcagctaaggagttagaagaagtaatgaagcgagtacgagaagctcagtcatttatctcagcagctattgaaccagagtctggaaagagcaatgaaagaaaaggcggtcgatctcgttcccatactcgctcaaaatccaggtctagctcaaaatcccattctagaaggaaaagatcacaatcaaaacacaggagtagatcccataatagatcacgttcaagacagaaagacagacgtagatctaagagcccacataaaaaacgctctaaatcaagggagagacggaagtcaaggagtcgttcgcattcacgggacaagagaaaagacactcgagaaaagatcaaggaaaaggannnnnnnnnnnnnnnnnnnnnnnnnnnnnnnnnnnnnnnnnnnnnnnnnnnnnnnnnnnnnnnggaacggggtaaaaacaaagaccgggacaaggaacgggaaaaggaccgggaaaaagacaaggaaaaggacagagagagagaacgggaaaaagagcatgagaaggatcgagacaaagagaaggaaaaggaacaggacaaagaaaaggaacgagaaaaagacagatccaaagagatagaa

SEQ ID NO: 251444 - DNA, 559 bp, Homo Sapiens; identical to SEQ ID NO: 82466
  misc_feature (139)..(192): n is a, c, g, or t
  misc_feature (358)..(413): n is a, c, g, or t

SEQ ID NO: 251445 - DNA, 772 bp, Homo Sapiens
  misc_feature (43)..(43): n is a, c, g, or t
  misc_feature (59)..(59): n is a, c, g, or t
attaatacataattgaaacaatttacatacatccagcacctanaatactgcatttgtgnctctgtaaagtgtgtgctgaacataaatcttctccaattattacaaaattaacaaggaaggcagaacgcacgtccaccttgagtcctactggtccacagccagtacgcacggcaggtgagaggggttacatggtggcttgtggcagtccactgctccagaaaccttcttctcctcctggggaagattacaagttttcaactgtataaacctttacacatatgctgattacttttccaattatttactcctctgatccatatatacaagtggagacaacaagctctgggaggcatggtctccctgctcagtgtagctaggttcccagtgctgtcctgtttggggacaggcagacacagtcattcatgttttaaacactgccgtttatgtgtggatactgaggaaggcatggttcgtaaggcatggggtctggagaaaaaacagaatcatctcctgaagaacaagaacttcttgtgtcagggtaactaggtgaatactgttcgagaggttggctgaggtccaagtattcctcattggttgtgagagtgagaattcgatccaagtcttctaccaactgcttgaacgttggtctctgggagggcactgcatgccaacagtccctcatcatcatgtacagttcgttggtgcagttggctggcttatccattctgtgtccttccttcagcagcttaaaaagttcctccacgggaatccc

SEQ ID NO: 251446 - DNA, 538 bp, Homo Sapiens
ctatattttattcactattaattttgcattaagaaacttatgtttgctaatttctattttttcattgtttcttgaagattttttaatgtttcaactttttacatatgtttaaaatgatttaaacaatatgctccaaattaaatgaacagaaggaattttgagagatttccccttatgtagctattctcagtgcactctggtcaaattttacttggcaataaatccttgcaaacgtcagtcatgtaagtgactaacaagactgaaataccacattgagtcacataccaaatacagtttcagaaaatgtaaacctttcccctgaaactctccaatcatgttaactagaactatactgtttctaatgatggaacctgtgaaatgctgggttttgaatgtagttaataaaataattttctagaatgcaagaaacactattatcacagttatcaccctattttaatgatttacaagtagtttatgcgctttccatcactataaagtatgggccagttgaaaattggccgggcatggcggctca

SEQ ID NO: 251447 - DNA, 1412 bp, Homo Sapiens
  misc_feature (231)..(420): n is a, c, g, or t
  misc_feature (1365)..(1365): n is a, c, g, or t
cttgtcaaggctcagccccgtggcctgcactcacctctcctcctgatggccttagcctcctgattgagactgcacactcagaccatgctgttaggactgagggatttttagtcccccaagtaccaatgagagctggagaagtgacaagtggatgtgtccagagaaggaggccgaggcagaccgtgctctctgtttccacagtatcccttctccatttctcccttactgtgnnnnnnnnnnnnnnnnnnnnnnnnnnnnnnnnnnnnnnnnnnnnnnnnnnnnnnnnnnnnnnnnnnnnnnnnnnnnnnnnnnnnnnnnnnnnnnnnnnnnnnnnnnnnnnnnnnnnnnnnnnnnnnnnnnnnnnnnnnnnnnnnnnnnnnnnnnnnnnnnnnnnnnnnnnnnnnnnnnnnnnnnnnnnnncagctatttttgctatgataatcctgctgcccttcagactcaagttaaacgagatatgcaagtgaataccacgaaattcatgctgctgtatgcctggtattctggccccaatgtagtttctgggtttctttggtggctttttgatagaccgagtatttggtaatacgatggggcacaatcatttttagctgctttgtttgcattggacaggttgtttttgccctgggtggaatatttaatgctttttggctgatggaatttggaagatttgtatttgggattggtggcgagtccttagcagttgcccagaatacatatgctgtgagctggtttaaaggcaaagaattaaacctggtgtttggacttcaacttagcatggctagaattggaagtacagtaaacatgaacctcatgggatggctgtattctaagattgaagctttgttaggttctgctggtcacacaaccctcgggatcacacttatgattgggggtgtaacgtgtattctttcactaatctgtgccttggctcttgcctacttggatcagagagcagagagaatccttcataaagaacaaggaaaaacaggtgaagttattaaattaactgatgtaaaggacttctccttacccctgtggcttatatttatcatctgtgtctgctattatgttgctgtgttcccttttattggacttgggaaagttttctttacagagaaatttggattttcttcccaggcagcaagtgcaattaacagtgttgtatatgtcatatcagctcccatgtccccggtgtttgggctcctggtggataaaacagggaagaacatcatctgggttctttgcgcagtagcagccactcttgtgtcccacatggatgctgggcctttacgatgtgggaacccttggatttgctatgtgtctttctggggacttctcctactncattgcttgcctgtggcattgtgggccaatggttggcatttgtagtt

SEQ ID NO: 251448 - DNA, 1181 bp, Homo Sapiens
catatgtatgcaggcagtgattatatcatgagacttgtactaattggccaaaccttcaaattttatattcatactaataaaaacagtgaaagtttggaggattagtgtttattgtgtatgtttaaaatgtaagctaaagaaaaccttcacaaatggttaagtgtgtttaaaaggtgaatttgtcaaaaatttgtctgcatatatcagttgtttgcaaaaaaagatcctgtagggatttttcctcattgagttagtaactaagtaagaagtaatccagtctgaataagtgaaaataacaagagcatcaccatctacctaacagaacagacttaaaaattccattaagtgttcatttccagtgagtttgctaaacaaagatccagttggcaagtttttaggatctttagactgtctgatccacactcctgagcttcaggcacagaccccctcaaagcattgtagtgtttgcagcttcaaaaacctaacaaagttataaaagaaatcaaataacagaaaaagttatccctcctcttccagtggcattataaatagacaaaaggcacataaatatgggaaggtgcaagaaataggaacaaagctaaaggaagaggtttaggctttcattcctatcccacctaaggaactgggcttccaaattacttttgtcccagtaattaatcttgtgaaaaaacatctttataaaatgtctaccattgtccttataggaagtgatcagctttgtaaaactgtagctcattaaccaagattgacacaatcccatctactttttaaaaaggtagaaaccataatttctgaatgcctttcccattaatattttctccctcccccaaacccttcaaatactacagactgttcttcaaagaacaacaacaaaaaagtcttctgtatgaaaagttcaattaattttagatatgtcccgagactgctgtaacaccaaatgttcccacggtgatctctttgtttcctttgattacgtcatgcaggctcggcaatgatcccgacttagtctgtattagagtttttatcaattttccttggtcttggactttagatcgtcttcgttttaaagccctcttctcagtttttgtcttttgagactgtccattgcacagacttgtgcaagctgaaatgccacaaaaataggactcttctgccggccg

SEQ ID NO: 251449 - DNA, 955 bp, Homo Sapiens
  misc_feature (207)..(207): n is a, c, g, or t
gcgtgagccaccatgcgtgacctttttttcttttcaaaagggaacaatgttgctttcaaaacaagacgtgctaggctgaaactgatttatggaaaagactgcttgttagcaagtatatttggtcttgagggggatacagattatagaatatgctgacatttgggcttcagaggaagaattttcaaatctaatggaaatagttgaggngttcaagaatgctgtttcttggagttggaagcttaagttttgaaatggtgaaaccaaaaagacaaaaattaaaacatagaccttaagtcgtcattcacacccggttctcaagaatcaagtggagcacttcaaagaccttggcttgtctgtcccatcctgccactttctcatcttttcatgcttttgaagacaccatttacagctctgactcagccctattttgtgtaaagtaatatattgattattcagaaatagacaatacattttttaattacccaaggactgactgttttgtgcattttactgttggttgtcttcagtagagaatagtaatagggcagagaaaagtatatattttgcctcagtcagtcccaccaccacaatggactattgggatattttctaaaaaaccaatcaatttgcccatgattacctcacaaataattagtgctacctggggtactctcaaatatacagcttttgaaactgtagatgaaaaaagctctactcagagtttttgtcaagactgtgcctgggttgaatatcagtcaattgcctacacttctaaacaataagtgccaatgtctcaattttctcaccctgaatgatagaagctagctttatcaaatgccaaggttagaaagcctggaaataaaacttaagcacagacattcaagtttttggaaagttgtaggtggcgttcagggaagactttgattttaataaagcaatatttagtattggaccc

SEQ ID NO: 251450 - DNA, 323 bp, Homo Sapiens
aaaagggaacaatgttgctttcaaaacaagacatgctaagctgaaactgatttatggaaaagactgcttgttagcaagtatatttggtcttgagggggatacagattatagaatatgctgacatttgggcttcagaggaagaattttcaaatctaatggaaatagttgaggtgttcaagaatgctgtttcttggagttggaagcttaagttttgaaatgttgaaaccaaaaagacaaaaattcacttcaaagaccttggcttgtctgtcccatcctgccactttctcatcttttcatgcttttgaagacaccatttacagctc

SEQ ID NO: 251451 - DNA, 1177 bp, Homo Sapiens
  misc_feature (17)..(17): n is a, c, g, or t
  misc_feature (42)..(42): n is a, c, g, or t
  misc_feature (111)..(111): n is a, c, g, or t
tataatataaagttgtnttcatggggttctatatcataactntataagaagtggcaatcacatgttatgtgaaaatgtcaataacgtgtgtgtgtatacacacatatacanatacacatagagaggagagatttctaccattttccatattctttattatcaaaaacaacatggtaaaggtatccttttcatcttacagacatgggaagttttcccagattatgttcctctatcatagtaagaaaatatataaatcttcttgtgaatgtgtatcccaaggtggaagaatcagagccaacaattacattgaacttctctgactttatggaaagtaatatgtggaatatgataacaaaacggtatttcaaaaatataacatgtaacactaaatgttggctcgagttgctgctgtcatacaggcaggttttgttttgtctttaaacattagctcttgtaatgcatcagatttaaactacacatgtagaagtaagaattgttttccatgaaggaatttttggttgccttctagaggagaacacatgaaaacaatagttaattgctggtattttaaaaacatatttcatcttttacctatatcactgtactgataggcaggtctctcctcttattactggattttaaaattttcatccttaatatgtagaatttgaaatagtttttaacatatgatgctatatatatatttatcatgaatattttaattattagagaaatggtaactggaatatgcaaggactatactttgaatgatgctctttgctggtacattattaatttatcttttgaacacactggcataactttgctttggaagttattcagtgttttgaaacacaagactgacgagcacatcaagttctaaactcaacaaaatgagacgagagtaaagagtttacacacacgcagttctatatagttcacttgtgccttggagggatagtattattatcattattattaataataaaaaacacaatttgtcccagtagtactggccaccctgttttaagagttttaggagatccctgagcacattgtttctgactcttaaccccaactccaaaatgatagggcttctatcgttgataccaagatggattgtcattcacagtaagtcaattataaggtgcttatttacccttgtttttcacccccg

SEQ ID NO: 251452 - DNA, 1327 bp, Homo Sapiens
gccattacggggccgggggggtcacaccgacctgcaccatctctcgcctgcctgtggggtttctgtcaactagtcgtggagggaaggagactctttaaagaataacatcttattgtggccatgccagaacccactaagaaagaggaaaatgaagtgccagccccagccccacccccggaagaaccaagtaaagagaaggaggccggaactacaccagcaaaagatgaagaggaagtctccccgcctagcgccttgcctccaggtttgggtagtcgggccctggagagaaaagattcagactggacccttgtcgaaactcctcctggggaggaacaagccaagcagaatgccaactcccagctgtccatcttgttcattgaaaaacctcaaggaggaacagtgaaagttggtgaagatatcaccttcatagccaaagtcaaggctgaagatcttctgagaaaacccactatcaaatggttcaaaggaaaatggatggacctggccagcaaagccgggaagcaccttcagctgaaggaaacctttgagaggcacagtcgggtgtacacatttgagatgcagatcatcaaggccaaagataactttgcaggaaattacagatgcgaggtcacctataaggataagtttgacagctgttcatttgatcttgaagtgcacgaatctactgggactactccaaacattgacatcagatctgctttcaagagaagtggagaaggtcaagaggatgcaggagaacttgactttagtggtctcctgaaacgtagggaggtgaagcagcaggaggaagaaccccaggtggacgtatgggagttgctgaagaacgcgaaacccagtgagtacgagaagatcgccttccagtatggaatcaccgacctgcgcggcatgctcaagcgactcaagcgcatgcgcagagaggagaagaagagcgcagcttttgcaaaaattcttgatcctgcatatcaggttgacaaaggaggcagagtgaggtttgttgtggagctggcagatccaaagttggaggtgaaatggtataaaaatggtcaagaaattcgacccagtaccaaatacatctttgaacacaaaggatgccagagaatcctgtttatcaataactgtcagatgacagatgattcagagtattatgtgacagccggtgatgagaaatgttccactgagctcttcgtaagagagcctccaattatggtgaccaaacagctggaagatacaactgcttattgtggggagagagtggaattagaaggtgaggtgtctgaagatgatgccaatgtaaaatggtttaagaatg

SEQ ID NO: 251453 - DNA, 436 bp, Homo Sapiens
acggccgggacaccgacctgcaccatctctcgcctgcctgtggggtttctgtcaactagtcgtggagggaaggagactctttaaagaataacatcttattgtggccatgccagaacccactaagaaagaggaaaatgaagtgccagccccagccccacccccggaagaaccaagtaaagagaaggaggccggaactacaccagcaaaagactggacccttgtcgaaactcctcctggggaggaacaagccaagcagaatgccaactcccagctgtccatcttgttcattgaaaaacctcaaggaggaacagtgaaagttggtgaagatatcaccttcatagccaaagtcaaggctgaagatcttctgagaaaacccactatcaaatggttcaaaggaaaatggatggacctggccagcaaaaccgggaagcacctt

SEQ ID NO: 251454 - DNA, 1671 bp, Homo Sapiens
ggcctgggtggcgaattcggcacgaggggtccgtctgcagtcggcagcctcgccggcagctcgctcggcccccgcttggcccggcccgcaggtaggagccgccgagggacgcggcgcccggttcccggccccgcctgcgccgcgcgctccccgctcccgccgcccgcttcgagggttctctccccttgccaccatgagcgagtcatttgactgtgcaaaatgcaacgagtccctgtatggacgcaagtacatccagacagacagcggcccctactgtgtgccctgctatgacaatacctttgccaacacctgtgctgagtgccagcagcttatcgggcatgactcgagggagctgttctatgaagaccgccatttccacgagggctgcttccgctgctgccgctgccagcgctcactagccgatgaacccttcacctgccaggacagtgagctgctctgcaatgactgctactgcagtgcgttttcctcgcagtgctccgcttgtggggagactgtcatgcctgggtcccggaagctggaatatggaggccagacatggcatgagcactgcttcctgtgcagtggctgtgaacagccactgggctccccttcctttgtgcccgacaagggcgctcactactggcgtgccctgctatgagaacaagcttgctccccgctgcccccgctgcagcaagacgctgacacagggtggagtgacataccgtgatcagccatggcatcgagaatgtctggtctgtaccggatgccagacgcccctggcagggcagcagttcacctcccgggatgaagatccctactgtgtggcctgttttggagaactctttgcacctaagtgcagcagctgcaagcgccccatcgtaggactcggtggaggcaagtatgtgtcctttgaagaccgacactggcaccacaactgcttctcctgcgcccgctgctctacctccctggtgggccagggcttcgtaccggatggagaccaagtgctctgccagggctgtagccaggcagggccctaagccagggctcctggacccaggctttcccataccacgggcccaggactgtggctccttttctaaaccacctctgggactcagctccccccgccaaaaaaaatgggtctccttctgggctccaggattgtctccccactccagcatccccaaactggtactccctgacccaggcccccaaacctgagctcttacagagcctccatgagtcaagccccctccccacacctggactcacagaattcaccctctcccctgcagtctgggttcccagactgagtcctctccccaaatcagggctctagacccgagccctccaaacctggactctgggacttaggcccccttaaatctagacttctctttataggtttcaggtctcctatgggtgcctgggaagtccttgaaagtggactgttctcaggcttgacctgccccaccccatccccgcggttgaggctgtgggggcagcagatcaggagcccactgataaggggccctagggtacagggtgctgcccagcaggtcgccaccgagtgtcttctcattttatttcagctccattttgcccatagatgggcagaggggtgagattggctcatcccccttccagattctgcaataaagcggtgtgagg

SEQ ID NO: 251455 - DNA, 1541 bp, Homo Sapiens
  misc_feature (757)..(757): n is a, c, g, or t
  misc_feature (770)..(770): n is a, c, g, or t
  misc_feature (827)..(827): n is a, c, g, or t
  misc_feature (967)..(967): n is a, c, g, or t
  misc_feature (1494)..(1494): n is a, c, g, or t
  misc_feature (1510)..(1510): n is a, c, g, or t
  misc_feature (1527)..(1527): n is a, c, g, or t
ctcgtgccgaattcggcacgaggaatcgcggcgcattgaggcaggtggggtgccagtggaagagggaaggcaggcgagtgtttacggcctgacttgggaggccggcggatcagcaattgcagaagcaggcagcggcagagagggaatggtgcaggcaggcgctgagaaggaggcgcagtccatctctctcagggttagtgaatgaggctctccgcccgggccggcccggggacagtgcgctgctggtcccagcatgaatgcgggccccggctgtgaaccctgcaccaagcgaccccgctggggcgccgctacaacttcgccggctgcttcggacgcccggagctttcccagcaggcagaggcgcgtcctcgaccccggacgctcacgtgcagttcagggtcccaccgtcctcgccagcctgcgtcccagggcgggcgggacagcacagaggcagcgccacctcgcttgttttcaaacaaaagactattaccagttggatggacactaaaggaatcaagacagcggaatcagaaagtttggatagtaaagaaaacaacaatacaagaatagaatccatgatgagttctgtacaaaaagataacttttaccaacataatgtagaaaaattagaaaatgtttctcagctaagtcttgataagtcacccactgaaaaaagtacacagtatttgaaccagcatcagactgcagcaatgtgtaagtggcaaaatgaagggaaacacacggagcagcttttggnaagtgaacctcanacagtaaccctggtaccagagcagtttagtaatgctaacattgatcggtcacctcanaatgatgatcacagtgacacagatagtggagagaatagagacaatcaacagtttctcacaactgtaaagctttgcaaatgcaaagcagactacagaagatgaacaggcccagagaagccaaaagccaccagaagtgcagncaagtcttgcgatcctggggaagactgtgcaagttgtcagcaagatgagatagatgtggtgccagagagtccattgtcagatgttggctctgaggatgttggtactgggccaaaaaatgacaacaaattgactagacaagaaagttgcctaggaaattctcctccatttgagaaggaaagtgaacccgagtcaccgatggatgtggataattctaaaaatagttgtcaagactcagaagcagatgaggagacaagtccaggttttgatgaacaagaagatggtagttcctcccaaacagcaaataaaccttcaaggttccaagcaagagacgctgacattgaatttaggaaacggtactctactaagggcggtgaagttagattacatttccaatttgaaggaggagagagtcgcactggaatgaatgatttaaatgctaaactacctggaaatatgtctagcctgaatgtagaatgcagaaattctaagcaacatgaaaaaaaggattctaaaatcacagatcatntcatgagactgcccanagcagaggacagaaganaagaacagtgggaa

SEQ ID NO: 251456 - DNA, 449 bp, Homo Sapiens
  misc_feature (30)..(30): n is a, c, g, or t
  misc_feature (45)..(45): n is a, c, g, or t
  misc_feature (67)..(67): n is a, c, g, or t
  misc_feature (161)..(169): n is a, c, g, or t
caacccctcccgcccctggcccctccccantatctgggacctacnggtgtgtgcctacccatgcccngccagtttttttaattaattagtagaagacgaggtccttactaggttgcctcaggcccaaccatttctgatattacagtgtattgcctataagnnnnnnnnngtatgtcacagaattactacgtgtcaaagaacaattaggagttaagagtgtttgttcaaaatgtaagtttttaaaaatgatttgaataaaggaaataaagtcaaatacaaactaaaaagtattcattaaaagaaaaagccagaatgtcacaactttaaaagtcctatattgtatataggatcacaaatttctataatcaggcaccacatttgctgattcataaatatacttctttggcttaattctccccccgtttttctgtaagcaaaaataaaagtag

SEQ ID NO: 251457 - DNA, 655 bp, Homo Sapiens
aaagatactgcaggtgttacacgttcagcttcaagtcccagactttcctcctctttggataataaagaaaaggagaaagatagtaaaggaactaggcttgcatatgttgcacctacaataccaagacgactagccagtacatctgacattgaagagaaagaaaacagagattcttcaagtttgcgaacaagtagttcatatacaaggagaaaatgggaagatgatcttaaaaaaaatagctcagttaatgaaggatcaacgtatcataaaagttgctcctttggtagaagacaagatgatttgattagttctagtgttccaagcaccacatcaacaccaacagttacctctgcagctgggcttcagaaaagcctgctttccagcacaagcactactacaaagattacaacgggttcttcctcagcaggcacacaaagcagtacctcaaatcgtttgtgggctgaggatagtactgagaaagaaaaggacagtgttcctacggcagtgaccattcctgttgctccaactgttgtaaatgctgcagcttctaccacaaccctgactacaactactgctggcactgtctcctccacaacagaggtcagggagagacgcagatcatacctcactcctgttagggatgaagagtctgaat

SEQ ID NO: 251458 - DNA, 1292 bp, Homo Sapiens
  misc_feature (24)..(24): n is a, c, g, or t
  misc_feature (33)..(33): n is a, c, g, or t
ggtgccatttaggatatgaacccngttggtttnaaaaaacagtgtacggccggaattccgggattcgtcgaccacgcgtcgtgaaaaacgggacagaaatctccactaattgaatcaacagcaaatatggacaataatcagtcacagaagacctttaaaaacaaagagacgttgattattgagccagagaaaaatgcatcccgtattgaatttctggaacaagaaaaggttgatgaagaagaagaaggaaagaaggatgagtctagctgctctagtgaagaagatgaggaagatgactcggaatcagaagctgaaacagataagacaaaacccctggcttctgtaactaatgccaacacttctagtacacaagcagctcctgtagctgttacaacacctactgtgtcatcaggtcaagcaacacctacatcacctattaaaaagtttccaaccacagctacaaaaatttctcccaaagaagaagagagaaaagatgagtctcctgcaacttggaggttaggacttagaaagacgggcagctatggtgcacttgctgaaatcacagcatctaaagagggtcagaaagaaaaagatactgcaggtgttacacgttcagcttcaagtcccagactttcctcctctttggataataaagaaaaggagaaagatagtaaaggaactaggcttgcatatgttgcacctacaataccaagacgactagccagtacatctgacattgaagagaaagaaaacagagattcttcaagtttgcgaacaagtagttcatatacaaggagaaaatgggaagatgatcttaaaaaaaatagctcagttaatgaaggatcaacgtatcataaaagttctagtgttccaagcaccacatcaacaccaacagttacctctgcagctgggcttcagaaaagcctgctttccagcacaagcactactacaaagattacaacgggttcttcctcagcaggcacacaaagcagtacctcaaatcgtttgtgggctgaggatagtactgagaaagaaaaggacagtgtgtcctacgggcagtgaacattcctgtggctcaactgtgtaaaggcgggagctttacaaacctgaataaactatgggggacgtcctcacacagagtcgcgagaggcgatcaaacccaccgtagggaaagcggaccaaaaagcgatcgaaagagaatctcgaacaccggggggctacggcccaacgaaaacggaaaggctccccggacaaagaaaaaaggggcgcgaacccgggacaccacctgaggc

SEQ ID NO: 251459 - DNA, 814 bp, Homo Sapiens
ctgcttacaaaagtattctgttaagcctatgtcagcatgttatccatgcagcagttttgaggattttatgaagaaaaagagctaaaaaggaacattaagaggaatgggatatccaggtgttctgcacatgccaaactgctgtagatagtttacactcttccattatttatacggagtgatgcagcacattttagcattcaggaggatttttaaaaaatagctgcagattaatctggaaaatgtgctaatttaataatagttacaaatttataaatttaaatccatttgaaattgttgcattatgctgggtagtatacacaaaatggttatcatcttaaaccaacttttcagagaatcttgatggactctgcctttaggcttgaattcttcaaagtcaattttaatgaaatttatctaaattgcagcagtctatttgattcagctcatagacatgtaaaaattatgaatgctgttttcttatgaaacaaattgtcacagtgtagttatacattctatttttgtccccttttccctttttctcctgtatcttttaaaatttggaaactacttttccagaaggcattatttatgcctccctaataaggtattttacttatgacagatgaaaaggaaccaggatatgtttgaattttttcactttcttagtctgtgacaagaagtagaaatatcactagtgtggtataggaacttacatgttttttatgatgaaaataattctcaatgccacttgaaaggtaattgtgtctgagagctgcaaatttttcaaccacaaaatgtcacttattcctacagg

SEQ ID NO: 251460 - DNA, 1786 bp, Homo Sapiens
  misc_feature (1740)..(1740): n is a, c, g, or t
  misc_feature (1757)..(1757): n is a, c, g, or t
gtatcagagtcgtagaaaaaaccactgcgaccttcattgcaaaagttggaggtgacccaatcccaaatgttaaatggacaaaagggaagtggagacagctgaaccaaggaggtcgtgttttcatccaccaaaaaggcgatgaagcaaaactggagattagggacaccacaaaaactgattctgggttataccgatgcgtggcatttaacgaacatggtgaaattgaaagtaatgttaacttacaggtggatgaaaggaagaaacaagagaaaattgaaggcgatcttagagcaatgctgaaaaagactccaatcttaaagaaaggagctggagaagaagaggaaattgatatcatggaacttctcaaaaatgttgatcctaaagaatatgaaaaatatgcccgcatgtatggaatcactgacttccgaggtcttcttcaagcatttgaactgctcaagcaaagccaagaagaagagacacatagactggaaattgaggaaatagagaggtcagagagggacgaaaaggaatttgaggaacttgtatcatttattcagcaaagactgtcacagacagagcctgtcactctgatcaaggacattgaaaatcagacagttttgaaagataatgatgctgtctttgaaattgacattaaaattaattatccagaaatcaagctttcgtggtacaaaggaactgaaaaactggaacccagtgataaatttgaaataagcattgatggtgaccgacatacactcagagtcaaaaactgtcaacttaaagaccagggcaattatcgattggtttgtggtccacacatcgctagcgctaaactaactgtaattgagcctgcatgggaacggcatcttcaggatgtgactctgaaagaaggccagacttgcaccatgacatgccaattttctgtaccaaatgtaaaatctgaatggtacagaaatggcagaatccttaaaccccaaggtagacataaaacagaagtggaacacaaagtccataaattgaccattgcagatgttcgagcagaagaccagggtcagtacacctgcaaatatgaagaccttgaaacttcagcagaactcagaatcgaagctgaaccaattcagtttacaaagcgcatacagaacatcgtggtgagtgagcatcagtctgccacctttgagtgtgaagtgtcctttgatgatgccattgtaacatggtacaaaggaccaacagaactgacagagagccagaaatacaacttcaggaatgatggccgctgccattatatgaccatccacaatgtgaccccagacgatgaaggtgtctactcggtcatcgctcggctggagccaagaggtgaagcaagaagcacggcagagctgtacctaacgacgaaagaaatcaaacttgagctgaagcctcctgatattcctgactccagagttccaatcccaaccatgcctatcagagcagtgccaccagaagaaatccctcctgtggttgctcctcctatcccccttttgctaccaacacccgaagaaaagaaaccaccaccaaaacgtattgaagttaccaaaaaggctgtgaagaaagatgccaaaaaagttgttgcaaagcccaaagagatgacaccacgtgaagagattgtcaagaagcctccacctcctactaccttaattccagcaaaagctcctgaaatcattgatgtatcctctaagctgaagaagtaaaataatgactatnaccagaaagaaagaggntcagaaagaaaaaaagctgtgtatgagaa

SEQ ID NO: 251461 - DNA, 1496 bp, Homo Sapiens
tccagctcatagaagtctttgaagatggtcttctgaggattctcggagtggatgcgcgccacgccgttgacggcgtgcgaccccgcgatgcacaggtgtgccatgttgatgcgcttcactgcgccctcctccaccagcgacatgcgccgcagccggtctacgtcccctgggaatgcggccgccacccggttgaggaagcgctggttgatctcgtagatgatctggaggtgccgcggcaacagcgtctccaagaggtgcaccggccagcgctccagggcctcgggcagcaccgtgtggttggtgtaggcacaggtcctcactgtcacatcccacgccttgtcccagtccatccgttccaggtccaccaggatcctcatcagctcggggatggccagggaggggtgggtgtcattgagctggatggccaccttatctgggaaggcatcgaagttcgtgcgcacgggatcacggcagccgaacttggaagacttgaagcgacggatgatgtcctggagggtggcagccaccacgaaatactcctgcttcagccgcagctccttcccttcgaagaaattatcattggggtacaggacacgagagatgttctccgccaggtttcggtccaacacagcctggatgtagccaccaacattgaagtccttgaggttgaagtcattgggagccttggcagaccagaggcgcatggtgttgacaacattgttgcgatagccaggcacgggcgtatcgtagggcatggccagtaccacctgtgtgtccacccacttggcaccctggctggtgtgctccacatggccgtagaagtgcacaggtagcgtgaactcgggccgggccttctcccaggggttgccgtagcgaagccagtcatcggcctcctccatctgccagcccccggagatcttctggttaaaaatcccaaactcatagcgaatcccgtagccataggcggccaggcccagtgttgccatggagtcaagaaagcaggctgccagccggcccaggcccccgttgcccagccccgcatcctcctcaatttcctccagctcctccatgtccaggcccagctggtaggtggcctcgtcacaggcattctctaaggccaggttcaccatggtgttctgtagcgtccgtcccatatagaactctaaagacaggtagtagatcctcttggggtccttctcatagtagtgctgctgcgtgcggatccagcgccccacgaggtggtcgcgcacggtatgggccagagcaaagtagtagtctcgtggggtggccacattgcggtcctttacgagtgtgaaatgcaggtgccggttgaagttctttttcagctcagtcacgttctccacgccggccaggccacgcacactgatttgctttcttttctcttggtctgacaggggccgggacatggctgcaggagggcgggccggactggactgatggtagaggggacggcggcctcagcactgcctccagcc

SEQ ID NO: 251462 - DNA, 1061 bp, Homo Sapiens
aagagaaacaagtcttctctaatactaaagatcaaagcaagagattacacagaacaaatctttcttttcctctgtgaaagaatcccagcgggatgatggaaaaggtgccttaaatatagtggaattcttgagaaaacgtgaagaactgcaacagattttgtcgagagtgaaacagtttgaagcagagccaaataaaagtggccttaaaacatttcagacactattaaatactatcccaggatggctgataagtgaagataagagagaatatgcagttcacattgccatggagaataatttagaaaaagtaaaagaagaaataacacatattaaaactcaagcggaagatatgcttgtgtcctatgaaaatataattcagacagccatgatgtcctccaaaacaggaaaaccgggaaataaacccactagtcttgatgaaacatcatccaaagtatctaatgttcatgtcagcaataataaaaatagtgaacagaaagaaaataaaattgccaaagagaaaacagtacagcaccaagtagcagctcatcatgaagcaactgttcgtagtcacgtgaaaacccatcaggaaattaaacttgatgatagcaacattcctcctccctctttaaaaacacgcccaccgtcaccaacttttatcacaatagaatctactgcccgacgaacagaaaaccctactaagaacgagctttctcagtcccctaaaaaggacagttatgttgaacccccaccaagaaggcccatgtcgcaaaaatctgaaattcacagagcaaacacttccccttctccacccaggagtcgctctgaacaacttgtcagactcaaagacaccactgcaaagttatccaaaggggccatcccatgtccagcagcaaccccggttccaattgtagagaagaggtctgaaatcatcatgtctcctgcaacacttcgtcgtcaaattaagatagaaactcgtggtagggactctccacctacaatcacaataccagtaaatataaatcatgctgctagtggttccttcagagaatctgtggacgctc

SEQ ID NO: 251463 - DNA, 1119 bp, Homo Sapiens
  misc_feature (12)..(12): n is a, c, g, or t
  misc_feature (25)..(25): n is a, c, g, or t
  misc_feature (56)..(56): n is a, c, g, or t
  misc_feature (64)..(64): n is a, c, g, or t
  misc_feature (69)..(69): n is a, c, g, or t
  misc_feature (96)..(96): n is a, c, g, or t
  misc_feature (123)..(123): n is a, c, g, or t
  misc_feature (129)..(129): n is a, c, g, or t
acactctcgacncccctgtatgacntagagtgatcctcaacaggagtgactccagntgcctggngtganacaggtctcttgcctctcgcagcgggngcaggcctcacgctcgctggtctggcnatgtcntcttgtgtttctctgaactcctcacgaagtgttcaccagcctgtgtcaaagtcctccccacccaggtggtgtccccggccgtggccttcacctcgaagatgccgtcgtcgatcgtcaggatggacacgtcgaaggtgcccccgcccaggtcaaagatgagcacgttgcgctcccccttgcccgttctgtccaggccgtaggcgatggcggcggccgtgggctcgttgatgatccgcagcacgttgagccccgcgatcacacccgcatccttggtggcctggcgctgcgagtcgttgaagtaggccggcacggtgatcaccgcgttggtcaccgggtagcccaggtacgcctcggcgatctccttcatcttggtcagcaccatggacgagatctcctcggggtagaatgccttggtctcccccttgtagctcacctgcaccttgggcttgtctccgtcgttgatcacctggaaaggccagtgcttcatgtccgactgcaccaccgggtcgccgaacttgcggccgatcagccttcgcgtcaaacacggtgttctgcgggttcagcgccacctggttcttggccgcatccccgatgagccgctcggtgtccgtgaaggccacgtagctgggggtggtgcggttgccctggtcgttggcgatgatctccaccttgccgtgttggaacacccccacgcaggagtaggtggtgcccaggtcgatgccgatcgccgcggctttggccatgccggttccctgctctctgtcggctccgctctgagattgggggctggaaacggaacactggatccgcgagaagagctcggtccttccggacgccggaaactcgacgcgccggtgcctgcagccgcacaggttcgctctgggaagccttgggacaacgggagtcactctcgaaaaaggtagtggactgtcgcagcagctcctcaggcatcccgggaattccggaccggtaccagcctgcttttttgta

SEQ ID NO: 251464 - DNA, 1212 bp, Homo Sapiens
  misc_feature (6)..(6): n is a, c, g, or t
  misc_feature (14)..(14): n is a, c, g, or t
  misc_feature (48)..(48): n is a, c, g, or t
  misc_feature (53)..(53): n is a, c, g, or t
  misc_feature (64)..(64): n is a, c, g, or t
  misc_feature (68)..(68): n is a, c, g, or t
  misc_feature (79)..(79): n is a, c, g, or t
  misc_feature (83)..(84): n is a, c, g, or t
  misc_feature (87)..(87): n is a, c, g, or t
  misc_feature (95)..(95): n is a, c, g, or t
  misc_feature (98)..(98): n is a, c, g, or t
  misc_feature (109)..(109): n is a, c, g, or t
  misc_feature (156)..(156): n is a, c, g, or t
  misc_feature (193)..(193): n is a, c, g, or t
cctganccctgaanagctctccaacccagctgacaagccaaatcacanctgtnctgtcgggtcnaccncatcccaagtnaganntgntcagactntcnacgcgcgactngacagagcatcaccccgacgagctttgtctacgggccgcgctgcagncgccatcctgatggggaacaagtccgagaacgtgcangacctgctgctgctggacgtggctcccctgtcgctggggctggagacggccggaggcgtgatgactgccctgatcaagcgcaactccaccatccccaccaagcagacgcagatcttcaccacctactccgacaaccaacccggggtgctgatccaggtgtacgagggcgagagggccatgacgaaagacaacaatctgttggggcgcttcgagctgagcggcatccctccggcccccaggggcgtgccccagatcgaggtgaccttcgacatcgatgccaacggcatcctgaacgtcacggccacggacaagagcaccggcaaggccaacaagatcaccatcaccaacgacaagggccgcctgagcaaggaggagatcgagcgcatggtgcaggaggcggagaagtacaaagcggaggacgaggtgcagcgcgagagggtgtcagccaagaacgccctggagtcctacgccttcaacatgaagagcgccgtggaggatgaggggctcaagggcaagatcagcgaggccgacaagaagaaggtgctggacaagtgtcaagaggtcatctcgtggctggacgccaacaccttggccgagaaggacgagtttgagcacaagaggaaggagctggagcaggtgtgtaaccccatcatcagcggactgtaccagggtgccggtggtcccgggcctgggggcttcggggctcagggtcccaagggagggtctgggtcaggccccaccattgaggaggtagattaggggcctttccaagattgctgtttttgttttggagcttcaagactttgcatttcctagtatttctgtttgtcagttctcaatttcctgtgtttgcaatgttgaaattttttggtgaagtactgaacttgctttttttccggtttctacatgcagagatgaatttatactgccatcttacgactatttcttctttttaatacacttaactcaggccattttttaagttggttacttcaaagtaaataaactttaaaattcaa

SEQ ID NO: 251465 - DNA, 2563 bp, Homo Sapiens
  misc_feature (2379)..(2379): n is a, c, g, or t
  misc_feature (2456)..(2456): n is a, c, g, or t
  misc_feature (2462)..(2462): n is a, c, g, or t
  misc_feature (2476)..(2476): n is a, c, g, or t
  misc_feature (2481)..(2481): n is a, c, g, or t
  misc_feature (2483)..(2483): n is a, c, g, or t
  misc_feature (2485)..(2485): n is a, c, g, or t
  misc_feature (2487)..(2487): n is a, c, g, or t
  misc_feature (2495)..(2495): n is a, c, g, or t
  misc_feature (2500)..(2520): n is a, c, g, or t
  misc_feature (2542)..(2542): n is a, c, g, or t
cggcagtactctaagcggtttaaggtagcgaggcctgggtggcgaattcggcacgaggaggagctgctgcgacatgccactaccttgtccgatattgactcccgttgtcccaaggacttcccagagcgaatctgtgctgctggaggcaccgtgtgcgtcgagttaccggcgtccggaatgaccgagtctcttctcgcggatccagtgttccgtaaccagccccctaatctcatgagccagagtcgcgtacagagaagcagtgcaaccggctatggccaaaagccgacggggatcaggcatcgagctgggcacgcaccatacgtaccatgcgtaggggtgtgttccaacacggcaagggtggatgatcatcgccaagcgagcatgtgggaaccgtagcacccccaggctacagtggccttcacaggacaccagagctggctcatcaggcggatagcaggccaaggaacccaaggtggcgctgaagccgcagaacaccgtgtgtgacgctgaagcggctgatcggccgcaagttcggcgacccggtggtgcagtcggacatgaagcactggcctttccaggtgatcaacgacggagacaagcccaaggtgcaggtgagctacaagggggagaccaaggcattctaccccgaggagatctcgtccatggtgctgaccaagatgaaggagatcgccgaggcgtacctgggctacccggtgaccaacgcggtgatcaccgtgccggcctacttcaacgactcgcagcgccaggccaccaaggatgcgggtgtgatcgcggggctcaacgtgctgcggatcatcaacgagcccacggccgccgccatcgcctacggcctggacagaacgggcaagggggagcgcaacgtgctcatctttgacctgggcgggggcaccttcgacgtgtccatcctgacgatcgacgacggcatcttcgaggtgaaggccacggccggggacacccacctgggtggggaggactttgacaacaggctggtgaaccacttcgtggaggagttcaagagaaaacacaagaaggacatcagccagaacaagcgagccgtgaggcggctgcgcaccgcctgcgagagggccaagaggaccctgtcgtccagcacccaggccagcctggagatcgactccctgtttgagggcatcgacttctacacgtccatcaccagggcgaggttcgaggagctgtgctccgacctgttccgaagcaccctggagcccgtggagaaggctctgcgcgacgccaagctggacaaggcccagattcacgacctggtcctggtcgggggctccacccgcatccccaaggtgcagaagctgctgcaggacttcttcaacgggcgcgacctgaacaagagcatcaaccccgacgaggctgtggcctacggggcggcggtgcaggcggccatcctgatgggggacaagtccgagaacgtgcaggacctgctgctgctggacgtggctcccctgtcgctggggctggagacggccggaggcgtgatgactgccctgatcaagcgcaactccaccatccccaccaagcagacgcagatcttcaccacctactccgacaaccaacccggggtgctgatccaggtgtacgagggcgagagggccatgacgaaagacaacaatctgttggggcgcttcgagctgagcggcatccctccggcccccaggggcgtgccccagatcgaggtgaccttcgacatcgatgccaacggcatcctgaacgtcacggccacggacaagagcaccggcaaggccaacaagatcaccatcaccaacgacaagggccgcctgagcaaggaggagatcgagcgcatggtgcaggaggcggagaagtacaaagcggaggacgaggtgcagcgcgagagggtgtcagccaagaacgccctggagtcctacgccttcaacatgaagagcgccgtggaggatgaggggctcaagggcaagatcagcgaggcggacaagaagaaggttctggacaagtgtcaagaggtcatctcgtggctggacgccaacaccttggccgagaaggacgagtttgagcacaagaggaaggagctggagcaggtgtgtaaccccatcatcagcggactgtaccagggtgccggtggtcccgggcctgggggcttcggggctcagggtcccaagggagggtctgggtcaggccctaccattgaggaggtggattaggggcctttgttctttagtatgtttgtctttgaggtggactgttgggactcaaggactttgctgctgttttcctatgtcatttctgcttcagctctttgctgcttcacttctttgtaaagttgtaacctgatggtaattagctggctccattatntttgtagtacaaccgatatgttcattagaattctttgcatttaatgttgatactgtaagggtgtttcgttccctttnaatgantcaattatctgccnccttntntncntatttttntttgnnnnnnnnnnnnnnnnnnnnngctgtggcgaaatattctatantaggctgggaatgtatgtttt

SEQ ID NO: 251466 - DNA, 1512 bp, Homo Sapiens
gagacgccctcagatctacgctctctgatgcaacgccggaatcgcggaaaccgccggtgcacgttggagtcataagacggcgtcggtgttgcagtctgtgtccttggaggtgaccagggccactgcaggcatggtgctagcagagctgtacgtctctgaccgagagggaagcgatgccacgggagatggaaccaaggagaaaccatttaaaacaggtctaaaggctttgatgacagtagggaaagaaccatttcctaccatttacgtagattcacaaaaagaaaatgagaggtggaatgttatttctaaatcacagttgaagaacattaaaaagatgtggcatagggaacaaatgaagagtgaatcccgggaaaagaaagaggcagaagatagtttacgaagagaaaagaacctggaagaagcaaagaagattaccattaaaaatgatccaagtctcccagagccaaaatgtgtgaagattggtgcgttagaaggatatagaggccaaagagtaaaggtgtttggctgggtccacaggctgcgcaggcaaggaaagaatttaatgtttctggtgttgcgagatggtacaggttatcttcagtgtgtcttggcggatgagttgtgtcagtgctacaatggagttctcttgtccacggagagcagtgttgcagtgtatggaatgctaaatcttaccccaaagggcaagcaggctccaggtggccatgagctgagttgtgacttctgggaactaattgggttggcccctgctggaggagctgacaacctgatcaatgaggagtctgacgttgatgtccagctcaacaacagacacatgatgatccgaggagaaaacatgtccaaaatcctaaaagcacgatccatggtcaccaggtgctttagagatcacttctttgatagggggtactatgaagttactcctccaacattagtgcaaacacaagtagaaggtggtgccacactcttcaagcttgactattttggggaagaggcatttttgactcaatcctctcagttgtacttggagacctgcctcccagccctgggagatgttttttgtattgctcagtcataccgggcagagcagtccagaacacgaaggcacctggctgagtacactcacgtggaagctgagtgtcctttcctgacttttgacgaccctcctgaaccggttggaggacttggtttgtgatgtggtagatcgaatattgaagtcacctgcagggagcatagtgcatgagctcaacccgaactttcagccccccaaacggcctttccggatgaactattcagatgctatcgtttggcttatcccagaagctcctgagagactgatgacagacaccattaatgaaccaatcttgctgtgtcgatttcctgtggagatcaagtccttctacatgcagcgatgtcctgaggattcccgtcttactgaatctgtcgacgtgttgatgcccaatgttggtgagaatgtgggggctctgccgttttttg

SEQ ID NO: 251467 - DNA, 724 bp, Homo Sapiens
aagacggtgtcggtgttgcagtctgtgtccttggaggtgaccagggccactgcaggcatggtgctagcagagctgtacgtctctgaccgagagggaagcgatgccacgggagatggaaccaaggagaaaccatttaaaacaggtctaaaggctttgatgacagtagggaaagaaccatttcctaccatttacgtagattcacaaaaagaaaatgagaggtggaatgttatttctaaatcacagttgaagaacattaaaaagatgtggcatagggaacaaatgaagagtgaatcccgggaaaagaaagaggcagaagatagtttacgaagagaaaagaacctggaagaagcaaagaagattaccattatgatccaagtctcccagagccgtttggctgggtccacaggctgcgcaggcaaggaaagaatttaatgtttctggtgttgcgagatggtacaggttatcttcagtgtgacttggcggatgagttgtgtcagtgctacaatggagttctctctgtccacggagagcagtgttgcagtgtatggaatgctaaatcgtaccccaaagggcaagcagggctccaggtggtcatgagctgagttgtgacttctggcaacctaattgggtaggcccctgctggatgagctgacaacctgatcaacgaggagtcttgaccttgatgtccagttcaacaatccgataccatgatgatccgcggggc

SEQ ID NO: 251468 - DNA, 522 bp, Homo Sapiens
tattcagatgctatcgtttggctaaaagaacatgatgtaaagaaagaagatggaactttctatgaatttggagaagatatcccagaagctcctgagagactgatgacagacaccattaatgaaccaatcttgctgtgtcgatttcctgtggagatcaagtccttctacatgcagcgatgtcctgaggattcccgtcttactgaatctgtcgacgtgttgatgcccaatgttggtgagattgtgggaggctcaatgcgtatctttgatagtgaagaaatactggcaggttataaaagggaagggattgaccccactccctattactggtatacggatcagagaaaatacggtacatgtccccatggaggatatggcttgggcttggaacgattcttaacgtggattctgaataggtatcacatccgagacgtgtgcttataccctcgatttgtccagcgttgcacgccataaccattttctccagaagcatggaggaaagattatgaaaggaacaggctcttt

SEQ ID NO: 251469 - DNA, 1177 bp, Homo Sapiens
  misc_feature (14)..(14): n is a, c, g, or t
  misc_feature (74)..(74): n is a, c, g, or t
  misc_feature (101)..(275): n is a, c, g, or t
  misc_feature (286)..(340): n is a, c, g, or t
taggacaataactntgctctgtccataagatgtagcctcattcaagaaatgaatggaatttcacagttaagaanacactaggccaagtgcggcgcctcatnnnnnnnnnnnnnnnnnnnnnnnnnnnnnnnnnnnnnnnnnnnnnnnnnnnnnnnnnnnnnnnnnnnnnnnnnnnnnnnnnnnnnnnnnnnnnnnnnnnnnnnnnnnnnnnnnnnnnnnnnnnnnnnnnnnnnnnnnnnnnnnnnnnnnnnnnnnnnnnnnnnnnnnnnnnnnnnttgcttgaatnnnnnnnnnnnnnnnnnnnnnnnnnnnnnnnnnnnnnnnnnnnnnnnnnnnnnnntgacagagtgagcctctgtctcaaaacaaaacaaaacacccattagattaagttttatgttctgtgactggaaatacagtctgtctaggcttttcttttctgaggagcaaaattatagggaagagacttgtcattaaatatacaaagtatcttatttagagagaaatcacaatctaaaagaggctatctttgatcaatggcaacactcaacatcaagggggctttggataaacccacaaattgcctccattcctcatttattctcatgaaaaatttcaaagtcatgataattatagcagagagtcattcaatctaaaacccacacaatgctgcactgtggttcatcaaaaacatggttagcaaatttcagctttacacttaagaaaactcagtcaatttcaaataattgagataaaacttataccctgcttgattctgcttatcgctgataattttagtctgttcagattctgacgattctaaatattttcatttagttgctaggtcgagaattagctttaaccagcaaggatcatccaacctttaaagttactgatacaaagagtaaactgagtaacttgtagaagtggcacttgcaactgatacggttttcatactagaggcatgcagctctatttataaatactaccagaggaatttttgccaggtctcaaacatgctttatttgttgttaattccactaatttaacaagttaatggaattttctctaggggtacaatttcattacgctttacttataaaaactacagtatgctgttcttttattttaaaacaacttactgtgttcaagaaatcatgttacaatataaattggc

SEQ ID NO: 251470 - DNA, 2335 bp, Homo Sapiens
  misc_feature (103)..(156): n is a, c, g, or t
tggtaccggtcccgaattttgggatatcgtcgacccacgcgtcgggcggcgcccagaggctgctgaggctggcggaacggaggatggcgctggtggcgttggnnnnnnnnnnnnnnnnnnnnnnnnnnnnnnnnnnnnnnnnnnnnnnnnnnnnnnactggacggcggccaggcgctcccggagccggcgcgaagcggcgagaagccgaggcggaggtgcccgtggtccagtacgtgggcgagcgcgctgcccgcgccgatcgcgtcttcgtgtggggcttcagcttctcgggggcgctgggcgtgccttcctttgtggtgcccagctccgggcccgggccccgcgccggcgcccgacgcgccgcaggatccagcccgtgccctatcgcctggagctggaccaaaagatttcatctgctgcttgcggctatggattcacactgctgtcctctaagactgcggatgttacgaaagtctgggggatgggactcaacaaagattctcagcttggatttcacaggagccggaaagataaaacgaggggctacgagtatgtgttggagccctcacccgtctccctgcctctggacagacctcaggagacacgggtgctgcaggtctcctgcggccgagctcactctcttgtgttgactgacagggaaggagtcttcagcatgggaaacaattcttatgggcaatgtggaagaaaggtggtcgaaaaatgaaatttacagtgaaagtcacagagtccacaggatgcaggacttcgatggccaggtggtccaggtcgcctgtggtcaggatcatagtctgttcctgacggataaaggagaagtctattcttgtggatggggtgctgatgggcaaacaggtctgggtcactacaatatcaccagctcgcccaccaagctgggtggagacctggcgggagtgaacgttatccaagttgccacctacggtgattgctgcctggccgtgtccgccgacggaggactttttggttggggaaactcggagtacctgcagctggcctctgtcactgactccacacaggtgaatgtgccccgctgcttacacttctcaggagtggggaaggtgcgacaggctgcatgcggtggcacgggctgtgcagtgttaaacggagaaggacatgtttttgtctggggctatggaattcttgggaaaggtccaaacctagtggaaagtgccgtccctgaaatgattccacccactctctttggcttgacggagttcaacccagaaatccaggtttcccgcatccgatgtggactcagccactttgctgcactgaccaacaaaggagagctgtttgtatggggcaagaacatccgagggtgcctgggaatcggtcgcctggaggaccagtatttcccatggagggtgacgatgcctggggagcctgtggacgtggcatgtggcgtggaccacatggtgaccctggccaagtcattcatctaaacctccctcacctgcttgggcggccccgtcccgggaaccactggcactccttggcagaggccagcgcgtggccagccccccggggttcttggatggtggtggcggaggaccctgcgtgcagtgtgacgctctgtcctgaatcccttagcgggtacttaccaggaggatcagggcaaggtccctctccagctgcaggtgaggcctgcggaactcagcttggatggcagcctttggtgggccgctgtggcccgcacgtctctgttctctccaagtaacatgcgacggtgtctggtgtcacgtctcgcctgagaagcccgtcttaggaaagcttagcttgaacacagtgctcgggaggtttctgctctgtctgtcatggcagtctcttggtttgtgtctggccaaggccatgcgtgtgcctcggaccgagccccagcttaagcgagggagtcaggctggcttcggccctcggttttcattcaggccaccctgctcatggcccttcctggccgcctgccacaccgcaagctcgctggggggacactaaaaacaccgtggcctgggattccatctggagctgtccgcaggcaccagccccagcctcccaccacgctcactgcctggcttggaaaagttaagaagcccctcaggaagagaatcgaggccaagttcctctgcgccgagggccccgagcatatcccccaaggctcagctgcagtgccaggcggaggaggaagatccagaaattgtgaacaatgtttgatttagtagcgtgacttgcctttccctttaaaaacatcttttacaaatctgtcttggaataaagtctattttctgccttttggtttttaagctctga

SEQ ID NO: 251471 - DNA, 926 bp, Homo Sapiens
ggcatcattcctgctcctgatctcagcatccagtgtgctctgcatgactccacgattctaatgtgtttctcttcatctggtcaatttcctcatctttttcagcaattttcctatcaacctcagacttgacttggttcaactcaagctggatgcgcaggatctttccctcttcatgttcaagagatgcctctgcctcctctaaggcagcctgaagttcagacttttcttgctcaacttgcttctttattttttccagttcatggatgcgctttcctccttctgcaatctgttcagtgagatcagaaatctcctgttgcaaattcttattttcccgtttcaaggtttcaagttggtctaaagattcctcataagcattcttaatcttaaatagttctgtgctgagtgagcgggattccttttgagaagcttcaagttcagcatgagtttcttcacacttctgtttccattcagccaggatcttatcaaagttcctttgctttttgtccagggcggcacaggcagcatttgtcctctcaacatcaatcatgaggtcctcaacttcattctggagcctctgcttcgtcttctcaagggaagcacatttggcattcacagcttctacatgttcctcagcatcctgcagacgctgagccagcttcttcttggcctccaccagctcctctgtgcgctggatggcatctgtctcatatttggtcctccactgggcaacctcactgttggccttggacattgctctctgtagctcggccttggcttcctgctcctcctcatactgttcccgcagcaggtcacagtcatggcgggaggactgcagggcatgtgccagggcactcttggcctttatctcctcttcaagttgccttttcagttcctcaatctgttgtgtaaaggcttgtttgcccccc

SEQ ID NO: 251472 - DNA, 958 bp, Homo Sapiens
  misc_feature (856)..(856): n is a, c, g, or t
aaggtagcgaggcctgggtggcgaattcggcacgaggctggagtttgttaaaccatatggattctcaagctcctctcttgaagattctgattcagtaggtctgggagtggcgcgctggattttgatcaaaattgtagagcattttaaggtgagtacctgagggagaacttaaagacatcttagttggggagtagtccttttgaattttacagctagatataatcttcagtcagataaaatttatgggagctggtgtcttatgcctgactcttagtaatttcataccggtttgaagtacgtgtgcccatgcctaaagccttgactttcagaatgttgtcttttgattcttctgtcttgatttgattaggggtgaaatttagaagtcttagtaatgtaacttgaagatgttaaacaaaaatctcaagtaaaatgaaaagcaaatatgggctactgaattaagaaactggcattctagtattaaatcctcacttcaggagcttttaaaaatactgagacccccccataaccagagattcagattcaaagactgaggataggaccttagcattgtagctatttaaagtttctaatgtgcacccagggtcgggaatcaccaatgtgggtgtgaaaatgcctacaaagggttttagtgccttagaagtcctaagaagcccaatctgtatcaaagcagatccattttgcaaggatctttcttttagaaactttctcagttctcttagtagagaactttagaagtaaatcttgataataagcacagacagcctaacagcagaggcaacttaaataactccctgagcagttggcactagaacagaatacttgggaaggacaccanaagttaacccaagtccagcatatgtcccaaaagaaggtaaagtggtttcattttactgggaacatttctggggtgaagaaaattgggtttgcctgaaattct

SEQ ID NO: 251473 - DNA, 1757 bp, Homo Sapiens
  misc_feature (22)..(22): n is a, c, g, or t
  misc_feature (129)..(129): n is a, c, g, or t
  misc_feature (509)..(568): n is a, c, g, or t
  misc_feature (1169)..(1198): n is a, c, g, or t
  misc_feature (1533)..(1592): n is a, c, g, or t
cctatgattatgctgtgaagangccatggcttgcatatcctcactataagcccccggagaaatgcccctctatcattctccatgatcgactttattacctcaatggcatagagtgtgcagcaagtgccntggagatgagtgccattgcagcccacaacgctgcactccttgcctatcaccgctggaacgggcacacagacatgattgatcaggatggcttatatgagaaacttaaaactgaactatgaagtgacacactcctttttcccctcctagttccaaatgactatcagtggcaaaaaagaacaaaatctgagcagagatgattttgaaccagatattttggccattatcattgtttaataaaagtaatccctgctggtcataggaaaacacacggttctaattaagtgtgaaggtatagctattgcacttatgccatctccaaaatttcttaagtattctttcactatccattaggagtttttcttaaacttgtctgataatannnnnnnnnnnnnnnnnnnnnnnnnnnnnnnnnnnnnnnnnnnnnnnnnnnnnnnnnnnngcctgagcaacacgagcaaaactccgtctcaaaagtaaataaaaataatcacctggagtgtgttaaaccatatggattctcaagctcctctcttgaagattctgattcagtaggtctgggagtggcgcccctggattttgatcaaaattgtagagcattttaaggtgagtacctgagggagaacttaaagacatcttagttggggagtagtccttttgaattttacagctagatataatcttcagtcagataaaatttatgggagctggtgtcttatgcctgactcttagtaatttcataccggtttgaagtacgtgtgcccatgcctaaagccttgactttcagaatgttgtcttttgattcttctgtcttgatttgattaggggtgaaatttagaagtcttagtaatgtaacttgaagatgttaaacaaaaatctcaagtaaaatgaaaagcaaatatgggctactgaattaagaaactggcattctagtattaaatcctcacttcaggagcttttaaaaatactgagacccccccataaccagagattcagattcaaagactgaggataggaccttagcattgtagctatttaaagtnnnnnnnnnnnnnnnnnnnnnnnnnnnnnncaatgtgggtgtgaaaatgcctacaaagggttttagtgccttagaagtcctaagaagcccaatctgtatcaaagcagatccatttttgcaaggatctttcttttagaactttctcagttctcttagtaagaactttagaagtaatcttgaataataagcacagacagcctaacagcagaggcaaacttaaataactcctgagcagttggcactagaacagaatacttggaatgacacccaaagttaaccaagtccagcatatgtcccaaagagttaaggggtttcatttactgtagcattctgggtgagaaattggttgctgaaatcttaagacnnnnnnnnnnnnnnnnnnnnnnnnnnnnnnnnnnnnnnnnnnnnnnnnnnnnnnnnnnnngtaattaacaggcagcaaaacttcagaactagttctgcatctactgtgcaaagatcatgattaactgtcaagacactggtagaacagaacaagcaaaagattaagagttcaaaagtaaatgcaaccaatttaacatgtagtgttattaaaaaattacaaaggcct

SEQ ID NO: 251474 - DNA, 516 bp, Homo Sapiens
  misc_feature (294)..(349): n is a, c, g, or t
agagtcttgggctgaagcaccggtgaatacacgcggacactcctcactggacacttgggcagctccctgtgtggcctcgagataatcctgcctcagtttctcttggacccgctgctcacctgctggacagcaggctgggagggctccgagctccccccgctgaaggctccggtcagggcgctgcccatgacgtgtcccacagccgagcccacggctacccctgcggccgtggtcgccatctgagccatgagccccggctggcccgaaggggcgggggctggggcggctgccgannnnnnnnnnnnnnnnnnnnnnnnnnnnnnnnnnnnnnnnnnnnnnnnnnnnnnnngggaggccgcgctgcggcttccccgaggcatggtggcggcggtgggacccgggcgaccttagagacggcggcagcggtgctgtcgcggggacaaatgccgcagcgcttgtcaccgacgcgtgggtcgacgatatctcgagatttcccgggaccgggttaccaagcct

SEQ ID NO: 251475 - DNA, 1032 bp, Homo Sapiens
  misc_feature (98)..(183): n is a, c, g, or t
  misc_feature (333)..(359): n is a, c, g, or t
  misc_feature (667)..(810): n is a, c, g, or t
  misc_feature (821)..(863): n is a, c, g, or t
  misc_feature (920)..(947): n is a, c, g, or t
  misc_feature (968)..(980): n is a, c, g, or t
ggggcatttgtccccgcgacagcaccgctgccgccgtctctaaggtcgcccgggtcccaccgccgccaccatgcctcggggaagccgcagcgcggccnnnnnnnnnnnnnnnnnnnnnnnnnnnnnnnnnnnnnnnnnnnnnnnnnnnnnnnnnnnnnnnnnnnnnnnnnnnnnnnnnnnnnnttcgggccagccggggctcatggctcagatggcgaccacggccgcaggggtagccgtgggctcggctgtgggacacgtcatgggcagcgccctgaccggagccttcagcggggggagctcggagccctcccagcctgctgtccagcaggnnnnnnnnnnnnnnnnnnnnnnnnnnntgcagatggggccctgcgcctacgagatcaggcagttcctggactgttccaccactcagagtgacctgtccctgtgtgagggcttcagcgaggccctgaagcagtgcaagtactaccatggtctgagctccctgccctgaagaggtcggtgcagactcgggggccagtcctgcacccacctctacccctcgccgacagccagaccacaacaccagattgtacccagatagctgggattggaagtgaggaggtttctcaccccacagataacccaagacacaaatgtgcaattaaaagtttattttagnnnnnnnnnnnnnnnnnnnnnnnnnnnnnnnnnnnnnnnnnnnnnnnnnnnnnnnnnnnnnnnnnnnnnnnnnnnnnnnnnnnnnnnnnnnnnnnnnnnnnnnnnnnnnnnnnnnnnnnnnnnnnnnnnnnnnnnnnnnnnnnnaatgtgggggnnnnnnnnnnnnnnnnnnnnnnnnnnnnnnnnnnnnnnnnnnngggggcgcggggccccaaaaggaaaaggaaaaaatggggcaatatttgttttccccnnnnnnnnnnnnnnnnnnnnnnnnnnnngggtttgggattccccccccnnnnnnnnnnnnnccccccccggcggggaaacacggagggtttttttaaacaaaaatccccccaa

SEQ ID NO: 251476 - DNA, 936 bp, Homo Sapiens
  misc_feature (509)..(509): n is a, c, g, or t
  misc_feature (796)..(796): n is a, c, g, or t
  misc_feature (830)..(830): n is a, c, g, or t
  misc_feature (874)..(875): n is a, c, g, or t
  misc_feature (920)..(920): n is a, c, g, or t
gatatctttaaaataattgacacaattgcaaaatgaattcctggcttcagttagctattatttttttaatgacaacatagactgtgctctaagtttaaaagatggggaagcttatataaaagtgacccttttgcatcatatgggtatctaaacttaatttacccaataagttgatgcttaatgattttattttatttttgtctatttctattttagttgtggctttgctctaagaatgggtaatagttgtactacagactgctataaatttcttgtgatactcttttagagctcaaaatatctctgagctttagacatggtaaggtggagagtaaatgcttgataaatctttaagatatgtcttgaatgataattaggacattcagtccagtggaaatacaccattcaattagtcaggtctggtgaatcgtttgtttaaaatattagcaaatgagatgtggaattctgaaatttctccagactgtgtcttaataaaaatgtcacctggngtgaaattttagatcaatcactaaatttgggtgacaaatataaaaatattttcatttcactttaatacattctttctgtgaagtaaaatgtttttctttctcataatggcaaaatatgaatgccatcaaagtttaaggaattcattttagccttaaatgccttcgtgagatgtcttacttgtattttaggtaactggtcatcagtgccaatgacatggataacaatttttaatctactcgacagtgcatccctgggaatgactgttatgtttttgtcatattcctgntaatataaatactcgtgttctttactacattgtntttatcaactctaaaagtcatgcctctgtgacctttatcatgtnntacattgcaactgaacttatgaacaattaactcaggaaataaatngagttatcctttctag

SEQ ID NO: 251477 - DNA, 1819 bp, Homo Sapiens
  misc_feature (19)..(19): n is a, c, g, or t
  misc_feature (72)..(72): n is a, c, g, or t
  misc_feature (126)..(126): n is a, c, g, or t
  misc_feature (330)..(420): n is a, c, g, or t
agggataccaaagggttcncaggtccctcataaccaaccgaaccccaactccctcatttagatgggcatcangttgtttttggacaagtaatcctctggtcaagaagttgtaagagagattgaaancccagaaaacagatgcagctagcaaaccgtttgcggaggtacggatactcagttgtggagagctgattcccaaatctaaagttaagaaagaagaaaagaaaaggcataaatcatcatcatcttcctcctcctcatctagtgactcagatagctcaagtgattctcagtcctcttctgattcctctgattccgaaagtgctactnnnnnnnnnnnnnnnnnnnnnnnnnnnnnnnnnnnnnnnnnnnnnnnnnnnnnnnnnnnnnnnnnnnnnnnnnnnnnnnnnnnnnnnnnnngtgcatctagtgagagtgaagctgaaaatcttgaagcacaaccccagtctactgtccgtccagaagagatccctcctatacctgaaaatagattcctaatgagaaaaagtcctcctaaagctgatgagaaggaaaggaaaaacagagagagagaaagggaaagagagtgtaatccacctaactcccagcctgcttcataccagagacgacttttagttactagatctggcaggaaaattaaaggaagaggaccaaggcgttatcgaactccttccagatccagatcaagggatcgtttcagacgtagtgagactcctccacattggaggcaagagatgcagagagctcaaagaatgagggtatcaagtggtgaaagatggatcaagggggataagagtgagttgaatgaaataaaagaaaatcagagaagtccagttagagtaaaagagagaaaaataacagatcacaggaatgtatctgagagtccaaacagaaaaaatgaaaaggagaagaaagttaaagaccataaatctaacagcaaagagagagacatcagaagaaattcagaaaaagatgacaagtataaaaacaaagtgaagaaaagggccaaatctaaaagtaggagtaagagcaaagagaaatcaaagagtaaagaaagagattcaaaacataatagaaatgaagaaaagaggatgaggtcaaggagtaaaggaagggatcatgaaaatgttaaagaaaaagaaaagcagtctgattctaaaggaaaagatcaggaaaggagtagaagtaaagagaagtctaaacagttagaatcaaagagtaatgagcatgatcacagtaaaagtaaggaaaaggatagacgcgcacaatccaggagtagagaatgtgatataactaaaggtaaacacagttataatagcagaacaagagaacgaagcagaagtagggacagaagcagaagagtgcgatcaagaacccatgacagagatcgcagcagaagcaaggagtaccatagatacagagaacaggaatacaggagaagaggacggtcacgaagccgagagagaagaacaccaccaggaagatcaagaagtaaagataggaggagaaggaggagagactcacggagctcagagagagaagaaagtcaaagcagaaacaaagacaaatacagaaaccaagagagtaagagctcacacagaaaagaaaattctgagagtgagaaaagaatgtactctaaaagtcgtgatcataatagctcaaataacagcagggaaaaaaaggctgatagagatcaaagtcccttctcaaaaataaaacaaagcagtcaggacaatgaattaaagtcctccatgtggaaaaataaggaggatgagaagatcagatcctcagtggaaaa

SEQ ID NO: 251478 - DNA, 688 bp, Homo Sapiens
  misc_feature (481)..(531): n is a, c, g, or t
  misc_feature (653)..(653): n is a, c, g, or t
agataagaaaccagctgacagccatgtcctcagtacttgcaaaagcacttgaagtcattaaaccagctcatatactgcaagagaaagaagaacagcatcaggtggctgtcactgcataccttaaaaattcacgaaaagagcaccagcggatcctggctcgccgccagacaattgaggagagaaaagagcgccttgagagtctgaatattcagcgtgagaaagaagaattggaacagagggaagctgaactccagaaagtgcggaaggctgaggaagagaggctgcgccaggaagcaaaggagagagagaaggagcgtatcttacaggaacatgaacaaatcaaaaagaaaactgtccgagagcgtttggagcagatcaagaaaacagaactgggtgccaaagcattcaaagatattgatattgaagaccttgaggaattggatccagattttatcatggctaaacaggttgaacaaccggnnnnnnnnnnnnnnnnnnnnnnnnnnnnnnnnnnnnnnnnnnnnnnnnnnnttgactattttgaaagagccaaacgtttggaagaaattcctttgataaagagcgcttacgaggaacagagaattaaagacatggatctgtgggagcaacaagaggaagaaagaattactacnatgcagctagaacgtgaaaaggctcttgaacataa

SEQ ID NO: 251479 - DNA, 1203 bp, Homo Sapiens
  misc_feature (1115)..(1115): n is a, c, g, or t
  misc_feature (1126)..(1126): n is a, c, g, or t
  misc_feature (1133)..(1133): n is a, c, g, or t
  misc_feature (1145)..(1145): n is a, c, g, or t
  misc_feature (1161)..(1161): n is a, c, g, or t
  misc_feature (1179)..(1179): n is a, c, g, or t
aaccagctgacagccatgtcctcagtactttcaaaagcacttgaagtcattaaaccagctcatatacttcaagagaaagagaacagtcatcagttggctgtcactgcataccttaaaaattcacgaaaagagcaccagcggactcctgctcgccgccagacaattgaggagagaaaagagcgccttgagagtctgaatattcagcgtgagaaagaagaattggaacagagggaagctgaactccagaaagtgcggaaggctgaggaagagacgctgcgccaggaagcaaaggagagagagaaggagcgtatcttacaggaacatgaacaaatcaaaaagaaaactgtccgagagcgtttggagcagatcaagaaaacagaactgggtgccaaagcattcaaagatattgatattgaagaccttgaggaattggatccagattttatcatggctaaacaggttgaacaactggagaaagaaaagaaagaacttcaagaacgcctaaagaatcaagaaaagaagattgactattttgaaagagccaaacgtttggaagaaattcctttgataaagagcgcttacgaggaacagagaattaaagacatggatctgtgggagcaacaagaggaagaaagaattactacaatgcagctagaacgtgaaaaggctcttgaacataagaatcgaatgtcacgaatgcttgaagacagagatttattcgtaatgcgactcaaagctgcacggcagtctgtttatgaggaaaaacttaaacagtttgaagagcgattagcagaagaaaggcataatcgattggaagaacggaaaaggcagcgtaaagaagaacgcaggataacatactatagagaaaaagaagaggaggagcagagaagggcagaagaacaaatgctaaaagagcgggaagagagagagcgcgccgaacgagcaaaacgcgaggaagagctacgagagtatcaggagcgggtgaagaaattagaagaagtggaaagtgaaaaaacgccaaagggagttggaaattgaagaacgagaacggcgtagagaggaagagagaagactttggcgattagttccctttcttaggaaaggactcttcgttngggagattagnagatttnagaaggcacctnggagaaaaggaccttnaaagcagttcttgagttnggagaaggaggcccaccagaggag

SEQ ID NO: 251480 - DNA, 1273 bp, Homo Sapiens
ctccccgccccctcggccgctccgctccctggcgtgactcggcactgagagtcccgggagaagactcggcggtcgccacctcttctgtccaggcctcggccttcctgagcatctctccttcctctcccagatcgtcttctccttcagtttcaaagccagtggcgtcgcggccaccctgccgggctctctgtgaggatggtgggggtgaagcccgtcgggagcgacccggatttccagccagagctgagcggcgcgggctccagactcgccgtggtcaagttcaccatgagagggtgtgggccatgtttgaggattgccccagcattcagttctatgagtaataaatatccacaggctgttttcttggaagtcgatgtacatcagtgtcagggaacagctgccaccaacaatatatcagcaacacctacatttttgttttttcgaaacaaagtgagaattgatcaatatcaaggagcagatgctgtgggattagaagaaaaaatcaagcagcacttagaaaatgaccctggaagcaatgaggacacagatattccaaaaggctatatggatttaatgccttttattaacaaagctggttgtgaatgtcttaatgaaagtgatgagcatggatttgacaactgtttacgaaaagacacaaccttcttggaatctgactgtgatgaacagctgcttattactgtggcattcaatcaacctgttaagctttattccatgaaatttcaagggccagataatggtcagggccctaaatatgtaaaaatttttatcaacctaccccgatctatggattttgaagaggcagaaagaagtgaaccaactcaagctctggaactgacagaggatgatattaaagaagatggcattgttcccattcgttatgttaagtttcagaatgttaacagtgtaactatatttgttcagtcgaatcaaggtgaagaggaaacaacaagaatttcatattttacttttattggtactccagtccaggcaacaaatatgaatgacttcaaacgagtagttggcaaaaaaggagaaagccactaaggtacaaaagacactggacaaccatattgcaatcagatctacagctcctggataattgcttgattctcgccagagactgtcaatgtttcattcattgccattaccaataaatcattgcttttgttcagatggtatcactagtgtttccattgtaatcttgacacatgcaattgtaaataaaagtcaccacttttgccaagcttaaaaa

SEQ ID NO: 251481 - DNA, 814 bp, Homo Sapiens
  misc_feature (39)..(39): n is a, c, g, or t
  misc_feature (110)..(110): n is a, c, g, or t
aactgtgtgcatattgttcaggacagtatccccagtganccagcacagtatctggccctcaacaaatgtttgttgaatgaatgaattagaacagaagtcttaacatgganacaatgatttatagcaatggccccaacagcaattttctagcttccaatgtgtcactaataatttcattagtatgtgtttcataagcagagatcctcatcaagatagcctgtgttcattaataaattttcaatgttttaatagtaagctcagagtgacccaatttattttgttcgtatacaatttataatgtagttgcattattccgtatttgtatacaaatctgctgttcaataagaacacattctctttactgtaccacagtacagtaaatggatccaatcccaattatgcattaaattgtgccaactgaataatcttaaaaactttatgtttaatgaagtaaatttgtcctagattttctagaaccttaactacaaatttatcagagaaatacggtattgcttttcaagaactagttgttcttaaatttaaaagaaaccattcagtagtgtttaaaaaaccaaacaactctgaaaataacccatcaaaacataatattaaaatcatttgatttctgttgggaaaaccagggtaaacatagtttaaatgcgtttttgtctatggaaagcattcaggaaaattctacttttcacaaaagaggtttatatcctacagctctttttaagaccgaaagtttaaaataaattttaattttattctttggctattatttatacctaataaatgagtcgctgatatcaat

SEQ ID NO: 251482 - DNA, 745 bp, Homo Sapiens
ttctgctgcagttcaaaggcctggagaaactgaaaatgcattcatttgggtttttttcccttgaaaagaaagagataaattattttcatcttggaattttagagttgaataaataatcccaataattacagatcaatcactaataaactaacattgggaccagccagattggcaactgttagaaatacatgttccatttctatacaaattctcaaacttctagttgccaatttaaaaaagtttaaacaaagtagtggcttaaattcaacatcaaaattaccccttataaatacaagtcttaccattaaagggtaaaggtgtccagtctggcttgctggttcttcttctgtgagaaaagtcactgacagccagaggctcccagcctttccccagtgaaggtccaacaagacacacatgcattttctgctaagaaggtagcaaactctaactagcctgtgttgtgagtgacaattgtgcccctacctcccaacataaatagatggcaaaaagagttggactacaagaggaaccgccggaagcagagtcctatgcatttaaaaaagaatcaatttgctagctgcttcctatacctggagtcagtatgttcagtgtctgaagaagactagaaatgccagccctcagtgtccatgctaaactggcaggaagttttcatagtcctgaagactgacatccaaaacagaccagcacagcagaaggaaagacaagctcctttctctctgcaatc

SEQ ID NO: 251483 - DNA, 729 bp, Homo Sapiens
gcatcctggaaatccaagtagcacagtagaggatgcaggacaatacaactgctacattgaaaatgcctgctggaaaagattcctgttcagcacaaatactcatactagaaccaccgtattttgtcaagcagttggagccggttaaggtgtctgttggagattctgcctctctacaatgccagcttgctggaacccctgaaattggggtatcctggtataaaggagatacaaaattgagacccactacgacttacaaaatgcattttaggaataatgttgctacactggttttcaaccaggttgatattaatgatagtggagaatatatctgcaaggctgaaaacagcgtgggagaagtttctgcatcaactttccttaccgttcaagagcaaaaacttccaccatcattttctcgacaattgagagatgttcaagaaacagttggactgccagttgtttttgattgtgccataagtggatcagaacctatctccgtgtcttggtataaagacggcaagccattgaaagacagcccaaatgtacaaacatcatttttagacaatacagccacactcaatatttttaaaactgaccggagccttgcaggccagtattcctgcacagctacaaaccctataggctctgcttcttccagtgccaggctcattctcacagaggggaagaacccacccttctttgacatccgtcttgcccctgtggatgctgtgg

SEQ ID NO: 251484 - DNA, 761 bp, Homo Sapiens
atcagtcgactcaccagtgtgagggtctataagctcttgccagtaagtcctcaagctgttcaagtacaacctggatgcctccttactaaagtaatcattggggtgcttgtgccactggagaatggatagcagtgcccggccgctctccactgcattttcaatctatagcaaagtctcatggggcaactaagagacagcaatataataaaagagtctttcactgactgcctgggaacaagcacaacctgcatggccatcaaagacccccaaaagcatccctctggtctgcaagcaggttgctgcacttctccggtcctcaatgggtgcatctgcaggcagctgattgctgtcaaatccaaggatagaactgacatttttgccgtcaaattctggcactttgaaactgtattcattagctttaaggatgctattgacttgtggaggtgtgaggtaaaatttctgtggtgtggaagcatatctccttccttgggtgtactgccaccagttctcctttggcctgcaaaaggtagcatatgctggatgagatgtgtatctcagtcgactctgaggaatgtacgatgaggaacaacagagatgtttgtggtggcagtaacatgcagtgccatagatcctgctcagttcacagttacggatgagaggaaaaaacagttgagttggtgctgacatggcatcagagaacagtggcaggctggaacttatgactgggattccgggcacggcaggagaccatacgattgttc

SEQ ID NO: 251485 - DNA, 395 bp, Homo Sapiens
cgcacaaaacaacttccataatagacggactccatcctgtggtgcttaagagcacagactctggggccaaatgtcctagatgcaaatcctgcctccattattactatttgctgttttatcttaggcaagttatttaacttctctgcgcctcagtgttcttgtctgtaaaatggggacactaatattccctacctcctagggttgtgttgagactgaatacctgcaaagcacttagaatagtgtctggcatgaagtatgcactatataggtgctttaatatataaataaactaaaacctgagtaatgtcctggctccaagggctaagcacaatgagctcagggcaggaagaagccattctgttcccaacatgcatttccctcctcaccactgaggg

SEQ ID NO: 251486 - DNA, 1508 bp, Homo Sapiens
  misc_feature (241)..(241): n is a, c, g, or t
tcgactcttgagacttgcatttcacgggcggaaaggggcctatcggacagctaaccgtaacggccctacaaaggggcccttttcccgaatgccccgaaaactccagcattcggtgccgccaacccttatctgggctgtaacccaaaccccggatgcaaaattcgggccctgccgagttcagcctgcaagtagccactgaacacttgcaattattgcaagcattggccgatttggccgattnagcccgttttagccgatcttcccgctgagagcaagattcaacaccattctagggctaccacagattataagtagtatatatcataatgcttggtatgagaaaaactactcagcataagattcacggagaaaaacctgttaggtatctggccctcttgcctgaaatctattgattttaccaaccactccctttcacagcaataagagttctcaagatgagaagaattttctcactccatatagaaaatcatatttgggaagccagtcccaaaagaccgaatattgtagaattccatttatatgaaatgaccagaataagcaaatctacagagagagaaatagattagtggttgccaggggctcggggatggggtgggcactgggagaaaatgagaggtgactgctcaagggtacagggtttctttttggggtaacgaaatgttctaaaattgactgtggtcacggttacacaactttgtgaatacactaaaaaccactaaattgtacccttaaaataagtgaattgtaaggtatgtgaattatatctcaataatgttacaaacatattaagaaacgaagacataccccaaagagaaggaaacaagaggctcttccaaaccaaatcgtacccagaagaaaacagtagccaagtctgatggaaggagcttgtttcttgcatgctattttatcatcatcactttaacccgatttcacatttttaattcatttctaaattattttaggttatcggcagatttctaactttgttctcattagagagcagagtcagtgttccgcagacagactgggctggcgtaacaaaccaaaactaaacaacaataaaaacccaatgaaaaataatctcatgctttggggctatgtgttaccagtcagaagagaagagctgatgtccatttctaaaggaaaataaaatgcctacaagtacaatggcatcttatgactcatgcctaaagcacatttccttttcaaacctgcatacagttattccctttttacacctatacaattcaacaaaagcaatgtttttatacctgtacaatccaaaaaaagcaacgttctctacaaagaaatgttgagcttcctacagctctctagctcaaagagctagccaatttccttaaaagtaaaattactgtttctaaaaatatcaactctgtatcctcatcctcactttcagcaacatacagtgaagatggaaaacttgaagactgctataaaccagaaactacaaaacaatttcttaaatg

SEQ ID NO: 251487 - DNA, 742 bp, Homo Sapiens
ggatagaaaaggagaggaggcaaacgcagcccaaactggggggtttctcttcaaagccagctggtctggctttattctgcaggaatttttttacctgtcagggtttggacaacaaagccctcagcaggtgctgacgggtacaacttcctggagaagcagaaaggcactggtgccaaagaagagttgcaaactgtgaagtaacttctatgaagagatgaagtaaagaacggaaggcaaatgattgtggcagtaaagaagtgtatgtgcaggaacgaatgcaggaatttgggaactgagctgtgcaagtgctgaagaaggagatttgtttggaggaaacaggaaagagaaagaaaaggaaggaaaaaatacataatttcagggacgagagagagaagaaaaacggggactatggggagaaaaaagattcagattacgaggattatggatgaacgtaacagacaggtgacatttacaaagaggaaatttgggttgatgaagaaggcttatgagctgagcgtgctgtgtgactgtgagattgcgctgatcatcttcaacagcaccaacaagctgttccagtatgccagcaccgacatggacaaagtgcttctcaagtacacggagtacaacgagccgcatgagagccggacaaactcagacatcgtggaggcattgaacaagaaagaaaaacaaggctgtgaaagccccgatcccgactcctcttatgcactcaccccacgcactg

SEQ ID NO: 251488 - DNA, 806 bp, Homo Sapiens; identical to SEQ ID NO: 5496
  misc_feature (159)..(168): n is a, c, g, or t
  misc_feature (301)..(364): n is a, c, g, or t

SEQ ID NO: 251489 - DNA, 750 bp, Homo Sapiens
  misc_feature (660)..(660): n is a, c, g, or t
gattttgaatataagctggaccgggagtcctcaagggttgcaagctttctgtcactgatgacaaaaacacggtgctcgccctcaggaatactttaatagaaagtgatctgaaatacaaagagaaacatgtcaaggaaagaggaacctgccatgccgtacccgacacgcctcagatcctgctggcgaagactgtcagcaacctggtgtctgagaacaagtacaaggaccatgtcaagaagcacttggcacagggctcatacacaacactaccagagacccgggacactgttcacgtcaaggaagtgaccaagcatgtcagtgatacaaattacaaaaagaagtttgtcaaggagaaaggaaaatccaactactccatcatgctggagccaccagaggtgaaacatgctatggaagtggccaagaagcaaagtgatgtcgcttacagaaaagatgccaaagagaacctgcattacaccacagtggctgatcgaccagacatcaagaaggccacacaggcagccaaacaggccagtgaggtggagtacagagccaagcaccgcaaggaaggcagccatggcttaagcatgctcggtcgcccagacatagaaatggccaagaaggcagccaagctgagcagccaggttaaataccgagaaaatntcgataaagaaaaggggcagacaccaaaatacaatccaaaagacagccagctctacaaagtcatgaaagatgctaataaatcttgcagtg

SEQ ID NO: 251490 - DNA, 1644 bp, Homo Sapiens
  misc_feature (1487)..(1490): n is a, c, g, or t
  misc_feature (1495)..(1509): n is a, c, g, or t
gggggggtcacgtggtggctgggccggggaaatggcggcttcaggagagagcgggacttcaggcggcggaggcagcaccgaggaagcatttatgaccttctacagtgaggtgaaacaaatagagaagagagactcggttctaacttcgaaaaatcagattgaaagactgacccgtcctggttcctcttacttcaatttgaacccatttgaggttcttcagatagatcctgaagttacagatgaagaaataaaaaagaggtttcggcagttatccatcttggtgcatcctgacaaaaatcaagatgatgctgacagagcacaaaaggcttttgaagctgtggacaaagcttacaagttgctactggatcaggagcaaaagaagagggccctggatgtaattcaggcaggaaaagaatacgtggaacacactgtgaaagagcgaaaaaaacaattaaagaaggaaggaaaacctacaattgtagaggaggatgatcctgagctgttcaaacaagctgtatataaacagacaatgaaactctttgcagagctggaaattaaaaggaaagagagagaagccaaagagatgcatgaaaggaaacgacaaagggaagaagagattgaagctcaagaaaaagccaaacgggaaagagagtggcagaaaaactttgaggaaagtcgagatggtcgtgtggacagctggcgaaacttccaagccaatacgaaggggaagaaagagaagaaaaatcggaccttcctgagaccaccgaaagtaaaaatggagcaacgtgagtgaccgcccaaggtcacaggcacagaacctttcccctgctatctcccttcctgcttcgaaggactcattctttcctcccacttccaccccaacatagagtagtatttgctttttagtccattttgttttcaatacgatttaatatcgatcagagtaattcttttgtacattgaaatgaggggcttggtttaaaaaaagacctttccctctccctgcccctagaacaaccagtattagaaggtgccaccattggtgctgccttctcttcccacagcctgtaactcagtgttttgtacttcactgaattgtgatggttagaaacttcgtggatagtttgtggaaatcatccaattaaacatactgcttaaaacagtgttgctgtgacttcagagacaagcctggaaggggcaccttaggaagccccttcgcttcagttgctcgcttctgggtgtgctcccttcgaaggcccagataagacagggaacacttgtgagcacacagagcagcatctgatgccctgtggtgtttggcatgtgccccctgtctactgaccaatcagtgtggcatgaggcccacgccacccaaacctttcactttccaaagagctagccgtcctccacccagtaccatgtcctagcctgtctgcatttgttagtggtaatattctttatgtataataaatttttatactcaaaannnnaaaannnnnnnnnnnnnnncaagatgtccgccgcgtccctcctcaagattctttctccatcattcggttgggccgggcccccaggaagaaagagaacatggtaatagctgtctcctaggacatgctgatcatgactggtggttgtattcccacc

SEQ ID NO: 251491 - DNA, 679 bp, Homo Sapiens
  misc_feature (27)..(27): n is a, c, g, or t
caccagatcctccagtgatcaggatgnactgattctctcggtcagtcagcatgaactgataggcgtgtccagagatggagaagatgtggggcggggcctcctggcgcttttgccctcggtaggctgtcaccacctcgggcttatacacaggcagccacttgtaggggttgacagtgacacagaagagacctgaataggtgtagatcatccaggctgcataacgttctttgaggttgtacagcacagcaggctcatgcagatgagtcatcatggccatatcctcgatcttgtcatatttgggagggttcatggggaagacctgatcatccttcactgtcagagtcgctcctccctcagtcttcaccgtcacttttcctccttctctgctctggatggtccctttgacaaaggattctttgggctccgccacaaagacagatgttttggcatcaaagggcctattctgggcctcaatgcgctccctttcagactttcggaggaaaggagcagcctccccaaaaacagccaattctgagtctgaactcatggctgctgaactcagaggtccttgttagcaagtgagaagatgtagcctgggagtgagacagttcagaactagcagctgctgctgacactgggcggtgtgaccagtgtccctcttgaaaggcccgtcctcccc

SEQ ID NO: 251492 - DNA, 1399 bp, Homo Sapiens
  misc_feature (179)..(216): n is a, c, g, or t
  misc_feature (1298)..(1298): n is a, c, g, or t
  misc_feature (1317)..(1317): n is a, c, g, or t
  misc_feature (1353)..(1353): n is a, c, g, or t
cggggtgagaaattaattctacaaatggtttgtactattctgtgcctcaaatattaaatatctaattgtgactaccgtgaaatgcagttagttgataatgataaaatctctgtggtagcatttttgattctcttaatgttaaccttattaacaacagaatcaaaaatgctaccactaannnnnnnnnnnnnnnnnnnnnnnnnnnnnnnnnnnnnngaagatcttaaaaacgagatttttgatttaattaaagatatttcaactcagaaatgagtatgtttaagtgtaaatatttctaaatgtattgtacacctttttcttaggttaacgccttttactatttaaagtcaaatactttacgacatttagttgacagaaacttcaactcaatagaatcatacaacagagaagaaatcctagagaatatctaatatctccaatataatcctgttattttattgcttaaaaattaaggcctgaagatatcgtaacctgataacttggagttttatgttttgattagtcaggattttgccatttttacacattacaagaacattgtaaaccaaaaagggaattctacagctgctttgtttggcagatacagggcactaacttcagatgactagatcccaagtctagacctggaatcaaagttctttttcctcttagctcacttcctaagtcttaactgtgctggtttctgcctgagttattctatttggagatgctaccacttgataaccaagatggccctcagcaggctccagaccagtctccagtttaccaatcccaatgcagatggctctgggagagataattccagttggcctggttaggcctggtgaacatctgggaccatttttgtagttgaggatggtgattcttcccaggcgcacacctgtgcacaaagctttggaatgagagttgagtgggtcccactcaaacttcatcaaatgtagggcttctgggacaagaaagtgaggctttgaaaactggacagaagaagaagcagaacatgtcccccaggcatatgaaagttacacgattctcaaaccatatccccgtgttagatcttttctcctgagataaatggaatgtttttttaaaacttatgtacaaaattttaagtgctgtcttcactaaagattttttgttctctcttgaagaagggcaaacaattataagtgaatttgttgagagcattctggtaatttttacccttagtttttaagttcaatggctatgtggcagaaaatacataaatactaaattctaaacaaatgagtgaaaatatnttggaataacctaatcatncaaagcacataagaattgtctattgctatttagtanagtactttgaaatgttttggctatctcattgatttttcctttgact

SEQ ID NO: 251493 - DNA, 484 bp, Homo Sapiens
ggtacctgtctataaggagtcctgcttatcacaatgaatgttctcctgggcagcgttgtgatctttgccaccttcgtgactttatgcaatgcatcatgctatttcatacctaatgagggagttccaggagattcaaccaggaaatgcatggatctcaaaggaaacaaacacccaataaactcggagtggcagactgacaactgtgagacatgcacttgctacgaaacagaaatttcatgttgcacccttgtttctacacctgtgggttatgacaaagacaactgccaaagaatcttcaagaaggaggactgcaagtatatcgtggtggagaagaaggacccaaaaaagacctgttctgtcagtgaatggataatctaatgtgcttctagtaggcacagggcacccaggccaggcctcattctcctctggcctctaatagtcaatgattgtgtagccatgcctatcagtaaaaagatttttgagc

SEQ ID NO: 251494 - DNA, 1035 bp, Homo Sapiens
  misc_feature (244)..(262): n is a, c, g, or t
  misc_feature (548)..(587): n is a, c, g, or t
gagaattcgacctggatgagaccatggatgtggccaggcacgtggaggaactcttacgccgaccaatggacagtcttgactcccgcctctcgccccctgccggtcttttcacctctgccagaggctccctctcatgaatgtttgaatcccacgcttctctttggcaatatgcaatgtgaagcggtcgtgttgtgagtttagtaaggctgtgtacactgacacctttgcaggcatgcatgtgctnnnnnnnnnnnnnnnnnnnccttgtgcatgagctacgcctgcctcccctgtgcagtcctgggatgtggctgcagcagcggtggcctcttttcagatcatggcatccgagtgcgccgagtctgtctctgtcatggtagagaccgagcctctgtcactgcaggcactcaatgcagccagacctattcctcctgggcccctcatctgctcagcagctatttgaatgagatgattcagaaggggaggggagacaggtaacgtctgtaagctgaagtttcactccggagtgagaagctttgccctcctannnnnnnnnnnnnnnnnnnnnnnnnnnnnnnnnnnnnnnntgtgtgggtctatgtaaatgcatctgtcctcatgtgttgatgtaaccgattcatctctcagaagggaggctggggttcattttcgagtagtattttatactttagtgaacgtggactccagactctctgtgaaccctatgagagcgcgtctgggcccggccatgtccttaacacaggggggcccgccggtttgagtggagggtttcttgagctgctctgaattagtccttgcttggctgcttggccttgggcttcattcaagtctatgatgctgttgcccacgtttcccgggatatatattctctcccctccgttgggccccagccttctttgcttgcctctctgtttgtaaccttgtcgacaaagaggtagaaaagattgggtctaggatatggtgggtggacaggggccccgggacttggagggttggtcctcttgcctcctggga

SEQ ID NO: 251495 - DNA, 3063 bp, Homo Sapiens
  misc_feature (2732)..(2772): n is a, c, g, or t
cgcgcgcccccgcgggccccggcgggaggagagtcggcggccggagccgtcaccccgggcggggacccagcgcaggcaactccgcgcggcggcccggccgagggagggagcgagcgggcgggcgggcaagccagacagctgggccggagcagccgcgggcgcccgaggggccgagcgagattgtaaaccatggctgtgtggatacaagctcagcagctccaaggagaagcccttcatcagatgcaagcgttatatggccagcattttcccattgaggtgcggcattatttatcccagtggattgaaagccaagcatgggactcagtagatcttgataatccacaggagaacattaaggccacccagctcctggagggcctggtgcaggagctgcagaagaaggcagagcaccaggtgggggaagatgggtttttactgaagatcaagctggggcactacgccacacagctccagaaaacatatgaccgctgccccatggagctggtccgctgcatccgccacatactgtacaatgaacagaggctggtccgagaagccaacaatggcagctctccagctggaagcctggctgacgccatgtcccagaaacacctccagatcaaccagacatttgaggagctgcgactggtcacgcaggacacagagaatgagctaaaaaaactgcagcagactcaggagtacttcatcatccagtaccaggagagcctgaggatccaagctcagtttgcccagctggcccagctgagcccccaggagcgtctgagccgggagacggccctccagcagaagcaggtgtctctggaggcctggttgcagcgtgaggcacagacactgcagcagtaccgcgtggagctggccgagaagcaccagaagaccctgcagctgctgcggaagcagcagaccatcatcctggatgacgagctgatccagtggaagcggcggcagcagctggccgggaacggcgggccccccgagggcagcctggacgtgctacagtcctggtgtgagaagttggccgagatcatctggcagaaccggcagcagatccgcagggctgagcacctctgccagcagctgcccatccccggcccagtggaggagatgctggccgaggtcaacgccaccatcacggacattatctcagccctggtgaccagcacattcatcattgagaagcagcctcctcaggtcctgaagacccagaccaagtttgcagccaccgtacgcctgctggtgggcgggaagctgaacgtgcacatgaaccccccccaggtgaaggccaccatcatcagtgagcagcaggccaagtctctgctcaaaaacgagaacacccgcaacgagtacagtggcgagatcttgaacaactgctgcgtcatggagtaccaccaagccacaggcacccttagtgcccacttcaggaatatgtccctgaaacgaattaagaggtcagaccgtcgtggggcagagtcggtgacagaagaaaaatttacaatcctgtttgaatcccagttcagtgttggtggaaatgagctggtttttcaagtcaagaccctgtccctgccagtggtggtgatcgttcatggcagccaggacaacaatgcgacggccactgttctctgggacaatgcttttgcagagcctgggcagggtgccatttgccgtgcctgacaaagtgctgtggccacagctgtgtgaggcgctcaacatgaaattcaaggccgaagtgcagagcaaccggggcctgaccaaggagaacctcgtgttcctggcgcagaaactgttcaacaacagcagcagccacctggaggactacagtggcctgtctgtgtcctggtcccagttcaacagggagaatttaccaggacggaattacactttctggcaatggtttgacggtgtgatggaagtgttaaaaaaacatctcaagcctcattggaatgatggggccattttggggtttgtaaacaagcaacaggcccatgacctactcattaacaagccagatgggaccttcctcctgagattcagtgactcagaaattggcggcatcaccattgcttggaagtttgattctcaggaaagaatgttttggaatctgatgccttttaccaccagagacttctccattcggtccctagccgaccgcttgggagacttgaattaccttatctacgtgtttcctgatcggccaaaagatgaagtatactccaaatactacacaccagttccctgcgagtctgctactgctaaagctgttgatggatacgtgaagccacagatcaagcaagtggtccctgagtttgtgaacgcatctgcagatgccgggggcggcagcgccacgtacatggaccaggccccctccccagctgtgtgtccccaggctcactataacatgtacccacagaaccctgactcagtccttgacaccgatggggacttcgatctggaggacacaatggacgtagcgcggcgtgtggaggagctcctgggccggccaatggacagtcagtggatcccgcacgcacaatcgtgaccccgcgacctctccatcttcagcttcttcatcttcaccagaggaatcactcttgtggatgttttaattccatgaatcgcttctcttttgaaacaatactcataatgtgaagtgttaatactagttgtgaccttagtgtttctgtgcatggtggcaccagcgaagggagtgcgagtannnnnnnnnnnnnnnnnnnnnnnnnnnnnnnnnnnnnnnnngcacgttatggtgtttctccctctcagtgtctgagagtttagttgtagcagaggggccaagacagaagctgtggtggttcactactgtgtgcaaaaaggcagtgagtttcgtgaacggctggaagcttggccactgtgtcttaagagtggctggacttttgacattgtggctgtctcgaataagagacggacacggggaggagaaagcacctgtgctccagtgagtcttcggcactctgtcctgcccagccagtgatatataacccggagtgtctcagctttcttctgagg

SEQ ID NO: 251496 - DNA, 788 bp, Homo Sapiens
gcgcggggggggcgggccgccgggcgcgcccccaccacccccgctcgcgaggctgggtggtgttttcggcacgagggacgagatcagtgtggacagtctggacttcaacaagaagatcctgcacacagcctggcaccccgtggacaatgtcattgccgtggctgccaccaataacttgtacatattccaggacaaaatcaactacagacgcgaacgtgaggaccaagtcttgtcttgcatagttaagccggacatttttctgtcagagaaaaggcatcattgtccgctccattaacaacagtgacgcacctgctacttcccttcacagacacaggagaaagccgcctccgctggaggcccggtgtgggtccgcctcggcgaggcgcgagacaggcgctgctgctcacgtggagacgctctcgaagcagagttgacggacactgctcccaaaaggtcattactcagaataaatgtatttatttcagtccgagccttcctttccaatttatagaccaaaaaattaacatccaagagaaaagttattgtcagataccgctctttctccaactttccctctttctctgccatcacacttgggccttcactgcagcgtggtgtggccaccgtccgtgtcctctcggccttcctccgagtccaggtggactctgtggatgtgtggatgtggcccgagcaggctcaggcggccccactcacccacagcatccgccgccacccttcgggtgtgagcgctcaataaaaacaacacactataaagtgtttttaaatcc

SEQ ID NO: 251497 - DNA, 564 bp, Homo Sapiens
ccatcttcaagagtaacagtttccttcagggacttaccattaatcctcctgaaaataacttgcaacatagaaagaaaacaaataattaacactagaatgtagaaaggtaataaagaagactgtgtcaatcgcagaaaaaaatcttgagatggtgcctgcagggattcttgacagaggagccaattcattgtaaaattcttggtcatatttagtccaaattttacttcaaggaatttcagcatgtgcccattttctttgtgtgggacaaacatcttcattataatattcaatgttattgtcagagtacacaccaagtaaaaattaatcacttttattattttagctacaaaacttcctttcttcacattcagctgaaggcacttagcaagcattaaggctgctactaaacttaataaaggagataccaacaaagctggattctcaaactgtagtaaatatcccagaaagagggaaaatatgtagattttataaacttcataaaccttgtcactttgctccactgaaaaggtatctagcaggaatagagatattgcttgaagaaac

SEQ ID NO: 251498 - DNA, 685 bp, Homo Sapiens
gactcactctctttctctctccctctggcatgcatgctgctggtaggagacccccaagtcaacattgcttcagaaatcctttagcactcatttctcaggagaacttatggcttcagaatcacagctcggtttttaagatggacataacctgtacgaccttctgatgggctttcaactttgaactggatgtggacacttttctctcagatgacagaattactccaacctcccctttgcagttgcttcctttccttgaaggtagctgtatcttattttctttaaaaagctttttcttccaaagccacttgccatgccgaccgtcattagcgcatctgtggctccaaggacagcggctgagccccggtccccagggccagttcctcacccggcccagagcaaggccactgaggctgggggtggaaacccaagtggcatctattcagccatcatcagccgcaattttcctattatcggagtgaaagagaagacattcgagcaacttcacaagaaatgtctagaaaagaaagttctttatgtggaccctgagttcccaccggatgagacctctctcttttatagccagaagttcccatccagttcgtctggaagagactccggaaattgcgagaatcccgattatcattgatggagcaacagaatgacatctgtcaggagagctagggac

SEQ ID NO: 251499 - DNA, 417 bp, Homo Sapiens
  misc_feature (27)..(27): n is a, c, g, or t
  misc_feature (296)..(305): n is a, c, g, or t
gtctgctgggtgtgcagctgccacagnactccaaaggcgtagaagtttgtgccaacacacggagtcattctggctctctgctgaggcccctgttttctggcaggtgccctccttggaaactggttttggctctgatcagcggttctttttgcagcaaagcctgcatctgtgttgacttgcaagattttgcgtttattcagggcaaaaactggtcaaaatggttactacatgatttgttcccagaggttttgaaacatttcagtgaaactttttaaaactttgattgcatgatgtannnnnnnnnnagaaagttattgtttgagaataatgtctttttataccaggaaaatagttatcctgaatgacgttgaaaactccccctcccctttattttttttaatcaatacatgtgaaagt

SEQ ID NO: 251500 - DNA, 880 bp, Homo Sapiens
gggcagtgagagagagctggaaaggggcaaccctgagcagcgggcgtgccccatgccctgtgggtttcccctatgtccaatgactgtagacgggctgtcttgccaggcctcagccccgtctaccctaagcctggccccaaaggtttctctttcttcctccttgattttccatcttgacgaaggcattatatagaatcatcttaatcactttcagaatgttagaaagcagcgtattttactaggcatttatatccattgctttcctcagcaaggcatgttactacttttatcatctaaggaaaaaagacaagggaattccagtcaggcattattttcctattactagtgtttgcagaataggtgtaggactatttaagtttagaccttggtttggtagttcttgtttttaataaggggaaaaagataaaataacccctatttttcctgttattgtatttaactaatatattatttctttaaggttactcacttcccctacccctccaaataccttgcattctcaatcaaaaatggaaacaatctgagagacaggaagagtgcaatattaccaagatggatgccagggctcattggggacaatggagggaataccagtggcgctcagagagcaagaggcagggagcggggtgctgaaggaatcctagctgtggaacaagtgggtgggttggtggagtttgatcttgtggcgttctcctctcccccttctttgggaagatgataggggtccctgccagatccacccagaagaaagggattcaggcatggggcccttgacctctaggccccagtccctggagcagaggcaggccctcgggagctgttccttgttttgatttctgttgtggtgcagccagctgct

SEQ ID NO: 251501 - DNA, 664 bp, Homo Sapiens
  misc_feature (641)..(641): n is a, c, g, or t
cccttcggccggggggccggctgctcaagtgggacgggggtcagagctttgtggagggaagaaaaacctggagggggcaggagagtaaaaagaagaaacccaggcagacaggcagttggacacactgaggaagaccccccacgagtgggaaccccctggaaggaacacaccggccccggcccccaggaagggagcacaatggaggccgctcatgctaaaaccacggaggaatgtttggcctattttggggtgagtgagaccacgggcctcaccccggaccaagttaagcggaatctggagaaatacggcctcaatgagctccctgctgaggaagggaagaccctgtgggagctggtgatagagcagtttgaagacctcctggtgcggattctcctcctggccgcatgcatttccttcgtgctggcctggtttgaggaaggtgaagagaccatcactgcctttgttgaaccctttgtcatcctcttgatcctcattgccaatgccatcgtgggggtttggcaggagcggaacgcagagaacgccatcgaggccctgaaggagtatgagccagagatggggaaggtctaccaggctgaccgcaagtcagtgcaaaggatcaaggctcgggacatcgtccctgnggacatcgtggaggtggctgtgg

SEQ ID NO: 251502 - DNA, 348 bp, Homo Sapiens
aaatataatacctcaatacatttaataataaaagtaagctctacaaaaaacctgccccacatatcatacaaaatgtagaggtcagcgcagctcactgaaccacactattcagtcatgtatcaggaagacttgaaattagaaaattatgcaatttctgtggctcatcctcctcctactggtaacagattcgtgctatgtcctgttcttgacatatttgttgcttcgtccattaagttcactctgtgcaatgcctttcttctgaaaatattgcaaacaaataaaaaggaatagaaaccccaagtccaataaacttttgggctgcctgatgagtcacactctcttgaaaat

SEQ ID NO: 251503 - DNA, 851 bp, Homo Sapiens
  misc_feature (717)..(717): n is a, c, g, or t
  misc_feature (770)..(770): n is a, c, g, or t
gggaacgcagagttgggagcaactccagagcctccttcaagatgctgctggtcctgctctcagtggtccttctggctctgagctcagctcagagcacagataatgatgtgaactatgaagactttactttcaccataccagatgtagaggactcaagtcagagaccagatcagggaccccagagacctcctcctgaaggactcctacctagaccccctggtgatagtggtaaccaagatgatggtcctcagcagagaccaccaaaaccaggaggccatcaccgccatcctcccccacctccttttcaaaatcagcaacgaccaccccaacgaggacaccgtcaactctctctaccccgatttccttctgtcagcctgcaggaagcatcatcattcttccggagggacagaccagcaagacatccccaggagcaaccactctggtaatctagaattcagtggcagaaaataaataagaagataacttccttcagaaagccatgacattgaaataatgtggtcataactctttcttcagtataccaataaaatattaatagcagtgcgaaaaaagacaaaccccaatagcccaccaaagccccaaagaatcgcccgtccgtcctgaacacccggcccgggtctcgagcacgacgaaggcgcgccgcaaaacacctccgcctgcggtattcagtcgaacacgcgaaataaagaccggcgnccggaccatccaaagaagtcgggtgggggcgcgcccgcttcgcgcgcgcccanttggaagagaaaagagggtcttgttacgtaaaacacgactttttttcgcccctttcttgtgacccgcccccgcggcctccc

SEQ ID NO: 251504 - DNA, 651 bp, Homo Sapiens
gggcggctagcggcgaggccccttcctgaccttcagggatcggccaccatgtcccaccggaagttttccgcccctcggcacggacacctgggcttcctgccccataagaggagccaccggcaccggggcaaggtgaagacgtggccgcgggatgaccccagccagcccgtgcacctcacggccttcctgggctacaaggcgggcatgacccacaccctgcgggaggtgcaccggccggggctcaaaatttccaaacgggaggaggtggaggcggtgacaattgtagaaacgccgcccctagtggtggtgggcgtggtgggctacgtggccacccctcgaggtctccggagcttcaagaccatctttgcagaacacctcagtgatgagtgccggcgccgattctacaaggactggcacaagagcaagaagaaagccttcaccaaggcctgcaagaggtggcgggacacagacgggaaaaagcagctacagaaggacttcgccgccatgaagaagtactgcaaggtcattcgggtcattgtccacactcagatgaaactgctgcccttccggcagaagaaggcccacatcatggagatccagctgaacggtggcacggtggccgagaaggtggcctgggcccaggcccggctg

SEQ ID NO: 251505 - DNA, 508 bp, Homo Sapiens
tgggctccatctgcctctccatgtccctgcacttcctcatcctatatgttgaccccctgccgatgatcttcaagctccgggccctggacctcacccagtggctcatggtcctcaagatctcactgccagtcatagggctcgacgaaatcctcaagttcgttgctcggaactacctagagggataactgttccccctcctccatctctgagcccgtgtcacagatccagaagatgaaagaaggaagtgagcatccttttgctctgtcctccccaccccgatagtgacacatcttcaggcagagctgtggcacagacccccgtcctgtcccccacacccgtgtcatgtgtctgtttataaacatgtccccttccctttccttccccctcggccacccgcctccctctcaaccttgtaaattccccttcccaaccccgaggggcttgcagggacaaggcgaccgactgcgctgagctgcttatttattgaaaataaacgacggaaaagtcc

SEQ ID NO: 251506 - DNA, 1557 bp, Homo Sapiens
  misc_feature (726)..(726): n is a, c, g, or t
  misc_feature (733)..(747): n is a, c, g, or t
  misc_feature (1204)..(1204): n is a, c, g, or t
  misc_feature (1342)..(1350): n is a, c, g, or t
ctcaaatcaaattgaagagagcagttgaagaagtgaagaaattattggtacctgcagcagaaggagaagacagcctgaagaagatgcagctgatggagcttgcgattctgaatggcacctacagagatgccaacattaaatcaccagcccttgccttttctcttgcagcaacagcccaggctgctccaaggatcattactgggcctgcgccggttctcccaccagctgccctgcgtactcctacgccagctggccctaccataatgcctttgatcagacaaatacagaccgctgtcatgcccggaactcctcacccaactgctgcaatagttcctccagggcccgaagctggtttaatctatacaccctatgagtacccctacacattggcaccagctacatcaatccttgagtatcctattgaacctagtggtgtattaggtgcggtggctactaaagttcgaaggcacgatatgcgtgtccatccttaccaaaggattgtgaccgcagaccgagccgccaccggcaactaacctatgaccttctgacctctgaactcttcacccaatgatgacctgaccatgcctgcctgctgatcagttaactgggtaatcgcctttgcttgcctgtcgtcagtgcagcgagctgaggcacttgtccgttcgtcttaccatctaaccaaacaaaagacaaagaaattgttgtagaaactccaactcaatagcngtaaagnnnnnnnnnnnnnnncctgtttgggtgaaagtggttctagaaactgcactgaatagtagtaaagcaataaggcccaattcatcccacagcactgatcatcttttaatatcccaccctaagcgaacggtaagaaggcctctcttaagaaggggagacagatggtccttaactactcaatgacagaggcagttactgtgagagacttctaggaatctttttcttctcatagcgaagtcaaagctctctctgaatgtactgtgtgatgatgcatcatgcatgaaccttcggtcagggatatcattggtgaagtgatttcaaaaagtattcaaaatttgatatgctgtttagtcactacagtgccctcaaagggcagaagttgcagccttttttatattgcctgccaaaatttgaagtattagaagaaagtgtgccatgagagaaaaacttaaggagttttgaaaagtaatgcaanataacaaaactgcaacactatttttaaaaagataaatatctgaagtaaaattactgaatccttattttacacctaaaaaaatatgagaacaaggtacatgcattatgtgtcacattactgggcaaactgttcaagtannnnnnnnnaaacctccctgtatagaaaaaaatcattaaggatgtaaaagccatgcttgcctatttgctgtatacatgtaatgaaattgtagataaagtgtagtgcattgaaacaaatgaacaaaaagtagatacttttactatacaagggtgctggtgcagaaaaaaatatatatatttttggaaatgtagcattttatactttcaagtgttata

SEQ ID NO: 251507 - DNA, 359 bp, Homo Sapiens
  misc_feature (93)..(93): n is a, c, g, or t
  misc_feature (285)..(302): n is a, c, g, or t
agtattaggtgcggtggctactaaagttcgaaggcacgatatgcgtgtccatccttaccaaaggattgtgaccgcagaccgagccgccaccgnaacttaacctatgaccttctgacctctgaactcttcacccaatgatgacctgaccatgcctgcctgctgatcagttaactggtaatcgcctttgcttgcctgtcgtcagtgcagcgagctgaggcacttgtccgttcgtcttaccatctaaccaaacaaaagacaaagaaattgttgtcctccaactcagcnnnnnnnnnnnnnnnnnncctgtttgggtgaaagtggttctagaaactgcactgaatagtagtaaagcaccaagg

SEQ ID NO: 251508 - DNA, 1465 bp, Homo Sapiens
ggcctgggtggcgaattcggcacgagggctgctattgccccattccaggggagggtgttgattggtgtggggaagctgttgcgtgtctatgacctgggaaagaagaagttactccgaaaatgtgagaataagcatattgccaattatatctctgggatccagactatcggacatagggtaattgtatctgatgtccaagaaagtttcatctgggttcgctacaagcgtaatgaaaaccagcttatcatctttgctgatgatacctacccccgatgggtcactacagccagcctcctggactatgacactgtggctggggcagacaagtttggcaacatatgtgtggtgaggctcccacctaacaccaatgatgaagtagatgaggatcctacaggaaacaaagccctgtgggaccgtggcttgctcaatggggcctcccagaaggcagaggtgatcatgaactaccatgtcggggagacggtgctgtccttgcagaagaccacgctgatccctggaggctcagaatcacttgtctataccaccttgtctggaggaattggcatccttgtgccattcacgtcccatgaggaccatgacttcttccagcatgtggaaatgcacctgcggtctgaacatccccctctctgtgggcgggaccacctcagctttcgctcctactacttccctgtgaagaatgtgattgatggagacctctgtgagcagttcaattccatggaacccaacaaacaaaagaacgtctctgaagaactggaccgaaccccacccgaagtgtccaagaaactcgaggatatccggacccgctacgccttctgagccctcctttcccggtggggcttgccagagactgtgtgttttgtttcccccaccaccatcactgccacctggcttctgccatgtggcaggagggtgactggataattaagactgcattatgaaagtcaacagctctttcccctcagctcttctcctggaatgactggcttcccctcaaattggcactgagatttgctacacttctccccacctggtacatgatacatgaccccaggttccagtgtagaacctgagtcccccattccccaaagccatccctgcattgatatgtcttgactctcctgtctacttttgcacacacccttaatttttaattggttttcttgtaaatacagttttgtacaatgttatctctgtgggaggaaggaggcaggctgtggtgggactgggtagggtatagtatcactcctgagttccactgctctagaatctaaccagaaatagaaacctagtttttaaggtgactggcatccatgtgtcttgttctggagatgaggatgtaggtgggaggtttgaacccaagttagagcaggaagaactgagtagactccttccttccagataccgacttggacttgcggcactctgtggctccccacccccaggtctg

SEQ ID NO: 251509 - DNA, 772 bp, Homo Sapiens
gaagcgtagcctcttctcctttaccaagatggcactcttgtccctgtttcgccacagttcctaccttatgagctcggttttcttatgcttataagagtggaacagcaaaagctggcaggctgacagaggcggcctcaggacggaccttctggctactgaccgttttgctgtggttttcccggattgtgtgtaggtgtgagatcaaccatgagttccgttgcagttttgacccaagagagttttgctgaacaccgaagtgggctggttccgcaacaaatcaaagttgccactctaaattcagaagaggagagcgaccctccaacctacaaggatgccttccctccacttcctgagaaagctgcttgcctggaaagtgcccaggaacccgctggagcctgggggaacaagatccgacccatcaaggcttctgtcatcactcaggtgttccatgtacccctggaggagagaaaatacaaggatatgaaccagtttggagaaggtgaacaagcaaaaatctgccttgagatcatgcagagaactggtgctcacttggagctgtctttggccaaagaccaaggcctctccatcatggtgtcaggaaagctggatgctgccatgaaagctcggaaagacattgttgctagactgcagactcaggcctcagcaactgttgccattcccaaagaacaccatcgctttgttattggcaaaaatggagagaaactgcaagaacttggagctaaaaactgcaaccaaaatccagatcccacgc

SEQ ID NO: 251510 - DNA, 704 bp, Homo Sapiens
  misc_feature (47)..(47): n is a, c, g, or t
gtcagggtatgttcataaacatagttatcaataacatttccaaggtntgttccttcatccaacaggccaacggagtagtttgcatcatcaataaatcctttcatctcagccgtattccacaaagccgaaagtcataaaccaggaaagacaagagacgggccaccaagcctatgtctgggtccttagaatatgcaacaaaatggacaagttgggagatggaacccccctatcatcagctaggttcccaaggtggctcagcgttgaagtcgaactgctctctatacagcacttctcctaggccctctgggtagttgtatacttggtcagaaagttcgccgtgagataacggcccaaagagtcgggtaaagcgtcttctctttttcggcggaatttttaaagagggatgtggttaccttgagcagaaatacccaaggcggcctgggccataggctgcgggaacgacttgggggtaaaagcgcggcaccgacaccagctgtgtgcagcagtggcggcggcggccgaaggagaaatagaacagcgcaggcaaaagaagaaaggcgcgggctgggtgggaagaggattcggactcgtcacactgcagagcagcagagcgagaaaggatgagaagaggcagagaaggcgacggcagaagaaaaaaggaaaaactgcggccgcgatcagagcctgaaagtgtgccccggccg

SEQ ID NO: 251511 - DNA, 834 bp, Homo Sapiens
  misc_feature (733)..(733): n is a, c, g, or t
cggccggggacactttcaggctctgatcgcggccgcagtttttccttttttcttctgccgtcgccttctctgcctcttctcatcctttctcgctctgctgctctgcagtgtgacgagtccgaatcctcttcccacccagcccgcgcctttcttcttttgcctgcgctgttctatttctccttcggccgccgccgccactgctgcacacagctggtgtcggtgccgcgcttttacccccaagtcgttcccgcagcctatggcccaggccgccttgggtatttctgctcaaggtaaccacatccctctttaaaaattccgccgaaaaagagaagacgctttacccgactctttgggccgttatctcacggcgaactttctgaccaagtatacaactacccagagggcctaggagaagtgctgtatagagagcagttcgacttcaacgctgagccaccttgggaacctagctgatgataggggggttccatctcccaacttgtccatggaggtcttcacttcagaaatccaagactcatattcatccagcttggtgtcaagggggctgttgctgccagaattatcttgtgattatttgagagatgtatcagtttcttctgaagtacaatcaactgtagaagcctttgtagcagtttgttgcatattctaaggacccagacatagggcttggtgggcccgtctcttgtctttcctggtttatgactttcggctttgngggatacggctgagatgaaaagatttattgatgatggcaactactcccttggccctgtttggatgaaggaaacaaaccttgggaaatgttattgaataact

SEQ ID NO: 251512 - DNA, 1859 bp, Homo Sapiens
  misc_feature (452)..(462): n is a, c, g, or t
  misc_feature (585)..(651): n is a, c, g, or t
gagacaatttttccagcagtttgttgggtctggagttataaagttgaataagtgacaatcaatcagtgatctcagagaatttatagggtagtaggaagggaagttgtacgagtaaataattatatgatttcacattgaaatggaaatctgtactgtggaggtcagtgggctgggtattgtcaataaccaggataaagtctgtgtggtaggagcccactacctgctttaccatctgctgctactcattctcctgcccctgtcagttcctctctctaatggccagccacttcactgcagctggggggagtctttcttatttattttgttgttactataagtaagagacttacatgttattcaggtatttgaataacattgtttattgtctcttttgaagtaataattgatctctaccaacttattctaaaattaaaacataataaatacactgnnnnnnnnnnncagagatgggagaatgctcaaaaacatgtaagatgtggagccgggaaaagcttctgaaaccaaacaagggactgtaaaaattgcagcacaagcagctaagaaggatgaaaagaaggaagattnnnnnnnnnnnnnnnnnnnnnnnnnnnnnnnnnnnnnnnnnnnnnnnnnnnnnnnnnnnnnnnnnnnccatgtggaaccagcaaagtcaccaaagaaagaacactcagttccaagtgacaaacaagtaaaagcaaaaactgaacgagccaaagaggagattggtgcggtttcaagtaaaaaagctgtacctggaaagaaggaagagaaaacaaccaagacagtggagcaagaaattagaaaagaaaaatctgggaagacttcttcaattctgaaagataaagaacctattaaagggaaagaagagaaagttccagcttccctaaaggaaaaagaacctgaaactaaaaaagatgaaaagatgtccaaagcaggcaaagaagtcaagcctaaacctccacaactacaaggaaaaaaggaagagaagccagagccccaaattaaaaaagaagcaaaaccagctatatctgaaaaagtgcaaatacacaaacaagacatagtgaaaccagaaaagactgtttctcatggtaaaccagaagaaaaagttctcaagcaggtaaaagctgtcacaatagaaaaaacagccaagcccaaaccaacaaaaaaagctgaacatcgagaaagagaacctccatctataaaaacagacaaaccaaaaccaactccaaaaggaacatcagaagtcacagaatcaggaaagaagaaaactgaaatatctgaaaaagaaagtaaagaaaaagcagacatgaagcatcttagagaagaaaaagtctcaacaagaaaagaaagtcttcaattacacaatgtgacaaaagcagaaaaacctgcaagagtatcaaaagatgttgaagatgtaccagcttcaaagaaagctaaagaaggaactgaagatgtgtctcccacaaagcagaaaagtcccatcagtttcttccagtgtgtctacttggatgggtacaatggctatggatttcagtttcctttcactcctgcagaccgccctggagagagctctggtcaagcaaattctccaggacagaagcaacaaggacagtaaacacacatgtatgacccttacaagtgctttaagattttaaaaatgtgatgttttgtccacaatagttcaggcaattaagaatatgcaacccagagaatttctgtgaaaacattttgctctttggcctggtgtggacagaaagggtggccaaatggattgagtgatgagcagacatgtttaagggtctaagtctcaagaatctgttatgtgtgtttgctgcggt

SEQ ID NO: 251513 - DNA, 611 bp, Homo Sapiens
  misc_feature (62)..(62): n is a, c, g, or t
  misc_feature (214)..(214): n is a, c, g, or t
tacggggccgggggaagaaaacaggaaaagaaagaaaaacatggggaaccagcaaagtcacncaaagaaagaacactcagttccaagtgacaaacaagtaaaagcaaaaactgaacgagccaaagaggagattggtgcggtttcaagtaaaaaagctgtacctggaaagaaggaagagaaaacaaccaagacagtggagcaaggtaaaaaaaantgaaggaggttgacattatcttctttagaaagacaacaacatgcggaggaaagcactggattcagacaggcggaagacaataacctttaagtctattactctttatcactgtccttgcatgtttttctgtgccagggagaatgtgagacagcaatctgggttggtctttcttttgtgtaactgaactttgaatatcagttccgaacagggaaactccacaaactgtttaattacatcaggggacatgctgaagattgctgggaataagacaatgatccagggtaactggtagacatattcctatttgatttgtggttttaacaccaccttactgattataatttgaaaaataaagatggcccaatcctatacatgcaaaaactatttctgttgcttg

SEQ ID NO: 251514 - DNA, 1231 bp, Homo Sapiens
  misc_feature (187)..(187): n is a, c, g, or t
  misc_feature (189)..(194): n is a, c, g, or t
tagggacccggtgaggggtgaattcccaaaggtttatgtgttccctggggtgtgaccccccccgttaaagggttaattgtttttttgtaaagggagccccttttcggattggcccgcccccttaggatggggaatccacccacttttcaggaaaattatacatgtgcatcttttggaggaaagtagntnnnnnntcataattggcagatgtgttagcatgctgttcttccttcattggaatatttgtaatagtagttgaagccaagtcaaaatgttgctgtactaaaatattcaatttggtagcaagatgccgtcctgcacgaacactatgaacttcactggttaaaaccggggacaactcttttttagaacgatcagatacaaggctgtcttcaccaactgggtaggtgtggatcaagaccaactcacatttttgaatctgcatgagatgatcggaattggcagcaaagctggttatgttcaggaatcgtttcctggacacagtcttcaagcattcgcacatgactatcactttttgcattagtaatacagattattcgtcctctatttccaacacgttctgcattctccatgagtagagtacgagcctcatgttggtattcagtaattttgcggagagtttccactgctgcaacaaggccatgcagaatactgcagcactctggatctgcccgaggattaggaggcccaacagcggctaatgctgccattagctcctgtaaattttggtcttcttgagtccaagaatttaaaaaatgtgctccagagtcactcacaataaaattcaccagctttttgaaaggaaatatatcatacattattctacaatattccatggaagattctactgagcaagtccacaatgatttagatatgggggccaaaggaatgattccttgggttctattcttcaccagcatatcaaactcgacatgctgcctgcaagattctgccatataagggcagtgatccacaacaaacactgttttatgagattcagaaaaaatcttcattttgttttaactttcgtgcctggtcctgcagtgaaaacgaacagaggctatggaccacagcctctctggaaaaggctgctggctgggcggggagagtcagcgcacagtcgggagtgtctggtgccacagacaggggactatgctttccccgatcatctcctagcacaccggtccttcccaggcttcctaagagcccc

SEQ ID NO: 251515 - DNA, 497 bp, Homo Sapiens
cgggagaggtgggcgctagaagatgcagcccaggatgtggcaatcaatgacactattggggtttcccaggatggattggtcagggggagaaaggaaaaggcaaaacactccaggacctctcccggatctgtctcctcctctagccagcagtatggacagctggacccctgaacttcctctcctcttacctgggcagagtgttgtctctccccaaatttataaaaactaaaatgcattccattcctctgaaagcaaaacaaattcataattgagtgatattaaatagagaggttttcggaagcagatctgtgaatatgaaatacatgtgcatatttcattccccaggcagacattttttagaaatcaatacatgccccaatattggaaagacttgttcttccacggtgactacagtacatgctgaagcgtgccgtttcagccctcatttaattcaatttgtaagtagcgcagcagcctctgtgggggaggataggctg

SEQ ID NO: 251516 - DNA, 439 bp, Homo Sapiens
acctatttaaaaaagaacatctcctgtgtaaggagatggaagtataataatattgtttcacttggaaaattaggtggtaatgtcaagaattctgtgataggttaaagtaaacaacaaccacactacactgtctgcgataggttaaagtaaacaacaattacactacactgtaagacagaatatgaatgtgctttgataagggtacagtgtgctaagaagggagctatcatatccagttgaagagattagaaaggtttcaaggtttcatgtttgcatttgaaaagaacaacgaattaatgaatatcgcccatagagatgtacatatccctgggtgcaagacagaaagtaccctagaattgggaaaatttatgaacttctttttttcctgtatataccttgatcagaaatagggaagtcgtccgggcgcagtggctcatgc

SEQ ID NO: 251517 - DNA, 717 bp, Homo Sapiens
  misc_feature (296)..(306): n is a, c, g, or t
  misc_feature (643)..(668): n is a, c, g, or t
ggttctatagatattttttaaggacctactcatttggggatgtcagtggtgttttgcaagatcatctgaggaacaggaaagcatttgaaatctgaaaaggataactgtggcggttttcacagtggaaggaaactatatcggcaaagaggcagatgactgaataaagtagttggctcaaagaagatgcacagtctgctatttttttctctgaatgaagactgtttaatggaagctgtattcatgtggagatcaaaggaaacactggaatgatacactactatgtttttccccccccnnnnnnnnnnnaaagaaaacaaaaagcctgaagcagtaatttgagctcaaatgccttctaattccttcacagcctgcttgttctactaggattctccactaacaccatttctgcctggtgcctgtgcccttttgctggagcagccacagacaactgcctgatggagaaagaatgaacgctctgccttgcttatgctatcgatgggaataaagctaactgtgtttcttctattatatgggaaacctggattaatcaagctgtattctagtaccaagagtcgtattgtctcttgtggtctgactcatcacatgtaaacgtactgcagctttgctattaatgcagagtggnnnnnnnnnnnnnnnnnnnnnnnnnngcccctttcccaaacactgaaagaattgttaacctctgagcttcatttt

SEQ ID NO: 251518 - DNA, 1203 bp, Homo Sapiens
  misc_feature (632)..(646): n is a, c, g, or t
ccctagggaaaagagggccactaggggaaaacaatggttgcagtgcactgcagaatgaccaatggcacctacttccagagttttccttcaactaaaaagagatggcattttcttatgattcagtaaccgcattacttacatcaacattatggttgctatagacaagcctaggtagctagcctctatttacatcatcccactaagggtatccaaacccaagtaaccaaattttagaacactatcagatagtttcctgcattcaagacttcaactcataactctttgaactcttattagatataaggaatctaagatgtattataggcattcctataattagccatatttacaagatacaaaatatttggataaaaagcaaatttcatcacatcgtataatgtacagataaggtttataaagtaaattaatttatttttagcaccatatatacaatccaaacactgcaaattaatttcttttcaaactcaaaagatagttttcattaatcatgatggcacatcctctctctcaataaacgcaaatgctgttttatgggctgtgtggtaatagtttaacatttagtaattgattatataaaattatgttctcaagactaggctgcatttcctttnnnnnnnnnnnnnnncctcaggttaaaaattagccaaaaatttgtgattactatcacaaataatccaagatttaaataaccaagagcctccagaggcccctattcttccttttgccctgtctaaaatccaatgaaatatattaagtgttaaactggtatggagaggtggaactaaattctttgaaacacaaggtggagtatcactttttacttaaactttgagtcctttacatttataactgctattcaaaaaaaattagacaaagacatctagatttagattaacgtgatcaaagggattattgtggatcattaaaggaaacttaacattaagccttcatgtaccaaatactaatatttaaattaatttcaaaatctataaaggtatgtaattattaatttgcaaaggagaaaactgaggctcagaagttgcacaaaaccatgaactagtggaactgagctttacaaaccaaggctgtcctctactatacattatttctcctcagtacacaataataaattggttcaaaattatctagacctttaaaaagtatataatggaaagtgctttt

SEQ ID NO: 251519 - DNA, 1324 bp, Homo Sapiens
  misc_feature (799)..(925): n is a, c, g, or t
  misc_feature (933)..(948): n is a, c, g, or t
  misc_feature (988)..(1042): n is a, c, g, or t
  misc_feature (1058)..(1153): n is a, c, g, or t
  misc_feature (1168)..(1178): n is a, c, g, or t
gaaactatctgatagtgttctaaaatttggttacttgggtttggatacccttagtgggatgatgtaaatagaggctagctacctaggcttgtctatagcaaccataatgttgatgtaagtaatgcggttactgaatcataagaaaatgccatctctttttagttgaaggaaaactctggaagtaggtgccattggtcattctgcagtgcactgcaaccattgtttcccctagtgccctcttttccctagggcattgctctcctattcccacgccttaacacagctctatacctagaagcagccagcccaggcatgcagtcacatttaatcacatcccccttctagagtgcttcaaaatgatgtagtccctcaacttggctaaagaatctcaatctcttgaaatttatttttttaatgtcatattcatctggtaaatatctactgtttgccaggcatttaagaatatggcaaagaacataaaagatggtgtcaccagattttggtcaccaatgagtacccgacccgttgccatgattaagagagaatgctttctattggagtttcaggaaatataatttgagaatactttaaagggaagtggaagtataagtgaatgatatttttcttttacatgtaaacaatgaagttatttcaaagttaagttttaaacaaaatacatgaagtagtgtctgccatacatgttaatattctacattcttgcttccttaaattaatatgtttgtgtgtatatatgtgcctcacacctgaattgaaaattaaagactggtttaaaagtggnnnnnnnnnnnnnnnnnnnnnnnnnnnnnnnnnnnnnnnnnnnnnnnnnnnnnnnnnnnnnnnnnnnnnnnnnnnnnnnnnnnnnnnnnnnnnnnnnnnnnnnnnnnnnnnnnnnnnnnnnnnnnnncctttggnnnnnnnnnnnnnnnnaaaaaattttttaaaacctttttttgggccccgggccccnnnnnnnnnnnnnnnnnnnnnnnnnnnnnnnnnnnnnnnnnnnnnnnnnnnnnnngggtttgatttccccnnnnnnnnnnnnnnnnnnnnnnnnnnnnnnnnnnnnnnnnnnnnnnnnnnnnnnnnnnnnnnnnnnnnnnnnnnnnnnnnnnnnnnnnnnnnnnnnctcaaaataaatttnnnnnnnnnnntgccctttttggaaaaaggtgtgaaattttaaaaactttcgcccgagagggaaccccctccaaggggttttaaaaactttattcccccggggaaaaccacctttgggccctttggaaaaaaatttcccccggggaaaaacgggggg

SEQ ID NO: 251520 - DNA, 721 bp, Homo Sapiens
caaggaggagtcattgcagagggcacagatggtggccagctccaccagcccgtcatactgccctggccggactggcttatcattcttcaagacctctccctctggagcgtaagtggagccggtgatggagaactcattcaggaggcagatgtccccatccaccttgtcaatgataaacatcttgcagacagacatctggttggtggtgagggtgcctgtcttgtcggaacagatgacagaggtgcagcccagggtctctacggagggcaagcttcttacaatggcattcttctttgccatccgacgggtacccagggccaggcaggtggtgatgactgcaggaagaccttcggggatggcagccacagccaaggccacggcaatcttaaagtagtagatggccccgcggaaccaggagcccccatggacggggtcgttgaagtggccaatgttgataagccagacagccacacagatgagggagatgaccttggagagctgctccccaaactcatccagcttctgctgcaagggggtcttgtcctgttctgtggcagccatttggtctcggatcttcccaatctcggtgcccacaccggtggtggccacgatgcccaaggccttgccggctgcaatgttggtgcccgagaaaagcatgttcttcttgtcctggttgacagctcgggggtcaggaacgggctccgtgtgtttgatgacagat

SEQ ID NO: 251521 - DNA, 689 bp, Homo Sapiens
gaagaagtagagattcttgtacataatgcagcagaagaactttggaaatggaaagaattaggccacgatcttcatagcatcagtattcctacaaaactgcttggctgtgccagtaaaggtctagatatagaaagcactagtaaaagggtctacaaacaggcggtttttgatttaacaaaagagatttttgaggaaatatttgctgaggatcccaacttaaatcaacctgtctggatgaagccatgtagaatcaactctagttatttccgacgagtgaaaaatccaaataaccttgatgaaatcaagagcttcatagcaagtgaagtactcaagttgttcagtcttaaaaaggagccaaaccacaaaacagattggcagaaaatgatgaaatttggaagaaagaaaagagaccgagtggatcatatcctggttcaggagctccatgaggaggaggcacagtgggtgaactatgatgaggatgagttgtgtgtgaaaatgcagctagccgacgggatctttgagaccctgatcaaagatactattgatgttctgaatcagatcagtgaaaagcagggggagaatgctacttgtgtgacatcttgcaaataaatcgaacgctgagtgctaatcattgcttctcacaactattacctgcatctgaaaaaaatctatagactccagctgctaca

SEQ ID NO: 251522 - DNA, 1235 bp, Homo Sapiens
ggctgaagctttttttcttgctcctctatttcctggtcctgttcgtcctggccaggttttttgaggccattgtgtggtatgaaactggcatctttgccacccagctggtggatccggtggcgctgagcttcaagaagctgaagaccattttggagtgccgggggttgggctactcagggttgcccgagaagaaggatgtccgggagctggtggaaaagtcaggtgacttgatggagggtgagctctattctgctctcaaggaagaagaagcatccgaatcggtttctagtaccaatttcagtggtgaaatgcacttctatgagcttgtggaagacacaaaagatggcatctggctggttcaggtcatagcaaatgacagaagtcccttggtgggcaaaattcactgggagaaaatggttaaaaaggtgtcaagatttggaatacgtacaggcacatttaactgttccagtgatcccagatattgcaggagaagaggctgggtccgatccacactcattatgtctgttccacaaacaagtacttcaaaagggaaagtcatgcttaaagaatacagtggacgcaagattgaagtagagcacatttttaaatggataactgctcatgcagcttctcggatcaaaaccatttataatgctgaacacttgaaagaagaatggaataaaagtgatcagtattggttaaaaatatacctatttgcaaaccttgaccagcccccagctttcttctctgcactaagtataaagtttactggaagagttgagtttatttttgttaatgtagaaaattgggacaacaagagttatatgacagatattggcatatataatatgccatcatacatacttagaactcctgaaggaatttacaggtatggaaaccacacaggcgaatttatatcccttcaggccatggattcatttttgcgctcattacaacccgaggtaaatgatctgtttgttttgagcttggttctagttaatcttatggcttggatggacttatttattacacaggagctaccataaagcgatttgtggttctcataagcactttaaggacatataatctcctattaatatttccctgcctacctgtgttgggcctttttacagctacctaacctataatagctttaatgaatatagcttaaattggttgagatattcccatacaacccccctggctttcatgggaagggccaaactggaatggtt

SEQ ID NO: 251523 - DNA, 1478 bp, Homo Sapiens
  misc_feature (7)..(7): n is a, c, g, or t
  misc_feature (19)..(19): n is a, c, g, or t
  misc_feature (28)..(28): n is a, c, g, or t
  misc_feature (35)..(35): n is a, c, g, or t
  misc_feature (38)..(38): n is a, c, g, or t
  misc_feature (49)..(49): n is a, c, g, or t
  misc_feature (64)..(64): n is a, c, g, or t
  misc_feature (70)..(70): n is a, c, g, or t
  misc_feature (72)..(72): n is a, c, g, or t
  misc_feature (91)..(91): n is a, c, g, or t
  misc_feature (108)..(108): n is a, c, g, or t
  misc_feature (113)..(113): n is a, c, g, or t
  misc_feature (129)..(129): n is a, c, g, or t
  misc_feature (134)..(134): n is a, c, g, or t
  misc_feature (137)..(137): n is a, c, g, or t
  misc_feature (158)..(158): n is a, c, g, or t
  misc_feature (162)..(175): n is a, c, g, or t
  misc_feature (325)..(325): n is a, c, g, or t
  misc_feature (331)..(331): n is a, c, g, or t
  misc_feature (385)..(386): n is a, c, g, or t
  misc_feature (404)..(404): n is a, c, g, or t
  misc_feature (408)..(408): n is a, c, g, or t
  misc_feature (1158)..(1171): n is a, c, g, or t
ggacctngtagtgaccttnaggaagcangctactngancgcgtcgaagntatttgccattcggnttttgntntctccagtaggcctttttnttttgcctgagatcagngggangtttactattctgatncctantcncagggtcagtgtcagatggangctnnnnnnnnnnnnnnaggctagcatgcgtggcgccctgggtatttctgtcagtccccatggcaagcagtgatttagtaaaacaccccagagtcagggaagccaaccaccttgaaacctttagaacatctctgctttggagaaagacccagagatcaggcagaggngcagantcaatcattactcataacctttgagagctggcaaatgggaggagtgttagtctnngttttggaattggaccantctngcaaccaaaaggacttagagcagtttgctcataaagacatcctttattataaaaggaagtatttaaaggatgatagagaccatcagatagaagcagggaaggtagataacttttaggaccttgatgtgaggaaaagataaaatttaaacaataaatttgccacttagattttctagcagcaaagtccgaaaagatagttatatacaaaattctgttttctgaaaacaaaattgtgattcaccttcagaattggccattttttttgtgagtttccttgcatcaaggacactgagaaacacagtcattgtcttaggtgttctatgggaggaagtgaatagagcctttaggaacttcctggtcaagcttatggtgcttattttgatctgggccacttccctccttccagtcatgagtaatcatcaaggagcaagttggagtgtttcaggtgtatattttgtagaacccaaaagattggagccttaacaataaacatcagcactaagtgacctgttcctccttttttaaatagcagctttattgagatataatttacatacccataatttacatacctgtttaaagtatacaattcagtggatttagtatgttcacagtgttgcacatccaccaccatttctaatttcctgaacatttttcaccacctcaaaaagaaaccacacacccattggcatgactccccattcccttgctcccagccccaggcaaccactaacatctgtctctaaagannnnnnnnnnnnnnctggacagttctcataagtggaatcactcagtattatggccttttgtgtctggcttctttcatttcatgtgatgttttcaagattcattcatgctgtagcatgtatccatggtatggatatatcacattttgcttatccttttatcagttgatggacagttgggttgtttctacaaaaaggctattatgagtaatgcagccaagaacatttgtgtaccagtttttgagttttcagttgtttgagtttcagatgttttcagttcatttgggtatataccaaggagtggaattgctggttcacatggta

SEQ ID NO: 251524 - DNA, 1597 bp, Homo Sapiens
  misc_feature (151)..(151): n is a, c, g, or t
  misc_feature (155)..(155): n is a, c, g, or t
  misc_feature (185)..(186): n is a, c, g, or t
  misc_feature (1560)..(1560): n is a, c, g, or t
  misc_feature (1565)..(1565): n is a, c, g, or t
ccggcttattgaaattaaattcggctccacttaaggggggcccggcaaatttaaccctttgtacaagaaaggtgggttcaggaaacaggtatggcccagggccatttcattacctctttttccccacccgacatagaatgccttggggtgngggngtttttttgtgtgtgtgggggggttttttnntaaccggcaacatgaattctgtattgacatttggttcttaataataacatccaaaatgcgttctgttcttatagcactgcatctggtcgaggatatatgttgctgaaggttgccggagtctcccttgggaagtggagaggagctggtggtgaaaggggaggagctgatggtgaaagagacacactgatttctctttgggagctatctgcagctaggtggagagctgcagcaggtgtcttggctctgataaggggtggggaggctatcccagccggtctgcaaacacatgagcagaatcccttgcccccagcctgcaagaacatggttgctgatggggacagcggtggcagctccaggagaatggagggaagcctgggatgttacattcttgaggccttcacaggtacatgtcatcgtagcccggcggggggagatggtctgggttaggtccgggtgggctggtcccaatgggtccaaaggggtcaaagcgagctcctgggggcacagcgcctggaggaagtcggttcgggaggcctgaggaagggtcaataagtgctcttgggaagccagatctcaggggatccacaatcatgccacctctccgaggcccaaaagggtctaagtcttctcccccgacaacaaacgggcccaggggatcacaccagggaggctgccgactggtgtgtgggtggtgtggaggaatccggagtgggtccacctctctggcggtagcaggggggaactcccggtggggactgcttacattagccttttcccactgctcatggataggtgtgatgattccagacacaatacgagaccgaagctcctcactgttcttgtaggtcctgtggaagtcacccaggtgttctgcatcgatataatcatccaagttcagggtcaagtctgccacttgctgtgagccatattccagcacattgaggatcatgctgctctccacggtgatggctttcacaaggagctttctggacccatccttatactcataccggaggacatacaggtctttattgttgttccacccagctggcagcagttctgacttcttatcattgggacccggctggtcaccgacacccaagccgcagtaaccgtgtgtcaccacttcccaatgcaagaagcagacgagcgcgtcctgcctgcaggtgatggccggcgctgccgatgcgaacagtacctccaggcccgccatgagcgcccgcgacttcggcgtctggaggaaagaagggggcgggggtagtgcagtgagccggctccgcggccggggtagctataactccgcttccctcttgcgctggttcttgccgagtccaccctcgtgccgaattcgccacccaggcctcgcggcggggnggggntaggggggtttgggtcacttacccgcctccac

SEQ ID NO: 251525 - DNA, 1089 bp, Homo Sapiens
  misc_feature (57)..(57): n is a, c, g, or t
  misc_feature (64)..(64): n is a, c, g, or t
  misc_feature (70)..(70): n is a, c, g, or t
  misc_feature (96)..(96): n is a, c, g, or t
  misc_feature (120)..(120): n is a, c, g, or t
tcccttcccctccttaaggcccttgtcccaaaaccctatgaaaatggaggtgccttncctgctnctaaancattttgaatgtctcattctgtgttnggtaacccctataaactggggcanaggaaaagaatgatggttcaaggccatacttcccttgaaccttgtgtggttcttgcctaactctgtggttttgggaccccatggggccccagacagagcacaggagcatgggctgcctctgagtgtggtgttgaacttcgggaggagcagggagccctgcaccttgtgtcctggcccacctgacctttggtgttctccggatccttttcagcccgaggcctgacagacgcgggcagtgatgagccctgttctggagtggaaagagcacgatagagcaccaggctaagaggcacgagatcaaggcggtagtcacttccgctctgcagctagcatttcaaccatatgtggatcctttcatttctcagctccctggattccttcccctaaattaggacctattatttacctgtaggtaagcaagctactgtagctcttctgaggtatctgccaggctgttttctgtagcctcagattgcctatctgcttagcctgagaacaggtagatgaaaactaaactgatgcctaggcccagggtcagtctcagatggaagctgggcctgggtggggaggctagcatgcgtggctccctggggtatttctgtcagtccccatgggcaagcagttgatttagtaaaacaccccagagtcagggaagccaaccaccttgaaacctttagaacatctctgctttggagaaagacccagagatcaggcagaggtgcagattcaatcattactcataacctttgagagatggcaaactgggaggagtgttagtctttgttttggaattggaccattcttgcaaccaaaaggacttagagcagtttgctcataaagacatccttttattataaaagggaagtatttaaaaggatgataagagaccatcagaatagaagcacgggaaaggtaaaattaacttttacggaccttggatggtgaggaaaaagattaaaattttaaacc

SEQ ID NO: 251526 - DNA, 749 bp, Homo Sapiens
tctgatagaaggtgacgggtccagctagtttggcccttcctcttcctccacccctccttccttgaacgcagacatgattcttggggatacagcagccatcttgggaccatgaagtaacgagcactgagattaaggcaaaaggatccaagacgtgacccctaccttcgtggagttgttgaaccaataccattagccacccatctccagaatccatgctatgtggaaaaacaatcttctgtttgtttaaaccactgcaatcaaggttttcctttccttgcagctgaatgtagtccatataagaggttacatagacaaaaatgcagagggatccttgtccttgggaatttggagccggcagcacgtggctcttcaagcccatctctgttctccttctcggtaatgcttcaagggtaaggccatgatcctattgtcacagaggtgggaactggggctcccacactgtacagtgagtccaaggccttgtagctggtgagaggggtgcccagagtcagaccctctcgccaggtgcaaagagaatgcacccctgctatcctcttctgcatggcccagcctgctggaggccaggtgtgtcttctgggctcttgaaggtggcagcaggtgccaaggaggctgctactgcaagtctggtgtggatgctcccaggtacacccttaggtctgagagagtggactggacaagcttgcgggcgacgcgtggtcgacatatcccgaattccggaccgtaccacc

SEQ ID NO: 251527 - DNA, 561 bp, Homo Sapiens
  misc_feature (293)..(482): n is a, c, g, or t
  misc_feature (489)..(513): n is a, c, g, or t
aatgtgtacataatctccccttgatgctcttcaacagagacaaggttcttgtctgcagatcagatagatcacagtattactaaaaaaccataacagcaaatttggaagtacaatcaatttaaggagaagcaaaaggaaaagacttagaaatgggacattattgtctacatctagaggatacatacacctgaaagcttaagaaagcccttatcttaggaacttgaagctgaggataatctcgagttcacttagtgccagtcactttagttttttaaaaaatttaacttaaaccnnnnnnnnnnnnnnnnnnnnnnnnnnnnnnnnnnnnnnnnnnnnnnnnnnnnnnnnnnnnnnnnnnnnnnnnnnnnnnnnnnnnnnnnnnnnnnnnnnnnnnnnnnnnnnnnnnnnnnnnnnnnnnnnnnnnnnnnnnnnnnnnnnnnnnnnnnnnnnnnnnnnnnnnnnnnnnnnnnnnnnnnnnnnnntgtctcnnnnnnnnnnnnnnnnnnnnnnnnntttaaactcttcttgtgtctttttccttgtaaaacattaactaaaagt

SEQ ID NO: 251528 - DNA, 1664 bp, Homo Sapiens
  misc_feature (24)..(24): n is a, c, g, or t
  misc_feature (29)..(29): n is a, c, g, or t
  misc_feature (506)..(506): n is a, c, g, or t
cccgggatgccccggcggggaacnggcanagtccgcgccctgcgtccgcgaccaggaggatcggaccttcgccttcgctgtcgccgccgccgccgcccgcggccgtcggggctattagtgaaagatggtggatcgcttggcaaacagtgaagcaaatactagacgtataagtatagtggaaaactgttttggagcagctggtcaacctttaactatacctggacgagttcttattggagaaggagtattgactaagttgtgcaggaaaaagcccaaagcaaggcagtttttcttgtttaatgatattcttgtatatggcaatattgtcatccagaagaaaaaatataacaaacaacatattattcccctggaaaatgtcactattgattccatcaaagatgagggagacttaaggaatggatggctaatcaagacaccaactaaatcttttgcagtttatgctgccactgctacggagaaatcagaatggatgaatcatataaatnaatgtgttactgatttactctccaaaagtgggaagacacccagtaatgaacatgctgctgtctgggttcctgactctgaggcaactgtatgtatgcgttgtcagaaagcaaaattcacacctgttaatcgtcgccaccattgccgcaaatgtggttttgttgtctgtgggccctgctctgaaaagagatttcttcttcccagccagtcctctaagcctgtgcggatttgtgacttctgctatgacctgctttctgctggggacatggccacatgccagcctgctagatcagactcttacagccagtcattgaagtctcctttaaatgatatgtctgatgatgatgacgatgatgatagcagtgactaaggacacatttgggagtatttaatcaggtgtggctatctgagaaatcaactttgggggaaatgtaagattctgagctctctctctgttttgttctagccatgaatttgcctgagaaacttgtaacctatgtgcctcaatatattccatagaaagtaggtccccctgccttctcccactcctcacactcttctacagggataggcttttgcaaatatatcagataaattttttgtttcttgtttatttttaggttattttcttggaaggttgggaaaagatgtttgttttaacaggtcatgtactacgttgttgttttcatttctgttataagtaaaactaaaagcacagaatggtgggaaaggggctataatgtggttcattaataatgttagcagcttttttctaaccatcctgtctaatggttaagacaccagtaacaaaaacacatgatttggaaatactttggctttttcatatacctagtggtgccttatcataatagcactgttacatgaaataagcccctaccttcttactttctggtttgttgaaaaaatacactggtgctctttgaagtgataaaatgagtgtttatgaatgggtgtaattaggaaatacttctcatctgacagctacaaataactaagttttggaggtatttttcactctatatgaataaatatttttccctaaaatagttgggaattatattttttgttttatatagggccccaaaattataggttgtccaaatatattatttttaaattttaataaaaaggttgtcccg

SEQ ID NO: 251529 - DNA, 663 bp, Homo Sapiens
  misc_feature (244)..(252): n is a, c, g, or t
ggtagcggacccaccttcctaaccaggaataaagatttcgacatcttcagagtccctattttctttagccaccattttcattcatttttagcttagtcagaaagttggtggtaatcactggactgtagtttaatcactggactattatcactccccacatttcaagttcctttatatttgttagttctcttgaccaaaagacatttacagtattatgctaaaggccttagtaaatttttacttnnnnnnnnntacctggtggttttgttcttggagtctgcataaagccactgctcaaattatatctttcccaagaaaaatcctagaaaccattaaaccatccatataactcctattatcataacttttgctcattaatcctattctcagacaatgtgatgggtgttatgccttcatgggtggtggcctctgttttccatttccccaggtagaatgctgagtaggctaccccaaagggcagggtggaatgcggtggttctgcaaggtcatctgactagaagttcctctcatgctttggatcttttatggtgggaactttggagaaaccaaacatccacattccttatcaatgagaaattaattcatgagtaacttaacggtttagtactgaaaacatgttactggagtttttggttcatctgc

SEQ ID NO: 251530 - DNA, 215 bp, Homo Sapiens
ctgtttgttacacgaaatgtgcaaaatggttttcttattcctattatctcaacaggtaatattcttatattcttttatttgataaagtataggctacaatattgaaagacagcataatgtcaaagatacctgttgtcctgtgaaaatacttacctaatttttagtcttctacatcaatgataataataagagctcacactaataaaacatttagt

SEQ ID NO: 251531 - DNA, 856 bp, Homo Sapiens
  misc_feature (206)..(215): n is a, c, g, or t
aaaacctgagagcacaaacattgatactgaaaaaacccccaaaaagtctcgtgtgaggttcagtaatatcatggagattcgacagcttccgtcaagtcatgcattggaagcaaagttgtctcgcatgtcatatcctgtgaaagaacaagaatccatactgaaaactgtggggaaacttactgcaactcaagtagcgaaaattagcnnnnnnnnnngctttgtgtggtttttggcaaatttgtcatatcaagaagcactttcagacacacaagttgctatagttaatattttatcttcaacttccggactttttaccttaatccttgctgcagtatttccaagtaacagtggagatagatttaccctttctaaactattagctgtaattttaagcattggaggcgttgtactggtaaacctggcagggtctgaaaaacctgctggaagagacacagtaggttccatttggtctcttgctggagccatgctctatgctgtctatattgttatgattaagagaaaagtagatagagaagacaagttggatattccaatgttctttggttttgtaggtttgtttaatctgctgctcttatggccaggtttctttttacttcattatactggatttgaggacttcgagtttcccaataaagtagtattaatgtgcattatcattaatggccttattggaacagtactctcagagttcctgtggttgtggggctgctttcttacctcatcattgataggcacacttgcactaagccttacaatacctctgtccataatagctgacatgtgtatgcaaaaggtgcagttttcttgggtattttttgcaggagctatccctgga

SEQ ID NO: 251532 - DNA, 580 bp, Homo Sapiens
  misc_feature (40)..(40): n is a, c, g, or t
gctacagcaatggtcagcttggaaccacagtgaagaagcnagcactgatgaccaaagagaagatactcgtattaagcctatttataatctatatgcaatttcgtgccattcaggaattctgggtgggggccattacgtcacttatgccaaaaacccaaactgcaagtggtactgttacaatgacagcagctgtaaggaacttcacccggatgaaattgacaccgactctgcctacattcttttctatgagcagcaggggatagactatgcacaatttctgccaaagactgatggcaaaaagatggcagacacaagcagtatggatgaagactttgagtctgattacaaaaagtactgtgtgttacagtaaagctaccactctggctgctagacagcttggcggtgagggagatgactccttgtagctgacatttggcaaaagcgtcactgaaaggcaagctaaatgtagttattttatcctgtggccctgaagcacaaaataaaaattctaattaaaatagttaactttaagagtagtaatcattttattttgaagtctcatacaagctctccgatagag

SEQ ID NO: 251533 - DNA, 432 bp, Homo Sapiens
gggtctaagagaagtaaattaatgaatgaatatgccttgtctttcgtgatcgatctttgttgttgtgggttttctgtccttgtagaagtctactttcacaggcatgctttagtatagttattacagccaaacatgtataattataatcggaagtaaggattaagtggcgataatgaaaacatctgtttttcccataccttatttgaaactggatcaccaaatcttcaggagaatattagaggtgtgtttattccgtctgtaccagtgttagctacactattgccacattaaaaataggaaacatttatatgttccctttgagtctttctgaaagggaaagaaaaattacagtactcactggttcataatacaaatgctggataatgctaaaagtcaactaagtatcaaaaacttaccaagcctcttttttta

SEQ ID NO: 251534 - DNA, 592 bp, Homo Sapiens
  misc_feature (271)..(376): n is a, c, g, or t
gggattacaggtgtgagcttagtttctaatttctgagttttgtagaaaacaatcttaaaaaaaacaagttatgagtagtctgttaataacagtatatttaggtggaacttacagttttatcagacggaatagtaaaatttatctcacccatgaagctaaaatgaaagcagaaatgttaacaccaaagttactacaggttatcctgacttagagcatgataaatcattccggacatctgaaaatgaacccaaaatagtaatcttgtaaaaannnnnnnnnnnnnnnnnnnnnnnnnnnnnnnnnnnnnnnnnnnnnnnnnnnnnnnnnnnnnnnnnnnnnnnnnnnnnnnnnnnnnnnnnnnnnnnnnnnnnnnnnnaaatcttataatctcttagccttattagattttttactaacccactgaagtttctaaaagtccatacattcttagatgtttttgctaaaaactgcaagcttctgctattcttttcatcccttaattcttttttgctgtggtatttctttgaacactgaagcaaatgtagctacccctttgtcaccaaaaagtgatatctctttctttctttctttc

SEQ ID NO: 251535 - DNA, 1197 bp, Homo Sapiens
ctaatatacttaaagctgaattaaacaaagtaacatctttgcataaccaagcatttgaaatagaaaaaaacctaaaagaacaaataattgaactgcagagtaaattggattcagaattgagtgctcttgaaagacaaaaagatgaaaaaattacccaacaagaagagaaatacgaagctattatccagaaccttgagaaagacagacaaaaattggtcagcagccaggagcaagacagagaacagttaattcagaagcttaattgtgaaaaagatgaagctattcagactgccctaaaagaatttaaattggagagagaagttgttgagaaagagttattagaaaaagttaaacatcttgagaatcaaatagcaaaaagtcctgccattgactctaccagaggagattcttcaagcttagttgctgaacttcaagaaaagcttcaggaagaaaaagctaagtttctagaacaacttgaagagcaagaaaaaagaaagaatgaagaaatgcaaaatgttcgaacatctttgattgcggaacaacagaccaattttaacactgttttaacaagagagaaaatgagaaaagaaaacataataaatgatcttagtgataagttgaaaagtacaatgcagcaacaagaacgggataaagatttgatagagtcactttctgaagatcgagctcgtttgcttgaggaaaagaaaaagcttgaagaagaagtcagtaagttgcgcagtagcagtttggttccttcaccatatgtagctacagccccagaactttatggagcttgtgcacctgaactcccaggtgaatcagatagatccgctgtgggaaaacagcagatgaaggaagagtggattcagcaattggagacaagcatgatgttctgtacaagaaaaatattccatatgttggtctgaagaaacaacagcggataatgctgttagaacgaacattgcaattgaaagaagaagaaaataaacggttaaatcaaagactgatgtctcagagcatgtcttcagtatcttcaaggcattctgaaaagatagctattagagattttcaggtgggagatttggtactcatcatcctagacgaacgccatgacaattatgtgttatttactgttagtcctactttatattttctacattcagagtctctacctgccctggatctcaaaccagcttc

SEQ ID NO: 251536 - DNA, 988 bp, Homo Sapiens
  misc_feature (853)..(853): n is a, c, g, or t
gctcagtgtccagcagccagcaccaggcggcattccttcatctctggtggacggtctaccagaacaacgtgctgcccctttataaaagcgtccaagcgggggaagcacgcgcgtctcctggtcacacactttgccacagtgatgtgggggggccgtgtgcggattcagcctctggtgttggagagccgtgtgaaaattcaacacccagtgcgggcgtgccgtgtgcaaattcaccactgggttctaaccagcctgctcagggccttccggagccgacccagatagtggatgagaccctgtccctacctgaaggacgccgttcagaagatatgatagcttgtcctgaaactgagactcctgccgtgataacgtgtgacccactgtcccagccttcccctcagcctgcagacttcacagagactgaaaccatcttgccagcaaataaagtcgaaactgtctcatccgaggaaaccttcgaaccaagccaggaactccctgctgaggctctcagggaccccagtctgcaggatgcactggaggtcgacctggccgtctctgtttcccagatctccatcgaagagaaggtgaaggaattgagccccgaggaaaagaggaggaagtgggaggaaggccgtatcgactacatgggggaaggacgcgtttgctcgcatccaggagaagctggaccggttcctgcagtaatcccgcagctggtgggcgttgtgtgtagttagacaatgtcctggttggggggtcctgtttgcgtggaaatctcctctggtcctttccaagggaaacgctgttgaaccttgtggcctctatttatgcctaatccatttgagtgcctcacacnaaaaacgtagagtatagaaatccacctttaaagcccctcggccccaactttctccaccaacgccctttctggccttttcttcagagggtcactttcataccccttggaaagctgtccgggcaaaaagcgaagcat

SEQ ID NO: 251537 - DNA, 1042 bp, Homo Sapiens
gcaagggctgtggcccttttcccaccccctagcgccgctgggcctgcaggtctctgtcgagcagcggacgccggtctctgttccgcaggatggggtttgttaaagttgttaagaataaggcctactttaagagataccaagtgaaatttagaagacgacgagagggtaaaactgattattatgctcggaaacgcttggtgatacaagataaaaataaatacaacacacccaaatacaggatgatagttcgtgtgacaaacagagatatcatttgtcagattgcttatgcccgtatagagggggatatgatagtctgcgcagcgtatgcacacgaactgccaaaatatggtgtgaaggttggcctgacaaattatgctgcagcatattgtactggcctgctgctggcccgcaggcttctcaataggtttggcatggacaagatctatgaaggccaagtggaggtgactggtgatgaatacaatgtggaaagcattgatggtcagccaggtgccttcacctgctatttggatgcaggccttgccagaactaccactggcaataaagtttttggtgccctgaagggagctgtggatggaggcttgtctatccctcacagtaccaaacgattccctggttatgattctgaaagcaaggaatttaatgcagaagtacatcggaagcacatcatgggccagaatgttgcagattacatgcgctacttaatggaagaagatgaagatgcttacaagaaacagttctctcaatacataaagaacagcgtaactccagacatgatggaggagatgtataagaaagctcatgctgctatacgagagaatccagtctatgaaaagaagcccaagaaagaagttaaaaagaagaggtggaaccgtcccaaaatgtcccttgctcagaagaaggatcgggtagctcaaaagaaggcaagcttcctcagagctcaggagcgggctgctgagagctaaacccagcaattttctatgattttttcagatatagataataaacttatgaacagcaacta

SEQ ID NO: 251538 - DNA, 848 bp, Homo Sapiens
  misc_feature (751)..(751): n is a, c, g, or t
gggccttttcccaccccctagcgccgctgggcctgcaggtctctgtcgagcagcggacgccggtctctgttccgcaggatggggtttgttaaagttgttaagaataaggcctactttaagagataccaagtgaaatttagaagacgacgagagggtaaaactgattattatgctcggaaacgcttggtgatacaagataaaaataaatacaacacacccaaatacaggatgatagttcgtgtgacaaacagagatatcatttgtcagattgcttatgcccgtatagagggggatatgatagtctgcgcagcgtatgcacacgaactgccaaaatatggtgtgaaggttggcctgacaaattatgctgcagcatattgtactggcctgctgctggcccgcaggcttctcaataggtttggcatggacaagatctatgaaggccaagtggaggtgactggtgatgaatacaatgtggaaagcattgatggtcagccaggtgccttcacctgctatttggatgcaggccttgccagaactaccactggcaataaagtttttggtgccctgaagggagctgtggatggaggcttgtctatccctcacagtaccaaacgattccctggttatgattctgaaagcaaggaatttaatgcagaagtacatcggaagcacatcatggggccagaatgttgcagattacatgcgctactttaatggaaagaagatgaaagatgccttacaaagaaacagngttctcctcaatacattaaagaaacagcggtaacttcccagacattgatggaggaagaatggtattaaggaaaggctccatggctggctaatacgaa

SEQ ID NO: 251539 - DNA, 932 bp, Homo Sapiens
gtagcgaggcctgggtggcgaattcggcacgaggctgcaggtctctgtcgagcagcggacgccggtctctgttccgcaggatggggtttgttaaagttgttaagaataaggcctactttaagagataccaagtgaaatttagaagacgacgagagggtaaaactgattattatgctcggaaacgcttggtgatacaagataaaaataaatacaacacacccaaatacaggatgatagttcgtgtgacaaacagagatatcatttgtcagattgcttatgcccgtatagagggggatatgatagtctgcgcagcgtatgcacacgaactgccaaaatatggtgtgaaggttggcctgacaaattatgctgcagcatattgtactggcctgctgctggcccgcaggcttctcaataggtttggcatggacaagatctatgaaggccaagtggaggtgactggtgatgaatacaatgtggaaagcattgatggtcagccaggtgccttcacctgctatttggatgcaggccttgccagaactaccactggcaataaagtttttggtgccctgaagggagctgtggatggaggcttgtctatccctcacagtaccaaacgattccctggttatgattctgaaagcaaggaatttaatgcagaagtacatcggaagcacatcatgggccagaaatgttgcagattacatgcgctacttaatgggaagaagatgaagatgcttacaagaaacagttctctcaatacataaagaacagcgtaactcccaacatgaatgggagggagatgtattaagaaagctcattgctgctatacggagagaatcccagtcctatgaaaaagaagccccaaagaaagaaggttaaaaaagaaagagggtggaaacccgtccccaaaatgtccccttgcctcagaaaaa

SEQ ID NO: 251540 - DNA, 1159 bp, Homo Sapiens
  misc_feature (844)..(844): n is a, c, g, or t
  misc_feature (909)..(909): n is a, c, g, or t
ctcctcctgcagctgtggtcctgccgtccgcacgcttctacgtacgagcctgggtggcgaattcggcacgagggcaggatggggtttgttaaagttgttaagaataaggcctactttaagagataccaagtgaaatttagaagacgacgagagggtaaaactgattattatgctcggaaacgcttggtgatacaagataaaaataaatacaacacacccaaatacaggatgatagttcgtgtgacaaacagagatatcatttgtcagattgcttatgcccgcatacagggggatatgacagtctgcgcagcgcatgcacacgaactgccaaaatatggtgcgaaggttggcctgacaaattatgctgcagcatattgcactggcctgctgctggcccgcaggcttctcaataggtttggcatggacaacatctatgaacgccaagtggaggtgactggtgatgaatacaatgtggaaagcattgatggtcagccaggcgccttcacctgctatttggatgcacgccttgccataactaccactggcaatacagtttttggtgcccctgaagggagctgcgcatggaggcttgtctatccctcacactaccaaacgactccccggttatgactctgaaagcccggactcgtctgcagaagtacctcctgaagtacatccacggccccaaaccgttgcaaatctacctggccctattttacttggaacaataatgcccccgccttttccggcaacaatgcttcccgtcacccccccttttacccacccgcgctttacctccttccaccccatattgcgactgccgatttcttccccgcattacctntcccttggccgccgcatgcgaataccgccgtatcgccgcgacgccttgtaaacggggagccgccntgacgtgtacaataggatcagatttgccccttatagccccgtgtcaagccgccctcgcgactcatcctcacttcgctgctcacagtcgaccacgtttcctggcaaccaactacccctcgtccgcacttgttctcaaccggatgtcgaagggcgaacggataacggcgcgcctcgctgaaaagccctagtacgctctgtcggtaaacagcgacggtcgaaactctcctactgtgccctcccccctctccgt

SEQ ID NO: 251541 - DNA, 516 bp, Homo Sapiens
cctccccagggcccccaggacccctttcccagactcctcctatgcagaggccggtggagccccaggagggaccgcacaagagcctggtggcacaccgggtcccactgaagccatatgcagcacctgtaccccgatccacagtccctgcaggaccagcccacccgaaacctggctgccttcccagcctcccatgaccccgaccctgccatccccgcacccactgccacgcccagtgcccgaggagctgtataagaaagctcatgctgctatacgagagaatccagtctatgaaaagaagcccaagaaagaagttaaaaagaagaggtggaaccgtcccaaaatgtcccttgctcagaagaaggatcgggtagctcaaaagaaggcaagcttcctcagagctcaggagcgggctgctgagagctaaacccagcaattttctatgattttttcagatatagataataaacttatgcgcagccacttcccgcgaaaccccataacccaaaaaaaccttgt

SEQ ID NO: 251542 - DNA, 754 bp, Homo Sapiens
  misc_feature (85)..(85): n is a, c, g, or t
gcggaagcgcctgcgcgcgctcctccgtacgagaactagttttgttccgtgccctctggactggaaccttttggtagagaacccnccggcaggaccaaccccgcacccgccagcaccgcggcaatgtccagcaatagttttccttacaatgagcagtccggaggaggggaggcgacggagctgggtcaggaggcgacctcaaccatttccccctcgggggccttcggcctctttagcagcgatttgaagaagaatgaagatctaaagcaaatgttagagagcaacaaagattctgctaaactggatgctatgaagcggattgttgggatgattgcaaaagggaaaaatgcatctgaactgtttcctgctgttgtgaagaatgtggccagtaaaaatattgagaccaagaagttggtatatgtttacctggttcgatatgctgaagaacagcaggatcttgcactcctgtccataagcacttttcagcgagctctgaaggacccaaaccaactaattcgtgcaagcgctttgagagttctgtcaagtattagagtgccaattattgtacccatcatgatgcttgctattaaggaagcttctgctgacttatcaccatatgtgaggaagaatgcagcccatgcaatacaaaaattatacagccttgatccagagcagaaggaaatgttaattgaagtaattgaaaaacttctgaaagataaaagcacattggtagctggcagtgttgtgatggctt

SEQ ID NO: 251543 - DNA, 702 bp, Homo Sapiens
ctagactaacagaatcaagcgtgcatgattttaaaacagaagatcaagaggttatcacgacagattttggccaagttgttctaagacccaaggaggcaaggcatgctaacgtgaaccctaatgaggatggagaatcaagttcaagttctcctactgaagaaaatgcagccactgacaatattgccttcatgattacccgaaaccactgtccaggttctttccagtggggaggtgcatgatattgttagccaaaagggagaagacatacagacggttaatatcgatgccagaaaagagatgaccccccgacaagaagggactgacaatgaggatccagtcgtgtgcctgggacaagaaaccagtgatcatcattttcgatgagcccatgggacatccggtctgcctataagagactttcaactatctttgaggaatgtgatgaggaattagagagaatgatgatggaggaaaagatagaggaggaggaagaggaggaaaatggggattctgtagtccagaataataacacttcccagatgtctcataagaaggtggccccaggcaatcttagaaccggacaacaggtggaaacaaagtcacagccacactccctggccacagagaccagaaacccaggaggacaggaaatgaacggaacggagctgaacaagttcagccacgtggattctccaaattcggaat

SEQ ID NO: 251544 - DNA, 577 bp, Homo Sapiens
caaacctgccactgggtgcactgtcatacagaagagtacagatgccagatgcgggatcctttgccaacatggtatcatctgcgccaaggttttctgttcttgaaggaacaagtcattggcaatatgcactattttttccacagcaatgatgcttccgatgctatgaatttcaatatctgccagcatggtgaggacaaggatggcttcaaccagcagctgacggtactctggctgaggtacacgattcaggacagactccacatgaacagagaatttaatctcacctggagtcatctctctagtggtagaggaaggaaggacaaacccctcaacagaaagtccgtgacacttctgcaaaactttccatactttcgtgataaaatccaactggaagctctattcagtgccccatccagccttcttcggcgttgccattgaccttgacgactatctttagatgactgctgatcatatgcactaggaaaggacccactacttggagtcatagaggttccaggtgactgctttatctcactttttaactgcatgatcccagttcgttctgttttggttgctc

SEQ ID NO: 251545 - DNA, 449 bp, Homo Sapiens
  misc_feature (331)..(386): n is a, c, g, or t
gttgccagttattcagcttccaggcggctttgcacctccaaaggtgcaaaaaggaaaaagaaagcagaaaggattcagcatttaagcagaaagaaaagggaaattctactctaccagatgagccactggttccactggagcttatcagtgaagtaacactgcaggagccctggtatccttccctcagagatatcatcaggggccctcaaaccccattgtttatgccagcactgaccgcactttaagcacacacttaccaatcagaggtcgtgtaattggcctaaatctaggcccagttattactacaaatcttagtcaccatactctctcnnnnnnnnnnnnnnnnnnnnnnnnnnnnnnnnnnnnnnnnnnnnnnnnnnnnnnnngctcaagggatcctctcggctcggctcccgaacagctaggactggaggtgtgcaccaccatgc

SEQ ID NO: 251546 - DNA, 1375 bp, Homo Sapiens
gagcatgaagaatacatcacagaaccagagaagcctatccctgtaaagcctgtcccagaagaaccagttcccacaaaaccaaaggccccaccggctaaagtgctgaagaaagctgtccctgtaagaaaaagtaccagtgcccattcctaagaaactcaaacctccaccacccaaagtgcctgaagaaccaaagaaagtttttgaggaaaaaatacatatttcaattaccaaacgtgaaaaagagcaggtgactgaacccgctgctaaagtgcccatgaagcccaagagggttgtcgcagaagaaaaagtacctgtccctagaaaagaagtagcaccacctgttagagtgccagaagtgcctaaagaacttgaaccagaagaggttgcctttgaagaggaagttgtaacccatgtagaagaatatcttgtagaagaagaagaagagtacattcatgaagaagaggagttcataactgaggaagaagtggtgccagtgataccagtcaaagtgcctgaggtacccaggaaacctgttccagaagagaagaaacctgttcctgttcccaagaagaaggaagctccaccggcaaaagtgcctgaggttcctaagaagccagaggagaaagttcctgtgcttattcctaaaaaggagaagcctccgccagcaaaagttcctgaagtgcccaagaaacctgtgccagaggagaaagtaccagtaccagttcctaaaaaggtggaagctccacctgccaaagtgccagaggtacccaagaagcctgtgcctgagaagaaggtgccagttcctgctcctaagaaagtggaggctccacctgcaaaagtgccagaggtgcccaagaagctcatcccagaagaaaagaaaccaacacctgttccgaaaaaagtggaagcaccaccacccaaagtgccaaagaaacgtgaaccagttccagttcctgtagctctacctcaggaagaggaagttctatttgaagaagaaattgttcctgaagaggaagttctacctgaggaagaggaagttctacctgaggaagaggaagttctacctgaagaagaggaagttctacctgaagaagaggaaattccacctgaggaagaggaagttcctcccgaagaagaatatgtacctgagggagaagaatttgtacctgaagaagaagtccttccagaagttaaacctaaggtgccagtacctgcaccagtgcctgaagtgccaaagaaacctgtaccagagaagaaagtccctgttcccgcccctaaaaaagtggaacctccaccaccacccaaagtgcctgaaattaagaagaaagtgacagagaagaaagtggtcattcccaagaaagaggaggctccccct

SEQ ID NO: 251547 - DNA, 716 bp, Homo Sapiens
  misc_feature (67)..(67): n is a, c, g, or t
  misc_feature (218)..(218): n is a, c, g, or t
tctgcttgtataaaccttactgacttgctgcgacactttcttgcaatgttcaatatcctttgctttntcatctacgtgacatatagtcttagcaacatcaccatccattcgatacttaacctcactgagttgatcttgtacttttttgattctgcgaagttctggagtatctgttgtgctggcgtatggctgtccttttgttttctcaaacttctccnttgtatttatttgggctaaaaagatcctgcattttctgactgtgtgcaatgtagggggtcatgaactttgaaggatccactttcttccggatgaccttccttcctctccaccggctttgctgatgctggctgtgccagtgctggctgtgccagagctggtttggaagtttctgattgctcatagtcagatgtccttgttgtcgtagtctcataaatttttgttattgtctctcccgacacctcttcgtaaaccacttcttctgtgtagtactccaccacctcctcatagtcttcgtcatctgccatttttccagagtagtagtggcacctacaaactcaaggcaatggggttattttcttcccgaacaccattggcttatacagactttttctttcgtttctgtagctctcgttcaaaccttcaatctaccaaataaatttcctcagcagcaaagcctctcccaactctcccctcctgagaaccccaggcaaaagccc

SEQ ID NO: 251548 - DNA, 959 bp, Homo Sapiens
gagaagggtgcaggcttcaggcaggaaaggagtgtgtggattctccagtggaaggagggcagtcagaagcacctccttctctggtatcctttgccgtctcatcagaaggcacagagcagggagaagatccacgctcggaaaaagatcacagcagacctcacaagcaccgagcgcggcatgcacggctcaggaggagtgaaagcctgtcagaaaaacaagtgaaggaagcaaaatctaaatgcaaaagcattgcccttcttctaacggatgctcccaaccccaactccaagggggtgttgatgtttaagaagcgacgtcggagggccaggaaatacaccctagttagctacggtactggcgagcttgagcgagaggcggacgaggaggaagaaggtgacaaggaggatacatgtgaagtagcatttcttggtgcaagcgaatcagaggtggatgaagagttattgtctgacgttgacgacaacacacaagttgtgaactttgactgggattctggactggtggacattgaaaagaaactgaacagaggggacaagatggagatgttaccagacaccacaggcaagggagccctcatgtttgccaagaggagggagagaatggatcagatcacagcccaaaaagaagaggacaaggtaggtggaacgccaagcagagaacaagatgctgcccagaccgatggcctgagaaccacgacttcttaccaaagaaaggaggaagagtcggtaagaacgcagagctctgtgagcaaaagctacatcgaggtgagtcatggtcttggccatgttccccaacagaatggcttcagtgggacatctgagacagcaaacatccagaggatggtccccatgaatagaacggccaaacccttcccagggtctgtgaatcagccagctacccccttctcgccaacccgaaacatgacgagtcccattgctgac

SEQ ID NO: 251549 - DNA, 775 bp, Homo Sapiens
tgcccactggtgtcacctcctaatgttaacttggattcctaaagcagtcccactctgttatgagagtcactgactcccgtggacatccccacagtaagcagccttacaaaatccagtccccttagggcagagtgagtgtcatagaataatgactccaaacccacgtcaaaaatggcttgttttcagcgatgttataaaacaaaggcctgtttttttggaattgggggtgactgggtggtttggattgaaatgtggacaaagatagcatgtgtattttgaataaaataaaaattttgtaataaaacttttaaaaatcagtgatgtaaaatcaatatttaagactataggctataaattgtttgatttcattaactagcccttttgatgcctagacatgttgtaaaaaaattgtgctatggctgccttttcttccgccccacaacacaaagggctatttctacaaggcaaagttttgtatatgtgctattctttacttcagattgagagttgggaaaaactggagtaaataatgggtttcttacttgcttaaaagcatatttatatgtgtatctcaatatatacaaggcaggttcccctataaaagtctggaatgtactgcttaattttacacttgtgtagacacgattatttgtgactgaaaagtggaataacgtgtggattttggtcaactcattatcagtctgttagcagtcctctatgtgaggcatggtggtctaattgtgaaattctccctgtatatgggtgtctgtgtgaa

SEQ ID NO: 251550 - DNA, 735 bp, Homo Sapiens
  misc_feature (682)..(682): n is a, c, g, or t
gaaaacaagaagccagaaacttacaggggacaaaggatgccttgcagcagagattgactcagcaggacacatctgttcttcagctcaaacaagagctgctgagggcaaatatggacaaagatgagctgcacaaccagaatgtggatctgcagaggaagctagatgagaggaaccggctcttgggagaatataaaaaagagctggggcagaaggatcgccttcttcagcagcaccaggccaagttagaagaagcactccggaaactctctgatgtcagttaccaccaggtggatctagagcgagagctaggaacacaaagatgtcctcttggctcactgtatgaaaagagaggcagatgaggcgaccaactacaacagtcacaactctcaaagcaatggttttcttccttccaacgggcagggaaaaggagctacttcagtcagcaacagagggaccagcgacctgcagcttgttcgagatgctctccgcagcctgcgcaacagcttcagtggccacgatcctcagcaccacactattgacagcttggagcagggcatttctagcctcatggagcgcctgcatgttatggagacgcagaagaaacaagaaagaaaggttcgggtgcagtcacccagaactccagtaggtagtgaataccgggagtcctggccccctaactcanagttgcctcactcacagagctctccaactgtcagcagcacctgtactaaagtg

SEQ ID NO: 251551 - DNA, 567 bp, Homo Sapiens
ggccaaactgtggaagaaacagcagcaggaaaaggaggatgctgagcaccatccagatgaggacgtcgatgagagtgaatcctgatcttttttttcatagacaaatgttttgttatttttataaattaattgtttggaactcttgtgactcctggtaagttcttatacatttcaccagtaagaaattgattggtatctttgatggctactttttaagttattttttaaatgctcttgggttagctaggggtagggattgcaagtaaaggacttttttaactgctggatttgtttttccaactgagtccaaacttttctaatgtctgtccacatcatgcattaggaaatgtaattaaggtaacattctacagttacttttcatgtcatacccataaagatagtttatgcattcatctgaaatgtgtaactttttcatgtcttcagagtcacagacttgagttcatttcccagctctgccactcatgattatataacttaattttcattttcctcattcacaaaatgggccaatagtttgacagctcattttgaagattacattataaa

SEQ ID NO: 251552 - DNA, 1563 bp, Homo Sapiens
  misc_feature (1128)..(1128): n is a, c, g, or t
  misc_feature (1243)..(1243): n is a, c, g, or t
  misc_feature (1319)..(1319): n is a, c, g, or t
  misc_feature (1477)..(1477): n is a, c, g, or t
  misc_feature (1484)..(1484): n is a, c, g, or t
  misc_feature (1488)..(1488): n is a, c, g, or t
gaacattgtatactctagtaaaacagcatcactttaaaaatattcatttatgaaatctgttacctatagttgaagtcttgagtagtgaacaagggactctaataccaatactcttaatatctggctattttagatcccttaaagggcataattattggaaatttaggtatttcactaaagcatgtatataatattgccaacaagaaaagtaaatttgaagattaagggaacttacttctgcaaactgtcttgcgatagttaagcagaatttaaactctgttttaagcaggaaaccagaaagattattttgcagttgtagaagatttcataacttattaaaacttattaacattttgtgttgtttagatataggcagttgatacatactaacatcccagccttttcaatatcagggttaaattataggaaaactcagtaaaatggtacaaatctgaaagtttgatggtagaaactgaagatttaacagagaactgtgttttacccgagtgccaaaaatgctgtgagcctccttgcacaaaatttataccacttttgcatttttatctatcagtccagatagttgtctcccctccttctcccaggacctctccaccattaaaatgcacaaaccacatggccgatttcaccatttacatttattttcaaaagttactacaaccaaattaattctattagaagaaatgtagacaaattctataaagactatagattgtgacctaagaaagaaatgaggcaaagaaccaaacattgaattaaatgctacatgggtgactaagatctgtttcaagtcagtgataatatagccacttctgggtacttcagtatcagagatcagttctcgtggtttagacagttcctatctatagctgactatccttgtccttgaatatggtgtaactgactattggctctacagttttattgggccacttaagaaatatttccttgaataattattttgagaaaaagtctaaaagtaataaaaataattttaaacacactgtagtaagaaatgactgttggaaaattatgctttcactttctaccatattctcagctatacaaaaccatttattttgaagatttttagactactgttaatttganatctgttactcttattgtggaatttgtttttttaaaaaagatgtttctaattggatttttaaaagaagatgggaattgggtgctattttacaatagaaactaagctttttgtggntcctaatgtcctatgtaaaacttagtgccaaaggaatccaactttgaaattttcccttcctatcctgctttatatnaaaaagccccataagaaaaatgggaaccctggtgaataatataatgaaattggaaaaaaattttaaatggtggaaactttttttccacctgtgagaacctgaacttggaatttttttggaatgaaaaaacaggcttgccgtggataaaggtaaaaccnccaccancacnaacatagtactcgggacaacaaaacgccagaacggacgccattgcgcgagtcggcctcaatcggcactagacgac

SEQ ID NO: 251553 - DNA, 577 bp, Homo Sapiens
  misc_feature (46)..(46): n is a, c, g, or t
  misc_feature (81)..(81): n is a, c, g, or t
  misc_feature (129)..(129): n is a, c, g, or t
  misc_feature (449)..(449): n is a, c, g, or t
  misc_feature (502)..(502): n is a, c, g, or t
  misc_feature (515)..(516): n is a, c, g, or t
  misc_feature (529)..(529): n is a, c, g, or t
  misc_feature (556)..(556): n is a, c, g, or t
tggaactgtgggtgccctgaatgttcccccgggcaaatttggaacnaaaaaaataaaatacttttaacaacaaagaaaaanggatggcaaaggccttcctaacgttaacactttgggggaatgcccttnaaggaccaaggctccctgcttgggctttcatttccacagggcctgcaagccttgtctctggaaggtgctgattaggactgggaatggcctcctctggtcgagactctctgacccctaagtaaatgaacttgttcccatcccagtctccaaacagatcccacacactacgtttgtttttctatatcctgattgtcacacctggaagactctccttagtatacatgaggcttactgccatgagaccaaatgactagagagcatcttttaagagaagcttgctcattcaggaaaaattaaggatttggtacaaactgcaggcnaaagggaagctgacatattgttttggtgtgtattcttgaaaacgcatcattanatctacagtcccnntgcagcatgctgncttttacgctgcctcaaggagtcttcnaccacctctgtgtcagctggg

SEQ ID NO: 251554 - DNA, 613 bp, Homo Sapiens
tttggagactgggatgggaacaagttcatttacttaggggtcagagagtctcgaccagaggaggccattcccagtcctaatcagcaccttccagagacaaggctgcaggcctgtgaaatgaaagccaagcaggagccttggtcgaaggcatccccaaagtgtaacgtagaagccttgcatccttttcttgtgtaaagtatttatttttgtcaaattgcaggaaacatcaggcaccacagtgcatgaaaaatctttcacagctagaaattgaaagggccttgggtatagagagcagctcagaagtcatcccagccctctgaatctcctgtgctatgttttatttcttacctttaatttttccagcatttccaccatgggcattcaggctctccacactcttcactattatctcttggtcagaggactccaataacagccaggtttacatgaactgtgtttgttcattctgacctaaggggtttagataatcagtaaccataacccctgaagctgtgactgccaaacatctcaaatgaaatgttgtagccatcagagactcaaaaggaagtaaggattttacaagacagattaaaaaaattgttttgtccaaaaa

SEQ ID NO: 251555 - DNA, 1077 bp, Homo Sapiens
  misc_feature (13)..(13): n is a, c, g, or t
  misc_feature (57)..(57): n is a, c, g, or t
  misc_feature (1002)..(1002): n is a, c, g, or t
  misc_feature (1041)..(1041): n is a, c, g, or t
  misc_feature (1061)..(1061): n is a, c, g, or t
ctggccgcttctntgtcaccactatcccagcattttctcatgcaaaggatgggatantccgccgttatcgtggccccaggaatcttcgaagacctgcagaattatatcttagagaagaaatggcaatcagtcggagcctctgactggctggaaatccccggcttctctaacgatgtctggaatggctggtctttttagcatctctggcaagatatggcatccttcacaacttatttcacagtgactcttggaattcctgcttggtgttcttatgtctttttcgtcatagccaccttggtttttggcctttttatgggtctgggtcttggtggtaatatcagaatgtttctatgtgccacttccaaggcatttatctgagcgttctgagcagaatcggagatcagaggaggctcatagagctgaacagttgcaggatgcggaggaggaaaaagatgattcaaatgaagaagaaaacaaagacagccttgtagatgatgaagaagagaaagaagatcttggcgatgaggatgaagcagaggaagaagaggaggaggacaacttggctgctggtgtggatgaggagagaagtgaggccaatgatcaggggcccccaggagaggacggtgtgacccgggaggaagtagagcctgaggaggctgaagaaggcatctctgagcaaccctgcccagctgacacagaggtggtggaagactccttgaggcagcgtaaaagtcagcatgctgacaagggactgtagatttaatgatgcgttttcaagaatacacaccaaaacaatatgtcagcttccctttggcctgcagtttgtaccaaatccttaattttttttgaatgagcaagcttctcttaaaagatgctctctagtcatttggtctcatggcagtaagcctcatgtatactaagggagagtcttccaggtgtgacaatcagggatataggaaaaacaaacgtagtgtttggggatctgttttggaagactgggantgggggaacaagttcatttttactttaggggggttcagnggagttctcgacccgggggngggccctttccccgtt

SEQ ID NO: 251556 - DNA, 686 bp, Homo Sapiens
ggatcagcttccagcccagtcggcccggcccgggggccatggagctccgagcggcggatcgcgagcctcctgcgaaccccagcctgcacgcccggttagcattcggccgggagatgcggcagtggaatctggaagggcggtgaaaaacctacgtcctgccctcgcccggcctctccattcgtcccccgggtagagaggtgcccggctcccaccccttcccagccccagccctggagacagcagcccctagactactgagggacagcgacagcatgaaggctccgggtcggctcgtgctcatcatcctgtgctccgtggtcttctctgccgtctacatcctcctgtgctgctgggccggcctgcccctctgcctggccacctgcctggaccaccacttccccacaggctccaggcccactgtgccgggacccctgcacttcagtggatatagcagtgtgccagatgggaagccgctggtccgcgagccctgccgcagctgtgccgtggtgtccagctccggtcaaatgctgggctcaggcctgggtgctgagatcgacagtgccgagtgcgtgttccgcgtgaaccaggcgcccaccgtgggctttgaggcggatgtgggccagcgcagcaccctgcgtgtcgtctcacacacaagcgtgccgctgctgctgcgcaactattcacac

SEQ ID NO: 251557 - DNA, 1155 bp, Homo Sapiens
  misc_feature (11)..(11): n is a, c, g, or t
  misc_feature (48)..(49): n is a, c, g, or t
  misc_feature (89)..(89): n is a, c, g, or t
  misc_feature (712)..(712): n is a, c, g, or t
gagagaggganacacttgggcacaaagaggggaagggactgtgaatcnncagggagcaccctggccagatcccagcggtgttcgaatcncaggaccatcttccatctacagcctagctgcctccttccctggtcaacccttcctgggtgcccatccaccacactgcccaacctcactccccgtcccctcccacaaagagtgacagtggcctggggctcggcctctcctgaccccaggggaggatgggtgatctgggcctcctgctacctgccacctgggcctcctatctccagctgggagccagggacctacccacgggcctggcctgacctctctccccctcccctcatgcttccagaccctgccgcagcctgcggtccagggccaggagctgcctcaggaagccccggttggggatgatgcctcggtggtctttgactttcttgatggcctccacgagggtaaggtggtggtacagcatgaggtaggccagtaccagggtggcggatcggctcacgcccacagcacaatgcaccaggatcttccctcccggctggctcagcgcccggtggatgaagtcggcagccgtctggaagtggatgcacatgtcaaaggctggcgagtcgtgggacctcaacaccccaggtagcggatgcccagcccctcataggcctcgggcgtgcctcgccaccggctgtgtgaggcattgagnacgtgcgtgatgcccaggcggcgaagctcccggcggttgttagccatgtcctggtctccgagatagaggcctgaccagacctcgtcggcatggttacaggctgtcttgcctgtgtagaggagccgctccaactcgaagacattgaggaaaggatgttgaacggttggcatctcctccagggtccctcgagttcgaacaggagaccttgagctactccgggagaagcgggccataaaagtcatagaagcccaaagccagttaccagggcacatcttagaggtggcagaaaccgtggcagctgcaggagtggctgtggtgatgatgggttcagttgccaggtagctgctctttgcaagcgctacgctgggcctcagtccgaaaggcggatcgccggcgcagacagcgccacggccatgacgctcctgctgctgtcgccgccgctc

SEQ ID NO: 251558 - DNA, 1067 bp, Homo Sapiens
gacagcagctgacccagctcaggcactgcccctctcacagccctcaagacacaccatgggcccagaggcaggtttgctacacagcagcgacgacgcaggcggcggccccagcgactcgcaactgcctccctgaccacagcggccaccgcccaacacccccgagaagccatcgccaccaccggcaggagaacctagggtccataaagccatcttcgcgatcgactaaagctacgtcaacaactatggcgggcgacgggcggcgggcagaggcggtgcgggaaggatggggtgtgtacgtcacccccagggcccccatccgagagggaaggggccggctcgcccctcaaaatggcggcagcagcgatgcgcctgcgtacagaactcctccgtcgcgccagggccggcgggaagtgaggttctcggacgagccgccagaagtgtacggcgacttcgagcccctggtggccaaagaaaggtccccggtgggaaaacgaacccggctagaagagttccggtccgattctgcgaaagaggaagtgagagaaagcgcgtactaccttcggtctaggcagcggaggcagccgcgaccccaggaaaccgaggaaatgaagacgcgaaggactacccgccttcagcagcagcactcagagcagcctccgctacagccgtctcctgttacgaccaggagagggctgcgggactctcattcctctgaagaggatgaagcatcttcccaaactgatttaagccaaacgatctcaaagaaaactgtcaggagcatacaagaggctccagcagtgagtgaagatcttgtaatcaggttacgtcgaccccctctaagatacccaagatatgaagccaccagtgtccaacagaaggtcaatttctctgaagaaggagaaactgaagaagatgatcaagacagctctcacagcagtgtcactactgttaaggccagatccagggattctgatgaatctggagataaaaccaccagatcatctagtcaatatatagaatcattttggcagtcatcacaaagtcaaaacttcacagctcatgataag

SEQ ID NO: 251559 - DNA, 585 bp, Homo Sapiens
  misc_feature (168)..(194): n is a, c, g, or t
  misc_feature (236)..(278): n is a, c, g, or t
  misc_feature (468)..(468): n is a, c, g, or t
  misc_feature (564)..(564): n is a, c, g, or t
ggggaaaaatgccctcttgtgggctccaatgtcccctgggcctttatgcaaggggaaattgcaaccatccttgctggagatgtgaaagtgaaaaaagagagagactcgtgacttttccggtttcagaaaaacccaatgattacccttaattaaaactgcttgaattgnnnnnnnnnnnnnnnnnnnnnnnnnnnccaagacaagggaaatgtagacttcataaacatggctgtatnnnnnnnnnnnnnnnnnnnnnnnnnnnnnnnnnnnnnnnnnnngacgacaaaaggtatgtacttataaagacatttttttcttttgttaacgttattagcatatctttgtgctttattatcctggtgacagttaccgttctatgtaggctgtgacttgcgctgcttttttagagcacttggcaaatcagaaatgcttctagctgtatttgtatgcacttattttaaaaagganaaaaaaagcccaaataccattttctggaccattggtagggattgcccttacctgtcctggtccattcccttattgctggggccccctttctcgggncggcgggaggtggggtgggga

SEQ ID NO: 251560 - DNA, 1023 bp, Homo Sapiens
  misc_feature (702)..(727): n is a, c, g, or t
  misc_feature (769)..(811): n is a, c, g, or t
  misc_feature (818)..(818): n is a, c, g, or t
ggccagacgcggctgtgcacatacacagaggggctcacgagacccatgactcctacatactcttttgtgtgtccgccaccacccactgtcttacctcatttcaaccgcaccacaccgcctgaagcggcccacaatggccagtcccccatggcagccctgatcttagaagcagacaatgcacggggcagtcatgcctcaaaagatagccaaccagggtcactccactaccacgaggaatatgcaacacgccgccctctccgtcctctatgaaccaaagaaagctgggccccagagaggtggggggccacggagcaagcaacacacagaagactggagccacgtgcaccctgccagactcccggactcctctctggcaaccagagccccgctgtgctgcaccctctgccacgagcggctggaggacacaccattttgtgcacagcccgtccgtcccttcgcacaaggtctgcttcccttgctccagacaaagcatcaaacagcacggagctagtggagaggtctattgtcccagtggggaaaaatgccctcttgtgggctccaatgtcccctgggcctttatgcaaggggaaattgcaaccatccttgctggagatgtgaaagtgaaaaaagagagagactcgtgacttttccggtttcagaaaaacccaatgattacccttaattaaaactgcttgaattggnnnnnnnnnnnnnnnnnnnnnnnnnnccaagacaagggaaatgtagacttcataaacatggctggatnnnnnnnnnnnnnnnnnnnnnnnnnnnnnnnnnnnnnnnnnnngacgacnaaaggtatgtacttataaagacatttttttcttttggtaacggtattagcatatctttgggctttattattctggtggacaggtacggttctatgggagggttggggacttgcggctgctttttttagaaccacttgggaaaatcagaaaatgcgtccctagctgggatttggatggcactttattttttaaaaagaaaaacaac

SEQ ID NO: 251561 - DNA, 926 bp, Homo Sapiens
  misc_feature (636)..(662): n is a, c, g, or t
  misc_feature (705)..(746): n is a, c, g, or t
ggcctgggtggcgaattcggacgaggctattccaccggaccacaccgcctgaagcggcccagaatggccagtcccccatggcagccctgatcttagtagcagacaatgcaggggccagtcatgcctcaaaagatgccaacccaggttcacttccaactaccaggaggaatagccaacagtccgcccttctccgtccctcttatgaacccaaagaaggctgggcccccagagaggtggggggccagggagcaggcaacacaggaggactggagccagtgcaccctgccagcctcccggactcctctctggcaaccagtgcccccgctgtgctgcaccctctgccacgagcggctggaggacacccattttgtgcagtgcccgtccgtcccttcgcacaagttctgcttcccttgctccagacaaagcatcaaacagcagggagctagtggagaggtctattgtcccagtggggaaaaatgccctcttgtgggctccaatgtcccctgggcctttatgcaaggggaaattgcaaccatccttgctggagatgtgaaagtgaaaaaagagagagactcgtgacttttccggtttcagaaaaacccaatgattacccttaattaaaactgcttgaattgnnnnnnnnnnnnnnnnnnnnnnnnnnnccaagacaagggaaatgtagacttcataaacatggctgtatannnnnnnnnnnnnnnnnnnnnnnnnnnnnnnnnnnnnnnnnngacgacaaaggtatgtacttataaagacatttttttcttttgtaacgttattagcatatctttgggctttattatcctggggacagttaccgttctatgtaagctgtgacttgcgctgcttttttagagcacttggcaaatcagaaatgcttctagctggatttggatgcaccttatttt

SEQ ID NO: 251562 - DNA, 560 bp, Homo Sapiens
  misc_feature (44)..(44): n is a, c, g, or t
  misc_feature (108)..(108): n is a, c, g, or t
  misc_feature (543)..(543): n is a, c, g, or t
cactgcaacaaaaaggttgtccttccaacccgctccttggcaanagggtgcaaccacaacggggcaactggttgccaaaagaggaagtccgggaggctggcagggtgncactggctcccagtcctcctgtgttgcctgctccctggccccccacctctctggggcccagccttctttggttcatagaggacggagagggcggactgttgctattcctccctggtagtggagtgaacctggttggcatcttttgaagcatgactgccccctgcattgtctgctactaagatcagggctgccatgggggactggccattctggcgccgcttcaggcggtgtggtccggttggaatgaggtgaggcagtgggtggtggcggagacacaaaagaggatgtaggagtcatggggatcttgagcccctctgtggatgtggacagccacggctgggcctctccgttgatcttagggggcccgacttcaccttctggttctggagagggcttccttttccttgctgttcttgcaactgctttagacccgtntgccccgttggcctcgc

SEQ ID NO: 251563 - DNA, 970 bp, Homo Sapiens
caatacctgacagcaaaagtctggaatccagcaaagaaatcccagagcaacgagaaaacaaacagcagcagaagaagcgaaaagtccaagataaacagaaatcggtatcagtcagcactgtacactagagggttccatgagattattgtagactcatgatgctgctatctcaaccagatgcccaggacaggtgctctagccattaggaccacaaatggacatgtcagttattgctctgtctaaacaacattcccagtagttgctatattcttcatacaagcatagttaacaacaaagagccaaaagatcaaagaagggatactttcagatggttgtcttgtgtgcttctctgcatttttaaaagacaagacattcttgtacatattatcaataggctataagatgtaacaacgaaatgatgacatctggagaagaaacatcttttccttataaaaatgtgttttcaagctgttgttttaagaagcaaaagatagttctgcaaattcaaagatacagtatcccttcaaaacaaataggagttcagggaagagaaacatccttcaaaggacagtgttgttttgaccgggagatctagagagtgctcagaattagggcctggcatttggaatcacaggatttatcatcacagaaacaactgttttaagattagttccatcactctcatcctgtatttttataagaaacacaagagtgcataccagaattgaatataccatatgggattggagaaagacaaatgtggaagaaatcatagagctggagactacttttgtgctttacaaaactgtgaaggattgtggtcacctggaacaggtctccaatctatgttagcactatgtggctcagcctctgttaccccttggattatatatcaacctgtaaacatgtgcctgtaacttacttccaaaaacaaaatcatacttattagaagaaaattctgattttatag

SEQ ID NO: 251564 - DNA, 1662 bp, Homo Sapiens
  misc_feature (21)..(21): n is a, c, g, or t
  misc_feature (442)..(442): n is a, c, g, or t
  misc_feature (476)..(476): n is a, c, g, or t
  misc_feature (1400)..(1400): n is a, c, g, or t
  misc_feature (1410)..(1410): n is a, c, g, or t
  misc_feature (1487)..(1487): n is a, c, g, or t
  misc_feature (1510)..(1510): n is a, c, g, or t
  misc_feature (1604)..(1604): n is a, c, g, or t
  misc_feature (1630)..(1630): n is a, c, g, or t
  misc_feature (1653)..(1653): n is a, c, g, or t
accagagcaaaattcaatggnaacctgcacataagtctcaatttcacttcttgccaaaaacaaaatagagtatacataaaaatagatataacccagataaccatatacatcagtatatgaccagtgctatttacatgtaaaatgttgcattgcataattcaaggaataaaataccatcatgcatttcatttaacttttaaggtgaaaaaatgcagtaacagaactaagtttgcttaccatgattgtcccaatatttacttaagaaacaatacccaaaggtttcttgtttacatatctctttccacatctagctattcatctgtgtaacagattacaccactttagcaacaagaaacttttgaacaatatctattatactgacatattaaactgaagatatgaatacataatcacactgaaagttttgatgaaaatgtatganagaatcccaagaattagtttttccaatgtaaaanactatttggaatatcgtaaaggagcagtgaagtcctttcaaagtttaatgtcactcttcagacaggtacagacataacacacttctaaaaggaacattctttatcattctgcacaaattaaaatacaatgcaataatcaaaaagggaaacattatataattgttacattagatgaagtttttgccatttcttcaggagaatggctctttacgacttctttgatgaactgttcaagtgcagtgaaatagccttggcactgccatgtgtcattgtgagtcccatctggaaaaatggctaatctcttagtccgagatggggagagttcataaagttgtttcatcattactggtggaattaattgatctgagagtccagagatgaaaagtgaaggcattctacactgagagatttttctgtaggacaaaaatttatttttgtagcaccataaaggaaggtaacgcatcggaaagaatgaaaataaagtgctggccatatgtggtatgcttaaaaatgtgttctccaccataatggctgaaatcctatgtgaattttcagaagccaaatgaatagccactgctccacccaaggaacggccaaaaagaaaaatttttgttttatcaaggtcaggtctagtcatcacgtagtctaacacagcttcagaatctaagtagagtccttcttcacttgcttctccttcactttttccatatcctcgataatcaaccagcaaaaggttaactttgaggttaaccaacataagtaatgcatttggcaacctgtgacctatgttgcctgaattcccatgaaaataaattatagttggggaatagggtgaattgtctccagtgtatcgtatcaaaataagattcagacgtattccatctttggttctgatgaaaatgttttcatgtggaatgccagtgngaatgggaanataaagacgtgaagaggatggctgttctggaaaataaagaaataaatcctggaatttataaagaatacctgatattnatatgaatattaaaaaaagtaanataatgcctccatacagatgaaaagtaactattaaaggtaaaagagaaatacggcagagagcccaagaccatgaagccaaggttattagccatntttcaacaaagttccacagcatccangaattttccattgtagctctttntaagtatcc

SEQ ID NO: 251565 - DNA, 1290 bp, Homo Sapiens
  misc_feature (851)..(870): n is a, c, g, or t
  misc_feature (879)..(917): n is a, c, g, or t
  misc_feature (964)..(1036): n is a, c, g, or t
  misc_feature (1075)..(1083): n is a, c, g, or t
  misc_feature (1167)..(1167): n is a, c, g, or t
aattgagttgcgccgctttcaggagttgcggggtggggcagagaacgaatacgctccgttttaattcagtggcctgggctacatgggatatttaggacagactatctctctgagacagaaaaacaagggaggaggcagtatgaaagaatgtattctcgctaaattccagtttctaaaggatgtgtaagaaaccagaggtaaaggtctcgcgatatcttaagacatccggcgtagtacgcttcagtgagccacagcgctagagaagtaggagaagctcgcgagatctgtgccgttgccgaggagactaggagggggaggagaggggatctcgcgaaaggaaagaggtcgggagcgctcgcgagatctcggaccacccaacctgaaaggtgcttaggaagttgaaaggcccagaggaggcctccgggcaaatggccggagctggaccgaccatgctgctacgagaagagaatggctgttgcagtcggcgtcagagcagctccagtgctggggattcggacggagagcgcgaggactcggcggctgagcgcgcccgacagcagctagaggcgctgctcaacaagactatgcgcattcgcatgacagatggacggacactggtcggctgcttcctctgcactgaccgtgactgcaatgtcatcctgggctcggcgcaggagttcctcaagccgtcggattccttctctgccggggagccccgtgtgctgggcctggccatggtacccggacaccacatcgtttccattgaggtgcagagggagagtctgaccgggcctccgtatctctgaccacgatggcgcttacctttcagacttcattaaacttatgaccgnnnnnnnnnnnnnnnnnnnnctcgaggcnnnnnnnnnnnnnnnnnnnnnnnnnnnnnnnnnnnnnnncatggtcatagctgtttcctgacccagctttcttgtacaaagtggtnnnnnnnnnnnnnnnnnnnnnnnnnnnnnnnnnnnnnnnnnnnnnnnnnnnnnnnnnnnnnnnnnnnnnnnnntgcagtacccgggaatttaacccgcctaatgagcgggcnnnnnnnnngtgatcccaaggatcttccttgagatccctttttttctgcgagtaatctgcctgcttggcaacaaaaaaaccacccgctaccangggggggtttgggttgccggatcaagaagcttcccaactcctttttccgaaggtacctggctttcaccagagcgcaaatacccaataccgggtcttcctaagggaaccccgagtttaggcccc

SEQ ID NO: 251566 - DNA, 436 bp, Homo Sapiens
ggggagtgccccgcgggctgccgggagctgtggttccgcgggcgggcagcctgggctgcgcggtctgagcgcttgttacaccccgcgcaggattcggacggagagcgcgaggactcggcggctgagcgcgcccgacagcagctagaggcgctgctcaacaagactatgcgcattcgcatgacagatggacggacactggtcggctgcttcctctgcactgaccgtgactgcaatgtcatcctgggctcggcgcaggagttcctcaagccgtcggattccttctctgccggggagccccgtgtgctgggcctggccatggtacccggacaccacatcgtttccattgaggtgcagagggagagtctgaccgggcctccgtatctctgaccacgatggcgcttacctttcagacttcattaaacttatgaccgaaaaa

SEQ ID NO: 251567 - DNA, 824 bp, Homo Sapiens
  misc_feature (607)..(607): n is a, c, g, or t
cgcgaatccgtcgcggaacctgtcttctgtctttacccagagctaccatgagcaagcggaaccaggtatcgtacgtgcggccagccgagccggcgtttctggcccgcttcaaggaacgggtcggctacagggagggacccaccgtagagactaagagaattcagcctcagcccccagatgaagatggggatcacagtgacaaagaagatgaacagcctcaagtggtggttttaaaaaagggagacctgtcagttgaagaagtcatgaaaattaaagcagaaataaaggctgccaaagcagatgaagaaccaactccagccgatggaagaatcatatatcgaaaaccagtcaagcatccctcagatgaaaaatattcaggtttaacagcaagctcaaaaaagaagaagccaaatgaagatgaagtaaatcaggactcggtcaaaaagaactcacaaaaacaaattaaaaatagtagcctcctttcttttgacaacgaagatgaaaatgagtaagtgtaaatattttgaatttagtctactttgaaagtatatggagtgttcattaaaatcacattttttccctattatataagatactacaagttctnttatagaaagtttaggaaatagagaaaaaaatttaataaactacatctattcatcaatacccctctgacttaaaatgccaactctatagaaattagctagtattaacattttgttatttcccttgtgtggttgtatatatatgtaaattatatttttaagcaaaatacattttttgtgtgtaaacaaaattttataaatacaactgtattgcaaaaa

SEQ ID NO: 251568 - DNA, 873 bp, Homo Sapiens
  misc_feature (29)..(29): n is a, c, g, or t
  misc_feature (76)..(76): n is a, c, g, or t
  misc_feature (151)..(151): n is a, c, g, or t
agatgaccattgctggtttataaggggtnactttgcaattgccaaaaagaattctgaaacttaatgcttacttgcnaattaaccaggccagccatacatcttcaggtccagaaacgccaatcattaaattaagtgtaaagttcatggaaantttgaccagctgaattgagcaccccagaggcatgaagataaccttggagccttattttccttgccaatgcaaattgtggctgctgcataactaccaaatttgtgtatcaagaaacctacattagtttcaaggcttaaaaattacccagatttgggggagtatgggtggtgagaaaaggctgaaaggaatggacagagcatgtagacaaaggaagggaaaggaaaaggagacagtttcctgatttcatagcaactcaaagataacatgacccaatgacaggaaaatggagaacgtataaaaagcatccaaatcccctaaacaagatgacttctcctagctagcaggaataatgctactctgaacatacatagttcacaggtaagggaactgacccttcctgaaagggcaaaggcagggtaaggaagaatgggaagagaagaatacaaatgttttttaagatggaattgaaagttgaatataataaaaagcccagtacatctcacctgcagaagagcctacaggcatgttcctaaaggcaaataggactttctatcatatgtatgagaactaaatcaaagcttaaaacaacagctcctggggctttaatggataatccatattaataaatatgtaggggcctagggggcgtgtcactctggagcacttgctggttctggaacatgagtttgttatgttttttaaaagacattcatttaaaaaac

SEQ ID NO: 251569 - DNA, 1309 bp, Homo Sapiens
ggggcaatcagcgagattccgtgggcgtaggaccctctgagccagatctttctctggaatcaaaggactccagctgaaagttaacctccaacccaatgataactactttttctatgtgagggccatcaatgcatttgggacaagtgaacagagtgaagctgctctcatctccaccagaggaaccagatttctcttgttgagagaaacagctcatcctgctctacacatttcctcaagtgggacagtgatcagctttggtgagaggagacagctgacggaaatcccgtcagtgctgggtgaggagctgccttcctgtggccagcattactgggaaaccacagtcacagactgcccagcatatcgactcggcatctgctccagctcggctgtgcaggcaggtgccctaggacaaggggagacctcatggtacatgcactgctctgagccacagagatacacatttttctacagtggtattgtgagtgatgttcatgcgactgagcgaccacccaaagtgggcatccggctggactacaacaaccacagacttatcttcatcaacgcagagagcgagcagttgctcttcatcatcaggcacaggtttaatgagggtgtccaccctgcctttgccctggagaaacctggaaaatgtactttgcacctggggatagagcccccggattctgtaaggcacaagtgatccttggctttcagaatttgcaagaacagcgatttgaattttgggggggtctgctgttcattcctttaggtgctatacattattcaaaaagtctcccgcgcatttgcactaatgatggctgcatgcatagcaatcagcatgtgagcaaaatcgacaagaaaaccttgactttacagagcagtgtgcgagtaaacagaatgaaaacaacaacctccactctttagtttatataagtttgagttctttcctaaattaaaagatctacacttgagttgggaaccgaaagagaaaaatggacttccatctgttttactggtaaaggaaatcctctgatggacaggtcagagtgaaggaaggttgtgctggtaagacatctctgacgaagagccatggatgctttccacaaaatgtcacctcgctgcactaaaggatgatgaatcctaatcattaaaggaattgtttcagctgatttaaatttataatgaactcttttgtaataatgtatactgtagaacatgagtctctcctccctaaaattttaaatgtagaaaagtgctatatattagaaatttccattttgttaaataaatggttagagtctataaagcc

SEQ ID NO: 251570 - DNA, 720 bp, Homo Sapiens
gaggcattggctgggtccccattgggtgtatggatgtggtcaagtgcaagagagctaccgaaatactgagtgataacatctaccgccagcctccggacaagctgaaatttaccagtgtgaccgattctctagagcaggtgctggccaagaacaatgctctcaacatgaataagcgtttatacacagaggcctgggacaaagacaagactcaaattcacataatgcctggtacaccagagattatgttggcaaggcagaacaaaatcaactacagtgagactctatacaaacttgccaatgaagaagcaaaaaagaaaggctacgacttgcgaagtgacgccatccccatcgtggctgccaaggcctccagggacgttatcagtgattacaaatacaaagaaggctaccgcaaacagctcggccaccacattggagcccggaacattaaagatgaccccaagatgatgtggtccatccatgtggccaagatccagagtgacagggagtacaagaaggactttgagaagtggaagaccaagttcagcagcccagtggacatgctgggggtggtgctggccaagaagtgtcagatccttgtaagcgacatagactacaagcatcccctgcatgaatggacctgcctgcctgatcagaatgacgtcattcaggctcggaaggcctatgacctgcagagtgatgctatttacaaatctgatcttg

SEQ ID NO: 251571 - DNA, 1074 bp, Homo Sapiens
  misc_feature (178)..(179): n is a, c, g, or t
  misc_feature (182)..(184): n is a, c, g, or t
  misc_feature (941)..(979): n is a, c, g, or t
  misc_feature (1044)..(1044): n is a, c, g, or t
aaatgggtggaggaattcccaaaagccccttagttcccagtgcccgaggattctccctaggggaacccaggcttagggacccaatgtttcacttttcccttagctggggcccggggcgcccaaaaagaaatggttctaggaaaagattctcgaaggggcgaggccgggccgaccaggnnttnnntaaatatggttggtgtggtgtttttttaacatggccatttcaccactattaacagcacacgggcctggctgtacgtttttaactatgacatttcccatatgatattcgaggcctggtggacacatgactgacagtgcacatccagagattctacactcatcagacacagacatgaccgcaaaggtatcaaagtgaccccactttaagcagtgaaaaaagacctttccttttgttctcaaatcagcattttctaaagtcaggtgttagccttttgccaacagtgtgtacttgatggtaattatggcaacatagagcttcaaacaagatcgcctgacaacactgccgcatacacatacggcacccaggactcagaatcagtctgtcctggcaaatccttccaaatgacatcatagtgttgtcacattgaaagcaactcacagccttcagtgaggaaaggggagaggagaatgagaaggggagaaaagccaaggcagggacaaaggcccggtgggggatgggggttgcagggtggaggggggtctttattgctatatgcaccataaaacaaaggaaaaccaaatgaacttctgtgtgtaatgttcacttgtgaaggtattttaaagcatgaaatgcttaagtcttaaaaaacatatgctatagcttaccggcattttcaagggcaggaacctgctctctcatatgagccgataagagctttgcaatgcaatttattttctaaataccactctattcttcnnnnnnnnnnnnnnnnnnnnnnnnnnnnnnnnnnnnnnnggcctggccaatcactcccacagtttgtggggatcatatgtccacagaaccatcacatgcaacgnaaaaagccctaacccacacacatacacaca

SEQ ID NO: 251572 - DNA, 384 bp, Homo Sapiens
gacagtggcgaaagaacagaagaaagctaagactgcagaaaagagtgaagaaaagactaaaaaggaagtgaaaggtggaaaacaggagaaagtgaagcaaacagctgcaaaagtaaaagaagtacagaaaacaccatcaaaacccaaagaaaaggaggacaaagagaaagcagctgtgtcaaagcatgaacagaaagatcagtatgcattctgtcgatatatgattgacatatttgtccatggggatttaaaaccaggacaaagcccagccattccacctcccttaccgacagaacaagcttccagacccactccggcatcacctgcccttgaagaaaaagaaggggaaaagaagaaggctgagaagaaagttacttctgaaac

SEQ ID NO: 251573 - DNA, 643 bp, Homo Sapiens
gagaagagaactacctaatgctgccctgcgagcttgctgtgtttcctgtctgacatcctgctaagtgaatccattgccaagagcagcttactgtaggcctgtgtgagtctaaaggcctagatgaacctaaaaagaagccctggtgggcattatagataaggtcaggccagagctcctccactttcctcaaatgaaggcttctggactaaatgatccagcaactaccaccggcttgacctctctggaacaagcttagatttaacagagaacaaacatcaatccagagagagaaatccaaaggcgggatcagtgtggcttactgtgccagtcttttcctcagatctttgatttggtcattcttcttggtaagaatctctttcatgtttcgataagctgctgtttgctgaaatttcttttctaattcctgcttagtaaaaaatgtcagcccattactaaaaaaatagttaaggaaagagataacaaatgcgataaaaatatgtagttttttttgcttgaattttactagtattttgctaatgattttctaatttccttaaaggacacatttatataaaactaagactatccaaactttaaaaatatattctttcaaatgagaagccataaaatagtaacattttcc

SEQ ID NO: 251574 - DNA, 1491 bp, Homo Sapiens
  misc_feature (1110)..(1110): n is a, c, g, or t
  misc_feature (1115)..(1115): n is a, c, g, or t
  misc_feature (1117)..(1117): n is a, c, g, or t
  misc_feature (1353)..(1353): n is a, c, g, or t
ttctaaacaacctaccctccttccccattttctgtggtccaactaccctcggcgatcccaggcttggcggggcaccgcctggcctctcccgttcctttaggctgccgccgctgcctgccgccatggcagagttgggcctaaatgagcaccatcaaaatgaagttattaattatatgcgttttgctcgttcaaagagaggcttgagactcaaaactgtagattcctgcttccaagacctcaaggagagcaggctggtggaggacaccttcaccatagatgaagtctctgaagtcctcaatggattacaagctgtggttcatagtgaggtggaatctgagctcatcaacactgcctataccaatgtgttacttctgcgacagctgtttgcacaagctgagaagtggtatcttaagctacagacagacatctctgaacttgaaaaccgagaattattagaacaagttgcagaatttgaaaaagccagagattacatccttcaaacaaaaagcccatcttaaatggtcacaaagccaaaacttgctccacttaatgaaggtggaacagcagaactcctaaacaaggaaattttaagacttcaagaagagaatgagaaattgaagtcaaggttgaagaccattgaaatacaggctacaaatgcactggatgaaaagtcaaaactagaaaaagcactgcaagatttacagcttgatcaaggaaatcaaaaggattttataaaggcccaagacttaagtaacttagaaaacactgtcgctgccttaaagagtgagtttcagaagacacttaatgacaagacagaaaaccagaagtcactggaggagaatctggcgacagccaagcacgatctactcagggttcaggagcagctgcacatggctgaaaaggaattagaaaagaaatttcagcaaacagcagcttatcgaaacatgaaagagattcttaccaagaagaatgaccaaatcaaagatctgaggaaaagactggcacaatatgaacctgaagattaaaactgaagatttcctctggaagctaccacatgcaaacatacaagcagtctcacctcaggcatgtattttgaaaagcattttgtcntatcncntctccttatttttctaatatttagactttgaatatttagaactagagttcctattttcagctagttgaaaacagagaaaacctagtgattctgtctggtcatcccacacacctctctactgagtgctccagagtcttagctcacatgcactgagaattctttacagcaaagaagagatttttagagtgggaagaagaggcttatccttctgcattagtataaagagtctgtatttntaataaatgttaaataagctaacaatgtttgtacttatgcattccccaatgggtaaaaataaataatagcattgttaaagatagttattaccaaaaaaagagagttattacaaataaatatgtctctttattttttcg

SEQ ID NO: 251575 - DNA, 744 bp, Homo Sapiens
  misc_feature (71)..(108): n is a, c, g, or t
  misc_feature (642)..(667): n is a, c, g, or t
cagaggtggtggtggggcaagatcgcaccattgcacccgagcctaggcaacaagagtgaaattccgtctcnnnnnnnnnnnnnnnnnnnnnnnnnnnnnnnnnnnnnntaattctttatccagagtcgggtgctttagaatttataagtcacttatgtgttttgcttgaattaattctgacagcccctatgaggaaatctggaggcaggtaacagttcccattttagagatgaagaactgaggcacagattaaaggacttgcctgtgttgaataccagtcctgttctaggacattctcccctctcctaggagacggatgtcacgcacaaatggggagagaagtgtttattttgtaggcactaagggtttctaaaacccttaacactggtaagggctcaaaaataaacgtatgtgttcatattcgatcaccgaaatgagagttcttaattgctaattgacaaacgcgttagcaatttcagttagggagtcatctcccttgattgtgttcttttcctgtcaattttcatagacctaatttgcaaactcaatcggggactaaaatttcccactgaaaatgttaaacattttagataactgtgaagatagtttatttttattccttgccaatctgggaatatgccnnnnnnnnnnnnnnnnnnnnnnnnnnaagtgctgtattaataatactttctgaaagaaaaggacacttaccccaaaacttcaatctgaaatgtcttacattaa

SEQ ID NO: 251576 - DNA, 673 bp, Homo Sapiens
aaaaattaaatataaataaggcactatttcttagatctacatcacttcgttttttccctgggaaaacaaagacccagtcttttcagggatagtcaaggtgctaaaaggccaagatagacatcaggtgaaagggagtgaagtcaccctagttccactattatattctgatgtgagctgtgtggttcctcagatcaagaaagaaactagtttgctgagttctcattgataaagaataagcagtcacaggccataggacacatctatattagacaaggtttcacacctcacccactgaaacatattcactggctattcctttcagtccttctgctttgcatctttaaatcctaactccctaatcataagcatgagagaaatccggcttatccatgttcttgggagtttttttaaaacattaaactcacaaacttctctccctttaaaaaaaatgtacccaggaaaccagtggagaaagatgaggagacaaagcagaaagtataccattctacaaaataaatgcctgttgctaaaacatcgtaagcaaaaaacccatagagcggcttcagtggggctgtagtacatttgtttccaggttaagcactataaaggtttaatttcaacagctctaaccctctgatttaggaaacaagcagggtctttaacctttaactta

SEQ ID NO: 251577 - DNA, 662 bp, Homo Sapiens
ggcatcaaagcttccagagggagaggaaggatggacggcaccactgcccctgtcactaaatctggagctgccaagttagttaagagaaatttccttgaggcgctaaagtccaatgacttcggaaaattgaaggctattttgatccaaaggcaaatagatgtggacactgtttttgaagtcgaagatgagaatatggttttggcatcttataaacaaggttactggttgcctagctataaattgaagtcttcctgggccacaggcctccatctctctgtcttgtttggccatgtggaatgtcttctggtgctactggaccacaatgctacaatcaactgtagacccaatgggaaaacccctcttcacgtggcttgtgaaatggccaatgtggattgtgttaagatcctctgtgatcgtggggcaaagctcaattgctactccttaagtggacacacagctttgcacttttgtacaactccaagttccattctctgtgccaagcaattggtttggagaggggcgaatgtgaacatgaagaccaacaaccaagatgaggagacgcccttgcacacggctgcccacttcggcctttcggagctggtggccttctacgtggaacacggggccatagtggacagcgtgaatgcccacatggagacccc

SEQ ID NO: 251578 - DNA, 437 bp, Homo Sapiens
  misc_feature (18)..(18): n is a, c, g, or t
  misc_feature (35)..(35): n is a, c, g, or t
  misc_feature (58)..(58): n is a, c, g, or t
tttcccagaaagtccagngataccagaagtacccnattttggccaaggttaaaacccngtttgaaggcccttgggagaaaaggggtttccattggtagggtaccatagtgccacctgttaatattttaaacaagtagttcactccttcccatttaagggatagcaggtcccttgtataaaatgactggatgtgtataaaggaattatgttgtcatgtgcctttaaccagctttagtaattactataatctcatatttatgatagttttgttaggtgacaggaccaaatgaaaatattttatgttttctcatcactttagattttatcattatgtacattactgggtttttagcatttcctaatgtgaagttttaatcacttttaagtatacatttttttctgtatcatttaaataaaatatttttataactttaaaa

SEQ ID NO: 251579 - DNA, 1022 bp, Homo Sapiens
tggtacggcccggaattcccgggatatcgtcgaacccacgcgtcgcgtgtgtccacgccggatggggcagagctcgattgtggatgtggttgagaaccatgacggtacctttgacatctactacacagcgcccgagccgggcaagtacgtcatcaccatccgcttcgggggtgagcacatccccaacagccccttccacgtgctggcgtgtgaccccctgccgcacgaggaggagccctctgaagtgccacagctgcgccagccctacgctcctccccggcccggcgcccgccccacacactgggccacagaggagccagtggtgcctgtggagccaatggagtccatgctgaggcccttcaacccggtcatccccttcgcggtgcagaaaggggagctcacaggagaggtgcggatgccctcggggaagacggcacggcccaacatcaccgacaacaaggacggcaccatcacggtgaggtatgcacccactgagaaaggcctgcaccagatggggatcaagtatgacggcaaccacatccctgggagccccttacagttctatgtggatgccatcaacagccgccatgtcagtgcctatgggccaggcctgagccatggcatggtcaacaagccagcaccttcactattgtcaccaaagatgctggagaagggggtctgtcactggccgtggagggcccatccaaggcagagatccctgtacgaccacaggtggcaccgcaccgtgtctaattgcgattgcgcctgggacacacgatcatcggggcgtcgtgaaagcacatccgggaaccttaaagcaagatcacagggagatccgagacccacagtggaagtgggacccacgaggtcaaatccattctctgcgcacgcgcgatccgcacggaaagagccgcgtagagcgacaggaagtcacacccacgacggaggagaggaaggaaacaacagggacagaagggagagagaaaaacaagcaatacgagaccacacccagcggcgcgcgg

SEQ ID NO: 251580 - DNA, 489 bp, Homo Sapiens
aggcgtttcagagtggctgccagattatatacctcatcctcatctaggaaggacgactgagaaggaaagaagatccacaatagcatttcccccagaactcatcagtccacatcccccgtcttgcagcccctcccacccttgtttggggtgtcccattgtccagccccagctcctacctgtaacagctcttcaagctcctgctggaagcggtcagtcagcaaatctactagctggctgcgggcaaagtccgcccggctgaagaaagtgaattcgggattacagagcaggtagagggcatgcgccccagcctcaagcaccgctggctctgcatgcttcaccaccacctcctggagttgctgcaggaacagctccaggtgctgagaagaaaaggcagaagatggtgtgctgtggggatgggaggaggacactcttctggcgggaagtggaacggggttaaaagcattaaacttcaaggataagatgcctaaa

SEQ ID NO: 251581 - DNA, 570 bp, Homo Sapiens
ggctgtgtgtgtgaagcgtacctagggcgggaggcgacatggagacaggggcggccgagctgtatgaccaggcccttttgggcatcctgcagcacgtgggcaacgtccaggatttcctgcgcgttctctttggcttcctctaccgcaagacagacttctatcgcttgctgcgccacccatcggaccgcatgggcttcccgcccggggccgcgcaggccttggtgctgcaggtattcaaaacctttgaccacatggcccgccaggatgatgagaagagaaggcaggaacttgaagagaaaatcagaagaaaggaagaggaagaggccaagactgtgtcagctgctgcagctgagaaggagccagtcccagttccagtccaggaaatagagattgactccaccacagaattggatgggcatcaggaagtagagaaagtgcagcctccaggccctgtgaaggaaatggcccatggttcacaggaggcagaagctccagcagcagttgctggtgctgctgaagtccctagggaaccaccaattcttcccaggattcaggagcagttccagaaaa

SEQ ID NO: 251582 - DNA, 798 bp, Homo Sapiens
gggaagcagggcgcgcagggaccagggtcccacaacccacaccaaggccacggcagtgtggcaccgggacccagatgcaaagtggctgttcctgccatggggccaatacccaatactatccctcagtcattcttcctagatattggtttgctgtttataaaagcagggcagggagtggggagaaatgcaacacagaatataaaatcaggcaaaacaaacactagtcaccatggaagtgaatgactctcaaagtctcccaaataacaaggtgtagggcatctcacaccactgcatcacttctggaagactacccacagggtgggggctgcaatgggggccaactcgggaactatagagaagagaggagacacacaccacaagacctcctttcattaggcaggaaagctcttgtgggacagtggtgtgcaaatcctaggacctcaatgggaagaactccaggaaaaaaaatgacaagtctttctcaggacccctcatagatgacaagaattctgctccccagggtcgagatctctttagaggggcttcaccagctcagtggcaaatatcagacaacaagactctcacattccaaaggggggatctagggccttttgctctcctgtgatgatcggagcaacatgtttggacccacagaagacttcccaggaaagctttcttacaaggggggtcagccaccaccgtaaaccagaaacaaaccacaaacttactctccaagagagcccccacaacccaagtatccatagagagtgtgcaggagcggggaccttcccctgaccc

SEQ ID NO: 251583 - DNA, 879 bp, Homo Sapiens
ggggctgtgtgtgtgaagcgtacctagggcgggaggcgacatggagacaggggcggccgagctgtatgaccaagcccctctaaagagatctcgaccctggggagcagaattcttgtcatctatgaggggtcctgagaaagacttgtcattttttttcctggagttcttcccattgaggtcctaggatttgcacaccactgtcccacaagagctttcctgcctaatgaaaggaggtcttgtggtgtgtgtctcctctcttctctatagttcccgagttggcccccattgcagcccccaccctgtgggtagtcttccagaagtgatgcagtggtgtgagatgccctacaccttgttatttgggagactttgagagtcattcacttccatggtgactagtgtttgttttgcctgattttatattctgtgttgcatttctccccactccctgccctgctttaataaacagcaaaccaatatctaggaagaatgactgagggatagtattgggtattggccccatggcaggaacagccacttgcatctggtcccggtgccacactgcggtgcttggtgtggttgtggagcctgtccctgcgcgccttgctcccgttgagccacgctgtctggtgggtgattctctgccctgagccaccaccctggactggcccagtctccagagctggcacaccctgcctgttttctctttttagacacaacagccgcagtttggccagccactaagtcccaccagctgaggtccgaggaaagcggggtgactcatttcccttgtccagggcccgaggagagtgaggtgtccagcctgcaaagctattccagctccttggtgttggtttgcaataaattggtatttaagcagta

SEQ ID NO: 251584 - DNA, 692 bp, Homo Sapiens
gggctgcggtccgtgcggaggctgagccggccgcgggcgcgaccggaggcagtttccgttactatggcaatgacggcagggactacaacaacctttcctatgagcaaccatacccgggaaagagtgactgtagccaagctcacattggagaatttttatagcaacctaattttacagcatgaagagagagaaaccaggcagaagaaattagaagtggccatggaagaagaaggattagcagatgaagagaaaaagttacgtcgatcacaacacgctcgcaaagaaacagagttcttacggctcaaaaggaccagacttggcttggatgactttgagtctctgaaagttataggaagaggagcttttggagaggtgcggttggtccagaagaaagatacaggccatatctatgcaatgaagatattgagaaagtctgatatgcttgaaaaagagcaggtggcccatatccgagcagaaagagatattttggtagaagcagatggtgcctgggtggtgaagatgttttacagttttcaggataagaggaatctttatctaatcatggaatttctccctggaggtgacatgatgacattgctaatgaagaaagacaccttgacagaagaggaaacacagttctacatttcagagactgttctggcaatagatgcgatccaccagttgggtttcat

SEQ ID NO: 251585 - DNA, 793 bp, Homo Sapiens
ttctaacagaaactcttaggtggaatgtttctgaaggctttaaaaaaaatacaataaagtaaaaaccgcagttggaactctttcctctccccagccccccttaccttcactcccatactggacaagacattttggacatgagttcaagggggcaggttaattcctggcattgccagatttcttcattcagaatctgtttgttgatcaagtgactgtccccgtaaaaagtagaagataagtttgttaaagtattttttataaacagcttaatataaaacattatagatttagtgtttggcttttttccttataagtttataagtttgatttcagatgttggaaatgtgtgctttatagtgtttactaaagtgacaagaaaatataccatttgacacactatagattccaaacataacgttgcaccaaatagaaatgtatattttattatgcaatgccttagtcataaactgggctcaaacaattctcagcctaaaacactgttgtcttttaaaatgcttccaacccaaaggcctttcatctcaatatctgtcaaacttgaataatggcttctctttaatattcacataaggcagcctattaactgtgtcttagcaatgttgtatatagatcttttaatattcataaggtatatatttgaattttggtatatgttgagattgcatataagaatagtaggaaatccaatgaaatggctgtgttcaccaagaattcttagcactggtgtaaatatcatggtgcctactcgaaagagatgtaaatgctatgcattttg

SEQ ID NO: 251586 - DNA, 835 bp, Homo Sapiens
gaatttatactaatcaagacaaacctttgaaaggttacactaagtacagaacttttaaaccttgctttgtatgagttgtactttttgaacataagctgcacttttattttctaatgcagaggatgaataagttaaatacatgctttgaggatagaagcagatgttctgtttggcaccacgttataatctgcttattttacaatatacacgtttccctaagaaatcatggcagagatgtgagggcagaatatacacaacagatgctgaaggagaaggagggtagtgttttgcaaaagaaaaagaaaagaaccaacagaattttaactctattaacttttccaaattttcctatgcttttagttaacatcattattgtatcctaatgccactaggggagagagcttttgactctgttgggttttatttgaatgtgtgcataacagtaatgagatctggaaacacctattttttggggaaaaaggtttgttggtctccttcctgtgttcctacgaaactcccactctcaggtgcaagagttatgtagaaggaaagggagctgaaataggaacagaaaaatcaacccctataactagtgaacaccaagggaaaataccacaatgatttcagaggagactctgcaaaatcgtcccttgtggagaatgcaggcaacatggaatactacgaatgaaatcacatcactgtatcttttacatcaatagcctcaccactaatatatcttgtatctaggtgtctataatggctgaaaccactacatccatctatgccatttacctgaaaacttaactgtggcctttatgaggccagaaaagtgaac

SEQ ID NO: 251587 - DNA, 742 bp, Homo Sapiens
  misc_feature (147)..(147): n is a, c, g, or t
  misc_feature (541)..(551): n is a, c, g, or t
tttccccaaaaaataggtgtttccggatctcattactgttatgcccacattcaaataaaacccaccagagtcaaaagctttctcccatagtggcattaggacccaataatgatgttacctaactttttctttggcaaaacactaccntccttctcctcaagcatctgttgtgtatattctgccctcacatctctgccatgatttcttagggaaacgtgtatattgtaaaataagcagattataacgtggtgccaaacagaacatctgcttctatcctcaaagcatgtatttaacttattcatcctctgcattagaaaataaaagtgcagcttatgttcaaaaagtacaactcatacaaagcaaggtttaaaagttctgtacttagtgtaacctttcaaaggtttgtcttgattagtataaattcagactctgcttacccattgactataagtaactgttttttgttttcaagtctttagatgacagatcatgctggagtagatgtgctcttgcttgcataaagacagctgtgctatggcgnnnnnnnnnnnaatctcaaaagttaacgtgattcaagagagtggttttgctaaacaaactgaagcacactcgtcattacattaaaaggtaagaaaacaattctgagagacagcaagcataaagggcccagaatcactgtgcgaggccacaggtcaactcacacagcggacatatgtacaccagtgttgaatctttaaaattc

SEQ ID NO: 251588 - DNA, 1206 bp, Homo Sapiens
acaatgaaaattcctgttcggaacacaagttgctgtttatatttgcttgttctcttaaatagtatgagaagaagtaaggtggagctgttgggaaagcccatcgtggacctttggagattatcttcttggttcagtcatctccaccacagatttttaagagtgtgatttcatagtctccagaagtatccgatttaattgctgaatatagggaatagccataatgcttcttgaactctgttcgaatgtccaaaaggtcaatttctgatctggacaccattattcggttcagagtaaactcatcagttccaatacccttcaaggctcgatgcagtctttcggctaaaaaggccggcgtgttcctcacacaattaactatggccaacagtaagtcttcaaaatgcccagataattctcctttttatgctgtccaacaatgtccttttggatgatatttctgtattcatcaaatgttagttttaattgaggaaagctccttaaacacaggatctcagtgaatttgtcttcatccgtgccccatctgttctcaccagctttatagagaatctgggcatcttgtttggccagatgctcatccactttcagactttcatctcttctgccatctgccaaagtcaacagagctttccggaagtcaccagatgtttcggaactaatgtcatctccaagactcttcttgtatactgtataataggcttgagagatatccttcatttgcctgcttgtcctggtagttaagatttcaatcaaggcatcttcgtttgttcccgcgcccttcatggatttctttagctgctttgcatcaaagactgctggtggagtcactagggccaccatgagatgctcaaagtggccagagagatcacccttcaagtcatctttcagctcctttccatatgctgcttgatattccttaacaatcagctgccgctgtgcatttgacctctcagtcagaatgctgatgagcattttctcatcagttccaattcctctgattgctttctgaatagcttcagcatccactgatgggctaaagtctggataatctcttactgttcctcggtgtccaacccagatagatgccatgatatcccacctttgccttgagctgagatcacactaatccaaagcgcggtgggggaaactggtgtgcgagtaaactgcgaacaaactgcgagcgaaggtccc

SEQ ID NO: 251589 - DNA, 494 bp, Homo Sapiens
taggacttgggctgctaactccaggatcagctcctccatctcaaattgtctttgtgaggccttgtcatcctcggggggttcatggtagaggagtgccagcacctcatactccttgaacacattcttgtagttctttgcattgacattgatcacacggtccacaccatcgtactcagggaagtccagcccttcctgcccctgtacccctgacttgggtgtccctagcaccagcagcaacagcagtgccagccgcagacccggcacagctctgggccccatcctgtctgtagcactcatggaggtagtgggatctgggttggctctcctggtccagaagaggttagctggggtagggaggggcccctgggtcccagattctgagttaggggctcaagtgggaggggggattggggaatggcccagagcagtggacagagggcactgctgggtcctggagaaactgccgacagagccaagggaaaaagggtcaggtc

SEQ ID NO: 251590 - DNA, 812 bp, Homo Sapiens
ggggttgaagataaacaccctgtttgtacattttttgtcatctgtctttcctcctagacaatatatcatccctttatgtgaaatcacattatggccatagactttgatagggagtttttttacttcgttccatttggcagccacaggatcatagcataatactgaatccagcgaagcctctgtttgaaggtctttgcctgcaactacatagattttatcatccacctctcccagaccgaagagacacctggctgaaggcagaggtggaagtccaacccattcagatgctatgctatcgagctggaagaagtatgactgtagaggttgatccttattttcttcatccacatatagtcctcctaccacatatatctgattttgctgggtaacaatgctggaatgatttctgggaatctgctcagccagtgcagtaaggtagcattcattttccgtggggtcataagccactgctgctgtgtcattaaccaagaggatgaggtcttttacaaacattccatgcctgggaatgtcattcaggtaaccaggaagtaaatcttcatcaccaacatcaccattcacctcaccagccccagtcttcgcggcatttttgctaggttctgggagtttgcctgcgaaagcatcttttagaactttgatttttttctggaggtctgggttgcttttaattatatcatctttctcaacatgatccttaaaatatttttctgtcataaggcgaaaacggatacaatcaaacacttcactaaggtttttaaccctgttttccttgtctgttcgcacccatttcatca

SEQ ID NO: 251591 - DNA, 1278 bp, Homo Sapiens
  misc_feature (1141)..(1141): n is a, c, g, or t
ggggagacacaagcgagaggatcatggcggatggccccaggtgtaagcgcagaaagcaggcgaacccgcggcgcaataacgttacaaattataatactgtggtagaaacaaattcagattcagatgatgaagacaaactgcatattgtggaagaagaaagtgttacagatgcagctgactgtgaaggtgtaccagaggatgacctgccaacagaccagacagtgttaccagggaggagcagtgaaagagaagggaatgctaagaactgctgggaggatgacagaaaggaagggcaagaaatcctggggcctgaagctcaggcagatgaagcaggatgtacagtaaaagatgatgaatgcgagtcagatgcagaaaatgagcaaaaccatgatcctaatgttgaagagtttctacaacaacaagacactgctgtcatttttcctgaggcacctgaagaggaccagaggcagggcacaccagaagccagtggtcatgatgaaaatggaacaccagatgcattttcacaattactcacctgtccatattgtgatagaggctataaacgctttacctctctgaaagaacacattaaatatcgtcatgaaaagaatgaagataactttagttgctccctgtgcagttacacctttgcatacagaacccaacttgaacgtcacatgacatcacataaatcaggaagagatcaaagacatgtgacgcagtctgggtgtaatcgtaaattcaaatgcactgagtgtggaaaagctttcaaatacaaacatcacctaaaagagcacttaagaattcacagtggagagaagccatatgaatgcccaaactgcaagaaacgcttttcccattctggctcctatagctcacacataagcagtaagaaatgtatcagcttgatacctgtgaatgggcgaccaagaacaggactcaagacatctcagtgttcttcaccgtctctttcagcatcaccaggcagtcccacacgaccacagatacggcaaaagatagagaataaaccccttcaagaacaactttctgttaaccaaattaactgttcaacccctttccaaatggggttttcactggtggtggcccattacaggcaaccagttctcctcagggcatggtngcagctgttgttctgccacagttgggttggtgtctccctaagtatcatttaagtgatttcagaatgacttaaaggggcgtagatggtaatgaataaggcagtgttggagattatcccatcttgcatccaagacaagc

SEQ ID NO: 251592 - DNA, 456 bp, Homo Sapiens
tttctgttaaccaaattaaaactgaacctgtggattatgaattcaaacccatagtggttgcttcaggaatcaactgttcaacccctttacaaaatggggttttcactggtggtggcccattacaggcaaccagttctcctcagggcatggtgcaagctgttgttctgccaacagttggtttggtgtctcccataagtatcaatttaagtgatattcagaatgtacttaaagtggcggtagatggtaatgtaataaggcaagtgttggagaataatcaagccaatcttgcatccaaagaacaagaaacaatcaatgcttcacccatacaacaaggtggccattctgttatttcagccatcagtcttcctttggttgatcaagatggaacaaccaaaattatcatcaactacagtcttgagcagcctagccaacttcaagttgttcctcaaaatttaa

SEQ ID NO: 251593 - DNA, 503 bp, Homo Sapiens
gggactgcggggctcttgaggccagctgcagagcttgtggaggccatggggcagcgtcgtcgcggagctcgtctcctcgctgctggggttgtggctgttgctgtgcagctgcggatgccccgagggcgccgagctgcgtgctccgccagataaaatcgcgattattggagccggaattggtggcacttcagcagcctattacctgcggcagaaatttgggaaagatgtgaagatagacctgtttgaaagagaagaggtcgggggccgcctggctaccatgatggtgcaggggcaagaatacgaggcaggaggttctgtcatccatcctttaaatctgcacatgaaacgttttgtcaaagacctgggtctctctgctgttcaggcctctggtggcctactggggatatataatggagagactctggtatttgaggagagcaactggttcataattaacgtgattaaattagtttggcgctatggatttcaatccctccgtatgc

SEQ ID NO: 251594 - DNA, 747 bp, Homo Sapiens
ttgtacagcgtgctcacggtgtcgtccgggagcacctcacactccttctgcagcagcaggtctccggtgtccagaccatcatccgcccagaagatggaaaacccccctttcttatctccgtgaatgagggtccagttgatggccgaggcccctcggtgcctagggagcagtgacgggtgatagatgatggagccatgccggggggcactgattatctccatggggatgaattggctgcagaagggcaggacgttgagctcggcccccaaagcctggtattttgccaccacatcaggcaaagcctgtccttttgcacgccaccgggagtacttgaataccggcactccatccttctcagcttccagacccagggggtcggcctttccatccttgtctggaacagtgaacacacccaccacttcgtggccctccttcctcaggtggcagtaaacttcctggccaaacaggctctgtccaatcactgcaatcttcatggtagcaggagggttggaaggaccgcgcgcaggagttggtgcgggcgtcccgggcaggttagacttctgtgagccgcagccccgaaactgaggttggtgcagacccgtcccgggagccaggaggtgggacctgtccccgccagtccgcgagctctggttaaggccagagcccgtgaggggaggggcgcggggcgggcggagagtcagccgagtgggggcggcgctcaccggtggtgggactatggcgggagcc

SEQ ID NO: 251595 - DNA, 424 bp, Homo Sapiens
agcagcgcccaaaatccctatgctattacagtgggaattacatcaagctgctttgttcaactgagaggcccaggaaagcggggagggtccctgatcagggcaggaggccacctcagaagcccaggcccaccagtgcccaagcacatgtcagggctcagaacaaggcctcaaccaagagggttgatggcctccagtcaagaaactgtggctcatgccagcagagctctctcctcctccagcaggcgccatgcaagggcaggctaaaagacctccagtgcatcaacatccatctagcagagagaaaaggggcactgaagcagctatgtctgccaggggctaggggctcccttgcagacagcaatgctacaataaaggacacagaaatgggggaggtgggggagcggcctcgtgccgcctcgtgccg

SEQ ID NO: 251596 - DNA, 440 bp, Homo Sapiens
gcaagaactatatcagccagtattctgaaattgctatccagatgatgatgcacatgcaacccaaggagatctgtgcgctggttgggttctgtgatgaggtgaaagagatgcccatgcagactctggtccccgccaaagtggcctccaagaatgtcatccctgccctggaactggtggagcccattaagaagcacgaggtcccagcaaagtctgatgtttactgtgaggtgtgtgaattcctggtgaaggaggtgaccaagctgattgacaacaacaagactgagagtactcgacgcttttgacgacacgtacggcagctccatcctgtccatcctgctggaggaggtcagccctgagctggtgtgcagcatgctgcacctctgctctggcacgcggctgcctgcactgaccgttcacgtgactcagccggcggtggcttc

SEQ ID NO: 251597 - DNA, 2775 bp, Homo Sapiens
gggatgctgacgctccgcattgcagactgcggagtcagacggcgctatgtacgccctcttcctcctggccagcctcctgggcgcggctctagccggcccggtccttggactgaaagaatgcaccaggggctcggcagtgtggtgccagaatgtgaagacggcgtccgactgcggggcagtgaagcactgcctgcagaccgtttggaacaagccaacagtgaaatcccttccctgcgacatatgcaaagacgttgtcaccgcagctggtgatatgctgaaggacaatgccactgaggaggagatccttgtttacttggagaagacctgtgactggcttccgaaaccgaacatgtctgcttcatgcaaggagatagtggactcctacctccctgtcatcctggacatcattaaaggagaaatgagccgtcctggggaggtgtgctctgctctcaacctctgcgagtctctccagaagcacctagcagagctgaatcaccagaagcagctggagtccaataagatcccagagctggacatgactgaggtggtggcccccttcatggccaacatccctctcctcctctaccctcaggacggcccccgcagcaagccccagccaaaggataatggggacgtttgccaggactgcattcagatggtgactgacatccagactgctgtacggaccaactccacctttgtccaggccttggtggaacatgtcaaggaggagtgtgaccgcctgggccctggcatggccgacatatgcaagaactatatcagccagtattctgaaattgctatccagatgatgatgcacatgcaacccaaggagatctgtgcgctggttgggttctgtgatgaggtgaaagagatgcccatgcagactctggtccccgccaaagtggcctccaagaatgtcatccctgccctggaactggtggagcccattaagaagcacgaggtcccagcaaagtctgatgtttactgtgaggtgtgtgaattcctggtgaaggaggtgaccaagctgattgacaacaacaagactgagaaagaaatactcgacgcttttgacaaaatgtgctcgaagctgccgaagtccctgtcggaagagtgccaggaggtggtggacacgtacggcagctccatcctgtccatcctgctggaggaggtcagccctgagctggtgtgcagcatgctgcacctctgctctggcacgcggctgcctgcactgaccgttcacgtgactcagccaaaggacggtggcttctgcgaagtgtgcaagaagctggtgggttatttggatcgcaacctggagacagcaccaagcaggagatcctggctgctcttgagaaaggctgcagcttcctgccagacccttaccagaagcagtgtgatcagtttgtggcagagtacgagcccgtgctgatcgagatcctggtggaggtgatggatccttccttcgtgtgcttgaaaattggagcctgcccctcggcccataagcccttgttgggaactgagaagtgtatatggggcccaagctactggtgccagaacacagagacagcagcccagtgcaatgctgtcgagcattgcaaaacgccatgtgtggaactaggaggaggaatattccatcttggcagaaaccacagcattggtttttttctacttgtgtgtctgggggaatgaacgcacagatctgtttgactttgttataaaaatagggctcccccacctcccccatttctgtgtcctttattgtagcattgctgtctgcaagggagcccctagcccctggcagacatagctgcttcagtgccccttttctctctgctagatggatgttgatgcactggaggtcttttagcctgcccttgcatggcgcctgctggaggaggagagagctctgctggcatgagccacagtttcttgactggaggccatcaaccctcttggttgaggccttgttctgagccctgacatgtgcttgggcactggtgggcctgggcttctgaggtggcctcctgccctgatcagggaccctccccgctttcctgggcctctcagttgaacaaagcagcaaaacaaaggcagttttatatgaaagattagaagcctggaataatcaggctttttaaatgatgtaattcccactgtaatagcatagggattttggaagcagctgctggtggcttgggacatcagtggggccaagggttctctgtccctggttcaactgtgatttggctttcccgtgtctttcctggtgatgccttgtttggggttctgtgggtttgggtgggaagagggccatctgcctgaatgtaacctgctagctctccgaagccctgcggcctggcttgtgtgagcgtgtggacagtggtggccgcgctgtgcctgctcgtgttgcctacatgtccctggctgttgaggcgctgcttcagcctgcacccctcccttgtctcatagatgctccttttgaccttttcaaataaatatggatggcgagctcctagcctctggcttcctggtagagggcggcatgccgaagggtctgctgggtgtggattggatgctggggtgtgggggttggaagctgtctgtgcccacttgggcacccacgcttctgtccacttctggttgccaggagacagcaagcaaagccagcaggacatgaagttgctattaaatggacttcgtgatttttgttttgcactaaagtttctgtgatttaacaataaaattctgttagccagtaaaacaactccaaatgag

SEQ ID NO: 251598 - DNA, 412 bp, Homo Sapiens
atcctggtccagtccaaaccaccatcaccctgtgatgtgggagctggccacttcaccagaacctctgtgtcagaaaaatttctcttccttttaaaatgatgagggggaaccttcagacagtgtctgattagggtgggtggagagaggggtttcctagaaagtcaggcagggacaggctgaagccctctgggttaactgagtgcttttgatatgaaggcaggtaagactggacaggtgggggtgttggaagctgtctgtggcccacttgggcacccacgcttctgtccacttctggttgccaggagacagcaagcaaagccagcaggacatgaagttgctattaaatggacttcgtgatttttgttttgcactaaagtttctgtgatttaacgaataaaattctgttagccag

SEQ ID NO: 251599 - DNA, 955 bp, Homo Sapiens
  misc_feature (232)..(246): n is a, c, g, or t
  misc_feature (274)..(504): n is a, c, g, or t
  misc_feature (704)..(704): n is a, c, g, or t
  misc_feature (720)..(720): n is a, c, g, or t
  misc_feature (754)..(754): n is a, c, g, or t
  misc_feature (779)..(779): n is a, c, g, or t
gacttctaagtttggtactgtgaggcaagtacttaaaattttcatgctggttacttaaaaggcatttagagatttcaagaatgattttgtatacgatgttttaaattttgactgatctcatagtcttcatagaattgcagtagtcttcattgtatgaaatcccgaaagtccatgagttgatcttaaagaccactaacagactggctatcagatcccttttcactttggctannnnnnnnnnnnnnngagatggagtcttgctgtgtcactgagnnnnnnnnnnnnnnnnnnnnnnnnnnnnnnnnnnnnnnnnnnnnnnnnnnnnnnnnnnnnnnnnnnnnnnnnnnnnnnnnnnnnnnnnnnnnnnnnnnnnnnnnnnnnnnnnnnnnnnnnnnnnnnnnnnnnnnnnnnnnnnnnnnnnnnnnnnnnnnnnnnnnnnnnnnnnnnnnnnnnnnnnnnnnnnnnnnnnnnnnnnnnnnnnnnnnnnnnnnnnnnnnnnnnnnnatgagccactgcgcctggcccactttagctatttttaaaaataggacctattgttttggattactatctgagaatttcatggattcactcctgggtataggagataagaatacgtttaattcataacttttatattaaccaatatagtaaaaaaataaagctcacacatacaaaaactaagttgcctttccttgaatganccctgtctgaataaancaatgaaaaataaaaataaaattaatggtatgtngtctaatttgtaaatgaatgaatanggaaataatacacactgtggatatattttaaggccttatgtagttttaattgttctgctcgttccgtggttatgtttaagactatagtatatgactctcttcaaagtatatcaagtattgtgaatgctttggttcagatgtgtcaaattaacagtaaaacaacaaatataccaaaa

SEQ ID NO: 251600 - DNA, 633 bp, Homo Sapiens
aagagaaccggaccagctgctggcagggaaactgtcttccttttctccaagatgtacagaaccaaagtgggcttgaaggaccgccagcagctctacaagctgatcattagccagctgctatatgacggctacatcagcatcgccaatggcctcatcaatgaaatcaagcctcagtctgtgtgtgcaccctcggagcagctcctgcatctcatcaaactcggtagattgtgaacacaaatccatacgtcccatggcaaggaatggaaaacgatgacaccgcagttcagtatgcaattggtcgttcagatactgttgcccctggcacagggattgacctggaattagatgcagatgttcagactatgtgcccagaggcttctgagtacgaaacatgctatgtcacatcacataaaggaccatgccgtgtagctacctatagtagagatggacagttaatagctactgggtctgctgatgcttcgataaagatacttgacacagagaggatgttggccgtgccatgccaatagaagtcatgatgaatgagaccgcacaacacaatatggaataccacccagtgtttcgaactctttatgaccatgtggatgaaggtacgtgcctttgttttccccc

SEQ ID NO: 251601 - DNA, 1693 bp, Homo Sapiens
ggagtaagtaagatggcgagaaaagcaagagagagtgggaccgatcgatagcgcagcggtcggcttggcgccctttcagcgtgcgcagtgaacgtgcgctcggagcggtagattgggcaggattcgcgcctccatttttccaggagagagcgggataccaagagaaccggaccagctgctggcagggaaactgtcttccttttctccaagatgtacagaaccaaagtgggcttgaaggaccgccagcagctctacaagctgatcattagccagctgctatatgacggctacatcagcatcgccaatggcctcatcaatgaaatcaagcctcagtctgtgtgtgcaccctcggagcagctcctgcatctcatcaaactcggaatggaaaacgatgacaccgcagttcagtatgcaattggtcgttcagatactgttgcccctggcacagggattgacctggaatttgatgcagatgttcagactatgtccccagaggcttctgagtacgaaacatgctatgtcacatcacataaaggaccatgccgtgtagctacctatagtagagatggacagttaatagctactgggtctgctgatgcttcgataaagatacttgacacagagaggatgttggccaaaagtgccatgccaatagaggtcatgatgaatgagaccgcacaacaaaatatggaaaaccacccagtgattcgaactctttatgaccatgtggatgaagtcacgtgccttgctttccacccaacagaacagatcctggcttctggttcaagggattatactcttaaattatttgattattccaaaccatcagcaaaaagagccttcaaatacattcaggaagctgaaatgttacgttccatctcttttcatccttctggagactttatacttgtcggaactcagcatcctactcttcgcctttatgatatcaacacctttcaatgttttgtctcttgcaatcctcaagatcaacacaccgatgctatatgttccgttaattacaattctagtgccaatatgtacgtaactggaagcaaggacggctgcatcaaattatgggatggtgtttcaaatcgatgcatcacaacttttgagaaagcacatgacggtgctgaagtttgttctgccattttttccaaaaattctaaatacattctctcaagtggaaaagactctgtagctaaactttgggaaatatcaacgggacgaacactggtcagatacacgggcgcgggttaaagtggacgccaggtgcaccggacacaggctgtgtttaaccacaccgaggactatgtgttgctgcccgacgagaggacgatcagtctttgctgctgggactcgaggacagccgagcggagaaacctgctgtcgttgggcgcacaacaatattgtacgctgcatagtgcactcccccaccaaccccgggttcatgacgtgcagcgatgacttcagagcgcggttttggtaccggagatcgaccactgactgagccaccctctccgtaggggtctttctcgaggactctaccctcctcccacacgtcctgtctcagctgcagtcgtaagtccgtgcaccatccttgacgttttgctgccacctctgtccacattcttcttggatttgtataaaagaatctttttttaccttgatgtagaatcatggtggaaaaagttgg

SEQ ID NO: 251602 - DNA, 1246 bp, Homo Sapiens
  misc_feature (249)..(273): n is a, c, g, or t
ggcaaagaaaagagaagcagaggaagtttatcggaattctatgccagcttccagttttcagcagcagaaacttcgagtctgtgaagtctgctctgcctatttaggacttcatgataatgacagacgactggctgatcattttgggggtaaactgcacctgggatttattgaaataagagagaagcttgaagaattaaagagagtcgtagctgagaagcaggagaaaagaaaccaggaacggctgaaacnnnnnnnnnnnnnnnnnnnnnnnnnaagggagaagctgaggaggtcccgatcacacagcaagaatccaaaaagatccaggtccagagagcatcgcagacatcgatctcgctccatgtcacgtgaacgcaagaggagaactcgatccaaatctcgggagaaacgccatcgccacaggtcccgctccagcagccgtagccgcagccgtagccaccagagaagtcggcacagttctagagataggagcagagaacgatccaagaggagatcctcaaaagaaagattcagagaccaagacttagcatcatgtgacagagacaggagttcaagagacagatcacctcgtgacagagatcggaaagataagaagcggtcctatgagagtgctaatggcagatcagaagacaggaggagctctaagagcgccgaacaggcggagatctaactagctgtgtacatttcttcagtccttaagcttcctacggagttacgtactattgtttagttcacagctgttcagggtgacagtgagcagatccagacaccagatctagctaggctagatgtacagtatctaacttgatctgaactgaacctgttttccttgatgatgcctaaaactacatccatagtttctggtgaacctgtaatacagttctgaaagtacagttatatactaactaagatgctgatctctttattccttcaagtaagagtgctagtgaacaaattgtgttacttggccttgggattttttgaacgtttgtaaaatgctgtcttcctagtccaaacagctgcagctttgggcatttttctttttaattattcttcctctgactttgtatcccttaatacctacactctccaattgtaagagaaagggggcagggaagcaatatagcttccattctaaggctgtattcccgttatgaattactagctgattacagttcagagcattgatcctggaatgtgtgctggagaaatttaaaatactggg

SEQ ID NO: 251603 - DNA, 465 bp, Homo Sapiens
  misc_feature (19)..(19): n is a, c, g, or t
tgcccggctgcttaagttnccttaaaatacagaaaggctaggcggaaacagtgttttttgcccctttaattgttaattatttccttaatttaaaaagaaacctagggcttaagatagtccctatcttctatttggatgtcagcaaggttaaaaagtgcaatgcccaggagtatgtagctataggtggcctgtggcatttgcttacagaaacaggcagaagggatgccgcaggcacccaggaggcacttgtctaagaacaacaacaacaataacaaaaagctgctgagaaaggagggcaggggaacaaaacaacacaagacatttcctttttctccctctagccaccccccgccacatcccctgatcatgggtctcagagaacacatccttatttgcatttagataaaagcagatcacccacattcactcatttctctatttttaaaaggtgcccagattcccggc

SEQ ID NO: 251604 - DNA, 514 bp, Homo Sapiens
tctagaacacaggctgtgcagaacaggtgactgagacctgaaccattcaccacccgaattttcaagggtgattcaacgcacagactgagggtccatgaatcctaaggccacttcactgccacaccgatgaaccagaaagggggacatcacttccatttcattttgttttcaaaagctttcttctaaacttaacttttaattttcctgaaaattatacacaaaaatatttctaggttaatcttcccacctaaaatttgatgggttgtaatctgaattataaattgcaatattgaagtgggatagagaaaataattaccttcagttaatataatgttaatacaaggaatttaactttatgttcttaaaaaagccaggattttaaaagctatcttgaattcaacatggcgtttatgccctaggcttagcttctgctgaacttaaaggtgcttcactatgactgaggtctcagcctcacatgctaagtctcactttctctcctccctaagtcataggc

SEQ ID NO: 251605 - DNA, 496 bp, Homo Sapiens
ttcaaagcacagtactgttagctgtttttgtggacaggattcgattaagtattccctcttgtcaaactggaagctaggggaaaaagagggatttttatcctttactcttctagagtactgttaatgcccctttcccacagtcttttatataattaaatatatgtcaatacacattagaatcagatttgaaaaagttaaaacaatttcattgttgtaattgttccctttctgttttcatatagtgaataacctttaaagggttgttttgttttgttttgaattataggagttataatctttggagatgattgcatatctcattagatatgcaatataaatttatctgagtgaacaaagtgctaaataaatagatctacattttgtacatatttatataaaatttacctttaagtatttactttaaaaaatttaatggcttaactcgaacttgaagacacatacttcaactgtccttattgtccattaaactgataat

SEQ ID NO: 251606 - DNA, 914 bp, Homo Sapiens
  misc_feature (328)..(331): n is a, c, g, or t
  misc_feature (333)..(333): n is a, c, g, or t
  misc_feature (335)..(338): n is a, c, g, or t
  misc_feature (346)..(347): n is a, c, g, or t
gggcggataaaaagggcggatcatgtgcgaaacgtctccgccttggggggtctcccctggttgggataagggttcccacgtgaaaggggcccctccgggaaacccccctatctggggaatttgttcacgaaacgcttccgggtttcccgccggggcgggttttttaatggggggggaatcccaggcccttagtccatggccaaggtatttcctagggaacccagctatggcccaggttccacttaccctactggggccccgcgcgcccaaaccgaattggtcctagaaaagctttctccgagggcccgaggcggcccgaccatgggtnnnntntnnnngggggtgnntgtttttaacaactggtcatcaatttattaaaatagttgacttaagcatctgcaatggtgacttccacctcaactcctggctcaatactgatggaagtaatctgcttaacaatctcagaaggactgtgcaagtcaatgagtcgcttgtgaattctcatctggaaacgatcccacgtcttagaaccttcaccacaaggagtttttcttgtagtgattctcaaagtcttggtaggcattcgaactggtcctttcactttgagattcttttcttttgcgcctcttatcaagtcagcacacaccttttccaaggattttacgttgcggcttgttagggtgattcgaattcggtgaattgccacctccggctccacgggtgtttttccggtatccttaaaagccatggctgttgcgcgcgggcttcctgaccgacttgttcctcggcgagagcgaacagcggtgagtcaggagcaggagcgtgcggaccaaaaatcctcagcccttacgaccgcgtcttcctcaaaaagaaccccggccgtaatgggtctctgcgttgataccactgcttcc

SEQ ID NO: 251607 - DNA, 522 bp, Homo Sapiens
tttaacaactggtcatcaatttattaaaatagttgacttaagcatctgcaatggtgacttccacctcaactcctggctcaatactgatggaagtaatctgcttaacaatctcagaaggactgtgcaagtcaatgagtcgcttgtgaattctcatctggaaacgatcccacgtcttagaaccttcaccacaaggagtttttctcgtagtgattctcaaagtcttggtaggcattcgaactggtcctttcactttgagattcttttcttttgcgcctcttatcaagtcagcacacaccttttccaaggattttacgttgcggcttgttagggtgattcgaattcggtgaattgccacctccggctccacgggtgtttttccggtatccttaaaagccatggctgttgcgcgcgggcttcctgaccgacttgttcctcggcgagagcgaacagcggtgagtcaggagcaggagcgtgcggaccaaaaatcctcagcccttacgaccgcgtcttcctcaaaaagaa

SEQ ID NO: 251608 - DNA, 842 bp, Homo Sapiens
ggggaagaggcaattcaccgaattcgaatcaccctaacaagcgcgcaacgtaaaatccttggaaaaggagtgcgctgacttgataagaggcgcaaaagaaaagaatctcagagagagaggaccagttcgaatgcctaccaagactttgagaatcactacgagaaaaactccttgaggtgaaggttctaagacgtgggatcgtttccagatgagaattcacgagcgactcattgacttgcacagtccttctgagatagctaagcagattacttccatcagtattgagccaggagttgacggggaagtcaccattgcaaatgcttaagtcaactattgtaataaattgatgaccagctccagacttgggatcagttataaactctagagtgcttactgcagtgcatggtattcagtcagcttttgatgaagctatgtcatactgtcgatatcatccttccaaagggtattggtggcacttcaaagatcatgaagagcaagataaagtcagacctaaagccaaaaggaaagaagaaccaagctctatttttcagagacaacgtgtggatgctttacttttagacctcagacaaaaatttccacccaaatttgtgcagctaaagcctggagaaaagcctgttccagtggatcaaacaaagaaagaggcagaacctataccagaaactgtaaaacctgaggagaaagagaccacaaagaaatgtacaccgacagtgagtgctaaagggccccctgaaaaacggatgagacttcagtgagtactggaccaaagagaaacctggaagactctccctgctagttatcaaacctccgaactgtgggttctc

SEQ ID NO: 251609 - DNA, 400 bp, Homo Sapiens
agggtgaccctcctctctgcttggctcaatactgatggaagtaatctgcttaacaatctcagaaggactgtgcaagtcaatgagtcgcttgtgtcttgtagtgattctcaaagtcttggtaggcattcgaactggtcccactttgagattccttttgcgcctcttatcaagtcagcacacaccttttccaaggattttacgttgcggcttgttagggtgattcgaattcggtgaattgccacctccggctccacgggtgtttttccggtatccttaaaagccatggctgttgcgcgcgggcttcctgaccgacttgttcctcggcgagagcgaacagcggtgagtcaggagcaggagcgtgcggaccaaaaatcctcagcccttacctcgtgcgaattcc

SEQ ID NO: 251610 - DNA, 983 bp, Homo Sapiens
  misc_feature (486)..(607): n is a, c, g, or t
  misc_feature (655)..(670): n is a, c, g, or t
  misc_feature (680)..(690): n is a, c, g, or t
  misc_feature (766)..(776): n is a, c, g, or t
  misc_feature (833)..(833): n is a, c, g, or t
  misc_feature (924)..(924): n is a, c, g, or t
accccctgttcccctctcgcccgaggaaacaaagtcgggtcaggaaagccccgcgccgcaatcagccccatggcttttaaagggatacccgggaaaaaacacccccgtggaggccggagggtggcaattccacccgaattccgaatcaccccctaacaagcccgcaaccgtaaaatcccttggaaaaggtgtgtgcctgaccttgataagaggcgcaaaagaaaagaatcctcaaagtgaaaggaccagttcgaatgccctacccaagactttgagaatcacctacaagaaaaactccttgtggtgaaggttcctaagacgtgggatcgtttccagatgagaattcacaagcgactcattgacttgcacagtccttctgagattgttaagcagattacttccatcagtattgagccaggagttgaggtggaagtcaccattgcagatgcttaagtcaactattttaataaatccatgactttttcnnnnnnnnnnnnnnnnnnnnnnnnnnnnnnnnnnnnnnnnnnnnnnnnnnnnnnnnnnnnnnnnnnnnnnnnnnnnnnnnnnnnnnnnnnnnnnnnnnnnnnnnnnnnnnnnnnnnnnnnnngggaacaaagaaaaaaagagaagaagacaaggggggaggagagcccgnnnnnnnnnnnnnnnnagagaaacannnnnnnnnnngcgaccccccaagaggaaaccgcggagggcaaagcgggcgcgacgtcaaaggggcccccggggaaacccacgaggnnnnnnnnnnnccccaagagagcgccccccgccgccgcaaagaccggaagaaaccccagaaaaaccanaccgggcgccccgggaagggcccaccacggggcgaaaagcgggacaggcgccgccaaaaaaggggggaaaaaccgccggagaccgccccgncgcgcaacaagaaaacccggcaaaagaaaataaatagccccgggggaaacacaacccgg

SEQ ID NO: 251611 - DNA, 424 bp, Homo Sapiens
tgcccccagcaccagggaaaaaccagcccccgggcattttcaacccccagggaccctgaaaatccctattaagtgtaaattgggaatccatccccaaagggaaacctaatgaaatgattaagaagtaatgattttccccagatgttcctagggataaagtataaaacgataaacacttggtttccctttgtcttttgttacagactttgagaatcactacaagaaaaactccttgtggtgaaggttctaagacgtgggatcgtttccagatgagaattcacaagcgactcattgacttgcacagtccttctgagattgttaagcagattacttccatcagtattgagccaggagttgaggtggaagtcaccattgcagatgcttaagtcaactattttaataaattgatgaccagttgttaaaa

SEQ ID NO: 251612 - DNA, 392 bp, Homo Sapiens
  misc_feature (58)..(58): n is a, c, g, or t
  misc_feature (63)..(63): n is a, c, g, or t
tcgccttggtgaaaatcctccatctgggaaaacgaacccaacgtccttaaaaaccttncaccnacaaggaatttttccttgtaatgatcctcaaaaatccttggtaaggcaattcgaaactggtcctttcactttgaagattcttttcttttgcgcctcttatcaagtcagcacacaccttttcccaaggattttacgttgcggcttgttagggtgattcgaattcggtgaattgcccactccggctccacgggtgtttttccggtatccttaaaagccatggctgttgcgcgcgggcttcctgaccgacttgttcctcggcgagagcgaacagcggtgagtcaggagcaggagcgtgcggaccaaaaatcctcagcccttacgaccgcgtc

SEQ ID NO: 251613 - DNA, 1051 bp, Homo Sapiens
ggggtcacgtgatgcgccgggagcgtcatcgcctcctccctccccaagatggcgtccttgctgcagtcggaccgggttctctatctagtccagggagaaaagaaggttcgggccccgctctcgcaactctacttctgccgctattgtagcgaactgcggtcgctggaatgtgtgtctcacgaggtggactcccattattgtcccagttgtttagaaaatatgccatcggctgaagccaaactaaaaaagaatagatgtgccaattgttttgactgtcctggctgcatgcacaccctctctactcgggccacgagcatctccacacagcttccagatgacccagccaagaccaccatgaagaaagcctattacctggcatgtggattttgtcgctggacgtctagagatgtgggcatggcagacaaatctgtagctagtggcggttggcaggaacctgaaaatcctcacacacaacggatgaacaaattgattgaatattaccagcagcttgctcagaaagagaaggttgagcgagatcgcaagaaactggcacgacgtagaaaactatatgcctctggctttttcggacaaatatggtcttgggaacaggcttcagcgaccacgagctggtgcatccatcagtacccttgccggactttcccttaaagaaggagaggatcagaaagagataaagattgagccagctcaggctgtggatgaagtggaacctctacctgaagactattatacaagaccagtaaatttaacagaggtaacaacccttcagcagcgtctgttacagcctgacttccagccagtctgtgcttcacagctctatcctcgccacaaacatcttctgatcaaacggtccctgcgctgccgtaaatgtgaacataatttgagcaagccagaatttaacccaacgtcaatcaaattcaaaatccagctggtcgctgtgtaagtattttgggattggtgttttcagttactgttttgagttattttggtttattcttcttccccagtatgaagtgtgtttactcttggccta

SEQ ID NO: 251614 - DNA, 1144 bp, Homo Sapiens
  misc_feature (492)..(492): n is a, c, g, or t
  misc_feature (1015)..(1015): n is a, c, g, or t
tgggtggcgaattcggcacgaggctggactctattacctggcagaactgatagaagaatacacagtggccaccagcaggatcataaaatacatgatctggttctccaccgctgtactgattggcctctacgtctttgagcgcttccccaccagcatgattggagtgggcctattcaccaacctcgtctactttggcctcctccagaccttccccttcatcatgctgacctcgcctaacttcatcctgtcgtgtggactagtggtggtgaatcattacctagcatttcagttttttgcagaagaatattatcccttctcagagtctctcttgttgccaggtcctggcctatttcactttctgcctgtggataattccgtttgcgttttttgtgtcactttcggccggggagaacgtcctgccctctaccatgcagccaggagatgatgtcgtctccaattatttcaccaaaggcaagcggggcaaacgcttanggatcctggttgtcttctccttcatcaaagaggccattctacccagtcgtcagaagatatactgacccccatgcaggcaggatgtggggggcaagatcaggagagtcaggcccctgggcctctatgccaggtggggaccagaagtcgggaagagcacctaccacctgccctggctttcttcccctcaactctggagcccccatccccaccctccttgggggggctcagcttgggctcagatctgatgcttcaagaggctggtaacctcaaagggcaccaagggagggtgggcaaagcctgccttagcccaggaggccgaaggcccctcagtccctcccctgtcccttccaaggtgggtcaggaggttctggccccgctggggcaggcagggcagggtctgtgaagcttaagagcagatggtgacaagttctctgggcaggtggccatggggaggggccatggcttggcatgtccaacagaaatagtttttgctgttgaacggtgatttctgtccaagtgcagnatttccgtttgaataaagcttcgcttctaggtggcactgtttgccttaataccctgacagttcatcttcctttcttcctgctaaccttctgctctggactggactcacttttctgctccagggactcct

SEQ ID NO: 251615 - DNA, 923 bp, Homo Sapiens
gttccgggtaaagcaagggctcttcccccctccctggttgcccttggaggttacagcctctgaaagcatcagatctgagccaaggtgagccccccaagggaggggtggggatggggctccagagttgagggaaagaaagccagggcaggtggtaggtgccttcccgacttctggtccccacctggcatagaggcccaggggcctgactctcctgatcttgccccccacatcctgcctgcatgggggtcagtatatcttctgacgaactgggtagaatggcctctttaatgaaggagaagacaacccaggatccctaagcgtttgccccgcttgcctttggtgaaataattggagacgacatcatctcctggctgcatggtagagggcaggacgttctccccggccgaaagtgacacaaaaaacgcaaacggaattatccacaggcagaaagtgaaataggccaggacctctgagaagggataatattcttctgcaaaaaactgaaatgctaggtaatgattcaccaccactagtccacacgacaggatgaagttaggcgaggtcagcatgatgaaggggaaggtctggaggaggccaaagtagacgaggttggtgaataggcccactccaatcatgctggtggggaagcgctcaaagacgtagaggccaatcagtacagcggtggagaaccagatcatgtattttatgatcctgctggtggccactgtgtattcttctatcagttctgccaggtaatagagtccagccgcgacagccagcgtgatgaaggccacctggatgaagagcgacagccagctcagcaggtacatgaaccacatggcgcccccacccgcccgctccccggccaccgggacgggcctgcgcgcttcggcctcgtgccgaattcgccacccaggctggaa

SEQ ID NO: 251616 - DNA, 561 bp, Homo Sapiens
gtgtttgcaacttgttcagattttgcattagcaggttggcttctttgcctaatccttttaggattttcttttccaatttttgctccttattgctgacgggctctttgacagtgggtggctctccagaagcaacgggttctcttccagcctcttcagttgtttcctcacagtccccatcctcgttgtcaggtgattctgcattctcaggctgctcactggccctggcagagccctctttccctgccgtgctggcagcagacccataagtgttaatgatgtcttccagctgtcgattcagctcttcagagatatcggggtgcacacttgcctctttctctggtggttggactggggttggagaatcctggccatcttccttctccaggccattgtgactgggtaatgatgaactgtcacctggaggtgttgactgtcgttccgctgagagctgttcagagtgattagcctccatcttgggagtagtatcagaaggcaagaagctaagcaagaagagagaggagaggaaggaggcaggaaaaagcaagtcagagctgcagcaac

SEQ ID NO: 251617 - DNA, 1104 bp, Homo Sapiens
  misc_feature (733)..(819): n is a, c, g, or t
  misc_feature (834)..(1008): n is a, c, g, or t
  misc_feature (1056)..(1056): n is a, c, g, or t
  misc_feature (1071)..(1071): n is a, c, g, or t
  misc_feature (1081)..(1081): n is a, c, g, or t
  misc_feature (1088)..(1088): n is a, c, g, or t
ctcatgatgtctgtggtgctgtaaaatttatactaaaatgtggactacttttgaaattactaaccactttttgatgccctgaatcttgaggtgacttatctttgcactagaggatatggatagaccaacagtaagggttgtgggttataccggcatagagaaaagaagaaaactagaattgaaacaactgtgtcttagacatttgtttgaaaaagcttcatcaggccttggagcagtcactgctttattccgcaaaaattatttggtaggaaatttttgggagatctgattttcttatccaagttttgtaaatagtcgttatttctatatttggattggtgaaagacctcaagtttatatgtaaagacataactgcccttagtcatgaaattgttgtgacctctactttttgtcactaatagcctacattcaagtgcctgtgttttttcatcttgtttaggaatgttttgagattaatgtgcttaaaagtcctacgtgactgattttaaacattgtgataaaattaattttcagtagaatagttgaatgtgttaagataggattttatgttagagataccagaatgctggtattctactacttgtgcaatatatatgttttaaaaaacaaatttgagaatacatttaatcatagggatatagatataagcacctctctaaagaatctttagtttccgacgttgaattatagaccagtttgagtaagtactgcnnnnnnnnnnnnnnnnnnnnnnnnnnnnnnnnnnnnnnnnnnnnnnnnnnnnnnnnnnnnnnnnnnnnnnnnnnnnnnnnnnnnnnngtgggttcaaacagnnnnnnnnnnnnnnnnnnnnnnnnnnnnnnnnnnnnnnnnnnnnnnnnnnnnnnnnnnnnnnnnnnnnnnnnnnnnnnnnnnnnnnnnnnnnnnnnnnnnnnnnnnnnnnnnnnnnnnnnnnnnnnnnnnnnnnnnnnnnnnnnnnnnnnnnnnnnnnnnnnnnnnnnnnnnnnntgacactcatggcccggcccataaagtaccgttttttgaggttcagtnctttaaacatttggnttttaagganaacagtnttgtattttcacatgg

SEQ ID NO: 251618 - DNA, 651 bp, Homo Sapiens
ggaaggagctgaccagccagctgacccctcacactcacctagccaccatggacatcgccatccaccacccctggatccgccgccccttctttcctttccactcccccagccgcctctttgaccagttcttcggagagcacctgttggagtctgatcttttcccgacgtctacttccctgagtcccttctaccttcggccaccctccttcctgcgggcacccagctggtttgacactggactctcagaggtgagtctccccacagctaggacgggagagtccttactggaacctcctggaaacttctccatccattttcctttcctaccctgcctaaaccattttaggcacatgtgtgtccaaatgtgaagaaaaatgaggaggttgctagtgccttcctcccccatcacctgtttctatttgatagtcctctgtatcccatttattacattttttcatgcactgtcaagtttatcctccgtcccctaacttctctacaggatacccctttctggtttggttcatgacaatctgcagggaaagagctgccttcaaactcctttgcttatctcctccaacaccttggactcttgaccgattttaccatctcaggtttcagagccaggagagagccctgcctcatcctgagctg

SEQ ID NO: 251619 - DNA, 1217 bp, Homo Sapiens
  misc_feature (1116)..(1116): n is a, c, g, or t
  misc_feature (1122)..(1122): n is a, c, g, or t
  misc_feature (1124)..(1124): n is a, c, g, or t
  misc_feature (1153)..(1153): n is a, c, g, or t
  misc_feature (1174)..(1175): n is a, c, g, or t
  misc_feature (1180)..(1180): n is a, c, g, or t
  misc_feature (1196)..(1196): n is a, c, g, or t
gccggggagaaaggggctgcgtccaatgagtggagcgaaccgcggcaggggccaagcctcctcaactatgacctcaaccggccaggattccaccacaaccaggcagcgaagaagtaggcagaacccccagtcgccccctcaggactccagtgtcacttcgaagcgaaatattaaaaagggagccgttccccgctctatccccaatctagcggaggtaaagaagaaaggcaaaatgaagaagctcggccaagcaatggaagaagacctaatcgtgggactgcaagggatggatctgaaccttgaggctgaagcactggctggcactggcttggtgttggatgagcagttaaatgaattccattgcctctgggatgacagcttcccggaaggccctgagcggctccatgccatcaaggagcaactgatccaggagggcctcctagatcgctgcgtgtcctttcaggcccggtttgctgaaaaggaagagctgatgttggttcacagcctagaatatattgatctgatggaaacaacccagtacatgaatgagggagaactccgtgtcctagcagacacctacgactcagtttatctgcatccgaactcatactcctgtgcctgcctggcctcaggctctgtcctcaggctggtggatgcggtcctgggggctgagatccggaatggcatggccatcattaggcctcctggacatcacgcccagcacagtcttatggatggctattgcatgttcaaccacgtggctgtggcagcccgctatgctcaacagaaacaccgcatccggagggtccttatcgtagattggggatgtgcaccacggtcaaggaacacagttcaccttcgaccaggaccccagtgtcctctatttctccatccaccgctacgagcagggtaggttctggccccacctgaaggcctctaactggtccaccacaggtttcggccaaggccaaggatataccatcaatgtgccttggaaccaggtggggatgcgggatgctgactacattgctgctttcctgcacgtcctgctgccagtcgccctcgaggtcctggggatctggggtgtgttgggaggaggagtggccttgaaggtangctgtnanggtaggtagctcatggagtctgttccccntcagtccagctcagctggtcnngtggntgcggattgatgcctnaagggacccaaggtgaaaggc

SEQ ID NO: 251620 - DNA, 1262 bp, Homo Sapiens
  misc_feature (739)..(739): n is a, c, g, or t
tttatttcatgtcataaaatggtgacacttacttgtgttaaaaaaatttaataacaatgtaatcattatatctctgcaatcagctgaagttctaagaaaaaatgacaatgttgaaagttgtatcatcattattataaactttcatgttcagtatatgtaaactccaaagccaatttcaaaagatatttttgtgaaataccattctttaaaaaaaaggatattatatataattgtatgaatgttaaatgttttacagtactgatttgctacattttatgtatgctgtaaaacaaataccattttaaagtatattggaattcgtaactaaagtaataaataaatgcttgaaatatacccagtagaaacttatttttattatccaatccttttgataagaaatgccactagtgttatgtacaaacttgatcttctttgaaatgtgttgtccactgcttttctgtttctgtcacagtagctataaacagctgtttaaggatatccttatctaaatttctgccaatgaggaccaatcgatttgttctctcagtgtcatccttccagctcactggagtctcctccagatcatagagctcatggacacccctggacaatcacttgtggtgatttgtctttgattgacaccaatcccttcaggccttatggacctccatggcagtgattgtccttgtttctcacattcttttcccacaggaggattctggaataaacatattaagantgttcttcctttgcatttcctggtacttcaaatgtgattgtaacaatactctgatcaaggtgaggttgtgttcctggcacatgctgaagttttttctgcaaacttattccagagagactatcaaaggcatgaagatctaatacattagagagatcaactcttgatctttgtgtttctaagatttgtcctagtccatttatggatctaattgtcgttcttaatttctttacatcttcttctggaaccaagtctgttttattaatgagaatgatatctgccaaagcaacttgcctagtagcttcattgataaggccatcaggtttctcttctgttaaatgtgctttgggccctatccatatgctcagattgggaacgggtcagtgggtgggatgatttcattctcttctgcctttagtggtatttcacttttaatccatattttgaatccacaatagttatgataccatcaaggtaaatatcactccctaattcagcatcaacccaaaacatagaagtcactgcc

SEQ ID NO: 251621 - DNA, 1288 bp, Homo Sapiens
  misc_feature (1054)..(1054): n is a, c, g, or t
  misc_feature (1061)..(1061): n is a, c, g, or t
  misc_feature (1082)..(1082): n is a, c, g, or t
  misc_feature (1088)..(1088): n is a, c, g, or t
  misc_feature (1103)..(1103): n is a, c, g, or t
  misc_feature (1156)..(1156): n is a, c, g, or t
  misc_feature (1172)..(1172): n is a, c, g, or t
  misc_feature (1178)..(1178): n is a, c, g, or t
  misc_feature (1183)..(1183): n is a, c, g, or t
  misc_feature (1190)..(1190): n is a, c, g, or t
  misc_feature (1207)..(1207): n is a, c, g, or t
  misc_feature (1223)..(1224): n is a, c, g, or t
  misc_feature (1234)..(1235): n is a, c, g, or t
  misc_feature (1237)..(1237): n is a, c, g, or t
  misc_feature (1267)..(1268): n is a, c, g, or t
  misc_feature (1273)..(1273): n is a, c, g, or t
  misc_feature (1281)..(1281): n is a, c, g, or t
ggggtgctgggcgtgcgcggctgcggtacggcgtgttggtcccagcggttcagctgaggtagggacgtgctgtaggccggaatgttaccggctgttggatctgcggatgaggaggaggatcctgcggaggaggattgtcctgaattggttcccatggagacgacgcaaagcgaggaggaggaaaagtctggcctcggcgccaagatcccagtcacaattatcaccgggtatttaggtgctgggaagacaacacttctgaactatattttgacagagcaacatagtaaaagagtagcggtcattttaaatgaatttggggaaggaagtgcgctggagaaatccttagctgtcagccaaggtggagagctctatgaagagtggctggaacttagaaacggttgcctctgctgttcagtgaaggacagtggccttagagctattgagaatttgatgcaaaagaaggggaaatttgattacatactgttagagaccactggattagcagaccctggtgcagtggcttctatgttttgggttgatgctgaattagggagtgatatttatcttgatggtatcataactattgtggattcaaaatatggattaaaacatttaacagaagagaaacctgatggccttatcaatgaagctactaggcaagttgctttggcagatgccattctcattaataaaacagacctggttccagaagaagatgtaaagaaattaagaacgacaattagatccataaatggactaggacaaatcttagaaacacaaagatcaagagttgatctctctaatgtattagatcttcatgcctttgatagtctctctggaataagtttgcagaaaaaacttcagcatgtgccaggaacacaacctcaccttgatcagagtattgttacaatcacatttgaagtaccaggaaatgcaaaggaagaacatcttaatatgtttattcagaatctcctgtgggaaaagaatgtgagaaacaaggacaatcactgcatggaggtcataaggctgaagggattggtgtcaatcaaagacnaatcacnacaagtgattgcccagggtgnccatgngctctatgatctggnggagactccagtgagctggatggatgacactgagagaacaaatcgattgggcngccttggcagaaattnagatanggatngccttanacggctgtttatggctnctgtgacagaaacagnnaggcagtggnngncacgtgccaagaagatcaagtttgtacatnncactngaggcatntcttatc

SEQ ID NO: 251622 - DNA, 778 bp, Homo Sapiens
gggggcgtgctgggcgtgcgcggctgcggtacggcgtgttggtcccagcggttcagctgaggtagggacgtgctgtaggccggaatgttaccggctgttggatctgtggatgaggaagaggatcctgcggaggaggattgtcctgaattggttcccattgagacgacgcaaagcgaggaggaggaaaagtctggcctcggcgccaagatcccagtcacaattatcaccgggtatttaggtgctgggaagacaacacttctgaactatattttgacagagcaacatagtaaaagagtagcggtcattttaaatgaatctggggaaggaagtgcgctggagaaatccttagctgtcagccaaggtggagagctctatgaagagtggctggaacttagaaacggttgcctctgctgttcagtgaagtgaggaatgtgtttactgtgtacatggtttactagaaatgtttattgattatatttccagctttaattttcttgagtaatttaactgaatttacacagtttgcttcattgtattttcaaacaaatagaaaataaacttattaggaagcattttcttaaagtgtttttgctgtcttttctatctgctctaatgttttggtccttttattgagtttttattgcttttgatgtcagggcttatttaatctctagtgcatgaaagtctcatatgtaaaaaatgattattctgaatttaatctgtcattggtcatacttctaagtgttcaaccttataaaaaataaatgactatcaaaaa

SEQ ID NO: 251623 - DNA, 825 bp, Homo Sapiens; identical to SEQ ID NO: 167294
  misc_feature (680)..(680): n is a, c, g, or t
  misc_feature (694)..(694): n is a, c, g, or t
  misc_feature (812)..(812): n is a, c, g, or t

SEQ ID NO: 251624 - DNA, 1090 bp, Homo Sapiens
  misc_feature (738)..(738): n is a, c, g, or t
ggggcggtacggcgtgttggtcccagcggttcagctgaggtagggacgtgctgtaggccggaatgttaccggctgttggatctgcggatgaggaggaggatcctgcggaggaggattgtcctgaattggttcccatggagacgacgcaaagcgaggaggaggaaaacgctggcctcggcgccaagatcccagtcacaattactcaccgggtatttagttattcagaggctgctctgctgagaagatgaacaaatttcttgtccaaaacaatgtatttcaaacgtgccgctcgggcctttcccgtattgctcactggtgctgggaagacaacacttctgaactatattttgacagagcaacatagtaaaagagtagcggtcattttaaatgaatttggggaaggaagtgcgctggagaaatccttagctgtcagccaaggtggagagctctatgaagagtggctggaacttagaaacggttgcctctgctgttcagtgaaggacaatggccttagagctattgagaatttgatgcaaaagaaggggaaatttgattacatactgttagagaccactggattagcagacccaggtgcaggctggcttctatgttttgggttgatgctgaattagggagtgatatttaccttgatggtatcataactatagtggattcaaaatatggattaaaacatttaacagaaagagaaacctgatggccttatcaatgaagctactnagacaagttgctttggcagatgccattctcattaataaaacagacctggtttccaggaagaagatgtaaagaaattaagagcgacaattagatccataaatggactaggacaaatcttagaaacacaaacatcaagagttgatctctctaatgtattaaatcttcatgcctttgatagtctctctggaataagtttgcagaaaaaacttccgcatgtgcccagaacccaccctcaccttgatcagaagattggtaccatcccctttggaagtacccggaaaagccaaaggaaaaacatcttaatatgttttatccaaaatctcctgtgggaaaaagaattgggaaaaaacag

SEQ ID NO: 251625 - DNA, 804 bp, Homo Sapiens
  misc_feature (744)..(744): n is a, c, g, or t
gggagctgaactgagctgaaatcctaaaggccgcggagtcggcggtgttgtaggtagcggtaccttgagtggcaacagaattcgattaaattacaatgggaaacatttttgaaaagctctttaaaagtctacttgggaaaaaaaagatgcggattcttatattgagtttggatacagctggaaaaaccaccatcttgtataaattgaagctgggggagactgtgcctgccgtccctacagtaggtttctgtgtggagacagtagaatataaaaataacaccttcgctgtctgggatgttggcagccacttcaaaatcagacctctgtggcagcattttttccagaacacaaaaggtgccagaagcccaggaagcacacatcaaggctcacttgccagcggggtgctgccaataaaatgtagtcacgtggaatttggaatgtggaaaggaggtagaagtcatcctttcctcccccatagcagcaggtgtgcaggctctggtggtcagctggactccatactcccccaccagtcaccagcctggggaccgtggggctgcaaggacctcagcagcggtttcccaagtttcctgacttcttccatcctctggaaatcaactgtggtaaagtagcctgaaagccagtggtgcaaccccatccccacaaccttcaccaacctctagcacctccagtgattagcactaattgcctatatacaaccccttttttgtttggaatatctagaanaaatttctgttttccctatctgggggtaatggtacctttaggagaaaatttttatttggg

SEQ ID NO: 251626 - DNA, 1787 bp, Homo Sapiens
  misc_feature (1245)..(1257): n is a, c, g, or t
gggccataccccaaactgggaggcaatatgaagaagcttgagaattgtaactacgcggtagaattggggaagaatcaagcgaagttctccctggttggcatcggtggacaagatctcaatgaaggaaaccgcactctcacactggccttgatttggcagctaatgagaaggtatacactgaatatcctcgaagaaattggtggtggccagaaggtcaatgatgacattattgtcaactgggtgaatgaaacattgagggaagcagagaaaagttcatccatctctagtttcaaggacccgaagattagtacaagtctgcctgttctggacctcatcgatgccatccaaccaggttccattaactatgaccttctgaagacagaaaatctgaatgatgatgagaaactcaacaatgcaaaatatgccatctctatggcccgaaaaattggagcaagagtgtatgccctgccagaagacctggttgaagtgaaccccaaaatggtcatgaccgtgtttgcctgcctcatggggaaaggaatgaagagggtgtgaggcccaatggggctgggtgggaggcggtgcactcactcctgactgcccggcacagatgctccagggatgattcaagccattccaaagttcaacttggtgacactctataagattccaaaaagcacatattagtgcagccaagtagcctctcctgtatttaacaaaaagtgcttcattctttgcaggaggcccaacctcctatatataggtttctattcttgatttatttgccttcttcgaaaatctagaggaaaagaaagaagttattttccaggtacccttctcgcttttgccattagccaaggatagaagctgcagtggtattaattttgatataatctttcaaaccagcttcatgtggcttcccttttctttgttcaagatgagggccaggaggggaaacatcacacctgccctaaaccctgttcctgggaggtcagcatttgatctgttgcaagcccctctttctgtcccctcttcctaccctgcctcccatgactttgctcctcacacttttggaaccatgcctcccgggggggcccatctcttctggccgtccttgtctctgggccacttggagtgtgtgataaatcagtcaagctgttgaagtctcaggagtctctggtagcctgcagaagtaagcctcatcatcagagcctttcctcaaaactggagtcccaaatgtcatcaggnnnnnnnnnnnnncagccactaagaacccctctgcttttaactctagaatttgggcttggaccagatctaacatcttgaatactctgccctctagagccttcagccttaatggaaggttggatccaaggagggtgtaatggagcatcaagccactcggcggcacattggagctataactaagcatcctttagggttctgcctctccaggcatttagccctcacattagatctagttactgtggtatggctaatacctgtcaacatttggaggcaatcctaccttgcttttgcttctagagcttagcatatctgattgttgtcaggccatattatcaatgtttacttttttggtactataaaagctttctgccacccctaaactccagggggggaaaatatgtgccaatcaataagcacccctaattcacatacacacacacctaggccagctgttcaaggggcaggatggaatctatggtgggttaagaaatgggtgggaactgcgttttggaaggagctaattttacttggacaaaggattt

SEQ ID NO: 251627 - DNA, 1030 bp, Homo Sapiens
  misc_feature (773)..(780): n is a, c, g, or t
  misc_feature (783)..(783): n is a, c, g, or t
  misc_feature (785)..(785): n is a, c, g, or t
  misc_feature (787)..(844): n is a, c, g, or t
  misc_feature (846)..(846): n is a, c, g, or t
  misc_feature (848)..(851): n is a, c, g, or t
  misc_feature (859)..(860): n is a, c, g, or t
  misc_feature (863)..(864): n is a, c, g, or t
  misc_feature (867)..(867): n is a, c, g, or t
  misc_feature (874)..(889): n is a, c, g, or t
  misc_feature (891)..(904): n is a, c, g, or t
gccctacacattagaacttagttactgctgctatgcctaatacctgatcacctctaggaggccaacccctcactcgcttttgctcctagagctatggcatatctgattgctgtcaggcacatatgatcaatgttaacttttttggtactataaaagctttctgccacccctaaaactccaggggggacaatatgtgccaatcaatagcatcccctactcacatacacacacacctagccagctgtcaagggcagaatgaatctatgctggataagaaatggtggaactgcgttatgaagagctaatttactggacaaagaattccaaagcaaaaccagaacagtatgaatttgagcaggtctcataggttgagcaatttccccctaaaccaactgaaggctaaaaagcaacaggccattgtgaaccaatgcaagacgccctctatcatggtgaaaagctccatcaatgaggtatcttctttagtggtggtatgtaatggaacttagccatttttcaaagcaattgaaatgcattgctctggatctgttccttggcagtggactcagaaagccaacatgtggctcctcccagcccataaccagtatttttgctgcttctgaatacaaattggttggttttgacttcagattgaacttactgtagcctcagatgatttcccccctccgcctccaggaagaaagaatgttactgccttaataaaaaatgaaaagagaatgatgctcaaaatctttccaaataaaatgttccttatnnnnnnnnaananannnnnnnnnnnnnnnnnnnnnnnnnnnnnnnnnnnnnnnnnnnnnnnnnnnnnnnnnnanannnnaaaaaaannaannaanaaaaaannnnnnnnnnnnnnnnannnnnnnnnnnnnnaaaaatttttcaaaaacattccttttgggccccccggcccccaaaagagaacgggaaactggggccatacctgtttctcaaaggaaaaacccgggcccaagaaaaaggggcgtgggacctcccccc

SEQ ID NO: 251628 - DNA, 1298 bp, Homo Sapiens
gtcttaaatcaaatgtcatttcctcacttttgaattttaaatgcttactttattatttacattgcacttatgcttgaaattatctcttttacatatttacttcttaccttattttactacttatttgtttattcacttattttttagtgatcttgccagttttgtttgtcatcattgtattaacagcctggtttatagaagacataaagtaattattaagttaataaatacattaactgttgcaaaagaaaagccattgctttgatacctataaaatgtaccaatatcttgaaattaaaaatgatggattattctgtgttctcagatgtcagcaattgacagaaccaaggcattccctggtcagggttaggcaaatacttagctgagtcctaggggtttcaagccagtaaggtatgatggcttccagcttcaatgaaaccagttctcactcagcagcgtttcacagagatgttctgcataagcttttgtttgaagaaagagttccattgcttaaaaacggggttggagtacagtggtaaaaaccactgttctagggaatttggagcaaatggtagccgaaatgagtttacatgctaagttatatttacttttccctttaaaagtcaatgtgctatcttattaatgtttttatactatagcgacataaaattatttctgccttggtttgaagatttgaatgatttatgctttttagaattttagagataaatgaaacacctaggcaagattcagaaaaccgtttacctttggctacataaaaaactgtaagttaaaccttatatgtggaaaactagaattttggcttcaaagatttgtccttccactgtgttaatcttatatttatattttatttccttctctatagagagagcaggtaaaaacatgtttagtgtttcctcgctttccaagttacattttatcttgagcagatttaaaacgagattagctgtaataggactccaggatgtgggcagatgtctacttgtcaaagacaatctctcttgcaatcagctccttcattatttcatttgtaccaccatagattggctgaactctggcatccacataagcttttgcaattggggtactcccacatgtatccccaacctccatgggagctgtacacaggtcggtaaggctacactattttgtaactcaggatgcccaatatttcgccatgcaagcagtgggcgggagtccaaacgtttcgcttcatgcagctgggagacaggttgtccacaaatgctcggggttacacatatatggggtttttaata

SEQ ID NO: 251629 - DNA, 973 bp, Homo Sapiens
  misc_feature (131)..(131): n is a, c, g, or t
  misc_feature (243)..(243): n is a, c, g, or t
  misc_feature (524)..(524): n is a, c, g, or t
agttcaacatttaggatataaattacattcaggatataaattgtattaatctcatctaacttagatatgcattcaagttcaaaagagcttctttcctgtcacaattctgggacaactgattttaggaacancaactgtggataaagttttttcaaacaggtgggcctataaactgcccataattctatatgaagatgaatatagtttccaaaattgttctgaggaaaaaccacaataaaaaanccagaccaaatacaactaaaagcaacaatgacattaaattgtaaagccaaaatatacagttcaaagttattttgtaatgcatgtatacctccgttttccaaaaggtggttaagatatgcaaagtcctacttctctaatacttgtttccttttcccattaaaattaataattacatttgttaatacttacttcacttaactagtaagaacaaaatcaagaacatagagtctagtatacagcagaacctcaattaaaatttgatggaaaaagtacgtatctcnaatatttgtccaaatatttatatttatatgagcactgcactaaataccaaatgacagccttatgggcattgaaacctttacataatgaacatattttggtaggtgacaaatcatcaagtcttaattgttccctggggccatacctttgggctcttacaataaccaagacttaagaagttaaagtgaatttgataaaattcaagatggaattctgtctgcataaatatgttagagaaataattctaagtgtgctctgaagaattatgtctcataagtgtaatcagaaacgatggagtattccatgaatacatactagagaatagctgggtaacatgaactctctttcaaaaggactttaaattgccaacgtatcagacagtcatggatccagaagattaaacattccacagaaattctgaaaagtacgataaagtctaggttttaataaa

SEQ ID NO: 251630 - DNA, 722 bp, Homo Sapiens
gggacgaccttcgtctgggatgcactcttcttctccttcacctacatatgatagaggattacgaagaactatacggttggctcctctttcctttggccttaggtttctgacctcctgcagcctcctcttgcctcgggctgcccagatcttggcggctgaggctggcttaccttcgagccgttccttcatgggatttgctgctcccttcaccaacaagcgaaaggcttactcggagcgtagaatcatggggtactcaatgcaggagatgtatgaggtggtgtccaacgtccaggagtatcgtgagtttgtgccctggtgtaagaagtctctggtggtatccagccgtaagggtcatttgaaagcccagctggaggttggctttccacctgtcatggaacgttacacctctgcagtttccatggtcaaacctcacatggtcaaggctgtttgtactgatggcaagctcttcaaccacttagagactatttggcgattcagccctggtattcctgcctatactcgaacctgcactgtggacttttcgatttcctttgaagtacgttctctgctgcactcccagctggccaccatggtttttgatgaggctgtcaaacacaatgttgctgactttgagcgtagggcagacaccaaggtttggtccagcagccattccccgtgaactgatggtccatgaggtgcaccagacttgaggcaggcgttgt

SEQ ID NO: 251631 - DNA, 760 bp, Homo Sapiens
gttgtcaaacagaatgttgctgcctttgagcgtcgggcagccaccaagtttggtccagaaacagccatcccccgtgaactgatgttccatgaggtgcaccagacttgaggcaagggattgctccctgacctcccttctaccccacttccctacacaattctcttatttatttggtttggctcctgttccaatttgaaaggagtctgtgttcataatactgtttctcctctcaatttcccagaaattgggttctatgctggctgggaaatgttgggggaaagagaaggcaaaggatgtggaaatgagatgtgcttaggaaagggtcaggcccatcgtaggagcaccatatgcctgcagccttttcactacgaattagaataaggactatgtggttgtctctggaccttatcaaagacaccttagtgtctgaccaggggacgatagtaacttttctaaggattgaataaattgagcttttcttctggcacagaggtactgagtggtaagtaacttttaccctgcctgagattcctcaggagaaaaagcaacctgcctccagcctgaaatacataaagcctcattttaagactgtaagtccatgctgcctggctactagagagcaaggggctttcttaccaccagtgctgaggagaaaagtactgaacggaaacggagttgtctttgtactcttgagttgtaccttattcttccacttggcctgagtttttataaaatttcaataaattgtgacagtgtgaaa

SEQ ID NO: 251632 - DNA, 1051 bp, Homo Sapiens
  misc_feature (262)..(294): n is a, c, g, or t
cagctctggtggaagcagagaaggagtgtaacctggagctctcagagaaactgaagggagtcaccaaaaactgggaagatgtaccaggagaccaggtcaagcccgaccaatacactgaggccctggcccagagggacaagatctaaaaaaaataatgctgggaagtcctaaccacatcaagaatgcctcagatcagtgacccaaggaccttccagaatggatgaaatagacccaaagctgaattcacctaattttagggccnnnnnnnnnnnnnnnnnnnnnnnnnnnnnnnnntcttcagatactgggagaacaaatctcaattgctcaattgtatcttatgaaaacaatttttcaaaataaaacaagagatatttaagattcattaagttcttgtcatttcaaattttaagaaaaatattttctaatggaattacatatatttatatgattcttctagttatatccatggtaataaatactcttttcagttggaaataaaacccatttgtgctatattattagggaaaatatctacataaattagtttttaatttaactaaagtctatcttttgaattcataagcataaaattttaaccacttgcaaaatttataacacacttaaggtagtcagatgccttgtcaagtagtttaacaaaagtgattttcacctgtttgttttaataacagtgcatcgattttatgaaaatcaggcatgccctcgggtcctaacaaagtatacgaagctgaatggatctatgccaaatatgccagattttactttctgagtctgattttatacttctgtcctctttcttaccacatggcttccagtatcacttacagactaacccttcaaaaggagaaggctaagttactaacatttggaaggcttatgaaagtgaagcatagttatgagccagcaatgtttttatttagggaatgtgtgcaaaccacacacttaagcaagctctggggaatgagagttggggggaatcaactgttttatttgctaattggtatttcctttaaagatagagttcttcaga

SEQ ID NO: 251633 - DNA, 386 bp, Homo Sapiens
taagcacattattttaccttaaaaaaacacaactaaatacaagcaagtttccaattcaaactcagggtctacctaattcctacagattgctacactaataactgaaatttaaattacttttggttaattttaccttagtaaattaaagaacaatcttccttttatatgatatgtgaaatattaagcatctcagtaaagaatatgtagcttgagaaaacttaatatataactctaacgtgaagtcagatgtgctcctaaaagacagaggtccattaaaagtggtaaaaatcatcttttattttcatgtataaaatcaaaagatataaaacattacttttcctctatgccaaaattcaacaaaatagtactctttctagaaaactcat

SEQ ID NO: 251634 - DNA, 1065 bp, Homo Sapiens
  misc_feature (1028)..(1028): n is a, c, g, or t
catagtaaaacagatgtaataattgattcatatagtctacaagagaagatattgggtgtttttttgtaggtggcaaatataaaatggttaattgtatccaggcttgcagcaagtttatccatgcattaaatggcaacatgagtagaatacatggtcgaaaaatgaggatcagacacattcttctgcagacatcaaaagaggattgatatactcaaaaccttcaaattcagactgatcaatcttcctcacaatgtcatcgtcatctggagtgagctggacaggttcattagtaaactgagaatcaaagttgtccaaaccaaattccccagaaaatatttgctttaaagggaggtaccacctgtttttgctccatcatatcccaatcaacatttcggaagaacgggtgtccctgaatatcagcaaatcgctgtttgaggatgacaacccaatcgttccttagggtccttattaagagaactcttcagaacacttgcaggcttttacaggacagagaacgtggtatgcgaatttgttttgtccgagagtaacttggaagagataatcgctctgtgttctggtcagggttatcggagctcccgacgatatcaaatggagaccttcgtgccattcatgtcggacagtgagcagctgccaagagcccaccagtcaacactggaaccataatcttgctcgctcttagagatttcaggagcaatgtaatttaggagtaccacagaaagtgctggttgtatctcctggccgtaatccttccgttacacatgccgtagtcagtgagtttaatgtggccttcagagtccagtaatacattgtccagtttcaaatctctataaagttatccctcgctcatgaagataatttaatgctagactgatttctgcagagtaaaatctggcatgttcttcaggaagttttctttgtcgctgcatatgaaacattaggtctcctccatttacatactctataacaagaacatctgctttctgtctgaaagcaagaatgcagcccancaggaaaggatgattggatgcctgctcaaacacatgc

SEQ ID NO: 251635 - DNA, 527 bp, Homo Sapiens
  misc_feature (305)..(305): n is a, c, g, or t
cccccggcttttcccaggcaggctcctgcgtgcccactggctccagcctggtcctctgtctcttggctgcttcactcttgctctttgtcccgactctggccctgcttacaggggccactacctgctggtgcctccataacaagcgtctggcgttgagacccctggcatggcaggggctttggggtctggtttccacaaggcttagccatggcagaacctcgttttattttaactctttgcccctacaaacaaacagcagtacttgccagaaccattcttgggattcaggagctcgggcgactgcncttgctctggccgcacccaggagggtggggttggatctgtgtagttgccaggcccacacctgccagcagggggctgactggatccatgctttactgtgtttaatgggggtaacaggggtccctacagccctcccagctaaacatttggaacaaaacaccagcccttttgtagtggatgcagaataaaattgttaatccaatcacctccaaatgcaaggcctt

SEQ ID NO: 251636 - DNA, 899 bp, Homo Sapiens
  misc_feature (729)..(769): n is a, c, g, or t
caaatcaatgtgatataccacttgaacataacgaaagatgaaaaccacatcatctcaatacatggagaaaaagcatttcacaaaattcaacatccagtcatcatggaaatcctaaacaaaatagaaagagaaggaaatttacctcaacaatacaaagaccatccatgaaatgaccacagcagaaataaccagtcagggaaaatggaatgcttttcctgtaggatctcacatgatgcaagaatgctctcaccccttctattcaatcaatactggctgtcctagctagagcaatgaaatagcaaaagaaatcaaactcatccaaatcagaaagaaaggagtaaaactatttctttgtagatgacatgaccttctgtgaagaaaatcacaaagagtcaaccaaaatgcaactggaactaaaaaacacatgcagtggatttgaagaatagaataacagcaccaaaaattagttgaatttccatacattaacaataaacaattttaaaagaaaattaaaaaccaattccatttgctaaagaacttaaagtaagaaatatttaggaataaacataaaaagtgaggtttgtaccttgaaatctataaacattgatcaaaatgattaaaaacatgtataaatagatataaatcccatactgattggaaaaatgaatatcgctcaatgattatattgttaaagaaacaaaaaacaggccaggcacagtggctcactcnnnnnnnnnnnnnnnnnnnnnnnnnnnnnnnnnnnnnnnnntaaagtcagaagatagagaccattctggctaacacggtgaaacccagtctctactaaaaacacaaaaaattacccaggtgtggtggcacacaactgtagtgtcagctacttgggactacaggcacgcgcc

SEQ ID NO: 251637 - DNA, 756 bp, Homo Sapiens
atctccatatgttgtagtgttgtgaaaatgtgattttaaaaaattatcgccagttaaaactggctattcttttcctctatttcaaagtcatttttgttcagtggaatagagacagcaacatggtgttaacctctcaattaaaatacaattgacaccagtaaattttgccataaaaagttaaaatctcttgttcaaaatatgtgtatcttcttaatgtgttcatgttagagaaagtgtccccatctcactgccaaaaatgaaagaaaataattaaactctttaaatgattaaatgtaatgattctactcgcagtgcataacagcacatatttttgacagattattttttaggcaattacctttccttaaggtatctgatacagtatagtaaagaatcacttatatcagtaatagcacttgagagatagcaagtcaccaagaaacttaattttcatttaaaattttattttgtgaataaggtcaatctacaatcccagataactacattttttttcatagatggccagtgttttcaacagagatttaaaatggaatattaaaattatagtgattatttcagaagcattttaatttagaaaggagctggtttgttagttcactgatgacattttttgacaaacattttataccattatcacaataatcagacttgaattttttttggagttccttcatgtgaatgaaaactgagttaaaagaaagtaggcatttaggtctggatgcagtggctcatgct

SEQ ID NO: 251638 - DNA, 763 bp, Homo Sapiens
  misc_feature (706)..(706): n is a, c, g, or t
gagacatggcccgggcagtggctcctggaagaggaacaagtgtgggaaaagggagaggaagccggagctaaatgacaggatgcaggcgacttgagacacaaaaagagaagcgttcctctcggatccaggcattgcctcgctgctttcttttctccaagacgggctgaggattgtacagctctaggcggagttggggctcttcggatcgcttagattctcctctttgctgcatttccccccacgtcctcgttctcccgcgtctgcctgcggacccggagaagggagaatggagagggggctgccgctcctctgcgccgtgctcgccctcgtcctcgccccggccggcgcttttcgcaacgataaatgtggcgatactataaaaattgaaagccccgggtaccttacatctcctggttatcctcattcttatcacccaagtgaaaaatgcgaatggctgattcaggctccggacccataccagagaattatgatcaacttcaaccctcacttcgatttggaggacagagactgcaagtatgactacgtggaagtcttcgatggagaaaatgaaaatggacattttaggggaaagttctgtggaaagatagcccctcctcctgttgtgtcttcagggccatttctttttatcaaatctgtctctgactacgaaacacatggtgcaggattttccatacgttatgaaatnttcaagagaggtcctgaatgttcccagaactacacaacacctagtggagtgataaag

SEQ ID NO: 251639 - DNA, 893 bp, Homo Sapiens
  misc_feature (34)..(34): n is a, c, g, or t
  misc_feature (107)..(107): n is a, c, g, or t
catgtgtggtctccggggaccattcgcggtgganggtgaaggaagcgctgacctttcccctgtggaaatagtgggcagcgttcagcttgtccactttcttcttctcncggggccttcatggtggctgccagaatctcgtcccctttgaactccttgtagagctcctgcagggtctctcgggtctcggcatttgtatttttcagataataagacgggtcctgtttggccttctcttcatctgggtctattattttcaggttattctgcacatgatagaagttagagacattgaacttgtcccagaattggtggggtcctggaggggtgatgatgtcctgccggggagaagggctcgtcggtcagcaggtcccggaagttcttggccttgatatttagctgttccactgcctcataggcgtagacgttgccggtcgtcctcacagccacgatgtgggtgttgttggtgaacacggtaaacagcactgggcagtggtacttcccctcactgttcttggaaaagttcagcttgatcagggacctcccgtccagcttctctccattgctggggttggtcccgtacttcttaagccatggaacaatgttcagtaagtcaaagacgatgccatcgggagtgcagactgggtagacaaagggctgcagagagagactgcagtggtcaaaaggtaaacgacgaaaatttgtttgtgggagatctggcttcttgccaccataaaagtgagtgtattcagcacaggtaatgtacattttgtccttttggtgctgtcgcttccccatggcggagcggcggcggcgactagcgagcacgaaaaaacaacggctgacaactcagaccatggagccgcagccgagttccgtgaccacttccgggttcc

SEQ ID NO: 251640 - DNA, 597 bp, Homo Sapiens
atgtaactaaaatgattaatagaatagaaaactgatcttatgagaacagggttccatgtaacacaccttggaatacagaagaaatgaaactactcactacttagaataataatcagttgttccctaaatccacttggtgggggtaaaaaagttaacagaggcaaagtatttaaatttccctacaaagacaattcctaatagtgagtgttgctaaataagggaactgaattttgaaaaggacttaatatcggtctaaattctgattgttgaatatgtaacataggtctgtaggaatcaacttatttctcacaaaagaactgtacttgtataacttgcattgtgctaatcttgggttatcctaatctctggcataaagatgcactttctgttagctgagaatacaatgcaaccgtgtatctcttgttatacagaagctcatgcaacagacacagttatactttataaatgtgggagagacttttaaggagataaaattttgtgttcccaaaatgatttttaagtagaacatattgattctaattttcttgcataaatatagtcgcatctaacagcaacaatggcagaactcgagaccca

SEQ ID NO: 251641 - DNA, 1263 bp, Homo Sapiens
  misc_feature (22)..(22): n is a, c, g, or t
  misc_feature (31)..(31): n is a, c, g, or t
  misc_feature (37)..(37): n is a, c, g, or t
  misc_feature (97)..(97): n is a, c, g, or t
  misc_feature (291)..(346): n is a, c, g, or t
  misc_feature (924)..(980): n is a, c, g, or t
  misc_feature (1089)..(1103): n is a, c, g, or t
  misc_feature (1105)..(1207): n is a, c, g, or t
aaaggtaacagaacagaaaatnccacaaaancccagngggaagagaacaattagtacctcagacatgatggctgcctacattgtgtaaagaactggncttagccctatcaaatggtctgtggacttacttggaaaaactgatttgaaactttcacagatctcagctttcatctgatgtcacttttcatgatcttctcattggcccccttaacctggtctgaagttctgggatgttttcagtttgatcagtctgatactcagtggcactttattaaaacatcagctgtggannnnnnnnnnnnnnnnnnnnnnnnnnnnnnnnnnnnnnnnnnnnnnnnnnnnnnnntcttgagcccaggattttgaatccatcgtggacaacatagcaagattccatctctaaaaaaaatgaaaataaacataagccacaaggaatgggtgaaagattattgtaatgtgctttaacgtaaataggtaaatatactaaacaaatgctaaaactcagttttaggatgaaaccattgttgatatccacatcagtccctgtttagaaaacatttaaaatgacttttagttatgtacagtacgttggcaatgaatacattaagcttcaaaatttggtagtgctctcgaatatgtatatttgtatttttcaagcgaagttctcttattcacatataaattaaagtgggttggtactgatatcaaaaaatgtttatgtttttagaacagacatttcagtcactgcattcttaggtattccaaaccaaatatgatgacatcaatagattgcattttaaaaatattgtttgatttttctattttcaaaaataaaattctgtttctaactaaaatgtgatattcccagtattccttcacatctcttttgagaactcccctcttcctgcaggaaagagacatatnnnnnnnnnnnnnnnnnnnnnnnnnnnnnnnnnnnnnnnnnnnnnnnnnnnnnnnnntgcacacactgaactccttcagtcctgtggagcccgtgcatgggagaattccaccttgcacataagcagattttgcatcctgtgaaagtactgtattttctttctttcnnnnnnnnnnnnnnngnnnnnnnnnnnnnnnnnnnnnnnnnnnnnnnnnnnnnnnnnnnnnnnnnnnnnnnnnnnnnnnnnnnnnnnnnnnnnnnnnnnnnnnnnnnnnnnnnnnnnnnctctgagtagttgggactataggtgcccgccaccacgcccggacaatttttttgta

SEQ ID NO: 251642 - DNA, 360 bp, Homo Sapiens
cccccagggccgaactgatatggaaggtcgatcttgcagctggcgacttacatgcttatgttgagagaagtttcaaatggattctgaatgtacagaggagaagaatcaggtttgttttgctcccttccctgtcgaatatttatggaatttttatcgaaagcaaaattgccaaaatactcaaaaaattccttcagtagtaattctaatgtttctgtgttctgtgaaggtttaattctactcaagtcacgaacaaatgtgcagttgttgccttctattacacatttatcttctgcatctgctagggtttttaaggaatctagtgttggaagaatagggggtgatcttctctggagaaaaaag

SEQ ID NO: 251643 - DNA, 575 bp, Homo Sapiens
  misc_feature (59)..(114): n is a, c, g, or t
tttagagatggaatcttgctatgttgtccacgatggattcaaaatcctgggctcaagannnnnnnnnnnnnnnnnnnnnnnnnnnnnnnnnnnnnnnnnnnnnnnnnnnnnnnntccacagctgatgttttaataaagtgccactgagtatcagactgatcaaactgaaaacatcccagaacttcagaccaggttaagggggccaatgagaagatcatgaaaagtgacatcagatgaaagctgagatctgtgaaagtttcaaatcagtttttccaagtaagtccacagaccatttgataggctaagcccagttctttacacaatgtagcagccatcatgtctgagtactaattgttctcttcccactggtttttgtgaaattttctgttctgttaccttttaaagattctagcaagtttttgactgtttcaattgcaaacttattgcttttcttcttggtaaaggactttctgtttggagcagatggtagcaatagggataccagcccccagggccgattacttgatatggaaggtcgatctgtatcttcctgttgtaaaatccaggcactttct

SEQ ID NO: 251644 - DNA, 482 bp, Homo Sapiens
  misc_feature (168)..(168): n is a, c, g, or t
  misc_feature (463)..(463): n is a, c, g, or t
tcttctcctctgtacattcagaatccatttgaaacttctctcaacataagcaaaaatgtaagtcaaagccagctgcaaaaatttgtagatttggcccgagaaagtgcctggattttacaacaggaagatacagatcgaccttccatatcaagtaatcggccctggggntgggtatccctattgctaccatctgctccaaacagaaagtcctttaccaagaagaaaagcaataagtttgcaattgaaacagtcaaaaacttgctagaatctttaaaaggtaacagaacagaaaatttcacaaaaaccagtggggaagaggaacaattagtactcaggacatgatgggcttgctacattgtgttaaaggaactggggcttaggcctattccaaatgggtctgtgggactttactttggggaaaaactggttttggaaactttccaccggtccttcagcttttccntctggatgttcactttttc

SEQ ID NO: 251645 - DNA, 1038 bp, Homo Sapiens
  misc_feature (880)..(880): n is a, c, g, or t
  misc_feature (903)..(903): n is a, c, g, or t
  misc_feature (972)..(972): n is a, c, g, or t
  misc_feature (991)..(991): n is a, c, g, or t
  misc_feature (999)..(999): n is a, c, g, or t
  misc_feature (1005)..(1005): n is a, c, g, or t
  misc_feature (1021)..(1021): n is a, c, g, or t
tcaggtcaacacttttgggaagttaggatgtgatttggacatgtttttggatctagatgaaaccagaaacctcagcgctcacaagatctcaggaaattttctgatggaatttcaagtgaaaaatgttccttcagaaagaattgcaactcagaagatcctgtctgtgttaggagagtgccttgaccactttggccctggctgtgtgggtgtgcaaaaaatattaaatgcccggtgtccgctcgtgaggttctcacaccaggcctccggatttcagtgtgatttgactacgaacaataggattgccttgacaagttccgaactcctttatatatatggtgccctagactcaagagtgagagccttggtgttcagtgtacggtgctgggctcgagcacattcactaacaagtagtattcctggtgcatggattacaaatttctcccttacaatgatggtcatcttttttctccagagaagatcaccccctattcttccaacactagattccttaaaaaccctagcagatgcagaagataaatgtgtaatagaaggcaacaactgcacatttgttcgtgacttgagtagaattaaaccttcacagaacacagaaacattagaattactactgaaggaattttttgagtattttggcaattttgctttcgataaaaattccataaatattcgacagggaagggagcaaaacaaacctgattcttctcctctgtacattcagaatccatttgaaacttctctcaacataaggcaaaaatgtaagtcaaagccagctggcaaaaattttgtaggatttgggcccgaggaaagtgcctggggtttttacaacagggaaggatacagatccgacctttcccttattcangtaatcgggcccgggggggcttngggtattcccctatttgcttacccatcttgcttcccaaacaggaagttcctttttacccagggaggggnaaggccattaggtttttgnccattttngaaacnggttccaaaactttgnctaggggattctttttt

SEQ ID NO: 251646 - DNA, 341 bp, Homo Sapiens
ggcagctgcggggagccgcaagaggcgcctggcggagctgacggtggacgagttcctagcttcgggctttgactccgagtccgaatccgagtccgataagccgggcgggagcccctcggccaggttagtggggacatgcgtgagcagaacctcttgctcgtcctgtcccaccccggttgggttgctgacctcgcctggggtctcagggccaaggcctaaggatcgccgacctctgccccccagtcctttcagcttaacttactctttcatccgatgtttactgagctcctgttccgtgccaaactctgtcctaggcagggagcgtatgttggtgagttgtg

SEQ ID NO: 251647 - DNA, 1238 bp, Homo Sapiens
  misc_feature (3)..(3): n is a, c, g, or t
  misc_feature (66)..(67): n is a, c, g, or t
  misc_feature (87)..(87): n is a, c, g, or t
  misc_feature (90)..(90): n is a, c, g, or t
  misc_feature (101)..(101): n is a, c, g, or t
  misc_feature (106)..(106): n is a, c, g, or t
  misc_feature (120)..(120): n is a, c, g, or t
  misc_feature (144)..(144): n is a, c, g, or t
ganaatgtgacttcaaaggaaaagaacaaatttccaaagacttaagggagtgaaggcagagctggnngcagatggacgaggtctgcnganggagggcagangtggnggaaggggccaggngcctgcaggctccccctggaactnggactggtctcggtctgctgacgtcagggtcagactcccccgcggagctgacttcagcagcccacagctgtggggcttcagcagccacaccagcccagcccagcccagctctcgatacgtttggtctttcatgctgaaaaataaataatataagcctgtcccgtgtctactgcctcccccaactgcacagacgccagcctctaggcctgactgccagggaggtggaaacactggccaccagcccggcagcccctacaggccccccagatgggctgcctcagtcgtcctctgagagctgcagatcctccagctcgtcctccggcccctgggccagctgctgcagctccccaggggccagccccgcctctgcgtctgggtctccatcctccgagttgctgctgtcctcctcgccctcctcctcggcctattcaacgtcttccaccccatgccgagtgctcagggcacggatgcagtgcattcgcagcgggtagaagcgggcagtggggatgagcttgatacagccaatgatgacttgggcaagggggtagaccaagggctggagggcttcgctggggcccgcagtgctcaggacccggcaccacaggaagaggcagtgcacatactgccagttgtacacagactggtatgtttccttcttgcgggtggtcatggcgttgcgcaggtgtatggcgagctggcggatgtagaggaaggcgtgctggtaggccacacccggctccagggccagcagctccgtcaaggtccactgcatgaaactgatgaaggggagggcaccaggcgaggtgaacttgcagttcctcacatacgtgatgtacatttgcttgaggacggggccaaggaaagtgtccttcttgtgccggcagactctgctgaggaccaggaaagccagcacccgcagagactcctccccagtgctccatacgaccaccattctcttgagcagcatgcggcactgcttggggaaggtcaggaagcagggcaccagcacgctgatgtgccgcagcacggccgccaacaccgtcgtctccgtcaggacaggactatcagactgtatgacacgcagaacccaggta

SEQ ID NO: 251648 - DNA, 2769 bp, Homo Sapiens
  misc_feature (2718)..(2718): n is a, c, g, or t
attctggggccggaagtggggtgcacgcttcgggttggtgtcatggcagctgcggggagccgcaagaggcgcctggcggagctgacggtggacgagttcctagcttcgggctttgactccgagtccgaatccgagtccgaaaattctccacaagcggagacacgggaagcacgcgaggctgcccggagtccggataagccgggcgggagcccctcggccagccggcgtaaaggccgtgcctctgagcacaaagaccagctctctcggctgaaggacagagaccccgagttctacaagttcctgcaggagaatgaccagagcctgctaaacttcagcgactcggacagctctgaggaggaagaggggccgttccactccctgccagatgtgctggaggaagccagtgaggaggaggatggagcggaggaaggagaagatggggacagagtccccagagggctgaaggggaagaagaattctgttcctgtgaccgtcgccatggttgagagatggaagcaggcagcaaagcaacgcctcactccaaagctgttccatgaagtggtacaggcgttccgagcagctgtggccaccacccgaggggaccaggaaagtgctgaggccaacaaattccaggtcacggacagtgctgcattcaatgctctggttaccttctgcatcagagacctcattggctgtctccagaagctgctgtttggaaaggtggcaaaggatagcagcaggatgctgcagccgtccagcagcccgctctgggggaagcttcgtgtggacatcaaggcttacctgggctcggccatacagctggtgtcctgtctgtcggagacgacggtgttggcggccgtgctgcggcacatcagcgtgctggtgccctgcttcctgaccttccccaagcagtgccgcatgctgctcaagagaatggtggtcgtatggagcactggggaggagtctctgcgggtgctggctttcctggtcctcagcagagtctgccggcacaagaaggacactttccttggccccgtcctcaagcaaatgtacatcacgtatgtgaggaactgcaagttcacctcgcctggtgccctccccttcatcagtttcatgcagtggaccttgacggagctgctggccctggagccgggtgtggcctaccagcacgccttcctctacatccgccagctcgccatacacctgcgcaacgccatgaccacccgcaagaaggaaacataccagtctgtgtacaactggcagtatgtgcactgcctcttcctgtggtgccgggtcctgagcactgcgggccccagcgaagccctccagcccttggtctacccccttgcccaagtcatcattggctgtatcaagctcatccccactgcccgcttctacccgctgcgaatgcactgcatccgtgccctgacgctgctctcggggagctcgggggccttcatcccggtgctgcctttcatcctggagatgttccagcaggtcgacttcaacaggaagccagggcgcatgagctccaagcccatcaacttctccgtgatcctgaagctgtccaatgtcaacctgcaggagaaggcgtaccgggacggcctggtggagcagctgtacgacctcaccctggagtacctgcacagccaggcacactgcatcggcttcccggagctggtgctgcctgtggtcctgcagctgaagtcgttcctccgggagtgcaaggtggccaactactgccggcaggtgcagcagctgcttgggaaggttcaggagaactcggcatacatctgcagccgccgccagagggtttccttcggcgtctctgagcagcaggcagtggaagcctgggagaagctgacccgggaagaggggacacccttgaccttgtactacagccactggcgcaagctgcgtgaccgggagatccagctggagatcagtggcaaagagcggctggaagacctgaacttccctgagatcaaacgaaggaagatggctgacaggaaggatgaggacaggaagcaatttaaagacctctttgacctgaacagctctgaagaggacgacaccgagggattctcggagagagggatactgaggcccctgagcactcggcatggggtggaagacgatgaagaggacgaggaggagggcgaggaggacagcagcaactcggaggatggagacccagacgcagaggcggggctggcccctggggagctgcagcagctggcccaggggccggaggacgagctggaggatctgcagctctcagaggacgactgaggcagcccatctggggggcctgtaggggctgccgggctggtggccagtgtttccacctccctggcagtcaggcctagaggctggcgtctgtgcagttgggggaggcagtagacacgggacaggctttattatttatttttcagcatgaaagaccaaacgtatcgagagctgggctgggctgggctggtgtggctgctgaagccccacagctgtgggctgctgaagtcagctccgcgggggagctgaccctgacgtcagcagaccgagaccagtcccagttccagggggacggcctgcaggcccctggccccttccaccacctctgccctccgtctgcagacctcgtccatctgcaccaggctctgccttcactcccccaagtctttggaaatttgttcttttcctttgaagtcacattttcttttnaaaattttttgttttgcatccgaaaccgaaagaaattaaagcggtggggaa

SEQ ID NO: 251649 - DNA, 520 bp, Homo Sapiens
  misc_feature (232)..(243): n is a, c, g, or t
tcaatactgtactgtcaagaaatttgatgccgaaaatctttatatgcactatacaagagttaacacatttactaataaaagagggacatcccgagttacgtatatctaccttgcccacataactggatacaaccactctatattagaatgaaaggactgtcagattcatctgaactggaccagtgttgatctgtaatgtaatagaaaatctgatagaccagcacttctgacnnnnnnnnnnnnggtacaacaatgcaagatgctctgatagcatttgctaacaggaccaggaggatctaaaaaggaccagcctaatgtagaaggtggttatttggaccagaggctttagattattattttagatcctacatatacttttatcagtagaatgatttcatttagatgtataatgaggataatgcattttagtcaaggtacacagatggcagtgccataagcaagtctataaatatcggctgcagccatccccctcatttttgttgccctaataatctgcgtt

SEQ ID NO: 251650 - DNA, 758 bp, Homo Sapiens
cttaactggtaccaccagtgattctgatgcgatgcttcaatcccgagatttcacatctggaaagcctaagaatttacaaagatgttctgctaaaacccccagggccccatgcagtcttgctagaaaatttcctccctagggttcctttggaaggttaaatactccccataggatctgtggcatttctccatccaatgaatactacttagagctacactcaccacttccctagacagcctttaataggcatgataacagtgttaatagaccagtgtgatagatcacttatctttatggattgtgcttaatactgatttagtatcttgactccaaaaactgacatctgttgtctgtgataaccacttctgtattgcgtcttaaccacttctgtattgtgtggtcttaactgcctaaggcggcaatgggcagtgggcccctttcccttaggatgggtatcaattcaacaatatttataaggcatttactgtgtgctaagcatttggaagacccaggctacaaaataagacatagttcctgccctccaggccagcagagggaggcacaaatacccaggaatctctgatgggtgtgaagtgcggtcgtgggccacagaaaatgaccgtcatggagaccctgctaaaggtcggaccctgagcccaaaggggtattcagaagtggagatgattttggccccactcatagatgggtggcaaatctaagatttgtataaagcatataaaatagggtgatcacccgcg

SEQ ID NO: 251651 - DNA, 1205 bp, Homo Sapiens
ccagactcagggttccagaaatcccccgttcccaaaccaaaccaatcatggatcttccctttaaggggtagaatcagcctttagagttacaagcccctggaaaagggagcaggtcccatacaatcagcctttctcctcttctcttcttgggacaggaataactgctgagcagtccccctttgccactcctggctgtctgagtgggcacttgtctgggctgctggccagcagtgtaagggccacttggtgacttcgtagggttccttagagaagtgacatggccttgaggagattcagggcacctttcctcagtgagctttgatatggtccaaaaacagccttaaatcaagaatatttgtggaggtaggtgtggggaaggttggagaagagttaggtttgtgctttgtaatcttggcatccatgttttgtgcctgccctccctcttggggaggccatgcttgactctgctgaaagctgctaactggtgacagggtggatcatggtgaggactaggggtaaggtcagggaatgcttaagctctggccctgccctgtattcctcttccccttggtagcagttccctgaccaagggcaaggtgtgtctcaggaaggtggttctgtgcatgcctgggtgtggttaaggcgtggcccagaaggcttccctggtgctctcagtccaggcaaagcccagagcatctgagcacgtctctgacttccagtggcaacacagtttgaatgtggtgaaacagggtgtagttcttttccacattctgtgtcatctagtcgtgcaggtagggaaaaagttggtctaattgaagattgtgcatttcctagtgacaggtgccaagaggttatgatacgggtttcttgggtctgatgtacagtgtgaataaatgcttgcagctcttagctcttttttgatcgatgaagcacttttttattaatattttcctttgttaaaggaggaaccgtaactctccatagctgtacatataacccttttctcctaaagaggagtcagtcagtgctcctatatttttcattttttgtcaaagcaagaagtaaatactttagaattgttaaatatataaataaagcaaataaagttgagtgttccacatggtagcatttgctaacacttcctaattctttgccctgtggtttatcccctcttcgtcccttttccctctcacacagaagtgttt

SEQ ID NO: 251652 - DNA, 670 bp, Homo Sapiens
  misc_feature (480)..(480): n is a, c, g, or t
  misc_feature (511)..(511): n is a, c, g, or t
gggttcggggccaagatggcgacgggaacgggcaaacacaagctgctaagcactggccccacagagccatggtccatccgagagaagctatgtttagcatcttctgtcatgagaagtggcgatcaaaattgggtatcagttagcagagcaatcaagccctttgcagaacctggccgccctccagactggttctctcaaaaacattgtgcttcccagcactcggagcttttagagaccactgagacaccaaaacggaaacgaggtgaaaagggagaagtggtggaaactgttgaagatgttattgttcggaaattgactgctgagcgagttgaagaactaaagaaagtgataaaggaaacccaggagagatatagacggctaaagacagatgcagaactaattcaagctcggacacatggacagcagactggatgagctttgcaatggacattgccaccggacacacccaacccacccctncacaaacccacatgccgggcccccccacggnccctcccaaaaaagctttccaaccccaattccctttgggcgccgcgcgcccccccgtaaggctaacccggaaccctgggggccataaaccttggtttcctaagcgaaaaccctgggccccatggaccctaagcggcctccgggatttccccacccaatt

SEQ ID NO: 251653 - DNA, 555 bp, Homo Sapiens
tcggggaggcctgaactccagaactggttcttccaacttccgcttgggactggggaccttagtgtcttcttttatttctgtttcctcctcattggtggcatctgtcatttctttcaggtcagggtccttgatgccatgcatcagctggacgtgcttctccagcatcaaacgtttggtaaaggtacgtctggagtctgggcagtgcgagcaggcgtacactttcctgatgcctttgtgcttgatccggttgtgccggcacaggctgtgggacgagctgaaagactcgtcacactggcgccaggggtgtttcttcatttgcttcccgtgctccttcctcacgtgggatatgtacacatctctccgcatgaacaggcagtcacactcccaacacgtccacccaggactggccactttcttggtttccattgattttttcacaggagatggagatttcttttccaatttctcttccccattcatggatttgatgtcctctttgttctgatttgctgaattttgagttgcaggcttaatgctcaaagccaagttcatacc

SEQ ID NO: 251654 - DNA, 1808 bp, Homo Sapiens
  misc_feature (1741)..(1741): n is a, c, g, or t
  misc_feature (1747)..(1747): n is a, c, g, or t
  misc_feature (1749)..(1749): n is a, c, g, or t
  misc_feature (1753)..(1753): n is a, c, g, or t
  misc_feature (1760)..(1760): n is a, c, g, or t
  misc_feature (1764)..(1764): n is a, c, g, or t
  misc_feature (1766)..(1767): n is a, c, g, or t
  misc_feature (1769)..(1769): n is a, c, g, or t
  misc_feature (1772)..(1772): n is a, c, g, or t
  misc_feature (1780)..(1780): n is a, c, g, or t
  misc_feature (1785)..(1785): n is a, c, g, or t
tggtaccggcccggaattccgggatatgtcgacccacgcgtcgccgggagctgccaggctgtacgacgccgccgcgtgcggggccatgatccggaacgggcgcggggctgcaggcggcgcagagcagccgggcccggggggcaggcgcgccgtgagggtgtggtgcgatggctgctatgacatggtgcattacggccactccaaccagctgcgccagtgcacgggccatgggtgactacctcatcgtaggcgtgcacaccgatgaggagatcgccaagcacaaggggcccccggtgtacactcaggaggagagatacaagatggtgcaggccatcaaatgggtggacgaggtggtgccagcggctccctacgtcactacactagagaccctggacaaatacaactgtgacttctgtgtatcacggaaatgacatcaccgctgactggtaggatggccgggacacactatgaggaagtaaagcaggctgggaggtacagagaatgcaagccgcacgcaaggggtgtccacacacagaccctcgtgggccgcatgctgctggtaaccaaagcccatcacagcagccaggagatgtcctctgagtaccgggagtatgcagacagttttggcaagtgccctggtgggcggaacccctggaccggggtatcccagttcctgcagacatctcagaagatcatccagtttgcttctgggaaggagccccagccaggggagacagtcatctatgtggctggtgccttcgacctgttccacatcgggcatgtggacttcctggagaaggtgcacaggctggcagagaggccctacatcatcgcgggcttacactttgaccaggaggtcaatcactacaaggggaagaactaccccatcatgaatctgcatgaacggactctgagcgtgctggcctgccggtacgtgtcagaagtggtgattggagccccgtacgcggtcacagcagagctcctaagtcacttcaaggtggacctggtgtgtcacggcaagacagaaattatccctgacagggatggctccgacccataccaggagcccaagagaaggggcatcttccgtcagattgacagtggcagcaacctcaccacagacctcatcgtccagcggatcatcaccaacaggttggagtatgaggcgcgaaaccagaagaaggaagccaaggagctggccttcctggaggctgccaggcagcaggcggcacagcccctgggggagcgcgatggtgacttctaacctggcagaggccctggccggccctccccctgctctgcttctgcgccttctgcgtttggacataggactctgcagggccgccctctctaactggcctggctctggaagggctggtgaggactctgcctccttgcctgcctacaaggtgcctggtttgcagcaggctctccgctctttccagcaaagctgctcagagagggtgtccagcacagtggagaggccggaagtgagacgggcagacggcacctgcagcctgaaacgcaccgctcctgcgtgcgcccccacctggtccccggatgcccccaccacctggacagaggccacactgactgcccacccagctgtggcgggaggtgcagagcagagggctttagggagcagtgactgcggtcacccctttagttctctgggtgtagaccacaccacctcccactgggcaccccccaacacggtgtcctgccacccagcgcctggctnccaggnanacangcttgcnttcntnncnagncagtcgcnactcnccttatggactctgttctgtttg

SEQ ID NO: 251655 - DNA, 861 bp, Homo Sapiens
aacgagcgaggcctgggtggcgaattccgcacgaggcaccaacaggttggagtatgaggcgcgaaaccagaagaaggaagccaaggagctggccttcctggaggctgccaggcagcaggcggcacagcccctgggggagcgcgatggtgacttctaacctggcagaggccctggccggccctccccctgctctgcttctgcgccttctgcgtttggacataggactctgcagggccgccctctctaactggcctggctctggaagggctggtgaggactctgcctccttgcctgcctacaaggtgcctggtttgcagcaggctctccgctctttccagcaaagctgctcagagagggtgtccagcacagtggagaggccggaagtgagacgggcagacggcacctgcagcctgaaacgcaccgctcctgcgtgcgcccccacctggtccccggatgcccccaccacctggacagaggccacactgactgcccacccagctgtggcgggaggtgcagagcagagggctttagggagcagtgactgcggtcacccctttagttctctgggtgtagaccacaccacctcccactgggcaccccccaacacggtgtcctgccacccagcgcctggctccaggaaaacacgcttgccttccttcccggcagcttcgccactctccttatggactctgttctgtttgtacatggctgacggaaatctctttggtacaaccgaataaagctggtggcagtgctgcgcggggtctccagccctgctgggaaggaccagggaaccactcagcaaggagaccctcttggccctgcccccaccatgcacccaaaaccgggaagggcagcggt

SEQ ID NO: 251656 - DNA, 998 bp, Homo Sapiens
  misc_feature (794)..(794): n is a, c, g, or t
taggtagcgaggcctgggtggcgaattcggcacgaggctcggagtcgccgggagctgccaggctgtccgcgccgccgctgcggggccatgatccggaacgggcgcggggctgcaggcggcgcagagcagccgggcccggggggcaggcgcgccgtgagggtgtggtgcgatggctgctatgacatggtgcattacggccactccaaccagctgcgccaggcacgggccatgggtgactacctcatcgtaggcgtgcacaccgatgaggagatcgccaagcacaaggggcccccggtgttcactcaggaggagagatacaagatggtgcaggccatcaaatgggtggacgaggtggtgccagcggctccctacgtcactacaactgtgacttctgtgttcacggcaatgacatcaccctgactgtagatggccgggacacctatgaggaagtaaagcaggctgggaggtacagagaatgcaagcgcacgcaaggggtgtccaccacagacctcgtgggccgcatgctgctggtaaccaaagcccatcacagcagccaggagatgtcctctgagtaccgggagtatgcagacagttttggcaagccccctcacccgatacccgccggggacatactttcctcagaaggctgctcccagtgccctggtgggcggaacccctggaccggggtatcccagttcctgcagacatctcagaagatcatccagtttgccttctgggaaggagccccagccacgggagacagtcatctatgtgggctggtgccttcgacctgntccacatcgggcatgtggacttcctggagaaggtgcacaggctggcagagaggccctacatcatcgcgggcttaccttttgaccaggaggtcatcactacaagggggagaactaccccatcatgaatctgcatgaacggactctgagcgtgctggcctgccgttacgtgtcaaaaggggtggatggaaaccccgtacccgggtc

SEQ ID NO: 251657 - DNA, 322 bp, Homo Sapiens
gaagttgatggctgggcaagaggactccaatggctgcatcaactatgaagcatttgtgaagcacatcatgtccagctaaacctcgtgcccaggaagcccagggaaggctgtgcagggacgtctcatctcccatgtgtgatgctgacaccagcggcctggagtcgtgggaaggaggggagccttaccaagactcctgcaaaaacccttggacctctccacgtggttgccgtctctggcccctctcaggctgtgcttacctgtgacagcagctctgtccccaccccatgggcctcatgaataaatggcttcttgccagccttcg

SEQ ID NO: 251658 - DNA, 1169 bp, Homo Sapiens
  misc_feature (434)..(444): n is a, c, g, or t
aggggaaaaaattagtctccacagagaatcatgcttagactgtaatagtattttctctagagacaactttttggttaattgggacacaactatgagaatgcagaatttacttaggtgcaaagtcatgtttgctttttatacaccttaagatcctaaatacaagggaacctgtttttcagtagttcagtcatctccctgattctggttctaccattgggtctctctctcttcttccctcctctaagatcatcaaaacaatactacccaatggcttaaaagcccaaacatttttctgtttttgtccttccctccaattctatcttaaacatgtatctcctctaacagagtgtgctattttggcttgatggaatgcaaggttttatttgctgccactctgtaggacagtaagcattacaatgtaactagttctggtnnnnnnnnnnngacaaagagattgcaaagtgcttccacaaaatccacgggcgtagagaaaggactgcaaggttcaactcaaaacacatgctccagagccaatcccagtattcatctatccaaatgtcacacctgtttgtcctttggcatgggaattaagactgaccaactatgatacccaaccctagaatgagcaattgccgaggaggtgagaaggcgattcagcaggaatgtctccatgctctgaaacttgtggtctttgctttagtttctactacagaaaataccaaagacatccaaggccaccctgtcccgtcaccagaacttgctgctggccacttccaatccatctcataccatttggaattgattgtgctgtttctctatctttgtaaaaagaagtttcacttattttgtgtcgagaattacaagtgtgagagaggcatcctgtcttccaccagtactgtgtccatcccaaactggtcggtgcactgcttcacggtggccaggacactcaggagccgctggtccacggcgtccagatgaggatcagagagcactggggagatggggtcatgggccatggcagattttaaggcagactttagcacaccattctttaggtagttcagtctgttccaggtggacacccgaatgatgcaacactgatagagaggggcaagaatgcttctttcatccagcgaggggttcccaaagcttttggcattatcaagaag

SEQ ID NO: 251659 - DNA, 544 bp, Homo Sapiens
acccactacaaactaaatctttacaatggacttacggcggttaccagcttacccaaatgatcatccttagtttcactaatgcaaggacctgtacttaaatgttttctgacagtacaatatgacatagaaataacctacaaagtattcttccccaaaacgtttaatctagacctaagaaagcctctggacttactttcccttgtaaagaaaatacaaccaagaacaaggctaaatgacactataaagaaagaaatctaaacacatagccaacaacatttctgggctactcaaaattcaatgtcatttttttaaaatgagaaatgttctagaccagtggctctctaactctggttggtatcacagacacaaaacctggagaaataataaaaaacagaggcccaggcttataaactagggctacacttctgtaggtttactaagttccacaggggattctgatacccaccataatttgagagcatactttcatggaatttccatgctacaatacactaaagagagataaccaaatgcaatgcagaat

SEQ ID NO: 251660 - DNA, 241 bp, Homo Sapiens
atcggccattacggacggggattcaaaaaggacttgaagatgtgaatcatctattttgctgaagaaatcttaactctttgaaattactttttattgctgttgtcatactcttaggtgccaaactgcggtaaattttttatcagtgaagtggaagcatgtgttttgttttggaaatttttatcaagtatcttcagagaagattatttcctgctttatcttcagaaactggaaagggtcaaag

SEQ ID NO: 251661 - DNA, 1778 bp, Homo Sapiens
  misc_feature (1558)..(1573): n is a, c, g, or t
  misc_feature (1593)..(1593): n is a, c, g, or t
  misc_feature (1620)..(1620): n is a, c, g, or t
  misc_feature (1631)..(1631): n is a, c, g, or t
  misc_feature (1649)..(1649): n is a, c, g, or t
  misc_feature (1671)..(1671): n is a, c, g, or t
  misc_feature (1731)..(1731): n is a, c, g, or t
  misc_feature (1735)..(1735): n is a, c, g, or t
  misc_feature (1742)..(1742): n is a, c, g, or t
  misc_feature (1759)..(1759): n is a, c, g, or t
  misc_feature (1765)..(1765): n is a, c, g, or t
  misc_feature (1772)..(1772): n is a, c, g, or t
aaacagctgccctcattagcggattccgttccattatcaaacccgagtggatccgaatgttctcaactcctgaactgcagcgtctcatctctggcgacaatgctgagattgatctggaagatttaaagaagcacacagtctactacggtggtttccatggaagtcacagagtcatcatctggctctgggatattctggcctctgacttcacaccggatgagagagctatgtttctgaagttcgtgaccagctgctccagacccccgctcctgggattcgcctacctcaagcctccattctccatccgctgcgtggaggtgtcggacgatcaggacaccggggacactctgggcagcgtcctccggggcttcttcaccatccccaagcgggagccaggcggccgcctgcccacctcctccacctgcttcaacctgctcaagctgcccaactacagcaagaagagcgtcctccgcgagaagctgcgtacgccatcagcatgaacacgggctttgaactctcctagctcctgtcccgagccctgcctccagggctcctgggctgccagggaccttcagctcccagaggcagtgtggtcctgggaatgtgaccaacatgccaggtgacattggcccctagaccctctctatagccatgagactccttgtggcctcaagaaatttagacgcccacgacagcactacacagcatctccaggtgatgcccaaggcacagggctgcagaaaataaacctccagattccaccaacacgggtccattcttcctggtgatggcagaggggcttcttttagctagtttgatcttttgggagtctgtctttccttagccgtctgagtgagctgtgtatgaacaagtcccaggagttccaagagtctagagtggtttttgcagcatgggttgagtgtacaaagcctactgtgcgtgagatcctctccttccgtttctgaaatctcttactcaggtaaggcctcgccaagcctctatgcaccccacaaagtttctgcctccatgccgtccacaagcgcctcttccaagacaagccaaggcccatctgctgcccaagggaaagcgcaggcgcctgctaagggacgctatggacaccggtgagtccaaggccgcttgctcctgccttgaagccacgcgctccacgccgcggccctcccattttctgcgtcctcagcgggctgagctgccagagagccttcccggacctattcccgtcctgtgcattcacattggcatcctggtttgggggaagaaaaacaacggcccttagcagcagccccgtttccagaatgtgctgcctgttccccaaagcctgcttgtcccgcggaggacggctgcctttgaccctgcttatttgtctcactggttatctaatgaggaacaaacactaacctaaggtacacatcccatctgggcggtggcttcactcctgagtctgcaaaatcccaggaaacttgggtcttgctgcccatccttcctcagcacagggaacccggaagcccgttgcactgacagaggctcacaccctctgggnnnnnnnnnnnnnnnnaaacttcatttctcttccanccattgtgttctctgcctcattcttancctttgttgtnagaacttagctcagggantgaggagaggcctgtttgtggntgtgtgacagcaccaccctctcccctatgctctgacctgcacaccaaggtgatgcggatngaanccaggangccagtcctctctgctncctaanacgcaanattttc

SEQ ID NO: 251662 - DNA, 944 bp, Homo Sapiens
  misc_feature (918)..(918): n is a, c, g, or t
acaatccttgatgacattgaagtttatgaagaacagatttcattcaaactggaagagctggtcactatctcctctttcctgaattcttttgtgtttaagatgatctgggatggaattgtagagaacgccaagggtgagaccttggagctgttccagtctgtccacgggtggcttatggtgctgtacgagcgggactgccggcggcgcttcacccccgaggaccactggctgcgaaaggatctcaaacctagcgtgctcttccaagaactcgacagggacagaaaacgggcacagttgatcctgcagtacatcccacatgtcatccctcacaaaaacagagttctactgtttcgaaccatggttaccaaggagaaggagaaactggggctggtggaaaccagctctgcctccccgcatgtcactcacatcaccatccgccggtccaggatgctggaggacggctacgagcagcttaggcagctctcccagcacgccatgaagggggtcatccgtgtgaagtttgtcaatgacctcggggtggacgaagcagggattgatcaagacggtgtttttaaggagttcttggaagagatcatcaagagagtttttgacccagcactcaatctgttcaagacaaccagtggggatgagaggctgtacccctcacccacatcctacatccatgagaattacctgcagctcttcgagtttgtggggaagatgctggggaaagctgtgtatgaaggaattgtggtggacgtgccatttgcatccttcttcctgagccaactgcttgggcaccaccacagcgtcttctatagcctcggtgggatgaactgcccttctctggactccgagttctataaaaacctcacctccatcaagcggctatgatgggggacatcactgacctggggncctgacgctgttcttaccaacgagga

SEQ ID NO: 251663 - DNA, 461 bp, Homo Sapiens
  misc_feature (365)..(365): n is a, c, g, or t
  misc_feature (373)..(373): n is a, c, g, or t
  misc_feature (422)..(422): n is a, c, g, or t
  misc_feature (429)..(429): n is a, c, g, or t
  misc_feature (449)..(449): n is a, c, g, or t
tcaactcctgaactgcagcgtctcatctctggcgacaatgctgagattgatctggaagatttaaagaagcacacagtctactacggtggtttccatggaagtcacagagtcatcatctggctctgggatattctggcctctgacttcacaccggatgagagagctatgtttctgaagttcgtgaccagctgctccagacccccgctcctgggattcgcctacctcaagcctccattctccatccgctgcgtggaggtgtcggacgatcaggctgtgcacgtccaggctcgctgcttcatttcctcatttggccaaaggagaaggaaagccttcagggtttacgggagctctgtgtgtctcaagcngggcccantgtggggtggttcaaatgagagttcctacttccccttaaaaacccagtnggccgtntttgggttttaggttgcctnttaatgatggtt

SEQ ID NO: 251664 - DNA, 510 bp, Homo Sapiens
ggccaacagactcttccctgggccctgtgctgttcagcactgtttttatagtcactgctctgaaataaaaacctcagcaccccaagtactaggaatgcattagatgatggaaccagaagccaggaaggcctcaacagattagaatcaagagacaaactaaacagatgatttagtaggagaactccaaagttgtggttctggggctgtgcatgttgaggtctggatggagtagatgtgctgaatggctgtgtcctaacagagctgaccaccagccagaagtccaggcccagcaccacccccacatctcggtctctgctccctgcgttgatccctgccatccacctgctctgctgccaatagaaagatctgacagcagccagattcaagaagtgaagagctgggcttgctccttgcaaggcacttgacctctgcctctccccgtctttttgccttgcagacaaccagtggggatgagaggctgtacccctcacccacatcctacatccatga

SEQ ID NO: 251665 - DNA, 876 bp, Homo Sapiens
  misc_feature (23)..(23): n is a, c, g, or t
  misc_feature (282)..(361): n is a, c, g, or t
tccgggccaacccgggatatttnaatattagctatccccggtaatgatttccaagaaggccaggtattaccattggtggaggtcctattagattcatacaccataatggacaaatctggacttgacagatacatacagaaccagcagatatcagttgccgaatgtttcttttggcacaaactgagtatttaaaaaactgacaatatgtagtatcagaaaaaatctttaactttcatagaataaaagagagaatacaatcagtgtagagatcaacaaaagatnnnnnnnnnnnnnnnnnnnnnnnnnnnnnnnnnnnnnnnnnnnnnnnnnnnnnnnnnnnnnnnnnnnnnnnnnnnnnnnnagcctagatacctgatttctttttaattatgcttgaaattcaaattacaaaatactaagtaacccatgcatagaggaaacaaaaattgaagattattttatttgtaaaataatgacaataccaatttcataggactttttattagtagtatcataggcagtcttctgacaaattaggaaaagtagatagggtctgtccttagagtagtggcttgggctgattacctaacttctctgcacctcagcactgtcatcattacattggaggggtccctatggtgccttaaagtgctcaagctctattattcaccacactattttgtcatttttaaattatcataggatattcaacctgaagttttactttacctgcccacgtcatctctacatattctcatgagatgcagttcatgaattctaaagcagtatcatttaatgtattattttaaaaagatatttagaaaggtatattcatttcaaacatctttaagaataacagtatatccacttaatacc

SEQ ID NO: 251666 - DNA, 749 bp, Homo Sapiens
  misc_feature (46)..(46): n is a, c, g, or t
tctccagggcaacatttctctgcaggagtgaatgtctggtttggcntgcatgttatagaggcttattaaatatgctctcatgggcatattaattcacaataggtctctcattttcaagctcattctccgctgtagatgctttaccttgtagtagtgacacaacactgtgatatgccaaaagcacagataccagccatggaaatttgacgttaacccctacctggaatgcaatttcattagccttatcaaaacacaaacaaaaactcagatacagaaatattacttgctctgacctggcaaagtcattcaaacattccactcactacactggtatgctttgctcctctcattctgtcaccaatttcacttcttttggatgtttttcttttcatcttgtcctgacttccaagaaatatgcagaatataagaaaagtcctcattctctcatcacttcattttggactttctttcttgttcactaacttttagctctggagacatggtgacctcactgtattttctctttaatactatgaccaagctctctgcatgaagcattacagaaatgacacgctgaacagaacatgtccattctaatgggaaaactgaggagactggcttggtatagaaactggaagtgtggtactgatgaagcaactaattttaaatttagaacagcaaagctgatgtcatatttcaaaggaagggctaattttaataatcttaataaccaagtcaaaaatacaatc

SEQ ID NO: 251667 - DNA, 686 bp, Homo Sapiens
  misc_feature (25)..(25): n is a, c, g, or t
ggcctgcagccggtgctgtctacangggagctccagcccttctcacactcgacccgcagaaaccacccaccttcaccatgtctgacgaggaagttgaacaggtggaggagcagtacgaagaagaagaggagaaaccgagacccaaactcactgctcctaagatcccagaaggggagaaagtggacttcgatgacatccagaagaagcgtcagaacaaagacctaatggagctccaggccctcatcgacagccactttgaagcccggaagaaggaggaggaggagctggtcgctctcaaagagagaatcgagaagcgccgtgcagagagagcggagcagcagaggattcgtgcagagaaggagagggagcgccagaacagactggcggaggaaaaggccagaagggaggaggaggatgccaagaggagggcagaggacgacctgaagaagaagaaagctctgtcttccatgggagccaactacagcagctacctggccaaggctgaccagaagagaggcaagaagcagacagcccgggaaatgaagaagaagattctggctgagagacgcaagccgctcaacatcgatcaccttggtgaagaacaactgagggacaaggccaaggagctctgggagaccctgcaccagctggagattgacaagttcgagtttggggagaagctgaaa

SEQ ID NO: 251668 - DNA, 551 bp, Homo Sapiens
tacctactgaatcacaaatgtaaggcattggtgatgcttgcatttaccctcctgtaagcaacactttaacgtcttacattttctctgatgatgtcacacaaaattatcatgacaaatattaccagagcaaagtgtaacggccaacactttgttcgatcattttacgctgtctctgacataaggagtgcctgaatagcttggaaaagtaacatctcctggccatcccttcatttaaccaagctattcaagtattcctatgccagagcagtgccaactcttggaggtcccagagtgcagccaatgcctttgtgtggtagttctaaattttaattgcacctgaaaaacctgggcacctaagcaatgagccacagcaaaaagtaaagaacaacaacaaaataaagctgttgttaaattttaaacaatattactaattgcccaaaatgtcaatttgatgtagttcttttcatgcaagtataaattcaattgttagttataattgttggaccgccttgagatagtaacaacaaaataaagcaagctatttgcacctc

SEQ ID NO: 251669 - DNA, 588 bp, Homo Sapiens
gcattcaaagtaaaggaggtgggcagcccgtatcttcttgggttcctccttcaccagcaaaggcgagacgccagcccctccctggctagtcctctctggagtgttagacgtcatcatggtccccactagctctgtccctcctccttccctttgctgccccaggcaggcactgtcactgaggtggggagatcccttgacatctgggtctgggatctcctccttcaccttggcttctgtcctcaggaagtgctgatggcaacgcatgtggagtttcaggctgaagtggcgtgaggaagtaaaagggcacagctggcactgaaaggtctctccccggtcctggtgctgatgaaccttcatgtgggatttgagattgtccttgcgagcacaccggaatggacagagcggacactgatgactttttaaacctgtgtgaatcaccatgtgccgcttccagtaactcttccttttaataaccaaaccacatattggacactggaaaggctttccactttcctcttctgaggccgaattggagggtttagaagctcttcccttaggaactgggagtaataataattccagggattc

SEQ ID NO: 251670 - DNA, 733 bp, Homo Sapiens
  misc_feature (627)..(627): n is a, c, g, or t
  misc_feature (712)..(712): n is a, c, g, or t
gggggcgatgtgtgattaccatggcgaggagttctgtccgggggcctggctaaggaaaccctattacctccaggctcgcttctcatatgtgcggatgaaatatcttttcttttcctggttagtggtttttgttggaagctggattatatatgtgcagtattctacctatacagaattatgcagaggaaaggactgtaagaaaataatatgtgacaagtacaagactggagttattgatgggcctgcatgtaacagcctttgtgttacagaaactctttactttggaaaatgtttatccaccaagcccaacaatcagatgtatttagggatttgggataatctaccaggtgttgtgaaatgtcaaatggaacaagcgcttcatcttgattttggaactgaattggaaccaagaaaagaaatagtgctatttgataagccaactagaggaactactgtacaaaaatttaaagaaatggtctatagtctctttaaggcaaaattgggtgaccaaggaaacctctctgaactggtcaatctcatcttgacggtggctgatggagacaaagatggccaggtttccttgggagaagcaaagtcggcatgggcacttcttcaactgaatgaatntcttctcatggtgatacttcaagataaagaacatacccccaaattaatgggattctgtggtgacctctatgtgatggaaagtgtngaatatacctctctttatgga

SEQ ID NO: 251671 - DNA, 557 bp, Homo Sapiens
catttccactctcccacacccgcttctctgggcgttcgttcgcttcttgcagagctgccacggttgcccctaggttgctattctcttccttgtgggccatggcttcctgggaagtttcagagagccgaccgagctggcagcctacgggcactgcttcctgggggctctgcaagggtgctgagtcctaggtcatagcagagccccatatggccatgcccttgtctcaggcacactcctgctccccccaggcagctcatcttctttcttctctggcaggcccagcaccctcctgctgaccttcttggtccagcggccaggaggggtggtgagcacagatcctaaggggaggtggcagaggcctgggcatgaccttcaaacaagagcaaagcaccggcccttaacagggaggagtgggcttagaggtttcagggtgtgggggagggtggcggggctggggtgtccaggttttctagagttctagagtatcgatccagatgtccccatcccagtgtaagggtcccacattcctaactaggacaatgaccttggtatggcac

SEQ ID NO: 251672 - DNA, 1124 bp, Homo Sapiens
  misc_feature (390)..(403): n is a, c, g, or t
  misc_feature (537)..(549): n is a, c, g, or t
acagtagttacaatgacactccaaacagaaaagcaaagtaaaaaatcaaaaccccaatttctattcatgtaattagacttatacagaaattagaaggctaaataacaactagttaatcacctaatttcacagctatctgaagtggcaatcgttatatagcagcttatctatgatacattcaagataaatgatacaatttattacttgcctgtaagctaaaacacagcctcaatttaatacctttccttaaattccacctttacactacaatatacttgaggtctatgcaaaaagtagctacctttatataggaaatggatgattaagtctttggtgctgtaaaagcaacttcatttaaacagacataaccactaccatcaccaccacccnnnnnnnnnnnnnntgtcggggaaggggggaactcaacacacttcctagaaagaaaaaaaagcatgtaatttctgtccctgacggaatgtattaaataagcaaacatcaccaacaagcaaaacaagtactgcaatgtaaaaatacttnnnnnnnnnnnnnccctctcacatgcataaatcaaaaattgcacacaaagaactcacatcttttcaagcttctatagtaaaagttctgctactatttattaaatactgcatggtttgcccaagctaagataaaaccacatcatgaatcaatgagcattttgcattttattatctaccccaaagtcatgcctactgtacctctaaacattttattaagtccaattatacagcaaacactctcaaaataaacttagattgtattgcagtttcacttaacagtatataaaatgctgtgctgtgacagttatcaactatccattagatactgaatcaatttttcttaagcactactaactgcttgcttttcttgaagctagatcattctgaaaaatcagacagcagaattcagctatagcaaacatgctgccctcttaataaggaaaaaaacagctactacctgaaatcataccacacaaaaacaaaaatgaacattacgctatcaaaaggaaactaaatagtaggtctgaattttaagtgctgcagtcctcaacatttatatataggtaataacattaacaacctcaaata

SEQ ID NO: 251673 - DNA, 1381 bp, Homo Sapiens
  misc_feature (91)..(91): n is a, c, g, or t
  misc_feature (1071)..(1082): n is a, c, g, or t
  misc_feature (1327)..(1336): n is a, c, g, or t
caaactcaaggcaggttacaccccccaccgcctgggctggtcaccccccacaaatcccggggcggaaggctacaggtgaattttgcctccnttttgctcaaaatggaactcaagcattccctgaagggggagggtgtagggtttctggtttcccagacaggatcctggccatacaagaatccctgtttcaaaggtagtcttttaggatacgctgcaggaccactaagagtcccacccagcttctaaagactgagggttagaaggctacatttcgaaaaaacaagtcaaatatccccctccagccccctttgaaactaccgagaggtcatcgaccacaggcctgagactgggtcagcaatcaggctctttgaccaccccctgccacaagaaatatccaggacattaacttactcaaaccaggaaccctatctcaccagaagagaaaccccaaggtaaccttaggcattcctttcagattcaggtaattacaaaagccaacccttagctcatagtgtcaacatctcctctaccaaccacccagcccaaggaccagtagcagaagcacatgggcgatgtctcccctccactgctctgacccacccctctggcagaaaatctaacaagctacaaaatgccagaaagacagggagtaggagaaggagaagccaagggtctctataaatcagccctgaatgcacccatttggctgccaagagcttctcactgccttgctagcagcctgccactgttccctggcaaattgaaaccacccacgcaaacactcaaaaccccaatctccttgctaataagatacaaccagttaacaccgtgaaaaatgcacatctccagccttcatttcaaaaaagagctctgtactaaatgcaatatgcttttaaagggggttttacagggaccaatctcaatgcaaagaccagtaccagatgtctgagttttggttacaggtttataattagacacaaaattcactccacactggagttttactttcaagctggaagctagcattagttctacttggggggaaaaaagcaaagtcaagtcaacttgggnnnnnnnnnnnnggaggaggaggctaagtataatcataaattaaaagtcgcgaatcaaaggtgactggtagtgtcttttaggcatgaagagactggcttacaaaagtgactactgcttctaccacacacagcgaagattgaattacagacacactaaatcatgtctcttgcagatggtctcaagtagttacataagacaggtaatcagcagcacaattgagaacaacccctaaatacatgcttgagagaaagtgggnnnnnnnnnncattaagagctctactgcctgaatagatcattaaaagttaccata

SEQ ID NO: 251674 - DNA, 755 bp, Homo Sapiens
  misc_feature (34)..(34): n is a, c, g, or t
caccaagaaaggataaccgggggggacagccgangggggaggggaagtactgaagggagtacattttgtcatgttaaacagggagaaagattgggagctgggctcctgaaattgtaatactgcttgttagccatctacaatccctaaagtgctttcagaggctctacacatcttcaatgagtcaaaccccaaagacttataaataggtatataggttgctaatctattcctgatgctttgcctaaaaaattggcattgccatacttccacatctttcttttggaagcatggttttgagtttgttccttgttggtaagcatccagaaaatggcagattccggggattacactagggaagtttggtggaagttcctcccttgatcgaggggtaaacacgaaaccaggacagtctttgagtaatctgtaagttgttgggctgacatggagttttgcgtggtacactgcaggactcaaatttgttagccagagtgacattgtttccaaaaagacagtaacggggcattttaactccaacgacgccagcaaaaactgatccagagtggcagtccaattcgcatcttgataggttctccatggggagacataacttcattcgagagctgcatcagcttcagggccatcagcgctatctgaacagcatgagtatcacactcttgttgtgatccccagtcacacattaggctcgcaatggtcctcaccttggagaatatcgtctcttcacattgctggtcgaa

SEQ ID NO: 251675 - DNA, 771 bp, Homo Sapiens
  misc_feature (698)..(698): n is a, c, g, or t
gggggaaaaaactagcatgctcccctgctccctgttgtgttagggatgtttaggtcatactaggagcaattaggagccatatgcctgggctaagaagagctaggcagtagtgaccttaggatatgactaactcaccaaacaatgccaaggagaaaggcggacaggtcaccatcacctttcatcgattacatgtatagcagtagttttggtgaattcaccaaatcagcttccacttagcattaggaggtcatgccatacaactcacgtatgcgggcaaacacttttgatttgcatatcctgggtgtactgagccacataataaggtgtcaaaatgtgcttgagattccaaaaacttgctgaaacacttgatattgcacagtgcacttattttgtggccaaagcatggccttaccaccttgtctgcactattttcttttgggtggtgactgtttttttctgactttgcatatccctagacactagaactaaaggattggtaataaaccaatcagaaagaaatcctctgtggggtcactttaaaaactactagcttcaactaccacttacaaaatgtgcaagagtcatcattcgcccataaaatacacctcatgggctcctacccctttccccaaaagtctgaaagtgtaggaggaaggagggatacaaacaaggagaggaaatgatgggagagtgttgtntttgtcacttgccccagcagagcaggggttttggaaggagaggtctttaatagctttgaaacgctttgagatc

SEQ ID NO: 251676 - DNA, 1094 bp, Homo Sapiens
  misc_feature (949)..(949): n is a, c, g, or t
  misc_feature (1012)..(1012): n is a, c, g, or t
  misc_feature (1015)..(1017): n is a, c, g, or t
  misc_feature (1021)..(1021): n is a, c, g, or t
  misc_feature (1031)..(1032): n is a, c, g, or t
  misc_feature (1035)..(1035): n is a, c, g, or t
  misc_feature (1038)..(1040): n is a, c, g, or t
  misc_feature (1063)..(1063): n is a, c, g, or t
  misc_feature (1067)..(1067): n is a, c, g, or t
  misc_feature (1084)..(1084): n is a, c, g, or t
  misc_feature (1088)..(1088): n is a, c, g, or t
gggggagaatagggttgcaccatcccagaagctgctgttagctcgccggtcctcggcacgccgcccgttcgcccctgcgctgtccgcccttcccctagcgttacttccggtccctcgctgagggggttcgtgcggctcccaggaggcgtgaaccgcggaccatgagcgtgggcttcatcggggccggccagctggcctatgctctggcgcggggcttcacggccgcaggattcctgtcggctcacaagataatagccagctccccagaaatgaacctgcccacggtgtccgcgctcaggaagatgggtgtgaacctgacacgcagcaacaaggagacggtgaagcacagcgacgtcctgtttctggctgtgaagccacatatcatccccttcatcctggatgagattggggccgacgtgcaagccagacacatcgtggtctcctgtgcggctggtgtcaccatcagctctgtggagaagaagctgatggcattccagccagcccccaaagtgattcgctgcatgaccaacacacctgtggtagtgcaggaaggcgctacagtgtacgccacgggcacccatgccctggtggaggatgggcagctcctggagcagctcatgagcagcgtgggcttctgcactgaggtggaagaggacctcatcgatgccgtcacggggctcagtggcagcgggcctgcctatgcattcatggctctggacgcattggctgatggtggggtgaagatgggtttgccacggcgcctggcaatccaactcggggcccaggctttgctgggagctgccaagatgctgctggactcggagcagcatccatgccagcttaaggacaatgtctgctcccctgggggagccaccatccacgccctgcactttctagagagtgggggcttcgctctctgctcatcaatgcagttgaggctcctgtatcngacacgaaactacagtcatggcggacaagaaagatctcccagctgccttaagagacctcttanaannngagntggattcccnnagntcnnntgaccctccagccaggaagtctnaaanaactggcctgggggganaagntaagga

SEQ ID NO: 251677 - DNA, 1591 bp, Homo Sapiens
gctgagggggttcgtgcggctcccaggaggcgtgaaccgcggaccatgagcgtgggcttcatcggggccggccagctggcctatgctctggcgcggggcttcacggccgcaggcatcctgtcggctcacaagataatagccagctccccagaaatgaacctgcccacggtgtccgcgctcaggaagatgggtgtgaacctgacacgcagcaacaaggagacggtgaagcacagcgacgtcctgtttctggctgtgaagccacatatcatccccttcatcctggatgagattggggccgacgtgcaagccagacacatcgtggtctcctgtgcggctggtgtcaccatcagctctgtggagaagaagctgatggcattccagccagcccccaaagtgattcgctgcatgaccaacacacctgtggtagtgcaggaaggcgctacagtgtacgccacgggcacccatgccctggtggaggatgggcagctcctggagcagctcatgagcagcgtgggcttctgcactgaggtggaagaggacctcatcgatgccgtcacggggcctcagtggcagcgggcctgcctatgcattcatggctctggacgcattggctgatggtggggtgaagatgggtttgccacggcgcctggcaatccaactcggggcccaggctttgctgggagctgccaagatgctgctggactcggagcagcatccatgccagcttaaggacaatgtctgctcccctgggggagccaccatccacgccctgcactttctagagagtgggggcttccgctctctgctcatcaatgcagttgaggcctcctgtatccgaacacgagagctacagtccatggccgaccaagaaaagatctccccagctgcccttaagaagaccctcttagacagagtgaagctggaatcccccacagtctccacactgaccccctccagcccagggaagctcctcacaagaagcctggccctgggaggcaagaaggactaaggcagcatctgtcccctctgtgattcagagcccttagttgagagcccctgccgcccctgccacccccctgccccgctcccaacattgcccctcctcagctgtgcaaggagaaagcatgcttaggaagttttcaggtccttgtgataaaacctccttaaatctgttcagaccaagcaatgcgagcttcctctcctgtcccatgttggaagttgctctgaaggggtggtagatgctggaagccagacacaacccctgcgtacgctgcctcagttggtggagactggggctgggactggagtcagcccagctgggaggaggggctggggaggatctgcagctgaagcccgaggcagggttggtgtgatgccaaggcaaagtggtgaggagaaaacaggaaacgggctttctctgaattggtaaatgggaaagaagtgagcaacttaagattgtcacaattaatcacaagtgtacaggattagactgggtttatatttaactcttgcttcataggtgtaccatttaaagagtgttatttaatgctaagtttaactgctttaataaagtttatttttaaattaaaaa

SEQ ID NO: 251678 - DNA, 801 bp, Homo Sapiens
gcctgggtggcgaattcggcacgagggggagccggtgccatctgtgggggctttgggccaggggtctccggacagcatgagcgtgggcttcatcggcgctggccagctggcttttgccctggccaagggcttcacagcagcaggcgtcttggctgcccacaagataatggctagctccccagacatggacctggccacagtttctgctctcaggaagatgggggtgaagttgacaccccacaacaaggagacggtgcagcacagtgatgtgctcttcctggctgtgaagccacacatcatccccttcatcctggatgaaataggcgccgacattgaggacagacacattgtggtgtcctgcgcggccggcgtcaccatcagctccattgagaagaagctgtcagcgtttcggccagccccccagggtcatccgctgcatgaccaacactccagtcgtggtgcgggagggggccaccgtgtatgccacaggcacgcacgcccaagtggaggacgggaagctcatggagcagctgctgaccagcgtgggcttctgcacggaagtggaagaagacctgattgatgccgtcacgggggctcaagggcagcggcccccgcctacccattcacagccctggatgccctggctgatggggggtgtgaaaaaagggacttcccaaggcgcccgggcaatcccccctcgggggccccaggccctcccgggggggctgcccaaaatcctgctgggcctccaaaaaaagcccccccaggccaggttctaggggaaaacgttcagtttctcct

SEQ ID NO: 251679 - DNA, 1433 bp, Homo Sapiens
cctgggtggcgaattcggcacgaggcaggggtctccggacagcatgagcgtgggcttcatcggcgctggccagctggcttttgccctggccaagggcttcacagcagcaggcgtcttggctgcccacaagataatggctagctccccagacatggacctggccacagtttctgctctcaggaagatgggggtgaagttgacaccccacaacaaggagacggtgcagcacagtgatgtgctcttcctggctgtgaagccacacatcatccccttcatcctggatgaaataggcgccgacattgaggacagacacattgtggtgtcctgcgcggccggcgtcaccatcagctccattgagaagaagctgtcagcgtttcggccagcccccagggtcatccgctgcatgaccaacactccagtcgtggtgcgggagggggccaccgtgtatgccacaggcacgcacgcccaggtggaggacgggaggctcatggagcagctgctgagcagcgtgggcttctgcacggaggtggaagaggacctgattgatgccgtcacggggctcagtggcagcggccccgcctacgcattcacagccctggatgccctggctgatgggggtgtgaagatgggacttccaaggcgcctggcagtccgcctcggggcccaggccctcctgggggctgccaagatgctgctgcactcagaacagcacccaggccagctcaaggacaacgtcagctctcctggtggggccaccatccatgccttgcatgtgctggagagtgggggcttccgctccctgctcatcaacgctgtggaggcctcctgcatccgcacacgggagctgcagtccatggctgaccaggagcaggtgtcaccagccgccatcaagaagaccatcctggacaaggtgaagctggactcccctgcagggaccgctctgtcgccttctggccacaccaagctgctcccccgcagcctggccccagcgggcaaggattgacacgtcctgcctgaccaccatcctgccaccaccttctcttctcttgtcactagggggactagggggtccccaaagtggcccactttctgtggctctgatcagcgcaggggccagccagggacatagccagggaggggccacatcacttcccactggaaatctctgtggtctgcaagtgcttcccagcccagaacaggggtggattccccaacctcaacctcctttcttctctgctcccaaaccatgtcaggaccaccttcctctagagctcgggagcccggagggtcttcaccccactcctactccagcatcagctggcacgggcctccttcctgagaggcaaggtcaaggaccccctctgtgaagctcaccaaaggggggatccaagccccctcccgggccctccctgccctccattcagggagaaacc

SEQ ID NO: 251680 - DNA, 2270 bp, Homo Sapiens
  misc_feature (1695)..(1712): n is a, c, g, or t
  misc_feature (1721)..(1759): n is a, c, g, or t
  misc_feature (1806)..(1876): n is a, c, g, or t
  misc_feature (1932)..(2133): n is a, c, g, or t
ggcctgggtggcgaattcggcacgagggggagccggtgccatctgtgggggctttgggccaggggtctccggacagcatgagcgtgggcttcatcggcgctggccagctggcttttgccctggccaagggcttcacagcagcaggcgtcttggctgcccacaagataatggctagctccccagacatggacctggccacagtttctgctctcaggaagatgggggtgaagttgacaccccacaacaaggagacggtgcagcacagtgatgtgctcttcctggctgtgaagccacacatcatccccttcatcctggatgaaataggcgccgacattgaggacagacacattgtggtgtcctgcgcggccggcgtcaccatcagctccattgagaagaagctgtcagcgtttcggccagcccccagggtcatccgctgcatgaccaacactccagtcgtggtgcgggagggggccaccgtgtatgccacaggcacgcacgcccaggtggaggacgggaggctcatggagcagctgctgagcagcgtgggcttctgcacggaggtggaagaggacctgattgatgccgtcacggggctcagtggcagcggccccgcctacgcattcacagccctggatgccctggctgatgggggtgtgaagatgggacttccaaggcgcctggcagtccgcctcggggcccaggccctcctgggagctgcagtccatggctgaccaggagcaggtgtcaccagccgccatcaagaagaccatcctggacaaggtgaagctggactcccctgcagggaccgctctgtcgccttctggccacaccaagctgctcccccgcagcctggccccagcgggcaaggattgacacgtcctgcctgaccaccatcctgccaccaccttctcttctcttgtcactagggggactagggggtccccaaagtggcccactttctgtggctctgatcagcgcaggggccagccagggacatagccagggaggggccacatcacttcccactggaaatctctgtggtctgcaagtgcttcccagcccagaacaggggtggattccccaacctcaacctcctttcttctctgctcccaaaccatgtcaggaccaccttcctctagagctcgggagcccggagggtcttcacccactcctactccagtatcagctggcacgggctccttcctgagagcaaaggtcaaggaccccctctgtgaaggctcagcagaggtgggatcccacgccccctcccggcccctccctgccctccattcagggagaaacctctccttcccgtgtgagaagggccagagggtccaggcatcccaagtccagcgtgaagggccacagcccctcttggctgccaagcacgcagatcccatggacatttggggaaagggctccttgggctgctggtgaacttctgtggccaccacctcctgctcctgacctccctgggagggtgctatcagttctgtcctggccctttcagttttataagttggtttccagcccccagtgtcctgacttctgtctgccacatgaggagggaggccctgcctgtgtgggagggtggttactgtgggtggaatagtggaggccttcaactgattagacaaggcccgcccacatcttggagggcatctgccttactgattaaaatgtcaatgtaatctnnnnnnnnnnnnnnnnnnctcgaggcnnnnnnnnnnnnnnnnnnnnnnnnnnnnnnnnnnnnnnncatggtcatagctgtttcctgacccagctttcttgtacaaagtggtnnnnnnnnnnnnnnnnnnnnnnnnnnnnnnnnnnnnnnnnnnnnnnnnnnnnnnnnnnnnnnnnnnnnnnncgctgcagtacccgggaatttaacccccctaatgagcgggcttttttttgtgatcnnnnnnnnnnnnnnnnnnnnnnnnnnnnnnnnnnnnnnnnnnnnnnnnnnnnnnnnnnnnnnnnnnnnnnnnnnnnnnnnnnnnnnnnnnnnnnnnnnnnnnnnnnnnnnnnnnnnnnnnnnnnnnnnnnnnnnnnnnnnnnnnnnnnnnnnnnnnnnnnnnnnnnnnnnnnnnnnnnnnnnnnnnnnnnnnnnnnnnnnnntttctggaaccaccgcccaaataacctcggttcttctaatccccggataaccatcggccctcatgccccacggggcgaataaagtctctgggccctaacccggggtttggggtcttaaacaacgacaatgtctcccg

SEQ ID NO: 251681 - DNA, 716 bp, Homo Sapiens
gcggcaccagaaggatataaccagaattctccagcaacatgaggaggaaaagaagaaatgggcacacaggtggagaaggaaagggagctagagcttcgagacagactggatgagcagcgaagggtcctggaaggaaagaacgaagaggccctgcaagtcctccgggcctcatatgaacaggagaaagaagcgcttacccactctttccgggaggccagttctacccagcaggagaccatagacagactgacctcacagctggaggctttccaggccaaaatgaagagggtggaggagtccattctgagccgaaactataagaaacatatccaggattatgggagccccagccagttctgggagcaggagctggagagcttacactttgtcatcgagatgaagaatgagcgtattcatgagctggacaggcggctgatcctcatggaaacagtgaaagagaaaaatctgatattggaggaaaaaattacgaccctgcaacaggaaaatgaggacctccatgtccgaagccgcaaccaggtggtcctgtcaaggcaggctgtcagaagacctgcttctcacgcgtgaggccctgggagaaggaggtgcagctgcggcgacacctccagcaggaggaagggagggagctgttgtaccgggtccttgggggccaattgcttcgccttgccttccctttgggcccctgttcatttccattg

SEQ ID NO: 251682 - DNA, 512 bp, Homo Sapiens
ctggcaactaaatgcttgccctagtaagtgacactggttcttctttctataacgcatcagccagaacgagttccgtggtcccacccaaccatgaggtgggcccagaaaggcaattaatctagtggcatcaacagcttttactcttcccaaatagactctcagcttcgtgaaagcagctgccagctctgcttgttttaaccaatgtgcccagcacacagtgccctgataaaaatatgtgttcaacagataaaggactcccttcctggggaaaatgagtaaggggactcttacaacaggcaacaaaaaccttaaggtagggcactcactctgggattcaccaaagttagctgagcaggagaaagacagggggtgggggcacctggacttacctgttgtgcccatttcttcttttcctcctcatgttgctggagaattctggttatatccttctggtgccgctcagcctcctctgatgcacagagctggacagttatagctagagatgaaaaagc

SEQ ID NO: 251683 - DNA, 692 bp, Homo Sapiens
agtcatttgtaagcataccaaaataataaagtatagcccacgtatgagccaaacacactgagacatttgagggcatacaatgctaccctccagtctactttcgtcagaaaccaaacctactcactcagatcatttacaaggaaaactagtgcagaaagcaccccaaaaatgttgcctgtcagcaggttaattttcttctaactttaaaagaagtagatattttttcttttaaaattcatttataaaaataaattttagtttgagaccctaggtaccaaattgtggcttaatttactcaagatggatgtactacaaagttatgaaaaatgtagctgaaaacccatgagctccagctcatttctgcagcgtggccaacagctgccactgtacactgtcacaacccttctcataggtaaccaaaatacgctcaacgtcttgacaaacttttagccttcctttgtcctgaaactcccacacaactttaattcttagacctccattataaaactattagtaaccataatacattcaagatagagaatgaagacctgtcatccactcaggagacactgaaccagggcactgggacaacacggccactcaggggaaatagtcacccttgtgggtgtacagctcttcagatgttttgcactagaatgcaggcaaaaagtcccttatgtaatttttatctc

SEQ ID NO: 251684 - DNA, 675 bp, Homo Sapiens
gataatgtctttgcacgaggtcatttccactgcacagccaggatccttctggctaacagaggaggccttggggcagaagaacccgggttgtgtctacttccagagctccaagcctagacagaggtactgtgagggccaagaacaacctcaaggaaacaaaaaagaagtgaaggagggagctcagccctgagtctcctttattcttggctgaactgcagaaaggccctctccttctcactcccaggggtcagaatcacccccgtggaagagcctccaaggctcacagaaccagtgactgcaagaagcctacaaggtcgggcacagcccaggctcacagcatggcaacaggctgactgaccagggtggacctgtgcactggggacggcaccagatgtcacctaattaagaaaaactgcagggattctgggacctgtgtggtcttgcccccagggcctggtgatgaacaccactgatgattccatgtctctcaggaagcaggaaaatatgatgctggaagcagaaagataaggtgcagtaaaagccatggatttcactggagccatcattaatagacacagacagccctggggcaatggagaaacactaagagtctaaattctattattgaaatcaccaatgagcatctcaggcctggaaaaaagctttcagtcactg

SEQ ID NO: 251685 - DNA, 356 bp, Homo Sapiens
gtactttggaaacaagaatattgttaaaggtgccataaaaatggacaacactgaaaacagtttgcaaataaaccacctaacactgcagttctttatacatattaaaagccttgtctggggtttgtcatatgttaaatattatttaaagtgggaaaatatgttgtagcttgaagcctcccattggcccaaacatccaatacaaaacacatctccacaaaaggagcaggcagacaatacaggtacatttatagaagcagccagctaatgtcctaatgtttaaaaatttaccactgtttaatatgagatttcaaactgtgtggataacaggagaattttggattcaggaagatgtatac

SEQ ID NO: 251686 - DNA, 549 bp, Homo Sapiens
ccagtttacactgaagatcgatctgaaactcagcaccagcgaaatccagaacttgcctgtctccatggctggttttaatttccccattctgcagtggcttgttaatattagttctgacctttggggcaaggtgaacacatggttggactgaagagaaaaggcttctggtggctcaggaacgtctttggcaactacaacagctgatatttcaacagagcacatacatcccccacttaacaagggtacgtcctcagccttctcagggaaccaacgaacacctccaggcttcctctttgatgccacccactggacctgccttgggggtctgtaaatgcaagagaaccgagtgttggataattagcgatggaagaaaaaacctctagaataaaaggtaggtgagaaagaagggaaagtaggcaggagttgcacaaatccacatccattcttcaggccctctggaaagttttctttgcatagatggttggttgtcgtgtgcattaaagggcatgggaaagtgggggaaaagattatatctatatgtaacctaaa

SEQ ID NO: 251687 - DNA, 440 bp, Homo Sapiens
  misc_feature (42)..(42): n is a, c, g, or t
  misc_feature (385)..(385): n is a, c, g, or t
  misc_feature (405)..(405): n is a, c, g, or t
ccatttacactgaagatcgatctgaaactcagcaccagcganaatccagaacttgcctgtctccatggctggttttaatttccccattctgcagtggcttgttaatattagttctgacctttggggcaaggtgaacacatggttggactgaagagaaaaggcttctggtggctcaggaacgtctttgggcaactacaacagctgatatttcaacagaggcacatacatcccccactttaacaaggggtacgtccttcagccttcttcaggggaaccaacggaacacctccagggcttcctcttttggatggccaccccactggggacctggccttggggggtcttgttaaaatggccaaggaggaacccgagtgtttggggatanttaggccgatggggaagggnaaaaacccttttagggatttaaaagggtagggttt

SEQ ID NO: 251688 - DNA, 698 bp, Homo Sapiens
  misc_feature (501)..(524): n is a, c, g, or t
tgaataatgctgcagtaaacattgacataacaagtatgtatttgattgcctgtttctaagttcttttgggtatacatcttgagtagaattgctagataatgtcatgttttatttctcttgtgatttcttcttcgatcccctggttgagtgtgttaatttctacatgtttatgaatttcccactgtttttttgttattgatttccaagttcattccattgtgattagagaagatacttagtatgattttaatgtttttgagaattggtgtgtggcctgatagatggtctgtcctggagaatgttcctcatacacttgagcaaaatatttatcatgctattgttgactgtagttttctatatgtctcttaggtcaaggtggtttacaatgtgttaaggttctctttttttaaaaaaatttttgcacagagtatctttttctatgtgttccatgtatttgtgtctttggagctatagtctcttgtagacagcatatcactatcnnnnnnnnnnnnnnnnnnnnnnnnctgtccattctgccaatttctgccttttgattggaaaatttaatccatttgcatttaaagtaattaaggaaggactttcttctaccatttaacacttcttctatatgtcatatacttttttggcccctcatttcctctttatggccttcttttctgtttttttgtagtgaacta

SEQ ID NO: 251689 - DNA, 688 bp, Homo Sapiens
gttttaggggtgactgaacatgggacaccaaagcccttttcaaaagtaagtaaatcttaagcagctttcaataaggcgcattttaagaaacgtaaccttttttcctctaaagtttcattttaaaggaaaagaaaccctgtataccaatctgttatgtagtataaaagaaagctcttaagaaacactggtcattcaaaagctgtattttgaagtatgtataaaacagccatttgtaggagaggatgaaatttcagtgctaagtcagattcaggaatctgattagaatttattgtaatataaagatttgtgctgtttctcattgtccacctaaagtcttcaaattgaattcactcttttttcttcataggtttgacagtgtagcttttggagaaagtcaaagtgaggatgaacaatttgaaaatgacttagagacagatccacccaactggcagcagcttgttagtcgagaagtgttactgggactaaaaccttgtgaaatcaaaagacaggaagtgattaatgaattgttctacactgaaagagctcatgttcgaacactgaaggttcttgatcaagtgttctatcagcgagtatccagagaaggaattctgtcaccctcagagctacggaaaattttttcaaacttggaagatattcttcaacttcatagtaagagaaattagctctg

SEQ ID NO: 251690 - DNA, 566 bp, Homo Sapiens
agtctgtcagagccatagtaactgtatattggggaaattggaaccacttttatcttggatggccctgagctgctgcttacctgttaattttgagtttcagtgcagttaatagattaggagtttggaaaaaagcttagctttcctcatggaaaacttaaaaaggtagagatggtctgactcctccaaacccctcaacccacaccagcattacatagcatgctccccacttgcatacatatgtgcacagcttagatatccaaagtctgaggtaaaaaattagttgtactctacaagatgatattgaacatattaaagttactagattgtgactcgccaaggacctgctgggttctgagttttcttctcctttttgagtatgcagattatggtttcacattagggcaattcatctaacaataaccgctttgccaaaatctgctttttttgcgttgaacaagtgctgcacttcatactgtgtgcttgtgttcatcacttttttctttgtattctttgtatccctagcatgtttgtggggggttttgttttctctttgatattttgaccaa

SEQ ID NO: 251691 - DNA, 946 bp, Homo Sapiens
cagaggtcaactggattggttgtgatgcggacaaacaccaggcctgacgaacacgcagtaatgaagaccagcgagaagaaaatgactcagccagggtttcggacgcagaaagacccccagcgtgtgaacaaccgcctcaagcagccctcaaatgctgcgctgacagggtcacagcaggacgcctctcctttgtcacttgcattaacataaaaagctatattgctatcgatgggagtgatactcggagacaaaataccgttttctgtagcaccacactgcaaaaaatgctccaaaaaacacaagcaaaaaccccatgtaggtgatccacatgatgacatacatggcgtccaagccaaggatcgtccaggggtagcgagtcaaagtagagcttggagagcaggggcatgtggcggatgatgagccgcagggaggcatctgtgatgtccaggcctgccaggcgcagctccacgatgttccggagcttgctccgattgtccatctgacctggcctgttgtctgtgggcggggacaggagatcccgcatctgggcatcctttagtccctccacccactggacatccagggtccggagcagcggacaactggagctgcaaagggccgagaccgcgatccatgagcagcctgacagcaccaagtcccggagcccaggcagccggttgatgagccagctcagctgcttcttggagatattggtccagctgaggtcgagggagacgggctgtcgccggatgatgccactcagcatcaggggtgtgatagacttgcagtggttcaggtcaatgcgggtccacaaccgcttatcgcagcaccagcggttccaggtcctgcagacccgcatgcacacacacaggtcttggtggctgaggtagctgaagacggccatccacacctccctgtgcatgacgtgggctgccccatcgtccag

SEQ ID NO: 251692 - DNA, 1267 bp, Homo Sapiens
gtgtcaagacggcagcagatgtggtgtgtggtcccactttatgtcaacacccaaaacctcggtgttgccaaggaatgaagtgtccaaaacaccactaccactaacagaaactcctaagctcatgcttcagtatgagaatttctccgaagtccaccctcctctccgacaggaatgtcttcttgtaaaggccgccttagaaatggtccagaaagcagtgcagttacgattcagaaagaccaaaggaaagtgtcggctcactcatcccccaaacgggtggttgaacagcttctcccttggaaagacttgcaaaatggaattgcgttgtggtctgttgtcccacgttccaaatggaaaatgaaagccctcatttttgtgaagtctctcccctcccagagcccgccccgtatttacatacttatccttggactaactcagtttttgcaggagtttttcttctacatgcccaaactggacactcacagacatctcggctatgaactgctcacagccttccttggtgacttgcttgcagtacctcaggtcaatatgacagatgtttccacagcgtttgaagaaggacaggcactgatcagtgaccttactgtagtcagacaggttgatctcggttaaggagtctcgggtggtggtgccaacagcagtgagcaggttgatagactggtcggtgacgtggttacagtaactgaggtggagcttggagagcaggggcatgtggcggatgatgagccgcagggaggcatctgtgatgtccaggcctgccaggcgcagctccacgatgttccggagcttgctccgattgtccatctgacctggcctataatctgtgggcggggacaggagatcccgcatctgggcatcctttagtccctccacccactggacatccagggtccggagcagcggacaactggagctgcaaagggccgagaccgcgatccatgagcagcctgacagcaccaagtcccggagcccaggcagccggttgatgagccagctcagctgcttcttggagatattggtccagctgaggtcgagggagacgggctgtcgccggatgatgccactcagcatcaggggtgtgatagacttgcagtggttcaggtcaatgcgggtccacaaccgcttatcgcagcaccagcggttccaggtcctgcagacccgcatgcacacacacaggtcttggtggctgaggtagctgaagacggccatccacacctccctgtgcatgacgtgggctgccccatcgtca

SEQ ID NO: 251693 - DNA, 664 bp, Homo Sapiens
  misc_feature (524)..(585): n is a, c, g, or t
actctgacagcctttccccagcagctgaggtccctgcttctctagagggtgcagattccccatcccaacaacttccactaaagtaaagtagtcggtggcattttgtcagcatataacttctggctccttggacaactgtgttttgtcttaacaaggaagctgaccttacccttaaaacctttcaacaaatgaaatgttactcatggttgtttttctggttgctttcttatcgcacaggtgttatacaaagaagacatgggcaagggaacccctctacctgtcactcccgagatggaaagagtcaaacacaatcaagaaaatattagctcggtacttgggcaagaaaagaaaaaaactacttatttaatgattttgaaaactttcatgatttaaaataatacgtattaatcctactttttaaagacaacttaaattttgtgaatttctttagcaaatttatccttttttcctttgggctacttctagcctaacaccattcccatttctataatacagttaatttnnnnnnnnnnnnnnnnnnnnnnnnnnnnnnnnnnnnnnnnnnnnnnnnnnnnnnnnnnnnnngtgtggataacaccactgagttctaactgtctcaaatcctcatataattgtttaggaggcatggtactcacaaaaaagg

SEQ ID NO: 251694 - DNA, 572 bp, Homo Sapiens
  misc_feature (342)..(383): n is a, c, g, or t
  misc_feature (522)..(522): n is a, c, g, or t
  misc_feature (539)..(539): n is a, c, g, or t
atcaaaattgcatttaaccaattatataaagcctagaaaaataaaaggcttggatatgtgacaaggactataaacagttcaatgctacaatttcttaaaagtttttcaaacatccagtgttttcatcctttttgagggcaaataactttagtgaatgttatatatagagaactccaaagaaaaacaaatatgaattcgatcctgataaatcaactacctttaaatatgtacaaagtaggatatgcataaactcggtggccatagtatccctaggactaaaaagaattcattttatatcaatgaaaatcccttctttgtggcttcttgagattcctataattnnnnnnnnnnnnnnnnnnnnnnnnnnnnnnnnnnnnnnnnnngataggttcatggtaggcactggtcttaccatgtacataagataatccgaggtgagaattccaacttgatatacacagattcttagggatagccaaaggaattttaaaaagcctaatgaaaagtatatacaggcaaaantaaaacaggtttttgtnttcgtttttgagcttcacaccaatgaagtcact

SEQ ID NO: 251695 - DNA, 1917 bp, Homo Sapiens
tttaataaataacaaatacaacattgtaggccataatcatatacagtataaggaaaaggtggtagtgttgagtaagcagttattagaatagaataccttggcctctatgcaaatatgtctagacactttgattcactcagccctgacattcagttttcaaagtaggagacaggttctacagtatcattttacagtttccaacacattgaaaacaagtagaaaatgatgagttgatttttattaatgcattacatcctcaagagttatcaccaacccctcagtataaaaaattttcaagttatattagtcatataacttggtgtgcttattttaaatagtgctaaatggattaagtgaagacaacaatggttcccctaatgtgattgatattgtcatttttaccagcttctagatctaaactttcaggcttttgaactgaacattgatgacagtgttcatagttcaacctactgaacatacagtgtgcttgattcagaatgttattttgtagaaattaaaattttaacctggtgaaaaataagttgatataagtggtataataaacaatacactgaaatggttactgtcacaaacggtgctaaataatgatataggaggttccactctcaagtcacctagaagtttgattacatattgttacttacaaaactataataaattggatgcacagctgtttacttcagtctggtgtcttcaaccaaaatatgtaccttataccaaaacaatgcttattccaaaatattttttgtagctagtagttctttccttggaggtaaagaaaatacacccaaacttttaattaccaggattcagaatatttaagagaacaattttagttaagaatcaaatatacagagattcaaagaggggaaaaaaaggaaatattatagaagacaaaggtcaaactggcattccagatctggagcaattttgtaaagcaggaaaacaactatgacaatctgtagcttcttagatcattatagtgaatgtccccatttactataagtgtttttataatggtgtttcctaaataaaggaacataaatgtacactaaagggtgtttcccaagaatagaggtgaagatattttcattttgtttaacccacaaactatttggtcaaaggaatatgtaaagctaaataaaagcacatctggtagaaattcatggcaatgcatgttgacaagatgtgcttggacctcgcttgcagcatctggcagtgggtagcagaacaaaggtaggaatctcacaggctctcctgtgtcttttctggaagaggctccgtggtggtggcactagcatttgcagccgaattcaagacttctccaaaatcaccaccagcaggcttggttccccctactttaagttttcgaccttttcttcaaatgatttaaaagttggggagttttttacatattccagctttttggtgatgactgagccaacagacgaaaaagcagctgaggccttctgtccagcctgggataaggtttcagatgtcttcttgtaagcagatgttgctgtcacgtcttgccaccctttggcaatgttctgttttagttcctgtagagaattgattccaagtttccgcttgatctctgctagatgcttctcttttgctgctaacacttgagacagagtctggatttcttcttctacctttgcaagttctcttcttagctcttcctgctcctcttccgagagggtctctgtggcactgatcgtggcagcaacatcttctccttcctcagggactgggtatgttctcagcagaccttgctcgccgcggtccatgtctccagcccgccgcctcgtgtcctctgcagcacccccgcctgcagcccgtcccggctcggatcgcccgccgcgccgcgcagagctcctcctcgcctccccc

SEQ ID NO: 251696 - DNA, 328 bp, Homo Sapiens
  misc_feature (243)..(243): n is a, c, g, or t
  misc_feature (286)..(286): n is a, c, g, or t
  misc_feature (296)..(296): n is a, c, g, or t
gaccacgcaggggaagagaaagcaggagccgtccagcacggaggaaggcgaccatggccaaggagtggggctacgccagtcacaacggtcctgaccactggcatgaacttttcccaaatagccaagggggaaaaccacgttcgcccattgagctgcatactaaagacatcaggcatgacccttctctgcagccatggtctgtgtcttatgatggtagcctctgccaagaccatcctgaataangggaagacctgccgagttgtatttgatgatacttatgataggncaatgctganagggggtcctctccctggaccctaccgacttc

SEQ ID NO: 251697 - DNA, 766 bp, Homo Sapiens
ggtggctgcagttggcaagatggcgccggtgggggtggagaagaagctgctgctaggtcccaacgggcccgcggtggcggccgccggcgacctgaccagtgaggaggaggaaggccagagcctatggtcctccattctgagcgaagtgtccacccgcgccaggtccaagctgccgtccggcaagaacatcctggtcttcggtgaagatggttctggtaaaacaaccctcatgactaaactacaaggagctgagcatggcaaaaaaggaagaggcctagaatatctctacctcagtgtccatgatgaggaccgagatgatcacacgcgctgcaacgtgtggattctggatggagacttgtaccacaaaggcctgctgaaatttgcagtttctgctgaatccttgccagagaccctcgtcatttttgttgcagacatgtctagaccttggactgtgatggaatctctgcagaaatgggctagtgttttacgtgagcacattgataaaatgaaaattccaccagaaaaaatgagggagctggaacggaagtttgtgaaagattttcaagactatatggaacctgaagaaggttgtcaaggttccccacagagaagaggccctctgacctcaggctccgatgaagaaaatgttgccctgcctctgggtgacaatgtgctgactcataacctggggatcccggtgttggtggtgtgcacaaagtgtgatgcggtgagtgtcctggagaaggagcacgattacagggatgag

SEQ ID NO: 251698 - DNA, 820 bp, Homo Sapiens
ggacagaaggacaagaagtgaggcacaggctgagctagatcggcaatgccctgtgatccaggctgaggcattgggatgtgctcgtacaggcgatcctgatctcagcggatgatgagatggaggagtccgacgtggaggaggacctccgcagactgacccccctcaagcctgtgaagaaaaagaagcaccgctttgggctacccgtatgacacattcccatgctgggggtgacgggagggccccgccagccgctggtgtgcagaggtcatcccgcagcatcgttccttaccctctctctgcccttcctttctacctctgctcctcttgctgtctctgcccgctctcgcctgcccccagactactgtgacttaaaaagagggaagaggagccagcgcccgagggggccactggcggctggaggtccccattcagttgcactacaaacactgaccaaatatgcaaggaaggagctgtgtttgtttgttgtcgtcccagacagtgttgtgagggacctgaggccctgccccgtgtccgaccaccgagtggcaaggtggaaggaagcacaggcacacagaccgtgggtgggtctcctcaccgtggctgtgggcagtgcgaacacgtaacaccctcgggctaaaagtgactcgttgaccaagttggaaccggaatgctttcttactcaaaatggcttttgtaactattgatttctgaagctggttttatgagttgtgacagtgttaccaggttgggggtatgtgtttatttcctacaaagtacttacgggactaatgggcaaaacagagatttttaagtcttccgt

SEQ ID NO: 251699 - DNA, 915 bp, Homo Sapiens
ggatggtttcaatatctgaaatgaacacatcaaagtttcatccacactcatcattccaccagcattatcaaactcgccacagtaatttggggctgaaaataaggttaccaactgtcgtttagcaaaaaattcatatccatcttccaccacctgatgagctcgacaaatcaaatctaaatcatgacgattcagaaatttactgactacatcagctccaaaagtaaaggaaacaccacgatcatttttctccccagccttgcacatccttatccggatcagaccatagcaaatcacagagcaaacctgtatcagggacatcagtaggtctcataattctccgaatctgctccatagattgcaggtctggtgacaatcctccatgacaacagaagatcttctcatccacaatggctgctataggcagacagttaaaacaatcagtgaaggtcttccacaatttaatattaaatcttcgtttgcattcatcatagaatccataaatgcgatatgatgctagcacatctcagtggtttcctgcttaagagaaagaagttgctctggcatatttgattttataagccaatagcaaacaaatggtttccaaagactgctttcctctgtccacataacctcctaagaaaagatagttggcttctggtgggaaacctccatattcaaataatctcagtaaatctgtatactgtccatgaatatctccacaaattttcagcggtgcttccaattccaaaagaataggctggatgagaaagatctcccgagacttgatacataagcctcgaacctccgcttcactcatctgcacaatctttcctggacgacatcctcgtacctccagcagccgggtgatgaggctgtccacgttcagctccccgtccgccatcttgtcggcccggc

SEQ ID NO: 251700 - DNA, 922 bp, Homo Sapiens
ggcgaattcggcacgagggggcggtgccgaggaggaggaggtggcggcctgggtgagagaacgccgagccgtcgccgcagcctccgccgccgagaagcccttgttcccgctgctgggaaggagagtctgtgccgacaagatggcggacggggagctgaacgtggacagcctcatcacccggctgctggagcagccattgtggatgagaagatcttctgttgtcatggaggattgtcaccagacctgcaatctatggagcagattcggagaattatgagacctactgatgtccctgatacaggtttgctctgtgatttgctatggtctgatccagataaggatgtgcaaggctggggagaaaatgatcgtggtgtttcctttacttttggagctgatgtagtcagtaaatttctgaatcgtcatgatttagatttgatttgtcgagctcatcaggtggtggaagatggatatgaattttttgctaaacgacagttggtaaccttattttcagccccaaattactgtggcgagtttgataatgctggtggaatgatgagtgtggatgaaactttgatgtgttcatttcagatattgaaaccatctgaaaagaaagctaaataccagtatggtggactgaattctggacgtcctgtcactccacctcgaacagctaatccgccgaagaaaaggtgaagaaaggaattctgtaaagaaaccatcagatttgttaaagacatacttcataatatataagtgtgcactggaaaaccatccagccatttgacaccctttatgatgtcacaccttttaacttaaagagacgggtaaaggatcttaaattttttttctaatagaaagatgtgctacactgtatttggaataagtatactctggtatagtcaacaaagttaaatccacatta

SEQ ID NO: 251701 - DNA, 1558 bp, Homo Sapiens
gggggagagaaaagtagccagagcggcgcagtggcggccgcgttctgtggttttccgctattcccccagacccgcaccttctcggcctctttgcggagaatcgtgaccaagatgtggaacagtggattcgaaagctatggcagctcctcatacgggggagccggcggctacacgcagtccccggggggctttggatcgcccgcaccttctcaagccgaaaagaaatcaagagcccgagcccagcacattgtgccctgtactatatctcagctgctttctgccactttggttgatgaagtgttcagaattgggaatgttgagatttcacaggtcactattgtggggatcatcagacatgcagagaaggctccaaccaacattgtttacaaaatagatgacatgacagctgcacccatggacgttcgccagtgggttgacacagatgacaccagcagtgaaaacactgtggttcctccagaaacatatgtgaaagtggcaggccacctgagatcttttcagaacaaaaagagcctggtagcctttaagatcatgcccctggaggatatgaatgagttcaccacacatattctggaagtgatcaatgcacacatggtactaagcaaagccaacagccagccctcagcagggagagcacctatcagcaatccaggaatgagtgaagcagggaactttggtgggaatagcttcatgccagcaaatggcctcactgtggcccaaaaccaggtgttgaatttgattaaggcttgtccaagacctgaagggttgaactttcaggatctcaagaaccagctgaaacacatgtctgtatcctcaatcaagcaagctgtggattttctgagcaatgaggggcacatctattctactgtggatgatgaccattttaaatccacagatgcagaataactggatctaactgggtacctgagatattttacagctggacctagtttcacaatctgttgtctccagctctgcatatgtctggccagggggcttctaggaagtaggtttcatctatcaaatgtctcctctgacttccttttgaaacttactgctcttctgttttattttgttttgtttgaagctcagagggagatgggcaattgacagggatgcaatccagggtgggatttcttgaggaagttacaaataagcttgttacaacatcaagatagatggaattggaaggatgctaccaggagagtacttacatagtgctcaggagtttctcttcttaaaatgtttactgctgaaagatgagcaggaccagggcgttataggcagagccctagccgagaaacctgctggcctctgcctgttttcatttcccactttggttgtgtggcattactttcagaattgcactttcctgcttgtcatgactttttgacacacttgccatgacgtgtgtttctgtgaacatgaagttctgcggtagtgcctccaggggcagaggaaaagaagaagtgttactgcgttttgtacaaaataaatacagtcatatgtttaataaaacagttctattgtagtaacttgt

SEQ ID NO: 251702 - DNA, 794 bp, Homo Sapiens
  misc_feature (424)..(424): n is a, c, g, or t
  misc_feature (581)..(581): n is a, c, g, or t
  misc_feature (612)..(612): n is a, c, g, or t
  misc_feature (614)..(614): n is a, c, g, or t
  misc_feature (702)..(702): n is a, c, g, or t
  misc_feature (757)..(757): n is a, c, g, or t
gacatgacttacatcagtaatcatgtggtgaaaagtttagaaaatgcccttatatgtaatacagagaagttagaaacaaacaggaaaaaaatacgaacataatgagctaaaaggccattcatacagaaattacatgaggtgactacggcatgttacaaatgaaagtatcctctccagacagttagaatggaggagcttcctgaggtcctgctcttttccacacactttctttctttcttctttcttcagcggcttcatcctgaagcagcccttgcggggatgctggagggtcacacacatgcttcttcacatcctcgcagagttaagcacagtgtctactgctggacgccaacccagggaccatggcttctgctggggctatgctgggcccgatacagaaacggtggttggtatgggcgctccnagctgcctgtctgcccgctgactcctacaggacgcacacacttaccctggtgaccagtcaggaacaggccaacacaccaacatgaggcagacccacagccctgcgagccttaccttatgtacacttttggggttttccagccaagcacagtacatcncctccacatagttcgaactagtcccactgananagggctcagcagcaacaggtgcagaatagcaccgaatctgttgaaatgtcctagctgctgctggtctgttttgtgaaaatgtcttaanagtctgggaagccgtcaatggcctcaacttagcagcacaagtccttaaatgaaanatttttgtcctgaagtttttcacaactgccttgtaca

SEQ ID NO: 251703 - DNA, 513 bp, Homo Sapiens
cggaagttttgctgctagtcgcggacgcaatggcttcaaggttacttcgcggagctggaacgctggccgcgcaggccctgagggctcgcggccccagtggcgcggccgcgatgcgctccatggcatctggaggtggtgttcccactgatgaagagcaggcgactgggttggagagggagatcatgctggctgcaaagaagggactggacccatacaatgtactggccccaaagggagcttcaggcaccagggaagaccctaatttagtcccctccatctccaacaagagaatagtaggctgcatctgtgaagaggacaataccagcgtcgtctggttttggctgcacaaaggcgaggcccagcgatgcccccgctgtggagcccattacaagctggtgccccagcagctggcacactgagcacctgcactaaattactcaaaatgtgctgtaaagtttcttctttccagtaaagactagccattgcattggctccttctcccatagaaaaaaa

SEQ ID NO: 251704 - DNA, 849 bp, Homo Sapiens
ggggacgtcatcgccgcggggcggaggcgacagtgtctagcgggagctccgcgtgtagctacgccggccgcctggctttgagacaacgtgattctccgcagctggtcgcctacccgtgatgttctgcccacgtcgagacctgagctgaaatggcagacgatctcggagacgagtggtgggagaaccagccgactggagcaggcagcagcccagaagcatcagatggtgaaggagaaggagacacagaagtgatgcagcaggagacagttccagttcctgtaccttcagagaaaaccaaacagcctaaagaatgttttttgatacaaccaaaggaaagaaaagagaataccaccaagaccaggaaaagaagaaagaagaaaattactgatgttcttgcaaaatcagaaccaaaaccagggttacctgaagacctacagaagctgatgaaggactattatagcagcagacgcttggtgattgaattagaagaactgaacctgccagactcctgtttcctcaaggccaatgatttgactcacagtctttcctcatacctaaaagaaatttgtcctaagtgggtaaaacttaggaagaaccacagtgagaagaaatcggtcctgatgctgatcatctgcagctcggccgtccgagccctggagctcattaggtcgatgacagcattcagaggagacggcaaagttataaaattatttgcaaagcacataaaggtccaggcgcaggtaaagttgctgggagaagcgtgtggtgcacctggggtgtaggaactccgggggagaatttaaagaacttgttaaacaaggttggctttaatttgagcccccttaaaac

SEQ ID NO: 251705 - DNA, 369 bp, Homo Sapiens
gtggggggcaggacaaatggctaagcagtgtttggaccgcaggatgaacaatcaataggcagaaagcaagattgaggcttccctcagccttttggatcgacaatcgacagctgagaggctattttttgctatggttgactaaatatggtcagggaagagagaggcacaagagagcctgtttgcctgggagtgcatgtttcaaatgcttagctgcctataaagctgtaacagtttagccagtggtcactgaggaagaatataagttagcctcgtagtgaccatgtggaagtcctgacctcgcttgcagacttgacctctggatgtgacaaggtagcttcactacagctctactatttaatcctggaaact

SEQ ID NO: 251706 - DNA, 361 bp, Homo Sapiens
ggtgggaagttggctggctggcgaggcagggcctctcctcaaagcctggctcccacggaaaatatgctcagtgcagccgcgtgcatgtaatgaaaacgccgccgggcccttctagtcggacaaaatgcagccgagaactccgctcgttctgtgcgttctcctgtcccaggtgctgctgctaacatctgcagaagatttggactgcactcctggatttcagcagaaagtgttccatatcaatcagccagctgaattcattgaggaccagtcaattctaaacttgaccttcagtgactgtaagggaaacgacaagctacgctatgaggtctcgagcccatacttcaagggtgaacagcgatgg

SEQ ID NO: 251707 - DNA, 826 bp, Homo Sapiens
ctcataattttaaaggactgtataagactcttttcggtcttttgatgtgacaataatctcaatcaaatgttaataagcttttactggttccctttctgactctgtttctgacattctaatcttttaaagatatagtttctgctgaaaataaaacatatatttaagataaaatataaacacttaaacctataattaaatgtgagaggtattatatagaaagcttaaaatctagatctactaagtccttgggatttagcaaatatgactttaggccaagtaactaagcattgatttggtcaatgaaatggggataacagtattcacgcaggggattgtgaagattaaatgaaataacatatacaaagcacttagcatacagaaagagctcaataaatgttggctgttattatagttatcatctagaaagctatattatctttaaatattcccatctgtatcatcctgaaccactttattcctattgcagttcttctcaacccacatcagtcttttttaattattttactaatcacatatttctttttatcattttgaacacttcaacaaattgcatgttttgacctcttacattagcagttgttcctggtatccagatgtagcatggtcatttatagtattatttgcatttatagtatcattttaagaggtaatattagtattttaactcttataagggatacaggttacactgctatacaattagtaggtaatctcctgtcaataaattcaaacataaattgcttcctagcttttaagtataaattttggctcaaggaaaaattttaatatataacattataaaccc

SEQ ID NO: 251708 - DNA, 785 bp, Homo Sapiens
  misc_feature (167)..(167): n is a, c, g, or t
  misc_feature (231)..(231): n is a, c, g, or t
  misc_feature (341)..(341): n is a, c, g, or t
aggggaaataaagctcaactcaccacacctctttccatattagtttctgcactaaatgactgggtcaaggagggctggctacaggcagagtggatttcataaatcaccatcccctcttaaatgcgtgcttcacctactattttaagtatgatttctcaggttaaaanaacttttccccaaaagctgcacacatggaacctgcttttcatcagaactctgtaaaaactgctntgtgagcctctctgtaactgcttttcatatacttcattaagtattcaagtttctcaacacaacccactcattttaacattttaatgccagtcttgctcattgaactattntgtggtagtttttctcagtttaatagtgaaatgtatgaaagcactgattccacagagaagaaggctttctcctcttggtccacaagctgacagattaattgcttattaaatatacactttcaacccacaattatctctttcacacacacccttctggaaattctatctcaggagcaaactacaactttgcccaaattcagatgacagctgcagttttaggggaacacaatctggggctgccagtgcagtcagccttcaagctttgtgcctgtcagataaaagaacaaaaggcagtgcttcctccctcagcccctcattagcgctggaggacggcaggcttgacagaacagttccagagaaaaaggaaccatgctgaagcaagtgagagtttcccctccacaaacatagaaaactaccaacccaccttggatacgctgcctcatg

SEQ ID NO: 251709 - DNA, 393 bp, Homo Sapiens
ccaacggtggccacatactgtcaggaaccctgtgtgatcatggtctggatctgcaacacgggccaggccaaagtcacagatcttgagatcacaggtggtgttgagcagcaaccctctgaggatctggtagagaaaatagcagatatggtcattgctgaggtgttgtgtcttcaagagcttgtaaagatctgccatgaggtcctgtactatatatacatctttcatttgctcgatggttggtgctcgaataatgtcattgattccaatgatgttctcatgtctgaagcgcagtaagatatctccctcagggttctctggcagtaggtctggtgctcaaaggggctgattttcttgatagctactcgaactttgttgacattatcataagcagag

SEQ ID NO: 251710 - DNA, 854 bp, Homo Sapiens
agagggttaaaatatatccattcagctaacgttctgcaccgtgacctcaagccttccaacctgctgctcaacaccacctgtgatctcaagatctgtgactttggcctggcccgtgttgcagatccagaccatgatcacacagggttcctgacagaatatgtggccacacgttggtacagggctccagaaattatgttgaattccaagggctacaccaagtccattgatatttggtctgtaggctgcattctggcagaaatgctttctaacaggcccatctttccagggaagcattatcttgaccagctgaaccacattttgggtattcttgggatccccatcacaagaagacctgaattgtataataaatttaaaagctaggaactatttgctttctcttccacacaaaaataaggtgccatggaacaggctgttcccaaatgctgactccaaagctctggacttattggacaaaatgttgacattcaacccacacaagaggattgaagtagaacaggctctggcccacccatatctggagcagtattacgacccgagtgacgagcccatcgccgaagcaccattcaagttcgacatggaattggatgacttgcctaaggaaaagctcaaagaactaatttttgaagagactgctagattccagccaggatacagatcttaaatttgtcaggacaagggctcagaggactggacgtgctcagacatcggtgttcttcttcccagttcttgacccctggtcctgtctccagcccgtcttggcttatccactttgactcctttgaacccgtttggaagggcggtttctgggtaattgtggcttttatgctttcaaa

SEQ ID NO: 251711 - DNA, 430 bp, Homo Sapiens
aacaggctgttcccaaatgctgactccaaagctctggacttattggacaaaatgttgacattcaaccccacacaagaggattgaagtagaacaggctctggccccaccccatatctggagcagtattacgacccgagtgacgagcccatcgccgaagcacccattcaagttcgacatggaattggatgacttgcctaaggaaaagctcaaagaactaatttttgaagagactgctagattccagccaggatacagatcttaaatttgtcaggtacctggagtttaatacagtgagctctagcaagggagcgctgccttttgtttctagaatattatgttcctcaaggtccattattttgtattcttttccaagctccttattggaaggtatttttttaaatttagaattaaaaattatttagaaagttgt

SEQ ID NO: 251712 - DNA, 1178 bp, Homo Sapiens
  misc_feature (306)..(321): n is a, c, g, or t
  misc_feature (778)..(814): n is a, c, g, or t
  misc_feature (1003)..(1014): n is a, c, g, or t
  misc_feature (1043)..(1053): n is a, c, g, or t
  misc_feature (1118)..(1126): n is a, c, g, or t
cctgggtggcgaattcggcacgaggagggtcttcactccctgcttggtgcccacagggctgcgcactgccagggcagggacagttcctgtggggctcgctctcactgctactgcttcctgggaggtgcatccctcttggtgaagtggcctagtgccccccagccaccctgactccccaccattccctcccacggcaaacgcacaaaacgtcttgagggagattttgacaagtcacccattccaggtgccacaggcaggggatgtttagtaatccaggatttctctgagaactgggatatgtggccnnnnnnnnnnnnnnnnatcttttatctggaaactgggtttgggtcaaccccaggagtatttgcagaaggcccagcacagtggggggtattggctgcagggcagggaaggcattgccgactagataaccgtgtgagcttggactgagcgttggtggttcttcccaaaggaaaggaatttctcccggcctgccaggtctctgggccttcagcgcgggtcctggtgctgcggccacaccaccctggggtgctcattgacagagctgccataatgaacttgaaaggacgggaatcacgagggaagctggggctcccctgcccacaggagaggatccccgttcttcaagcttctctgctcagtgtctactaacgaccgacatttgctaatgtaaataatagtaaattattgagaattctaattcttttacacagtctgtttttaatctattttaattaaataaaatctatgactctannnnnnnnnnnnnnnnnnnnnnnnnnnnnnnnnnnnngaaccaacgagacgcggactagtccatcacagacccaaacacacagaaccactctatcagaagcgtggattaaagggtccattcctcgggggtggcctgtggcaggatcccggaatgggtagctggctgtgtggggcggccgcctcccggcccccctgaaaaaaattttttgtaaaaacccattttgtnnnnnnnnnnnncggcgcccccctaggggggaacaacgcannnnnnnnnnnaaaaactcgtgtctccccagagggaaacaccgcgcgcgcaaagagacaaaggggcgctgcggagnnnnnnnnnacccaacataaaaaaccgccccgcggggcgacaacccccgattcgttttctt

SEQ ID NO: 251713 - DNA, 633 bp, Homo Sapiens
ccaccgctgactgatagccagggcctcgggccagtccccaccccaggtgccctgcttgaggtcgaaattcatgaactcctcgccgttcagggcgaacttggcggtgggcaccgaggtgttgtcagggcccagttcacagcccagcaggccctgcagagtgtagggaccttttccccccaaagctttgaaagcttccagaaagagcttctccttgatcctcagatctgtggtctctttctcccaataccaggacacctggttttcccagacccaagctccacagggctccgcctcgccccgcaggctattgtagctcaggtactgctgcgggcccagccagccggacacccagaaggcaggagtccccggggcaggcgaggacaccgcggtaaggtggtacaggagggagaggtggctttctgcgcccaggctcccaggaaggagaaagagcaggagccccagcgcccagggctgaggccgcgggacccccatgctgagaggacgacgttcccttcagcctcgctcccttcatgcctgcggccctggccggctcctggctcccgtgactggagaccccagttcatctctcacatcctgtgggaggctgctgctccctgactccaagaacatcca

SEQ ID NO: 251714 - DNA, 1513 bp, Homo Sapiens
aattaattaaccaactgagatacagttcaggggtgaaagttcttcaggtacgaggagggcattgttgtcagtctggaccgagcccgcagagcccctcctcggcgtcctggtcccggccgtgcccgcggtgtcccgggaggaaggggcgggccgggggtcgggaggagtcacgtgccccctcccgccccaggtcgtcctctcagcatgggggtcccgcggcctcagccctgggcgctggggctcctgctctttctccttcctgggagcctgggcgcagaaagccacctctccctcctgtaccaccttaccgcggtgtcctcgcctgccccggggactcctgccttctgggtgtccggctggctgggcccgcagcagtacctgagctacaatagcctgcggggcgaggcggagcctgtggagcttgggtctgggaaaaccaggtgtcctggtattgggagaaagagaccacagatctgaggatcaaggagaagctctttctggaagctttcaaagctttggggggaaaaggtccctacactctgcagggcctgctgggctgtgaactgggccctgacaacacctcggtgcccaccgccaagttcgccctgaacggcgaggagttcatgaatttcgacctcaagcagggcacctggggtggggactggcccgaggccctggctatcagtcagcggtggcagcagcaggacaaggcggccaacaaggagctcaccttcctgctattctcctgcccgcaccgcctgcgggagcacctggagaggggccgcgggaaacctggagtggaaggagcccccctccatgcgcctgaaggcccgacccagcagccctggcttttccgtgcttacctgcagcgccttctccttctaccctccggagctgcaacttcggttcctgcggaatgggctggccgctggcaccggccagggtgacttcggccccaacagtgacggatccttccacgcctcgtcgtcactaacagtcaaaagtggcgatgagcaccactactgctgcattgtgcagcacgcggggctggcgcagcccctcagggtggagctggaatctccagccaagtcctccgtgctcgtggtgggaatcgtcatcggtgtcttgctactcacggcagcggctgtaggaggagctctgttgtggagaaggatgaggagtgggctgccagccccttggatctcccttcgtggagacgacaccggggtcctcctgcccaccccaggggaggcccaggatgctgatttgaaggatgtaaatgtgattccagccaccgcctgaccatccgccattccgactgctaaaagcgaatgtagtcaggcccctttcatgctgtgagacctcctggaacactggcatctctgagcctccagaaggggttctgggcctagttgtcctccctctggagccccgtcctgtggtctgcctcagtttcccctcctaatacatatggctgttttccacctcgataatataacacgagtttgggccc

SEQ ID NO: 251715 - DNA, 821 bp, Homo Sapiens
tgaggggcccccagtgccagggattccgaatcattcccacaaattttgtgcaggaagggccactgactggtttggtaaaaatggggtttaggccgtaattttgagtaagaaggtgaatgtatggaagtttgtcaaaaaatatgaagtggggtggttatctcctcgggccatcataaatgaaaatttttcccggtactcttttcggaagcagcaactgaagaaattgcatcccctgggcaatagatccactcaccctgtccaggaaaatagccaagtttcaagcatgttgatcatgtcaaagttcactacatcaaacaccttcattgctttatcatcacccacagaacagaacaatgctccctcagagctaactgcaatactctcaataactcccaggtgactacgaaaatgtttaacaaattcaattccctcttctatttttttccagaacttgacatgtccatcatgactggcagtaataataaaatctgttttggtgcataccacatgggtgataacatctctatgcatgtaactgcgctcatacatggatgcactggggagattatcaagatagactctttcaaactctaagactttcctcttcttggccagtgttgcctccacaggtaaaggtccaacccagcgctcttcgttctcctcatcgttctcctgggacaccgccactgctactgccagctctctttcgctgagttctgttttttccggttcctccgggtcccggcgccttctacgtctctgctgaaaatcgctaccactttccgccgccatgttgttcgcatcgtcagaaaaggcgcccc

SEQ ID NO: 251716 - DNA, 645 bp, Homo Sapiens
aagacactgcctggcttgagtggaacgctcttcacaccagttgttcctaacagaaccattctcattgcggctttctttccttgaattgcttttacttggcagaaatctccatggctttggggcatttacatcaaaaggggatcatctacagagacctgaagccggagaatatcatgcttaatcaccaaggtcatgtgaaactaacagactttggactatgcaaagaatctattcatgatggaacagtcacacacacattttgtggaacaatagaatacatggcccctgaaatcttgatgagaagtggccacaatcgtgctgtggattggtggagtttgggagcattaatgtatgacatgctgactggagcacccccattcactgaggagaatagaaagaaaacaattgacaaaatcctcaaatgtaaactcaatttgcctccctacctcacacaagaagccagagatctgcttaaaaagctgctgcaagctcatccattctttagacacattaactgggaagaacttctggctcgaaaggtggagcccccctttaaacctctgttgcaatctgaagaggatgtaagtcacgttgattccaagtttacacgtcagacacctgtcgacagaccagatgacttaactt

SEQ ID NO: 251717 - DNA, 1293 bp, Homo Sapiens
tcattgtggatttaatttatgcctttcagactggtggaaaactctacctcatccttgagtatctcagtggaggagaactatttatgcagttagaaagagagggaatatttatggaagacactgcctgcttttacttggcagaaatctccatggctttggggcatttacatcaaaaggggatcatctacagagacctgaagccggagaatatcatgcttaatcaccaaggtcatgtgaaactaacagactttggactatgcaaagaatctattcatgatggaacagtcacacacacattttgtggaacaatagaatacatggcccctgaaatcttgatgagaagtggccacaatcgtgctgtggattggtggagtttgggagcattaatgtatgacatgctgactggagcacccccattcactggggagaatagaaagaaaacaattgacaaaatcctcaaatgtaaactcaatttgcctccctacctcacacaagaagccagagatctgcttaaaaagctgctgaaaagaaatgctgcttctcgtctgggagctggtcctggggacgctggagaagttcaagctcatccattctttagacacattaactgggaagaacttctggctcgaaaggtggagcccccctttaaacctctgttgcaatctgaagaggatgtaagtcagtttgattccaagtttacacgtcagacacctgtcgacagcccagatgactcaactctcagtgaaagtgccaatcaggtctttctgggttttacatatgtggctccatctgtacttgaaagtgtgaaagaaaagttttcctttgaaccaaaaatccgatcacctcgaagatttattggcagcccacgaacacctgtcagcccagtcaaattttctcctggggatttctggggaagaggtgcttcggccagcacagcaaatcctcagacacctgtggaatacccaatggaaacaagtggcatagagcagatggatgtgacaatgagtggggaagcatcggcaccacttccaatacgacagccgaactctgggccatacaaaaaacaagcttttcccatgatctccaaacggccagagcacctgcgtatgaatctatgacagagcaatgcttttaatgaatttaaggcaaaaaaggtggagagggagatgtgtgagcatcctgcaaggtgaaacgactcaaaatgacagtttcagagagtcaatgtcattacatagaacacttcagacacaggaaaaataaacgtggattttaaaaaatcaatcaatggtgcaa

SEQ ID NO: 251718 - DNA, 660 bp, Homo Sapiens
ggactttcagaagcaaactttgttaaagcaagaaacaaaatattctaataaggatataaagaaaaataatataaaccttcaaccaatgtggcaggttttgcctgtagagcaagacacatccaatgtaacagaaatgaaagtccctgaaaaaagtcacaatacatttaaggcaaccaacaaaaagcgggagactgatgttcactcgaaaagccaggactttctaatgaaaacaaatacttccacaggcttaaaaatggcaatggaaaggtcctcgaatccaatcaactttaaccctgagaataatgtaaaagaaagtgagtgcccccttccacctccatctccacctcctccaccaccttctaatgcatcatctgaaattgaatttcctcttcctcctccacctcctttgatgatgtttccctgaaaaaaatgggtttcttccctcactgtccacagagaagataaaggctgaatttgaaagttttccaggcctccctcttcctccacctccagtagatgagaaatctgaaagagaaagttcatcgatgtttctgccgcctcctcctcctccaactccatctcaaaagccagcacatctcctttcctcctctgctccggaaaagcacagtggagacttcatgcaacaatattcccaaaaag

SEQ ID NO: 251719 - DNA, 1046 bp, Homo Sapiens
  misc_feature (61)..(61): n is a, c, g, or t
  misc_feature (290)..(343): n is a, c, g, or t
  misc_feature (624)..(624): n is a, c, g, or t
  misc_feature (629)..(629): n is a, c, g, or t
  misc_feature (635)..(635): n is a, c, g, or t
  misc_feature (641)..(642): n is a, c, g, or t
  misc_feature (981)..(999): n is a, c, g, or t
tcatgacgttattcgcgccggagtccgcggcgctgtgtaatctcttcgctggtgggcgaantttctctcgcgtcgtcttacccttccgcccggcgcgttcgtccgtctggatggacaggcggcgggcatatctgggcctgcacacgtctcgtgcgccatccgccggccgtgagccgtggcgtagcatttgtcgcttactggggagcgggggactcgcggggtattcgggctggcttctggcgtgaaatcgcacggggggggacggaccaaacgcgtgtattccattcgtnnnnnnnnnnnnnnnnnnnnnnnnnnnnnnnnnnnnnnnnnnnnnnnnnnnnnntcgcgcgcaaacacgttgggcccgcacaagcgggtctgcgggcgccgcgaaccgagtgtggcgggccgcgcggtgctatttatatggcgcggtcggatgtggcgggttggcggccaccccgggttttttttgcccgccgaccctcgtcggcggccttctctgagggcggggcctgggcctgaattggggtgtccggcttaaatgggtccgccctgctcaaaccccgggcggtggtccggcggctgcccaccgtcgccttcgtgaaggacaaccttctctancaaanctcacnttacanncccctctaccccttcagcctgccctacagcgacttcccccgacccctaccccacgctacccagggcccagcggccaccccgtaccactgttgaagtgaagcacctcttctgagccaggccgagcccctggccgacttgggagcctcaggcccacgcccacccttcgaggaaggtgtcacctggaccccttcattccacggaggaagctgaggccacagggagcggccatcgccattgggaaggggcgactccacggaaagcccagacgggcttctgcatccattccctctttttgtttttaaaataaattgtatttttgaatcaaggaggataaagatnnnnnnnnnnnnnnnnnnnctcgagactagttctctctctccctcgtgccgaattcgccacccagc

SEQ ID NO: 251720 - DNA, 427 bp, Homo Sapiens
gcgacctcccctgcctctcacactctgtgtattttgtgaagctccacaaacggggtcacgtcatccaggtgaggccaccaccggtacagaaacctctcggcaatggttcttagccagggggtgactttgacttcacccctcgcctccctctccagcagctcccacagctcctcctgggacaggtagaggatgcttttcgtttcactgggatccgggttcagagtgacgtttcctcacaagcagaaggtaacaaatttcatgctctccccaaattctgtctgattttgccttgtggtgatagattgtcatgaacacaatgtcctctggagaaatctattgacagaaattggtgcagtgttaacaacgctaatgtaaaacacagaatttacagaaaaatagagaaaataaacacatttgttttcctcaa

SEQ ID NO: 251721 - DNA, 729 bp, Homo Sapiens
  misc_feature (477)..(477): n is a, c, g, or t
gggactcagcaggttgggctgcggcggcggcggcagctgtggaagctcaggcgctgcgcgtgagaggtcccagatacgtctgcggttccggctccgccaccctcagcttctcttccccaggtctgggagccgagtgcggaaggagggaacggccctagctttgggaagccagaggacacccctggctcctgccgacaccgccctccttcccttcccagccgcgggcctcgctcggtgctaggctactctgccgggaggcggcggcgactgccagtctgtggagagtcctgctgccctccagccgggctcctccaccgggccttgcaggggccgagagagctcggtgcccgcccttccgctcgcctttttcgtcagctggctggagcagcatcggtccgggaagtctctaggccgaggcggcggccgctcctctagttccacaatgtccacgggcggagacttcgggaatccgccganggaaattcaagctggtggtccctgggggagcaaagcgttggaaagacatctttgatcaccagatcatggatgacagttttgacacacctatccggcaaccaatggcattgacctttttatccaaaaactttgaaccttggagggacccaaccggaccgatttgccatttatggggacccccgccagggccaaaaaaagggggttctcgggagagcttggattcccaaaaccaaacatttcgggggaactccc

SEQ ID NO: 251722 - DNA, 751 bp, Homo Sapiens
gggggcgcgggaagatggcggcagcggcggcggcggctgcagaacagcaaagttccaatggtcctgtaaagaagtccatgcgtgagaaggctgttgagagaaggagtgtcaataaagagcacaacagtaactttaaagctggatacattccgattgatgaagatcgtctccacaaaacagggttgagaggaagaaagggcaatttagccatctgtgtgattatcctcttgtttatcctggctgtcatcaatttaataataacacttgttatttgggccgtgattcgcattggaccaaatggctgtgatagtatggagtttcatgaaagtggcctgcttcgatttaagcaagtatctgacatgggagtgatccaccctctttataaaagcacagtaggaggaaggcgaaatgaaaatttggtcatcactggcaacaaccagcctattgtttttcagcaagggacaacaaagctcagtgtagaaaacaacaaaacttctattacaagtgacatcggcatgcagttttttgacccgaggactcaaaatatcttattcagcacagactatgaaactcatgagtttcatttgccaagtggagtgaaaagtttgaatgttcaaaaggcatctactgaaaggattaccagcaatgctaccagtgatttaaatataaaaggttgatgggcgtggctattgtgcgtggggaaatgaaaggtggtattccattaatgggcaaaaccattggattttcccct

SEQ ID NO: 251723 - DNA, 748 bp, Homo Sapiens
ttgaacatgagttgcaccagatgcaaattcttcctccgggaaggacacttgtactgggacattcagatggacctctggacttgcatttccgacttcattaccgtgactgcctgcttcatctgcacgctccagaacatgatgggtgtcttcaaatggaaccgcataacttattttctgggtagccactctgacgtcctctgtgatgggagctttcttctgcatcgctacgttaccaacggtctccacatggtctactgattctccttccccataaacacctttctgttcttccagactcttctccctgcaaatagttccaaactttccccaaatttccccttctgcagctatcggttggtatgaatcatccttaccaactcgtttttcttccagaccttggccctggtccttttgagttagagatgtgtcatggagaatgtcatctttgagtatgtacttctcaaaatatattcctgttccatcatcagtgtcagaatttctgctgggaaatgatgcctcagaattcacactgtcaccttcagaagctgtctcctcttccttctttttctctccaactgcttcttcatacagatccttatataaaaatgcaagtgcaggtggctcctccagaaattctggatcaatgactttaatagtggtaggaaatatctgggttcgtgatagaactccttcctctgcttcaaataaaggcatccccggtgactttgagtccacatctctctttgtg

SEQ ID NO: 251724 - DNA, 1104 bp, Homo Sapiens
  misc_feature (731)..(739): n is a, c, g, or t
  misc_feature (1041)..(1041): n is a, c, g, or t
  misc_feature (1066)..(1066): n is a, c, g, or t
  misc_feature (1090)..(1090): n is a, c, g, or t
catatactttaggaaatgtctgttctccaattaaaaaatgctataatctccattctaaaaattcactgagataaactgaaatctatcaatttaaccagctgtgatccaaaagtgtaattaacggcagtcagtgaaacaggtatgggatctctttaaaagtgtaaaagtgggttgagaccttatatttttacatttcagactttagattttaaaaaatcttttggacagtgcctgatttgtatgtataccacagtgttaactacgccctagcatcttgcagtgtgggacacacaattagcctatgtccccagtactagtatttacctgggaaatactccatggatgcacacattcacacaggcacatgcagagttgtctttcctctgtgcttctactgtttcttgccatcctcttaatttggttctcttgaaaaagagcagtacccagtgcatatactctggagaggttctcaaagctggacagtaagtcctctggctcaggaactctgccccctaaagctgggaggaaagctggttgctcctaaacatggcttcctttctagaggctcgggccataaaaatcttatgtctttgggaaaatatccacagtttagctgtggtccacaaagtgactttgtttctttgatcctagtgttacaattagaatgagggttctggagcaagatatattacaccagaaagcatttttcctggctagagaaaccagtatgnnnnnnnnncatttatacccatttacaacacaaataattagcttcttcagtatcataatagatactctaggaaatacttgaagaaaggcaggtccctgaaggtacagataacatgaacaagaggcagttatttttaataaggcttagttctatttagtcagaacttaaggagtactttaaacctatctggaagaagaaatcaataggctgcaatgtcatgttctacttttcccatagtgttactgaggtttccagggaagggagggagcactttttggtttttcatttagaaagaagatggaaagtgaaancaggattagtcagatttactgaaanccaattgtccatcctttaggaagncgacccttgttcag

SEQ ID NO: 251725 - DNA, 644 bp, Homo Sapiens
ctttgtgttcttttttgcaatacaatcaatcacctttattccgggttagaacaaggccgtgcacactgcagacagaagagcacaagataggggcaatctcacagcaatataaggagtgggtgggcaggttagtctttttagattattttgccttacagagaaactactagactctgctgaaaagaaccctgtctctcttctcccatttcttccataagaaaggctccttattctctctctcactctaatgtaacatatcccaaatggaaggacagttcatgctcattccccccacccaattctacaagtatctctctcttcttaagggagaagccagacagggaaagggagacttgggaaggtcctttaaggcaaaactgtggagtcctagaggtgtgtgtgttaaggcaggtgtctgcagcagtggccagaggggcagggcacgctaggctgggctaggagttaagagtactgtctaaccagtctggcttcttccttcttccagcagccagccctcccctcccattaaagttttactcccacatcctaaaagctcctaacttgaactttgtctaaatagtctctgagactgcatgtgaatttaatgttttttgaaaaagccttcttttttgtttggactatcc

SEQ ID NO: 251726 - DNA, 506 bp, Homo Sapiens
  misc_feature (16)..(16): n is a, c, g, or t
  misc_feature (23)..(23): n is a, c, g, or t
  misc_feature (36)..(36): n is a, c, g, or t
  misc_feature (53)..(53): n is a, c, g, or t
  misc_feature (101)..(101): n is a, c, g, or t
  misc_feature (468)..(468): n is a, c, g, or t
aagaaagccaagaccnggttagnacagtactccttnaaactcccctagccccnagccctagcgtgccccctgccccctctgggcccactgctgcaagacancctgcccttaacaccacacaccctcctaggactccccacagttttgcccttaaaaggacccttcccccaagtctcccctttcccctgtcctggcttctccccttaagaagagagagatacttgtagaattgggtggggggaatgagcatgaactgtccttccatttgggatatgttacattagagtgagagagagaataaggagcctttcttatggaagaaatgggagaagagagacagggttcttttcagcagagtctagtagtttctctgtaaggcaaaataatctaaaaagactaacctgcccacccactccttatattgctgtgagattgcccctatcttgtgctcttctgtctgcatgtgtnaccggccttgttctaaccccggaataaacggtgattaa

SEQ ID NO: 251727 - DNA, 680 bp, Homo Sapiens
tggagtgttctgacacttctgcttcttaatctgacttttcatccacggaatatttaaaaaatttctgtcgctcttcagcatgattccataggctaagacctctaaggagttctgcagtatccttctgagagcagtgttgtgcaatcactttctttttaatatccttaagctcttcataggtaaaatattccattaacatgggctgaaaaacctcctcttcctctttcatgtgaggaagaaaatctcttgtaaaagcctccaatctctctttcagttgttttgcataatttaactgttcatattcattcttaacattcttcagtcccttttcaaagaggctaagcatctcggagagtctattgtcagaatgtacattataaatggtctggctgcgttgttgaagcaaaccaataatgtattcattttcaatctgctcatgcattttgaactccttgaaagtagcatacaaagactgcagaagagcacggaaatcgttgttgttggaaaaattggttttagaaagcttgtcgcagtagagccccaccagctgcttcatccgccagtgtggggcggtgaagacgtccacttcttcaggaaagggcgccatcgccactgcctcagcctccgcctcagcagccgcggccgccgcctctccatagacaacctcgccgcccccggcc

SEQ ID NO: 251728 - DNA, 768 bp, Homo Sapiens
  misc_feature (475)..(475): n is a, c, g, or t
gcaggtggcgattggcgccctttcctgaagaagtgggcgtcttcaccgccccacactggcggattgaagcagctggtggggctctactgcgacaagaatgaatatgaacagttaaattatgcaaaacaactgaaagagagattggaggcttttacaagagattttcttcctcacatgaaagaggaagaggaggtttttcagcccatgttaagggaattattttacctatgaagagcttaaggatattaaaaagaaagtgattgcacaacactgctctcagaaggatactgcagaactccttagaggtcttagcctatggaatcatgctgaagagcgacagaagttttttaaatattccgtggatgaaaagtcagataaagaagcagaagtgtcagaacactccacaggtataacccatcttcctcctgaggtaatgctgtcaattttcagctatcttaatcctcaagagttatgncgatgcagtcaagtaagcatgaaatggtctcagctgacaaaaacgggatcgctttggaaacatctttaccctgttcattgggccagaggtaggtaaatgggtttttaaaatattttcatgtatttttcctagatgaatattcatttacattaatgagcaaggccagagagagaaactctgagaggtcaatcaaaaagtagattttatagttagatgatgttttggtggtatatatttttggaaaactagcagtgatgaaattcatgggtaaattataatgatgtctgtaatta

SEQ ID NO: 251729 - DNA, 953 bp, Homo Sapiens; identical to SEQ ID NO: 8604
  misc_feature (876)..(877): n is a, c, g, or t

SEQ ID NO: 251730 - DNA, 618 bp, Homo Sapiens
acaaaaatattgataagtgtgataatgtgctgcaaaaaatatccacaagcactacacataagtacagagtattcacaatagtaatatgttactggaaaggccacttccgaaaagtttacattcacttggaaggctgcattaaagtatatctcttatctatgaccaaatatctggggtacttttagaagttttcagtacacccccttagagaatagcttatgagttatttcacacattcctgagcacatggctgtgtttagaatgatctagtgtaattcatacatgagctgacatacgttgatactttgacgagtaaattgtacagtcaaatgttcattgatttcatgttatttcaaagcattttcttattaaaaatatatctttcgttaatcctattttgctatgctttcaagtaaagtaaattcactgtagctaatgatgttacagacttacgtatacccttgtatacctgggacagggctgttttataccaataaacagcaaaatattgtccttactaattcaagaattaaaaggataaattttaaaaatgttatctgtctctaaatcaatgcctcattctgaaatcaagttaattttcaaatggcaactttctcc

SEQ ID NO: 251731 - DNA, 1049 bp, Homo Sapiens
agtgatcggagggaagaagctcaacatcaccctccaccatggccccttccaaacactcgtctaagttgcgataaccgtttacctgaagaggatactggccgaaggtctcattgttacaaaagggttttccttcacgaaccccttcagtcaggaaagtaccatagaacagctgcaccattggattttcagatttgttcctgggactgttaacattaacagctagctggaatgcgtcctctagccaatccaggagcttgtgtgtgaattcactcacatcttgctgctgttccccagatgatcggaatgctccctttaatagatccagggctgcagacgggtctacaaattttctatttgatcccatcattagagcaaacaaatactgaagctcttgcataaacatgatatttctcttttctgtatgacttcgacaattttcaagtacattttgtggcagactataactgagaacaagtcttcgaaattcaggcaattgaaagagagactgaataacagcactaaaccaacatgtattgccaacatttttcagcccaactggccaaccatcaactctcctccagtcattgggattggggttttctccccagacttcacagcgttttctctttgagcgtttagtttctgcagaggttgcttcatgcatcctgttaagatctcttccatcagcttgaattttgggagactccagtagactcaaagcaatggcagcctgaagatcatctttgttatcatgagtaaggtctataacttttgctaatacttccttgttggcagcactcccctctacttcagatggttctgtagcaacagtgtcttgactgggctccttaactctctcatcagtgagaaggctgactgcctgagtaatatcaccattactggccttcagagcttcatggagaaaggaagggtcctgaatgcctgtgatttctctcagttgatttaacagcatttggcagctcgagccgtggccgtctgccgcgccggccgcgtcgtcctgctgcagctccgcagtcatggccgaggcc

SEQ ID NO: 251732 - DNA, 773 bp, Homo Sapiens
  misc_feature (710)..(720): n is a, c, g, or t
ttattaatacttttaaagactgagctgtttaagaattttttggggaacatttctagcagtggttttttggcctttaatgatagcgtaaagacaggagccttacaacttaggcaaagcatttcacatgcagtccttcttccatctcaaaatatgtacttattttacatacagaattttacactaaccattgaaaaataaagtaggatctgctacagtttcacctgaaaatttataaaaagtgttgagattggtagaaggtagtttttaagtacatgtgcactaccctaaaagacttgtctattgtcaataaagtgttagtatttgtgaaattattattcctgttcagaaatactatttcttaaatctcctgggaatttgtggcataataaagcacattcaaagttctaatgtatttatgagctcattttcaaaatagtaagtttgtcatctttaaaatgaacatgacttgcctccttgatttctgaaatgaattaattgaagattgctatagtaatctttatttcatctttctagagttgttgacaattttattatacaacagttaccattagagaaggagggaagggcttttgggtgtgtatttataggtactaagggatttactaaatatagtagattagcactgtcacacttgttcaagtagtttcaaacatagaaaattaagtatcaggtatgtggagcaatgtagnnnnnnnnnnncttcagtttaaaaaatttttaattgtggtagaagcaatgtattcttaaggtga

SEQ ID NO: 251733 - DNA, 801 bp, Homo Sapiens
  misc_feature (787)..(787): n is a, c, g, or t
caaaaggaagtgtcctgataatggtactggtttttctacaaatataagtagtcatttagaagtttgcaaccaccaccaagtctgagagaactctgggatattctgtgggttttggcatattagatagagaaaatgacagatctagatgaagggagcttttggatgtgtgcctttaaaaactgattatgtataaatactgatatttcacatacggagatatttgaagacccaagtctgcctttcacagagccctccattccaagtttagtttttgtcaaaatatgaatcattttatttgactgtactatcagtacacaaatgcatgagtatgtttatacagtgttagactgatgtgaatttgcatttgttacattacattgccagcgcatatcatttagcaagttggcattaacatttatgctttaattaaatgccagtatacctatgtgtgcagcagtaaaaaattagtgagaaaaagcaactttttgtcactcttaggaaatattttgtcttattagtgttcttggcacatgtatattactaaagtagataattccaatgagaaatactaccagattattgttataaaattaatttacaatgtccctgatattgagctaactcttaaaaaaaccaaacaaaactcgtatctgagtgtaactttgccaatattttaaaagccaaaatattctctgggacaacaaatttgtattgctcaggggacagtttaccttgcctgggtaaaccttccccaaacaggaaatatagcctatactatctttggggntttggtttttttgt

SEQ ID NO: 251734 - DNA, 804 bp, Homo Sapiens
gtgtgtttccggcgtcggcggccgcggccggggacggtgtgagagcggtaagatggcggcggcggcggtggtggagttccagagagcccagtctctactcagcaccgaccgggaggcctccatcgacatcctccactccatcgtgaagcgtgacattcaggaaaacgatgaagaggcagtgcaagtcaaagagcagagcatcctggaactgggatctctcctggcaaagactggacaagctgcagagcttggaggactcctgaagtatgtacgacccttcttgaattccatcagcaaggctaaagcagctcgcctggtccgatctcttcttgatctgtttcttgatatggaagcagctacagggcaggaggtcgagctgtgtttagagtgcatcgaatgggccaagtcagagaaaagaactttcttacgccaagctttggaggcaagactggtgtctttgtactttgataccaagaggtaccaggaagcattgcatttgggttctcagctgctgcgggagttgaaaaagatggacgacaaagctcttttggtggaagtacagcttttagaaagcaaaacataccatgccctgagcaacctgccgaaagcccgagctgccttaacttctgctcgaaccacagcaaatgccatctactgccccccctaaattgcaggccacctttggacatgcagtccgggtattatcccatgcagcagaaagaaaaaggactggaaaaaacttgcgtactcatacttcctatgaaggcatttggaagggtatgaacttccatcgaacaggcccca

SEQ ID NO: 251735 - DNA, 653 bp, Homo Sapiens
  misc_feature (76)..(185): n is a, c, g, or t
ggcctgggtggcgaaaagatgctcccaccacagcctcccaggtagtgagtagctggtactacaggtgtgtgctgcnnnnnnnnnnnnnnnnnnnnnnnnnnnnnnnnnnnnnnnnnnnnnnnnnnnnnnnnnnnnnnnnnnnnnnnnnnnnnnnnnnnnnnnnnnnnnnnnnnnnnnnnnnnnnncctttctttatttctgtagaatctattttatggttggcattttgggggaagatttcgatgggttccacattcttgctttagttgttgtagagggatttgggtgtttctacccaaggcattggtctagcttttcctacaatgaacctatctttggaggttcaagctccccaccttcccccactgtggtgacctgtggccacttgcagaagggatggtgcctgacccactgccctagccccacgctatgcaccaaacttgttctccccgtcctggtccagggctggggtctttagagactgacagcctctgccccaggcctgagtccttagcaagggttgggtaaggaggttttaagggagaaggtccagtccttagcccttgaaatacaaagctcttctgacactgaattcggatgcaccttgttttatataataaatcgtgtttcacagaaaaacacaccaaaaaaac

SEQ ID NO: 251736 - DNA, 2119 bp, Homo Sapiens
  misc_feature (1582)..(1632): n is a, c, g, or t
  misc_feature (1762)..(1824): n is a, c, g, or t
aggtggtacggtccggaatttcgggatatcgtcgacccacgcgtgcgccacgcgtcggtaagatggcggcggcggcggtggtggagttccagagagcccagtctctactcagcaccgaccgggaggcctccatcgacatcctccactccatcgtgaagcgtgacattcaggaaaacgatgaagaggcagtgcaagtcaaagagcagagcatcctggaactgggatctctcctggcaaagactggacaagctgcagagcttggaggactcctgaagtatgtacgacccttcttgaattccatcagcaaggctaaagcagctcgcctggtccgatctcttcttgatctgtttcttgatatggaagcagctacagggcaggaggtcgagctgtgtttagagtgcatcgaatgggccaagtcagagaaaagaactttcttacgccaagctttggaggcaagactggtgtctttgtactttgataccaagaggtaccaggaagcattgcatttgggttctcagctgctgcgggagttgaaaaagatggacgacaaagctcttttggtggaagtacagcttttagaaagcaaaacataccatgccctgagcaacctgccgaaagcccgagctgccttaacttctgctcgaaccacagcaaatgccatctactgcccccctaaattgcaggccaccttggacatgcagtcgggtattatccatgcagcagaagagaaggactggaaaactgcgtactcatacttctatgaggcatttgagggttatgactccatcgacagccccaaggccatcacatctctgaagtacatgttgctgtgcaaaatcatgctcaacaccccagaagatgtccaggctttggtgagcgggaagcttgcacttcggtatgcagggaggcagacagaagcattaaaatgcgtggctcaggctagcaagaacagatcactggcagattttgaaaaggctctgacagattaccgggcagagctccgggatgacccaatcatcagcacacacttggccaagttgtatgataacttactagaacagaatctgatccgagtcattgagcctttttccagagtacagattgaacacatatctagtctcatcaaactctccaaggccgacgtggaaaggaaattatcacagatgattcttgacaagaaatttcatgggattttggaccagggggagggtgtcctgattattttcgatgaacccccagtagataaaacttacgaagctgctctggaaacaattcagaacatgagcaaagtagtggattccctctacaacaaagccaagaaactgacatagagttggatctgtagcggtcctttggagagtgtgtgtggcgggagagtgaaaccttgggggaaaatgctaggagattcttttttctttttgttctacttttcgctcggaaagtttttaaatcctcatttggtgcatctgtattccagccaataggtgtgccagttttcatgtaatctttactggcccaacttgggagtggggaaattgcttaccaaacaagaacaagaacaaaaaaaagattattctaaatnnnnnnnnnnnnnnnnnnnnnnnnnnnnnnnnnnnnnnnnnnnnnnnnnnntcgcccctccagaagctttccccgcaccattcctttggggcggggggcccggccgggaaaggggaccacgcgccatatgctgccttcctccggaaattctgggtctatggactaccggtttgggattccnnnnnnnnnnnnnnnnnnnnnnnnnnnnnnnnnnnnnnnnnnnnnnnnnnnnnnnnnnnnnnnacgaggggagtctcccggagggccccctcccgcggaatttacccacccgggaggtccccagcggggcggtcccattatcccaatttaaggccccccggaccggggcagaattaacgtgcaaagaaatgggttggtgaagttttctttacaggccctttccggggcggcccgctggaagaccccttccgccaacacgggctcttcaacggaagcccgggaaatcgcccgcgggcgcattaccacacgcccgccgccgcgcgcatccgcatatataaatactctggcccccagaggg

SEQ ID NO: 251737 - DNA, 723 bp, Homo Sapiens
cggccgggtagtatatcctcatatcctcctcattgctgagccagaggagagaggcaggactagcccacctggaaaaatccaaccctctctacaaaatgcattgatttgttatggggttttgcatacatacatcggacagctctgtcgtaaattatagatcaaagaccccgtgaagcgtcattgtatccttctcccatccttccctccgtacccttagagtaaactatgcctaaaccaaaacagatgaatgaactgttcttcagagaccacagtctcatagcctaccactgtcactttcttggacccttcacagaaaattattccatactgtgtggctaaagctctcacagtagacctatagcttttatttcttagacttttagcttttatttccagagaacaccattccttgtcttggacttgtggccagggttatgggcatgatatatcccactttagaagctttacaggcttactccagatctagccctctgtttcgtccctatcatctatggtattaactagccacagctggtcctgaaatgaatactctgtatagagcctggcctcctaacctataccagctctattaacttaggtctgtgagtaggaagaaacaggctgctagagtctgagaggtctcattggatttgtttctgggttcattggcaacagtcctgtgcccaagcctcagtgctcaggatctggctttgctgtttcctt

SEQ ID NO: 251738 - DNA, 885 bp, Homo Sapiens
gatggtttgactgatgcacagcaacagttttcagtgaaagaaacaaacttttcagaagggaaatttaaaattgaaaattggcctccaggctaagagaactaaaaaacctccaaagaacttggagaactatgtatgtcgacctgccataaaaacaactattaagcacccaaggaaagcacttaaaagtggaaagatgacgggtgaaaagaatgaacactgtccttcaaaacgagacccttcaaagttgtacaggaaagcagatgatgttgcagccattgaatgccagtctgaagaagtcatccgtcttcattcacagggagaaaacaatcctttgtctaagaagctgtctccagtacactcagaaatggcagattatattaatgcaacgccatctactcttcttggtagccgggatcctgatttaaaggacagagcattacttaatggaggaactagtgtaacagaaaagttggcacagctgattgctacctgtcctccttccaagtcttccaagacaaaaccgaagaagctaggaactggcactacagcaggattggttagcaaggatttgatcaggaaagcaggtgttggctctgtagctggaataatacataaggacttaataaaaaagcaaccatcagcacagcagttggattggtaactaaagatcctgggaaaaagccagtgtttaatgcagcagtaggattggtcaataaggactctgtgaaaaaactgggaactggcactacagcggtattcattaataaaaacttaggcaaaaagccaggaactatcactacagtaggactgctaagcaaagattcaggaaagaagctaggaattggtattgttccaggtttagtgcataaagagtctggcaagaag

SEQ ID NO: 251739 - DNA, 495 bp, Homo Sapiens
  misc_feature (186)..(217): n is a, c, g, or t
gagcagcgtggctagaggaattcctgcagcttagatttcgctggcactgttaccactcccagagaggagcggctggagttcacggctggttcctgacaaacttcctaattaatctgctaaagatcagaggaggactaataggggctgaagactgtgtgcgagaccacccctccgccctctcccttnnnnnnnnnnnnnnnnnnnnnnnnnnnnnnnnagcgcgtgcgcgcatgtggtgctgagcttggcgggagagagatggcctcaccagcgacaaagcattcctgctgctgttgctgccacctaccttccctgctttgggaggatacattttctcctcttgcttagaagtttcagggagtcacccaagccttcttctcccagatacaacggtggaataaaatatcttccagccaacatattttttggagacggaatctcactctgtcacctggttgaagtgcagcagcgcgatcatggctcactgcaacctct

SEQ ID NO: 251740 - DNA, 1147 bp, Homo Sapiens
  misc_feature (152)..(152): n is a, c, g, or t
aaaaatatgaggccattgtcatacaatatttaaaactgaaaatgatttccaagtcaatataaaaatagccattgaaagaacctcatttttttcacacaatccaagagcctaagctttaataagataaaagaagattttagtaaacaaaattnataaaatcatctgaaggagtaagatcctatctctaagaaccatttccagtctcttgtccactagaggagacattataaaattaatgaaactgacaccaatgtgatgatcagaagaaagaaacaatgttttcaaatcaattgtctgtttggtactattattagtgtgggtgctttatattctagtcaatcttcttttgatatactgtggctatgaaaacaacctatgaatatcatgagtaatcagcacttttatactagagggggaaagctataaaactcaatgaaatcaaagtaatttgataatttatgtcatctgtgttgaaattgattttataagaaaaaatgcctaagtatctgttacatgcttatctagaagtttacacattttcatatcctttcacatatgttttcatgtttgccctatacaacatcttctcagatgggcagatcagggataattacctttattttttaaaaaaataaatttagactcaggaacacgcataaatgaacacactgaaattaggatccagtgctcccactttatatttcagaaactaaaattccactcttcttcaaaaagaaaccaacagaaacatctactgaactgtaaaatttcagagtccccagaagccaaaataaattggaaaacattttccatgcaattataaagggattttattttgaaaagcccaaggaaataaattcttaaccaatctttttacttaactgaattcttaaccttagtttacttatttgacatgtgagggattgaaggattttcttgatatatttatgtcaaaagatcttaacttccgatattaggatttcatacatctaattgcatctcaaatttgaaggagaaatcatttagactttgttcttgataaaattattgcaagttctaatttaatttattacaataaatatagtattattatataagagcaatgacatgagggaacgacaattaaaattattagcacacttgagct

SEQ ID NO: 251741 - DNA, 1334 bp, Homo Sapiens
  misc_feature (217)..(288): n is a, c, g, or t
  misc_feature (1258)..(1258): n is a, c, g, or t
  misc_feature (1275)..(1275): n is a, c, g, or t
  misc_feature (1321)..(1321): n is a, c, g, or t
aagtgcattgggtctaagtggcgtaaagcaggctggtacggtccggaatcccgttatatcgtcgacccacgcgttccggaaacaacagcagcaggagtgggtgacatagagcattctatgccttgacatgtcataggataagctgtgttagcacttcctcaggaaatgagattgatttttacaatagccaataacattgcactttattaatgcctgnnnnnnnnnnnnnnnnnnnnnnnnnnnnnnnnnnnnnnnnnnnnnnnnnnnnnnnnnnnnnnnnnnnnnnnnagccataccttgaaaagagacaaggaaaaacatcaaatattcccaggaaattggttttattggagaactccagaaccaagcagagaaggaagggacccatgacagcattagcattgacaatcacacatgcagtggttctctgactgtaaaacagtgaacttgcatgaggaaagaggctccatgtctcacagccagctatgaccacattgcacttgcttttgcaaaataatcattccctgcctagcacttctcttctggccatggaactaagtacagtggcactgtttgaggaccagtgttcccggggttcctgtgtgcccttatttctcctggacttttcatttaagctccaagccccaaatctggggggctagtttagaaactctccctcaacctagtttagaaactctaccccatctttaataccttgaatgttttgaaccccactttttaccttcatgggttgcagaaaaatcagaacagatgtccccatccatgcgattgccccaccatctactaatgaaaaattgttctttttttcatctttcccctgcacttatgttactattctctgctcccagccttcatccttttctaaaaaggagcaaattctcactctaggctttatcgtgtttactttttcattacacttgacttgattttctagctttctatacaaacaccaatgggttccatctttctgggctcctgattgctcaagcacagtttggcctgatgaagaggatttcaactacacaatactatcattgtcaggactatgacctcaggcactctaaacatatgttttgtttggtcagcacagcgtttcaaaaagtgaagccactttataaatatttggagattttgcaggaaaatctggatccccaggtaaggatagcagatgggttttcagttatctccagtccacgttcacaaaatgtgaaggtgtggagacacttacaaagctgcnctcacttcttcactgtnaacatttaggctctttccactggcctacctggggaccccagtctanggtatttaaattt

SEQ ID NO: 251742 - DNA, 454 bp, Homo Sapiens
ggggggaaaggtggggaaaagatagagaatcagattgttactgtgtctgtgtagaaagaagtagacataggagactcccattttgttctgtactaagaaaaattcttctgccttgggatcctgttgatctatgaccttacccccaaccctgtgctctctgaaacatgtgctgtgtccactcagggttaaatggattaagggcggtgcaagatgtgctttgttaaacagatgcttgaaggcagcatgctcgttaagagtcatcaccactccctaatctcaagtacccagggacacaaacactgcggaaggccgcagggtcctctgcctaggaaaaccagagacctttgttcacttgtttatctgctgaccttccctccactattgtcctatgaccctgccaaatccccctctgtgagaaacacccaagaatgatcaataaatactaaaaaaatta

SEQ ID NO: 251743 - DNA, 961 bp, Homo Sapiens
aagcaggctggtacggccggaattcccgggatatcgtcgaccacgcgtcgctaaattttattatttgttgctcccccaatctgataccaaatgtttaaagttgtttgaaatccaaacatggtagtgttcatgggtaaatattttctaggctatgtaagagttagcagcccatagcatagaagtaatcaagtagcatctgagactgttggaggcactagggcctctctgggccctacagcctcacttccccagcctcaccttgctgtcctctgacactgccatcagggctgttagtggcacctgtatgaggccaagtgtgcgtccaggggaacagcacaggttaatgcgtctccctagaactcatgaagtcagtttaattcatgcatgaacatgagttcattttatgttttatatagctttcttagacataccaaaccatcattcataaatcagataaattattcagtttttgtgtttagaaagctaagtatgtgtagctggaaacaaaaatgagcgtgttttctctcctgttaatctagagtgtgcagttacacatgtgtggataatttcatgttccaggggcgcttggcatctcccatggactgattcccaggaagaaaagcccaaagggaaacccacgattcctttcgagtagatgtgggaaagagcccattggaggatatgaggtcctgtgaaattcagttgtgtgtgtgggctccttgttagcagtcatgttgacatggtgttaggaagtcccatcacctttacatgagtagggacacgcttgtggcaattacctgggaccagggctccggaaaaggagccggcggaccgggaggcccggcagcagggccctccctcctgggggggcaggccccacctgaggtggctcaaagcccccgagggtccgcggaggtaaatctccccttgtttttgttgtgttgatacagccggacacacg

SEQ ID NO: 251744 - DNA, 944 bp, Homo Sapiens
  misc_feature (338)..(349): n is a, c, g, or t
gaacacgtgtaaaaagcaggctggtacggccggaattcccgggatatcgtcgaccacgcgtcggcgaccaagaaaataggactgtcagaagctgccagttattactgaaccattaaatacttatatactaagaataaataaaatatacccatgtgaaataataatggattatggataacaagagagtgaaagccaaagcactttctgtctactgtactcttctaaatggaattttaaaagtcatagctggctttacgtgtgtcattattagcattataaatatgcatgatagtataatccagtaatggttgaagaatgtattttacttaaagagggannnnnnnnnnnnaagtcctgaataagtctactggaagaattattcttctgggtgaaaaagcttttgtttgtgttcttattttaaataatcggagtcaatttattaaaatgttcttgaaagtactattcccaggggattttaatgcacaaaccatattgtgacaagagatgagcctctgtactgtaaataagaaatgaagtagagaaatgttaaatattttatgagtttagaatatagtaaataaaaggtgatgtaaatgaatgctgcacaaacggtgttcatgatacttttagtagtactttaggaaaaactacacattctcagaagctcttgatgtctctaatgaaggggggggaatgctgttaatgagaacagtgcataaatttttagcatataattacaagaaccagactgtggatatgatcacttaaatgatttggggggatcggggccatggctttttatttaaagaaactttggcataatgcctttgtaaataatctttcttggaaaaataatttaaccatagtaaagagataaggataactaatagggacaggggctttgtataaagactctattaattggataaagggagaacaataac

SEQ ID NO: 251745 - DNA, 673 bp, Homo Sapiens
  misc_feature (46)..(46): n is a, c, g, or t
  misc_feature (64)..(64): n is a, c, g, or t
  misc_feature (77)..(77): n is a, c, g, or t
  misc_feature (181)..(181): n is a, c, g, or t
gcagtgaaactggattggatttagccgctggtcttgtccttaaatnatacatcccagtcttcanaccctacaagganagtaaagacaattattaggagaaactctgtgagaatactagacattccacaccaatatttaaaatacattcctgtccagccgccccgtccaggagggaggtgtncccaacagctcattgagaacgggccaagatgacaatggcggctttgtggaatagaagggcgggaaaggtggggaaaagattgagaaatcggatggttgccgtgtctgtgtagaaagaggtagacatgggagacttttcattttgttctgtactaagaaaaattcttatcctgttgatctgtgaccttacccccaaccccgtgctctctgaaacatgtgctgtgtccactcagggttaaatggattaagggcggtgcaagatgtgctttgttaaacagatgcttgaaggcagcatgctcgttaagagtcatcaccactccctaatctcaagtacccagggacacaaacactgtggaaggccgcagggtcctctgcctaggaaaaccagagacctttgttcacttgtttatctgctgaccttccctccactattgtcctatgaccctgccaaatccccctctgcgagaaacacccaagaatgatcaatttaaaa

SEQ ID NO: 251746 - DNA, 471 bp, Homo Sapiens
tatggcctcatgggaaggaaagacctgaccgtcccccagcccgacacccgtaaagggtctgtgctgaggaggattagtataagaggaaggcattcctcttgcagttgagacaagaggaaggcatctgtctcctgcccgtccctgggcaatggaatgtctcggtataaaacccgattgtacgttccatctactgagataggaagaaaacgccttagggctggaggtgggacatgaaggcagcaatactgctttgtaaagcattgagatgtttatgtgtatgcatatctaaaagcacagcacttaattctttaccttgtccatgatgcaaagaccgttgttcacctgtttacctgctgaccctctccccactattatcctatgaccatgacacatccccctctcagagaaacacccaagaatgatcaataaatactaagggaactcagagacggcgcggatcctccatatgct

SEQ ID NO: 251747 - DNA, 497 bp, Homo Sapiens
ctggtatttctgaattagaagaaatctaagggaacatttttgctcactccctcattttagagatgttgctaaaggagaaatgaagtgacttgctcaaggtcaaatagctgaagtcaccaggccagggttaagagccagacccgtgggctcctacaccagtgctctttttctctgtcctctctagtagggtccatgaagaatctgcatgcccggctctctcctctccaccgctggcaactcgtaaaatctgggtgtcacacagctcgctcccaagcattgtcagaaataagaagacaccatcagaaaggggaaagctggatgggcaagaagacaggaaaggaaaaagtgaccaaatgaagctgagcttctggcctgctacagttcatcatttctactgacagcttgaaaattaggaaagacacagaagttgaccaggaaacaataagaattatcagaatctccattagctattttttcaaaaaacgaaattgcacaag

SEQ ID NO: 251748 - DNA, 534 bp, Homo Sapiens
acaggacttcagctgctggcatcggaagagcagcaggaaattctcttctgtgggtaatacgtgagccaactctacaattcctatttttccatcatctctttgcccatactgatccacaaaagttttcatttcaggtgataactccaatccagccttctttcgcgcctgctggagctcctggatcaagttctgcagctcctttccttccaggtaaccacttcctgcaaagacaaagaggcacccaggtgtcagatatctcattccaagtgtctttcccgttcactttccaagacagttatctttctggcgacccgagaggctctctcttgcctggacgttgattaaccagcaaagtgtacagacggtgaagcgctcccctcctggggtatcaaactttagatccactgaggacaaaggaggatggttggggtgctaagcgcagccacagaaactttgggggggcagcattccccaatccctgctctctctctcctaccattaccgttcctggaaagacaaaagtttgaggttttg

SEQ ID NO: 251749 - DNA, 1597 bp, Homo Sapiens
  misc_feature (50)..(50): n is a, c, g, or t
agttgactagaataatttgcaacacatgaaaacagtttagaaaatggatntaggtcatattctctgacagtaagtttgttggaaatacaggcatagaatcagacagatttatgtgtcatctggtgctcccttcccttgtcacatcaacttgaaccgatagttttgtatggatccaagcagtagacatgctgttgattggtaaactaaatctgtaatgagactgttaacttcataaagccacaattaactatattttggtgagtattttagatggaaaagcacattcctcctaatagttagaaataagcttagaaatattttgtgggacagttctatggttgtctaaaataagaatgtttggcttgttatacataattccattattcagtgacaaatgtgcatttgcaaatcagagactagaattttagagattaatcctggtggaatttttagggaaatcttgttcaactatatttgtgaaagcaagaatatgttattttttaaaattgggtgtactgactggcctaagcatagactttcttcttttcaatcatatggttacaaaaactgtatattacaaacagtatagaaacaagctgaaaagaatgagccacacatcctggataattatctatatgcagttaaatttacagatataaaagaaaatacagcctactcccttatagtgcacagttattttttagatacagtgtatcactagcaagtggttgcggccaccaactctagttatccccagcacagagaataagagcaagatccgttcggtacagcttccctccatccgacaaagccattatgttcttcttgtatgttgtaatattattaatatccagatcctgtttattcttctcgcacagatccttcagtaaagcatccagttcattttcatctatgtatccattgccgtcctgatcatacagctcaaaagccttattgaactctttcccacacattttgattccctggaatttaagaagaaaattctcctgcactggtagtaacctggccatctcagttaattccagcttcccatcattatttgaatcaaatagtttcagcattaggtctgtatactcggctaattttgtgtcatcaacagtcttgtttgctttttctagcaggtcctttagaaagttcttaagctcctcagtttctatgaagccactgtggtcagtatcatattttctccatgtcttcatgaattcctcacaggacttcagctgctggcatcgaaagaggcagcaggaaattctcttctgtgggtaatacgtgagccaactatacaattcctatttttccatcatctctttgcccatactgatccacaaaagttttcatttcaggtgataactccaatccagccttctttcgcgcctgctggagctcctggatcaagttctgcagctcctttccttccaggtaaccacttccagatttgaaattggtgagatgtttcttgggctggtcggtctgaggacctgaggtcgtaggtggatctttctcacagagcaaagagcaggaggacaggggattgatctcccaagggaggtcccctgatccgagtcacggcaccaaa

SEQ ID NO: 251750 - DNA, 1133 bp, Homo Sapiens
  misc_feature (674)..(674): n is a, c, g, or t
ggggaatttcacaaggttaatcactcagttaaggtggggataactaaaaaggagtgcataaaaagaatgttgtccaagttggcaccagagttggggagttttaagaggtttagaagcctggccgtcaatacccacaacagttatggaggcaaaggaaacaggcccttgaaaagaaggtaatgtggagtgggtagcctccgtattgattaagaaggggacggacttaccctccactgtaagagttacccgaagcttggcgtccgtgatggtccagggggcttctgaggcgatcaggcagcatcagtcttcagccactaagccgagaagatctgggaaggagtcagtcagagagccttgggccagagttccaggggctctgggagtggctgccaggtgagttggacagtccgatttccagtggggtcccgcacagatgggacacggcttaggaggaatcccgggctgcgggcattccttggtccagtggccagatttccggcacttgaagcaagatcctgtgggaggaggttctggaggaacgcctggccgctgcggttcaggcatttggaagttcttgtgtgctggagatgtggctggggtttgtctcaaagtggaggcaaggaattgcaacttttttctattattgtacaccttgaaggcaaggttaattaaancctgttgtggggtttgagggccggaatttaatttttggagttttatttaatgtcgggagcagattgggtaataaaatgtattttgagaataagacggccttttgaccttttagggtctagggctgtaaagtgtctcagggttgctgccaaacaagtcatgaactgggctggatttttatatttgatgaaaaagagcctaaatgctatctgatttcggataaagaaaaaggagcattaaccttgactatgcctttagctccagccacctttttaagagtaaattgctgggcaggagggggagggctagtcacggaacgaaactgtaagccggaccaggtgtgagggaggggaggcgataaaaagattatagggtggaggagcagaggctgaggaagaattgggacctagctcggcctggcgagaagcagcctgggaggaagggagaggtcagatgggtct

SEQ ID NO: 251751 - DNA, 573 bp, Homo Sapiens
  misc_feature (157)..(244): n is a, c, g, or t
ggggaggtggtgtagaccttgctaaccaggacggcccagtaggcagagctcatttttattcctgtctgcaatcgtgcaaaaacgcctcttatggaagagccagagcgacaggagtcagcaaaacacactaaagattgggcagtcactggggagaacnnnnnnnnnnnnnnnnnnnnnnnnnnnnnnnnnnnnnnnnnnnnnnnnnnnnnnnnnnnnnnnnnnnnnnnnnnnnnnnnnnnnnnnncatttggtgctgaagacccaggacaggaggactccttcaggagaccagtcccctgtcctcgccctcactccgtgaggagatccacctacgacctcaggtcctcagaccaaccagcccaaggaacatctcatgaatttcaaatcggattcccaactatatgaagacaccctagctggacgatcagttcttattaagaacctgacccctcaaactctacaacctcgatggactggaccctacttagtcatctatagtaccccaactgccgtccgcctgcaggatccttccccactgggttcaccgttccagaataaaaccgtgcccatccg

SEQ ID NO: 251752 - DNA, 528 bp, Homo Sapiens
tttggtgccatgactcggatcggggtacctcccttgggagatcaatccccagtcctcctgctctttgctccatgagaaagatccacctacgacctcaggtcctcagaccaaccagcccaaggaacatctcaccaatttcaaatccggaccccactggaaatcggactgttcaactcacctggcagccactcccagagcccctagaactctggccaaagcctctctgactgactccttcccagatcttctcagcttagcagctgaagactgacactgcccaatcgccttggaagccccctagaccatcacggatgccgagctttggataactcttacagtagaggattcccaactatatgaagacaccctagctggacgatcagttcttattaagaacctgacccctcaaactctacaacctcgatggactggaccctacttagtcatctatagtaccccaactgccgtccgcctgcaggatcctccccactgggttcaccgttccagaataaagctgtgcccatcgga

SEQ ID NO: 251753 - DNA, 338 bp, Homo Sapiens
  misc_feature (310)..(310): n is a, c, g, or t
tatcacctccccctcctcacacctggtccagcttacagtttcgttctgcgactggccctccccccacctgcccagcaatttccctcttaaaaaggtggctggagctaaaggcatagtaaaggttaatgctcctttttctttatcggacctctcccaaatcagttagcgtttaggctctttttcatcaaatatgaaaaacccagcccagttcatggcccatttagcagcaacccttaagactctttacagccctaagaccctgaagggtcaggaaggccatcttcattcttaattatggcatttttaacanccagttcaggttcctggacatttaaata

SEQ ID NO: 251754 - DNA, 536 bp, Homo Sapiens
tcttcaaggggtccattcctttaagacaattttggatttctttaaaaaatctattttatttgctatattagatggctaacccaaaattgtttcttgggttattgagtaataagtatggtttaaatggcctaaatactacatattttaaaagccttgatgctggcagagctgcactgaggatctgtgtttttaagaagtgcctgggtcgggtaaggtgaaattctaaactggaggacacattagtcagtttatctctctaaacttgttcatccaaaataggctttttaataaacaatttagcttatacttcaaattaataatccccccacacacattcttccctttgcctcccaactatttaccataaattataggataggaaccccctaaaaatgagagccatgaagtaggttctactaaatgttagaaatctgcttgataaactcttctttgtttttggcaactttgattctatcaagacatctttccccctcttcttggttacaccaaatgagtgccgatgcatttccctcccc

SEQ ID NO: 251755 - DNA, 822 bp, Homo Sapiens
  misc_feature (347)..(355): n is a, c, g, or t
  misc_feature (651)..(651): n is a, c, g, or t
  misc_feature (699)..(699): n is a, c, g, or t
  misc_feature (714)..(714): n is a, c, g, or t
catgactagagagacggctgacaccgacactgccgagcaggtcatcgcctccttccggatcctggcttctgataagccatacatcctggcggaggagctgcgtcgggagctgcccccggatcaggcccagtactgcatcaagaggatgcccgcctactcgggcccaggcagtgtgcctggtgcactggattacgctgcgttctcttccgcactctacggggagagcgatctgtgatgctgagcttctgtaatcactcatcccatcagaatgcaataaaagcggaagtcacagtttgtttcctggaaactttgacaagctttattaagttgagagagagagagggggnnnnnnnnngcctttcgtagttcagtaattgccagcaatataacacggctaaaatgaagtttttacagtatatgacatagtgcgcttcataaataggtttatttctgagtttttagcaaaatgtaatgaaatatcaggttgatttctttgattaaacagaacaaattacttgagtaataggaaattaggaggatctagggacagaaggaaagtgaaaaatgtgaaaatacaaaatacccaagatttaagaccggggggaaaaaaccacaaattggtaaataaaggtttgctatttgtaaaaaatntcatttatctctaatatgcttatgtgattggccctaggggagtatatntgggattctaatgtnttattttcatgcctatccaaagattactattgtatcttcaaatgaacttaatattgtgagatggaactgccggggatttaaaagactacccaaaagatttttggcact

SEQ ID NO: 251756 - DNA, 1298 bp, Homo Sapiens
gagaaaccagctccagaagaagtggcccctgttcctatccctaaaaaagtggagcccccagcaccaaaagttcctgaggttcccaagaaacccgtgccagaggagaaaaagccagttcctgtgcctaagaaggaacctgctgctcccccaaaagtcccagaggtgccaaagaaacctgtccctgaagaaaagattcccgttcctgttgcaaagaaaaaggaagctcccccagctaaagttcctgaagtacagaagggagttgtgacagaagaaaaaataaccattgtaactcaaagagaggaatctccaccaccagcagtgccagaaataccaaagaagaaagttcctgaagaaaggaaacctgttcctcggaaggaggaagaagttccaccaccaccaaaagtgccagctctgcctaagaaacccgtcccagaggagaaagttgcagtgccagttcctgtcgctaagaaagctcctcctccccgagctgaagtctctaagaaaactgttgtagaagaaaagagatttgttgctgaagaaaaactatccttcgcagttcctcaaagagtggaagtcacgcggcacgaagtatctgcagaggaggaatggagttactcagaagaggaggaaggtgtgtccatttcagtttatagagaagaagaaagagaggaggaggaagaagcagaggttacagaatatgaagtgatggaagagcctgaggaatatgttgtggaagaaaagctgcacattatttctaagagagtggaagctgagccagctgaagtgacagagaggcaggagaagaaaattgtactgaaaccaaaaattcctgctaaaatagaggagcctccaccggctaaagttcctgaagcacctaagaaaattgtgcagaaaagaaagttcctgctccagttcctaaaaaggaaaaggtgcccccacctaaagtgccagaagagccaaagaaaccagttccagaaaaaaaggttcctccaaaagtcattaagatggaagaacctctcccagccaaagtgactgagaggcacatgcaaattacccaggaagaaaaagttcttgttgctgtaactaaaaaagaagcgcctccaaaagcaagagtgccagaggaaccgaagagagctgtcccagaagaaaaagttctgaaactcaaacctaaaagagaggaggaaccaccagctaaagtgactgaattcagaaaaagagtggttaaagaagaaaagtatcaattgaagctccaaaagagaacctcacccctcaagaagtaactatatggaagagaagaa

SEQ ID NO: 251757 - DNA, 687 bp, Homo Sapiens
  misc_feature (360)..(397): n is a, c, g, or t
cgtgttgggccagactgaacgtcttcaccacagtgttgtccttgagggcttcagcaaagcgggtaagggtctgtgttgtgatgttctcaatgttgttcaaattgacttctgtggtgtcagggtcattgcttttaatcttgtccaaagcgtcctcaatcactgtaggatttccacaagggtgaatggcagctggggactctgtgttcctcccattgctgccattggtcaaatttatgttctctatttgacttttaaatatctttggcttagagttgtcagaattgacactatcataatttacagttccattaatcccttttgcagtttcaattgttctttcctcttcgtcactgtcttctnnnnnnnnnnnnnnnnnnnnnnnnnnnnnnnnnnnnnntgtatacacttcctcagaaacctcactgttactttcagtaaagataagctcttcttcactttcctctttgtcttctgcaacctttccacattcccccagcctctccttctccaagagtttttgggactccttttcccaataggccatcagtgcctctctgctgaatgtccctgtgggggttttctctgtcaggctcttttgccttagccccacgggaaggttgcggtcaggttcaatgtcttccaactctctctctagctccttcagctcctcggctgacagggaggcga

SEQ ID NO: 251758 - DNA, 1266 bp, Homo Sapiens
  misc_feature (732)..(788): n is a, c, g, or t
tcaatgcggattgaggtaaaaggcatctcctccacaattttccctggcaaccaaaagggtatttttccaggggaaaaaaattttcctccttaccccccggccggaagaggaatttcagggatattgggccttgcccccttcttataacttttgcccaacataatttttctggaggacatatgttgccacaatttcccgccacttcaacccccacccgaggagcacccccacttggaccccctactacccgctcaggcttttctgcccagcaggtggctacccaggctactgctaagactcgtacttcccagtttggtgtgggcagctttcagactccatcctccttcagctccatgtccctccctgtgccccaactgcatcgcctggtgctgctgcctaccctagtctcaccaatcgtggatctaactttgctcctgagactggacagactgcaggacaattccagacacggacagcagagggtgtgggtgtctggccacagtggcagggccagcagcctcatcatcgttcaagttctagtgagcaacatgttcaacaaccgccagcacagcaacctggccagcctgaggtcttccaggagatgctgtccatgctgggagatcagagcaacagctacaacaatgaagaattccctgatctaactatgtttccccccttttcagaatagaactattggggtgaggataaggggtgggggagaaaaaatcactnnnnnnnnnnnnnnnnnnnnnnnnnnnnnnnnnnnnnnnnnnnnnnnnnnnnnnnnnccatttctgtattgctggcatctgtgctaagctttacagtggcaaaaataatgacatgtagcaaagattttcaaacaaaatattttttccttttgtaaaatttcttgtgttgtgtgatcttgattgcggctttatcattcctttccagttcataaacaacaggcacccacaaccagaggaatttatagtttaagctccagacatacaaacataaggcacattgtgtctttaatttcaggaatcagaaatcatagggttttgatcacattgcacgcctcccccctcacttgtcctcctgatcctgacacattttgagtaacatcagcaggaatgctttgaccataaggtgggggttttggggtgggcgttgcctgggtttttgggaaaaaggggaaaagtcgggacttgaaaaccactagggcacatttggatgccttcccccagtatgtccttttttggattaaaatgagtgaaattt

SEQ ID NO: 251759 - DNA, 463 bp, Homo Sapiens
  misc_feature (26)..(26): n is a, c, g, or t
aatggacttgtagcaaaagattttcnaaaacaaaaaatatttttccccctttggtaaaaaattcccttgtgttggtggtggaacccttgaatggcgggcctttatcaattccccctttcccaagttccataaacaacaggcacccccaacaacccagaggaatcctatagtttaagctcccagacatacaaacataaggcacattgtgtctttaatttcaggaatcagaaatcatagggttctgatcacattgcacgcctcccccctcacttgtcctcctgatcctgacacattctgagtaacatcagcaggaatgctctgaccatgaggtgggggttttggggtggcgttgcctgggttcttgggagagaggggaagagtcgggacttgaaaaccactagggcacatctggatgccttcccccagtatgtccttttctggattaaaatgagtgaaatttaaa

SEQ ID NO: 251760 - DNA, 323 bp, Homo Sapiens
ggcatctgtgctaagctttacagtggcaaaaataatgacatgtagcaaagattttcaaacaaaatattttttccttttgtaaaatttcttgtgttgtgtgatcttgattgcggctttatcattcctttccagttcataaacaacaggcacccacaaccagaggaatctatagtttaagctccagacatacaaacataaggcacattgtgtctttaatttcaggaatcaggaaatcatagggttctgatcacattgcacggcctccccccttcactttgtcctcctggatccctggacacattctgaggtaacatcaggcaggg

SEQ ID NO: 251761 - DNA, 875 bp, Homo Sapiens
  misc_feature (307)..(316): n is a, c, g, or t
  misc_feature (338)..(399): n is a, c, g, or t
  misc_feature (445)..(464): n is a, c, g, or t
  misc_feature (467)..(596): n is a, c, g, or t
  misc_feature (615)..(634): n is a, c, g, or t
tggaggtctgaggaataacatttaaggaataaatgaagaggccaaaaggtggggggtggttcaggagtgagcaaaatgtaagaagtcaagggaataaatctttaaagtaggggttgtcaaaaatgtcaaatacagaaaaaaagtcaagtactagcttgtgaattaaactgtggatttagaattaagattttagactttacaggaagggactgttaaccagagagccaaatggcagattttagttaaggagccagtagaaggtgacaaagtagaggtaagaatattccttcaaaaagattggcagctnnnnnnnnnngaggccgggcgtggtggctcannnnnnnnnnnnnnnnnnnnnnnnnnnnnnnnnnnnnnnnnnnnnnnnnnnnnnnnnnnnnnaccatcctggctaacacggtgaaacactgcctctactaaaaatacnnnnnnnnnnnnnnnnnnnnttnnnnnnnnnnnnnnnnnnnnnnnnnnnnnnnnnnnnnnnnnnnnnnnnnnnnnnnnnnnnnnnnnnnnnnnnnnnnnnnnnnnnnnnnnnnnnnnnnnnnnnnnnnnnnnnnnnnnnnnnnnnnnnnnnncagcaagactccgtctccnnnnnnnnnnnnnnnnnnnnggaagggaagcataagatgagagagagggacacacaaaaaatggccatttgaacccacactgtatttatattttatatagagtgatcacttcatagtcttttgagtctccaagaggattgacttaattaatggtttaatgtctttcctttcctgccttagagaaaaaggaagtgacagagaaaaacaggacaaattattaaacttacttctgtgattattcatcttaaaatatactgaata

SEQ ID NO: 251762 - DNA, 2030 bp, Homo Sapiens
  misc_feature (241)..(250): n is a, c, g, or t
  misc_feature (512)..(512): n is a, c, g, or t
  misc_feature (1077)..(1110): n is a, c, g, or t
  misc_feature (1595)..(1603): n is a, c, g, or t
  misc_feature (1901)..(1914): n is a, c, g, or t
atctttttgaaggaatattcttacctctactttgtcaccttctactggctccttaacttctgccatttggctctctggttaacagtcccttcctgtaaagtctttctgtatttgacatttttgacaacccctactttaaagatttattcccttgacttcttacattttgctcactcctgaaccaccccccaccttttggcctcttcatttattccttaaatgttattcctcagacctccannnnnnnnnnctctcttaatcacaacaccacttctcacgcttgggtaattttaattcagcagttcctaaatccttatctttagccagactcctcaatccatctgcctgttgcacttttcttggttgtcccagagacacctgtgtgtgtcttaaaacattcattctctgcaaaacctactctaatgcctgtgtcccttactttgggttaattttaggaaccattatattctaagttttctagggctcattcctctcctccaccttcccctatncatttaggtgtctaaggtttactgattttatctccacctctctgatacatcactctttcatcttcattgctattattaataaatacctacagtactaacctgcctcctatacctagctggtctcctctctgttgctcaatgttaccacagcaggctttctagaagcactctgacagtgttactccctaatatccttcagtgacttcaggaactttcaggagaaagcccaaactcctctgtttggtgtacaaggtcttctgatgtgtttcctccaccgaatgttctggtgaaacagacttacacttcttcagaagccacatttggccaggcctcccgccttggtaaatgctgtactctttgcatcaagtatgctagtcatccttccccacttggaaaattcctatgcatcttgcaggcctgacataagcatttcctctgtgaaacctcctttgctccactcaaggagagtcatctaacttccactttcgtgtcaccactgtaattacaacctacctctattgtatgtcacttaaatcgtactgtattgttttatttttcaaaagtnnnnnnnnnnnnnnnnnnnnnnnnnnnnnnnnnnaaggaacctttttattttttgcatctccatagcatagtttttggcatatgaatgtttaataaatgtttgttgaataaattgattttaaagtgacatctttattatattagaggtcctacctatattccaaatactttcactcccttcactttacagcaagggtcagtagagtcccaaggatttgtagactttagggggtcaataaagctgaaattgtattcaagatttggtgtggtttttggtgggtcatgaaaggggtctattcggggaaaaaaaggaacttctttcatgggaaaaggcagcatcattgaggaatttcttgaataatcaaataataccttcctaggattataaggtagataaatggattcctgtttaagattctgaagggaaggggagaagtgttataaattatttcatacaacaatttttcttagcttaatgtttgaataaataaaaatgttggtacccgaacccgacctctnnnnnnnnntcttttaatcttgtcgggccgcctccggccctccagaaactttctaaaccatttcgtttggccgcgcgggccccagtaaggaaagtgaaaattggcccttagctggtttccctaaggaaatcctggggcatgaacttagggctttggaattcctccccaaataaaaaaacggcccggcggggcaaacccgagcggtttctgaaccaaatcccaaaatgggagtttcctgaaggccattaacctggatcctaatcaacaggaagtcccaaggcccaagcttccaatattcaaatttaannnnnnnnnnnnnntggcccaccttctatcccaagaaaccggggtggaaaatttcaattaaagacatttctttggcggaacattggcaaagccccttccacaaaaccggggattgaatggaaacccctga

SEQ ID NO: 251763 - DNA, 762 bp, Homo Sapiens
  misc_feature (39)..(39): n is a, c, g, or t
gtatacaaccactgtgataattctcgattattcgcaaantcatccttgtctgttatgtgtctactaagcaaaacccaaactgcagcacccccctgtggacactgcacctccagtttgtactggggggttgttggccaggctataggcatctttcacaggtccttgctaagcatcccaagtactgtgaatacatgttgattctttaaaaagacctggattccaactcaaataaatcacatcataatactggcagagatcatcccaggaaatccaaaatattccgttgtctattttctgagctgttcggggatcaaagtttaaatacttttgcaactctggagtccagttttttacatcattttcactgtatcttcctttccaacgtaaatgactccaaggatttttcaactggataaatcgcagccccttgaactctctaatatccaaaacagcatatgcgtgtgtgggaaccagaccccacttctctccttcagcttctgtcatcattccagttgacgcagtgatgaggacatctcccttgtgaaatctttgataaagcattctgaaagaattatccttactgaaagtttggctatctgaatgcatagcaattctttctggtatccagccagtcagtgcatgaagatcaatattggagttggatcctggaaaatcatatcctcccatgactttcatgtatgctttttctatgagagaaacccataactcacctttgttgttggaataagaacagagcaattc

SEQ ID NO: 251764 - DNA, 691 bp, Homo Sapiens
  misc_feature (367)..(411): n is a, c, g, or t
  misc_feature (428)..(463): n is a, c, g, or t
  misc_feature (475)..(631): n is a, c, g, or t
  misc_feature (673)..(673): n is a, c, g, or t
cattaataattgctgctaaaggtgatgtttactgataaatcattttaaaatttttttgttttgaaaagtaaatttatcccccatgacgttagatacatttaaattattaagtcttttcagagatgagatggggacaggaagttattttgagccttacaatattatttagcccaataaaagatgcattgaagctcttatatattatgagtttgaaaaattttgaaggtagcatattgaagtgatctataaatatcttcagtcctctctgaagtgtgggtatttcttctatctaaaaaatacatacagtgactgtcttcaaatctacttggttcttgaccaaataggagctaatgggtaatgaataccnnnnnnnnnnnnnnnnnnnnnnnnnnnnnnnnnnnnnnnnnnnnnaagggtctcactctttnnnnnnnnnnnnnnnnnnnnnnnnnnnnnnnnnnnnccaggctaatgnnnnnnnnnnnnnnnnnnnnnnnnnnnnnnnnnnnnnnnnnnnnnnnnnnnnnnnnnnnnnnnnnnnnnnnnnnnnnnnnnnnnnnnnnnnnnnnnnnnnnnnnnnnnnnnnnnnnnnnnnnnnnnnnnnnnnnnnnnnnnnnnnnnnnnnnnnnnncctatgaatatctttctaacattgtaagaatgaggtaatgtntccatcagtctaatacag

SEQ ID NO: 251765 - DNA, 821 bp, Homo Sapiens
  misc_feature (406)..(406): n is a, c, g, or t
cgggcagtaacaacaaacaccactcacttcaagatgcattgccagccccgtggcttccctcagctcttggccacaacttgaaaactgtcttgaatgaagtacttggggagaagacaggccactgccctctgttccacagttttcttcatgcacggggtcctcctgttaacaattactgttgtgtacatataaggtatttttagagaagagaaacaggcctttattttcctatgtccttttttacgtttagaatagtcacctgaggggggatcagctcaactgtactgtgggagaaattcttttccaacaaacctcatgctcgtttttctgtggtgcaatttcaagggcaacgtgttctgtcctcacctcactctggtactcgcctcttggggcgcctcagcccatntcatggggatggcaccaagcggccatgctcagtcttccagccccgctgagggtaaaccgaggcctctggcagctgtgcacaggtgctggcctctggcgccttcaaggagcactgcctgtcactcgctcctgggctgtctagccatgtctcccacccccactttaacgcagccagctgctgggatcaaagcaagtctgttcttatgttatttgcctgtatgaaatcatttctcattttatcacaattccttcaactcagcttactcgcgtggctgcctgttcatatttgaaagcagccaccgtggctgtggctttggtttggaaaagcatgagcacggcacttcccttggttttcccttcccagagccgaccgcagctggtcagccctctcttcccgctcctgaacctttacttac

SEQ ID NO: 251766 - DNA, 715 bp, Homo Sapiens
  misc_feature (631)..(631): n is a, c, g, or t
gaccaaagatcaaactctgtaattctctggaagtaatccatcaggcaggtacaagacttggaacgagaattctctaataaaactaggcctagtaaatgacaaagactcaaaagattctatgacatgaaggagaataatcttgaagaggatgaagaagaagaagaaggtggggctgaaacagaagaacaatctggaaatgaaagtgaagtaaatgagccagaagaagaggagggttctgataatgatgatgatgagggagaagaagaggaggaagagaatacagattaccttacagattccaataaggaaaatgaaaccgatgaagagaatactgaggtaatgattaaaggcggtggacttaagcatgtaccttgtgtagaagatgaggacttcattcaagctctggataaaatgatgctagaaaatctacaacaacgaagtggtgaatctgttaaagtgcaccaactagatgttgccattcctttgcatctcaaaagccagctgaggaaagggcccccactgggaggtggggaaggagaggctgagtctgcagacacaatgccgtttgtcatgttaacaagaaaaggcaactaacagcagtttaagatccttaatgtacccatgtcctctncacttgctgcaaatcactggaatcagcaacaggcagaacatgaagagaggatgagaatgaaaaagctcacactagatatcaatg

SEQ ID NO: 251767 - DNA, 1280 bp, Homo Sapiens
  misc_feature (412)..(428): n is a, c, g, or t
  misc_feature (688)..(696): n is a, c, g, or t
  misc_feature (1264)..(1264): n is a, c, g, or t
tggtgccgcccaaacatggtgaaagtacacgccagaagggcttcaaaggaggacctttttaattcaaagggcaaaaaattaaatgtttaatttcgaaacaccattataattggggaagattattgtagcccaaaatgttcgggttcaattaaaatatcccgatagtagcccattggtaggtaaatactcggggcttatggacatggcatttagattaaacatgggaaatgcattccgacaccccatataatgggtacctgttgtcctaaaaattttcttgtgaatattcttgggggtataaaggggaggacaagacacgaaggcctggagagtggggttcacattatggagaaccaaggttaacccaatattccaaccccgatttttcactgggattttatattattttccnnnnnnnnnnnnnnnnncagtggtgctgtgaacatctgtgtttttccagcacacttattaagttatttatatgtaaaaggatagaattaaaactatttggaaggatttataagtatataaaaatgcataaatagttcagtttatattatccaactattatttttaataaagagccactgtatttcttcattatatatgttcaaggatatatgtttatccaagtccagggacttaatcaatgttcttaatagctaatgacaacagggtttacttaaannnnnnnnnaaataattaaacaatatgtagtgatctctttagtttacatacactgtaggtatagcatgaatataatttcatttcagaatatttgaaagcaaatgtatattaagaactattataaatgaaatattaactactgttataaaatgattgcactgaatgaatgtataactacacttcttctctagaaagattaataaaccagtattaataacttctctcttgagatgttttacaattttccaaattaataagactatgctaaattaaagttcgattccattgttcagcatacaaataagctaatttcttaattatccttaagatgcttagccatgctgtttcagtttttattgtaactgggattcctaaatacatttgtttttggtgatactctatttctaggtgttagttacttaaagggaatttcacaacattatttttgcaaagttaaaattaaaactgggaacagttgacatggaacaccaaattcagaaccattttaactttaagtcaattttacaacttttaaaaattcttcccaatagggtaagaaatagaaagtaaaatattnatgtcttccccggccg

SEQ ID NO: 251768 - DNA, 1930 bp, Homo Sapiens
  misc_feature (129)..(129): n is a, c, g, or t
  misc_feature (135)..(135): n is a, c, g, or t
  misc_feature (157)..(157): n is a, c, g, or t
  misc_feature (219)..(219): n is a, c, g, or t
  misc_feature (504)..(523): n is a, c, g, or t
atattactggttccttatttattaccactgacaaatgatttcataatactgaccagagggattacacagctcacaaaaactttccatataagaagcacgatgttaaaacgcagcagaggccatcaaacncagtantaatgagaattttgttagcttntaatgataatcattattgtatcaggatgcaattcacactaattattagtaaaagtttacaancattaaaaagtgcataataacatttggatctgagagggctgaaaaaagacatgaaaacacaacaccagggctttacttttgtgattggtgtccacatgattgcaaggagactactttctccacctgattcagcttagtgaagataagttgtcctccaaatttaaatagtatcatacagcattgtgagaaatttgattccatagaacaaaatatttccagtccttagtatgatcttggcttttcttttctacctttccaattgtccaaaattctcataaattaaannnnnnnnnnnnnnnnnnnntatgcgggagaagttctccacttgagaataaaacaaatttgacagattgaattccagtctgtgcagacaccaaacagactgaattcaggtgatattcacattaatggatattttcaaatgtctctataataaagcaatggagtcttgatgaatctgttagacttaatcaactcatcaacatacaatgagcaaggggaaagactgtgttttaaaaaagggtgttctatcctgtgtacaccaccacagtatggaaaactaaaatgaaaagacagcccttttaaaaatgagtggtataaaaattcacagtaatgtacatcattttgtttttcataagcaatcagagaagggggcagtgctgagcatatatattgtacaatacaaaacagtgtaaataacacagcagtaacacacagatacgtaatgctaaaaacagtgctttctggatctttcttttactgggtgaacacttgagccagagatatttaaactctggggttcaatcaacccttcgcaattagacacaattaaatcctctgacattgtgaggggccagatgctacaggaagaatcatcatctaggtcggagctactctctataagcatttcgtcatatgatcaagtgaaaggatccatacaaaaatgacgcccaaacacaagccacatgatttcaaccattgctaatgacagaggtagggaaaagtctgcctgcagccacagcctctgccctcatttttaacatgataatgagcaggttcctgcaatgcagcacagccattttctttttcctcttttcactcatggaaacaaatgcattccagatactcctggagatttgagacattttcaggtgtggtcgagggtcaaagtggggtgttagctttcagattttgctgcttctccctgggcttccccactttgttctgtagaacttcgttgtgcatcttcttcaccttctgtcttgttgatatcaagacctgctaatttcaaggctaattcattgctgttgccacttgcagaggaaaccaggatatcatgtattgcatttcttctacctgttcttcctgaagcaataaaatctgcatatgtagtttccacatcagtcattgctaccaaatatccacataacagggactgattggaaaccttcttgtctttaattcattgactatactagatctcttgttttctgggagatgaccttccaggatttcttatcaggaaatcacttctttgggggaaaaccaggggcttctcagaaagtcaggaaacttccccggacctagtcagcgcaggtccccgcgcacgcccgccacgggccgcagtcccgccgcgcccgccgagtgctcggtcagctcgcgccggcccgcgccccacctgccagcagcagcctccgctcccgccgcgccc

SEQ ID NO: 251769 - DNA, 849 bp, Homo Sapiens
aacccatctaatcaaccaactgctgaagaattatctttctaaatttcattcacagttgagaacctttactttcatttgctgccatccatagtcttttcctaagtatcacaaaaggatatgcctgccaatctcttaaaaaatgacaatgcagacttgtgctcaaaatgaagctacagatttagaacctcagattcaatgaactaaaaggagaatatattaaatgttaaatttgacctcagaaattccactatactaaggatgttgcctaagacctctcaaagactgaggaccagcagaacactgcccatttcactctagaaccacacacaagtctgttgttcccaagccaatgtgaaagctataagccttgagactcaaaagagcacaggtgtccacaggtgacccaaacatcaaaagtgagatcaccttctcaggaaggaaagataaaatcactgcttgcaagtctgtggcaggtttgctataaagatgtgaaacaaattttaaaatatggattattctacagaaggggtaagacaccagggagaaaaaaaggactcaatggactttttcctggccagtcacaccaagaaaaaggattaagaaacaacaggtcttcaaatggcactgaacgaacagtagccaataacccaaaaaccacccaaccacctgcaggaaaccttccaccaaaaagcagaaaacacatattcagggccattgtcttctactggactaaaagactgaagtctactaaaggttagggtccatgcgggacaagattacaaacacagccaactgatttctgcattcactcttcagagtacctttgaccaatactacccagctaacgta

SEQ ID NO: 251770 - DNA, 982 bp, Homo Sapiens
  misc_feature (3)..(3): n is a, c, g, or t
  misc_feature (849)..(922): n is a, c, g, or t
  misc_feature (926)..(926): n is a, c, g, or t
  misc_feature (937)..(937): n is a, c, g, or t
  misc_feature (976)..(976): n is a, c, g, or t
tangagggatttcggcctgagagcgggccgaggagattggcgacggtgtcgccgtgttttcgttggcgggtgcctgggctggtgggaacagccgcccgaagaagcaccatgatttcggccgcgcagttgttggatgagttaatgggccgggaccgaaacctagccccggacgagaagcgcacaaacgtgcggtgggaccacgagagcgtttgtaaatattatctctgtggtttttgtcctgcggaattgttcacaaatacacgttctgatcttggtccgtgtgaaaaaattcatgatgaaaatctacgaaaacagtatgagaagagctctcgtttcatgaaagttggctatgagagagattttttgcgatacttacagagcttacttgcagaagtagaacgtaggatcagacgaggccatgctcgtttggcattatctcaaaaccagcagtcttctggggccgctggcccaacaggcaaaaatgaagaaaaaattcaggttctaacagacaaaattgatgtacttctgcaacagattgaagaattagggtctgaaggaaaagtagaagaagcccaggggatgatgaaattagttgagcaattaaaagaagagagagaactgctaaggtccacaacgtcgacaattgaaagctttgctgcacaagaaaaacaaatggaagtttgtgaagtatgtggagcctttttaatagtaggagatgcccagtcccgggtagatgaccatttgatgggaaaacaacacatgggctatgccaaaattaaagctactgtagaagaattaaaagaaaagttaaggaaaagaaccgaagaacctgatcgtgatgagcgtctnnnnnnnnnnnnnnnnnnnnnnnnnnnnnnnnnnnnnnnnnnnnnnnnnnnnnnnnnnnnnnnnnnnnnnnnnncganggaagaggaanaagagaaaagaaagggctcgtgacagagaagaagaaganagtcgt

SEQ ID NO: 251771 - DNA, 2114 bp, Homo Sapiens
  misc_feature (307)..(323): n is a, c, g, or t
  misc_feature (367)..(391): n is a, c, g, or t
  misc_feature (405)..(432): n is a, c, g, or t
  misc_feature (474)..(486): n is a, c, g, or t
  misc_feature (508)..(525): n is a, c, g, or t
  misc_feature (533)..(684): n is a, c, g, or t
gtctcccccggctttttcgtcccgctggggggggagaaatattttatggctatcacggcggggcacagggaggtttgttgattatccccgcgcggcgagtgtaacagtgtgtcacaaaataacccgttgtgtggagaggtggtccgccccctttccgccgcgggaggaggtttgtataggattatcccacgccctctcccccttaaaaaaagtggcaaaggcgggcgggggtgggtgtcatttattttttgagaggccccgcgcgggcacccccccttggggtggtatgcccgccgggaaagtctgnnnnnnnnnnnnnnnnngcgggtaggtttttttaaaaaaacctccctttgttccccccccnnnnnnnnnnnnnnnnnnnnnnnnntggacccacgcccnnnnnnnnnnnnnnnnnnnnnnnnnnnnagaaaaaaatagtcaccggtgttccttctttttcggggcggnnnnnnnnnnnnnaaatgggttaaaaaattttttnnnnnnnnnnnnnnnnnncggttttnnnnnnnnnnnnnnnnnnnnnnnnnnnnnnnnnnnnnnnnnnnnnnnnnnnnnnnnnnnnnnnnnnnnnnnnnnnnnnnnnnnnnnnnnnnnnnnnnnnnnnnnnnnnnnnnnnnnnnnnnnnnnnnnnnnnnnnnnnnnnnnnnnnnnnnntatgattcaaggatttattaagtcatacatgcaaaacataatgctaattgcattagcaaaagatcaatgtaaaaacactccacaattctgcaactgtcaatttaaaaaattctgttgtagtggctgaagggtcccacgctgtattctcgccagtgagttaagttgtacagaacatcgtcagcactagcacagtttacagaacctcacagacccaaaggaacatcaataggcaaagcgactacaggaggcgtgtgtccgcgtgggcgaggtaaagagggtcagtattggtcaagtgacagtgtcggtaatctggcaagacagtgatgttaagaaggttcatagtttaagaattatctaaaatattttaaaaactataaagctgcaacacatgatttttacacctagttactagaaaactaaggaaagcacttattagctctgaataaagtaacatggaaagcacttttactaatcgacaaaaaaaccttctaatgcattatcagaaagattttataatacaaggaggcatattgctcagtcagaaggggttctataagaaaagcacttactaagttagcgactaacagaacaaccagtttaaagatgaattaaatgcccaatttggggaggcatggcaggtgtaagagaaaggaaaagcttaagaaaacatttcctgataataccaacctttctttcatcatctactgcatttgacagaaattaaccttttagagtttttacccgtgacactttcattccttgtacaatgtagtgtaaatctccacttcgtattttgtcaaaatactgtctttgtcctttgatcacacacaccccacccggcacacccacagctaaacagaattcttcattagaggaaatagcagttctgttcaaaatctccgcaaaagctggtcagaaaactcgctatgaaatcacaaagactgatccaaagagctgagctgctacgctcactccattacagtacaatgttatgtcgggaacacgtgctgctaactcactggtgagttcaatggcaacgcttcattcgggaggctgttctgctttacgcatctgagaactacataggagagcaagtgtctgcacctcctaactgcagaagctaccgtcttctcaaagacgaaggtctttgcaaagttcagtgctcggtgttctcggcacaacaatgcagtgtagttcagaaggtattttggcaactcttaatctgaacaagaatggggggggcgcttttgaaaaataaggctttaagaaggcttgtcattttagggctaaattttaatagaatgtgagtctgaactcttacatttagaacaaacaaaaccttaaaattactgattggttcaaaaaatggttttatggaaaaattaatctgtaacaaaaagttggcattgagtgcgaaggctccaccgttg

SEQ ID NO: 251772 - DNA, 848 bp, Homo Sapiens
  misc_feature (92)..(149): n is a, c, g, or t
cctgtttctctgcagttttcctcagctttgggtggtggccgctgccgggcatcggcttccagtccgcggagggcgaggcggcgtggacagcnnnnnnnnnnnnnnnnnnnnnnnnnnnnnnnnnnnnnnnnnnnnnnnnnnnnnnnnnnagcccgccgcttcctatctcagcgccctgccgccgccgccgcggcccagcgagcggccctgatgcaggccatcaagtgtgtggtggtgggagacggagctgtaggtaaaacttgcctactgatcagttacacaaccaatgcatttcctggagaatatatccctactgtctttgacaattattctgccaatgttatggtagatggaaaaccggtgaatctgggcttatgggatacagctggacaagaagattatgacagattacgccccctatcctatccgcaaacagatgtgttcttaatttgcttttcccttgtgagtcctgcatcatttgaaaatgtccgtgcaaagtggtatcctgaggtgcggcaccactgtcccaacactcccatcatcctagtgggaactaaacttgatcttagggatgataaagacacgatcgagaaactgaaggagaagaagctgactcccatcacctatccgcagggtctagccatggctaaggagattggtgctgtaaaatacctggagtgctcggcgctcacacagcgaggcctcaagacagtgtttgacgaagcgatccgagcagtcctctgcccgcctcccgtgaagaagaggaagagaaaatgcctgctgttgtaaatgtctcagcccctcgttcttggtcctgtcccttggaacctttgtacgtttgctcaaaa

SEQ ID NO: 251773 - DNA, 448 bp, Homo Sapiens
cccccctaggtttccccaggtaacccaggtgtaaaaaatccatgtggttggccagctttaataagtttttaaaaaatattttaggataataccttaaaacctatgaacccttccttaaacatcactgtccttggcccagattacccgacactgtcaccttgacccaatactgacccctctttaccctcgccccacgcggacacacgcctcctgtagtcgctttgccctattgatgttcctttgggtctgtgaggttctgtaaactgtgctagtgctgacgatgttctgtacaacttaactcactggcgagaatacagcgtgggacccttcagccactacaacagaattttttaaattgacagttgcagaattgtggagtgtttttacattgatcttttgctaatgcaattagcattatgttttgcatgtatgacttaataaatccttc

SEQ ID NO: 251774 - DNA, 465 bp, Homo Sapiens
ttttgagcaaagcgtacaaaggttccaagggacaggaccaagaacgaggggctgagacatttacaacagcaggcattttctcttcctcttcttcacgggaggcgggcagaggactgctcggatcgcttcgtcaaacactgtcttgaggcctcgctgtgtgagcgccgagcactccaggtattttacagcacctacaggaaacacgaccacacggcaatgtacactcgaccccactctcttctgatcacaccaccagcgggaggcagctcctggggcccgggcgccttctgccggctcccagccctgcttccaccttccaacgctgacgttaagacccagagggccttgccagctggttccccaagagtacaccaggccctgagtgggagacacacaccctcctttcccagactggactccagtctctgtcactacaataaaagaggtacaaggaggaggaaaaac

SEQ ID NO: 251775 - DNA, 525 bp, Homo Sapiens
cttacggccgggaaggcattatttaaaacttgccttttgtgaggaaaaaatgtagtagaaaaagctgacctaatttaattaatattagagaaaatggcaaaatagtagatgagcacaaaggttttataagtggtaaatgattaggggaaaataatcatggggaaagggatcttttttccttgaccctctgaaaacagaacgatgcagctggttacaaaatcctaccgttatcagctcttctgcacattgcagtgatgctttggtatgcggggagaaacactcttagggtgctggtccttggcatgactcttgccattctaattggaattagtgccaccctcagcttggattttgaacaaggccttattctttcaggaagacaactaatggatgatagcaagttcatccacttactgggcttgtgccatgagcaaaattcaaagtcctgtatatctttcattgtagatttttaaatactccttttcctaaaaaactcaagggtttaaaaattgctattttatattt

SEQ ID NO: 251776 - DNA, 986 bp, Homo Sapiens
  misc_feature (269)..(269): n is a, c, g, or t
ctggtcatgggtacctccttgcaggtgcagccctttgcctccctcatcagcaaggcacccctctccacccctcgcctgctcatcaacaaggagaaagctggccagtcggaccctttcctggggatgattatgggcctcggaggaggcatggactttgactccaagaaggcctacagggacgtggcctggctgggtgaatgcgaccagggctgcctggcccttgctgagctccttggatggaagaaggagctggaggaccttgtccgganggaagcacgccagcatagatgcccagtcgggggcgggggtccccaaccccagcacttcagcttcccccaagaagtccccgccacctgccaaggacgaggccaggacaacagagagggagaaaccccagtgacagctgcatctcccaggcgggatgccgagctcctcagggacagctgagccccaaccgggccaggccccctcttaaccagcagttcattgtctggcgagctcagaagcatcccccaatctcttagcagctccctccccaagaactggggtcccagcaaacctggcccccaaccccagcaaatctctaacacctcctagaggccaaggcttaaacaggcatctctaccagccccactgtctctaaccactcctgggctaaggagtaacctccctcatctctaactgcccccacggggccagggctaccccagaacttttaactcttccaggacagggagcttcgggcccccactctgtctcctgcccccgggggcctgtggctaagtaaaccatacctaacctaccccagtgtgggtgtgggcctctgaatataacccacacccagcgtagggggagtctgagccgggagggctcccgagtctctgccttcagctcccaaagtgggtggtgggcccccttcacgtgggacccacttcccatgctggatgggcagaagacattgcttattggagacaaattaaaaacaa

SEQ ID NO: 251777 - DNA, 1071 bp, Homo Sapiens
  misc_feature (993)..(993): n is a, c, g, or t
  misc_feature (1021)..(1021): n is a, c, g, or t
  misc_feature (1038)..(1038): n is a, c, g, or t
ggagcgaggcctgggtggcgaattcggcacgaggcagagcagtcggtgacgggacacagtggttggtgacgggacagagcggtcggtgacagcctcaagggcttcagcaccgcgcccatggcagagccagaccgactcagattcagactctgagggaggagccgctggtggagaagcagacatggacttcctgcggaacttattctcccagacgctcagcctgggcagccagaaggagcgtctgctggacgagctgaccttggaaggggtggcccggtacatgcagagcgaacgctgtcgcagagtcatctgtttggtgggagctggaatctccacatccgcaggcatccccgactttcgctctccatccaccggcctctatgacaacctagagaagtaccatcttccctacccagaggccatctttgagatcagctatttcaagaaacatccggaacccttcttcgccctcgccaaggaactctatcctgggcagttcaagccaaccatctgtcactacttcatgcgcctgctgaaggacaaggggctactcctgcgctgctacacgcagaacatagataccctggagcgaatagccgggctggaacaggaggacttggtggaggcgcacggcaccttctacacatcacactgcgtcagcgccagctgccggcacgaatacccgctaagctggatgaaagagaagatcttctctgaggtgacgcccaagtgtgaagactgtcagagcctggtgaagcctgatatcgtcttttttggtgagagcctcccagcgcgtttcttctcctgtatgcagtcagacttcctgaaggtggacctcctcctggtcatgggtacctccttgcaggtgcagccctttgcctccctcatcagcaagggacccctcttccacccctcgcctgctcatcaacaagggagaaagctgggccagtcggaacctttcctgggggatgattatggggcctccggaggagnattgggatttttgattccaaggaaggcntacaggggacgtgggcntgggttggggttgaattgcggaccaggggttgc

SEQ ID NO: 251778 - DNA, 379 bp, Homo Sapiens
tgtcttctaaacaaatccctgggctaaggaagtaacctcccctcatctcctaaaaacttccccacggggcccagggctacccccagaacttttaactcttcccaggacagggagcttcgggccccccactctgtctcccttcccccggggccctgtggctaagtaaaccatacctaacctaccccagtgtgggtgtgggcctctgaatataacccacacccagcgtagggggagtctgagccgggagggctcccgagtctctgccttcagctcccaaagtgggtggtgggcccccttcacgtgggacccacttcccatgctggatgggcagaagacattgcttattggagacaaattaaaaacaaaaacaactaacaaa

SEQ ID NO: 251779 - DNA, 972 bp, Homo Sapiens
ggacattcctcttcctccatgcctcttgccccagtttattttctaccataaaatcatgctctcaatgaagtaattgatatgaatcatttaatttatagcataaatttaagtcatttggttgtttcaactagaaggatttgcattttatcccttgtcctctattaaagaagaatttcacataccctgggagccttaccctcaccctaaaaactacaccaacctggttaaaggcaaccttggccctaatgtacaccccgcgaagatcaccaaataaaactatgtccctaaggaccattagccttaagcttagagagcttgaagtttacacaaccaataacaataattttatttgccccaatcttttatatgataagaatgatagaaacatttggaatttgtagatttggtagtaactggatgaatgggttctcctgttgataaatgccattgtttcccatttaatatggatcctcctgatttcttaagtaaaaatcaagcactcatctcacgtatataaaaatatatactcattctgtcctatttttattaatctcatctgctccaaatgagctttggatttataatcaaagtgtacccacttgatagcacttttcctatatgtttgccaagttttggggaaagggaatgactgtagtaaatgatacatattttccttttttataatttatcactttattctttgacagtttatttgttttggagaggaagtggcctatcaattatgggttatgtgcaattggattttgaaaaataaaacaagctatttaggaattgaacatgagatatatggaaatataatttggtttttgttaatctcatcctctccaccttgtgtagataggttattgctagttatgatatttatttctaaaatatgttatttgaactgtgaaaagtggttcatatagtacactttgtggaacaattttatatcattaccccgatgaaaag

SEQ ID NO: 251780 - DNA, 279 bp, Homo Sapiens
gggagggccaactccagggattccttccacgacagaaaaacatacaagactccttcagccaacatgatggtactgaaagtagaggaactggtcactggaaagaagaatggcaatggggaggcaggggaattccttcctgaggatttcagagatggagagtatgaagctgctgttactttagagaagcaggaggatctgaagacacttctagcccaccctgtgaccctgggggagcaacagtggaaaagcgagaaacaacgagaggcagagctcgaacac

SEQ ID NO: 251781 - DNA, 541 bp, Homo Sapiens
  misc_feature (387)..(451): n is a, c, g, or t
ctcgtgccgaggatctgtagtaataactgctttacaaaatccttaaaactactaatttgctgcttgtacagaaagtgaaaattagttggcaatcataagaaacatctgaataacaacgatgaatgggaaactagtgttgaaataggattcattttacttagcaccagcttaatttccttaggaagggctcatctccattagaaaatggagtcatcttatgtgcttaattattttcagttaattgtcaagtttaagtgcctaatcaaggcaagtgttgtttcagcctatgcttaatgcaagctaggatagtgattttaaataatcactaaaatcactagatttaaataatcactaaaatgatttgtgagaaactggcacttcagatannnnnnnnnnnnnnnnnnnnnnnnnnnnnnnnnnnnnnnnnnnnnnnnnnnnnnnnnnnnnnnnnaaagctttaaacttctgcagtaagttgagagaagggttgagaagaggaaaagaacttctcattttctatcagataagaatcacattagaa

SEQ ID NO: 251782 - DNA, 975 bp, Homo Sapiens
cgagagctccgggggccgctgcagccgcccaagcgcccgccatgcgcgctgcccgcgccgcgccgctgctccagctgctgctcctgctggggccgtggctggaggctgcgggcgttgcggagtcgccgctgcccgccgtggtccttgccatcctggcccgcaatgccgaacactcgctgccccactacctgggcgctctggagcggctggactacccccgggccaggatggccctctggtgtgccacggaccacaatgtggacaacaccacagagatgctgcaggagtggctggcggctgtgggcgatgactatgctgctgtggtctggaggcctgagggcgagcccaggttctacccagatgaagagggtcccaagcactggaccaaagaaaggcaccagtttctgatggagctgaagcaggaagccctcacctttgccaggaactggggggccgactatatcctgtttgcagacacagacaacattctgaccaacaatcagactctgcggcttctcatggggcaggggcttccagtggtggccccaatgctggactcccagacctactactccaacttctggtgtgggatcaccccccagggctactaccgccgcacagccgagtacttccccaccaagaaccgccagcgccggggctgcttccgtgtccccatggtccactccaccttccttgcatccctgcgggctgaaggggcagaccagcttgctttctacccgccacatcccaactacacttggccttttcgacgacatcatcgtcttcgcctatgcctgccaggctgctggggtctccgtccacgtgtgcaatgagcaccgttatgggtacatgaatgtgccggtgaaatcccaccaggggctggaagacgagagggtcaacttcatccacctgatcttagaagcactagtggacggcccccgcatgcaggcctcagctcatgtgactcggccctct

SEQ ID NO: 251783 - DNA, 979 bp, Homo Sapiens
gctgggtggcgattcggacgaggtaactccaagtcttccttgagacagactaacctgaaagctttgcctaacagtagcttgtagagatccagtgcacgccgatgctgctaaactcagtgcctgagcccggccctgcagccccagccgcagtgtctgaaggccacctcccaaagggagcacgttgccttttcaaactcccgtgccgatttcctaagagcccctagtccaagcctctcagatgaagctgaggagccgtgcctaggatcccttcccagctctgaggacgggctgcagagctctgcaggtgtggattcaccttacgcccctacagcaggctcagcccttcccaccctgccccatgcccagcagcacaacacggagtgagacaggatgcccacggtgactgccgctccgtccgtgcacacacagcggtgctcttctccccttagccacccactgcccaacccaacggcaaagacacagaaaccaggtccccttgcagacggctctcccatcttcctgcaagtcatctgctcacacacagttggcagcacatagcgtttccttctttcagaaacattcctcttctggggcttcagaaagctggcaaggccactagcagagcttttgttaatgccccagctgcttggcgagctaacagctgacctttcgggaagcccacagacgctggaggaatcttgagtttctccaaactgccgctccaccagtgcctttggacagccgtgcctgttcgccgctctccccaagtctgattctcatcgaggcccctcgcttctatgactgtgcttgcagaaaataaacactctccgatgccgctgtcctgggggagcccgcgggagcctgtgaatggtgataacgacctgggcagtcctgggcccagctcactttgtcagctacctgccagggggcttttcctggggtttaaaaacattgcatttccaagctgggccccctcggg

SEQ ID NO: 251784 - DNA, 763 bp, Homo Sapiens
  misc_feature (656)..(656): n is a, c, g, or t
cggccggggggagcgggcggccgcggctgtgccctctcctactcctcaccgcgcgagcgcggggaaccagtagccgcggctgcttcggttgccgcggtcggtggtcgttatggattctccatgggacgagttggctctggccttctcccgcacgtccatgtttcccttttttgacatcgcgcactatctagtgtcagtgatggcggtgaaacgtcagccgggagcagctgcattggcatggaagaatcctatttcaagctggtttactgctatgctccactgttttggtggaggaattttatcctgtctactgcttgcagagcctccattgaagtttcttgcaaaccacactaacatattactggcatcttcaatctggtatattacatttttttgcccgcatgacctagtttcccagggctattcatatctacctgttcaactactggcttcggaaatgaaggaagtgaccagaacttggaaaatagtaggtggagtcacacatgctaatagctattacaaaaatgggctggatagtcatgatagctattgggatggggcccgaggtgcagggtggtaccattattaacgaattttgagaggttggtaaaaggagattggaaaccagaaggtgatgaatggctgaagatgtcatnaccctgccaaggtaccctgctggggtcagttatcttcacattccagcacacccagcatctggcaaatatcaagcataatcttatgttcctttataccatctttattg

SEQ ID NO: 251785 - DNA, 722 bp, Homo Sapiens
gtaaccacttcataatatactgctgaagggcttcttcttatagcaagaactctgcacagcaactgcctggatgtatttgattttttaaagcgtagacatatatttatgaatgtgcatttcttgacttcacagcagccacttgactaataccttgtgttccgggaataacatgatactattcagaggagccagaagtaaagtttatttcatggattatttatgagagctaatttaaggatgactttttttctgattcaaaagtgaacttgattttaaaaaccagtcaagagcaatcaaagcagcacatggtgttgtatacttcattagcaagtgagtttggtgttttataggtcacatatgtctgtatctacttagccagatgcttggcctggtggcaccagggctccacagaggccacaaaatgttgcaagtcatgatggatggaaatatgttctaacagcatctgcctctattcaatttaattcttatttctgcgttactcatgtacattggcctttctacatagttattctatcactggcaatatttgttctggtttagtgttctgtattttaaggtgcacgtatcatttctaattttaagttattctaaattcatcatatgaatgttctttgttcccattgtgacgattatttatttctgtgtctgtctagaagtacgtgtttgcattatttatatgcttcccgaggctcatttagttg

SEQ ID NO: 251786 - DNA, 1710 bp, Homo Sapiens
  misc_feature (1518)..(1518): n is a, c, g, or t
tttaatatagagaactgattatgttcacttgtaacctgtcattccaaaattcttcaggatgtttaatgttcaagtgtccatattcccagtcccactggatgcctggcaggatgcaaccatctgaatgagtggaagtataatgtttgcaccaggtattatattaggagccttgaacccagaatatgtctgattaagtcttttagcccaataatttgccactgctgccaagtctggtaattttgaaggagaaagttcaaccataacggggtgatacagggcacccccgtactcaaaaaactttcaaagtgctttctaaacaagtttctctttctccttgaatacaacgtcagtcacaactgatggcagtacaatcgatccatccatacactgctctaagaacatcttgatggtataatatgctgtcattcatgctctacctgctactagtttaatttggtcaagtagctctttccctggagactcaaattctactagactcaaattctattagaccaaagacaaatgatctcaaccatggtcttcacttaaaccaatcactggccctgcattataactgagcaacaagttggcacaatcaccatgtgttggttgctggagagctatcatcagggtcttgaattgcttctgaacctggagactgctggcacggattctgtcacttgacccctactactatgccaatgccaatcagtagatcacaacagtacagtacagatgatagctccaagaatgtaaattgcggatccttccctttgtggctttggccatacagcattttagttttgttctttccattaactgaagtcacgaggtatgcctccttggaaactccaacagttaagagattctcatgtattccatgaaataaaaagcaaagaaaaatcaaacttgtcttaatgagatggaagtgttggatcaaacactgattgagctgttctatgtcctccacttccccagtgcctggatgtggttcatctgcatcgatggatactgtccaaatttgccacttggctcaaaagactgctgcccagtgaatggtaatgcagatagaggctcagaggtatccatgggttcctccatgatgaacaatggtcttgattgctgaagcgattgtttctgattggttcctatgcccagatcgtccaagactactcgttttacatgaggaaagggtcacagctcccgaaattttggattccacggcggcagctgctgcttctgacagcagaggcgggaggtggcccaggactactcggtcctcaaagactggactctctctcggcgcgcccggacctccgcgcttcactgactggcttccctagaagactgggggccttgcggggagataaaaagggcagacacgccacccccaccgaggccctggacgcccagccgccctagaatcacgaccttagcccttggaaagccagggagatgcggaccccctagacccgcagcccggccgcgtggggcggcgcgcagctgagggaccaggantgcgccccaccacaagtgaggggcggaccggagacgccgaggtcggcgagggggcacgcgctagttccacagctcggctggcgagacggagggtaggcaggggtcccaggccgcgggtgactcggggtccgtcacatacatactcactgccgtagctgcaaacagaaagcaccaaacagggaccaaaacgcg

SEQ ID NO: 251787 - DNA, 1211 bp, Homo Sapiens
cagacacacacagcctacgacactgcaacagagcctcacctcacaggaggtctgggggactcttaagtacagaaacctgcttttaacagtctaaacaggataaaaattgcataacaatatcccaatattaaggtcagtcatggcataaagtgaggcagcctgggaagtggctgctgagaacagcaggggccgggctcgcagctgtggcgcccccaaccctggtggtggccagtgcacatcggctcaaaggtcccacatcctatgtgtgaggtcacactgggggttcctgacaataatcagatcgagctttcaatttttaatgcaatatcctgtctactcactccaatctacctcacaacctttaaaaggacaacgtgtaccttcctttttttataggctgggaaaacattgaaaattaacaaagctcatgactgattgtttgacaacagcttaattgctaacattgaaagtctgctcttacagttgaggaaaagtacaaggtgtctgtatactgtttcatgagtaagttacaacagcaattaaaataaacataagacacttcatttttatgtaagaaatttcagattagcacaatgtgatttatgaaccatgacaattctcttaatatattactcagttataaaacatttttccttataagcccttcgacttacttctcaataatacatccttatatttatgaaaatgttaatattttgaatactttatttcatctttcataatgggcagaaacatactagcatttaataatatttcagcttttcttttcaaaaagaaacaccacaaaataggtcactgagaactttttgctgccaagatgaaaatgattatttgtcacacgaatttaataagttttagaagaaaatatatatatttccttgatctatttccttgtgaatttaaaccagcatgtaaagattataaaaaatagtctatttacatggcatagtatacctcagtgatatataaacaaggccataataaagcacagacacatccgactcctacggacacagctgagcagagtccacagacacaagagctaccgccgccctactgcacgttgtaggaactggcgaaatcctagaggaaatccaacacagaaaattcaatgataatattggccaaatttgcctgaaatgtcaacaattttataaaactattaaggtatgtataactaaatccatgaa

SEQ ID NO: 251788 - DNA, 577 bp, Homo Sapiens
  misc_feature (498)..(498): n is a, c, g, or t
  misc_feature (520)..(520): n is a, c, g, or t
  misc_feature (544)..(544): n is a, c, g, or t
  misc_feature (554)..(554): n is a, c, g, or t
aaaaaagtcaactacaatgctatattccatcgggattaatatgctgagcaatatttacatctccaaatatcaggtcacaatccctattatacgttgaagttagaatgataaattatcatatgctttgcatatcagagctggtatcacctttcccatagggaatgctgcctgaaattaacatattcccaaaggtaaaatgcatattctctgaaatgcattttattatgacaatgcatgtatttactcataaaaacaataaacacagacaattctacactagctctcaatctgtggatttaaaatttcaggttaaaatcagccatccaccttgtatagggagaagagttctgctagtgtttacaataaagtgattccttgggattagaaatagtaatgctgtttttttattttgaagtgggttctacttatgattggttttaattctgggcatttcatcttggccaactactatcctggtttaagccatggttgtcagcnaaaagggatttccgattaaacnaaagtgggtccagtgataagtacntacacacccnaccttggaataatcccagcccaa

SEQ ID NO: 251789 - DNA, 648 bp, Homo Sapiens
gaagtgggttctacttatgattggttttaattctggcatttcatcttgccaactactatcctgtttaagcaatgttgtcagctaaaaggaatttctgattaaactaaagtggtccagtgataagttacatacacaccctactttgaataatcccagccaaattggagaaaaatgctaccacactcttattaactaatgtaataaaatctcccaatttcatggtttactttttgctttaatcaactaaaagttaagttgctggtaaatatttacttttacccatattttgattttataatactgtttaccaaggcggtgatgtaggcaaagcttggggcaagaaaggcatgctctctacaggtctcattgctatattgagaggggcggctaatgtcataggtgtgggtagattcattggagatgtgatggtgacagggtgtgctatattcactggggcagtgacgggggtggggaggttgactggggtagtgagtgttaaaggagaggtcatggataatggactggttatagttacaggatgccctatgttcattgggctggttatgttaactgcacttgaaacatttactggacttctcatgctcattgcagctgccactgtgactgggtttgacatagtcccagacg

SEQ ID NO: 251790 - DNA, 694 bp, Homo Sapiens
  misc_feature (662)..(662): n is a, c, g, or t
gatattttatagtgtcagtcagtcaccccacagtctcctctctcttcttttctactgtgctatcctagaatcaaggatttcagcaacaatgcctctgttcaaactcccagctgaagagaaacaaattgatgatgcaatgcgcaactttgctgaaaaagtgtttgcctctgaagtcaaagatgaaggaggtcgtcaggagatttccccctttgatgtggatgagatctgtccgatttctcatcatgagatgcaagcacacatattccatctggagactctgtccacctccacagaagccaggagaaaaaagcgtttccaaggacggaagactgttaatttgtccattccactaagtgaaacatcttccaccaaactgtcccacattgatgaatacatttcctcatctccaacctaccagaccgtgcctgattttcagagagtgcagattactggtgactatgcctctggggttacagttgaagattttgaaattgtttgcaaaggtctgtatcgggcactatgcatacgtgagaaaacatgcagaagtcgtttcagaggttccctaaaaccccttccaaatacttgcggaacattgatggtgaggcttgggtagcaaatgagagcttctatacagtctttactcctcctgtgaagaagggagnaggacccttccgaacagacaccttcctgaaaa

SEQ ID NO: 251791 - DNA, 1870 bp, Homo Sapiens
  misc_feature (1857)..(1857): n is a, c, g, or t
ggctgcaggattcggcacgaggtccgacaggcgttcctgtccggccggtcgcgacctctgcggtttcggctgcagcagctggaggccctgcggaggatggtgcaggagcgcgagaaggatatcctgacggccatcgccgccgacctgtgcaagagtgaattcaatgtgtacagtcaggaagtcattactgtccttggggaaattgattttatgcttgagaatcttcctgaatgggttactgctaaaccagttaagaagaacgtgctcaccatgctggatgaggcctatattcagccacagcctctgggagtggtgctgataatcggagcttggaattaccccttcgttctcaccattcagccactgataggagccatcgctgcaggaaatgctgtgattataaagccttctgaactgagtgaaaatacagccaagatcttggcaaagcttctccctcagtatttagaccaggatctctatattgttattaatggtggtgttgaggaaaccacggagctcctgaagcagcgatttgaccacattttctatacgggaaacactgcggttggcaaaattgtcatggaagctgctgccaagcatctgacccctgtgactcttgaactgggagggaaaagtccatgttatattgataaagattgtgacctggacattgtttgcagacgcataacctggggaaaatacatgaattgtggccaaacctgcattgcacccgactatattctctgtgaagcatccctccaaaatcaaattgtatggaagattaaggaaacagtgaaggaattttatggagaaaatataaaagagtctcctgattatgaaaggatcatcaatcttcgtcattttaagaggatactaagtttgcttgaaggacaaaagatagcttttggtggggagactgatgaggccacacgctacatagccccaacagtacttaccgatgttgatcctaaaaccaaggtgatgcaagaagaaatttttggaccaatttcttccaatagtgcctggtgaaaaatgtagatgaggccataaatttcataaatgaacgtgaaaagcctctggctctttatgtattttcgcataaccataagctcatcaaacggatgattgatgagacatccagtggaggtgtcacaggcaatgacgtcattatgcacttcacgctcaactctttcccatttggaggagtgggttccagtgggatgggagcttatcacggaaaacatagttttgatactttttctcatcagcgtccctgtttattaaaaagtttaaagagagaaggtgctaacaaactcagatatcctcccaacagccagtcaaaggtggattggggaaaattttttctcttgaaacggttcaacaaagaaaaactcggtctcctgttgctcactttcctgggtattgtagccgctgtgcttgtcaaggctgaatattactgaagaatgatcctgttcaacctcctagtgcctctactgaattattcctcttttaaatggttaatgaaccaataatttttaaatcataccaaaaatagtaagaaaatatgcaaacactctgtgatcaaacttaaaagtcattgccattcatcattaataaaagttgccatttcaactacgtcccaacattccctaatagggtattcagggaacctgtcttaaattgtgcttatctaaatcttgggaactttgaggctaggggaggagaatgtattaggactaaatacaaactgcggggttgtaagggagtctcaggaacctcactggaatccttcactccagttaatgggcactgctcacttcctggcctctggctggcccacccatcactggtatgganggctttcaaggag

SEQ ID NO: 251792 - DNA, 404 bp, Homo Sapiens
ggatttcccaagtcaatactgcagcgcgacgatcccacacagtaacgatacctaaactggttaaacccaaaagcagtccactatgaatacagacacacaacgcgcacgcacgcacgcacacacatgatatttgtgaatttcagatagctttttactagatttgtagttagcttaaaaaccaaaaaccaacatgaagtgtgtggctgatgaatacctctacaaaataagccatgttacaatgagacgattagaaaagctcacttttgctggaaacatcccagagaggttcgatgtctgcctaagctgaagatgtggaagtatggttacagggttgtggacactagttagataactgcttaaaagcttatattaaggcaaataaaagctgattgctagaaaagcaa

SEQ ID NO: 251793 - DNA, 1991 bp, Homo Sapiens
  misc_feature (1829)..(1829): n is a, c, g, or t
  misc_feature (1874)..(1874): n is a, c, g, or t
  misc_feature (1915)..(1915): n is a, c, g, or t
  misc_feature (1948)..(1948): n is a, c, g, or t
  misc_feature (1980)..(1980): n is a, c, g, or t
ccgcctccccctgcctcagcggctgcccccgccagcgggccgcccgctcccccgggccttgcagcgggccccggcccggctggaggagccccgaccccagctctggtggcgggcagcagcgccgcggcccccttccctcacggggactcggccctgaacgagcaggagaaggagttgcagcggcggctgaagcgtctctacccggccgcggacgaacaagagacgccgctgcctctgtcctggagcccgaaggacaagttcagctacatcggcctctctcagaacaacactgcgggtgcactacaaaggtcatggcaaaaccccgatgccgcgtcagttcgagccacgcatccaataccagcagcctgtgggatttattattttgaagtaggtgtgaacatgaatagactaccaggttgggataagcattcatatggttaccatggggatgatggacattcgttttgttcttctggaactggacaaccttatggaccaactttcactactggtgatgtcattggctgttgtgttaatcttatcaacaatacctgcttttacaccaagaatggacatagtttagggattgctttcactgacctaccgccaaatttgtatcctactgtggggcttcaaacaccaggagaagtggtcgatgccaattttgggcaacatcctttcgtgtgtgatatagaagactatatgcgggagtggagaaccaaaatccaggcacagatagatcgatttcctatcggagatcgagaaggagaatggcagaccatgatacaaaaaatggtttcatcttatttagtccaccatgggtactgtgccacagcagaggcctttgccagatctacagaccagaccgttctagaagaattagcttccattaagaatagacaaagaattcagaaattggtattagcaggaagaatgggagaagccattgaaacaacacaacagttatacccaagtttacttgaaagaaatcctaatctccttttcacattaaaagtgcgtcagtttatagaaatggtgaatggtacagatagtgaagtacgatgtttcgggaggccgaagtccaaagtctcaagacagttatcctgtttagtcctcgaccttttagtagtcccaagtatgagccccagccatggaatgaatatccacaatttagcatcaggcaaaggaagcaccgcacatttttcaggttttgaaagttgtagtaatggtgtaatatcaaataaagcacatcaatcatattgccatagtaataaacaccagtcatccaacttgaatgtaccagaactaaacagtataaatatgtcaagatcacagcaagttaataacttcaccagtaatgatgtagacatggaaacagatcactactccaatggagttggagaaacttcatccaatggtttcctaaatggtagctctaaacatgaccacgaaatggaagattgtgacaccgaaatggaagttgattcaagtcagttgagacgccagttgtgtggaggaagtcaggccgccatagaaagaatgatccactttggacgagagctgcaagcaatgagtgaacagctaaggagagactgtggcaagaacactgcaaacaaaaaaatgttgaaggatgcattcagtctactagcatattcagatccctgggaacagcccagttggaaatcagcttgacccgattcagagagaacctgtgtgctcagctctttaacagtgcaatattaggaaacccacaatctgccaaagcaacctccacttgccctagcaatgggacaggccacacaatgtcttagggactgatgggctcgatncagggaattgggatcctggcggcattttgccacagtgggaaggantaccttacatttagctatggcattttcaaggagcttcacanttatttttgtgggccttttagttcaactggggngttggaccagttttggtggatttttgaatttnggtttttttaa

SEQ ID NO: 251794 - DNA, 701 bp, Homo Sapiens
  misc_feature (646)..(646): n is a, c, g, or t
gactcactgtcaacaacatcccatcctgaagacttgcttaccacaaccgagagcggggagtcagtttgaggcctagcatcacttaaacttcccccaaaggcacaaaagccagaagagaaaaatgaagacgggacattttgaaatagtcaccatgctgctggcaaccatgattctagtggacattttccaggtgaaggctgaagtgttagacatggcagataatgcatttgatgatgaatacctgaaatgtacggacaggatggaaattaaatacgttccccaactgctaaaggaggaaaaagcaagccaccaacaattagatactgtgtgggaaaatgcaaaagccaaatgggcagcccgaaagactcaaatctttctccctatgaattttaaggataaccatggaatagccccgatggcatatatttccgaagctcaagagcaaactcccttttaccatctgttcagtgaagctgtgaagatggctggccaatctcgagaagattatatctatggcttccagttcaaagctttccacttttacctcacaagagccctgcagttgctgagaaaaccttgtgaggccagttccaaaactgtggtatatagaacaagccagggcacttcatttacatttggagggctnaaaccaagccaggtttggccattttaccttggcatattcagccaacctcaggctg

SEQ ID NO: 251795 - DNA, 861 bp, Homo Sapiens
  misc_feature (333)..(333): n is a, c, g, or t
accaacagcaaaacaaattacgaagttcatagacgagatttgttcaacactgcaattgtttgttagatgtaaaccctgtgactatagtacgttgcttcttgttcttcacaattcatgacttaagtaccaaaatgcataccagttattatatattgccaagaattaaatgataaacttagagactgattagactgaaaatgcctaatcgatatatatattcttgtgcctagtactttaccacaaatacagtgtaatatcatcagtccaaaactgcattacttttgtaaaaacactggttaatttgtataagatattatagagctttttatgctnttagaagttaaacaatatctttgggggggaactaatttattttcatcacttgaaatgtggtagcgcttacaaagttgatcgattggattctttttaaaaatcaaaagccaagtgaacaacaggatatatagactgataaactatttaggctgacatagatattttacacacttgtcttcaacctgtgactctcgtctgtttacacttcgacacacacgacattactaacgacgttactgtttgtcaattatttctgaccctacctaatattgttacacaactctccctagttcgacgtattctatagaagttttacaaacggacacaaggacacctggacagcctattctctgtcctgcgagttcgaaatacaaccttacgacccttcattaatatatacccgcccaccaagaacattacaacacttttcataccaaggggtctaaaaaaccttatttaccaacccaaaatgcttccttgactccgtaggtatcaatatataggttaatcaatgggagggcggggtat

SEQ ID NO: 251796 - DNA, 288 bp, Homo Sapiens
cgcctcatcaatttcagataaaaagtactcacggaagtaaggactacaagctgacaaaatcaatctgtggcaaggaagacttttgtcacctgcttttagggtgcaatcgatgaattttttctcatccaggagatcttttagaccatcctgaagaagggtggattggtaaagccgcagttcctctgcaagttcccgctgggaatccattctgtgagaaacctgggtaaggaaggggacactgaaggccttagctccttgcagcacacaggtctagctgtaaaaaaaagc

SEQ ID NO: 251797 - DNA, 893 bp, Homo Sapiens
tcaccacggatttcagcagaggacctgattgacttgtgtgagctcacagtgacaggccacttcaaaacacccagcaagaaaacaaagtccagtaaaccaaagctcctggtggttgacatccggaatagtgaagactttattcgtggtcacatttcaggaagcatcaacattccattcagtgctgccttcactgcagaaggggagcttacccagggcccttacactgctatgctccagaacttcaaagggaaggtcattgtcatcgtggggcatgtggcaaaacacacagctgagtttgcagctcaccttgtgaagatgaaatatccaagaatctgtattctagatggtggcattaataaaataaagccaacaggcctcctcaccatcccatctcctcaaatatgaagaaccaagagtgtgactgccaaaacttagtgtggcatcagcaccaacagcacagttcttcatatccacgccactctcagacaaaactagatgtccagattgttgcatttccgtaaagtttgtcacgagacattttttaaaatctcataacccacatgttcagttatccatgcaagaaacttgactctacatgtattgctgaaagaattttcttaacagtgaaatctgatcatatatttttaccacactgccacataaagcccaagaaattcagctgacaagacagatttagcattatcaagaaatcccatttgccctgaaaaagctgtcctccattgtactgaacagacagtcctgtcgattgtgttatttagaaacatacactgaatgtgggctgaaatcatcatctttccataatgaaaactgagaaactattcacaatgcattccttataaataaatgctacatttagtaactcaaatcaccaa

SEQ ID NO: 251798 - DNA, 719 bp, Homo Sapiens
cattggtttcaggagggtagccagtagccaatattacagtatctattgattgttatagctaataggtatagccagcttctgatggagtgatctggatccttaaagaagctggaaaactcatcacaatcaaacaataacctaagagcttgattgacattggccagattatttcacagaactcttctttctgacaaaaatgaagatctgccaattggggtatatcctttccaatttacatatgtttgactctaaaggaaattgattagattttaggttcagccatttattcattgttataacctgaaccttgctaaactaactcccaacttccattttaccaaataagtaccccctataaaaccataacttgttttaaaaacagttagacatcagtgagtaccacatcctgttgtgtttgttcctctaaggttctttgcatctcccagtctgtgccaagatcctgaattaagctcagatttatcatagtcaacattagaataaactgacaattgactcagatattgtaaacagaggcacaattcatttgactactacctcccaagggaaacactttgaaagataatattcatttaattaagtttaggtgttttggggggtatctttacatatataatcacacctcatatactgtgttttaaaattattccagacagttggaattcattgtcccaaggtaaaatatatgatttatggctttg

SEQ ID NO: 251799 - DNA, 419 bp, Homo Sapiens
  misc_feature (391)..(391): n is a, c, g, or t
tttcttctggttcctggtccttattgctgctgttgttcacattaaaaagtgcaatggcaccaggcaggtactgctccctctgtgatggtcctccctttctgagtgacttataactaaaggaaccccttgcatgagggttttcattctctgattcttcagatgtagaggcactgtcatcatcctcagaaaaggagctgcatgctccattttccatccttcgtatttccttttcaatatctggtacaatcacattgggcatggttacaaaagactgctgtgtattgataatattgttcttcatggatagtttcatatctgaggagaaagaagtcttattagtggaaaggctatttttatatatttacatatataatcaaaagtttcaccctangtattagtctgtcctcatgctgctaata

SEQ ID NO: 251800 - DNA, 894 bp, Homo Sapiens
  misc_feature (101)..(101): n is a, c, g, or t
  misc_feature (158)..(158): n is a, c, g, or t
  misc_feature (202)..(202): n is a, c, g, or t
attccgtctagtgaagtataagggcagaatgaaatataatgagcttttccttctcactccacatttttatttacatactaccagattacaatggaatgaanatgtctcagcactaactctttcttaacgaattcttccagaataatataataaagcanacatgatgataacataaaatactgacccatccagaaagtaagcnctggacatggaggtccggaacaggaatcacatgagagaaaagggagatgatatgttaaaatggattactttaaagatctcatttcctcagatttatgaaacattttaaatcttttgttgccacaaaacatgaatctgtccacccactggttcccaaggcctctcccactctgagaagatcagagtctcccataaagctccttgcttcaggacaaggagcaccaatgtcaaggaatatgcttggtgttggacacacattgccaggatgtgatgaagtcaccaagaaaagaggaagagaagggtgttctgtgtcttctctgccttctgtcagatggtttagacatggtataggatttctttttgttcatttatcgttgtcagtgagtatgtagaaaagtatatatcatgaattgtctaaaccaccacattaaccctcaaaacaccacagttttgacacacctactggatacaactttgaccatgtattctaatatattacatcttctaagtctcctttttctaggtcatttaccccagaagatgtgacatatgttatcttcaggtacagaacagtccgctattaataagcacaattaacataaattatctcacttgattctcattagaactttagtaggtacacaacagaatagcttcatatgaggtattcatagaacattctgcttctggttc

SEQ ID NO: 251801 - DNA, 886 bp, Homo Sapiens
gagtagagaagaatttactgctgattaaggttgtgtttttcaacctgcaatcccgagaccctcagaataaagattacttgaggttgctatgaaaaatacagattcctgtcctccccctggctgaatcagaatctcataaggtgaggctcaggtttcggcacttttcacaactctgtaatgggttacagttgcaccctagatgtttgagaaccagtggcctaaagagaatgcaacctaagaggggcaaggctagtgcatagcttaaatcgctccagcctttggtaatcccttctaaacacagtaccacccatgtggaggagactgcaaggaagctgttattcaaagtagaacagtcagccttgtgcttgagtcctgctttatgcttgcgtgtttcataacaaaacacaaaggcaagtcttcatatcagcacttagtcttgatatccaagtagctgactactgtacttatgataacagcttgaagaggactgcgactctcccctcacgaatggtgacagagttggcttgtcacacctggctcagggaagaaaaatgagtaaacccctacctctttactcttgagtcctcttccaccctaatactgttaacacatcatcctgtgtgattcaaataatctggcagatgaaatacagaaaatctaagtcatattgttcttatcactctatggccagatattatactaatctaattttaaaaatccttttctgtgcaatagaaataaccaagctcattctgtctcctttcctttctaatgctgttgataggaacaaatatcaagtaagatacatgctagagatgttaaattcatacaagtaaagtaaattcggacgcgtggtcgacgatatcccgtaattccgggccgtacc

SEQ ID NO: 251802 - DNA, 561 bp, Homo Sapiens
aaggaagagcacaagtgaaggtacaattgttgtaaaaaatggaaactattcaagcattgggggaaggaaagaaagaagaatgggtttggtcagtggattagcaggagagtaaagtgagctcagggtatgggcctgcaagaccagctaaaagtaaggactttctttggtcagcagagttataattgggaatatcttgatcgatttggtggcagcatgcaacatagggtggaggagaagggaggactggggcaaggagaccaagttgcctattgtaatgagcaaaaggtcgaccgggcctggacctaactctgcttcataaatacccccaagaaaagtccagtattactgtgacagagggtacaccatgaccataaaggaaaaagaagcaaagatcaaaatataataataatgcctggattattaataggagcttctctaaaggatgggtgtcttgtttttgcagggtctttgcttgcaggattgtcagcatgcattagatgatgcgtggacctgcagtgttgaacatttgttcaaaactgtgctttagccagtatattatga

SEQ ID NO: 251803 - DNA, 816 bp, Homo Sapiens
  misc_feature (537)..(537): n is a, c, g, or t
  misc_feature (603)..(603): n is a, c, g, or t
  misc_feature (672)..(672): n is a, c, g, or t
  misc_feature (713)..(713): n is a, c, g, or t
  misc_feature (715)..(715): n is a, c, g, or t
  misc_feature (717)..(717): n is a, c, g, or t
  misc_feature (722)..(722): n is a, c, g, or t
  misc_feature (757)..(757): n is a, c, g, or t
  misc_feature (777)..(777): n is a, c, g, or t
ggggaggtcagaccggttgctttcccgggagttcggcgtttgctggggctgcagcagctgaagtgtagtgttttcttgggactggcggtctgcacttctctcccggggtccatctccccccgcccggtggtgaggccctcgaggagggctcggacgggtgtagcgatccgcgctagaggaagacgaggcccgggaacgcatggcccccagggcaggttagggggctggaggggtcaaatcccgcggtacttgtggagactctttagcgtggcttcttctctctgctgagaccccgagagctttcccagttctcctcccaggaccaccggggttcctgaagatcgggacttttctgcgcccctccaccaacagcccatctcctgtctatgaagaaagacccttcgtagaaacaacttccccgctgctgacgcgttttcccgtcccgtccccgaagtagtctactatgacctcgttgtgagcctctgaacgattttgacactttcccgaggcctagggtattatatcctaaccttactnaagaccacagaggtgcttgccattatgggaaatcagcttgctggcattgctccctcccagatcctnttctgtagagagttatttttcagatattcatgactttgaatatgataaaagcctgggggagtactcggntttttttaagttgctcgagccaagcacgagaaaggctgggncncnttggnggaaggttttttgcaatttcaggatcccacattgncctttaaccagctataaacnaggagctgggaggaaacttgaaaaatcaggctaaattct

SEQ ID NO: 251804 - DNA, 753 bp, Homo Sapiens
  misc_feature (340)..(356): n is a, c, g, or t
  misc_feature (700)..(700): n is a, c, g, or t
catcatttacttgtaatatccacaatgttaatatcacatagtggtactgtatggacaatactatttacaagtaaaatgtttagatctggaaattcatattgaatattagatgcagtaataatattttgttatttaacatttctaggatacatatatattggtcattatacaaattggtgatttttactagacatagtgaaagatagtatttgatatgtagagtggattaaacagtagcatttttaataatacatgctctaaaaatgtaaaagatacggaaaagagggtaggttattaaaagattctaattcattgtccagcaaaatccttggtgatgaannnnnnnnnnnnnnnnngcttttgagatctttggttttgagttcaggctgctaccatgaaatggaattcctaaagaaactccctgcttaagcagcacacagtgcccattgttcactggagttggaattttcacatatgcctaactctgttggggctattctttctttctaatgtcacaactcaactgtgctcttggtattaatattggagaaggaaaatctgtgctctgttcttgtttctatgtaacccacatttctaattctttgtgcggcacttcctccttacaatttaacaaatagaggaaaaacttaatttcaacattatctgcatttgcaagcaatacaaaacaagtttattctcngtggattattttgaagttctgaaatttttcttttgaaatatctattggaaatg

SEQ ID NO: 251805 - DNA, 633 bp, Homo Sapiens
  misc_feature (580)..(580): n is a, c, g, or t
gggcgaggagaggaggtgaccccgcgaaagataataaatcatcattgatcaagatgtcttcagcacctgagcctccaacattcaaaaaggaaccacccaaagagaaagagtttcaaagcccagggctcagaggggtgcgcacaacaaccttatttcgtgctgtgaatccagagctcttcattaaacctaacaaacctgtaatggctttcggattggtaactctttcactttgcgtggcatatattggttatctacatgcaatacaagagaataaaaaggacctctatgaagctattgatagtgaggggcacagttatatgaggcggaaaacatccaaatgggattagtagtgctggttagtgcagatggacctttattaaaggttctgaaatcttcaaatgaaagaccttgtgagtgtacagtatcatgtttcttgttctagaacatgctaatgaagagagaagatagcagttgcaaccagacaactgtcgtaaattttgtcctttcacagctgcagccattatctcattctttttccacagagtgagcgtcataatatttttctttccttacctcttantaaagtgccatgagaatggaaagtgtttttgttaattattaaattctgtataa

SEQ ID NO: 251806 - DNA, 1002 bp, Homo Sapiens
  misc_feature (38)..(38): n is a, c, g, or t
  misc_feature (70)..(70): n is a, c, g, or t
actatatagaaaccctcagttaagactggaagacatanatcttaatggttggatactttatttcttcaanactctcaagaactcactttgttgagataactctgttacctcttgcaaaaatgcagctctaaaaaaaattgaaatcaaatgttcaagtttaaattgtactgtagcagtgttaaattttctaaaattaactaggtcaacctagttctaaaattaactaggtcaactaagtcaagtcctaaactttatggattatcctaaatggttatcttctccccctaaatctccaacctctacagtctaagttcaaaacttgttttcaagaaaggagaaaatcaacaccatggttgctttgaactccaagagatttttctgctcttgttcaataaactagggacattacattctcaatctgatgcacctggctgaaactcaatactgtggctagtttcctggttcccaacctctcttcccacccctcccacttttgactccatagagacaaaagatctctctggcaaaagggaaaatactatacttccctcagattccaaaagaagcaaagcattattctattacagggacagccctgtattagggccagggtactaaatgagtaccatctctgtataatagtcatctgtgtcataaatgaactgaatgagagtcataactgtatttaaaatttgatgaaattgccttgggatcataaaaattgttgccctttgaaggaagaataaacacaaacattagaaaagccaggaaaattagtatatggcttggaccacaaagtaaggaagcaagctattgacctaggcgcaaagtatcatagattcttaaggttttcatcacttttgtcatatatgttagctatatacaccaaaacataagctcctgagtgttggattttgtttgaattgattttgtacactctctagggccctggttattgtaggtggctcaatacacatttgttaaatgaagattaaaatctcc

SEQ ID NO: 251807 - DNA, 220 bp, Homo Sapiens
aattttcaggctgaataattatcagaacttaattattaaggaataacagtaacagctcagctaatatgtaacattcactgtgtgccaggcatggctcctctaagtgcttatatttaactacattaactattaagcatgcaataaaaaacacatctgtcataatatgacaaagctgctgttttcagaacaaaaaaactttcaataaaaagttcatgatttt

SEQ ID NO: 251808 - DNA, 1196 bp, Homo Sapiens
gagagggccggagcgagaagatggcgaagacgtacgattatctcttcaagctcctgctgatcggcgactcgggggtaggcaagacctgcctcctgttccgcttctcagaggacgccttcaacaccaccttcatctccaccatcggaattgattttaaaattagaacgatagaactagatggaaagaaaattaagcttcagatatgggacacagcgggtcaggaaagattccgaacaatcacgacagcgtactacagaggagccatgggcattatgctggtctatgacatcacaaatgaaaaatcctttgacaatattaaaaattggatcagaaacattgaagagcatgcctcttccgatgtcgaaagaatgatcctgggtaacaaatgtgatatgaatgacaaaagacaagtgtcaaaagaaagaggagagaagctagcaattgactatgggattaaattcttggagacaagcgcaaaatccagtgcaaatgtagaagaggcattttttacacttgcacgagatataatgacaaaactcaacagaaaaatgaatgacagcaattcagcaggagcaggtggaccagtgaaaataacagaaaaccgatcaaagaagaccagtttctttcgttgctcgctactttgatgaactctttctgagagactgcagcacacctagagggccctttcctgcttctctgaaagcacaggtcacccagcctcagaatcacacctcccggctgctgctgagagcaccactgaacttagacctctcaacacagtatgccaagtggattccagcctcatggcctagcaaaagaacagactccctttttcaaacatggaagcaatgaagtggagacacatgcaggacctaactcgttttttccttgttttattacctgttgcagaagcggttatctttcttttttactttgcacatcagtgttagcctttccctatttcagcacaatcttagactcatatttgcacacttttgtgtcgtgaagttctagacaaatttgtacatgtggcaatgttaaaagagcatttacagcagaggttaatatactaaaattaaagggtatttggtctggttcatatggtcaaatattactgccttggtagcatttatttaagggctttttcttaaataagaatcattaaagtcattaaaaaaatttactgaaatgccgaa

SEQ ID NO: 251809 - DNA, 309 bp, Homo Sapiens
  misc_feature (294)..(294): n is a, c, g, or t
ctagggcctcccaaagtgctaggattacaggtgcgagttacaacacctggccaacctttactccttattacactaactttatcgttagtgttctactctacccacaactctggggaaactgaggctggggtagcttgctggtgcactagtaattccaaacttgaacgggagaaatgcttattcggaagcactgtctttatatagtttgcaagttgtcattactttttatttttagagacatgtcttgttctgttgcccaaggctggaatgcagtggcatggcccaatgcaagtngaatggtgataagcg

SEQ ID NO: 251810 - DNA, 1954 bp, Homo Sapiens
ggttggaggcaggcgctcgctgaggcaaaaggaggcgctcggcccgcggcctgacagggacttagcccgcagagatcgaccccgcgcgcgtgaccccacacccacccactcatccatctatccactccctgcgccgcctcctcccaccctgagcagagccgccgaggatgataaacacccaggacagtagtattttgcctttgagtaactgtccccagctccagtgctgcaggcacattgttccagggcctctgtggtgctcctgatgcccctcacccactgtcgaagatccccggtgggcgagggggcggcagggatccttctctctcagctctaatatataaggacgagaagctcactgtgacccaggacctccctgtgaatgatggaaaacctcacatcgtccacttccagtatgaggtcaccgaggtgaaggtctcttcttgggatgcagtcctgtccagccagagcctgtttgtagaaatcccagatggattattagctgatgggagcaaagaaggattgttagcactgctagagtttgctgaagagaagatgaaagtgaactatgtcttcatctgcttcaggaagggccgagaagacagagctccactcctgaagaccttcagcttcttgggctttgagattgtacgtccaggccatccctgtgtcccctctcggccagatgtgatgttcatggtttatcccctggaccagaacttgtccgatgaggactaatagtcatagaggatgctttacccaagagccacagtgggggaagaggggaagttaggcagccctgggacagacgagagggctcctcgctgtctagggaaggacactgaggggctcagggtgagggttgcctattgtgttctcggagttgactcgttgaaattgttttccataaagaacagtataaacatattattcacatgtaatcaccaatagtaaatgaagatgtttatgaactggcattagaagctttctaaactgcgctgtgtgatgtgttctatctagcctaggggaggacattgcctagagggggagggactgtctgggttcaggggcatggcctggagggctggtgggcagcactgtcaggctcaggtttccctgctgttggctttctgttttggttattaagacttgtgtattttctttctttgcttcctgtcaccccaggggctcctgagtataggcttttcagtccctgggcagtgtccttgagttgttttttgacactcttacctgggcttctctgtgtgcatttgcgtctggcctggagtaagcaggtccgacccctccttctttacagcttagtgttattctggcatttggttaagctggcttaatctgtttaatgttatcagtacattttaaataggggcattgaaatttactcccaccaccagggcttttttgggggatgcctgggcctttaaaacactagccaaactctaattaattctcaaatcactgccaggagttcttgctcctggctgcaggcccaggccccaaggtctccttcttggggtcacaaacagcagtaaggaagaggaatatatagcaactcagggcctgggaattgtggggcaatccgttcttagggactggatacttctggctggctgagtatagtactagctgcctccccaccaggttccgagtagtgtctgagactctgctctgcagggcctagggtagcgctgggagtgtagaagtggcctgcccttaactgttttcactaaacagctttttctaaggggagagcaagggggagagatctagattgggtgagggggacggggatgtcagggaggcaagtgtgttgtgttactgtgtcaataaactgatttaaagttgtggttggtctattctttatttctgaactaggaccaactccctaccaaactgttttgactccagagcctaataaatagaggtgtggtgc

SEQ ID NO: 251811 - DNA, 473 bp, Homo Sapiens
  misc_feature (20)..(20): n is a, c, g, or t
  misc_feature (27)..(27): n is a, c, g, or t
  misc_feature (40)..(40): n is a, c, g, or t
  misc_feature (55)..(55): n is a, c, g, or t
  misc_feature (62)..(62): n is a, c, g, or t
tgaacctatgccctcaaacntgccttngggaaaggccccnaaaaaaaacagagcnccccaancccctgaaaaaccccttaagcctccctgggcctttgaagatttgtaccgcccccaggcccatcccctgtgtcccccctctcggcccagatgtgatgttccatggtttatcccccctggacccagaacttgtcccgatgaggactaatagtcatagaggatgctttaccccaagagccacagtgggggaagaggggaagttaggcagccctgggacagacgagagggctcctcgctgtctagggaaggacactgaggggctcagggtgagggttgcctattgtgttctcggagttgactcgttgaaattgttttccataaagaacagtataaacatattattcacatgtaatcaccaatagtaaatgaagatgtttatgaactggcattagaagctttctaaactgcaaaaa

SEQ ID NO: 251812 - DNA, 516 bp, Homo Sapiens
  misc_feature (459)..(459): n is a, c, g, or t
  misc_feature (468)..(468): n is a, c, g, or t
  misc_feature (475)..(475): n is a, c, g, or t
  misc_feature (484)..(484): n is a, c, g, or t
gcgctcgctgaggcaaaaggaggcgctcggcctgcgcgcgacagggacttagcccgcagagatcgaccccgcgcgcgtgaccccacacccacccactcatccatctatccactccctgcgccgcctcctcccaccctgagcagagcgccgaggatgataaacacccaggacagtagtattttgcctttgagtaactgtccccagctccagtgctgcaggcacattgttccagggcctctgtggtgctcctgatgcccctcacccactgtcgaagatccccggtgggcgagggggcggcagggatccttctctctcagctctaatatataaggacgagaagctcactgtggacccaggacctccctgtggaatgatgggaaaacctcacattcgttccactttccagtatggagggtcaaccgaggtgaaagggtctctttcttgggggatggcagttcntgttccagnccagagnctggttttngttagtaaattcccagatgggattatttagct

SEQ ID NO: 251813 - DNA, 666 bp, Homo Sapiens
atccaggccagatcctattataaccaactctcaggatttacagccttcagttgtactagaattttgtttttatccaatactcattaaataagtgggccacttaggaagattcaaaatcttggttattacatgaagtttgttatatttcttgtcaacagtattgaaatgtaatatgtatgtgttcatgtatgaaaatttttactccacacaggtgtttcagtagagtggggcaggaaaagagatctcttcgatttctttcaggcctgaggcttttgtgaaatgcgccagccccctgtgacagtaggttttgatgctagtgatcttcagatctttctctctggaaatgtgcagagagtgtcagtttcccaagttctgaggtaactctcagcccagatgtgaaatgggagcctaccagctggtatagaagggaatgggtaggaggcactgggtgctgactcattcagcactgtcccttttctatactgctgatacatcccatggttctgagaagccttatctcagtctatttggaagagagggaggaagagaaggaagtaacccaaagtactactcatttatccttgtatattgattagttaaagggataattaatttaatgctgaggagagtttgacagattttgaaaatgagtaaaggcaaacagaa

SEQ ID NO: 251814 - DNA, 977 bp, Homo Sapiens
gggggcagccagtgagaaggccgtcaagatggcggcctcctggaggctgggctgtgatccgcggctgctgcgttatcttgtgggcttccccggccgccgaagcgtagggctggtgaagggggctcttgggtggtccgtaagccgcggagctaattggagatggtttcacagcacgcagtggcttcggggtgatcccattaagatactaatgccatcactgtctcctacaatggaagaaggaaacattgtgaaatggctgaaaaaggaaggtgaagcggtgagtgctggagatgcattatgtgaaattgagactgacaaagctgtggttaccttagatgcaagtgatgatggaatcttggccaaaatcgtggttgaagaaggaagtaaaaatatacggctaggttcactaattggtttgatagtagaagaaggagaagattggaaacatgttgaaattcccaaagacgtaggtcctccaccaccagtttcaaaaccttcagagcctcgcccctcaccagaaccacagatttccatccctgtcaagaaggaacacatacccgggacactacggttccgtttaagtccagctgcccgcaatattctggaaaaacactcactggatgctagccagggcacagccactggccctcgggggatattcactaaagaggatgctctcaaacttgtccagttgaaacaaacgggcaagattaccgagtccagaccaactccagcccccacagccactcccacagcaccttcgcccctacaggccacagctggaccatcttatccccggcctgtgatcccaccagtatcaactcctggacaacccaatgcagtgggcacattcactgaaatccccgccagcaatattcgaagagttattgccaagaagattaactgaatctaaaagtactgtacctcatgcatatgctactgctgactgtgaccttggagctgttttaaaagttagg

SEQ ID NO: 251815 - DNA, 1168 bp, Homo Sapiens
ggcctgggtggcgaattcggcacgagggagatgtcgctgctgcggtcgctgcgcgtgtttctggtcgcgcggaccgggagctacccggctgggtctcttctgcgtcagtcgccccagccaaggcacacattttatgctgggccccgtctgtctgcctcggcctccagcaaggagctcctcatgaagctgcggcggaaaacaggctactcctttgtaaattgcaagaaagctctggagacttgtggcggggacctcaaacaggcagagatctggctccacaaggaggcccagaaggagggctggagcaaagctgccaagctccaagggaggaagaccaaagaaggcctgattgggctgttgcaggaaggaaacacaactgtattagtagaggtaaactgtgagacagattttgtttctagaaatttaaaatttcaactgttggtccagcaagtagcccttggaaccatgatgcattgtcagaccctaaaggatcaaccctctgcatacagtaaaggtttcttgaattcctctgagctttctggacttccagctgggcctgacagagaaggctcactcaaggatcagttggctttagcaattggaaaactgggagaaaacatgattcttaaacgagctgcatgggtgaaggtgccatctgggttctacgttggctcttatgtccacggagcaatgcagagtccctcacttcacaagctggtgctggggaagtatggggccctggtcatctgtgagacgtctgaacagaaaacaaaccttgaagacgttggccgccgccttgggcagcatgtggtgggcatggcccccctctctgttggctccctggacgatgagcctgggggagaggcagagactaagatgctgtcccagccgtatttgctggatccctccattaccttggggcagtatgtgcagcctcagggggtgtcggtagtagactttgtgcggtttgaatgtggagaaggtgaagaggcagcagaaactgaataggttccagagacttttggcccaggaggaatatttacttttagctctggacatcattacaaaaaggaatatttcccaaacctcttcagaccgagaatgcatgggtaaaattattaaatagttgtataataaaaataattttttccttgtttgcgtcaaaaaa

SEQ ID NO: 251816 - DNA, 2053 bp, Homo Sapiens
  misc_feature (1787)..(1787): n is a, c, g, or t
  misc_feature (1842)..(1842): n is a, c, g, or t
aacactgtctctgaaggaactcactttctagagacaatagagactccaagacctggaaaactcttccccaaagatgtaagcagctccactccacccagtgtcacatcaaagagccgggtgagccggctggctggtaggaaaacaaatgaatctgtgagtgagccccgaaaaggctttatgtattccagaaacacaaatgaaaatcctcaggagtgtctcaatgcatcaaagctactgacatctcatggcatgggcatccaggttccgctgaatgcaacagagttcaactatctctgtccagccatcatcaaccaaattgatgctagatcttgtctgattcatacaagtgaaaagaaggctgaaatccctccaaagacctattcattacaaatagcctgggttggtggttttatagccatttccatcatcagtttcctgtctctgctgggggttatcttagtgcctctcatgaatcgggtgtttttcaaatttctcctgagtttccttgtggcactggccgttgggactttgagtggtgatgcttttttacaccttcttccacattctcatgcaagtcaccaccatagtcatagccatgaagaaccagcaatggaaatgaaaagaggaccacttttcagtcatctgtcttctcaaaacatagaagaaagtgcctattttgattccacgtggaagggtctaacagctctaggaggcctgtatttcatgtttcttgttgaacatgtcctcacattgatcaaacaatttaaagataagaagaaaaagaatcagaagaaacctgaaaatgatgatgatgtggagattaagaagcagttgtccaagtatgaatctcaactttcaacaaatgaggagaaagtagatacagatgatcgaactgaaggctatttacgagcagactcacaagagccctcccactttgattctcagcagcctgcagtcttggaagaagaagaggtcatgatagctcatgctcatccacaggaagtctacaatgaatatgtacccagagggtgcaagaataaatgccattcacatttccacgatacactcggccagtcagacgatctcattcaccaccatcatgactaccatcatattctccatcatcaccaccaccaaaaccaccatcctcacagtcacagccagcgctactctcgggaggagctgaaagatgccggcgtcgccactctggcctggatggtgataatgggtgatggcctgcacaatttcagcgatggcctagcaattggtgctgcttttactgaaggcttatcaagtggtttaagtacttctgttgctgtgttctgtcatgagttgcctcatgaattaggtgactttgctgttctactaaaggctggcatgaccgttaagcaggctgtcctttataatgcattgtcagccatgctggcgtatcttggaatggcaacaggaattttcattggtcattatgctgaaaatgtttctatgtggatatttgcacttactgctggcttattcatgtatgttgctctggttgatatggtacctgaaatgctgcacaatgatgctagtgaccatggatgtagccgctgggggtatttctttttacagaatgctgggatgcttttgggttttggaattatgttacttatttccatatttgaacataaaatcgtgtttcgtataaatttctagttaaaggttaaatgctagagtagcttaaaaaagtgtcatagtttcagtaggtcataggggagatgagtttgtatgctgtactatgcagcgtttanagttagtgggttttgtgatttttgtattgaatattgctgtctgttacaaagtcangttaaaggtacgttttaaatatttaagtttattctatctggggagataaaatctgtatgtgccaattccaccggtattaccaattttattattgtaaacaaaaagattttggcatggacctggttccggaatggtttccaggggaaaaaatggtcttttaatgctttttttccagaaattaacacagggttatttcctataacgggaattt

SEQ ID NO: 251817 - DNA, 385 bp, Homo Sapiens
  misc_feature (258)..(342): n is a, c, g, or t
acaccaaaaagagactagacggaaacaagcccatttcactgataaacctacataaatacacgatcgaaaggggcaacaggttcatagcagctaacaccctaaagtgtacctcttaaaattaaggcaatgaaatggctacagttcctaaggttatttttacggaacaaaaatatacatgtattttcctcctcaagttcaggcatcagagtatgattagtgacttgtattacacaaaacctgcagcactgggttgatgtnnnnnnnnnnnnnnnnnnnnnnnnnnnnnnnnnnnnnnnnnnnnnnnnnnnnnnnnnnnnnnnnnnnnnnnnnnnnnnnnnnnnnctcgtgccgaattcctcagcccgggggatccactagttctaga

SEQ ID NO: 251818 - DNA, 939 bp, Homo Sapiens
  misc_feature (410)..(428): n is a, c, g, or t
gtatgaactgcccacctcaaatgggcagtctgacctcttccacagtctttaagaaacagaagagccatttgcattatttaatcaccattcaataatctcctccctccccatagctgcttgagttaactgtcccacaagtgtcctgtgttttgtaaagatgagggttattttctggaatgcagatgggactaggatgaagctgtattatcaattacagagacagccaactctcattcctcttaaagcaaaaattcactccactgtgatttctccaggtatttcctgcaattctaaatccgcccttgatattagagaatattaaaatcacacagttgtggcaaaaatcacattgtggctattaaatcctttttgtgaactaaaaaaagtgaatgtggcttaggctaagctgnnnnnnnnnnnnnnnnnnnaaagatgaggatgcggactccaacaaaggcattaagaaagtactagatgaaaatgagaaatatgtgaaggataacatgtgaaatgtacactcaggtctaacaaatacctattatttctctggttaagaaggtttagcaggagcctccaatgagcactgtatgtagagaaaagggaaggagcaggaggaggaacagatctgcacagaatttttttcttaaaaaccacaaagggtgacttttttcttctaagcaagcaagcctgagaggcattacatgggctggctcctaatatcaaaacaaaatatttctttgccacaaaggaacttgactatgtagcaacacatttacaaaactactgcaaaacactcccagagggcagtgacctactctgctccccagaggctccaagaagcaaggcctcaagtgcctcatgttccatggggctgtgcagtgcaatgcagaaggcggaaatcctgctgtgacgccaccctcgagaccttctgcagcctga

SEQ ID NO: 251819 - DNA, 699 bp, Homo Sapiens
cagctcagaccaggaagggagcttgtctgagctggaccggaggatccaggagtgtgccttcaataagtttgagggagaggaagaagaggaggcaccagggcagggaggagaagccatcccatagccccgaggttcacagcaagttctgtgtctccaaccattggattggactagcagctgtgttgctgcttcttcatcatcagacacacacaatgtatatgtcagtgcaaaaagccagcctgtgtgagctcagcaaccccatttccagattttgttctagtttccctatgcgtagaagctagccactttataacattttatattagagttaggtagcccttggggcctatgcaagctgctattgtacttagaatgggacccaatgggtagcctcaagattaccatggatcctttcaagatttttctgagttattctccattcttgtgcttgaactggagcaagctggaagtagaggagttgggcttcttcttggcttctcagccagaattctaagtggttatttaagttgttccatatacaagtgttatcttccaatgttatctccccaccatagcatttgagcaccccagaacaaaccactgagactctggggatcctggcagggtcttcaggtgctggggcttgaacatgaaaaactgtgcatccaagtaattgcaggtttcatctgtgatcttctc

SEQ ID NO: 251820 - DNA, 654 bp, Homo Sapiens
gaaaaacgaatcattctccctaaagaagaggaagttctaccagttgaagtgactgaggagcctgaagaagagcctatttcagaagaagaaatcccagaagaaccacctagcatagaggaagttgaagaggtggcaccacctagagtgcctgaagtgattaagaaagcagtacctgaagcacctactcctgttcctaaaaaagtggaggcaccaccagctaaagtgtcaaagaaaattcctgaggaaaaagtacctgttcctgttcagaaaaaagaggcacccccagccaaagtgcctgaagtaccaaagaaagtcccagaaaagaaagtccttgtgcctaaaaaggaagctgttcccccagctaaagggagaactgtccttgaagaaaaagtatcagttgccttccgccaagaagtagtagtaaaagaaagactagaattagaagtagtagaagcagaagtggaagaaattccggaagaagaagagttccatgaagttgaagaatattttgaacaaggcaagtttcatgaagtagaagaattcatcaaattagaacaacatagagttgaagaagaacacagagttgaaaaagttcatagggtaatagaagtttttgaggctgaagaagtggaagtatttgaaaaaccaaaagct

SEQ ID NO: 251821 - DNA, 954 bp, Homo Sapiens
tgggtgtaccggtccggaatttcgggatatcgtcgacccacgcgtcgcgggaacgccggctcccggcatgcctgcgcgctgacagccttataaatagtcgcctttgccggccgccgcgaggacgggcagggcacgcactggccccggcgcccacccgcacccctccccagagcactgacacggctcccgggacctcggcaggatggaagagaagctgaagaaaaccaagatcatctttgtggtgggtgggcctggctcagggaagggcacccagtgtgagaagatcgtgcagaagtatggctacacccacctctccaccggggacctcctgcggtccgaggtcagctcaggctcggccaggggcaagaagctgtcggaaatcatggagaaggggcagctggttccactggagacagtgttggacatgctccgggatgccatggtggccaaagtcaatacttccaaaggcttcctgattgatggctacccgcgggaggtgcagcaaggagaagagtttgagcgacggattggacagcccacactgctgctgtatgtggacgcaggccctgagaccatgacccagcggctcttgaaacgtggagagaccagcgggcgtgtggacgacaatgaggagaccatcaaaaagcggctggagacctattacaaggccacagaacccgtcatcgccttctatgagaaacgtggcattgtgcgcaaggtcaacgctgagggctccgtggacagtgtcttctcccaggtctgcacccacctggacgccctaaagtagcaacgctggagccgcttccccagctcagagccccgccccaccccgtcctgattagaggtcctcctggcctgagcgcagcgcctccaccctgccctgctgagcacagacggaggaagccgcttatcctgttttcatggacagctgagcactaaaggaatttctaagga

SEQ ID NO: 251822 - DNA, 1351 bp, Homo Sapiens
  misc_feature (1291)..(1291): n is a, c, g, or t
ggcctccaggatcaactgtgggcaaagtgcctgcctctgacctcatcatggttctagttctcatacagaactccagaatttttaaagaactctataattggattgcaaactaggatgctacataggattctggtattccacatccaatatggatttctagaatgctgtgattaaaggagccagccaggtgtaatacagtcaaggcagcccccagcctagagacaatctgtgaaatccaaagttggtggtgttgggaaagcagggggacatgtgtccctcagctcagcagaggctgtggtacaacatggtccttggtgaagacctgcacccctggaacctcccaccatcatcacaactgtagtctcatttgcagtggagaaaagaacccgacgtcccacagccagatatacacccagctccatgccagcccttcatgtttaccttttgctttgttaattacatgtcagactcctagagggcctccagactaataggaagcatttctgtaaccaacctgccacccactgattcagaaatggaaatcacattccacaatctatggcttctaccagctagcccaggaaatacttgaaatcagcattccaattagtgttgagtctcttgattgtgtcatttaccaattaaataactgagacctaagtctgggaacagagccacgaatctgcctttgagatgctggcagatctcaaggccatcaattattgggggagggagggacaaacactcccaatcatccaccagtcagactgaatgtgtagctggcgaggaattacttccacttctggcccagcacaagccctgctttggccacctgtctgcaagagaggcggcccctgtgcttgcaacgcttacgtgttgatcccagtgtccttttccaaatgagtactgtagctttagaagtggccctctatagaaagaagtcaaaagatgaggccccttctagaatctaggataacaagagtgttgacagtttgaggagtcgaattgagattcaccatcaaagagcaatgcagcgtcgttaaaataaaaactgtgccttttaaaaagaaaaatgcaaatatagagcaaatccctaaacttgaaccatttcctagtgctttgctagacaaacataaaggggcagggttgtggggaggggaacgtttttggtggtgtgtgcagttcctactggatgagtgtgtgtttcttaatgtctcatttcaagcaggagatgttgggtctggagcaagatctgagactgagatgtcccccaagggtgacaggtcagatntatttcagtcagtgcaagtcacactccaaactaaaggctgggcagtgcgtttagtctgtg

SEQ ID NO: 251823 - DNA, 1238 bp, Homo Sapiens
  misc_feature (39)..(39): n is a, c, g, or t
  misc_feature (506)..(506): n is a, c, g, or t
gcctcatgtcctcccaatagatactgaaaccttatttanttaaatacctttgtataatcccaccttatttattgtaccccagtttgcaaatgctccctcagggcacttgagggaataaatataaaacaaaaatgaagttgcttccctattgccggacaactgcacctgtgacaggtggctggtctttctggggcaacctgggaaagattctgggactcgggggccacttgttaccataaccaagagctgtctgaaggcaaatctacaagtcaaggtgcagtgaagtctccaagtaagaaacctgtcaccctctgaagtgtgtaggcttatctactgatgatgagctatcaaacaaggagagaatacatcagcgcagctcacgaggccttctgagaatttcacgggacagaactgggccaaaaggaaaagcactgtgtgcgacagaagggtagcagaggagcgagtggtacacagaagacagatagaaggcagtattcttcagaccnccattggagaagaagggtctttgcgagcaggtgagcacttgccttctgaactgtgcgacagggtgagcatcccaggtgtgctggctgggggcttgcatccagcacccccagcaaaaaaagccggggtgagctgggagaaagacgggtagtgggaagggtttacggctgctttagaagagatagttatcactgaattaccatatttcaaattttgacatgggaatgtcttaagatcattattagataaaattaaactgactttattaaacagagtcacttcaggcctttttcttatgaacagagtgatccttagtcgggtaacatgtcaatgcacagtgcactctgtgcctctcctgcattgtggggagggcacttcataaggcaaagtaaaattcaggacgtgcatgaactcagttgtgcttccatgtgagttcgatatatgctattaatagttctgatcaccaaatttataacatttaaagtactgtctgatacccgatgtctggtatgtttacataaaacgtggttctgcccagtaacagcataaggtaaaaatgtgatttcccctaaaattataacatcatgtcatcctagagtgttacccacctgggagaggtacaaaaaacaaagcattagatttcaggccaagaacagccagttttaggagtaagaattacatcgaatagccttaagagcatttaaaaagtcaaggcatcttaaacttcagaaatg

SEQ ID NO: 251824 - DNA, 714 bp, Homo Sapiens
  misc_feature (165)..(175): n is a, c, g, or t
agagctagcaccataccctgactgagcaaaatgtgtgggattttcttgtttctcttctgggaaagggaaaagggttaaaatagcttgagcaactattattcatgaaatgtttttaactaagtcactaacaaagatttgcctatgtaagctttgatttctataacnnnnnnnnnnngaagcattcattgtgttaacacaaatgtagagctgtaatgtgaaacttcagggagccggggtaaaactccctttcagatgtcatcagctagttttgagtgatcgacacaggtcaaacttcatagtgcccaagctgggcaatagagacagattccaccaccagtctgatcagctgccattctctcgccgctcttaggggaaaaaactgtacacattagcaacttcccccaaaatctcttcttgctacccaaagtcatatttgatttttatcttcatactttttcatattataaacaacacattcttcatgatatctaagagatgaattatacaatttaacacataatttgttatacttagagctaagagattttcaatttcatttaattcaaatcgttcctttatcaaatgtggaaagtgaggtctagagaggttatatgccttacttatgagtatctgaaagtaacaaaaactttgaaaaggtttaatcataaaaccaaagttaacataatattcaactgccattttaattaagcggcc

SEQ ID NO: 251825 - DNA, 848 bp, Homo Sapiens
  misc_feature (24)..(25): n is a, c, g, or t
  misc_feature (72)..(72): n is a, c, g, or t
gcggatgaactgcttcatgtgtgnntagatggcgcggccctcctccacagcagctacgatggtggagaagtngtcgtcagccagcaccatctcagaggcagtcttggccacggcagtgccagatcccatggcaatgccaatctcagccttcttcagggcaggggcgtcattgacgccatcacctgtcatggctgtgatctcatcgtaggactgcaggtactccacaatcttggacttgtgcgagggctccacacgggcgaagcagcaggcacgtcggcaggcttcccgctgttcagccaggggcaggtcgtcgaactctcggcccgtgtaggcgcgatcggccacctcctcgttctccccaaagatgccaattcgccggcagatggcaatggctgtgcccttgttgtccccagtgatcatgatcacccggatcccggcgtcacggcacagctggatggagcccgtgacctccttgcgcggagggtccagcatgcccactacacccacgaatgtcaggtccgtctcatactccaggaacctggcagagtcatccaggaccatttcctctcgcttcgggggggtgtcccgggtggccagggccaagcagcgcagggtgtcccggccagtgccccactccttgatcaccgccatgatcttttccttcaccggccccgtcagtggcacccgggtggtgccaactcgcacatagttacagcggtcgatgacgccctcaggggcacccttgacaacatcttgttgcccacagtagcccgggaagatttggtggggagcatagacagacatggacttttgttcgcccgccgtaatgccgattcccggtactgcag

SEQ ID NO: 251826 - DNA, 1061 bp, Homo Sapiens
  misc_feature (27)..(27): n is a, c, g, or t
  misc_feature (943)..(943): n is a, c, g, or t
cccgcaggagcgtcactgtgcgccggngcggctgccgacggcgggactgggttttctatcagatgttccacgtaataatgctggagttaagaagtttccattattttgctccaaaccagaagactctgttccctgtatatagaataggagtaatatttgaaaacaactggctgatgtttaaaactgaagattgtcatgattgtttatcctaatcccaatgctgaagtaagattgtcttggaaatactaagttgggtaagtattttttaaaggtttatgttgagtggtgagaaaatactaacagaaaaagatgggaaaatttttttgaggctaataattcaggaatttcagtaatttgtggctaattaagtttaggtttgaggcagttttcaaacaacagtgagttacatttgaaatttgttttaattataaattcagaattctcaaaaagcatatttaatttaaaatgtgcctagttacagtactactgtgattgtcaattatgccttattatttattacattgtttctgtaggaaagtgaattctgcatttaaatttcagggaaccagtcagaagcatctggattaggcatttagtgatacaaggatccagaataacaaaaactatgtaccagccacattcacacaacaggtgatacccctataggttaattattctctagatattctaaattaagagacacagaatacttagtcttatgtgagtcaagagctctattctgtcttcactactgggtgtctactgttataaactggagaatatgtgtggttaaatgccatgtttttcatttttaattgatctttttcttattgctgtggttctttgcctttttaggatttcttgtaaaaacctcaaaatggttataaagagtatcacagatgtggtgttatggttagtgtgtactttgaaagtaatgaatgtntttatgtaattaaatatctttctgccaaaattacctacttagtgttatatttttaaactaatgagtagccattaaatattctattttttaacactagaatttggtacttaaaagcatg

SEQ ID NO: 251827 - DNA, 572 bp, Homo Sapiens
gttgcagccaagaagagaaagaaggacatgctgaatagcaaaaccaaaactcagtatttccaccaagaaaaatggatctatgttcacaaaggaagtactaaagagcgccatggatattgcaccctgggggaagctttcaacagactggacttctcaactgccattctggattccagaagatttaactacgtggtccggctgttggagctgatagcaaagtcacagctcacatccctgagtggcatcgcccaaaagaacttcatgaatattttggaaaaagtggtactgaaagtccttgaagaccagcaaaacattagactaataagggaactactccagaccctctacacatccttatgtacactggtccaaagagtcggcaagtctgtgctggtcgggaacattaacatgtgggtgtatcggatggagacgattctccactggcagcagcagctgaacaacattcagatcaccaggcctgccttcaaaggcctcaccttcactgacctgcctttgtgcctacaactgaacatcatgcagaggctgagcgacgggcgggacctggtcagcct

SEQ ID NO: 251828 - DNA, 537 bp, Homo Sapiens
ggatcacaaccatcacaagggactcacatataaacaagcgtcagattatggaatcaatcatgcacagctcccacttggaaattttgtgaagatgaatagtcgaaaagttttggcagttaatcatgtgtttgaaattattctggaatacctggaaacaagagactggcaagaagcatttttttactatcttgccccaacggaaaggagctgttcccacagacaaagcctgtgaaagtgcttctcatgacaatcagtctgtcaggatggaggaaggtggatcggacagtgattccagtgaggaggaatatagcagaaatgaactagattcaccacatgaagaaaagcaggataaggaaaatcacactgaatctacagtgaactctctgccacactaatgttacctggtttccttttagtttaaggaaaaattaggagaaagtgaggtgctatatagaatattgaaattggaagaacattttattttctcttatttctgttgtgatttttaaaaacttttttttggacctaaataataat

SEQ ID NO: 251829 - DNA, 805 bp, Homo Sapiens
accaggctgtatgcaaatatacaagtgcccctgatcccatgaattggagggtcctctgctcaaaacatatgatatacatgtcttcttttaatttggtatcgtctttaggtccggaagagaaaacattcccttccttgtaccaaagtcctcagctcaggttccctgagtccacagagggttgcctcagacgaactgggatctgaagtcctgagaaagcaccagcttccaccactcccaagtcctggagggtatccagtaactgctcccaggcagcaccaataaagcaattctccagaaagatgggcaggcctcccacaccatcatgcagggtacaggggcactcacaccaggcccagcacctccagcccgtggtccttggcccctgttgcgccggcctccacagccaacagctcctcgagcgtcagacgcttggcatagaagtgggccacaacgcgtggccctgacccgacgtgggagctgcggtagtcagtgcgctccacgcggaaagcggcagccgcttcgcccagctcctcgcgcagctcgcggttcagcccgtcctctaggcttctgtcctgcgtgtccacgaatccgccggggaagcccaggcgtccatcgaagcgcatctgcatcagtatggcgtagcgcagcgggatgcggccgaagagcatcccagggtccggcgcgtagaggagagcgtggcacgcatgacgccagcccgaccccagcgccagggcctcgcctagctccagcctgcgggctccggccatggccggacactgctcctctgctgtcccgaaggcccaat

SEQ ID NO: 251830 - DNA, 1585 bp, Homo Sapiens
ccgcaccagggctctggtgaaaagaaaatgctccacgctgggacgggccattgcctgatgcctgtacatggtgggcactgagaaaaaaaattcctgggccctgccttccatacactccccacgatcttggaggaagctctgaggaccccgctgagaacccacagacaggaggacaactgcgctatgacagcaataaaggccaagaaggagaaagttgaggaccgctgacagccccgtgtgctgttgggagctgccctttctacttcaaaccttcctctagcagactgtgcagggaccccccaacaacaacatctgccgccatggttgtgcaaaaaagcgcagaagccggggaaatgagggcaggcgtgcagctggagcccttcctgcaccaggtcggggggcacatgagcgtgatgaagtatgacgagcatacggtgtgcaagcccctcgtctcccgggagcagaggttctatgaatccctgccgctggccatgaagaggttcaaccaaagtacaaaggtaccgtcacagtgcacctctggaaagacagcacaggccatctcagcttggttgccaacccagtgaaggagagccaggagcccttcaaggtctccacagagtcggcggcggtggccatatggcagacgctccagcagaccaccggcagcaatggcagcgactgcacccttgcccagtggccgcatgcccagctggcacgctcacccaaggagagcccggccaaggctcttctgaggtccgagccccacctcaacactccagccttctcgctggtggaagacaccaacggaaaccaggttgagaggaagagcttcaacccgtggggcctgcaatgccaccaggcccacctgacccgcctgtgctccgagtacccagagaacaagcggcatcggttcttgttgctggaaaatgtagtgtcacagtacacgcatccctgtgtcctggatctgaagatggggacccggcagcacggcgatgatgcatcggaggagaagaaggcccgccacatgaggaagtgtgcgcagagcacctcagcctgcctgggtgtgcgcatctgcggcatgcaggtttatcaaacagataagaagtactttctctgcaaagacaaggactatgaaagaaaactctcaggggagggggtcagacaagccctctatcagttcctacataatggaagccacctccggagggagctcccggaggcccattctggaccagcttcggggccctcctcttcatcattagggagcacgaggttataccggttttatatccgctcttctccttggcaaccatgaaggcgcaggaacccccccaaagagagcctaggagggcccgtatcttacgagggttcccaggcagcccccggtggtctccgggggtgcgtaccagggtggcatcccaggatgactttgttttacccaaacaagggttctgtgaggggccccccctccattgcccaccctggtttttttggcctggaacccttagggttccgggggattcagggggggaagactccggggctttcggagtcctgggttgactcaaaaagacctggcgtttgg

SEQ ID NO: 251831 - DNA, 290 bp, Homo Sapiens
ttctaaagagtcactgctaagccctgaaattaactccaaatacctccctgggatacagtgccaaggaaggggcttccttgaacttcaacctctaaaagtaagcaagaattgagaaatatcttctgccttgaaaaatattcactccccaacgctaatacatcaattacatattatttgggggctaactaagctcctattttaaaatgtaaactgaagaaatcaggccagagtcattcccatcttagtgccaatcatataatcagataattagattgctctttccctaaagc

SEQ ID NO: 251832 - DNA, 671 bp, Homo Sapiens
  misc_feature (578)..(619): n is a, c, g, or t
cggccggggagacaaggcgggggaagggggagtagcggtggcttaagccgcgcggagcagcgcaacctgggtcgctccctgcttcgccgccgcctccggaccgagccagcggagtcagtgtcctagagaccctgtaacaccacaaagcggacgaaggagtccatgttggggaacttggcagcggagtgactgggacctgggaacctactgtggggccgcggccggaccgagcgcctcgacctcggtctgaggaaacccttttccaaagagaaatgaagaagaaaactgtatgtaccctaaatatgggagataagaagtatgaagacatggaaggtgaagaaaacggagataatactatttccactggtctgttgtacagtgaggctgacagatgcccaatatgtcttaattgtctattagaaaaggaagttggttttccagaaagctgtaatcatgtcttctgtatgacttgtattcttaaatgggcagagacactggcttcatgtcctattgaccgtaaaccttttcaggcagtgtttaaattcagtgcattggaaggttatgttaaggttcaagtnnnnnnnnnnnnnnnnnnnnnnnnnnnnnnnnnnnnnnnnnnctcatttgagaaaacggtcctcctgtcatgaaaattctaaaagctgtataag

SEQ ID NO: 251833 - DNA, 1089 bp, Homo Sapiens
  misc_feature (388)..(396): n is a, c, g, or t
  misc_feature (731)..(764): n is a, c, g, or t
  misc_feature (779)..(1019): n is a, c, g, or t
  misc_feature (1033)..(1033): n is a, c, g, or t
tgctctacaaagacacaaagcttcaggcttatacaaaactgagtatgattagaaatacctgagcccagaaatgattctgagaaaagagaataatttgaagacacttatttaaaagctaattatggttagaaatgaattaatttaaaaatgtgttcacatatccctttctctaacagtttaacctagacaaacatctgtatcagtattttttattcccctgattgattacatttggtcttctttattctgaaaggaaaataacaaaaacttcagaaattcctaagggtgtaataagaaagtgggttttgagtttcctttcctggaattattttacagttctttggtgggtctcgtcagctattaattgataatgaacatttttcactannnnnnnnnctatctgaagcttagagatctagagctttggatctttcgggtatatgtcaatggaggtattattttataatactttgcattgacatgaagtgggttcatgggggaaaaccatgagctgtgaacattggtagcaaacaagcatatattcatttcaaaactttccttgcttttagcagagagaagcctgtatatgttacatgtgtgactttcagtagtttaaagagatgtttcaaaaaattgttgcatgtttttgatgcaatttgggaaattgtttacttcacaatgtagtcattcataaaaaaattcatgaaaatactgaacatatgtttgaggannnnnnnnnnnnnnnnnnnnnnnnnnnnnnnnnnctgagacggagatcnnnnnnnnnnnnnnnnnnnnnnnnnnnnnnnnnnnnnnnnnnnnnnnnnnnnnnnnnnnnnnnnnnnnnnnnnnnnnnnnnnnnnnnnnnnnnnnnnnnnnnnnnnnnnnnnnnnnnnnnnnnnnnnnnnnnnnnnnnnnnnnnnnnnnnnnnnnnnnnnnnnnnnnnnnnnnnnnnnnnnnnnnnnnnnnnnnnnnnnnnnnnnnnnnnnnnnnnnnnnnnnnnnnnnnnnnnnnnnnnnggttaacaggtgtngaggccaccgtgcccggttgaagatttttctttaattggcaataaatatttcaggc

SEQ ID NO: 251834 - DNA, 487 bp, Homo Sapiens
aaacaagccaggcaaaggcagtaatagaaagagtagaagctgatgagtcaaaacacttgaacagaatttgaagcaccagagagtctttatctactacggaaaacctgattctgtggtctcagaaactgatgaattgttaagtctaggatacgcaaagatgcatttgttctaagcatgaactctggataatacctcctcaataaaaagcatttctattaaatgcttagtttagtgtttttgttcaagttattggttagatagtattccctttctcatctcccctttttaaacagaagtagaatactgtacaatttagtgaaaagaccaaagttcagataaattgataggaaggaaaatattttatggcttataccaaagagtcagcactaatgcatagtcactgtaaaaacccaagttaaagtttagaaagtcagtcagagtggactgaaatcctaggttaaagcatattcatacatagaaaattggc

SEQ ID NO: 251835 - DNA, 974 bp, Homo Sapiens
  misc_feature (924)..(924): n is a, c, g, or t
  misc_feature (937)..(937): n is a, c, g, or t
  misc_feature (952)..(952): n is a, c, g, or t
caggccgggggggatccaaaagctcggcatggctgacgacgcgggtttggagaccccgctgtgttccgagcagttcggctccggggaggcacggggctgccgcgccgccgcggacgggagcctgcagtgggaggtcgggggctggcgctggtgggggctctccagggccttcacggtcaaacctgaaggacgagatgcgggcgaagtgggggcttccggggccccctcaccgcccctctccgggctccaggccgtgttcctgcctcagggcttccctgatagcgtcagcccggactacttgccctaccagctgtgggattccgtgcaggcgtttgcttccagcctctccggctccctagccacccaggcagtcttgctgggcataggggtggggaacgcaaaagccactgtttcagctgccacggccacctggctcgtgaaagattcaactggcatgctgggccgcatcgtctttgcctggtggaaagggagcaaactggactgcaatgccaagcagtggaggctttttgcggacatcctcaatgacgtagccatgttccttgagattatggctcctgtatacccaatctgtttcaccatgaccgtctccaccagcaacctagccaagtgcatcgtgagtgttgctggtggggcccactcgggctgccctgaccgtgcaccaagcctcggaggaacaaaatggctgacgtgtcagcaagggacagcagccaggagacgctggtgaacctggcggggctcttggtcagcctcctgatgctccctctggtgtcaggttgccctggcttcagccttggatgtttcttcttcctcactgccctccacatctacgccaactaccgcgcggtccgagccctggtcatggagacttgaacgaagccggctccgctggttctgaagactacntcagagggagagnactcaccaactgcancaatcgatgagcgctgtgacag

SEQ ID NO: 251836 - DNA, 834 bp, Homo Sapiens
  misc_feature (62)..(62): n is a, c, g, or t
  misc_feature (64)..(274): n is a, c, g, or t
tggtgcaatgccctataatccccagctacttgggcaggctgaaggcaggagaatcacttgancnnnnnnnnnnnnnnnnnnnnnnnnnnnnnnnnnnnnnnnnnnnnnnnnnnnnnnnnnnnnnnnnnnnnnnnnnnnnnnnnnnnnnnnnnnnnnnnnnnnnnnnnnnnnnnnnnnnnnnnnnnnnnnnnnnnnnnnnnnnnnnnnnnnnnnnnnnnnnnnnnnnnnnnnnnnnnnnnnnnnnnnnnnnnnnnnnnnnnnnnnnnnnnnnnnntcttcgtatgaaatctgtaagcgtattataaatgaaggctcctctgggaaggaaaaaacagcttccaggactcaaatcgtggagaaagaaaagttcttgttccttcccgatcttcctgtgatctcggttctttgcttcctcttggaacttttcccagtctctcatcatcttgttatcaggaaaggatattccatagatcctctgcaatgtttccatttccggattgccctcccaatatgttgaggaattcttaaaaattttgatggttttaatttttccagtgtgtcttacatgtggacctttgcaaaggtcaattaatggaccgcacctgtacacggtggtagttgcagtgttaactttctcattcagaatgcggcatttaaatttattgtacttaaacatttccaggaggatttccttgctgacttctagtctttcaaaaggttgcttttcttttatgatggctttacatatattctccagggctgacaattctgtgctggacactgctctgtcttcaatgaacatgtcataataaaatccattttcaatcccggccg

SEQ ID NO: 251837 - DNA, 612 bp, Homo Sapiens
  misc_feature (161)..(175): n is a, c, g, or t
ctctatgaaacctgtatctgttaatctgattttgaacatatgtttacttaaaccaaagtttgcctaatgaatcttgatcactttaaaatgcaaaataccagcaacataaatttcattatatatacacatatgcatctgtgtatgcatattacatatatatnnnnnnnnnnnnnnnaatatgtagacataaatcccttgaaatgttttcaggaaatcattccttgaattataaatgaaaaacttcacattaataatttcatataaagcttttagtaacagtacatatgcactgtcaaaattttactagactatgatgtcaaaacagacatttcaaaagcacaaactggcagtttttcttaacaaaagttttaaaatattaagaatggattaaattttaatattcagaataatctgttcaaacctgagtgtattaagactaagtgtacttgacaattgaatgaattaagcctaaaaacatttctctaagaaaccagtggtccatttaaccatttgatgaaacattattttaatgacttataaaggatagtacagtatactgaaattccacttaaatactgaaatattctactaaatgacattgttttgtctaaa

SEQ ID NO: 251838 - DNA, 1480 bp, Homo Sapiens
ttgaaactaccatgaaatgtacagaatctgaagaagaagaagtcaccaaaggaaaggaaaatcaacttcagcttagctgttttatcaatcaggaagtcaagtatctttttacaggacttaaattgcgacttcaggaagaaatcaccaaacagtctccaacgttgcaaagaaatgccttgtatatcaaatcttccaagatcagccggctgcctgcttacttgaccattcagatggctcgatttttttataaagagaaggaatctgtgaatgccaaagttcttaaggatgttaaatttcctcttatgttggatatgtatgaactgtgtacaccagaacttcaagagaaaatggtgtcttttcgatccaaattcaaggatctagaagataaaaaagtgaatcagcagccaaatacaagtgacaaaaagagtagtccccagaaagaagttaagtatgaacccttttcttttgctgatgatattggctccaataattgtggatactatgacttacaagcagtactaacacaccagggaaggtctagttcttcaggtcattatgtatcatgggtgaaaaggaaacaagatgaatggattaacgttgatgatgacaaagtcagcatcgtaaaaccagaagcatatcttacggctttctggtggtggagactggcatatcgcttacgttctactctatgggcctcgcagagttgaaataatggaagagtaaagtgaacagtaatcttcattttagtatttatgcttagatgtgaaaataaatgttatttgttgatcatttctataatccagagctttagaggaagacacataggtgggtttatgtttcacctcatttggaacaaaagaggacagaagcagaccactctgtgcaccaacctaaaaaattacagagaagagaaaattatctttggattgtgctgccctatataaaggtggcagaaagacatttttaaaaagcttattatttcttgcattattttaaaaagttcagagttgaaatgcctttcaaccatttccttctgtggtcatttttcttgctgcctttttcacccaagattcagcagtcagatgtttactgcacacctattacctattatttgctgttcttgcatggttcaaaccaccattctgtagccacccatcctttgccttatctaacaaacatttttccaggaaggtggaaaaggaagtgttgctctcattgtgtgactcagtgctgctgtccatcccatggaaacatgggcacaatcaagtatttgtccagcctattgcaggcttttcctgactttaaaataaattgtgatcaataatagtacctttgattatacatttattattgtgtctctctctgatgtactgtggattgtacatttaactttggaatggctttgtaataatcagtcttaagaaaatgttgacaagctctggttgcttatttttagaaaatgaggacatttaataataat

SEQ ID NO: 251839 - DNA, 756 bp, Homo Sapiens
gaatgtcaaggttatgaatgacaagacttggaactatcacagaccacaggagactatggggacatgatgactgaatgcagtgaggaatcctggactacataaaaaggacattagtgagaaaactggtaaaatttaaaaatggttcttagagtagtagcagcctctcaaagttaatgtcttggtttcaataattgtactatggttacataaaatggcaacactacaggaagctggataaaggcaaatgggaaatttctacactatttttgcaaattttctgtaaatttaaaattatttcaaagtaaaatgattaaagaaacagaaaataaaaatggctacctaatgaaagtttcctaaattcaaataaagtaagtaaaatgtatgggaacagattttataagaaaacaaatgcaaggcacctgtagcctctacactgaaatatacagctataattaacagtttgctttccatcattctaccccaaattcctaagtacctaaaatattcataatgttgatattattgatttttattttcttacctgtgctttgccacattttcttgttttcccactgtgagcatagatttccttcgtaatcagaaaacatagctttcttttactaagtccctttataatttggccatatgaacaaactatttccagaaataagttaagaattacaagactctatgaatacaaagagaagatgtcacttgtttttattttaccaaatatgttcttcatagcaggcaaac

SEQ ID NO: 251840 - DNA, 1816 bp, Homo Sapiens
  misc_feature (1362)..(1362): n is a, c, g, or t
tcaacgccaaggggtgggtggcgaatccggcacgagggtgacagctataaatcagagtaaatcagaagaccagtgtattagctcacaattagatgagcttctctgtccacccacaacagtagaagggagaaatgatgagaaggctcttcttgaacagctggtatccttccttagtggcaaagatgaaactgagctagctgaactagacagagctctgggaattgacaaacttgttcaggggggtggattagatgtattatcagagagatttccaccacaacaagcaacgccacctttgatcatggaagaaagacccaacctttattcccagccttactcttctccttctcctactgccaatctccctagccctttccaaggcatggtcaggcaaaaaccttcactggggacgatgcctgttcaagtaacacctccccgaggtgctttttcacctggcatgggcatgcagcccaggcaaactctaaacagacctccggctgcacctaaccagcttcgacttcaactacagcagcgattacagggacaacagcagttgatacaccaaaatcggcaagctatcttaaaccagtttgcaggcaactgctcctgttgggcatcaatatgagatcaggcatgcaacagcaaattacacctcagccacccctgaatgctcaaatgttggcacaacgtcagcgggaactgtacagtcaacagcaccgacagaggcagctaatacagcagcaaagagccatgcttatgaggcagcaaagctttgggaacaacctccctccctcatctggactaccagttcaaatgggggaaccccgactttcctcagggtgctccacagcaattcccctatccaccaaactatggtacaaatccaggaaacccacctgcttctaccagccccgttttcacaactagcaagcaaaccctgaagcatccttggcccaaccgcaacagcatggtgagcagaggcatgacaggaaacataggaggacagtttggcactggaatcaatcctcagatgcagcagaatgtcttccagtatccaggagcaggaatggttccccaaggtgaggccaactttgctccatctctaagccctgggagctccatggtgccgatgccaatccctcctcctcagagttctctgctccagcaaactccacctgcctccgggtatcagtcaccagacatgaaggcctggcagcaaggagcgataggaaacaacaatgtgttcagtcaagctgtccagaaccagcccacgcctgcacagccagggagtatacaacaacatgagcatcaccgtttccatggcaggtggaaatacgaatgttcagaacatggaacccaatngatggccccagatgcagatgagctctttgcagatgccaggaatgaacactgtgtgccctgagccagataaatgatcccgcactgagacacacaggcctctactgcaaccagctctcatccactgaccttctcaaaacagaagcagatggaacccagcaggtgcaacaggttcaggtgtttgctgacgtccagtgtacagtgaatctggtaggcggggacccttacctgaaccagcctggtccactgggaactcaaaagcccacgtcaggaccacagaccccccaggcccagcagaagagcctccttcagcagctactgactgaataaccacttttaaaggaatgtgaaatttaaataatagacatacagagatatacaaatatattatatatttttctgagatttttgatatctcaatctgcagccattcttcaggtcgtagcatttggagcaa

SEQ ID NO: 251841 - DNA, 484 bp, Homo Sapiens
gctccaaatgctacgacctgaagaatggctgcagattgagatatcaaaaatctcagaaaaatatataatatatttgtatatctctgtatgtctattatttaaatttcacattcctttaaaagtggttattcagtcagtagctgctgaaggaggctcttctgctgggcctggggggtctgtggtcctgacgtgggcttttgagttcccagtggaccagggctggttcaggtaagggtccccgcctaccagattcactgtacactggacgtcagcaaacacctgaacctgttgcacctgtaggagcattcctctagtctgtagtcaccacagagaagaactcttctgtcttcttgtcctgggttccatctgcttctgttttgagaaggtcagtggatgagagctggttgcagtagaggcatgtgtgtctcagtgcgggatcatttatctgctcagggcacacagtgttcatctctggcatctgcaa

SEQ ID NO: 251842 - DNA, 1992 bp, Homo Sapiens
  misc_feature (1879)..(1879): n is a, c, g, or t
gaaccgcatctgcagcgagcaactgagaagccaagactgagccggcggccgcggcgcagcgaacgagcagtgaccgtgctcctacccagctctgctgcacagcacccacctgtctccgcccctcggcccctcgcccggctttgcctaaccgccacgatgatgttctcgggcttcaacgcagactacgaggcgtcatcctcccgctgcagcagcgcgtccccggccggggatagcctctcttactaccactcacccgcagactccttctccagcatgggctcgcctgtcaacgcgcaggacttctgcacggacctggccgtctccagtgccaacttcattcccacggtcactgccatctcgaccagtccggacctgcagtggctggtgcagcccgccctcgtctcctctgtggccccatcgcagaccagagcccctcaccctttcggagtccccgccccctccgctggggcttactccagggctggcgttgtgaagaccatgacaggaggccgagcgcagagcattggcaggaggggcaaggtggaacagttatctccagaagaagaagagaaaaggagaatccgaagggaaaggaataagatggctgcagccaaatgccgcaaccggaggagggagctgactgatacactccaagcggagacagaccaactagaagatgagaagtctgctttgcagaccgagattgccaacctgctgaaggagaaggacctgggcttcccagaagagatgtctgtggcttcccttgatctgactgggggcctgccagaggttgccaccccggagtctgaggaggccttcaccctgcctctcctcaatgaccctgagcccaagccctcagtggaacctgtcaagagcatcagcagcatggagctgaagaccgagccctttgatgacttcctgttcccagcatcatccaggcccagtggctctgagacagcccgctccgtgccagacatggacctatctgggtccttctatgcagcagactgggagcctctgcacagtggctccctggggatggggcccatggccacagagctggagcccctgtgcactccggtggtcacctgtactcccagctgcactgcttacacgtcttccttcgtcttcacctaccccgaggctgactccttccccagctgtgcagctgcccaccgcaagggcagcagcagcaatgagccttcctctgactcgctcagctcacccacgctgctggccctgtgagggggcagggaaggggaggcagccggcacccacaagtgccactgcccgagctggtgcattacagagaggagaaacacatcttccctagagggttcctgtagacctagggaggaccttatctgtgcgtaagtccttacctcttccggagatgtagcaaaacgcatggagtgtgtattgttcccagtgacacttcagagagctggtagttagtagcatggtgagccaggcctgggtctgtgtctcttttctctttctccttagtcctctcatagcattaactaatctattgggttcattattggaattaacctggtgctggatattttcaaattgtatctagtgcagctgattttaacaataactactgtgttcctggcaatagtgtgttctgattagaaatgaccaatattatactaagaaatagatacggcttcaacatcaatgtacatagaaataaatagctatatccatgcactgtagttttccttcaacatcaatgttcattgtaatgttactgatcatgcattgttgaggtggtctgaatgttctgacattaacagttttccatgaaaacgttttattgtgtttttaatttatttattaagatggattctcagatatttatatttttatnttatttttttctaccctgaggtcttttgacatgtggaaagtgaatttgaatgaaaaatttaagcattgtttgcttattgttccaagacattgtcaataaaagcatttaagttg

SEQ ID NO: 251843 - DNA, 681 bp, Homo Sapiens
  misc_feature (11)..(11): n is a, c, g, or t
  misc_feature (26)..(26): n is a, c, g, or t
  misc_feature (70)..(70): n is a, c, g, or t
  misc_feature (109)..(109): n is a, c, g, or t
ccgggggggcnacctctggcaggccnccagtcagatcaagggagcccacagacatctctctggggaagcncaggtccctcctcagcaaggttgcaatctcggtctgcanagcagacttctcatcttcaagttggcctgtccccgcttggagtgtatcagtcagctccctcctccggttgcggcaggctgcagccatcttatccctttcccttcggattctccctttctcttcttcttctggagataactagaataatcacaaaaaaagaccgacattcagtaaaagtgtctgccatcacctccattcacccaccccagtagaactggctcctgcagcttccctgcttcctggcaccccactgtgaaaccatttctgacctgcagttgcagactaggtgtgacttgcatttaaaataagatcctcagcaagagaacaaagaagagcccagtctgaaagcatgcggtaagaaacttagggaagaaactatgagagtacttcttagggtgagactcagagtctgagttgggatggaatgggcttggagccagggctcccagttacggatgtgcagccagccccatcagtggcttcatcctctgtactgggctcctgcatctccggggctgcttcccacccagcccccacattcccaggaagagtacgctagagttccctcgtgc

SEQ ID NO: 251844 - DNA, 578 bp, Homo Sapiens
  misc_feature (441)..(466): n is a, c, g, or t
gttcccagtgacactccagagagctggtagttagtagcatgtggagccaggccggggtctgggtctcttttctcttcccccttagtcttctcatagcattaacaaatctattgggctcattattggaattaacctggtgctggatatttccaaattgtatctagtgcagctgattttaacaataactactgtgttcccggcaatagtgtgttctgattagaaatgaccaatattatactaagaaaagatacgactttattttctggtagatagaaataaatagctatacccatgtactgtagtttttcttcaacaccaatgttcattgtaatgttactgaccatgcattgttgaggtggtctgaatgttctgacattaacagttttccatgaaaaccgtttatttgagttttaatttatttattaagatggattctcagannnnnnnnnnnnnnnnnnnnnnnnnnctaccctgaggtcttttgacatgtggaaagtgaatttgaatgaaaaatttaagcattgtttgcttattgttccaagacattgtcaataaaagcatttaagttgaatgcgaaa

SEQ ID NO: 251845 - DNA, 475 bp, Homo Sapiens
  misc_feature (353)..(353): n is a, c, g, or t
  misc_feature (366)..(366): n is a, c, g, or t
  misc_feature (416)..(416): n is a, c, g, or t
  misc_feature (421)..(421): n is a, c, g, or t
  misc_feature (434)..(434): n is a, c, g, or t
  misc_feature (444)..(444): n is a, c, g, or t
aggaaaaactagagttcatcctggcagctcaccgacctgcctgcaagatccctgatgacctgggcttcccagaagagatgtctgtggcttcccttgatctgactgggggcctgccagaggttgccaccccggagtctgaggaggccttcaccctgcctctcctcaatgaccctgagcccaagccctcagtggaacctgtcaagagcatcagcaggcatgggagctgaagaccgagccctttgatgacttcctgttcccagcattcatccagggcccagtggcttctggaggacagcccgctccgtggccagacatgggacctatctggggtcctttttatggcaggcagattnggggagccttttngcacagtgggcttcctggggggattggggggcccattggcaacaagaagnttggnagcccctttttgnaattccggtnggttaacttttaatttccaagttgaattttt

SEQ ID NO: 251846 - DNA, 615 bp, Homo Sapiens
gggggcgcggctctgggtccgtctcgtcgcgtccgggttgtcactctctcgggttgttactctgtagcttcccggctcgcgaaagggaggacctgtctgggtcatggattttgagaatcttttctcaaaaccccccaacccggccctcggcaaaacggccacggactctgacgaaagaatcgatgatgaaatagatacagaagttgaagaaacacaagaagagaaaattaaactggagtgcgagcaaattcccaaaaaaatggatattgcccaatactgatatcagttcaccagaatatgatcttaattgagcatatacattgcctggaagacatttatggaactttgttcgattcttctcttagatttgtcttttagcatgttactacattgcagatgagtcactgccaatcaaaggttaggcggaagctcctcagttgcatagttaaatggattttgaagcacttaaagtctgaaaaaacacttctggaactgtttgagtgtgcaaaatatatctgctgcaaattaatggtaggcatggagatcttgttcctattttaactttgaacagcacagtgataccaagcagtgtcagtaacacctgtgaactcatta

SEQ ID NO: 251847 - DNA, 596 bp, Homo Sapiens
tacggacagccatgccgagcaggggccagctcagcagccccaggcccaggtggaggatgcagatgcattcgagcacattaaacaaggcagtgacgcatacgatgcacagacctatgatgtggccagcaaagaacagcaacagtctgcaaaagactctggcaaagatcaggaagaggaggagatagaggacacccttatggacacagaggagcaggaggagttcaaagcagcagacgtggagcagctgaagccagaggaaatcaagtcgggcaccacagcacccttgggctttgatgagatggaagtggagatccaaactgttaaaacagaggaagaccaagaccccagaacagacaaagcccataaggagacagaaaatgagaaaccagaaagaagccgagagtctaccattcatacagctcatcaattcctcatggacacgatcttccagccctttttgccacgtgaatctggaaacccagaggaggagaaggttgcagctgagatgtggcagagttacctgatcttaacagcgcctctttcacaacggttatgtgaagagcttcgtctcatattagagcctacccaggcagcca

SEQ ID NO: 251848 - DNA, 1135 bp, Homo Sapiens
cgacaaaatgatcttgaagccggtgtccagttccagcagtacctggctgacctgcatgaagcagaaacatggatcagagagaaggaacctattgtagataatactaactatggtgctgatgaagaagcagctggggctcttctaaagaagcatgaggcctttctattagatctcaattcatttggagacagtatgaaagctctgcggaatcaggcaaacgcctgccagcaacaacaggctgcaccagtggagggagttgctggagaacaaagggtcatggctttatatgacttccaggcccgcagcccccgagaagtcaccatgaagaaaggtgatgtcttaacgctgctcagttccatcaataaggactggtggaaggtggaagccgctgatcatcagggcattgtcccagctgtctatgtcagaagactggcccacgatgagttcccgatgctcccacagcggcgacgagaagagccaggaaacatcacccagcgccaggagcagattgagaaccaataccgctccctcttggatcgggcagaagaacgcagacgtcgtctattgcaacgttataatgaatttttattggcctatgaggcaggagacatgctggaatggattcaagagaaaaaggcagaaaacactggagtggaactagatgatgtttgggagctgcagaaaaagtttgatgagttccaaaaggatttgaataccaatggagcctcggctaagggatatcaacaaggtagctgatgatctactatttgaaggacttctaacaccagaaggagctcaaatccggcaggaattgaatgcccgctggggttctttgcagaggcttgcagatgaacagcggcagctgctgggcagtgcccatgctgttgaagtgtttcacagagaagcagatgacacgaaggagcagattgagaagaaatgccaggccctcagtgctgcagaccctggctcagatctgttcagtgttcaggctcttcagcgacggcatgagggctttgaaagggacctcgcacccctgggagataaggtgaccatactgggggagacagcagagcggctcagtgagtcccatccagatgccactgaggacctgcagagacagaaaatggagctgaat

SEQ ID NO: 251849 - DNA, 1347 bp, Homo Sapiens
  misc_feature (801)..(801): n is a, c, g, or t
acatacataaattcttcaagcatacaatatgtgctaggcataataagccatggaatttgcctccaaaaaactttgcaatctatttgcgaagtaaatgactaaagctacgatttgaaatgtggctagcccaaacggagatgtgctgtaagtataaaatttttaaatttacagtataaaaatagatgtaaatatctcaataataatttttatattgattaggtaatcaatataattacttcaacatgttgaagtgatattgtggatacaatagttaaatacatatacattaaaattaatttattgtttctttttatctatttaaagtgtctactaagaaatttaaaatgacatacgtagtttgcactctatttctattggacagtactggtccagagacatgacagagcctggtacttatggacaagtcacacaatttatcctagagtaagagaaaaaagtagcaaacaagacaagggccaaatcatttaatagtggttgaatatgtgcctatgtttaaagaactatttcaagccatttgggaaacaaaaaagtgtaacacattatccttattttcaaggaattcatgatctaaaagaagagacaagatgagatttaaacttaaccccaataatccccgctgccaggaacaaagtgctatgttcagggacttcctcaactccacagccatctggctccaggtacctagtgctgcattcccacttgctctcattttctgtccttcaggctctctagtggtaaatagaggatgcatatctgcttgacacacacatgagatgacancttcattttaaacacagatgttgctagtatcttccttagcagtatctctccttgcacatgggctgtcccaccccagagtcaaaggtattaggaagatctataattgacagcattcacacagacacatatcttctactctagaccacagtatcattagccaaatattatttacttccttgtagctaacaagcaccattaaaatataaagaatcatttcaaaaaggaagaaacattttccaagttcttatgagatatctccatgtgcaaagtattacataggctctatatgggagacaaagtgatagacattatctaaagcacctaaataaaatgtctggttctctacacaaaatgaagagttaggctagtcaaagaagtaaacaataattgcactatggaagtttacacaaattgggttattcttgtcatatcccattaaaacagagttgagaggccagagagaaaaagcactcagggcacataacattgctgcaagaatgtaagtaattctctgcaagcctggctgctgaaactccctgctaaaat

SEQ ID NO: 251850 - DNA, 1090 bp, Homo Sapiens
  misc_feature (209)..(227): n is a, c, g, or t
  misc_feature (258)..(348): n is a, c, g, or t
  misc_feature (780)..(788): n is a, c, g, or t
  misc_feature (815)..(815): n is a, c, g, or t
atttctatacatttttgtgtatatgtgtgtgtgtataagccagttagtatatatctgtatgtatattatatacataaaacactatatttttacatacaagtatgcttttattatacagataataaagatgggggaaggtttctgtttttttcttaataggtgaagaaatcttgaagaccagaaattggatcttactgaaaagctgatgnnnnnnnnnnnnnnnnnnnaaattatattgttcagctatggaagatggannnnnnnnnnnnnnnnnnnnnnnnnnnnnnnnnnnnnnnnnnnnnnnnnnnnnnnnnnnnnnnnnnnnnnnnnnnnnnnnnnnnnnnnnnnaggagataactaaccctagctgtctccagtctgacaaaggttatttgaatggacttaatctcccagtagttgggagatgttttaaaaacacatgctgtgtttgaattgtggctgagaggttttcttggcaatgtgaggaggaaatttttttctgcctcattattattaattcatggattgagtgttggttcgacctacaggcgtaatagattggaactcagtgaagacacagatgttcctgttcagagcaaccagctaatgattacagtttaaagacaatttctgtgatcaagttgtcatttggaagattaaacccatttcacgaggacttggagcctggtccttgctttgaggaagcagtggcttgtttcaagaagccacttctgatctaagaatctacccagcatgcctaatcaaggagaagactgctannnnnnnnnctattccacatgtaccaaaggcgacantgcccattccgtcactgtgaagctgcaataggaaatgaaactgtttgcacattatggcaagaacgggcgctgttttctgacaggtgtgcaggtttccggcacactggagattgataaaaaacgcagtggaaattccttgttattgggaaaatcagccaacaggatgtcaaaaattaaactgcgctttccatcacaatagaggaccgatatgttgatggccttttcctacctccgagcaaaactgtgttgcccactgtgcctgagtcaccagaaga

SEQ ID NO: 251851 - DNA, 503 bp, Homo Sapiens
  misc_feature (281)..(281): n is a, c, g, or t
  misc_feature (319)..(342): n is a, c, g, or t
aaaaaacgccagtgaaaattcccttgttattggggaaaattcagcccaaccaggatgtcaaaaatttaaactgcgctttccatcacaatagaggacgatatgttgatggcctttttcctacctccgaggcaaaactgtgttgcccactgtgcctgagtcaaccagaagaggaagtgaaggctagccaactttcagttcagcagaacaaattgtctgtccagtccaatccttcccctcagctgcggagaattatgaaagtagaaagttccgaaaatgttccntagccccacgcatccaccagttgtaattaatgctgcannnnnnnnnnnnnnnnnnnnnnnncagttttctgaggaaggtgatgaaaccaaaacacctaccctgcaaccaactcctgaagttcacaatggattacgagtgacttctgtccggaaacctgcagtcaatataaagcaaggtgaatgtttgaattttggaataaaaactcttgaggaaattaagtc

SEQ ID NO: 251852 - DNA, 647 bp, Homo Sapiens
  misc_feature (628)..(628): n is a, c, g, or t
actggacctgtgaggcgtgcgaactggtggcagtgagagacttcggcggacatggctcccagcgtgccagcggcagaacccgagtatcctaaaggcatccgggccgtgctgctggggcctcccggggccggtaaagggacccaggcacccagattggctgaaaacttctgtgtctgccatttagctactggggacatgctgagggccatggtggcttctggctcagagctaggaaaaaagctgaaggcaactatggatgctgggaaactggtgagtgatgaaatggtagtggagctcattgagaagaatttggagacccccttgtgcaaaaatggttttcttctggatggcttccctcggactgtgaggcaggcagaaatgctcgatgacctcatggagaagaggaaagagaagcttgattctgtgattgaattcagcatcccagactctctgctgatccgaagaatcacaggaaggctgattcaccccaagagtggccgttcctaccacgaggagttcaaccctccaaaagagcccatgaaagatgacatcaccggggaacccttgatccgtcgatcagatgataatgggccttgaggcgcgggatccactccgccatcgatgcatnccagacccccgtgtcgtgt

SEQ ID NO: 251853 - DNA, 669 bp, Homo Sapiens
  misc_feature (632)..(632): n is a, c, g, or t
gacttcggcggacatggctcccagcgtgccagcggcagaacccgagtatcctaaaggcatccgggccgtgctgctggggcctcccggggccggtaaagggacccagttggagaaactgaagtttgaatggcttgttctctaggctacatagcaagtaatttacagagcttgcatctgaatgactccaaagctcctgctctttctgctgctatctactgccccaggcacccagattggctgaaaacttctgtgtctgccatttagctactggggacatgctgagggccatggtggcttctggctcagagctaggaaaaaagctgaaggcaactatggatgctgggaaactggtgagtgatgaaatggtagtggagctcattgagaagaatttggagacccccttgtgcaaaaatggttttcttctggatggcttccctcggactgtgaggcaagcagaaatgctcgatgacctcatggagaagaggaaagagaagcttgattctgtgattgaattcagcataccagactctctgctgatccgaagaatcacaggaaggctgattcaccccaagagtggccgttcctaccacgaggagttcaacccttcacaagagcccatgaaagatgacatnaccggggaacccttgatccgtcgatcagatgataatg

SEQ ID NO: 251854 - DNA, 1644 bp, Homo Sapiens
tagcgaggcctgggtggcgaattcggcacgaggggctcccagcgtgccagcggcagaacccgagtatcctaaaggcatccgggccgtgctgctggggcctcccggggccggtaaagggacccaggcacccagattggctgaaaacttctgtgtctgccatttagctactggggacatgctgagggccatggtggcttctggctcagagctaggaaaaaagctgaaggcaactatggatgctgggaaactggtgagtgatgaaatggtagtggagctcattgagaagaatttggagacccccttgtgcaaaaatggttttcttctggatggcttccctcggactgtgaggcaggcagaaatgctcgatgacctcatggagaagaggaaagagaagcttgattctgtgattgaattcagcatcccagactctctgctgatccgaagaatcacaggaaggctgattcaccccaagagtggccgttcctaccacgaggagttcaaccctccaaaagagcccatgaaagatgacatcaccggggaacccttgatccgtcgatcagatgataatgaaaaggccttgaaaatccgcctgcaagcctaccacactcaaaccaccccactcatagagtactacaggaaacgggggatccactccgccatcgatgcatcccagacccccgatgtcgtgttcgcaagcatcctagcagccttctccaaagccacatcctagtatcagaaggccaggcgagactgcaacactgctcatcaccccgcggcgtgatccctgctcttaggtgctgggcagaggggaagggtggtcagggtgaggatggtgagggagggctggtgaggggctcagaggaatacttggaacaacagcagtgttattgtagtgtggcagtttcttttatacataggtgagagtttttaaagtgtaagggaaaaattaattttttaaaaaacaccatgcttggagggtgggggtagaaatagacacaatattatttctaaggaatcgggttttcatttactctggacaggtgaaaatattttttaaagccagtgctctaagacctcagcttttatctcagaaccccatgggttcccagaccaagagtacaggaaatcaaattgttgtcctgtctgtctatagcttggaacagggagctttgattactgactccggttccacacactgtaagatcaaaaaaccatctccacatttgaaagagatgtaaggtgtattcatagggatggtggctcaacaaatcaagcaaactggaatcaaggggagggggaagggaatgaaatggaaagggaggctgattcccttcccctgacttaccactaatttactaggctacctactttcatgagtaacctctcacagctacccagcacatgccacaatcctatgctcttgccttcttttatctgcactgtgtgaagggactcttttaaataaatgagcaagtgtcctaagctatgtcatccaaagattgtcctttccattctcaaatcctgtgactgggatcactcaacagcactgtgatgtattattttcaatgaggtgcctttcttaactgaccaaatgctgccttgtttggcccctaaatcaataaaatatgttaaaatttgtaaaaa

SEQ ID NO: 251855 - DNA, 878 bp, Homo Sapiens
tggtacggtccggaattacgggatatcgtcgaccacgcgtcgggcagaacccgagtatctaaaggcatcgggccggctggctggggcctcccggggccggtaaagggacccaggcacccagattggctgaaaacttctgtgtctgccatttagctactggggacatgctgagggccatggtggcttctggctcagagctaggaaaaaagctgaaggcaactatggatgctgggaaactggtgagtgatgaaatggtagtggagctcattgagaagaatttggagacccccttgtgcaaaaatggttttcttctggatggcttccctcggactgtgaggcaggcagaaatgctcgatgacctcatggagaagaggaaagagaagcttgattctgtgatttgaattcagcatcccagactctctgctgatccgaagaatcacagggaaggctgattcaccccaagagtggccgttcctaccacgaggagttcaaccctccaaaagagcccatgaaagatgacatcaccggggaacccttgatccgtcgatcagatgataatgaaaaggccttgaaaatccgcctgcaagcctaccacactcaaaccaccccactcatagagtactacaggaaacgggggatccactccgccatcgatgcatcccagacccccgatgtcgtgttcgcaagcatcctagcagccttctccaaagccacatgtaaagacttggttatgtttatctaatgttgggtccaagaaggaatttctttccatccctgtgaggcaatgggtgggaatgataggacaggcaaagagaagcttcctcaggctagcaaaaatatcatttgatgtattgattaaaaaagcacttgcttgatgt

SEQ ID NO: 251856 - DNA, 1344 bp, Homo Sapiens
  misc_feature (139)..(139): n is a, c, g, or t
  misc_feature (741)..(852): n is a, c, g, or t
  misc_feature (971)..(1000): n is a, c, g, or t
  misc_feature (1109)..(1109): n is a, c, g, or t
tggctaaagttggtgggaaaaaggagcccagccaggcctcaggaatccctgttttcactgggccaccacttgtgtacatgttaagccagtccttctgctggagaaagcctggaactgcccaaacaaaaaaacaaatacnaacaactctcgtcaccacggtcaggaggaggttcagacattctgcccagaggggctggggaaagggatgggagccaggaaagatttaggggcaggagacagacacgtaacaggaactcggaaggtagaacttagaattcagaacttgggtttcaattgtagaatttggaatctggaatacagaattgggaagaagaacagagatgacaaaagaccacttgaagagaggttcctaatactagacagatggagagtggcttggctgtttccccctgcatattggggttgaaaacttaaatgtgtagttccagtccttctatgcagagtctctcctgccctccctccttcctgcaggcaaatatacaagctagaccctgttccctcaccctgtatcctgtctcccctaattgacattctatcagcccaaccctcattctgcagggccacctggtgtgtggaggtggcgggaggggtcagtgactctgggggtctcctcagtgacccccatacctcatcatgaacccttgggtagcttgattctgcctaccatccaggaaaacttgtgctggaattgctgatggaaacaattaaatatttactatnnnnnnnnnnnnnnnnnnnnnnnnnnnnnnnnnnnnnnnnnnnnnnnnnnnnnnnnnnnnnnnnnnnnnnnnnnnnnnnnnnnnnnnnnnnnnnnnnnnnnnnnnnnnnnnntatcaaaacaattcctttgccccacgaaccacaaaacgcacgggaaaatggcccatagttgccttcataggaaaatcctggtttggcgcagggctttgcctcctaaaaaattttataannnnnnnnnnnnnnnnnnnnnnnnnnnnnnaaaaaaacccaaaggggcaggttccgaaaggtcttttttcctggaaaacaaacccccccgcggggagctccaaaaggggggtggttttttattttccccaaaatcaaanaaaaaaccccgcgcccgcggggcgggctgcaaaccagggaggtgtttttttgttcccaaaattccccctttagaggcgtttttcccgtcgacgcaaaccttggataaaggcctctatttccccaaaaaaaccgggggtgggtgtccgccaaaacccgttggaacactcttcccccacaatgagggaaaatatagcgcgcgccccgccccctgtggcggggccctctttatggtat

SEQ ID NO: 251857 - DNA, 1605 bp, Homo Sapiens
ttttttgcggctccaacatggctccgcggctgtgcagcatctctgtgacggcgcggcggctgctggggggcccggggcctcgcgctggggacgttgcgtctgcagctgcggcgcgtttctattccaaggacaatgaaggcagctggttccgctccctctttgttcacaaagtggatccccggaaggatgcccactccaccctgctgtccaagaaggaaaccagcaacctctataagatccagtttcacaatgtaaagcctgaatacctggatgcctacaacagcctcacggaggctgtgctgcccaagcttcacctggatgaggactacccatgctcactcgtgggcaactggaacacgtggtatggggagcaggaccaggcagtgcacctgtggcgattctcaggtggctacccagccctcatggactgcatgaacaagctcaaaaacaataaggagtacctggagttccgaagggagcggagccagatgctgctgtccaggagaaaccagctgctcctcgagttcagcttctggaatgagccacagcccagaatgggtcccaacatctatgagctgaggacatacaagctcaagccaggaaccatgatcgagtgggggaacaactgggctcgggccatcaagtaccggcaggagaaccaggaggcagtgggcggcttcttctcacagataggagagctctacgtggtgcaccatctctgggcctataaagacctgcagtctcgggaggagactcgaaacgctgcctggaggaagagaggctgggatgaaaatgtctactatacagtccccctggtgcgacacatggagtctaggatcatgatccccttgaagatctcgcctctgcagtgatgctgcctacacctccacctccttccccttctccctcaggcaaccccgacagacagtggcactcctggtcctgctgtcttggttttgtcttggctctgggaggactctgaggggcagtgctcagttcagacaagggggaactgaaggctgacaagttctgaggattacagctctgcccaggccctttctactttccctgcctgcctccctccccctgctagaagtagtttctgatttccctgaatgaaagatagtgatcttttaggccttcatatatcttctaaaattcctcatctcaaggccaccagtccccagttatcacccttggaaatcctctgtttagcttagttgcacaaaaggtagtatgtccagtggctagaggtggggtgggaagagaggaggccaggccaggccctcaggaattccctggtttccactgggccacccacttgctggacagtctgagccaagtccctcctgctggagaaaagcctggaactgccaaaacaaaaaaaccaatccaaacaaccttcgtcaccacgggcaggaagaggtttcagacattctgccccaaaggggcttggggaaaagggatgggaagccgggaaagatttaggggcaggagaacggccccgtaacaggaacttggagaggtggaacttagaatttaaaaacctggggttccaatggagaaattgggaatttgggaacccaaaatggggaagaaaaacca

SEQ ID NO: 251858 - DNA, 465 bp, Homo Sapiens
gactgcatgaacaagctcaaaaacaataaggagtacctggagttccgaaggaggcggaccaggatgctgctgtccaggagaaaccagctgctccttgagttcagcttctggaatgagccacagcccagaatggttcccaacatctatgagctgaggacatacaagctcaagccaggaaccatgatcgagtgggggaacaactgggctcgggccatcaagtaccggcagagaaccaggaggcagtgggcggcttcttctcacagataggagagctctacgtggtgcaccatctctgggcctataaagacctggcagtcttcgggaggagattcgaaacgctgcctgggagggaagagaggctggggattgaaaatgtcttactatacagtccccctgggttgcgacacatgggagttttagggttcatgattccctttgaagttttcgcttttgcagtgatgttgc

SEQ ID NO: 251859 - DNA, 443 bp, Homo Sapiens
  misc_feature (370)..(370): n is a, c, g, or t
  misc_feature (421)..(421): n is a, c, g, or t
attcggcacagtgacagagatgacaaaagaccacttgaagagaggttcctaatactagacagatggagagtggcttggctgtttccccctgcatattggggttgaaaacttaaatgtgtagttccagtccttctatgcagagtctctcctgccctccctccttcctgcaggcaaatatacaagctagaccctgttccctcaccctgtatcctgtctcccctaattgacattctatcagcccaaccctcattctgcagggccacctgggtgtgtgggaggtggcgggaggggtcagtgactctgggggtctcctcagtgacccccatgacctcatcatggaacccttggggtaagcttggattctggcctnaccattccagggaaaacttgtggttgggaattggctgatgggaaacaattnaaatattttattattaaaaaaa

SEQ ID NO: 251860 - DNA, 325 bp, Homo Sapiens
ggggcgtcggggcgacggcgggaagatggcagcagcgggacccctgcgaaaggagcttcgtggagctaaacggagctgaacaccaaaggccgacgcactttcgggaatgcacactctgcaccattgcgactgcaaatgccgtggctggcgccgtaaaatacagagaaagcgcgggaggcttccactacctggagagtgacaagttgtactccgtaaccacaaacaggttcattcattggaagacctctggagatacattgcatctgatggaggagtcactggacataaatctgtagaataatgccattcgcctaaaattccaaaa

SEQ ID NO: 251861 - DNA, 396 bp, Homo Sapiens
cttaaataggtttcacattgaacaaaaaacaaggggacttaacagtaaacaaggaagtctcaacacagtgttcaaaaataaataaataaaagggaagaattattagaaaatgtaagacccaggtattttgtggttatgaaggaaatggtaaccatctattctccattacagtgaagacaaagaaataatttattcataccatgagtactttaaattagacattaagatttcctaatttgagaacattttttaattggattgaaacgactccccaggttggtaattaaagcatttaagttaatcatgattttgtctgaatgaattagataacccatcatgatctcttcataatcaggcaaaaatcattcttagtgctatgagtttattgtttatttg

SEQ ID NO: 251862 - DNA, 1504 bp, Homo Sapiens
  misc_feature (1404)..(1404): n is a, c, g, or t
  misc_feature (1414)..(1414): n is a, c, g, or t
  misc_feature (1473)..(1473): n is a, c, g, or t
  misc_feature (1490)..(1490): n is a, c, g, or t
ggtaccggccggaattacgggatatcgtcgacccacgcgttcgactattccatgctattggacgatacagccctgatgtattaaagaatcatgcaaaagaagtcctgcctctggcatttttaggcatgcatgaaattgctgatgaggagaaatccgaaaaagaagaatgtaatttatggaccgaagtgtggcaggaaaacgtacctggatcctttggtggcattcgattatacctgcaggagttaattactattacccagaaggctttgcagtctcagtcctggaaaatgaaagcccagggtgcaattgccatggcatcaattgcaaaacagactagctctctagtacctccatatctcggaatgatactgaccgcattgctgcaaggcctggctggaagaacgtgggcaggaaaggaggagctattgaaagccattgcctgtgtggtgacagcttgcagtgcagagctggaaaagtctgtgcccaatcaacccagcacaaatgaaattcttcaagctgttctgaaggaatgtagcaaagagaatgtcaaatacaagattgtagcaatcagctgtgcagctgatatcttggaaggccaccaaagaggacagattccaggagttctctaacattgtcatacctctcatcaagaagaactcacttgaaagcagtggggtccggacaaccaaaaatgaagaggagaatgaaaaggaaaaggagctccagctggaatatctgctgggtgcctttgaaagcctgggcaaagcctggccgcgaaacgcggagacccaacgttgttatcgtcaggagctgtgcaaactgatgtgtgaacggctaaaactcagcacgtggaaagtgcagctaggagtcctgcaatcaatgaatgccttttttcaggggttaatgcttttggaagaagaacatgccgatcctgaggctttggctgaaattctgcttgaaacttgtaaatcaatcacatattctttagaaaataagacctactcatctgtgagaacagaagctttatctgtgatagaattgctgcttaaaaaacttgaagaatctaaacagtgggaatgtttgacatctgaatgcagagtgctcctaattgagtctttagctactatggagccagacagcagacctgaactgcaggagaaagcagcgttactgaagaaaacacttgaaaatctggaataaattagaaggggaagaaacaaacaagtgccatgttcattgggggttgaagtggtggtgttctttgaaaaaccaagtgggaaaaagtaaagattaatctgtagcatgcatcattccttggctgaaataaaaagaaaaagccttaaattttgttccttattagctttattttactttatgtttttaaagtatctggggctggagtgnagcttaatgngaaccttgggatgtttggaggggtgggttgtaaagggaaactggccagaaatagttacnaaaagagttccaaggcnggttatttaaaggg

SEQ ID NO: 251863 - DNA, 413 bp, Homo Sapiens
agtcacttatttcagcaattcaaggtgatattgaagaagctaagaaacgactagagttaccagaacatttgaaaatcaaagaagacaatttcttccaggtttctaaaagcaaaataatgaatggccactgatgaaaaatcatattatttattcattcactgttttctagtgtttctgtgtttattactgttcagcatcatcttggttatatactgaaaatcaaacactttactacagttgtgaattagtttaaaccgtacaatgttgttatcacaccatgcttcaactattaaattaagcccatcatatcatagcactaaaaagattgagttaaaaataagatttaaaaaatatatattgattaaaatgtaccactagaaaggtgttacatgtgtataagtatgggtaaaaag

SEQ ID NO: 251864 - DNA, 1122 bp, Homo Sapiens
  misc_feature (297)..(335): n is a, c, g, or t
tacgcacattgtccaatccagtgattttaatcatacagtttgactgggcaaactttacagctgatagtgaatattttgctttatacaggaattgacactgatttggatttgtgcactctaatttttaacttattgatgctctattgtgcagtagcatttcatttaagataaggctcatatagtattacccaactagttggtaatgtgattatgtggtaccttggctttaggttttcattcgcgcggaacaccttttggcatgcttaacttcctggtaacaccttcacctgcattggnnnnnnnnnnnnnnnnnnnnnnnnnnnnnnnnnnnnnnngagttgttgtttgtttttagatccacagtacatgagaatccttttttgacaagccttggaaagctgacactgtctctttttcctccctctatacgaaggatgtatttaaatgaatgctggtcagtgggacattttgtcaactatgggtattgggtgcttaactgtctaatattgccatgtgaatgttgtatacgattgtaaggcttatgtcactaaagatttttattctgattttttcataatcaaaggtcatatgatactgtatagacaagctttgtagtgaagtatagtagcaataatttctgtacctgatcaagtttattgcagcctttcttttcctatttcttttttttaagggttagtattaacaaatggcaatgagtagaaaagttaacatgaagattttagaaggagagaacttacaggacacagatttgtgattctttgactgtgacactattggatgtgattctaaaagcttttattgagcattgtcaaatttgtaagcttcatagggatggacatcatatctataatgcccttctatatgtgctaccatagatgtgacatttttgaccttaatatcgtctttgaaaatgttaaattgagaaacctgttaacttacattttatgaattggcacattgtattacttactgcaagagatatttcattttcagcacagtgcaaaagttctttaaaatgcatatgtctttttttctaattccgttttgttttaaagcacattttaaatgtagttttctcatttagtaaaagttgtctaattg

SEQ ID NO: 251865 - DNA, 846 bp, Homo Sapiens
  misc_feature (489)..(497): n is a, c, g, or t
agggtaagtaaccagatctgtttgaaattagcttatgtgcttgcattaaggcttttgtaaatattttatgccatttaagttcacagtagaaatggcctaagtatctttttagtagattttagtagaagagtaatccataaaatgtattattaacatgtactcaaattgagcaggcatctttctttgacacttagataacagtcatgagttctacggtttttttcttgtcattgttaaaattttctcttttaataagataatacatgcttatgtataaaattgaaatactgtagagaaagggggagatgaaaagtgagtgtcactcccggatgtgaccttgacatcctcattctcttctccaagagcagtaactgctattactttttcttgggtatcatcaagataatttctatgcatatacagttattttatgtatattgatttaaacaaatgtgatcataccataaacacagatgagttgcaccttgnnnnnnnnnacttggtctctttggcatttttccattttttaatgtatctagacaactacatttttaatgcttacatagtatatttccgttatattaaggaatcataatttatttgaatcacttataaatggatttttttctataaaattggctgtaagccagagtatatcaggtactataaatacatcactaatttgaaacaaataatggctcaggcaatcccctgtctggaatatttccagtggtggaatgggttttgctttgggttgcgtgcacgcgcacgcacgtgtgtgtcttcgctttactgtttttctgttctaattttgaggaagaaagattcccagaaataacctgtcca

SEQ ID NO: 251866 - DNA, 617 bp, Homo Sapiens
gtggtgaaaaataacccaaatgaatctgtaactgctaatgccgctaccaattctccttcatgtacaagagagtttcatgggcacctaaaggagtagtgttgctgtacttatgcctctgttctaaaagaaataaattaccagttattgtgatagctgaagtctagtgatctttgacttctgatgttaaaggtacacttcaagagttatcttggacaccaatgggttatgttgttcgacagacattatctacagaactgtcagcagcccctaaaaatgttacttctatgataaacttaaagaccattgcttcatcagcagatcctaaaaatgttagtataccatcttctgaagctttatcttcggatccttcctacaacaaagaaaaacacattattcatcctacccaaaagtctaaagcatcacaaggtagtgaccttgaacaaaatgaagcctcaagaaagaataagaaaaagaaagaaaaatctacatcaaaatatgaagtcctgacagttcaagagcctccaaggattgaagatgccgaggaatttcccaacctggcagttgcatctggaagaagagacagaatagagacaccgaaatttcaatctaagcagcag

SEQ ID NO: 251867 - DNA, 1032 bp, Homo Sapiens
cgacggcccgctgctggcctccgtgacgcggcctcctccgcgcctcgcggcatggcgtcggaggggccgcgggagcccgaaagcgagggcatcaagttatcagcagatgtcaaaccatttgtccccagatttgccgggctcaatgtggcatggttagagtcctcagaagcatgtgtcttccccagctctgcagccacatactatccgcttgttcaggaaccaccagtgacagagcagaaaatatatactgaagacatggcctttggagcttcaacttttccacctcagtatttatcttctgagataactcttcatccatatgcctattctccttatacccttgactccacacagaatgtttactcagtgcctggctcccagtatctttataaccaacccagatgttaccgaggttttcaaacagtgaagcatcgaaatgagaacacatgccctctcccacaagaaatgaaagctctgtttaagaagaaaacctatgatgagaaaaaaacgtatgatcagcaaaagtttgacagtgaaagggctgatggaactatatcatctgagataaaatcagctagaggttcacatcatttgtccatttacgctgagaatagtttgaaatcagatggttaccataagcgaacagacaggaaatccagaatcattgcaaaaaatgtatctacctccaaacctgagtttgaatttaccacactggactttcctgaactgcaaggtgcagagaacaatatgtcagagatacagaagcaacccaagtggggacctgtccacttctgtctcttaccgacatttctcttctaagagaagtagtaaaaccagctgcagtgttatcaaagggtgaaatagtggtgaaaaaataacccaaatgaatctgtaacttgctaatgccgctaccaattctccttcatgtacaagaaaattatcttggacaccaatgggttattgttgttcgacagacattatctacagaactgtcagcagcccctaaaaatgttacttctatgataaacttaa

SEQ ID NO: 251868 - DNA, 719 bp, Homo Sapiens
actgaatatatgtaggaatgatttgaatcaaggtattgcttatgtaccattctctcaggtgtgtctgctccttcaatgaatctgggagctccgtccagtgctccccagaaagttcaaacacaaacgcactgctccgtttgcctctgtccttgggaagtgaactctgccttgtgagagtgttcctttcaatcttgtccagaagccgcacgctggtgtctatgaagccattcttgcagtatacagcctgggggatgcccttcctcctgcattcggccacaaagttccactcctcctttatcttctccaaggcgctcttctcaagcctttccacctccttcttctgccaagctttgtgcttcttgacacgagtttcccacaaggctctgatgacagaaatgtcgaagacaaccactttatgtcccattttgggagcatgaaattacctgccccgaggggcgggcactgacagtcctggcctgcccgccgcggctgtttacaccgcagaggctgtttacaccgcagaggctgtttacacccgctgagcagcacggccgagccggaagaagcctcccgtgcctgtgcgctaacaggctatatttgtaggcggataatatgatctggaggacatgtgctaaatcaactatctatctattctatgtgactcagcccagcctgagacaaaacagacttcgtaggggagggcttggcaccctgcgcgc

SEQ ID NO: 251869 - DNA, 1629 bp, Homo Sapiens
  misc_feature (1094)..(1094): n is a, c, g, or t
ctgtgtcgtcattagcatcattggcgcatgggcagttggatgagaaggaaccattcctgactgtacatgagcctgaggtacgtgggccatgtggggtgggttgtatacgccggctgaacgtgagaaggatggatcgtaaagacagtctgttgtgctgctgggaaactattctgtggcgactgcgtgttggaggcaggtgtcatggagggtggagttggcgcaagccccgcgtggtaaatggctgactgctgctgtgggctggccagatggagagcctgggcggcctggtgctgatggtgctgaacaggactgggtgcaggatgacttccaccatgttggctttgctgctgtccagtgggggtagctgaaggctgagggtgtggagtatgtgggtgcagggtagcgttagggtgcgcatactgctgagcaagggagcccgtggaaatggcaaagtagaaagaagggcttgtctccttgttgtatggtaatttgggacatgcatacatcgcatgcgtctgctcatgagccccgtactgagttgctgaagaagatactaaacccaggctgggccgtgtgttggtggtgcccatcattcctagcattaccctgtattacaggactatagacatgaggatgcctgagactgataatgtggcacatgctgaacaaggggctgatttgggaactgctgaggactgtaggcaacatattgcgtggagtaagctggtggggtggctgcaattcggtgggccccgctgctgacgctgggtgcatcatggcactctggatgatgcgtggactaagccgctgggggggcagcaatcggtaggcccgctgctgacgctgggtgcatcatggcactctgatgatgctggtcttgccgctgttggggcatatttggtattgcacgcctgggctcactgggactggatacatcatatttggtgcaaaacaaacaggctgagtataaactggagttggctgttgatgacccaccatagatgggctaggttgtgcttgaggccgaggtgaagttggggtagtagaaggctttggctgagagaaggaacgtggggttgaactcctttgcattngggattcaatgttgatttcctaacttgctcagctgcgtctttcttctcttccttatcgtctttctcttgtttacatgctgggctggaagtctgaaccccttgggaagtgacctcaggtcccctcttgtgctccgtgttactaagtattgaaggggaaatgctggggctattcggcttgctgctgccactggtacagttgctgctgctattttcaatgaaagaatccttagcacttggttcaattttgtctttgatcaaatctcttgatttttctccctctctatttttgtttagtagttgatccatagattcagaagtagaacttggctgtaacctaaaatcattcttaaatttctttaaatcatcaatctgttttctatgttcagaaacaactggtgatatacctttgttttcagcttttgagaagctaggtgatgtttcattgggtttaatattttctttattccctgcaggagagttctgcctctgatcttgaagcctggaatctttagcctcactagaaggggtaacagct

SEQ ID NO: 251870 - DNA, 1088 bp, Homo Sapiens
  misc_feature (82)..(82): n is a, c, g, or t
atcccttaatggtcctataagtccttgtaaatacagggtaaatgctaagaatgatgggcaccacccaaaaaaacggttaaanccctggtttaagtatcttcttcagcaactcagtacggggctcatgagcagacgcatgcgatgtatgtttccacgggctcccttgctcagcagtatgcgcaccctaacgctaccctgcacccacatactccaaaccctcagccttcagctacccccactggacagcagcaaagccaacatggtggaagtcatcctgcacccagtcctgttcagcaccatcagcaccaggccgcccaggctctccatctggccagtccacagcagcagtcagccatttaccacgcggggcttgcgccaactccaccctccatgacacctgcctccaacacgcagtcgccacagaatagtttcccagcagcacaacagactgtctttacgatccatccttctcacgttcagccggcgtataccaacccaccccacatggcccacgtacctcaggctcatgtacagtcaggaatggttccttctcatccaactgcccatgcgccaatgatgctaatgacgacacagccacccggcggtccccaggccgccctcgctcaaagtgcactacagcccattccagtctcgacaacagcgcatttcccctatatgacgcacccttcagtacaagcccaccaccaacagcagttgtaaggctgcccctggaggaaccgaaaggcccaaattcccctcctcccttctactgcttctaccaactggaagcacagaaaactagaatttcatttattttgtttttaaaatatatatgttgatttcttgtaacatccaataggaatgctaacagttcacttgcagtggaagatacttggaccgagtagaggcatttaggaacttgggggctattccataattccatatgctgtttcagagtcccgcaggtaccccagctctgcttgccgaaactggaagttatttattttttaataacccttgaaagtcatgaacacatcagctagcaaaagaagtaacaagagtgattcttgctgctattactgccaaac

SEQ ID NO: 251871 - DNA, 916 bp, Homo Sapiens
ggtccaaacgttggtcaacatgctccattaagcacccagaaagtgcggatataaaatgttcttcaggtgtggtaaggaggaagcaaatgtgaaaacccccagagaaccagcccctgcctcccaggaggcaatgatgtgggccaagagcagaaggggaggtctggccttggcctgcgattgctcagagggtagcagcccctttgcccaagagattgagctgcagccgtgttgctgcctcttcatttggtgaccaaagacaagacaagatcaccacgtggggaggagacagaagtgaaaggcccacctcaatgcaagggtgattagctctttctccagcagtactgactcactttggcctactaatcaatgtgaattcttcataacaggcgatcccctttgagtccacgaggacagagttgatgacagtgtagcctgaaattcctggggccctggattgaagctgtggccctgccatttcctcagtaactctgagctgttattgggcaacagacttcctaggttgtggaggaggctgggttaactggggactctaaatgcttgagccgcgtgttgactcattaactatgtctaccctaggctgaactggtgttgcccttcccttcccaggaaaggactggcctctcccattctgcccaaggaaaacctctgtgaacttttacattcttccaaactatactgatgtgtattgggctggatccattacatcagaagctactgagggtgatatcaggcatctatattttatatgtgggtgccttcacctacaccactcaccttcataggtgtgagattaatggggtgggagggcagggggaggggtacaccggccttgaagctctcatgacagacttgaccctttttttctccatgtgcccttcccttttctttggggggg

SEQ ID NO: 251872 - DNA, 766 bp, Homo Sapiens
  misc_feature (545)..(553): n is a, c, g, or t
  misc_feature (585)..(594): n is a, c, g, or t
ggattaagaaaaaaataaaataccagtacttgtagttgaacttaaatatgatgtgataagtataagctaatttggcgattttctttttttagatttcttcggtgcagaaaaaaaatgaagatttaggacaggaggaaattgttcaactttgtatgaaaaatgtaaaatgggtggaggacctctttgaaaaatttggagaacttctaaatcatgtacagcagaaatgttcctgacttttccacaaaaatcccatctttttatagcactaatgaagtggcagatatggggtggtcaaagataatcagatgtcaagtagtggccttctgcaggccggccgcttccatcatggaactgtcattaccacctctgctgaaggacagtggtgcggcctttaggaacgaagttagtcctctggaaatggacctaaatcccaccacatttttaccctaatgaatgatttttctattttgtaaaccattgggtaacttgagtcatattttcagaaacattttttgacaaatgatgaagcatgcactaagtataannnnnnnnnattgctagagaagtaacacttaaagtaacgannnnnnnnnnctgactccggctaaacaccagaatgacagagaagtggcagaaaccatatgtttgtactcacatctggcccacaaaaccagaaatactgtacattatgtaaagaggtctggtgtggtgtgacatcctgtataagaatatcatcaatttaaaatataaaatttggaaactaaaa

SEQ ID NO: 251873 - DNA, 1112 bp, Homo Sapiens
  misc_feature (826)..(826): n is a, c, g, or t
  misc_feature (838)..(876): n is a, c, g, or t
  misc_feature (926)..(994): n is a, c, g, or t
  misc_feature (1038)..(1046): n is a, c, g, or t
ccccattttccctttgaaaggaagacttctggcttctcctaaatctccgttctctgggtaaggggagtccaagcctctgtcatgaggaacggaaatgcgagggcctcgggtgttactctaaaatccgccctcagcttgcacgcccggaagctgcgattcctgcagcggaagaggcgtgatctggccttcgactcgctatgtccactaacaatatgtcggacccacggaggccgaacaaagtgctgaggtacaagcccccgccgagcgaatgtaacccggccttggacgacccgacgccggactacatgaacctgctgggcatgatcttcagcatgtgcggcctcatgcttaagctgaagtggtgtgcttgggtcgctgtctactgctccttcatcagctttgccaactctcggagctcggaggacacgaagcaaatgatgagtagcttcatgctgtccatctctgccgtggtgatgtcctatctgcagaatcctcagcccatgacgcccccatggtgataccagcctagaagggtcacattttggaccctgtctatccactaggcctgggctttggctgctaaacctgctgccttcagctgccatcctggacttccctgaatgaggccgtctcggtgcccccagctggatagagggaacctggccctttcctagggaacaccctaggcttacccctcctgcctcccttcccctgcctgctgctgggggagatgctgtccatgtttctaggggtattcatttgctttctcgttgaaacctgttgttaataaagtttttcactctgaaaaaacaaaaaccaaaacaanaaactcgaggcnnnnnnnnnnnnnnnnnnnnnnnnnnnnnnnnnnnnnnncatggtcatagctgtttcctgacccacctttcttgtacaaagtgggtaannnnnnnnnnnnnnnnnnnnnnnnnnnnnnnnnnnnnnnnnnnnnnnnnnnnnnnnnnnnnnnnnnnnncgctgcagaacccggggaatttaacccgcccaaagagccgggcnnnnnnnnngggatccaaagggattcttcttgaaatccttttttttcctgccaaaaaatctgctggctttgaaac

SEQ ID NO: 251874 - DNA, 1584 bp, Homo Sapiens
  misc_feature (697)..(704): n is a, c, g, or t
  misc_feature (706)..(708): n is a, c, g, or t
  misc_feature (710)..(712): n is a, c, g, or t
  misc_feature (724)..(991): n is a, c, g, or t
tgatgtcactcaaacttacacgacaaaattcaaacaaaaaagataaagttatatttcatcatctctatgtcctttcttctgatttgccaaattaggctaaaagaccaatagaaaaacagctaccaattttaaacaccaaagtcattcctctaggaaagacagcaaaattactaacgtgaatgacaggatgaatttttcctggtcattttcaaaccacttagatagctagaaccagaggaatcccccgaggcactttacccctcagccatggagaatgctgactttttttactttcagccaattatatggtaaatataattattagttttatcagaaaatcttatacatacaggtgatttctgatgcataattttattaaagccagagatggactttttttctagagaaacagatctctgaggttagaatggaagataatgaaacaagagatttcactttataatttacctttgtcaaactatcccagagcatgtcaattctattatgaaagtattactttgacatcatataaccaattattaatagaaaacacacatgccaaaaaaccttaaattttgtaatcttcaagtcaatcatcaacttttcttgaatttttgaagacccgaaaagaaaaataatttcaaacaacagcactcaaacatcatatgcatttgtaatgaggcacagcaatcaattnnnnnnnntnnntnnntagttaagagtnnnnnnnnnnnnnnnnnnnnnnnnnnnnnnnnnnnnnnnnnnnnnnnnnnnnnnnnnnnnnnnnnnnnnnnnnnnnnnnnnnnnnnnnnnnnnnnnnnnnnnnnnnnnnnnnnnnnnnnnnnnnnnnnnnnnnnnnnnnnnnnnnnnnnnnnnnnnnnnnnnnnnnnnnnnnnnnnnnnnnnnnnnnnnnnnnnnnnnnnnnnnnnnnnnnnnnnnnnnnnnnnnnnnnnnnnnnnnnnnnnnnnnnnnnnnnnnnnnnnnnnnnnnntggcagtcaattttaagcctcctatttcccaggttttagcttaataatcctcattagtttttcagatttttgtcagtcttgttttggggctattttgccttagtgggcctaaacagaatattaaaatacattaataatccatactgagagtagagtataaatgggtttctcactccttagggacacgagtggaaacaatacatcccatgaacacaggtgaatgtccctggttatccctgagctgggcagtttcacacaatcattttttctctgaggccaaagtctgtggtttgatcatcttagcagcttccagaacagaaagtaggtttactttgtctccaaattctttttctcggtgctcaagaagaatgccctgctttcctgatcccaccacgaaaactcccccaaggatgaagccttctccttccaggtttccagagaagcctccgttccaggctcggaagaagttgtaccacactcccagacggataaatcccataaacatcatcttccgcctttgtggaccatagaactttttcttttcatccaggaagatttctccttgatcccgaaattccggaccggtccagcct

SEQ ID NO: 251875 - DNA, 709 bp, Homo Sapiens
  misc_feature (123)..(396): n is a, c, g, or t
  misc_feature (398)..(420): n is a, c, g, or t
ggtctttagaaggggatagtgatgtgtcattttccccaggagaagtgccagctgattccaagccaagtgggtataaacttgtcagttccaggcagttagcttcatactactaaaaaaggctannnnnnnnnnnnnnnnnnnnnnnnnnnnnnnnnnnnnnnnnnnnnnnnnnnnnnnnnnnnnnnnnnnnnnnnnnnnnnnnnnnnnnnnnnnnnnnnnnnnnnnnnnnnnnnnnnnnnnnnnnnnnnnnnnnnnnnnnnnnnnnnnnnnnnnnnnnnnnnnnnnnnnnnnnnnnnnnnnnnnnnnnnnnnnnnnnnnnnnnnnnnnnnnnnnnnnnnnnnnnnnnnnnnnnnnnnnnnnnnnnnnnnnnnnnnnnnnnnnnnnnnnnnnnnnnnntnnnnnnnnnnnnnnnnnnnnnnngccctctttgtattaaatttcaaaatttcccccttttggaggataaaagacaaagagaagagaggtctccgctggcacagaaaccagcagcgagatcactctgccatcctttcccttggatccgtgggcacgtctcctgcttggggtgttttcttttccaacggtgtcttttgcctccttctctccctggccacagggacgcgtatcccacgtgtgaggtggttgatgtgcagctgtgctacaacgtggccaaactgatctacctgtgcaaggagaagtgagtggtggg

SEQ ID NO: 251876 - DNA, 2673 bp, Homo Sapiens
  misc_feature (32)..(32): n is a, c, g, or t
  misc_feature (51)..(104): n is a, c, g, or t
  misc_feature (108)..(108): n is a, c, g, or t
  misc_feature (141)..(141): n is a, c, g, or t
  misc_feature (1142)..(1142): n is a, c, g, or t
  misc_feature (1273)..(1273): n is a, c, g, or t
  misc_feature (1507)..(1507): n is a, c, g, or t
  misc_feature (2163)..(2163): n is a, c, g, or t
  misc_feature (2237)..(2237): n is a, c, g, or t
gattgtgcccttgcactcccagcctgggcaanaagagtgaaactctgtctnnnnnnnnnnnnnnnnnnnnnnnnnnnnnnnnnnnnnnnnnnnnnnnnnnnnnnctgntcttatctacaaagataatttgaacagttgttnccctattgctgacagattaaagtttggcccttaaaatgacacctgcttctactgaccacttccggtaaaggccactctctccatccttccaatgacaagtaatgcttcacactacagccaactaatagttcaagattcttagaaatggacaaaccacttgttgcttatttccacacagttactacctgtgtggaaaaattcaagttgctaaataacagtgtcactttatggcctggtaccacactagagcctgtcacaagttcccaagggcagtggcctcttcctctactaacgggtactaccagagaccttggttactaacacctaaatattaagacccatgggatttgcagtccctacattcatgcctagtactttggtaagatccacaccaggcacatactgttttatgcagttttcaaggacatctgcaatagacacatatcttcacacctaagctttaaaaaatactttaacgtaataatggtaatgcagagaactagaattcaacatattacactgctaaaatattcatataaatactatatatgcatgggttcattccattagaaaaattcacctatcagaatattaaagaccagtatcagcaaagcccaaggagagagtattttaacagtaggaacactaaaaatatcaagctatgaggtttataaacaagtggtgggaaagagaactttttacatttgctattgttatgacaggcacaatctgaaatacaattttagattagcagtgtataaaaatactttttaaacaatagttttgataggtacagtagcatttaaacaaacagctgtgtggttattccttttgaggacctactaaaacaattcgacttactgcccccagctacacctgaaagtgcgaacctggaaagcaagtctcttacccaggtacacaccacacacacccacatactgaaaccacctccatctatgatgcatactgatgaggcggtgatctcaaacacggcgtgagangagtgtttgaagcctgtttccatttccaggtttgggatgaattgaacaagaggcgaaaggccaagtggagtctgtgtgtgcctgggtcctctctaggagtttaatctggcatatcaatatttaactggganggggggggaacgtatttcccagggctctgggttataactactctggccttctttccaaatattggagcaattttcggagcttctggaactgatgtttcttcagcatcttcactatcttcgtgatggagatcatatgaaatgttcccatattctcttaaaaatgggaaaatttcaagcagaaactgacagaagtctctgcgaatgcgcaaaccaccaatgattgcccccctttcngcctaaatgttgtggccattaaagttagtaaggaaagccaaagggggacaaatatggagacgtaggagaatgtattgtggccatccaatctgtgaaccagcaggacctcaaaagtgagcagaggcacgacaatcgttatccaactgatagccatggtcacgtgtgttctccgctgctcggcaaccacatccagggaccgcaggaacaggagggaccagacgatgtaatagaggacgaccaggcaaaggaacgacatgaggatccacaggggcacaaacaccaccagccacggccagtgaataatcctgtccagctttagggcgatgaagatgaactgcaggatgttgaccgagcacaggatctccagctccagcgacctatcgtgtcgaaagccccagacgcaggcagccacggacacgggggacacgaagaagagaggcatgaagaccagcagccagaagtgggtgcccctctccaccctgtcgcagaccaggacttcgaacatgagcagcagcaggtggatgcccacagcgatcagcatggctttgaactccacacaggcctctccctcggtgcggtagcgagggttgcgggcccaaacgcccgcgcccacggaggcgcctgcgacgactagaagcttccacagccatatgggngcaaagacgccccagtagctccattggatgatgccgtccaggcggaggggcagcagcaccgagaagagcagcangcaggtgtagatgagaaacttactggggttgaagtcctggtacaggcccctggggttcatggcggaggccgccgcttgcctgcccgggcctgctccctcgcgacgctcggcgctcgcgtctccgcggcttctccggccgccgcctcccgggccccgcccaagccgctccgcgtggacgaatgccgggacgaccaggaggaggttcggagcggcgaagcggagaggccggaacacgtgcacgcgcggtcacgtggcccggccggaagcgcgctggggtgtggcgcgcgcgggcacgggcggcgcggcggttacaaactgggcgctgcctcggtcccgccgccgcccgcgttcactccgtacccatcaagaaggcacctaatgcgtgtggggcccgaaggggcctggcgcgctgctgactccccaagcggcccgcgac

SEQ ID NO: 251877 - DNA, 550 bp, Homo Sapiens
gaggaggaagtgtcatggcgtcgggccgtggagcttcttctcgctggttctttactcgggaacagctggagaacacgccgagccgccgctgcggagtggaggcggataaagagctctcgtgccgccagcaggcggccaacctcatccaggagatgggacagcgtctcaatgtctctcagcttacaataaacactgcgattgtttatatgcacaggttttatatgcaccattctttcaccaaattcaacaaaaatataatatcgtctactgcattatttttggctgcaaaagtggaagaacaggctcgaaaacttgaacatgttatcaaagtagcacatgcttgtcttcatcctctagagccactgctggatactaaatgtgatgcttaccttcaacagactcaagaactggttatacttgaaaccataatgctacaaactctaggttttgagatcaccattgaacacccacacacagatgtggtgaaatgtacccagttagtaagagcaagcaaggatttggcacagacatcctatttcatggctaccaa

SEQ ID NO: 251878 - DNA, 1057 bp, Homo Sapiens
ccagccaactcagctttgggacaaacccagccaagtgaccaggacactttagtgcaaagagctgagcacattccagcagggaaacgaactccgatgtgcgcccattgtaaccaggtcatcagaggaccattcttagtggcactggggaaatcttggcacccagaagaattcaactgcgctcactgcaaaaatacaatggcctacattgggatttgtagaggagaaaggagccctgtattgtgagctgtgctatgagaaattctttgcccctgaatgtggtcgatgccaaaggaagatccttggagaagtcatcaatgcgttgaaacaaacttgggcatgtttcctgttttgtgtgtgtagcctgtggaaagcccattcggaacaatgtttttcacttggaggatggtgaaccctactgtgcagactgattattatgccctctttggtactatatgccatggatgtgaatttcccatagaagctggtgacatgttcctggaagctctgggctacacctggcatgacacttgctttgtatgctcagtgtgttgtgaaagtttggaaggtcagacctttttctccaagaaggacaagcccctgtgtaagaaacatgctcattctgtgaatttttgaaagtcaacagttcaggagaagagaaggaatttgaagagaaaaaggaaaattaaaattactaattaatttttagattcaatatttatatggagttttgaaaaataatagtggccctgaaggaataaattccagctttaaaaaccaagtctgaggaaatatttggcttcataaagtaaagagacggtttggcatttattattactttttcctgtattttatgcccataaaataagctttataaaaaccaatttcctgatggactattaaattcatcttagaataaattagtgaagaatttaattttagaataaataatccaatctgaaataattataccttctttccttgttaggtagttatgagtaaatctgcaaaaggcaatgaaaatgccttaaattttatcaataacagaattattgtattt

SEQ ID NO: 251879 - DNA, 771 bp, Homo Sapiens
ggccgggaattaaatgtgaggtaaaataagtttatttttaatagtatctgtcaagttaatatctgtcaacagttaataatcatgttatgttaattttaacatgattgctgacttggataattcattattaccagcagttatgaaggaaatactgctaaaatgatctgggcctaccataaataaatatctccttttctgagctctaagaattatcagaaacaggaaagaatttagaaaaacttgagaaaacctaatccaaaataaaattcacttaagtagaactataaataaatatctagaatctgactggctcatcatgacatcctactcataacataaatcaaaggagatgattaatttccagttagctggaagaaactttggctgtaggtttttattttctacaagaattctggtttgaattatttttgtaagcaggtacattttataaaatgtaagccctactgtaaggtttagcactgggtgtacatatttattaaaaatttttattataacaacttttatttggcctttctgaacactctatttattgatgttgaagtaaggattagaaacatagactcccaagttttaaacacctaaatgtgaataacccatatatacaacaaagtttctgccatctagctttttgaagtctatgggggtcttactcaagtactagtaatttaacttcatcatgaatgaactaaaatttttaagttatgcccaatttataacgctgttatgactacattgggagttagatacctt

SEQ ID NO: 251880 - DNA, 1089 bp, Homo Sapiens
  misc_feature (267)..(295): n is a, c, g, or t
  misc_feature (468)..(476): n is a, c, g, or t
  misc_feature (519)..(549): n is a, c, g, or t
  misc_feature (1018)..(1018): n is a, c, g, or t
ggcaacctgaaaaaggctgtcattctacagggctctaatgatgttgaacttgttgctgagggcaacagcaggttcacttacactgttcttgtagatggctgctctaaaaagacaaatgaatggggaaagaccaatcattgaatacaaaacaaataagccatcacgcctgcccttccttgatattgcacctttggacatcggtggtgctgaccaggaattctttgtggacattggcccagtctgtttcaaataaatgaactcaatctnnnnnnnnnnnnnnnnnnnnnnnnnnnnnctttctctttgccatttcttcttcttcttttttaactgaaagctgaatccttccatttcttctgcacatctacttgcttaaattgtgggcaaaagagaaaaagaaggattgatcagagcattgtgcaatacagtttcattaactccttcccccgctcccccaaaaatttgaannnnnnnnncaacactcttacacctgttatggaaaatgtcaacctttgtaannnnnnnnnnnnnnnnnnnnnnnnnnnnnnnccataaacatttgcaccacttgtggcttttgaatatcttccacagagggaagtttaaaacccaaacttccaaaggtttaaactacctcaaaacactttcccatgagtgtgatccacattgttaggtgctgacctagacagagatgaactgaggtccttgttttgttttgttcataatacaaaggtgctaattaatagtatttcagatacttgaagaatgttgatggtgctagaagaatttgagaagaaatactcctgtattgagttgtatcgtgtggtgtattttttaaaaaatttgatttagcattcatattttccatcttattcccaattaaaagtatgcagattatttgcccaaagttgtcctcttcttcagattcagcatttgttctttgccagtctcattttcatcttcttccatggttccacagaagctttgtttcttgggcaagcagaaaaattaaattgtncctattttgtatatgtgagatgtttaaataaattgtgaaaaaaatgaaataaagcatgtttggttttccaa

SEQ ID NO: 251881 - DNA, 1149 bp, Homo Sapiens
  misc_feature (1087)..(1087): n is a, c, g, or t
  misc_feature (1109)..(1109): n is a, c, g, or t
  misc_feature (1118)..(1118): n is a, c, g, or t
  misc_feature (1125)..(1125): n is a, c, g, or t
ccggagagcccggtgaaaaggggcccagaggtcttcctggcttaaagggacacaatggattgcaaggtctgcctggtatcgctggtcaccatggtgatcaaggtgctcctggctccgtgggtcctgctggtcctaggggccctgctggtccttctggccctgctggaaaagatggtcgcactggacatcctggtacagttggacctgctggcccccctggtccccctggccctcctggacctccaggtgtaagcggtggtggttatgactttggttacgatggagacttctacagggctgaccagcctccgctcagcaccttctctcagacccaaggactatgaagttgatgctactctgaagtctctcaacaaccagattgagacccttcttactcctgaaggctctagaaagaacccagctcgcacatgccgtgacttgagactcagccacccagagtggagcagtggttactactggattgaccctaaccaaggatgcactatggatgctatcaaagtatactgtgatttctctactggcgaaacctgtatccgggcccaacctgaaaacatcccagccaagaactggtataggagctccaaggacaagaaacacgtctggctaggagaaactatcaatgctggcagccagtttgaatataatgtagaaggagtgacttccaaggaaatggctacccaacttgccttcatgcgcctgctggccaactatgcctctcagaacatcacctaccactgcaagaacagcattgcatacatggatgaggagactggcaacctgaaaaaggctgtcattctacagggctctaatgatgttgaacttgttgctgagggcaacagcaggttcacttacactgttcttgtagatggctgctctaaaaagacaaatgaatggggaaagacaatcattgaatacaaaacaaataagccatcacgcctgcccttccttgatattgcacctttggacatcggtggtgctgaccaggaattctttgtggacattggcccagtctgtttcaaataaatgaactcattttaaattaaaaaggaaaggaatttggaaaaanttctctttgcctttcttcttcntcttttttnactgaangtggattcttccatttttctgcac

SEQ ID NO: 251882 - DNA, 355 bp, Homo Sapiens
  misc_feature (228)..(256): n is a, c, g, or t
ggatgttgaacttgttgctgagggcaacagcaggttcacttacactgttcttgtagatggctgctctaaaaagacaaatgaatggggaaagacaatcattgaatacaaaacaaataagccatcacgcctgcccttccttgatattgcacctttggacatcggtggtgctgaccaggaattctttgtggacattggcccagtctgtttcaaataaatgaactcaatctnnnnnnnnnnnnnnnnnnnnnnnnnnnnnctttctctttgccatttcttcttcttcttttttaactgaaagctgaatccttccatttcttctgcacatctacttggcttaaattgtgggcaaaagaga

SEQ ID NO: 251883 - DNA, 449 bp, Homo Sapiens
  misc_feature (416)..(416): n is a, c, g, or t
  misc_feature (432)..(432): n is a, c, g, or t
tgaaaacatcccagccaagaactggtataggagctccaaggacaagaaacacgtctggctaggagaaactatcaatgctggcagccagtttgaatataatgtagaaggagtgacttccaaggaaatggctacccaacttgccttcatgcgcctgctggccaactatgcctctcagaacatcacctaccactggcaagaacagcattgcatacatggatgaggagactgggcaacctgaaaaaggctgtcattctacagggctcttaatgatgttgaacttgttgctggagggcaacaggcaggtttcacttgacactgttccttgttaggatgggcttgctcttaaaaaaggaccaaattgaatggggggaaaggacaattcatttgaattacaaaacaaataaggccttcacgcntgcccttccttggatntttgcacctttgggatt

SEQ ID NO: 251884 - DNA, 299 bp, Homo Sapiens
  misc_feature (177)..(177): n is a, c, g, or t
ccagccaagaactggtataggagctccaaggacaagaaacacgtctggctaggagaaactatcaatgctggcagccagtttgaatataatgtagaaggagtgacttccaaggaaatggctacccaacttgccttcatgcgcctgctggccaactatgcctctcaggaacatcacctnaccactgccaaggaacaggcattgcattacatgggatggagggagcactgggccaacctgcaaaaagggctgttcattcttacaggggctcttattgatgtttgaactttttttctttgggg

SEQ ID NO: 251885 - DNA, 1097 bp, Homo Sapiens
  misc_feature (829)..(837): n is a, c, g, or t
gaccagcaaagaggaagaggagaggcgcattgcagaaatggggcgccccatcctgggagagcacaccaagttggaagtgatcattgaagaatcctatgaattcaagagtactgtggacaaactcattaagaagacaaacctggcccttgtggttgggactaacagctggagagaacagttcattgaagctatcactgtcagtgctggggaagatgatgacgacgatgaatgtggggaagagaagctgccctcctgtttcgattacgtgatgcactttctgactgtgttctggaaggtcctgtttgccttcgtcccccctactgaatactggaatggctgggcgtgtttcattgtctccatcctcatgattggcctactgacagctttcattggagacctggcttcccactttggctgcaccattggcctgaaagattctgtgactgcagtcgtgttcgtcgcacttggaacgtcagtgccagacacatttgccagcaaagtggcagccacccaggaccagtatgcagacgcctccataggtaacgtcacgggcagcaacgcggtgaatgtcttcctgggaatcggtgtggcctggtccatcgctgccatctaccacgcagccaatggggaacagttcaaagtgtcccctggcacactagctttctctgtcactctcttcactatttttgctttcatcaacgtgggggtgctgctgtatccgcgggagcccgaaataagaggtgagctgggaggggcccccggactgccaagcttcctcacatcttcccctgtttggtgctccctgtgggctcctgtaaattttcctttnnnnnnnnntggaaagccctccctgcccacctcaaggggctttctaaagggaaccattcgcaccataggtaccttttcctatatatccccccgcctccccttttttattcctccttcaaaaactcttggcctcaccgcgaccgggagcttttattttaccccccctcacttttaaaaaccaatacaccttgtctggggctcgccttccggtcccctcttaacaatatttttcttaaacccctcttctttcttgcgctccgtggggcccc

SEQ ID NO: 251886 - DNA, 699 bp, Homo Sapiens
  misc_feature (677)..(677): n is a, c, g, or t
  misc_feature (680)..(680): n is a, c, g, or t
gcacatgagcctgggggttccctctctgaaagaagatcagtgatctgtgatatttctccactaagacagattgtcagggacccaggggctcactcactgggacacatgagtgccgacaccagaattgggaggaatgaccgtcccaatccaactttaagtcagtcggtcattcttcctggtggtttggtgtccatggaaaccaagctgaaatcccagagcgggcagataaaagaggaagactttgaacagtctaaatctcaagctagtttcaacaacaagaaatctggagaccactgccatcctcctagcatcaagcatgagtcttaccgcggcaatgccagccctggagcagcaacccatgattccctttcagactatggcccgcaagacagcagacccacgccaatgcggcgggtccctggcagagttggtggtcgggagggcatgaggggtcggtccccttctcaatatcatgactttgcagaaaaattgaaaatgtctcctggtgcggagcagaggcccagggggagaccctcatcacatgaatccacacatgaccttttcagagagggctaaccggagttctttacacactcccttttctcccaactcagaaaccctggcctctgcttatcatgcaaatactcgggctcatgcttatggggaccctaacgcangtntgaattctcagctgcatta

SEQ ID NO: 251887 - DNA, 1002 bp, Homo Sapiens
  misc_feature (48)..(48): n is a, c, g, or t
  misc_feature (916)..(916): n is a, c, g, or t
ggtcgcggaacccggaagcgggggtgcagcgcggcagaatgagggttngattcctcggctgaccccacaatgtcgcaggagcaagggccggggtcctccacgcctaccagttctacgacacttcttgacgctctgctacagaacctttacgactttggaggtacagaaggtgaaacagaacagaagaagatcataaagaaaagggaaaacaagaagagagatgtgatggcttcagcggccttggcagcagagccatctcccctacctggttctctcataagaggccagaggaagagcgcttcgagcttcttcaaggaacttagagaagagcggcattgtgctacttctgggacccccacaggaccagagatccttgctgctgcagatcctccctcttccctaaagaacaatagggaacaagtagaagtggtagaatatcacagcagtaaaagaagaaaattgacgccagatcataacaagaacacagagcaggctaatcctagtgttttgcagagagatgtggatacacaggaatttaacctagaaaaagctcgtttagaagtgcaccggtttggaatcacgggttatggaaaaggaaaggagagaaacctggaacaggaacgtgccaatatgctgggcgctaagcctcctaaaaagaggtatgtgaattacaagggtttacaggagcaaattaaagaaaaaaaggcagcaaaggaagaagaaaagagactggcccaagaaacagatattttcaagaaaaagaagaggaaaggacaggaggacaggaaatccaaaaagaagtccgctcccagtattttgtcaaatggacggattggacaggttggaaaattcaaaaatgggaacactgattctgagcccagttgatatcaagaaaattaaattcttccagagtggnccaaattgaagtactttgtccaaataaaacgagggtggggaacaacttgagtccaacttgcagcggccctggggtccctgttgcga

SEQ ID NO: 251888 - DNA, 1681 bp, Homo Sapiens
gagtaaatgcaaagggacagcaggtatttctgaaagatatctggccgactagagacgagatccaggcagtggagcgtcagtatgtcatcccggggatgtttaaggaagtctatcagaaaatagagactgtgaatgaaagctggaatgccttagcaaccccatcagataagctgtttttctggaattccaaatctacgtatatcaaatcaccaccattctttgaaaacctgactttggatcttcagccccctaaatctatagtggatgcctatgtgctgctaaatttgggagattcggtaacaactgaccacatctccccagctggaaatattgcaagaaacagtcctgctgctcgctacttaactaacagaggcctaactccacgagaattcaactcctatggctcccgccgaggtaatgacgccgtcatggcacggggaacatttgccaacattcgcttgttaaacagatttttgaacaagcaggcaccacagactatccatctgccttctggggaaatccttgatgtgtttgatgctgctgagcggtaccagcaggcaggccttcccctgatcgttctggctggcaaagagtacggtgcaggcagctcccgagactgggcagctaagggccctttcctgctgggaatcaaagccgtcctggccgagagctacgagcgcattcaccgcagtaacctggttgggatgggtgtgatcccacttgaatatctccctggtgagaatgcagatgccctggggctcacagggcaagaacgatacactatcattattccagaaaacctcaaaccacaaatgaaagtccaggtcaagctggatactggcaagaccttccaggctgtcatgaggtttgacactgatgtggagctcacttatttcctcaacgggggcatcctcaactacatgatccgcaagatggccaagtaggagacgtgcacttggtctggcgcccagggaggaagccgcaccaccagccagcgcaggccctggtggagaggcctccctggctgcctctgggaggggtgctgccttgtagatggagcaagtgagcactgagggtctggtgccaatcctgtaaggcacaaaaccagaagtttctacattctctatttttgttaatcatcttctctttttccagaatttggaagctagaatggtggggaatgtcagtagtgccagaaagagagaaccaagcttgtcttttaaagttacttgatcacaggacgttgcttttttcactgtttcctattaatcttcagctgaacacaagcaaaccttctcaggaggtgtctcctaccctcttattgttcctcttaagctctgctcaatgaaaccttcctcttgagggtcattttcctttctgtattaattataccagtgttaagtgacatagataagaactttgcacacttcaaatcagagcagtgattctctcttctctccccttttccttcagagtgaatcatccagactcctcatggataggtcgggtgttaaagttgttttgattatgtaccttttgatagatccacataaaaagaaatgtgaagttttcttttactatcttttcatttatcaagcagagacctttgttgggaggcggtttgggagaacacatttctaatttgaatgaaatgaaatctattttcagtgaaaacttgttg

SEQ ID NO: 251889 - DNA, 781 bp, Homo Sapiens
ggccgggagggggcggggccggccctcaaagtcctctgacggccccagtcagggaatttcaatttgaaacctagcacaagggaggaggcaggcgcggctgccggcggctgggactgaaaagggacgggtcccgcggcgagcgagctcctgagcataagctgtggccatgactactgaagtaggctctgtgtctgaagtgaagaaggactctagccagttaggaacagatgcaaccaaggaaaaacctaaagaagtagcagaaaatcagcagaatcagtcttccgatccagaggaggaaaaaggttcccagccacctcctgcagctgaaagccaaagtaatctacgccgccagaagagagagaaggaaacatcggagagcaggggtatttctcggttcataccgccatggcttaagaagcaaaagtcatataccttagtagtggccaaagatggaggagataaaaaagagcctacccaagctgttgttgaagaacaggtcttagataaagaggaaccccttccagaagaacagagacaggctaagggtgatgctgaagaaatggctcagaagaaacaagagattaaagttgaagtcaaggaagaaaaaccctcagtgagcaaggaagaaaaaccctcagtgagcaaagtggagatgcagcctactgaattagtaagtaaggagagagaagagaaggtaaaagaaacacaggaagacaaattagaaggaggagcagcaaaaagggagaccaaggaagtgcagaccaatgagctgaaagcagag

SEQ ID NO: 251890 - DNA, 1342 bp, Homo Sapiens
cacagtgttaaagatggtaagagggagccagcagactgcaaatgctaccacaatggagagcagcatgatattgattcttttggtttcactggacctgtacttattgtctctcatcttgtccatcatgttgtttctcctttttaggcgtatatatatcttgaagtagcaaataaatataaaacaaagtggaccaaaatactgcagcaccaagaggagagtggtataagacaacctatgagagtccgatggaaattgatcaaagcacacgtatttgtctttgtacgcatcaagtgttacattttggaacggctcatcagtcattacttggtagatcaggaaaggcaaagaagaagccacagcaaggacccaaatcacagcaatacctacataagcatgtctattatttggtctccaccctcgagggttgattatcagctgatgtcgttccacagcaatgagaaccagagagaaaatggacacagtgattgaaacacattgcacaaaaggattcaacttacacatcgcctcaccaaagacccagtggtccattaatgtgtagacaaatgtaaaggggagacacatgatgccaacaagcaagtctgagaaggaaaggttcacaatcaggatgttggtaacatttctcatctccttttgtttcaagatgattatgaccaaggccaggtttccagagacaccaagaatgatcacagctccataagcaagagctaaggtaaatatcatggccaagggcagatgacaatcatcattttcaaaagccagaagctgggcattcttctctgagaaattagagtggactgaatgattttcaacctgggaaaataatgttgaattcattttgattggtttggttgttatagattattttagacaaatggacagtatgtttcttcaaagcaggtcaactgttcagcttattcttattccccatattggaatccatttaccaaaattattctgaattcttcattcccttgaactgaacaatctgtaaagagaaaatgaccaattgcattactaattttattgagggcagtcaaaatgacttctgactcacagaactctttaaagtgaaaacactgaaataaataaacaaaatgtaatcttgtaaacatctttctaaaatagcagaaatggtgaaaacatactgaataaagaaaaaataaaatttttaattggacttgcttacagaacaagtcttagtaaaacataatggtctataagttagtaaggaatataaatattatgccccaagtcttacataaacagtaataacagcacattcctaaacattataagaatatgaatgtataaaaaccacccg

SEQ ID NO: 251891 - DNA, 854 bp, Homo Sapiens
  misc_feature (782)..(782): n is a, c, g, or t
caggtgtgacccaatgtgcccagccccaaactgacttctgaggaaccaagaagcttccttatcatttcctcccactcccatgccgttatgttttttggatccgcagggaagaatcttatgaggttaaaaagaggggatgggggaagggtgtgagtcagtatcagttacggagaagccgcgtccttaggtaagccggggagtgggcacagaaacagcccttaatgatcccagagactatatggaactcagaagccttgctttaggttcattcctcgtattttcccaaatgagatcttcggagacctgctctacacacttagctctgtcaccactgtcaacagatacatcaccagaaatgcaagtgggccagacgggtccagctcttaaacgatcgctgcttttttcgggtctgaggcaaaagaatccattaacaatgcctccccttgaccagcaccccccatcttctgcaagtaatacccatgtccctcaacacccccaagcccagggaggcagccccctcaccatctgtgactcatagccatcaatattgtagggcacgagaggagaggagaagggcaatttttctggttagggatgcaagaggaggcaggggtaaaatctaagtaagctttccaaagagcacaggaggtgccagaacacaacagccacttgggtttaaagatggaaacagcctgacgatcaggcgatctgtcgaacatttcccaggtctgatgggtgtgcacacctgtaaggtttcccccaggcaccttcgagccttcccntgacttgcatttctttgcccataaagaacaagatggtaagagaaaacactttgaatttaatgttccaattac

SEQ ID NO: 251892 - DNA, 1089 bp, Homo Sapiens
  misc_feature (650)..(666): n is a, c, g, or t
  misc_feature (1012)..(1012): n is a, c, g, or t
  misc_feature (1036)..(1036): n is a, c, g, or t
  misc_feature (1074)..(1074): n is a, c, g, or t
tttaaagaaggtaacaaaaagagaaagaaaatgccgaaaccaatcaacgtaagagtaactacaatggatgctgagctggaatttgccattcagcccaatacaactggcaaacaactttttgaccaggtggtgaaaacagttggtttgcgtgaggtctggttttttgggctgcagtatgtagacagcaaaggttattctacatggcttaaactaaataaaaaggtaacacagcaggatgttaaaaaagagaatcctttacagttcaagtttagagctaaattctttcctgaagatgtttctgaggaattaattcaagaaataacccagagactcttcttcttgcaagttaaagaagccatcttaaatgatgagatatattgcccgccagaaactgcagttcttttggcttcctatgctgtccaagccaagtatggagattacaataaagagattcataagccaggctacctggctaatgatagactcctaccccagcgtgtattggaacaacacaaactaacaaaagaacagtgggaagaaagaatacagaactggcatgaagaacatagaggaatgttaagggaggattctatgatggaatacctgaagattgcacaagatctagaaatgtatggagtcaactattttgnnnnnnnnnnnnnnnnnggaactgaattgtggctaggtgttgatgctttgggtctgaatatttatgagcatgacgacaagttaacacctaaaattggtttttccctggagtgaaatcagaaatatttcatttaatgacaaaaaatttgttataaagccaatcgacaaaaagggcacctgatatttgtgttttatgcaccctcccctgagaatcaataaagcggattttggccttatgtatgggaaaccatgaactatacatgcgaagaaggaagcctgatactattgaagtacaacagatgaaggctcaggctagggaggagaaacatcagaagcagttggaaggggcacattagagaatganaagaagaaaagagaaatagcaganaaggaaaaggaaagaatagaacgtgaaaaggaagagcntatggaacgtctaaa

SEQ ID NO: 251893 - DNA, 723 bp, Homo Sapiens
  misc_feature (498)..(512): n is a, c, g, or t
  misc_feature (536)..(587): n is a, c, g, or t
  misc_feature (652)..(652): n is a, c, g, or t
  misc_feature (663)..(674): n is a, c, g, or t
  misc_feature (694)..(694): n is a, c, g, or t
acagatttagactattacacactaaaatcttcatagatttagaatctatttcacttcattttcttccaaaaagaatttgatgtgactaggtctaattattgtaaacttaagatttttgttgattatacttgaaattatttttccaggtaacacagcaggatgttaaaaaagagaatcctttacagttcaagtttagagctaaattctttcctgaagatgtttctgaggaattaattcaagaaataacccagagactcttcttcttgcaagttaaagaagccatcttaaatgatgagatatattgcccgccagaaactgcagttcttttggcttcctatgctgtccaagccaagtatggagattacaataaagagattcataagccaggctacctggctaatgatagactcctaccccagcggtaagtgaaacatgcgtttgcattatattgtctgaaaattgtattctagaagtctataaataaaacgtttttcaggnnnnnnnnnnnnnnnggagacagggtctggacctgtcannnnnnnnnnnnnnnnnnnnnnnnnnnnnnnnnnnnnnnnnnnnnnnnnnnntggggttcaagccatccttccacctcagcctcctgagtagctgggtctataggcacatgccattntgtccgctaannnnnnnnnnnnaatgtattttttcattgagntgggggtttcatcatgtttgcccagggct

SEQ ID NO: 251894 - DNA, 2598 bp, Homo Sapiens
  misc_feature (459)..(459): n is a, c, g, or t
  misc_feature (476)..(476): n is a, c, g, or t
  misc_feature (486)..(486): n is a, c, g, or t
  misc_feature (488)..(490): n is a, c, g, or t
  misc_feature (499)..(499): n is a, c, g, or t
  misc_feature (501)..(501): n is a, c, g, or t
  misc_feature (865)..(865): n is a, c, g, or t
  misc_feature (867)..(867): n is a, c, g, or t
  misc_feature (2074)..(2074): n is a, c, g, or t
  misc_feature (2097)..(2097): n is a, c, g, or t
  misc_feature (2148)..(2148): n is a, c, g, or t
  misc_feature (2237)..(2237): n is a, c, g, or t
  misc_feature (2357)..(2357): n is a, c, g, or t
  misc_feature (2360)..(2360): n is a, c, g, or t
  misc_feature (2390)..(2390): n is a, c, g, or t
  misc_feature (2492)..(2492): n is a, c, g, or t
  misc_feature (2557)..(2557): n is a, c, g, or t
cagactgcggagtgggtcaggggctgcgagggctgccccaagtcctaccgggtttgcacgggcgcgcccggctccgcccgcaagtgcgccttcctgacttactgctgggtgcgcggggctgggggtgcgagtaccacccctgaagtctcttcctgggcgacctccggggcctcattctaggcctccttaaagagaaggatctaaattaggaaaaggaagtgcccttatccacgaccaagctcttccacctacggagctcgcttagtctgcacctcaaccgtgcggaaagtgactgccctgtttactgaggaaaaactggggctcagaaagataccatggagtagtttgaaacaggaacaaaatcttctgaaagctcggagcagaagcctttttggtcaacatggaggaaaaaagacggcgagcccgagttcagggagcctgggctgcccctgttaaaanccaggccattactcagncaactaccantnnnaaaagccancnccaccaaaaacctaacaagacctggaagaacaaagagcatcatctctctgacagagagtttgtgttcaaagaacctcagcaggtagtacgtagagctcctgagccacgagtgattgacagagagggtgtgtatgaaatcagcctgtcacccacaggtgtatctacggtctgtttgtatcctggctttgttgacgtgaaagaagctgactggatattggaacagctttgtcaagatgttccctggaaacagaggaccggcatcagagaggatataacttatcagcaaccaagacttacagcatggtatggagaacttccttacacttattcaagaatcactatggaaccaaatcctcactggcancnctctgtgcgcacactaaagaaccgcattgaagagaacactggccacaccttcaactccttactctgcaatctttatcgcaatgagaaggacagcgtggactggtacagtgatgatgaaccctcactagggaggtgccccattattgcttcactaagttttggtgccacacgcacatttgagatgagaaagaagccaccaccagaagagaatggagactacacatatgtggaaagagtgaagatacccttggatcatggtaccttgttaatcatggaaggagcgacacaagctgactggcagcatcgagtgcccaaagaataccactctagagaaccgagagtgaacctgacctttcggacagtctatccagaccctcgaggggcaccctggtgacgtcagagctttgagagagaagcttcactgaaacggagcaaaccttccactgagaagccacttcaagaggctggtgctgctagatctcatgatgtggctgttgggaagatggtggggtttgtttgccagcttggagtcctattaaatgaaagccagcaactcatgttggtaataggtctactgtgggaacagttatccctaaccacagctcaaaatcgctatcatctttaggcaaattaaaatctatgtggcagtgctcatgacacaaccacaatccgaaacatctccaatatttccctcaccaaaacccgatcgcaaaacgactacaagcacgaaccgccgaatcgtaatggtccccgcgggaacccctatcccctctatagcctagaaatttcttcggtccggtccccccgctttcccaaaaacttttccaaaacaccccccgtttggccgcggcggtctcccttatggcacaataacccttttgtcccatcttgtttttccccccacaaaacccccgggccctacgccccatagggtcctcgcggcttttcttcccaccgataaaaaaaacccccccgcgggtgttaaccacacacaccgcggctctgtaaacaacaaatttccctaaggcagggcggggtccctggggaggagggcctcaactcacctgcgggatcttcctatcccacaaacagagggcgcggcgcctcttgcgcgccggcgcccctccgcccgttcgtctcacaaatttttctccgccctctcacgccctgtccttctaccgcccgcgtgtctgtgttttcgcctgancgccgccgctaccgcgtggttcnttgccaccgcggcctgttctctatttaacgagtgtggccccgtcctcgccnaccactatcacttctgtggaagagagccttatacttattgcgaccccgccgctcttgtctttgcgtcacgccacacttccttgtatttnatttccgccgccgcccgtggctgttctaccccacgacacatcacctttgtgtggtgtccaccccttctcgcgctggtgcacgcgactattattgtctctgacgcgcagcgggagggaganaanacgccgcgcgcggggacgcaccacacaaanataagtgtgcactcataattgccgtgcggcggccgtctcacgagaagattctatgtctgttgggtgcccaccaactcctctccgctcgataattattgtgtnctcccgacccattaccacaataaacacgcgcccctccagtctataacactcttttccaccgccantatatacgccccgcgtctcttctccccgcccctcaaccccg

SEQ ID NO: 251895 - DNA, 642 bp, Homo Sapiens
atgatgcctcatgttgcagcagtccgctgtgttcaatatgatggcaggagggttgttagtggagcatatgattttatggtaaaggtgtgggatccacatactgaaacctgtctacacacgttgcaggggcatactaatagattctattcattacagtttgatggtatccatgtggtgagtggatctcttgatacatcaatccgtgtttgggatgtggagacagggaattgcattcacaccttaacagggcaccagtcgttaacaagtggaatggaactcaaagacaatattcttgtctctgggaatgcagattctacagttaaaatctgggatatcaaaacaggacagtgtttacaaacattgcaaggtcccaacaagcatcagagtgctgtgacctgtttacagttcaacaagaactttgtaattaccagctcagatgatggaactgtaaaactatgggacttgaaaacgggtgaatttattcgaaacctagtcacattggagagtgggggtagtgggggagttgtgtggcggatcagagcctcaaacacaaagctggtgtgtgcagttgggagtcggaatgggactgaagaaaccaagctgctggtgctggactttgatgtggacatgaagtgaagagca

SEQ ID NO: 251896 - DNA, 734 bp, Homo Sapiens
  misc_feature (172)..(181): n is a, c, g, or t
cagaagatggcagtctgctccataaccagagcaagtgcagtgggaaagctggactctcatacccactcacattcatgccttatataagcctctcctcctggttaaccttaacaggggagtgattcctctgctggttgctgtttttccttttctcttaccctattcctaaccnnnnnnnnnnaacatatagggtatttttttcttttaacatatagggtatttaccttcattttgtttatttccatttgtttccttcttcattcatgttcatctctgctattccttctccctccagaagggatggaaaccctattttcttttctccaagaccatggttggtctgcttccctcactcgggctccttgacagtcttctagaagagagaaggaggaaaagaagcagttcctgatgttacaaatgaacaaggatctcccaggtaaccagctccccacacccattttctgttactaatttctcaaacagaaatttctggttccccttcttccttatcactgagtgaaaggggacaggcatgcacatgtgcccatacatgcattcagaatagagtgtgggggcaggggcggcaggtcaattctgttattccaagacttttgggagctgaagtaaggggatcatttgtgggtcaggagatcaagactaagcctgtgcaacataattggcctgtctttactttacacgtgggccgggaattcactttaacgggagaccggttg

SEQ ID NO: 251897 - DNA, 861 bp, Homo Sapiens
  misc_feature (170)..(253): n is a, c, g, or t
cagaagatggcagtctgctccataaccagagcaagtgcagtgggaaagctggactctcatacccactcacattcatgccttatataagcctctcctcctggttaaccttaacaggggagtgattcctctgctggttgctgtttttccttttctcttaccctattcctaannnnnnnnnnnnnnnnnnnnnnnnnnnnnnnnnnnnnnnnnnnnnnnnnnnnnnnnnnnnnnnnnnnnnnnnnnnnnnnnnnnnaacatatagggtatttaccttcatttagtttatttccatttgtttccttcttcattcatgttcatctctgctattccttctccctccagaagggatggaaaccctattttcttttctccaagaccatggttggtctgcttccctcactcgggctccttgacagtcttctagaagagagaaggaggaaaagaagcagttcctgatgttacaaatgaacaaggatctcccaggtaaccagctccccacacccatttctgttactaatttctcaaacagaaatatctggttccccttcttccttatcactgagtgaaaggggacaggcatgcacatgtgaccatacatgcattcagaatagagtgtgggggcacgggcggagtcattcctgtatccagcacttgggaggcgggtcggtgatctagaagtccgagtcagactagcggccaactctgaaacggtgctctctagcggaagggatcagcgtagcccaccgagcggcggacccacggacaggtccgcaattccaacgccgggaggtcccaacacaaggcaccaggaatcagcccagactacggagcgagagcgcacagcaggacagccacgcgctc

SEQ ID NO: 251898 - DNA, 958 bp, Homo Sapiens
ttttacaactaagtggattgattgaaatgctttgattcttcatttgaaatgtttctattccatatacccattatcttttatcctcacaaaagcccttaacattgtttcctttaatctttggggttcttaagcatcatttccaccaacagagatgtacctacccacagttgtctcagagcatggaggctgaaagtctgtgagggcaagagtgaaatggagcagaggataggctgtggtttggaagcggctctggaatacgctgggggtggcggtggggctgaaggttggttatgggatgcttcctgggctccggaacatctgtgccaaaaactggaggacccatcctcggctccagccagacgcttggggtgctatgtattctgaaccatagcactaggttggaaaatttggctcctaatctatactctgccatgtacagatcacaaaatatcatacaaggagccttaaaaggtcatctaacctaaatccagtttcccaaggagaacactggggcacaaagaagtgagaggtaactcgcccaaagttatatagctagtcagggacttcctcttcggagacaaaggaaatcagaatagtgattcttctgattcaccgtccctcgacaaacagtccacaaagtgcttggaggttattaaaaggcaccccagaaaagtaaggctggcattttcctggaagcccctgagtgtacaacccctgaggctcagtatttggctataaaaacaggtctggagttgctttggcctccgttttaatccctaaagctgcctggaggctggagctctgatagctacctgtcatcactccccagccagtccgggacaccgcagccaggaactgtcagaggtgacaagggaatcccgtcataatgccaaggaccaaggagcagtggccaggttcctgggattaagcaaggcaattatggctgagttaaagctag

SEQ ID NO: 251899 - DNA, 1918 bp, Homo Sapiens
aggtcaaatcccaaaccattactgaggggattctctactgccaaccccctgccctggggagaaagtagtgggctagtactttgatgctcccttgatggggtccagagagcctccctgcagccaccagacttggcctccagctgttcttagtgacacacactgtctggggccccatcagctgccacaacaccagccccacttctgggtcatgcactgaggtccacagacctactgcactgagttaaaatagcggtacaagttctggcaagagcagatactgtctttgtgctgaatacgctaagcctggaagccatcctgcccttctgacccaaagcaaaacatcacattccagtctgaagtgcctactggggggctttggcctgtgagccattgtccctctttggaacagatatttagctctgtggaattcagtgacaaaatgggaggacggaaagagagttcgtaaggtcatgctggtgggttagctaaaccaagaaggagaccttttcacaatggaaaacctgggggatggtcagagcccagtcgagacctcacacacggctgtccctcatggagacctcatgccatggtctttgctaggcctcttgctgaaagccaaggcagctcttctggagtttctctaaagtcactagtgaacaattcggtggtttagggttatgtttttaggattcccctcaatgcagtcagtgtttcttttaagtatacaacaggagagagatggacatggctcattgtagcacaatcctattactcttcctctaacatttttgaggaagttttgtctaattatcaatattgaggatcagggctcctaggctcagtggtagctctggcttagacaccacctggagtgatcacctcttggggaccctgcctatcccacttcacaggtgaggcatggcaattctggaagctgattaaaacacacataaaccaaaaccaaacaacaggcccttgggtgaaaggtgctatataataatgaagtattaagcctaccgtatttcagccatgataagaacagagtgcctgcattcccaggaaaatacgaaaatcccatgagataaataaaaatataggtgatgggcagatcttttctttaaaataaaaaagcaaaaactcttgtggtacctagtcagatggtagacgagctgtctgctgccgcaggagcacctctatacaggacttagaagtagtatgttattcctggttaagcaggcattgctttgccctggagcagctattttaagccatctcagattctgtctaaaggggttttttgggaagacgttttctttatcgccctgagaagatctaccccagggagaatctgagacatcttgcctacttttctttattagctttctcctcatccatttcttttatacctttcctttttggggagttgttatgccatgatttttggtatttatgtaaaaggattattactaattctatttctctatgtttattctagttaaggaaatgttgagggcaagccaccaaattacctaggctgaggttagagagattggccagcaaaaactgtgggaagatgaactttgtcattatgatttcattatcacatgattatagaaggctgtcttagtgcaaaaaacatacttacatttcagacatatccaaagggaatactcacattttgttaagaagttgaactatgactggagtaaaccatgtattcccttatcttttactttttttctgtgacatttatgtctcatgtaatttgcattactctggtggattgttctagtactgtattgggcttcttcgttaatagattatttcatatactataattgtaaatattttgatacaaatgtttataactctagggatataaaaacagattctgattcccttcattgtgtgaatgttt

SEQ ID NO: 251900 - DNA, 1420 bp, Homo Sapiens
  misc_feature (799)..(853): n is a, c, g, or t
  misc_feature (1231)..(1240): n is a, c, g, or t
  misc_feature (1261)..(1281): n is a, c, g, or t
  misc_feature (1344)..(1344): n is a, c, g, or t
ctgtggtggttctttttgcaaagagaagaaacggtggattcacgcccattcggaagttcttggtggtgtgtaaggtctttttcacggtttctcctccagactctactctcttagggattgcaacactgtaagcacctgagcattcagctcaggcaccacacctggcccagatgaggtcaccgggctcagagcagcttccgggagttcagtactgaggaccgtcagatgctctcagggtggaggggaccaagacgtactctcagtgcacctctctcttatattgcttagatgttcccaaagtccatccaggttgttgtgctttgggatctgacgttcttgggtttgcacaataacggtaggatgttcacacccgggagaggaaacgccacaagaggtacacacagagaatcagaggatgaacacaggtgttcttgaaggcaggctcagagctaggtagctaccagcttatccgaacaggaaccttccagcagacctggtacctgaaccagaccatccataaaacctagtctctcacacactccacgtggcctcacaacatccaaaagtgttagcagcgaacatggcttcattcccagaaatggatgcctttaagaccaaacaaagaggccacttgtgcctgactccctccccttcccggccccacaacaggcagaccaactcatgtccccactccccgccaaccccggggaatagtcaataacttatgaggctaataccagagactttaaaaattaaatatggcacaaatatattctcaaaactccgtcatctcagttcnnnnnnnnnnnnnnnnnnnnnnnnnnnnnnnnnnnnnnnnnnnnnnnnnnnnnnnttaatgtcctagcttggtttggtcttgaaaagattcataatcactccaaatgaatgctcctcccttggccaccaatgtgaagggagggtagaaacctgaggctagacttctgacacaagaagaatctgtcgagagcacagtctcccagtcaataagaaggaaggagagagggggatgagctcgcacccttgagaagaaccttcatgagccaattcccaaagcatcaactccgcatggatactttgcacacacatcagccgtgtctaatggacacacacacgtgcatacacacgtgagcacacgccgggaccacagacccttatccaaaatatgaaagcagcagctattggtcaatttgaggaactcattttgtaaagnnnnnnnnnntccttcagcctggatgagagnnnnnnnnnnnnnnnnnnnnnccatcttgaagctcaacctgtaaaacttgaaattctcctggaacagggctgggtgtttttgtnttgttttttctttcgaacttttgttccacaaacaggaagttttgtctttaatactgaagctcagacaccagcaaaa

SEQ ID NO: 251901 - DNA, 709 bp, Homo Sapiens
  misc_feature (64)..(64): n is a, c, g, or t
cagataaaattgtataattctaagaggaaaaaagacaataaccacaaagaaaaaaaatttaaanatacttatcatggaaagcttcctctccatgggaagggagaataatcaaagtaagggtactcaaatatgcaacaggtaaatttacatacattgaatatgcaaacagcttatgagtaatattttacaattgtcacttgctaaaatatgggaaattttataatacaaactctatcatgaatatgtactcaactaagttactaacaaattaaaaaataagctcagaggaaataataacaaatactctcttcattaataataaatccttctaatcacaatttctgaattattcacaatgagtcagtctttgaaaacagcctcatgaaatccaggaaacttctcttcatttaaagagacttatatatcatacaaaatgataaattttaaaaatgactttattgaaaacaactgtagtaccacccaaattttagctaacccaaatcatgaaacagccagataccctcaaaaatgaatttaaacaataaaaggatatgaagcaggaaaatgtttaatgcctattttttaatgtaaatctaataaaatgcaatgaaatataaaatggattaggagacttttatttacacattcaaaaaaacaacaaagtaaatatacagtaacataaataactttgctgaatactaaaatggca

SEQ ID NO: 251902 - DNA, 1296 bp, Homo Sapiens
  misc_feature (111)..(111): n is a, c, g, or t
  misc_feature (122)..(122): n is a, c, g, or t
acagaaatttaaaagaaatggttcaacaaagaatcaaactggtttctccaggtatataccatgacaatgtatctttttactcgatgctgtgagcagacagtgattatttgngagaaggaaanataaggtgtggaattagtaatgcagatgctgaaaggcaagtggcaagagaagaatgcctcaaacaaaggctactttgttcccatctctactgcacctacacccacacccgccccggcccccaagctaaaagaccagaataaccaaagccattttaacagtagtgtgcaaaactgtcagctgacaaacaacataaaaacaagtcacgctatgttatctgtggtcacgttcttcagggttagtccagtaactcaagactttacattcttttgtctttatttgcttattttaattaaacatataaaggttaataaacagacaaagtccagagttagtaggttggtattataacatttattaaaataatgctgtgggttaatagaaacagcaaagaaccaaagaattaaaatgcaagctatgtaaaatcccaactaaaacccaaaagtgtctaatgtattcattcattagctaactaaaagcccaaaaaagacaagacacccaatataataaagtactgcaaaacaattggcaattttcagttatcaaaattgtggattttgcattttgtatccttttctcaatcaagaaaaaaattctttttgaatgttatataacatacatataaaacaagatagaaaaatacattataaacttgtaacaatggctgtaaatacattatcttacatgtttctcataggcaataggttggttatggtacatacatagcatgaaactaagataataaagaatagacaaaaatacatgtcagctgtacgataacatacaagcgacactcccatctacccacgctaaaaaattacataatactgtcagaaaaaaagtcttaaaaactacatattttaataagaaataaattcaataaagaatgataatactgagaaccaaggcattcagagatttcaaaagtcatgcttttttcagttgatccaaaattttgtcaaccaagttttcaaaagtttgttcagagccaacattccctataaatgtcacacatttattatttcatacatttactttcttccccataaaagacctttgataaacatctaaaatgtccaggtataacatagttgagatgaaactggatcaaatactggtattgtttttaacaactatcacctcaagtgtttgagtgtcgcaaatttattcaacccc

SEQ ID NO: 251903 - DNA, 1012 bp, Homo Sapiens
  misc_feature (957)..(957): n is a, c, g, or t
cggacgcgctgggcaaatcccaaagtagaagtttccttaggaaaaatcatcttgtataataccagtattcaaacatgggtaaggttaatcacccccaatcactcaggagatagttgcagaatttgaattacaatctcttcttactttcctagcctgtggcttgtcacttctccaaattgccatgctaaatatgcagtgaacaattgacgggagaatgctagttaaacaagaaattaggatttatcactggaattgaaactaagagtacaaaagtctgaacgaatgaaacttttctccaaattttacaaattcttgttcctttctcattagaagagcatgctatccaaagcataaatctcccttgaaaataacagaggcttcttaagccctctcttagctatgatcaatggatgatattatgcttcccatagctaatgtgatagctccttgcctaggattcctgttgaaataaggattctagccccatgttaagtttttcaaattactacaaattttagataagcatttggagctttttatactagaattatcaattttttattttagctaattacctgtgggcattatacttgaggcaggtacccaaactacttacagcctttttaatgacacacatgtgctgtgtactttgaatccattcatagacaaaattaccttgatgttctcttaactcattcttaattttagtgattaaatacaacctttgagttgttcaatatcatttgaaaatggtaggatttgtggttattttcattaccctattagatttaagatagagaggctgggatgacagaggcctccttgaatagctatgaagcctcattcagcatatcaaatggtagtctgagtcctaagaaaccttaagtaatttatcattctgtaaatactcttataagcaataatttttatttgtatttttgaaaacaaactacttanatatggaaaaatattaactggaaagccagcagtagggttttctatttttaaaaga

SEQ ID NO: 251904 - DNA, 661 bp, Homo Sapiens
  misc_feature (16)..(16): n is a, c, g, or t
  misc_feature (619)..(619): n is a, c, g, or t
  misc_feature (632)..(633): n is a, c, g, or t
tcttccttccgtgctntgatgcgggctcgtttctcatgttccagtctgagaaaatggtccacataaggcaaggcaaagaatcgtttcctattgtatctttaatttaggtgccaaggtataacccactgcttgaacttgtgccagatgattcttccaaagatgtctcttctccaagcaccaggtctagctctttcttgaccagtctgaagaagccttagggcatcttctctttcctggacaactttatctaatgcatccatggaatctactaccttatctaaccgctctggacttggcattggcaatctctgccgcttggcctcctgctctagggttagaagcatgtttctttctttcagtaagacataccaaagtttgtgtaaatcttcattacttttgttccttagttgctgacaggtccatgctgctccagattttactttttcttgcccccagttttttgggtcatcaaaaaattcttctagtcctttccttgacaatgtggtatgaagtaatctatattggtgaaaggatgtcacatttggtgtactcttaggcaacaaactaagaaaaaaccctgtgcaggcagggacctgaggagttattaacgatcgggaangatttcagggcgnngatgaaactctcctaccccaagaagggc

SEQ ID NO: 251905 - DNA, 929 bp, Homo Sapiens
  misc_feature (549)..(669): n is a, c, g, or t
  misc_feature (724)..(822): n is a, c, g, or t
ttctaaggataaaaagaactataaagaaaaaaattgtaatgttttaagtaattatgtagttagcagtaatgctggtatttggttactgttgagtatgtattacaggaaaatgcaaatgaatatttatattgttgttattgaatattgggatgtttggcatgaaagaaaggagattcagctgtaaattgattaggttaagtaaacattgtagccctggatttatttaaaggtattaatttgaaccatatgaaattgctgtttctctagtcaaaaaccattgaatcttggcagcttaatagggttcagcataatgccagcatgacccattaatgtattttgtctcttagaaaattgtgtatttcctggttctgtccattgaaatgttctagaaacaagagccagtcctgtagcaatttgcatgcttcttggttcttggacccagatttgagtgaccagtgttacctggtgtgcccagacttcccagtttcagcacccgaatttcacatcccaggaaactcttcagtttcaggaaaaccaggatgattggcnnnnnnnnnnnnnnnnnnnnnnnnnnnnnnnnnnnnnnnnnnnnnnnnnnnnnnnnnnnnnnnnnnnnnnnnnnnnnnnnnnnnnnnnnnnnnnnnnnnnnnnnnnnnnnnnnnnnnnnnncttattttaccacagaacaagaaagctatcaaaaagacttaacatgatggtacgnnnnnnnnnnnnnnnnnnnnnnnnnnnnnnnnnnnnnnnnnnnnnnnnnnnnnnnnnnnnnnnnnnnnnnnnnnnnnnnnnnnnnnnnnnnnnnnnnnncagttgtgctcagttcatgcgttcataatgtactaaaaacaaatttaaaaactcactggtcatctctagagaatgcttgggagctaactcattattttgaaaacgat

SEQ ID NO: 251906 - DNA, 531 bp, Homo Sapiens
gtagccaatttgcatgcttcctggttcttggacccggatttgagtgacccagtgttacctggtgtgcccagacttccccagtttcagcacccgaatttcacatcccaggaaactcttcagtttcaggaaaaccaggatgattggccaccttcaccccagattatggtacctaattatcattttcccatgaaaatgaactagggcctttgggaccagttggctgattccatacctggggcatggaatgcatttaaaataagccttgagtatcttattttaccacagaacaagaaagctatcaaaaagacttaacatgatggtacgaacaggactcaggagccactctgaagaggttccctctggccaaaaataagacaattggaacatcaataagaataacaacttcagtagattgaaacacatcagttgtgctcagttcatgcgttcataatgtactaaaaacaaatttaaaaactcactggtcatctctagagaatgcttgggagctaactcattattttgaaaaacgat

SEQ ID NO: 251907 - DNA, 1019 bp, Homo Sapiens
  misc_feature (716)..(740): n is a, c, g, or t
acggagaaaatgtgaaagtaaccatatctgacaaaattcccttgaatttttatcctttgcttgcaacatttaagactcaaagtcactggtatattggattaagttttttcctgttaatgcaattatagaaatacatcggagacacaacaaatgtggccattacaggtttcataaaattacactgacttggctgttacttgatcttaggaaacagcacagtttaagatattgtgaattctgacttatactttattaaatgctataaatctaaatagatcctgttggatgtgatgggtctagtccagtttatttaagttcatgtttcactgtttgcactttgcattggaacaatgggtttatttcgctgatgtaaaccggttcgagtgaagaattaatgcagtaagtatgacaacacatacacacttgcctctccccatctccagaagaggggagcagagtccgagcttatctaaatatgaatgtggccacaaagctgtggaaggtgacaaagcttaaacacctttgccctggctctgcattgtcacctagagagcaagaggtctatagaaacatcatgtcacatgaaacgattctctgctttttggttctgaacttgaagtccctaaactgcaaaatctaagagttgggtggttattaaaatgcttttaaaaagtcaactgtggcaccaattctaatgtaatccaacttgtgactgnnnnnnnnnnnnnnnnnnnnnnnnngtgtgtgagtgcgcgtggcactgggaaaagtggaaacaaacatgtattgaaatacatattggaaataaaaatggtttgagcgtcagtgatattctcccagaatgtacttatcttacctcggcaggtactgtactcaatcagtatttgtatatggcgctacaatttagattgtaaaatagcgaaattttaatgcgcccatctgtttttaacgtatatatgccttgctcagaattatttggtttaaataaatcaaccttgaggtttgtagcttttccttat

SEQ ID NO: 251908 - DNA, 470 bp, Homo Sapiens
  misc_feature (98)..(138): n is a, c, g, or t
ggaagtccctaaactgcaaaatctaagagttgggtggttattaaaatgcttttaaagtcaactgtggcaccaattctaatgtaatccaacttgtgacnnnnnnnnnnnnnnnnnnnnnnnnnnnnnnnnnnnnnnnnnggcactgggaaaagtggaaacaaacatgtattgaaatacatattggaaataaaaatggtttgagcgtcagtgatattctcccagaatgtacttatcttacctcggcatgtactgtagtcactcagtatttgtatatgttgctagaatttagattgtaaaatagtgaaattttaatgtgttcatttgtttttaatgtatatatgtcttgctcagattatttggtttaaataaaacaaccttgaggtttgtagctttttcccttatactaggccaccccctttcccagggggaatttaattcccattgtcgggcccgcccctccgggccccttt

SEQ ID NO: 251909 - DNA, 552 bp, Homo Sapiens
gaccctgctttctgcattcttctctccacatccctctctgtacttacagcccccaatggcccccaaaaagccagagcccaagaaggatgatgccaaggcagcccccaaggcagctccagctcccgcacctccccctgagcctgagcgccctaaggaggtcgagtttgatgcttccaagatcaagattgagttcacacctgagcagattgaagagttcaaggaagccttcatgctgttcgaccgcacacccaagtgtgagatgaagatcacctacgggcagtgtggggatgtcctgcgggcgctgggccagaaccccacacaggcagaagtgctccgtgtcctggggaagccaagacaggaagagctcaataccaagatgatggactttgaaactttcctgcctatgctccagcacatttccaagaacaaggacacaggcacctatgaggacttcgtggaggggctgcgggtcttcgacaaggagggcaatggcactgtcatgggtgctgagcttcgccacgtgctggccacgctgggtgagaggctgacaga

SEQ ID NO: 251910 - DNA, 1004 bp, Homo Sapiens
  misc_feature (737)..(748): n is a, c, g, or t
  misc_feature (855)..(869): n is a, c, g, or t
tgtctacagtagctgctacctaaaaaaagatgttttattttgccagttggacacaggtgattggctcctgggtttcatgttctgtgacatcctgcttcttcttccaaatgcagttcattgcagacaccaccatattgctatctaatggggaaatgtagctatgggccataaccaaaactcacatgaaacggaggcagatggagaccaagggtgggatccagaatggagtcttttctgttattgtatttaaaagggtaatgtggccttggcatttcttcttagaaaaaaactaatttttggtgctgattggcatgtctggttcacagtttagcattgttataaaccattccattcgaaaagcactttgaaaaattgttcccgagcgatagatgggatggtttatgcaagtcatgctgaatactcctcccctcttctcttttgccccctcccttcctgcccccagtctgggttactcttcgcttctggtatctggcgttctttggtacacagttctggtgttcctaccaggactcaagagacaccccttcctgctgacattcccatcacaacattcctcagacaagcctgtaaactaaaatctgttaccattctgatggcacagaaggatcttaattcccatctctatacttctcctttggacatggaaagaaaagttattgctggtgcaaagatagatggctgaacatcagggtgtggcattttgttcccttttccgnnnnnnnnnnnnattgttgttgttaattttattgcaaagttgtattcagcgtacttgaatttttcttcctctccacttcttagaggcattcagttaacaaagaggttggagcaacaacnnnnnnnnnnnnnnngcacaattgtaattgacaggtaatgaagctatttgttaaaatatttgcctttttaagtaaaaaagaaaagtcagaacagggctatttgaagaattattttatacacagattctgccttgtttcatagtatgaggg

SEQ ID NO: 251911 - DNA, 909 bp, Homo Sapiens
  misc_feature (590)..(590): n is a, c, g, or t
tagggattgattagcatatgatttagggcaagttgcttgaggtctttgggcctctcttttacatctgataatagaggtggtattttttgacttccatttgtgaagtttaaatgagattcgttattgttgcttttatgtgaatccttagtacatggcctgccgcaaacacccaggacaccgaggaaatggtcgttgctgtttgattttcctcatccccagtcccaaggggaagccaggccaatgagaagagccacttgccatcaggctgtccctttaggagtcactgaaaggcccccagggtgggatggtggggagataagaaccacgagagaagttggcacaaaggagttatgggaaaaagggtccaagataggcagaaaagaaaatgttgccagttgatgggggaagaaaggaagtcagagggctcagacactgaggggggacagaacatctccatgtgcactctcatctcttagagtcagcaacaggtatccacggggagggccctacatcatctgcttacccttgaaggatctggaggtaggaggctctgggcggaggtgcaagtgaccccgcaggccagccctccnaacctccctcccgaagcggggactgggtgcccctctgcccagctgagacagcccacacacaacccagccctaatgatcgttctctctacctctcccccaagtcctcctccgcctcctcctctctgcatgcgcctcagagcccgtgccaagaacaagcagcagtcctgaactcgaggtccataaaaatcagtcgactgaatgacaccatcaaatctttgaaacaacagaagaaacaagtggaacatcagctggaggaagtaacgtgatttctttgtttgctggcgacatgactgctgggtttgggggacactcagatgta

SEQ ID NO: 251912 - DNA, 836 bp, Homo Sapiens
ctgtattccgcctggaagccgagagactcttcacctgggagcctggatttgtaaagagctgcaaactgcgatatatgggccaaggttgctcgggtgattggtttactggattcgcacaacactgatctccaggaaaatatacctgttgttgagttaaaagaatattggcagagaaacagccctagagctccagcaggagcgaacaggcacaggaaaacaaatggcagtatccctgaggagccacttctggtggttgccagccacctagggattcagacacaaggttccacatggaagcgcctacatcatctgctaccctgaaagatctggagagcccgtgccaagaacgagcagtagtcctggattcaacgtccgtaaaaatcagtcgactgaagaacaccatcaaatctttgaaacaacagaagaaacaagtggaacatcagctggaagaagaaaagaaagcaaacaacgagagacagaaagccgaaagggagctagagcttcaaaaccagacattgatcatacagaaagaggaactaaatacggacctgtaccacatggaacgttctctcagatactttgaagaagagtccaaggacctggctgtccgcctgcaacattcattgcagtgtaaaggagagttagagagggctctgtctgctgtcatcgccacagagaagaagaaggcaaaccagttgtccagctgcagcaaagcacatacagagtgggagttagagcagtccctacaggaccaggcactgctgaaagcgcagcaactcttgtgattacagaaggaggaactaattacggacctgtaccacatggaacgttctctc

SEQ ID NO: 251913 - DNA, 345 bp, Homo Sapiens
gaagagcacgagagataccgaaaggaggaagagatggcgagtttctttcttaaaggactgatttttagaacttcacatttgagaaccgccggtttgtgggccaagctgaccttgaaagacagaaattttcagatttgaaactcaacggaccccaagatcacaggcaccttctatatagcaccattcccaggatgcaagaaccgcggcagaatgtggagacctacaccgaggaagatcctgagggagccatgtctgtagtctctgtggagacactcagatgatgggaccactcggcgcacagagaccacggtcaagaaagtagtgaagactgtgacaacaccgacc

SEQ ID NO: 251914 - DNA, 529 bp, Homo Sapiens
atttactctctgttcatgaatagaaacagaaaccaacaggaatatcctgtgatttatgaaaatgctgggatttaaaatcattaagtagtattttgctttcataggatatggagctaagaggaatggcagaagggattttaaacacagaaggggctagcgtgcaattaaaaaaatacataaaactaaaaatttcactgtcgaatttctttctcattgtactcatccagtatagaagaatttttaaaataatataatttttaaaaagacatctgggagaggggtattaaaataacagcctaagatttgtgctaacctgccacttctctcacatatccatgccacagttagtacacctactgagctcacaatttccccctaggtactctcatataccttgaggccgtgacgagagttacaataatagctataaagaaacccaccagactagaaagaacgtcttgtaaagaaagccaaatacatacatctccttaaaaaaccacaacgttaataaagcaaaagccatataaca

SEQ ID NO: 251915 - DNA, 431 bp, Homo Sapiens
ctgtcctaacagaacattcaggggagctggacatgggtatggtatgcttctcacgagatacttctggtatacctggcaggggtccctcacatgggaaacttattttcataggcagatgtccttgcagctcttgtctgacctgtgttcagtttacacctgtctgactaccaactactctgccactgggagcctgaccttgtcctctccctggcgtaccagagaaaaccagcctggggcagcccctggttcttcaatggaaggcgcaaattcaacacaccattacaatggtggagctggtgaggaggcaggtggctaaatgagtgtttgtaaaacagagggaaagctaactaccatttcttaagcacgtcttaggttttaggcactgagctagaagctttgcacacttgaaagttaaataaactgatggctca

SEQ ID NO: 251916 - DNA, 1188 bp, Homo Sapiens
atctccttgtgaacacaacaaaggaaatccacataagaagagcctccgtaaagtcctttgtcttctaccaggaactgtcggaaaaccatttctggttgttctcgctgctttacaattgtgagctccattgaatatggcctcttttgtgggataatacccattatcatttctgagttgttgagagtatgggtttcccacttcaggcagcaatgtcatatctgtgttgatatgtgcaaaagatggcacattaaatattccctggatcagttctggtgggctgcttactcccaaccacaggaacatgtgtagaccattagccagtaagaatattccttcttctgaaagacgggactcagagcaacgaacggcagcaggtaacattgtactcttgacatctaacgtgtgtatgggcagaagttgtgggtagaagaaaagctgagagtcagccacacccatggtcatgaccagctgtctctggtatgctcgttcatcagttgagatctctggtctgctgagtagtacacagtttttcaacaagcaattcatgtacactggcaatactttcatggaatctggtagaataagctggcttgctgcagaaggacttgcacaattcttccggtaacatgccaacatatgggcagtctgattaactagaatttcccggatgaccttcaaaggctggtggagaactgctttaaaagctgacttggcaaagaagttgataagagcatctgtctcacagctcttataaagatcagctagctgagagctgcagtttaagccaagattgtgaatccgaagtcttctttaaccactgattgtcgtgtaaagcacagcacactggattaaggctccactgtcttcactgagtttgtcatcgtgcttgaactccacggtcactgccttgtcacaatcgatggcagccatttctacatcggtggtgttgttcatcaagattccaccaaagaaatcagtggctctgaaacctgtgctggtacgaaccctcataatagcatcaaagcctattttcttttcaatatcatttctgaggtcgttcaaaaattgttgtctatccaagtgcatctggaaattgttgtatttgtaaagggttcctccagtgagctgaggaaccagccccagcgaggccacgtccacatactgactaggaaagaggaagagtgtcac

SEQ ID NO: 251917 - DNA, 1063 bp, Homo Sapiens
  misc_feature (145)..(145): n is a, c, g, or t
gggaacctgttcttttaacttagggagcagctggtctaaaaccaccatttttgccactgttggtactaggatgcatatctgtgtataaaggtggaccagtttctgctccatcaaagagatatggatgattacaacattttctcanctgcattaggatgttcaataacctcattttgtccatcttgcctgctgagttgagtatatctatatccttcattaatatccgagtataccattccctttgcattttgctgaggcccacatagatttttacttccttctttggaggcaaactcttttcaacatcagccttaattcgacgaaggaggaatggacgcaaaaccatatgaagcctctcaactagtttttgatccccaaggcagttgtttgtatcaaaccaggaatcaaagtcatctgctgaattaaacacatctggcaacagaaagttaagaagtgaccacagctcatgcaagttgttctgaagaggtgttccagttaataatagtctatttgtagtcttgaattccctcactatttctgacaacttagatttttcatttttgatcctgtgagcttcatctattactaagtatctccaattaaattttttgaacacagacttctctttaataagcatttcataagatgttacacatacatcccattctcccggtaataaaacgtctctgacaaaagcagctctttgttctttatctcctatcaaacaaacagatctaagtgttggtacccatctcttgaattcactcatccagttgtgtaatgtagacttaggaaccaaaaccatatgaggcccaggaatgtttctataatgtttcatgtacccaagaagagaaattgtttgaagagtctttcctaggcccatttcatctgcaaggataccattgatgccattctcatacaaagaaatgagccagtttaatcctcggacctgataatctctcagtttaccccattttacatacgatggagagtcttcaaatcgagtgcaaacattggttgctttggagctttctgttaatagctcttcatcctcctcttgctc

SEQ ID NO: 251918 - DNA, 1768 bp, Homo Sapiens
  misc_feature (693)..(693): n is a, c, g, or t
  misc_feature (785)..(795): n is a, c, g, or t
  misc_feature (868)..(930): n is a, c, g, or t
  misc_feature (1028)..(1048): n is a, c, g, or t
ggcctgggtggcgaattcggcacgaggcaaagatggaacatggacctaaagcagtgactattgcaaattctccatcaaagccttcagaaaaggattctgtagtttcccttgagtcccagaagacacctgctgacccaaaactgaaaactctaagtcaaaccaaaaaaaacaaaggatctgatagctcactctctggtaacagtgatggcggagaagaattttgtgaagaggagaaggaatattttgatgatagcacagaagaaaggttttacaagcagtcttccatgtctgaagatagtgatagcggtgacgacttcttcattgggaaagtcagacggacacgaaagaaggaaagtagttgtcattcttcagttaaggaacaaaaaccactagaaaaagtgtttcttaaagaagatacaggtgaaactcatggggatacaagaaatgacaaaatcaagccaagtacagaaaccagaaagttagaatcagtgtttttccactctttatctggatctaaaagctctagaagaaatttcaaagaacaggctccaaaaacaagatccctagattttccacagaatgagcctcagatcaagaatcagtttaataagaagctatcaggaagacttgaaaatacaaaacagcaattgcagctgcctcttcatccttcatgggaagcaagcagaaggcganaaagaacagcaatctaatattgctgtgtttcaggggaaaaaaattacgtttgatgattgattagtgcctctttctgcaaacttttccatctnnnnnnnnnnntgttttttttaagacaggatctcattctgttgcccagactagagtacaatattgcaatcacagctcactgcannnnnnnnnnnnnnnnnnnnnnnnnnnnnnnnnnnnnnnnnnnnnnnnnnnnnnnnnnnnnnngtgcatgcactaccatgcccagctttctcaccccaggctctgcagctattacttaaactcgtatttgaataagtctcttggggagaattatagaatgnnnnnnnnnnnnnnnnnnnnnaaagtaaattcaacttacgcttatataagcctttcacaaatccaatatgtacttaaattgatttttaataatatccctcagactgtttcccttatgaagtaatttggggattttagtgatctcatattttctctttagtgcttatcatgaaatgtgcttcactggttcagctctgttgtttccttaaacataaatgtcaatatatatttaaaataataatggaaacatagtaaatcagcctatttaaacccagatcacccttggtaaaaatcattcttggtagcaaactaaaatagtaacttttattatggatgtacagataaatattaattttattatagttttaagtacttgtgatcatgtactttttgattctaaaatagttgtctaggacaattttgggattcttaattatattttagttaagaaaattgtttaaatatagcaatacaaccaataatttgttttatgtttcactgcatataaatatttccattaaatcaagaatgtatattatctagtttttactatacttattttaaaatttttgaggaatcatagattctaatttttaagaccaaattctgaaggtggtaggattaaaagaatatttccactgatggctaagcaaagaagttgtaagatgactcactgaggaagggactgctttatacatcacagtactgctatttaaaaggaacacagaaatttttaaatccc

SEQ ID NO: 251919 - DNA, 823 bp, Homo Sapiens
  misc_feature (765)..(765): n is a, c, g, or t
  misc_feature (777)..(777): n is a, c, g, or t
ccgagcgggtttgacggaaggagcggcggcgacggaggaggaggatggaggcggtggtgttcgtcttctctctcctcgattgttgcgcgctcatcttcctctcggtctacttcataattacattgtctgatttagaatgtgattacattaatgctagatcatgttgctcaaaattaaacaagtgggtaattccagaattgattggccataccattgtcactgtattactgctcatgtcattgcactggttcatcttccttctcaacttacctgttgccacttggaatatatatcgatacattatggtgccgagtggtaacatgggagtgtttgatccaacagaaatacacaatcgagggcagctgaagtcacacatgaaagaagccatgatcaagcttggtttccacttgctctgcttcttcatgtatctttatagtggtagcaactgcccttgctaatcaccgtaacctcggctgagaaagaagaggaagcgaaatccaagatgcagctcagttcatcaaagcctagcaggtcccctcagctgccttttcatgcctgccacagactacagtaggacaaaacctgacctggtctttgaagttaagagctaagaaagcttccctatagtaagtatctcccatggcacttaccacattctatctggtattacaattatttgtatgcaattaatcactcttagattgtatgttcctggagggcagaatatgcccattcatatttgtatcttcttccttctgctcttgnacctaacaccanccttgcacacaaacaataaatgattgttgagtgaataagtaaaaaa

SEQ ID NO: 251920 - DNA, 735 bp, Homo Sapiens; identical to SEQ ID NO: 14811
  misc_feature (632)..(632): n is a, c, g, or t

SEQ ID NO: 251921 - DNA, 2553 bp, Homo Sapiens
  misc_feature (644)..(644): n is a, c, g, or t
  misc_feature (649)..(649): n is a, c, g, or t
  misc_feature (672)..(672): n is a, c, g, or t
  misc_feature (720)..(720): n is a, c, g, or t
  misc_feature (783)..(783): n is a, c, g, or t
  misc_feature (822)..(822): n is a, c, g, or t
  misc_feature (2192)..(2192): n is a, c, g, or t
gcgtgccgcgagaacagagtggacggagcgtaggagagaccgaaaaggctgggggtgggagtagcggatttgaagcacttgttggcctacagaggtgtggcaagcagagcacctcagaactcaggcgtactgcccgccgcccgagccctgcgagggccgatagcgagggtgtggcccttatctgcacccagcagagcgccggcggggtacggtcttaggacctcgatctccttctccctcattttctctcatccctacctattgtgggtttccgcatgggccggaccgtggtcgtgctgggcggaggcatcagcggcttggccgccagttaccacctgagccgggccccctgcccccctaaggtggtcctagtggagagcagtgagcgtctgggaggctggattcgctccgttcgaggccctaatggtgctatctttgagcttggacctcggggaattaagccagcgggagccctaggggcccggaccttgctcctggtgagaggcttgtgggatgtctaggagaggttgtggagggggcttccattggggaatagagtttaggggaggaagtatgtttggtgggtcagatcttcccttagtttctcctcttctgagggcatgtggagagcaggtttctgagcntggcntggattcagaagtgctgcctgtncggggagaccacccagctgcccagaacaggttcctctacgtgggcggngcctgcatgccctacccactggcctcagggggctactccgcccttcaccccccttctccaaanctctgttttgggctgggctgagggagctgaccaagcccnggggcaaagagcctgatgagactgtgcacagttttgcccagcgccgccttggacctgaggtggcgtctctagccatgagacagtctctgccgtggagtgtttgcaggcaacagccgtgagctcagcatcaggtcctgctttcccagtctcttccaagctgagcaaacccatcgttccatattactgggcctgctgctgggggcagggcggaccccacagccagactcagcactcattcgccaggccttggctgagcgctggagccagtggtcacttcgtggaggtctagagatgttgcctcaggcccttgaaacccacctgactagtaggggggtcagtgttctcaaggccagccggtctgtgggctcagcctccaggcaaaagggcgctggaaggtaggggaacccctggagtgtaatgaacctgtcagtgtttccatctttatccaagtggcttaactaggccagggccgataggactggagttcctcattgtttttgtgccttagaagctacttagacatgggctaccccagaatcctaggccctatttgtgaaccttcctcaaagagcctatgcaagtctgtggatagaagtagtacttataagtggcttagagataggggaaagaacccagcttcactgaacatttcagaacagccacactggcctgtctggtccacttcctggagtacacagaggaatgattttttgtgaagtctacatagtcacccaatctcttcatcctgggtcagtacacagtctccccggccacatgggtgcctgggaaactgagagtgaggcaccagaagtctcttttcactcatcaaattctcattttctgggtctctcaaatgttttcatgctctcaggtatctctaagggacagcagtctggaggctgaccacgttattagtgccattccagcttcaggtaatggaatagccaccttccccttccccaacccctaccagtgagaagcaaaagctataccttcctgggtcagcaggaccacaccatgcccctgaactggtcatctctatgggagtctaatcccaaagaggactgacaactgtaatgggaatgccttctgagtcaggcctctgcctgatctctagtgctcagtgagctgctccctgctgaggctgcccctctggctcgtgccctgagtgccatcactgcagtgtctgtagctgtggtgaatctgcagtaccaaggagcccatctgcctgtccagggatttggacatttggtgccatcttcagaagatccaggagtcctgggaatcgtgtatgactcagttgctttccctgagcaggacgggagcccccctggcctcagagtgactgtgatgctgggaggttcctggtnacagacactggaggctagtggctgtgtcttatctccagggagctgtttcaaacagcggggcccaggaagcagctgctacacaattaggacttgaaggagatgccgagccactgctttggtccatctacacaagaactgcattccccagtatacactaggtcactggcaaaaactagagtcagctaggcaattcctgactgctcacaggttgcccctgactctggctggagcctcctatgagggagttgctgttaatgactgtatagagagtgggcgccaggcagcagtcagtgtcctgggcacagaacctaacagctgatccccaactctcattcatgaaaataaaaattgctggagcttg

SEQ ID NO: 251922 - DNA, 611 bp, Homo Sapiens
aagcacttgttggcctacagaggtgtggcaagcagagcacctcagaactcaggcgtactgcccgccgcccgagccctgcgagggccgatagcgagggtgtggcccttatctgcacccagcagagcgccggcggggtacggtcttaggacctcgatctccttctccctcattttctctcatccctacctattgtgggtttccgcatgggccggaccgtggtcgtgctgggcggaggcatcagcggcttggccgccagttaccacctgagccgggccccctgcccccctaaggtggtcctagtggagagcagtgagcgtctgggaggctggattcgctccgttcgaggccctaatggtgctatctttgagcttggacctcggggaattaggccagcgggagccctaggggcccggaccttgctcctggcatgtggagagcaggtttctgagcttggcttggattcagaagtgctgcctgtccggggagaccacccagctgcccagaacaggttcctctacgtgggccgtgccctgcatgccctacccactggcctcagggggctactccgcccttcaccccccttctccaaacctctgttttgggctgggctg

SEQ ID NO: 251923 - DNA, 557 bp, Homo Sapiens
gtgctcagtgagctgctccctgctgaggctgcccctctggctcgtgccctgagtgccatcactgcagtgtctgtagctgtgtgaatctgcagtaccaaggagcccatctgcctgtccagggatttggacatttggtaccatattaagaagatccaggagtcctgggaatcgtgtatgactcagttgctttccctgagaaggaaggaggcccacctggcctaagagtgactgtgatgctgcgaggttcctggttacagacactggaggctagtggctgtgtcttatctcaggagactggttcaacagcgggcccaggaagcagctgctacacacattaggactgaaggagatgccgagccactgcttgggccatctacacaagaactgcattccccagtatacactagatctccggctggagcctcctatgagggagttgctgttaatgactgtatagagagtgggcgccaggcagcagtcagtgtcctgggcacagaacctaacagctgatccccaactctcattcatgaaaataaaaattgctggagcttgaaaaa

SEQ ID NO: 251924 - DNA, 1256 bp, Homo Sapiens
ggcacttgaacttggaatcttataacttgaagaactgccctggagaaaggaagaaacttataataaatgggaaattataaatctagaccaacccaaacttgtactgatgaatggaagaaaaaagtcagtgaatcatatgttatcacaatagaaagattagaagatgacctgcagatcaaggaaaaagaactgacagaactaaggaatatatttggctctgatgaagccttcagtaaagtcaatttaaattaccgcactgaaaatgggctgtctctacttcatttatgttgcatttgtggaggcaagaaatcacatattcgaactcttatgttgaaagggctccgcccatctcgactgacaagaaatggatttacagccttgcatttagcagtttacaaggataatgcagaattgatcacttctctgcttcacagtggagctgatatacagcaggttggatacggtggcctcactgccctccatattgctacaatagctggccacctagaggctgctgatgtgctgttgcaacatggagctaatgtcaatattcaagatgcagtttttttcactccattgcatattgcagcgtactatggacatgaacaggtaactcgccttcttttgaaatttggtgctgatgtaaatgtaagtggtgaagttggagatagacccctccacctagcatctgcaaaaggattcttgaatattgcaaaactcttgatggaagaaggcagcaaagcagatgtgaatgctcaagataatgaagaccatgtcccactccatttctgttctcgatttggacaccatgatatagttaagtatctgctgcaaagtgatttggaagttcaacctcatgttgttaatatctatggagatacccccttacacctggcatgctacaatggcaaatttgaagttgccaaggaaatcatccaaatatcaggaacagaaagtctgactaaggaaaacatcttcagtgaaacagcttttcatagtgcttgtacctatggcaagagcattgacctagtcaaatttcttcttgatcagaatgtcataaacatcaaccaccaaggaagggatgggcacactggattacactctgcttgctaccacggtcacattcgcctggttcagttcttactggataatggagctgatatgaatctagtggcttgtgatcccagcaggtctagtggtgaaaaagatgagcagacatgtttgatgtgggcttatgaaaaagggcatgatgccat

SEQ ID NO: 251925 - DNA, 949 bp, Homo Sapiens
cacccttcccacaaccttccattaagtaattttctttaaaagattcgccatttctagaaaaataatgacttccaaaacaacagctctgtttcatcaaaatggaatgggccaaacatctggtaacaagaatgcatcaatatccatttgaaataattatctaagaattgtgaaattcaaatttcaacaacataaaataactaccaaatcacaaactctgttcaaaataatacatttcatataaagcacttctctggatttacgcctgaaagctgtttgtcaaaatggaacacgtcatagatgaaggtacaccagtttttaaaaatgttgtgcaaaaatacatttttatagaaaatagactaccaggaatgaacaaatttacactgtgagaaatcagcttgcaaattaagtaatgctcactttatacagcaaattataaatagcagtaaaatcacccaaagctatcatgaaacatcatttaggtgcccagcaacctccagctctgagaaaacattcaaaaagatgattaaggcattacacctacagtaaaatctactagcaagtttgaaagtgctattaccctgattaaagttcatgtgattctccaaacacaagttatatatgcaattattcccagggtgtaaggttttgagacatttcaagagcatgcattttgttcaatatacattttagacaaggatatggccatagatttggcaagttcttcgtcgcgtttcctttgcacttgagtttgtttgcaccagttgtcgtactctgggttaggataggagtgatcaaatacagcatcatagtgtccgttactgagccaactgagccaaatactaggcctcagggaatcctctgggcccaaataatgaatcatggtagacaccgtgggactctccagcctccctccagtagttaaatggatattcacattcagcatctgccc

SEQ ID NO: 251926 - DNA, 767 bp, Homo Sapiens
  misc_feature (652)..(652): n is a, c, g, or t
  misc_feature (740)..(740): n is a, c, g, or t
gggctccagtcgcctccggaggaaggaagaagaggacgccgggcgcgcagctcggtgctgattatcacaactgtttggtgacctacttcactgacctgtgaggattccttcccttcaagtactggattcttgatctttctgcatcatcaagaatggaaacagactgtaatcccatggagctaagcagtatgtcaggatttgaagaaggttcagagctgaacggttttgaaggaactgacatgaaagacatgaggctcgaagctgaagcagttgtaaatgatgttctctttgctgttaacaacatgtttgtctcgaaaagcctgcggtgtgcggatgatgtggcctatatcaatgtggaaacaaaggaaagaaacagatattgcctagaactcactgaagcagggctcaaggtggtaggctatgcttttgaccaggtagatgatcatttacagactccctaccatgaaacagtctactccttgttggatacactcagccccgcctaccgagaagcatttggaaacgcactgcttcaaagactggaagctttgaaaagagatggacagtcatgactacactttttcctttcagaggggctggtgctggtacagaatgttgatataaagcttaaaattcttgcatatggtcatangaaatgcatcttttggttttgtgtttttatcacttgcttcccaccttagggctttgggctcagaaagattatggaataatgatttggncttaatttcctggttccagtaggggaa

SEQ ID NO: 251927 - DNA, 528 bp, Homo Sapiens
acacttaacaggacttcggcattcccctgaatacagactagatcagagattttatttttttaattgaaaagtaacttgggttctctttagaaacccttatttggtgtgcgcatctggctatttcacagagatttcagttttgcaaagaagtcggagttgatttcttccctcagacaagctattggttgttggtgggcaacagaagttgctcagcatagacaggggaaaaaacggttacggatgagactgaaagaaaacctcaaaggagaactctgagaattcatctcaggatgaagctgcaagggcaaaggagaagtacttgtgacacaagcaaatgggtccattgatcaacagatgcaagaagattcttctcccaactactgtacctcctgcaacgatgagaatctggctccttggaggcctgctgccattcctgctgctcctctctggcctgcagagacccacagagggttctgaggttgcaattaaaatcgacttcgacttcgcaccaggttcttttgatgatca

SEQ ID NO: 251928 - DNA, 656 bp, Homo Sapiens
tgatccaaaaataataatttcaatagtggatccaatgccttatcatttctctgtagtaatggtttgatgtttccatatagagcacgacctacaatctaaccatactttagaactttcacatgctttgcctcataaagcaattccttcactcagtgaattggctgagccaagtgctgaaaacacaaatttaggtcagcggaacagactgagcaacactttgttcttagttttctgatggaagaagtaaattgaagtacagcaaaaactttaaaagcttttaagaaaacattattatgtggacttttctccaaatcttctaaaatactgccatttaaaaaacaaatacaaatgtgagagagtataaaaacaaactgccttcagggactgacagatacaattttgtctttttaaaacataaactaataggaaaacatatatctaaatatcaatttaagtttttatactttttaaccataggtatattagagctgaaaaaatcagcttagaaacacaacgatcagtgtgcaagaaaaaagctttaataaaaaatctaaagtgaataccttaatttaatggtggtatgttgatagctattaatagtaattcctcagcagtatacattatcttaacagaagtggaggctattaaatgttgac

SEQ ID NO: 251929 - DNA, 587 bp, Homo Sapiens
  misc_feature (378)..(420): n is a, c, g, or t
  misc_feature (443)..(497): n is a, c, g, or t
gtgaaagctatcttttgggaattttgttttctttcttaatagtactagctttcacagctagtaagaggacttcagaattatttggagcataaatataagaactttcttactgatttgccccagtaacctaaatggaaggacacatggctaggatgatttggaattcaattaatgaaaatcaagcatgggtttgttagaagaggaatatttattttttcccatagaaataaaatgtaaattgttaaaaaaaagttggctcattttaattaattcaattacttagagtcattcatattttcattcagatataaatgaaacactcttccttctttatttttatttcctctccccagcttttcattctctttcagtcttccnnnnnnnnnnnnnnnnnnnnnnnnnnnnnnnnnnnnnnnnnnngagccaggatctcactctttctnnnnnnnnnnnnnnnnnnnnnnnnnnnnnnnnnnnnnnnnnnnnnnnnnnnnnnngctcaatcaatcatcctgagtaactgggactacaggcacgtgccatcatacccagctaatttttgtggggtttgttttgttctttcttat

SEQ ID NO: 251930 - DNA, 486 bp, Homo Sapiens
gtctctgaagccacagatctcttaagaactttctgtctccaaaccgtggctgctcgataaatcagacagaacagttaatcctcaatttaagcctgatctaacccctagaaacagatatagaacaatggaagtgacaacaagattgacatggaatgatgaaaatcatctgcgcaagctgcttggaaatgtgttctttgagtcttctctataagtctagtgttcatggaggtagcattgaagatatggttgaaagatgcagccgtcagggatgtactataacaatggcttacattgattacaatatgattgtagcctttatgcttggaaattatattaatttacgtgaaagttctacagagccaaatgattccctatggttttcacttcaaaagaaaaatgacaccactgaaattagaaactttactcttaaatacagcaccaaaaattattgaatgagcaactggtgtgtcgtttatcgaaaacgga

SEQ ID NO: 251931 - DNA, 1445 bp, Homo Sapiens
  misc_feature (81)..(81): n is a, c, g, or t
  misc_feature (84)..(85): n is a, c, g, or t
  misc_feature (87)..(87): n is a, c, g, or t
  misc_feature (89)..(92): n is a, c, g, or t
  misc_feature (94)..(98): n is a, c, g, or t
aactggggattaacagggcccgtggcccttcataccccaggtaattttttggggggttgggtttggtcctttcctaatttnttnntntnnnntnnnnngccagtggagatgggggtttcatccatgttgcccaaggctagttttccctttctatatacagaaaaatttaaagtgaatgtgatgttggagagagtgggaaggaaaagtaatggcaagtatgcttgctcattaccaggcactgtgctaagctctgtgaatacacagataagtaaaatccacgctgtttctcaaagaactcacaatctgtttaagaagcagatgtctatacaataattttataactattattcaatgtgattagtactcacatagctctatatagagtgttatagaagaataaattagagaatatctcatttttcctccagtgggtttaaaaagatgtcacagaaactgaattgtaaatgggtacggaaatatggaggggtggtttgcagtaggacctacctaagccccaccgctcctcaggttttggcctttgaacttgagatatgactgttcccaaggacagaaggcaaaacgaacaaaagcaaaatctgaagcataatttcccaaccatcaaaatattggaaataggaaatgcctagcattttatggacattcatgacccggctttgagaagtcatagatctactcatgtttaaaaagttgtcttgaagaacctcactgcaatcatccactttagtaagcaaggccacatatgctataccacagtttaatacttctttgtgaacttgcttcacttttgccaacattttagagtagagattgtcaatagagttgatgtctaagacataagccacacagtgaatcctgtccttcagagatggagaggtgataaaagtagaatgctcaggtgtaattggtttacgggaattaaactgatatctgtctggcatacaaccttttaagatgtggggaatgtcatccatgcacagtcctgctccttctgccccatctagccccatagtgtcacacaacataaatggcagagattttccattttttccatctttaacagaatatatcctataccgctcggttatgctggtgatatcagaccccactacggcttggccagtcacatggccatgaaaaatagacttgactgaattgaaaaaaactggactttccagacccaactggacccaccaaaagaatacgaatttctgaaaccaagtctgcatagggcctatagtctctgatgtctgctagaagcctatttctgtgctctctggctttaattatcctctttatgtcgtctaggttatccttaattcctgtttctaggggttagatcaggcttaaattgaggattaactgttctgtctgatttatcgagcagccacggtttggagacagaaagttcttaagagatctgtccc

SEQ ID NO: 251932 - DNA, 1386 bp, Homo Sapiens
cattaacgtatattgtatacatatcgtattcgttcacctcatcattagtattctctctttatacacattctacacattttttctccttccccctattctcctctcctcttctcgcagtttctcatctcctttatgcctattccccatttattcggtccccaaaataaccctccccttataagatccttgggtcaataaattggccttccccaggaaccgaaatttctccgataactccaaattattcaccggattacctttttagagcaatataatcttccccgaagagatgacaagcccaagacaacatgatacctttagaagccacactaccctttcagccataaatttggagaaatgcaaccattatgcttcatgaataatattgtagaaagaagtctgatgaaaatgacatccttaatgtaagataactttataagaaatctgggtcaaataaaattctttgaagaaaacatccaaatgtcattgacttatcaaatactatcttggcatataacctatgaagccaaactaacaaacaacaaaagctcacaccaactaaaccatcaacttattttgtattctataacatacaagactgtaaagatgtgacagtgtacattatatgacaatgcacattagccagcaagtcttttataggtggtttcagcagcaacgataagtaatgcagaattcagctccagcactttatttcaaaagaaatttcctgcctccctccaagatgcagggtgaggaggtagcttggggttgctattggagaagtattcagtttgctactttgtgtcaccccttgccattcttttatccccagttaattattatctgcatataatataaatctgctagaccataaattaacagctttcaggacagatgccttgaaagttcttagggaggttaaacaaatattgtagcctaaaacctcctctataacaaacatgcacacaatggaagtgatgtcgtaagtgagtgatggggcaggaaggacctagggctctgtctcgactataaaatcaccttgccccaaacaaatttaaattataacttaggaggttcatggactttcatccattctggaaacaaagagaaaaaccaaatcaaataccagaatctgttttctcactgggcaaatagcaacaggatccacagttttaccacaattgtttccctgtctccatgtggtatctacataattcttttcccaaaggaggaaatcaaataacaggccatctgagtaattaaactcccctcccacactacccaacctctgtgaataaaagcttttccaactttgtgatcacatttgaaattggttcacttcggacgcgtgggtcgacgatatcccaagcattccggccgggtacc

SEQ ID NO: 251933 - DNA, 762 bp, Homo Sapiens
tcctcctcctcctcttctccttcatcatcttccccatcatggcctcggtgtccatgcctgaggatatgatggtgatgctcactggacacaacctcatcctcatcctcgtcttgatggctgtggctcctgtggctggggaggtggtgcctgtgctcagctgagtcttccgtgtcttcactcccgtggcctctgtgcccacgggcctgcccaccatgctctgcaaagacctcctcacctgagacaccctcatctccgactttgtggtcttgggacctgtggcctgggagtaggtgcccatattccttggagacatcttcatcctccttttcacggtctgggtggctccagaaatgatgcccattctctgtggaaacatccttgttctcatctggatggtctctagggctgtggaggtggtggcgaagctctgctgatgcctcctcggagagcccggcgactccagtgctgttgttccggtttctgaagcctagcccatcccctctgagctgctgggtcatggccggggggaggagcaggctggccaccccagcccagaggacagaagcgtgcagccatggcctatggtggcccatggggacggacaggcagcactggctccagctgcctctgcggcaatgtggacaaacgttggggtctttgtccctttggggttggtctctttttttctctgtgtctctcctttgtcctttcggtctctgtccaccttcctctggtccttgctgcctggctctggacaccccc

SEQ ID NO: 251934 - DNA, 1056 bp, Homo Sapiens
  misc_feature (46)..(73): n is a, c, g, or t
  misc_feature (718)..(739): n is a, c, g, or t
agtggtgctgggagtgtcgtggacgccgtgccgttactcgtagtcnnnnnnnnnnnnnnnnnnnnnnnnnnnnatagcgcacagcgcgccttagcagcagcaggagcagcagcggcatcggaggtacccccgccgtcgcagcccccgcgctggtgcagccaccctcgctccctctgctcttcctcccttcgctcgcaccatggctgatcagctgaccgaagaacagattgctgaattcaaggaagccttctccctatttgataaagatggcgatggcaccatcacaacaaaggaacttggaactgtcatgaggtcactgggtcagaacccaacagaagctgaattgcaggatatgatcaatgaagtggatgctgatggtaatggcaccattgacttccccgaatttttgactatgatggctagaaaaatgaaagatacagatagtgaagaagaaatccgtgaggcattccgagtctttgacaaggatggcaatggttatatcagtgcagcagaactacgtcacgtcatgacaaacttaggagaaaaactaacagatgaagaagtagatgaaatgatcagagaagcagatattgatggagacggacaagtcaactatgaagaattcgtacagatgatgactgcaaaatgaagacctactttcaactcctttttcccccctctagaagaatcaaattgaatcttttacttacctcttgcnnnnnnnnnnnnnnnnnnnnnngttcatttattcattctgtttctatatagcaaaaactgaatgtcaaaaagtacccttctgtccacacccaccaaaatctgcatgtattggttggggggtccctgtcccccttaaagatcaagcttacacatccaggtttttccatattaattaccttggaactaccctttaatggataaaggacctccccttaaagttcccattttggcttatggatttaataacacctggtttgggggctgggccagtttttttccttgccatggcaacctttggaccaaattggaacccacggtccagggcccctttgggaattt

SEQ ID NO: 251935 - DNA, 808 bp, Homo Sapiens
  misc_feature (76)..(76): n is a, c, g, or t
  misc_feature (87)..(87): n is a, c, g, or t
  misc_feature (700)..(700): n is a, c, g, or t
gcaagtcaaaatggagagcaaaaaaatcaaccctaatttttagtttatgtatacactgaaaatagcaacaataaanataagcattgntagcagacatattccatcttcactattattttgctacctttggtaaattactggggcagatcttgaagttaaaaacccatgtttagaaataagtgcacgcttcccccactatatagcagcagactgtgttgcccctacgcaaaacattctcatatctaattttaactttacatataaaaataacttggagaaaatacaaaaaaacattttatttgaacatgaaaatatcacaaaaattagtaagcctgagatgtagggttttggtgaaaaacaagaggcttgtagtgttttggctgctgataaagatgcatgtattgatagctggggtgaaaagcagaagaatgcacttatttcttctgcatgtcagtatcttcagacacagtaagccacatgcaccctttctttccttgttaaacagaggccagtttgctattcttagttccagcggaagtggatctgacgtgggcgatcagcaccttcctttaccaatggcttatggaactcacgtccagcacgagagtggatatttgcccaacaaaactcacagtaatactgcaggcaagtgacattggcacaaaaaaagggagcaaattttccaccacagcgtgcgccntggcattcatcacacatctggtcatctagcacatatggctttacctccacacgtttatcaatatcaccatgctgaagctgaacaaaccgagcactcacggcaccaata

SEQ ID NO: 251936 - DNA, 1414 bp, Homo Sapiens
  misc_feature (37)..(37): n is a, c, g, or t
  misc_feature (61)..(61): n is a, c, g, or t
cagtatcatatgttagagatgaatggtgtttctaatntgctagccacctgggtcaagttanagcaggaagtgtatttatacaagtaatggtaatacaaatgttctcctgggaaaagctgttggtaagggtttaacatttttgaagtatgtttttgtatatcttcgaaatgggcattttataggcattgggccaaagcctcttaaaatcatgctccttagtacaggcataactattgtcagtgctgcctgaatgctcaggtagactcatgaggtgtgcatttttaagggttagttgaggtcaggtgaggttcggggcgtcgaaccaccttcatttgaataactctttaggaccaggaccctgctccttaatgtatggcgggtaaggcagcagtattgtcagcacctgcacctgggggggacctgatggaactgcagaaactctgcccccaacccactgaatcagaatctccattcaaaccaggtccccagatgatctgcaagcacttcagtgttggagaagcactggactaggaccccaaagcctctgcttaccaggggccaagcacaatgtgtggcattactttctttttccttctccttctgaaatcatcctctttttatggtatcccctcagccagtttccctttctttctctgcactcccacactcagtccccagatccacatgaatttcccagctctgatatccttgctggttatcaggaaaccacttctagtgctctccacctgaagtcacccagggctctctgctgctgagtaaccttgggaaggtcaaggcgtggtaatgactcccaaggatttattctgccttcctgcggctgggcctccctttcttcatttattctacatggagatgccatccttctaagttacccaccaaaatccaatctctcttttccattttaaatgcctctgttctgaaggggggatttctttgtccctgtttctggtcatggaatgctgccttcctaacctggcatgaagcttctttgctaatatttgcagggcacaggaaggacaaagggagccatgccagatgtttgggggaatcacagatagggtttactcagtagacgggaaatagtgtgcagttactaatgtcccacttagccgaccccttaacacacttcatttagccccacttttgcatggagggactcagcctgcaagaggcaattggagatccaacccagacccagactggccagccagttgactcctagaagcatttggtccctctgttctaaactgtgcaggggtaaaaggctctgcaaagaagtgaactgggcatttagaagcaagttgcttacaattcaggctctgtgggctgggggttagcgcagcgacgcgtggtcgacgatatcccgtaattccggaccgtaccagcccctgcc

SEQ ID NO: 251937 - DNA, 544 bp, Homo Sapiens
gaacattaggttactgaaagactctggcttccatcttgcatgcatgccctctcttcctttttttgcttactttctatgatggaggccaggtgccatatcatgagctgccctgtttatagcccacttggcaaggatatgagggcgacctccagccaacactcagcaaagaactgaagcctgccgacaactatgtgagtgatgttagaaggggctcctccccagtcaagccttaagctgactgaagccccagccaagattctgactacagcctctgtgtgagaacacatgcctgaggatccagcgaagtgcgcccaattactgacatacaggaaaatgagacaatacatatttgttgttttaacccagtctaggttaatttttacccacagataattaatacagtaaacttcccactataagttcgcaaagatgttaaagttgatgctcctctaggaaaaatggaagtacttacggcagacgtgtgagatgtaaggacacacaagaacagtcattgttattatctgaaaacacacatagtagacac

SEQ ID NO: 251938 - DNA, 883 bp, Homo Sapiens
tataaatcgtttctaagaaaagtaaaagctcttttgaggcacaagataaagaggtttagctaatgaggagggtaacgaacctaactggaaaagtactgctaagggacatataataagaggtagcagattcagagagttggaggaaagtcactgaaatgatgaagttcttaatcttattatctctcacaaacccaaaataaatttaaaataattctaagtgattgaaaacatgaataaagaagtattttctattcatggaacaaatttcaaggtgatacaaatacagaaaacccacaagtactagcactaaaattataatgacattatttctataataaaaatttatgtcatattcttataaaggaaataattaaactagtctggaagatgctattaccttttagggatctgttttagcactgcagctcagaaaacagaaaggatttgtttaaggaaagtagagctggagaccacacaattctctgattggccaaactctgcatgagtcagccaggtgctccctcctcaccaggtgatctagtgggaagagatgggtagcccatggcatggaaggaaaggaaaaacctgacatgctgttttcatgtctgcaacatgatagtctgtctgtctctttatgtgaacatcatcagtcagatgttctacctttttataacttcaaaatagttttaaaaacagcgtcggtggccccttattagataactgagtgtacatgaattttcaaatttgaaatctataaaaattttactgttctaaatgatagcagttactcagctaaacacagacatggaattgttgagactacaaaaccagccagcaaagctccccattgctttcaccaggacttgcaaaggcagcaaggatt

SEQ ID NO: 251939 - DNA, 739 bp, Homo Sapiens
  misc_feature (678)..(678): n is a, c, g, or t
  misc_feature (695)..(695): n is a, c, g, or t
tatctacccaaccactttctatacctctcttccaaccaaaagtctagatatgggaatatccctcaccacgatcctaatactgtcagtagctgtcctgctgtccacagcagcccctccgagctgccgtgagtgttatcagtctttgcactacagaggggagatgcaacaatactttacttaccatactcatatagaaagatcctgttatggaaacttaatcgaggaatgtgttgaatcaggaaagagttattataaagtaaagaatctaggagtatgtggcagtcgtaatggggctatttgccccagagggaagcagtggctttgcttcaccaaaattggacaatggggagtaaacactcaggtgcttgaggacataaagagagaacagattatagccaaagccaaagcctcaaaaccaacaactccccctgaaaatcgcccgcggcatgttccattcctttatacaaaaactataagcagatgcatcccttcctaagccaggaaaaaatctgtttgtagatctaggagaaccattgtgcttaccatgaatgtgtccaattgttgggtatgcgggggagctttatgagtgaacagtggctgtgggacgggatagacattcccccttacttacaggcatcccaaaaccccagactcactttcactcctcaggaatgcccngcagtcctggacacttnccaactcagtatgagggacggtgtgcatatcccgcaagtggact

SEQ ID NO: 251940 - DNA, 2306 bp, Homo Sapiens
ctcggaagttcgggatatgtcgacccacgcgtcgagttccacaagcacagtcagagcagccagacggcggacaatgccttgaaatgctcctgggtttgcttgaagctgcagcagaaatggagctatgaagacaaagatcaaaggccgtctgaatggctgtcaaggaccagctgtgctcactggtattcatggctctaacagacgcccagcacccagcttcagcttgttggcatccgtacactgacagtcttgggtgcccagccagatctcctatcttatgaggacttggagctggcagtgggtcacctgtacagactgagcttcctgaaggaggattcccagagttgcagggtggcagcactggaagcatcaggaaccctggctgctctctaccctgtggccttcagcagccacctcgtacccaagctcgctgaggagctgcgtgtaggggagtcaaatttgactaacggagatgagcccacccaatgctcccggcatctgtgctgtctgcaagcccttgtcacgcatgtatcaacacatcccagcatcgtcaaggagacactgcctctgctgctgcagcatctctggcaagtgaacagagggaatatggttgcacaatccagtgacgttattgctgtctgtcagagcctcagacagatggcagaaaaatgtcagcaggaccctgagagttgctggtatttccaccagacagctataccttgcctgcttgccttggctgtgcaggcctctatgccagaagaaggagccctcagttctgagaaaagtactattgggaggatgaggtgttggctgccatggtgtctgtcattggcactgctacaacccacctgagccctgagttagctgcccagagtgtgacacacattgtgcccctcttcttggatggcaacgtgtcctttctgcctgaaaacagcttcccgagcagattccagccattccaggatggctcctcagggcagaggcggctgattgcactgcttatggcctttgtctgctccctgcctcgaaatgtggaaatccctcagctgaaccaactcatgcgggagcttttggaactgagctgctgccacagctgccccttttcttccaccgctgctgccaagtgctttgcaggactcctcaacaagcaccctgcagggcagcagctggatgaattcctacagctagctgtggacaaagtggaggctggcctgggctctgggccctgtcgtagtcaggccttcactcttcttctctgggtaacaaaggccctagtgctcagataccatcctctcagctcctgccttacagcccggctcatgggcctcctgagtgacccagaattaggtccagcagcagctgatggcttctctctgctcatgtctgactgcactgatgtgctgactcgtgctggccatgccgaagtgcggatcatgttccgccagcggttcttcacagataatgtgcctgctttggtccagggcttccatgctgctccccaagatgtgaagccaaactacttgaagggtctttctcatgtacttaacaggctgcccaagcctgtactcttgccagagctgcccacgcttctttccttgctgctggaggccctgtcctgccctgactgtgtggtgcagctctccaccctcagctgccttcagcctcttctactggaagcaccccaagtcatgagtcttcacgtggacaccctcgtcaccaagtttctgaacctcagctctagcccttccatggctgtccggatcgccgcactgcagtgcatgcatgctctcactcgcctgcccacccctgtgctgctgccgtacaaaccacaggtgattcgggccttagccaaacccctggatgacaagaagagactggtgcgcaaggaagcagtgtcagccagaggggagtggtttctgttggggagccctggcagctgagccctcagtcctggcctagactgttctgacaatctaacctgggattactaactgttgagccatcttccccaaagcagggaaaccactggtctctgactgcctttcccaaagacacagcacaaatgctaggcctctgttgcatggctgtacaaagaacataagagtccatatttctagtggatttgtaaaataagtgtgtgtgagacacttgcgtttgaagaaagatctagggtcctgggtctcttgcatttatatgtcagaaaaggggcgatatgctgctgaggggtgagtgcatatgagtgtggccctgaggaccagggctggcagatgttgtctacctgctgaagaataaagatttcttttggt

SEQ ID NO: 251941 - DNA, 736 bp, Homo Sapiens
  misc_feature (39)..(39): n is a, c, g, or t
  misc_feature (42)..(107): n is a, c, g, or t
  misc_feature (116)..(143): n is a, c, g, or t
  misc_feature (488)..(520): n is a, c, g, or t
  misc_feature (565)..(574): n is a, c, g, or t
  misc_feature (662)..(674): n is a, c, g, or t
cagctacttgggacgctgacagaggagatctcctgaacncannnnnnnnnnnnnnnnnnnnnnnnnnnnnnnnnnnnnnnnnnnnnnnnnnnnnnnnnnnnnnnnnntccatctcnnnnnnnnnnnnnnnnnnnnnnnnnnnngtcggggagggaaaccacgatgtaatacttgggactggagattttaggaaatgatctggtatttttctgaaggagaaaagaacaactccttttaatcttttggaagcaagtctcttccattttcaacattaatggttataggtcaccatccgttaagaagatgtgttttgtctatttccattaaaatgtaagttctaggaggaaggaacaaagttgtttttcgccatggtatccccagtgcttggtatataacagagactcaattagcttgctgaatgaccaaacaaatgatttcagcttttgataacatctttggaacttgagagcatacaccttggcttttgnnnnnnnnnnnnnnnnnnnnnnnnnnnnnnnnntgtgcccttctgggaatgaaccaggactatttgaatggaaagagnnnnnnnnnngctgtcatagtttaaaaattggcatatgttctcttccagattaaattcccttggaccttttaatttatactagaacaagcacttatcnnnnnnnnnnnnnattactaagcccaacacagtgcgcggcatgcagtaactgttcaaataatgtttgtttaattg

SEQ ID NO: 251942 - DNA, 803 bp, Homo Sapiens
  misc_feature (742)..(752): n is a, c, g, or t
cagagaccaaaaatgtcagacattgcctttctctgtaacctgatctaagtcaatggaaactgaggggaaatcttctggaggcttttgttaaaaatcttcctcatggataaaacaaatgagagacgaaatggccttttctgcctttgagatacaattttacaaagatgtaaaactggaagttatagcagcagctcttgtgatcgagaggtggaatagcctaaggcaaaacaaaccaactgaggtcaaggcaaaaaaagtgtgtctttaatgacacccctgaaccctgtgttatgtcaaacaatttcctaggttacttaggccaattatatttggacactgttacctctggccaaaagcatcctaacttgtattagctatacaacagagtacattagaaccacaaaaagttatgttacagaggtatatttatgaacagtagatgtgcagttaaaaagaatttacaaaacagtacgtttccatgtttttaaaaaaatcaaatatgtcaatatggattcatttgccaagaaaaaggtctgaaaagatactcaaggttttaagagtagttatctttgaaagatagcatttaaatgtttccttttgcttatgtgcattttctatttttttctacagttagcatgtatcactttaagattccgccatccttcctatcaattcaatgcaatttaggaaagaaagaggtaaacatgtattccagtgagctatcttgaaccagaagtctgcnnnnnnnnnnnaaatggaaaagtttctgttctttaaaaaaacttttcgtgaaataaaatttg

SEQ ID NO: 251943 - DNA, 1016 bp, Homo Sapiens
  misc_feature (912)..(942): n is a, c, g, or t
agcagcggtacggtccggaattcccgggatatcgtcgaccacgcgtcgagaagatctggtggagggtgcaacgccgcctcctcgacattgacttcgggacctaccccttgtgacttcatccaactgcaccgtgggcggtgtgtgcacgggcctgggcatccccccgcagaacataggtgacgtgtatggcgtggtgaaagcctataccacacgtgtgggcatcggggccttccccaccgagcagatcaacgagattggaggcctgctgcagacccgcggcacgagtggggagtgaccacaggcaggaagaggcgctgcggctggctcgacctgatgattctaagatatgctcacatggtcaacggattcactgcgctggccctgacgaagctggacatcctggacgtactgggtgaggttaaagtcggtgtctcatacaagctgaacgggaaaaggactccctattccccagctaaccaggagatgcttcagaaggtcgaagttgagtatgaaacgctgcctgggtggaaagcagacaccacaggcgccaggaggtgggaggacctgcccccacaggcccagaactacatccgctttgtggagaatcacgtgggagtcgcagtcaaatgggttggtgttggcaagtcaagagagtcgatgatccagctgttttagtcacagactgagctgatcccaacaggccctggcagcgtctggacttgtgtaaacagcagcagtcacgttcctgggcgcaaacaatagcaagcaggaaacactttccgttcctttatattccggtcagccggtgttttacagatttaacatgggaagcggcgtgttatttttagacttattaagggccagggtgcgagaccttaacatgtccgttggttcccggagaggtataattannnnnnnnnnnnnnnnnnnnnnnnnnnnnnnattgtgcgtaccgtgtggaaataaataaaggacaagggaagtatacgacgtcccaatagacggtgataacgagc

SEQ ID NO: 251944 - DNA, 1257 bp, Homo Sapiens
ggggtccagcgagccgtctcctcctcctgctagtgctgctgcggcgtcccgcggcctccccgagtcgggcgggaggggagagcgggtgtggatttgtcttgacgaactaaaattccagatggcaaactcaatgaatggcagaaaccctggtggtcgaggaggaaatccccgaaaaggtcgaattttgggtattattgatgctattcaggatgcagttggaccccctaagcaagctgccgcagatcgcaggaccgtggagaagacttggaagctcatggacaaagtggtaagactgtgccaaaatcccaaacttcagttgaaaaatagcccaccatatatacttgatattttgcctgatacatatcagcatttacgacttatattgagtaaatatgatgacaaccagaaacttgcccaactcagtgagaatgagtactttaaaatctacattgatagccttatgaaaaagtcaaaacgggcaataagactctttaaagaaggcaaggagagaatgtatgaagaacagtcacaggacagacgaaatctcacaaaactgtcccttatcttcagtcacatgctggcagaaatcaaagcaatctttcccaatggtcaattccaggggagataactttcgtatcacaaaagcagatgctgctgaattctgggagaaagttttttggagacaaaactatcgtaccatgggaaagtattcagacagtgccttcatgaggtccaccagattagctctggcctggaagcaatggctctaaaatcaacaattgatttaacttgcaatgattacatttcagtttttgaatttgatatttttaccaggctgtttcagccttggggctctattttgcggaattggaatttcttagctgtgacacatccaggttacatggcatttctcacatatgatgaagttaaagcacgactacagaaatatagcaccaaacccggaagctatattttccggttaagttgcactcgattgggacagtgggccattggctatgtgactggggatgggaatatcttacagaccatacctcataacaagcccttatttcaagccctgattgatggcagcagggaaggattttatctttatcctgatgggaggagttataatcctgatttaactggattatgtgaacctacacctcatgaccatataaaagttacacaggaacaatatgaattatattgtgaaatgggctccacttttcagctctgtaagatttgtgcagagaa

SEQ ID NO: 251945 - DNA, 662 bp, Homo Sapiens
  misc_feature (600)..(612): n is a, c, g, or t
gcagaaacttgtctcataaattggcactgatggagcatcagctgtggcccacagagagccttgctgagaagggggcaggtaaagcagagattttagcattgccttggcataacaagggcccatcgattccctactaatgagaggcagggagagcatgggcaatggagacccaccaatgatccccaaccccggtgggtactggctgcctgccctgggccagggaatggctccttataccaaagatgctggcacatagcagaacccagtgcacgtcctccccttcccacccacctctggctgaaggtgctcaagagggaagcaattataaggtgggtggcaggagggaacaggtgccacctgctggacaatcacacgaaaggcaggcgggctgtgtactgggccctgactgtgcgtccactgctgtcttccctacctcaccaggctactggcagcagcatcccgagagcacatcatctccacagcctggtaaattccatgtgcctctgggtacaaaagtgcctcaacgacatgctctggaaatcccaaatgccacagtctgaggttgatatctaaaatctatgccttcaaaagagtctctgnnnnnnnnnnnnnaacctggtagacggtataaaagcagtgcaaataaacacctaaccttctgc

SEQ ID NO: 251946 - DNA, 1259 bp, Homo Sapiens
  misc_feature (1009)..(1009): n is a, c, g, or t
ggagagaggcaagatggctacggcagggggtggctctggggctgacccgggaagtcggggtctccttcgccttctgtctttctgcgtcctactagcaggtttgtgcaggggaaactcagtggagaggaagatatatatccccttaaataaaacagctccctgtgttcgcctgctcaacgccactcatcagattggctgccagtcttcaattagtggagacacaggggttatccacgtagtagagaaagaggaggacctacagtgggtattgactgatggccccaaccccccttacatggttctgctggagagcaagcattttaccagggatttaatggagaagctgaaagggagaaccagccgaattgctggtcttgcagtgtccttgaccaagcccagtcctgcctcaggcttctctcctagtgtacagtgcccaaatgatgggtttggtgtttactccaattcctatgggccagagtttgctcactgcagagaaatacagtggaattcgctgggcaatggtttggcttatgaagactttagtttccccatctttcttcttgaagatgaaaatgaaaccaaagtcatcaagcagtgctatcaagatcacaacctgagtcagaatggctcagcaccaaccttcccactatgtgccatgcagctcttttcacacatgcatgctgtcatcagcactgccacctgcatgcggcgcagctccatccaaagcaccttcagcatcaacccagaaatcgtctgtgaccccctgtctgattacaatgtgtggagcatgctaaagcctataaatacaactgggacattaaagcctgacgacagggttgtggttgctgccacccggctggatagtcgttcctttttctggaatgtggccccaggggctgaaagcgcagtggcttcctttgtcacccagctggctgctgctgaagctttgcaaaaggcacctgatgtgaccaccctgccccgcaatgtcatgtttgtcttctttcaaggngaaacttttgactacattggcagctcgaggatggtctacgatatggagaagggcaagttttccgtgcagttagagaatgttgactcatttgtggagctgggacaggtggcctttaagaacttcattagagctttggatgcacacagatcctggtttctcagaaaaaatgagtctgtacgggaaccaggggggagggatctccctgggccacaattggaagaaagaagtgggtgcttggtggttcccctgc

SEQ ID NO: 251947 - DNA, 1555 bp, Homo Sapiens
  misc_feature (1283)..(1304): n is a, c, g, or t
  misc_feature (1420)..(1420): n is a, c, g, or t
  misc_feature (1424)..(1424): n is a, c, g, or t
gatgtaattagcacattattcataagagacaaatatatacaatgagttactatacatatacaaagtgattttagctgtataaagtgatattgcaaaaaactacagctaatgtttcttgctgggtaattattagcataaatatcaggttcttagaggtctttaagagaatactttagagctaccaaaattagcagcagtgatgtaatatcaccctgaaataccaggagcagaggtgccccagagtgcttcacagctatgatcaggaaacttgacctgccccattgctacagcaacggcataaggactaggaaggtccactagctggggaggtcttggaaccctccgagccagaaagaagcattccagcatgattcctcagatgcaatgaggaaggtttacagaattttcacagggcaacagagatcaagtggtatgaaaaggtaggagttttaagctcaagtctcaaagataacctacctttacattctcagtcagaatttgacccagaaagaggaagtttcttcaggaacagaccgtacgttgatgaagtagaagtcatttcagtaaaaacggagtacagaacttggtcataatatcttgcattttatagatttattaaagattagtttcaagttcacattcgctattcagttgtaaaccgaatggatgggaggggagaaaatacaagctctccacacaggtatgctccctctcttttctgagagagaaagcatggggattttcagcataaattccatgttatgtgagtgctgtttgaattctgaagttcctatcaatatcctgttcctgcaagtgatctctggtaagaccaccttacatgctgggcttagttattgttaaaattgcaaggtttcttcacaccctctttgataagaagtgtttagctggcagagctttcccttgacttctgagtctagtgtgggttggcccatgacagtgggaagaaatccaacatgttacatggagaccttgtatgtaaacaaactctgtagcctttgaaagtggaactgctttttacagttaaagggctgctaaatggcttgcagatgagatcttctggctcaccttgatcttcacatgaacccattgtgacctatctggatttcctaggacctgtagtttccatttgggttatattagtgcctcaggaatgtgtcactactggtcaagcaatactcagaaattcaggctgtgaggggttagattagaggaaagtaatttaggtgagctatccagagctttcaacctcagggtttataggnnnnnnnnnnnnnnnnnnnnnncccttaggactttctcatactcttagccctgaccttgcagtctcctctgaggggcctcctaagacccttaaaataatattacaataggactttgagtgtgcatttcacagtggaanatanctctggctagcattacttccaaatgctagttccagctaaaaacaagtactttttattagtttcttgtctttcaacattctgccatcaaaatatattcattttattaacttaccgattattgggaacctgca

SEQ ID NO: 251948 - DNA, 729 bp, Homo Sapiens
  misc_feature (679)..(687): n is a, c, g, or t
tccttcagctgtattgagtgtccatttgcttatcaatttagagctcttctatggaaagagggtgaaaatctgttttgtgcctcttttttttgtatgtaaatgtgcaattatactggattttctcttgtaaaaaacactacaattcttttactgaagctcctaaactgccatttgcctgactccagcaattaattctgcggtgactcattgggcttccagtacttctgttgattagatatggtcccaaaagaaagagcaaaatggaaaatgcgatccatgtcaccaaatataattgctacaagtaacatgaaatacagctcaccaaaacactaaactttgctcttgagcaattatatagtttgatgtccttttaaaaaataagaaaagctaggttttatcatactaaaattttattttgtatatgatgtttggttttttaaacttactaacataaggatttcctttaatattccaaatacagttcttgaaacagtatccaacatgaaatcttatctccttgcttttagacttagtgctatttactatctaaagacttttctatggtaagccagggtacatcctatatactacagataccttaggtttcagtatttttatgcagcttcttcattgtgtcacattttgttttcatatctgtaacagagctctgctgaaattnnnnnnnnnttatgattaataggattgtttcaccatttcagaaatcagagt

SEQ ID NO: 251949 - DNA, 663 bp, Homo Sapiens
cctcttaatcaatttaattaaaatgataaagtacttacagcaaaataaatggctatacaaatacagtatctaattacagcaggtggatacactatagataagatatatcccatctagattatgtgtcataagcaaacttccgtttaagtaaaataaatgtcccaatccaatttcaaatatagtttccctctctctcattaaaaaaaattactagagtccaattatgatttcaataaaccctacggcactgagaaaactagcaaaggggtgcaaagaagtagtagaaataatttaagcaagactaaaacacacagaatctatatggacctcaaatggaactgaagtatgcatttcagtgttcaaaaatatatgcatgtgttgagtgtgaccagatattaatataataaagccttggaaatgtcagtaaacttaagtaataggaagtttcaaaataaaccaggatttatacctgaaaaaaaacataaacagctatctgtaagatgagcaattctggtcttagatgatggagaccgatcaactactgatacaatttgcccactgttgttgacttacaagctccctggcctagcattttacatacatcactttcccaacttctttactcgtaccaatcctcctgagctctacttggttaattcctat

SEQ ID NO: 251950 - DNA, 681 bp, Homo Sapiens
  misc_feature (85)..(85): n is a, c, g, or t
  misc_feature (183)..(183): n is a, c, g, or t
tgggaggtggaggagtcctgtcggctgttccctgtgggtgcatggctgagactctctaccatggtttgtagaacaacacaggccnaatctcctctttccatgctggtcggccccaagatttgaacattgagctcagtgcacaagaaatactcaatcccgctcaatcacggggccccatcctgntaccatgaacatcaaaaccagagggaacccagggagcagggtccccatgcagggagctggcccacattcccttcccaaagggtggcagccccattgatattgacttgcctttgttccacctctgttgaggaggaaaatccttgtaaaacctgactactgtgtgactggtatacgtatttcatccttttaagaaaaagtctaaggctcctgggttgaaagcagcctagtcatttacgtgtcgtagctagatgcattttaagtgcatttaaacattatcttgaatttgctacatgtaaacctcaaataactctagtgggtggcaattaattaaacatcggtatccatcccttcccttcctcggtcttccctctctgtggcctttcctcatgagaaatcagaatgtgcagaacacaaggcctgcgggtgcctggtctatcttcatggctgctttgccaatggccgtgtggctccgcacaccaagaagctgccacgggctgt

SEQ ID NO: 251951 - DNA, 472 bp, Homo Sapiens
gacacagagtgagtagacaaggcttcacatactgggagatctggctgggcttcaagagagggggttggtggtggtgtggctaagttccaaatgttggcctgaagccagtgctcaaagaaagggggcccttgagacagtccaaatggctcccttcgccactcccatggttcaagctttgactacaaccagaattcagaggcaggcagaaggattccagtgttggagaggctgctggtgggtgctccccaggccctggctcttcctgggcagcaggcgaatcgcactggaggcctcttcgcttgcccgttgagcctggaggagactgactgctacagagtggacatcgaccagggagctgatatgcaaaaggaaagcaaggagaaccagtggttgggagtcagtgttcggagccaggggcctgggggcaagattgttacctgtgcacaccgatatgaggcaaggcagcgagtgg

SEQ ID NO: 251952 - DNA, 1083 bp, Homo Sapiens
  misc_feature (14)..(14): n is a, c, g, or t
  misc_feature (30)..(30): n is a, c, g, or t
  misc_feature (161)..(219): n is a, c, g, or t
  misc_feature (233)..(233): n is a, c, g, or t
ggttaaaggtggtngtgagccctgaatggntcttttcgtctccaacagtcagatttaaacgttctgtcttcagccaaagcctttgcttctaatgtgtacattcttctctcttcattcttcatttcttccacctgtcaccaaggatcacacttatggctttnnnnnnnnnnnnnnnnnnnnnnnnnnnnnnnnnnnnnnnnnnnnnnnnnnnnnnnnnnntgacacagcggagntccgtctgttatctttcccgggatacatctgagtatattcaactctgtattttttggcaaaaagcatgaaggcattcattggtcttttgcacttattaggagaagtggcactcacagtccctgagctgtggtttttgacagctttagcatacaaagaattggaagagagctgtgatgatccaggtgagccacagtttttactgaatccagatcttgcaaagtcttgaccaccaggtcctccacaagacaaagatgcacgacgctggcgagccatactacttaacacataaactgcagaagaatccataggtgtgaagtcatagcttttaaatgtatcaaaaacacctgaatcatcaaaattaatggcatcggggtgtccaggaggtagacatacatcgccaatatgaacttcacaacatggaatgccatgctgtaccacagtcaagcttggataaaatgatgaccaacctttatttttaacatagaaagggtggtccagcttacactctacggtaagtaaaccatcttctactgtaccaggatcaaaagtcaacttcagtacagactcgccaaatgatacactttcttcatgtgataacaactttagaccatcagaaccatagcccttgtgaatgcccatttgaagatcttcctcattatcacagccttcagctctagcaaaatcttcaacatcttgccattccttattgcttcccttatgaaagcacagtcgtgtgcctttcaaaaaacagtgccagacagttgaaggccaggaattgcaccatcccaaatcatcatcatctgacagggaggacatgcagaaaatgccagattctgactcactatttgc

SEQ ID NO: 251953 - DNA, 441 bp, Homo Sapiens
  misc_feature (403)..(403): n is a, c, g, or t
gatttgtaaacattcactgagtttaattttatttccacagggctcacaacaacattaaaccaggatgcttatgttcttaagtctatatttgcatatacattgactcttgatggaaagacttaagaagatcaaggtctcaccatttgtcctcaattcgtgtgaccataagatactgatagcattgagtcttgaaatgatttaataatatgagtgaggatttgctttctccattagagcattaagctaaaactatcaacattttaaaccaaattgccttatttttcttccaaacttcatatatgtctatcagggtaataatagggcttgaaaattgatatcctgtgggtgcctaaaagtacagtaggaaaggagagggaggagtgtattacatgtttttattttnaattgtacggaaggggggattttaaaaaatttggtaac

SEQ ID NO: 251954 - DNA, 1049 bp, Homo Sapiens
  misc_feature (69)..(69): n is a, c, g, or t
  misc_feature (85)..(85): n is a, c, g, or t
  misc_feature (106)..(106): n is a, c, g, or t
taaactaataccccaaaggccaattaaactaactttaaccttggccctgggcctaggtactccaatggnaaataaataaaggganggctgcctgccaacctggtgncatcaaactcaagcatgcccatggtaaactgccagcaggtggctcttaggctgggacaccaaccaccagccacctgcccccattgttctggtagcctctttggcactgaccagactaggagcgcctatgtttggcacagatgctgagccatgtggtggttactagaggaaaggccgactcccagcttctgcttcatttcatcatgtgtacaatacagattaataagcagtaaggagccaatgtataaacagcagttacatattttttaaattcccctttcgtacaatttaaaataaaacatgtatacacttctcctctctttctactgtactttagcaccacaggatatcaattttcaagcctattattacctgatagacatatatgaagtttggaagaaaaataaggcaatttggtttaaaatgttgatagttttagcttaatgctctaatggagaaagcaaatcctcactcatattattaaatcatttcaagactcaatgctatcagtatcttatggtcacacgaattgaggacaaatggtgagaccttgatcttcttaagtctttccatcaagagtcaatgtatatgcaaatatagacttaagaacataagcatcctggtttaatgttgttgtgagcctgaattggttcttttcctcttccaacagtcaggatttaaacgtttctgttcttcagccaaagcctttgcttctaatgtgtacattcttctctcttcattcttcattttcttccacctgtcaccaaggatcacacttatggctctgttatctttccctggatacatctgagtatattcaactctgtattttttggcaaaaagcatgaaggcattcattggtcttttgcacttattaggagaagtggcactcacagtccctgagctgtggtttttgacagctttagcatacaaagaatggaaga

SEQ ID NO: 251955 - DNA, 499 bp, Homo Sapiens
  misc_feature (235)..(244): n is a, c, g, or t
tagatttcaagatgccataacccacaaatacttaatcatactagttttcctatttttaaattagcaggtttattaaattgaaaagatctccaaagtattacatatccaatctaatgtttaaaatggcaaatgcattaagttagattgtctaaggtacttacgtagcctctttaacattttccttagtcagttattacttattaaatatgaacttatgatcaaaaatgagaagacnnnnnnnnnntacaggtttaaaataaaatccgtgttaaaaaacatgaagagagatgggttctatgggctgaaagatctagaacctacacttaatatcattctgtgcattcagtaatcaacaaatttcccaagacagacaaatgatgcaataaactgcagaccaggaccaaggcgaggccatagccaagcagttataaatttgagagacctccttacttgtctagcagcgaagttttgggggttgagcccagtgccgattgctcca

SEQ ID NO: 251956 - DNA, 746 bp, Homo Sapiens
  misc_feature (281)..(289): n is a, c, g, or t
tgttaccattctgatgttggagatagaatataaccttaaccctagctaatttattttaaaataaatatagctctctgaagtaatttcatacatagtatcttataagagaacatgaaaaacatttattatcccataaaatccatggggtaataatgtcaattaatgatagtttcaggaaactccctttaaaaacagatctaagaattttacctaatatattttgagccaagaattaacaaatatgaaatttgccattagagaatgacagacttttctgtgcnnnnnnnnngtgcagaagatgttgtccctcctgaaactatggaattcctttatcttctaaaacttatctaaaaatcttttagtagcaggtaactaaactgtcctatatgcacctatcatgtactatcagttgactgtaaattcctgattttgatattaagtagtaaatgaaaatggtccattcgtgcaaattttggtaagacaacatttaaacatacagaagtccaaaataaccttcaaggtgtttaacattttacaacttaaaggaaaacaagtccattatataaattttagtaagactcataactacatgtaaaaactgtacaggaggattatggattgtatagaaactgatacacaacagtggtatcagtttttctcaagaacgttaatattttcacaccactattacaacacaaacaaaagttcagaaattatcacattttatttttgaaaagttgctgctt

SEQ ID NO: 251957 - DNA, 1746 bp, Homo Sapiens
  misc_feature (1581)..(1581): n is a, c, g, or t
gccatgctggccaagctgcagcggactcgggccaactccatggaagggctgatgccgcgctgggttcctgatcgtgccttctcccggaccaaggactccaaggccttccgccagatgggcattgatgattccagcaaagacaaccggggcacccaagatgccctgaaccctgaggatgaggtggatgagttcctgagccgtgccatcgatgcccgcagcattgatcagctgcggaaggaccatgtgcgccggtttctgctcaccttccagagagaggatcttgagaagaagtactcccggaaggtggatccccgcttcggagcctacgttgcctgtgccctgttggtcttctgcttcatctgcttcatccagcttctcatcttcccacactccaccctgatgcttgggatctatgccagcatcttcctgctgctgctaatcaccgtgctgatctgtgctgtgtactcctgtggttctctgttccctaaggccctgcaacgtctgtcccgcagcattgtccgctcacgggcacatagcaccgcagttggcatcttttccgtcctgcttgtgtttacttctgccattgccaacatgttcacctgtaaccacacccccatacggagctgtgcagcccggatgctgaatttaacacctgctgacatcactgcctgccacctgcagcagctcaattactctctgggcctggatgctcccctgtgtgagggcaccatgcccacctgcagctttcctgagtacttcatcgggaacatgctgctgagtctcttggccagctctgtcttcctgcacatcagcagcatcgggaagttggccatgatctttgtcttggggctcatctatttggtgctgcttctgctgggtcccccagccaccatctttgacaactatgacctactgcttggcgtccatggcttggcttcttccaatgagacctttgatgggctggactgtccagctgcagggagggtggccctcaaatatatgacccctgtgattctgctggtgtttgcgctggccctgtacctgcacgcccagcaggtggagtccactgcccgcctagacttcctctggaaactacaggcaacagaggagaaagaggagatggaggagctacaggcatacaaccggaggctgctgcacaacatcctgcccaaggacgtggccgcccacttcctggcccgcgagcgccgcaatgatgaactctactatcagtcctgtgagtgtgtggcggtcatgttcgcctccatcgccaacttctccgagttctacgtggagctggaggcaaacaacgagggtgtcgagtgcctgcggctactcaacgagatcatcgctgactttgatgagatcatcagcgaggagcggttccggcagctggaaaagatcaagaccatcggcagcacctacatggctgcctccggcctcaacgactctacctacgacaaggtgggcaagacccacatcaaggcactggccgactttgccatgaagctgatggaccagatgaagtacatcaatgagcactccttcaacaacttccagatgaagatcgggctcaacatcggnccccgtggtgggccggggtgataggggcacgaaagcctcagtacgacatctggggcaataccgtgaacgtggccagccgcatgaacagcacccggtgtacccgaccgcattcaggtcaccacagacatgtaaccaagttgttgggctgccaacacgttaccagct

SEQ ID NO: 251958 - DNA, 699 bp, Homo Sapiens
  misc_feature (290)..(579): n is a, c, g, or t
  misc_feature (581)..(610): n is a, c, g, or t
ggagctcctgctcattcagctaaagtattacttcctctgtgaagaaacattttctgacttcctgccagtgtcagacctctgaatcccctctacaccttgacaatacttctgtttaagtacttatctatcatactgtaattaacggtattctcatctggctcattaatagatttgaagttcctagaggtttgagaccacaccttcttcaagattatgtcccaagagcatgtccctggatgtaaaagttgaatttcaccaaagtactagggattcaataagtgtttgttgannnnnnnnnnnnnnnnnnnnnnnnnnnnnnnnnnnnnnnnnnnnnnnnnnnnnnnnnnnnnnnnnnnnnnnnnnnnnnnnnnnnnnnnnnnnnnnnnnnnnnnnnnnnnnnnnnnnnnnnnnnnnnnnnnnnnnnnnnnnnnnnnnnnnnnnnnnnnnnnnnnnnnnnnnnnnnnnnnnnnnnnnnnnnnnnnnnnnnnnnnnnnnnnnnnnnnnnnnnnnnnnnnnnnnnnnnnnnnnnnnnnnnnnnnnnnnnnnnnnnnnnnnnnnnnnnnnnnnnnnnnnnnnnnntnnnnnnnnnnnnnnnnnnnnnnnnnnnnnnaatgtttattgtaggcctatggtatgaagtaccgtgtgatataatagacaaggtaatcctggctgctaccctctaagagatcacaatct

SEQ ID NO: 251959 - DNA, 646 bp, Homo Sapiens
  misc_feature (73)..(184): n is a, c, g, or t
  misc_feature (207)..(303): n is a, c, g, or t
gttcaaacgattcttatccctcagcctcttgagtagctgggactacaggcatatgccaccatgcccagataannnnnnnnnnnnnnnnnnnnnnnnnnnnnnnnnnnnnnnnnnnnnnnnnnnnnnnnnnnnnnnnnnnnnnnnnnnnnnnnnnnnnnnnnnnnnnnnnnnnnnnnnnnnnnnntgagccaccgtgcccagcccaannnnnnnnnnnnnnnnnnnnnnnnnnnnnnnnnnnnnnnnnnnnnnnnnnnnnnnnnnnnnnnnnnnnnnnnnnnnnnnnnnnnnnnnnnnnnnnnnagccaccgcacccagcctggattgttgaactcaatgcttgggtcacctccagattcattttcacagtctttcatgttttggtcatactacattgtattttgctgccatatgactgatctttttttgttaaatgtgagatacttgttaaaaaatatttaacaatgaattgaggcctaggtagcatgttatcttgctgcagaaggagatggggagtctacttctgggggatgggtcaggggtcctccatacagggctggaaattgagggtcgtctctgcagggctcagtccctacaaagggccagggtatttcctgtccacctctattctggatggcatggactc

SEQ ID NO: 251960 - DNA, 739 bp, Homo Sapiens
ggcagtttcaggcaaagaagttgggaatgcccttctaaatgttgtcctaaaaaggtatgtattctggttcatgcagtaagatttgttgtttatttgtaaatagaatggtattctatttcaaacttttaagacaaacctgttgccgcaaggctgatgcacattggatgatgactgttttctggttccagatcttgtctttgtgatataggagttatggaatgagccctggacaggatcctaagatccgggtttgttcctacttctactcattaatagcagtttgacatttaatataggaataatgttaacttgtcacttaaaacaagattctcttcatcttgttttcaagatttcaagattcttttaaaaattagcatgaagtatgggataatggattggggaaggaagtatttttaaaaagccttcttgagtttttatgcatattacatttttattcaataaaaaattccccattgttttattgaaatggattagttgtcgatcctctgaattagacatattctttaaaaataagatccgttgtcagccatctaaaatgtttttataaattcatacttacattcttttttgccggttgcagtcagcctttagtgccaagagagaacattacagcatggatgaatgcaattggtttgatcatcactgccctaccagtgagttaataattgtgatttgtacttagtgatgaaatacagccagctgttccatgtcagcaaaa

SEQ ID NO: 251961 - DNA, 992 bp, Homo Sapiens
  misc_feature (200)..(208): n is a, c, g, or t
  misc_feature (407)..(415): n is a, c, g, or t
  misc_feature (624)..(646): n is a, c, g, or t
  misc_feature (689)..(699): n is a, c, g, or t
agacactgtggttacaaaacagcatgcactcaacttgggactttatgaaaagtactgaatgagcaggaaaaggcacatactcagttttttaaatgtacaatcaacaagtaaaaataacctcatgtaagtaagccatttttattgcctttctagatattttattttattgtggaaaactgtaaacatggtcagatttggcnnnnnnnnncattaactgagcaagactttcaggatattgtagatgcacagatggtaggttgccctgaattcttacattattagattactttaattgagatttgttaaaacggttaggactgttttgtccaggaaagataagaggaccaaacatataaggtgaaattcagaattccgtttccttctaactaatgaaaaactgcttactnnnnnnnnnttttatactttccttgctaaggtcccatatattgatttgtacagatccacttagtcattttctcctttttttaagaaccattttcatctgatttttaaactcacgataccagttatctgttaatcaaaattgcattttacaatttaataatgtgatatttcctatgtctacagcataccttattaggtataaaacctactgcaacttannnnnnnnnnnnnnnnnnnnnnncttttccaactgctgcattaagatagggtggattttatgtgcnnnnnnnnnnnaagagttgaatttcttttcctgacttttaccttttacagcgtattacttagtgaacattacattttcagaatagatcctaatattttattgagggcctatgtgctaaaaactatgcatatctatatattggccaattatctttaataatttaccttttgaaattgcatgtttatcatatatccttaagtggacacatacagtgccatgttgatgtgcctctcagtttcattgaaaagctgccccacagcccatgtctcttgttctctgcaatgcctcaagggagtgagctccc

SEQ ID NO: 251962 - DNA, 2230 bp, Homo Sapiens
  misc_feature (11)..(11): n is a, c, g, or t
caaaaaagcangctggtaccggtccggaattcccgggatctgggcgcgcgcgacgtcagtttgagttctgtgttctccccgcccgtgtcccgcccgacccgcgcccgcgatgctggcgctgcgctgcggctcccgctggctcggcctgctctccgtcccgcgctccgtgccgctgcgcctccccgcggcccgcgcctgcagcaagggctccggcgacccgtcctcttcctcctcctccgggaacccgctcgtgtacctggacgtggacgccaacgggaagccgctcggccgcgtggtgctggagctgaaggcagatgtcgtcccaaagacagctgagaacttcagagccctgtgcactggtgagaagggcttcggctacaaaggctccaccttccacagggtgatcccttccttcatgtgccaggcgggcgacttcaccaaccacaatggcacaggcgggaagtccatctacggaagccgctttcctgacgagaactttacactgaagcacgtggggccaggtgtcctgtccatggctaatgctggtcctaacaccaacggctcccagttcttcatctgcaccataaagacagactggttggatggcaagcatgttgtgttcggtcacgtcaaagagggcatggacgtcgtgaagaaaatagaatctttcggctctaagagtgggaggacatccaagaagattgtcatcacagactgtggccagttgagctaatctgtggccagggtgctggcatggtggcagctgcaaatgtccatgcacccaggtggccgcgttgggctgtcagccaaggtgcctgaaacgatacgtgtgcccactccactgtcacagtgtgcctgaggaaggctgctagggatgttagacctcggccaggacccaccacattgcttcctaatacccacccttcctcacgacctcatttctgggcatctttgtggacatgatgtcacccaccccttgtcaagcattgcctgtgattgcccagcccagattcatctgtgccttggacatggtgatggtgatgggttgccatccaagtgaaagtcttttccttgaccaagggggacagtcagttttgcaaaaggactctaatacctgtttaatattgtcttcctaattgggataatttaattaacaagattgactagaagtgaaactgcaacactaacttccccgtgctgtggtgtgacctgagttggtgacacaggccacagaccccagagcttggcttttgaaacacaactcagggcttttgtgaaggttcccccgctgagatctttcctcctggttactgtgaagcctgttggtttgctgctgtcgtttttgaggagggcccatgggggtaggagcagttgaacctgggaacaaacctcacttgagctgtgcctagacaatgtgaattcctgtgttgctaacagaagtggcctgtaagctcctgtgctccggagggaagcatttcctggtaggctttgatttttctgtgtgttaaagaaattcaatctactcatgatgtgttatgcataaaacatttctggaacatggatttgtgttcaccttaaatgtgaaaataaatcctattttctatggaagactggtacctggtttctggaagaggggtctgtgacttggagctgatctttactgagctcgccgtggcagatgccatgctcaggacgttcatgtggatggtttcatgtcatcgtgctggcaacttgtcctccctgccttagagatgaggctcagacaaacgaccttagcacccatagcctatgccatgagcactggctccaccctgaatcccagctcctccccttagtgaccccaagtctgtttccctcagctgcataaggaggcgatatagtttgaatatttgtccccagccaaatcatcatgttgaacttgtaatcacccagtgctggaggttggggctctggttacgagagtgatttggatcatggggacgggtatttcatggcttggtgctgttttcttgatggtgaattattgcaagatacggtcatttaaaattgtgtggcacctccccctgcccccttcttgctcctgctttcaccatgtgacatgtctgatcccccttcaccttttgccatggtcataagcttcctgaggcctccctggaagctgagcagatgccagcaccatgcttcctgtacatcctgcagaaccataagccaattaaacctttttaataat

SEQ ID NO: 251963 - DNA, 981 bp, Homo Sapiens
  misc_feature (896)..(896): n is a, c, g, or t
  misc_feature (915)..(916): n is a, c, g, or t
  misc_feature (919)..(919): n is a, c, g, or t
  misc_feature (921)..(921): n is a, c, g, or t
  misc_feature (925)..(926): n is a, c, g, or t
  misc_feature (932)..(932): n is a, c, g, or t
  misc_feature (939)..(941): n is a, c, g, or t
  misc_feature (959)..(959): n is a, c, g, or t
  misc_feature (964)..(964): n is a, c, g, or t
  misc_feature (967)..(967): n is a, c, g, or t
  misc_feature (970)..(970): n is a, c, g, or t
  misc_feature (976)..(976): n is a, c, g, or t
ggctggtaccggtccggaattcccgggatcgcgacgtcagtttgagttctgtgttctccccgcccgtgtcccgcccgacccgcgcccgcgatgctggcgctgcgctgcggctcccgctggctcggcctgctctccgtcccgcgctccgtgccgctgcgcctccccgcggcccgcgcctgcagcaagggctccggcgacccgtcctcttcctcctcctccgggaacccgctcgtgtacctggacgtggacgccaacgggaagccgctcggccgcgtggtgctggagctgaaggcagatgtcgtcccaaagacagctgagaacttcagagccctgtgcactggtgagaagggcttcggctacaaaggctccaccttccacagggtgatcccttccttcatgtgccaggcgggcgacttcaccaaccacaatggcacaggcgggaagtccatctacggaagccgctttcctgacgagaactttacactgaagcacgtggggccaggtgtcctgtccatggctaatgctggtcctaacaccaacggctcccagttcttcatctgcaccataaagacagactggttggatggcaagcatgttgtgttcggtcacgtcaaagagggcatggacgtcgtgaagaaaatagaatctttcggctctaagagtgggaggacatccaagaagattgtcatcacagactgtggccagttgagctaatctgtggccagggtgctggcatggtggcagctgcaaatgtccatgcacccaggtggccgcgttgggctgtcagccaaggtgcctgaaacgatacgtgtgcccactccactgtcacagtgtgcctgaagaaggctgctagggatgttagacctcggccaggaccaacacattgcttctaatanccacccttctcacgacttnnttntnggcnntttgtngaatgannnaccacccttgtcaacatnctgtnatnccnagccanatcat

SEQ ID NO: 251964 - DNA, 1128 bp, Homo Sapiens
  misc_feature (819)..(819): n is a, c, g, or t
  misc_feature (847)..(847): n is a, c, g, or t
  misc_feature (853)..(853): n is a, c, g, or t
  misc_feature (879)..(879): n is a, c, g, or t
  misc_feature (997)..(997): n is a, c, g, or t
  misc_feature (1001)..(1004): n is a, c, g, or t
  misc_feature (1098)..(1098): n is a, c, g, or t
gagggcctgaaacaatgtcctccaccgagagaaacgtaaaggacacttgatccacaatccctggaataatatccaggaaacacttgctggagccactcgcagcacccttccctggcagcacacttggggacagcgaggagatgagcgcatctctgaattacaaatctttttccaaagagcagcagaccatggataacttagagaagcaactcatctgtcccatctgcttagagatgttcacgaaacctgtggtgattctcccttgtcagcacaacctgtgtaggaaatgtgccagtgatattttccaggcctctaacccgtatttgcccacaagaggaggtaccaccatggcatcagggggccgattccgctgcccatcctgtagacatgaagtggttttggatagacatggggtatatggacttcagaggaacctgctggtggaaaatatcattgacatctacaagcaggagtccaccaggccagaaaagaaatccgaccagcccatgtgcgaggaacatgaagaggagcgcatcaacatctactgtctgaactgcgaagtacccacctgctctctgtgcaagggtgtttggtgcacacaaagactgccaggtggctcccctcactcatgtgttccagagacagaagtctgagctcagtgatggcatccgccatcctcgtgggcagcaacgatcgagtccagggagtgatcagccagctggaagacacctcgcaaaactatcgaggaatgttgcagaaaacagaaacaagagctttgtgagaagtttgattacctgtatggcattttggaggagaggnagaatgaaatgacccaagtcattacccnaacccnagaggagaaactggaacatgtccgtnctctgatcaaaaagtattctgatcatttggagaacgtctcaaagttggttgagtcaggaattcagtttatggatgagccagaaatggcagtgtttctgcagaatgccaaaaccctgcnaaannnnatctcggaagcatcaaaggcatttcagatggagaaaatagaacatggctatgagaacatgaaccacttcacagtcaacctcaatagagaagaanagataatacgtgagattgacttttacagag

SEQ ID NO: 251965 - DNA, 810 bp, Homo Sapiens
tggatttccactttttccccttttggaatttagggaaaggtacttccccatttcctataggggtttatttcccataatgttttttccaagggtctctttccatacaaagtcacaaaggttaagtggtcccagttcttcttttggctttcacctcaattaccttgccagtttggccttcactggcaaaaagattagccagtaatgcacactgaaaatcatgacatttctcactgtatttctccagtaggcaccctccatctgcagggttcacatgggcaaagtaacttccatttacaggaggcttgtgttcactttctgtctgaataactggcataaactcagaattgaacccgagagtctgaaatggacctgctcctgctccaagaataaaggctccaggcagcttgatttcttttgcaattttattcagatcataaacttttttttggtttacaagaggcaataagtaaggcacacctccaacttctgcaattctagttttcccacagatgccttttacaggaaaggtaaagggttccttagtcaaatcagggcaatcaactacagagacctggacatcagcaaagttatcttttaaccccttctgcataactccagcaagctcttcaagacttggtacatgaaaagaaaactcagcacaagccattttctttcttctttaggtgtgaggttggacaaatagagctactcttggttaattatcacaagagtccacagcgcaccaagtatgaacagtttctgttctaaacggtcacggtagcaaaacacccagagtccggatcttcgccc

SEQ ID NO: 251966 - DNA, 1243 bp, Homo Sapiens
aggctggaccggtccggattcccgggacgagaagagtacctgcagatgggggcaaggtgcccatcaagtggatggcgctggagtccattctccgccggcggttcacccaccagagtgatgtgtggagttatggtgtgactgtgtgggagctgatgacttttggggccaaaccttacgatgggatcccagcccgggagatccctgacctgctggaaaagggggagcggctgccccagccccccatctgcaccattgatgtctacatgatcatggtcaaatgttggatgattgactctgaatgtcggccaagattccgggagttggtgtctgaattctcccgcatggccagggacccccagcgctttgtggtcatccagaatgaggacttgggcccagccagtcccttggacagcaccttctaccgctcactgctggaggacgatgacatgggggacctggtggatgctgaggagtatctggtaccccagcagggcttcttctgtccagaccctgccccgggcgctgggggcatggtccaccacaggcaccgcagctcatctaccaggagtggcggtggggacctgacactagggctggagccctctgaagaggaggcccccaggtctccactggcaccctccgaaggggctggctccgatgtatttgatggtgacctgggaatgggggcagccaaggggctgcaaagcctccccacacatgaccccagccctctacagcggtacagtgaggaccccacagtacccctgccctctgagactgatggctacgttgcccccctgacctgcagcccccagcctgaatatgtgaaccagccagatgttcggccccagcccccttcgccccgagagggccctctgcctgctgcccgacctgctggtgccactctggaaaggcccaagactctctccccagggaagaatggggtcgtcaaagacgtttttgcctttgggggtgccgtggagaaccccgagtacttgacaccccagggaagaagctgcccctcagccccaccctcctcctgccttcagcccagccttcgacaacctctattactgggaccaggacccaccagaagcggggggctccacccagcaccttcaaagggacacctacggcagagaacccagagtacctggggtctggacgtgcccagtgttgaacccagaaggcccaagtccgcaaaaacccctgaaggggtcctcagggaaacagggaaagcctt

SEQ ID NO: 251967 - DNA, 1106 bp, Homo Sapiens
  misc_feature (964)..(1002): n is a, c, g, or t
ggaatgggggcagccaaggggctgcaaagcctccccacacatgaccccagccctctacagcggtacagtgaggaccccacagtacccctgccctctgagactgatggctacgttgcccccctgacctgcagcccccagcctgaatatgtgaaccagccagatgttcggccccagcccccttcgccccgagagggccctctgcctgctgcccgacctgctggtgccactctggaaaggcccaagactctctccccagggaagaatggggtcgtcaaagacgtttttgcctttgggggtgccgtggagaaccccgagtacttgacaccccagggaggagctgcccctcagccccaccctcctcctgccttcagcccagccttcgacaacctctattactgggaccaggacccaccagagcggggggctccacccagcaccttcaaagggacacctacggcagagaacccagagtacctgggtctggacgtgccagtgtgaaccagaaggccaagtccgcagaagccctgatgtgtcctcagggagcagggaaggcctgacttctgctggcatcaagaggtgggagggccctccgaccacttccaggggaacctgccatgccaggaacctgtcctaaggaaccttccttcctgcttgagttcccagatggctggaaggggtccagcctcgttggaagaggaacagcactggggagtctttgtggattctgaggccctgcccaatgagactctagggtccagtggatgccacagcccagcttggccctttccttccagatcctgggtactgaaagccttagggaagctggcctgagaggggaagcggccctaagggagtgtctaagaacaaaagcgacccattcagagactgtccctgaaacctagtactgccccccatgaggaaggaacagcaatggtgtcagtatccaggctttgtacagagtgcnnnnnnnnnnnnnnnnnnnnnnnnnnnnnnnnnnnnnnnaaagatgaaataaagacccagggggagaatgggtgttgtatggggaggcaagtgtggggggtccttctccacacccactttgtccatttgcaaatatattttgg

SEQ ID NO: 251968 - DNA, 1916 bp, Homo Sapiens
  misc_feature (607)..(607): n is a, c, g, or t
  misc_feature (1770)..(1770): n is a, c, g, or t
gcaagaatgaaattaaacagggcttggcacagtgaagcacgggaaaggctttctacagagcagtgactgttgttactcgctgttacaccttaggtaatgcgttttcctctctgggtgcctcccattttctggctcaagtccctgcccaggatcaagcttggaggagggccccgagggaggggccacagagactgggtgaagagcaagggtgtttgtcccaggagcatggcgaaaattgctgctgggtggccttgggaagcacaaaggggacccaactaagggcctgatcctactgccctgggggtgtcagtgccagccccccacaaatcttttctgccccccccaggaggctgaccagtgtgtggcctgtgcccactataaggaccctcccttctgcgtggcccgctgccccagcggtgtgaaacctgacctctcctacatgcccatctggaagtttccagatgaggagggcgcatgccagccttgccccatcaactgcacccactcctgtgtggacctggatgacaagggctgccccgccgagcagagagccagccctctgacgtccatcatctctgcggtggttggcattctgctggtcgtggtncttgggggtggtctttgggatcctcatcaagcgacggcagcagaagatccggaagtacacgatgcggagactgctgcaggaaacggagctggtggagccgctgacacctagcggagcgatgcccaaccaggcgcagatgcggatcctgaaagagacggagctgaggaaggtgaaggtgcttggatctggcgcttttggcacagtctacaagggcatctggatccctgatggggagaatgtgaaaattccagtggccatcaaagtgttgagggaaaacacatcccccaaagccaacaaagaaatcttagacgaagcatacgtgatggctggtgtgggctccccatatgtctcccgccttctgggcatctgcctgacatccacggtgcagctggtgacacagcttatgccctatggctgcctcttagaccatgtccgggaaaaccgcggacgcctgggctcccaggacctgctgaactggtgtatgcagattgccaaggggatgagctacctggaggatgtgcggctcgtacacagggacttggccgctcggaacgtgctggtcaagagtcccaaccatgtcaaaattacagacttcgggctggctcggctgctggacattgacgagacagagtaccatgcagatgggggcaaggtgcccatcaagtggatggcgctggagtccattctccgccggcggttcacccaccagagtgatgtgtggagttatggtgtgactgtgtgggagctgatgacttttggggccaaaccttacgatgggatcccagcccgggagatccctgacctgctggaaaagggggagcggctgccccagccccccatctgcaccattgatgtctacatgatcatggtcaaatgttggatgattgactctgaatgtcggccaagattccgggagttggtgtctgaattctcccgcatggccagggacccccagcgctttgtggtcatccagaatgaggacttgggcccagccagtcccttggacagcaccttctaccgctcactgctggaggacgatgacatgggggacctggtggatgctgaggagtatctggtaccccagcagggcttcttctgtccagaccctgccccgggcgcctgggggcatggtccaccacaggcaccgcagctcaccctaccangaagtggcggtgggggaccctgacactaagggctggagccctcctgaaagaggaggccccccaggtcctccactgggaacccccccgaaaggggctgggctccgaatggcatctgcacgcgtgaaccctgggaattgggggccaat

SEQ ID NO: 251969 - DNA, 1066 bp, Homo Sapiens
  misc_feature (849)..(849): n is a, c, g, or t
tggatgctgaggagtatctggtaccccagcagggcttcttctgtccagaccctgccccgggcgctgggggcatggtccaccacaggcaccgcagctcatctaccaggagtggcggtggggacctgacactagggctggagccctctgaagaggaggcccccaggtctccactggcaccctccgaaggggctggctccgatgtatttgatggtgacctgggaatgggggcagccaaggggctgcaaagcctccccacacatgaccccagccctctacagcggtacagtgaggaccccacagtacccctgccctctgagactgatggctacgttgcccccctgacctgcagcccccagcctgaatatgtgaaccagccagatgttcggccccagcccccttcgccccgagagggccctctgcctgctgcccgacctgctggtgccactctggaaaggcccaagactctctccccagggaagaatggggtcgtcaaagacgtttttgcctttgggggtgccgtggagaaccccgagtacttgacaccccagggaggagctgcccctcagccccaccctcctcctgccttcagcccagccttcgacaacctctattactgggaccaggacccaccagagcggggggctccacccagcaccttcaaagggacacctacggcagagaacccagagtacctgggtctggacgtgccagtgtgaaccagaaggccaagtccgcagaagccctgatgtgtcctcagggagcagggaaggcctgacttctgctggcatcaagaaggtgggagggccctccgaccacttccagggggaacctgccatgccagggaacctngtcctaaaggaaccttccttcctgcttgaggtccccagatgggctggaaagggggcccagccctcgcttggaaagaggaaacaggcacctgggggaagtcctttggggggattctgaagggcccctggccccaagggaaaactcctaggggtccagttgggatggccacaggccccaacttggggcccctttccctttccagaatcctggggttacc

SEQ ID NO: 251970 - DNA, 1247 bp, Homo Sapiens
  misc_feature (1039)..(1137): n is a, c, g, or t
gcctgggtggcgaattcggcacgaggctgcagccatgttccttcggggccaggagtgcgtggaggaatgccgagtactgcaggggctccccagggagtatgtgaatgccaggcactgtttgccgtgccaccctgagtgtcagccccagaatggctcagtgacctgttttggaccggaggctgaccagtgtgtggcctgtgcccactataaggaccctcccttctgcgtggcccgctgccccagcggtgtgaaacctgacctctcctacatgcccatctggaagtttccagatgaggagggcgcatgccagccttgccccatcaactgcacccactcctgtgtggacctggatgacaagggctgccccgccgagcagagagccagccctctgacgtccatcatctctgcggtggctggcattctgctggtcgtggacttggaggtgcaatgtgagatgaccctctgaagggctgaggatggacgcactgtcacacctctgcatttccagccccagcatcttgctggagccgttccatcccggagcttggaggggcagcctcaggtgtgtgcctgggcaccgctcacagcctcttgcacccagccgttggcagcatctactcagcaaggtcactaagctctgccagcgtggcagagcatgtcttggaacctgtcttgagtggggacaacgtccccccactgctgccctagagctggggagacgctgggaaaggttcaacctccacacactaaaatcattttggctcctggggcaagcttggggaatgaatgtggaagatgcctatattctgagagacaggacagtttcccaggaagatgggcagagacttgagtggcgattacctccagcacagagacgtgccaggcggtgttggcgctcggggcgagatgctgcccttctttgcacgaagcctggcctcttgcttggcgtgataaccctgtcatcttcccaaagctcatttatgagccaccaaaagctcctaccccaaagattttcacaaaaacttgaggtccaggtgcnnnnnnnnnnnnnnnnnnnnnnnnnnnnnnnnnnnnnnnnnnnnnnnnnnnnnnnnnnnnnnnnnnnnnnnnnnnnnnnnnnnnnnnnnnnnnnnnnnntcctgtctctacaaaaataaaagatttaaaaaaattagccaggcacggtggcacacacttgtagccccagctactagggaggctgaggagggaggatctcttgtgcctag

SEQ ID NO: 251971 - DNA, 834 bp, Homo Sapiens
  misc_feature (774)..(776): n is a, c, g, or t
gggacacccggaagcaggggcccgagcggagccggccgcgatgagcggggagccggggcagacgtccgtagcgccccctcccgaggaggtcgagccgggcagtggggtccgcatcgtggtggagtactgtgaaccctgcggcttcgaggcgacctacctggagctggccagtgctgtgaaggagcagtatccgggcatcgagatcgagtcgcgcctcgggggcacaggtgcttttgagatagagataaatggacagctggtgttctccaagctggagaatgggggctttccctatgagaaagatctcattgaggccatccgaagagccagtaatggagaaaccctagaaaagatcaccaacagccgtcctccctgcgtcatcctgtgactgcacaggactctgggttcctgctctgttctggggtccaaaccttggtctccctttggtcctgctgggagctccccctgcctctttcccctacttagctccttagcaaagagaccctggcctccactttgccctttgggtacaaagaaggaatagaagattccgtggccttgggggcaggagagagacactctccatgaacacttctccagccacctcatacccccttcccagggtaagtgcccacgaaagcccagtccactcttcgcctcggtaatacctgtctgatgccacagattttatttattctcccctaacccagggcaatgtcagctattggcagtaaagtggcgctaccagggaaaaaaccacacaacacaaacccnnncccttgtgggcccgcctcgggcctccagaagcttttctagacctttctttgggcgcgc

SEQ ID NO: 251972 - DNA, 565 bp, Homo Sapiens
  misc_feature (90)..(90): n is a, c, g, or t
  misc_feature (229)..(229): n is a, c, g, or t
  misc_feature (244)..(244): n is a, c, g, or t
gggagccggggcagacgtccgtagcgccccctcccgaggaggtcgagcagggcagtggggtccgcatcgtggtggagtactggtgaagcngccccggctggaggacccgcaccctggtcccgcgggccggacggaggtgggtccacgggaggccccacccccgaatccccagcccagccccatctcttgactccccagtgaaccctgcggcttcgaggcgacctacctnggagctggccagtgnctgtgaaggagcagtatccgggcatcgagatcgagtcgcgcctcgggggcacaggtgaggctcgcagaacacctgctgggtcagtctgtgctctgaatcccagctctcccgctttctagttctgacattggctgctttatgtaaagtgcccgcagtgcctggcacatggtaaaatgtccggccaacatgagttcccttccataggtcagggggtgtcacagaggcaccattgctgttccttcctcatggggggcagtactaggtttcagggacagtctctgaatgggtcgcttttgttcttagacactcccttagggccgc

SEQ ID NO: 251973 - DNA, 536 bp, Homo Sapiens
  misc_feature (46)..(46): n is a, c, g, or t
  misc_feature (67)..(67): n is a, c, g, or t
  misc_feature (135)..(135): n is a, c, g, or t
  misc_feature (228)..(228): n is a, c, g, or t
  misc_feature (383)..(421): n is a, c, g, or t
agtggagggccttcggccatttccgaggaactgccatgcagaaacntgtctaaggaccctcccttcntgctgagttcccagatggctgaaaggggtcagccctcgttgaaagagaacaagcactgggggagtctntgtggattctgaggccctgcccaatgagactctagggtccagtggatgccacagcccagcttggccctttccttccagatcctgggtactganagccttagggaagctggcctgagaggggaagcggccctaagggagtgtctaagaacaaaagcgacccattcagagactgtccctgaaacctagtactgccccccatgaggaaggaacagcaatggtgtcagtatccaggctttgtacagagtgcnnnnnnnnnnnnnnnnnnnnnnnnnnnnnnnnnnnnnnnaaagatgaaataaagacccagggggagaatgggtgttgtatggggaggcaagtgtggggggtccttctccacacccactttgtccatttgcaaatatattttggaaaacagcaaa

SEQ ID NO: 251974 - DNA, 725 bp, Homo Sapiens
gctttcccatcatgaatctgcacagtgtaggtcccctcattttcaatactaaatcgatccatcaccatctcaataatgccagtagctttgtcacatttaattctgtgtatctcgctgtcagagacttctctgtcgttaataataaatcggtagctggcatctggtgataagtgctcagcctggagccagaagcgaacccgccccttatcaaaaatctcataagctaattccgatttcagaggaattgtggggttctttatttcattgctcaatgccatcaaacgctcgagctcttctgggtccagaacaaaactggaggacactccgtctgtatcacttacagacacggagtaagtccctaaatcctccttatccggattctttaagtacagcttggagtgatcccccacggtttcaattttaaacctctcatcatctgaaatctcctcgtaggatttacaccaggtgaactgagacgcgtctgtcatttcctggcagtcgaagcccagatagatgttgccttgttcatcgacaccagcactgatttccttggtgcctggtctcgcctctaccagcacaggctccgacgtgtctgagggcttccccacgccatttgcattgactgcccggaccctgaagacataggtcttaccctgctgcaggtcagagacctttaaataacggttggctgttgtcgtctgattgacagtgatccactctccagc

SEQ ID NO: 251975 - DNA, 628 bp, Homo Sapiens
  misc_feature (55)..(117): n is a, c, g, or t
gtgcatcagcctagttagaaatatgtacaacatttcaggatctactatttcattnnnnnnnnnnnnnnnnnnnnnnnnnnnnnnnnnnnnnnnnnnnnnnnnnnnnnnnnnnnnnnntccattttcagatcttggaatgctccagtcttttgcaaagtcgatgagtggcttcagcactggggaaagaagcccgaaaggtgaccaatggaacctgtattcacagtcttcaaagttcccttttgaaacataaggaagaaaacgaagggaagaaggatttcacactttgggggcaaggggagatggtttctgttgatgtttagctatgaaagtgacagcaaagcatctatttatttgtctccaaaatctatgttttagcagcacaaagttttcaaagttcagaccatttatttatttttctttttacatgagaaagggtgtgtgttaacaggaatatggatattaacagaaacaagtgcctcacatacagttccttttttgctttctgtacactgctatctgctgctttgttggctgcgctctggatcactcgctgctcagactgcctaacacaaggacaaaactttgaagtaaaaaatgtgtcttttggtatatggaattgtcattaaca

SEQ ID NO: 251976 - DNA, 914 bp, Homo Sapiens
  misc_feature (617)..(637): n is a, c, g, or t
  misc_feature (768)..(828): n is a, c, g, or t
gcacagcccagggaaacctcctcacagttttcatccagccacgggccagcatgtctgggggcaaatacgtagactcggagggacatctctacaccgttcccatccgggaacagggcaacatctacaagcccaacaacaaggccatggcagacgagctgagcgagaagcaagtgtacgacgcgcacaccaaggagatcgacctggtcaaccgcgaccctaaacacctcaacgatgacgtggtcaagattgactttgaagatgtgattgcagaaccagaagggacacacagttttgacggcatttggaaggccagcttcaccaccttcactgtgacgaaatactggttttaccgcttgctgtctgccctctttggcatcccgatggcactcatctggggcatttacttcgccattctctctttcctgcacatctgggcagttgtaccatgcattaagagcttcctgattgagattcagtgcatcagccgtgtctattccatctacgtccacaccgtctgtgacccactctttgaagctgttgggaaaatattcagcaatgtccgcatcaacttgcagaaagaaatataaatgacatttcaaggatagaagtatacctgnnnnnnnnnnnnnnnnnnnnnccctggtgccaatttcaagttccaagttgctaatacagcaacaatttatgaattgaattatcttgggtgaaaataaaaagatcactttctcaggtttcataagtattatgtctcttctgagctatttcatnnnnnnnnnnnnnnnnnnnnnnnnnnnnnnnnnnnnnnnnnnnnnnnnnnnnnnnnnnnnngcatgtggatcaaccatcgctttatggctgagatatgaacatattgttgaaaggtaatttgagagaaatatgaagaactgaggagg

SEQ ID NO: 251977 - DNA, 1875 bp, Homo Sapiens
  misc_feature (1163)..(1171): n is a, c, g, or t
  misc_feature (1591)..(1742): n is a, c, g, or t
  misc_feature (1791)..(1800): n is a, c, g, or t
gaggctggtacggtcaggaatcccgggatatcgtcgacccacgcgtcggaaccaacaacctcaactgcctactccaaaatgttggtcattttatgttaagggaagaattccaggtatggccatggagtgtacaagtatgtgggcagattttcagcaaactcttttcccactgtttaaggagttagtggattactgccattcacttcataatccagtaggatccagtgatccttacaagttagaaaacataatcttctgccttctcatgatccaactaatgccttactcttcttgaaattttaacctatgatattttctgtgcctgaatatttgttatgtagataacaagacctcagtgccttcctgtttttcacattttccttttcaaatagggtctaactcagcaactcgctttaggtcagcagcctccctgaagaccaaaattagaatatccatgacctagttttccatgcgtgtttctgactctgagctacagagtctggtgaagctcacttctgggcttcatctggcaacatctttatccgtagtgggtatggttgacactagcccaatgaaatgaattaaagtggaccaatagggctgagctctctgtgggctggcagtcctggaagccagctttccctgcctctcatcaactgaatgaggtcagcatgtctattcagcttcgtttattttcaagaataatcacgctttcctgaatccaaactaatccatcaccggggtggtttagtggctcaacattgtgttcccatttcagctgatcagtgggcctccaaggaggggctgtaaaatggaggccattgtgtgagcctatcagagttgctgcaaacctgacccctgctcagtaaagcacttgcaaccgtctgttatgctgtgacacatggcccctccccctgccaggagctttggacctaatccaagcatccctttgcccagaaagaagatgggggaggaggcagtaataaaaagattgaagtattttgctggaataagttcaaattcttctgaactcaaactgaggaatttcacctgtaaacctgagtcgtacagaaagctgcctggtatatccaaaagctttttattcctcctgctcatattgtgattctgcctttggggacttttcttaaaccttcagttatgannnnnnnnncatacacttattggaactctgcttgatttttgcctcttccagtcttcctgacactttaattaccaacctgttacctactttgactttttgcatttaaaacagacactggcatggatatagttttacttttaaactgtgtacataactgaaaatgtgctatactgcatactttttaaatgtaaagatatttttatctttatatgaagaaaatcacttaggaaatggctttgtgattcaatctgtaaactgtgtattccaagacatgtctgttctacatagatgcttagtccctcatgcaaatcaattactggtccaaaagattgctgaaattttatatgcttactgatatattttacaattttttatcatgcatgtcctgtaaaggttacaagcctgcacaataaaaatgtttaacggttnnnnnnnnnnnnnnnnnnnnnnnnnnnnnnnnnnnnnnnnnnnnnnnnnnnnnnnnnnnnnnnnnnnnnnnnnnnnnnnnnnnnnnnnnnnnnnnnnnnnnnnnnnnnnnnnnnnnnnnnnnnnnnnnnnnnnnnnnnnnnnnnnnnnnnnnccttgggggccccccccccccccaaaaaattttttaaacccttcctttnnnnnnnnnncccccaaaggaaaggaaaaggggccaaagtggtcccaaagaaaacccgggaaagaaaaagggtgggatcccccac

SEQ ID NO: 251978 - DNA, 1001 bp, Homo Sapiens
  misc_feature (704)..(724): n is a, c, g, or t
ggggtgcacggagccgtagctgtcggagcggttagttcgatttcgagctcgaggtttcccccgccgccaggctgacttctcatcgcttgtttttctttttgcatttttcctcccaccgccgttgccgccctccccgtcctggccgtccgccctccgccctctgcagggacatctctacaccgttcccatccgggaacagggcaacatctacaagcccaacaacaaggccatggcagacgagctgagcgagaagcaagtgtacgacgcgcacaccaaggagatcgacctggtcaaccgcgaccctaaacacctcaacgatgacgtggtcaagattgactttgaagatgtgattgcagaaccagaagggacacacagttttgacggcatttggaaggccagcttcaccaccttcactgtgacgaaatactggttttaccgcttgctgtctgccctctttggcatcccgatggcactcatctggggcatttacttcgccattctctctttcctgcacatctgggcagttgtaccatgcattaagagcttcctgattgagattcagtgcatcagccgtgtctattccatctacgtccacaccgtctgtgacccactctttgaagctgttgggaaaatattcagcaatgtccgcatcaacttgccgaaagaaatataaatgacctttcaaggatagaaagtatacctgnnnnnnnnnnnnnnnnnnnnncctggtgccaatttcaagttccaagttgctaatacagcaacaatttatgaattgaattatcttggttgaaaataaaaagatcactttctcagttttcataagtattatgtctcttctgagctatttcatctatttttggcagtctgaatttttaaaacccatttaaatttttttccttacctttttatttgcatgtggatcaaccatcgctttattggctgagatatgaacatattgttgaaaggtaatttgagagaaatatgaagaactgaggagg

SEQ ID NO: 251979 - DNA, 523 bp, Homo Sapiens
  misc_feature (21)..(21): n is a, c, g, or t
accaaaacccaccccggtgangggattaagttgggaattcccggaaaaaccgtgaattaatccttgaaaaaataaaacgaaagctgaaataagaacatggctgaaccctcaattcaagttggatgaagaggccagggaaaagctggccttccccaggactgcccagccccacagaagagcctcaagcccctattggtcccactttaattcatttcattgggctagtgtcaacccataccccactacggataaagatgttgcccagatgaagcccagaagtgagcttcaccagactctgtagctcagagtcagaaacacgcatggaaaactaggtcatggatattctaattttggtcttcagggaggctgctgacctaaagcgagttgctgagttagaccctatttgaaaaggaaaatgtgaaaaacaggaaggcactgaggtcttgttatctacataacaaatattcaggcacagaaaatatcataggttaaaatttcaagaagagtaaggcattagttggat

SEQ ID NO: 251980 - DNA, 394 bp, Homo Sapiens
  misc_feature (17)..(17): n is a, c, g, or t
  misc_feature (31)..(31): n is a, c, g, or t
  misc_feature (49)..(49): n is a, c, g, or t
  misc_feature (94)..(94): n is a, c, g, or t
ccccggacaccttaatncccccaacccggtncccccaccttggaccttntggcatttaaaaaacagacaccgggcatgggatatagttttaccntttaaacctgtgtaccataactgaaaatgtggctatactgcatactttttaaatgtaaagatatttttacccttatatgaagaaaatcgcttaggaaatggctttgtgattcaatctgtaaactgtgtattccaagacatgtctgttctacatagatgcttagtccctcatgcaaatcaattactggtccaaaagattgctgaaattttatatgcttactgatatattttacaattttttatcatgcatgtcctgtaaaggttacaagcctgcacaataaaaatgtttaactggttaaaa

SEQ ID NO: 251981 - DNA, 614 bp, Homo Sapiens
agtcgcgcaccgacgctcaaacgcgcgctccaacccgcagcctcctcctgcctcaccgcccgaagatggcggctctcaaactcctctcctccgggcttcggctctgcgcctctgcccgcggatctggggcaacctggtacaagggatgtgtttgttccttttccaccagtgctcatcgccataccaagttttatacagatccagtagaagctgtaaaagacatccctgatggtgccacggttttggttggtggttttgggctatgtggaattccagagaatcttatagatgctttactgaaaactggagtaaaaggactaactgcagtcagcaacaatgcaggggttgacaattttggtttggggcttttgcttcggtccaagcagataaaacgcatggtctcttcatatgtgggagaaaatgcagaatttgaacgacagtacttatctggtgaattagaagtggagctgacaccacagggcacacttgcagagaggatccgtgcaggcggggctggagttcctgcattttacaccccaacagggtatgggaccctggtacaagaaggaggatcgcccatcaaatacaacaaagatggcagtgttgccattgcc

SEQ ID NO: 251982 - DNA, 364 bp, Homo Sapiens
attacaaaatattggcactaggcacactcaaacctatgggttaaaaaacaagggtggtgtgagagctggggatattttagagtatgggcagtatgcttgttctccttcactgaaatagacttaaacaattccaaattatgtatgtatagtttatcaaaatagtcttttagaaaatcttatcttactcagatgcagttgaaaactttacaaaacgactgcctcctgtactagatgaggcatttgttaaaaacccatttgtaaattcctctaaatagaaaactaggtattttaccattttatacctattaagatattatctcaccaacaatatgtcctgtcttaatacattttgccatccccggcc

SEQ ID NO: 251983 - DNA, 1193 bp, Homo Sapiens
  misc_feature (132)..(178): n is a, c, g, or t
atctttacagtgcgcaagactgcctactgtgaggcccactcgccaccaggtgcggccactgctaggaggaagggcgactcccctagaagcatcagtgagactggcgatgaggaagggctgaaggagggtgannnnnnnnnnnnnnnnnnnnnnnnnnnnnnnnnnnnnnnnnnnnnnnctcaaggcggggtgagtggctccctcaagggagtgcccaagaaaagcaagatgagtttgaagcagaagatcaagaaggagccagaggaagcaggccaagacacaccctccactctccccatgcttgctggtcccacagataccctcttacaggttgaacaagatctgtagtggtctctcctttcagaggaaaaaccagtttatgcagcggcttcacaattattggctgttgaagcggcaggcacggaatggtgtccctcttatccggcgcttgcactcccatctgcagtcccaaagaaacgctgagcagcgagagcaggatgagaagacaagtgcagtgaaggaggagctgaagtattggcagaagctccggcatgacttggagcgggcgcggctgctgattgagctgattcggaagagagagaagctcaaacgagagcaggtcaaagtccagcaggctgccatggagctggagctgatgccattcaatgttctgttgaggacaacactggacctgctgcaggagaaggatcctgcacacatcttcgcagaaccagtcaacttgagtgaggttttatatgtttaggttccagattacctggaattcatatccaagccaatggatttttctactatgaggcggaaggctggagtcccacctgtaccgcaccttggaggagtctgaggaggactttaaccttatagttaccaactgcatgaagtataaatgctaaacagacaacaatttcaccaccgagcagctgtccgcctgcggggaactgggaggggccactcctacggcacgcccggcggcaaggcagtagaacatcgggtagaacccggaagggcacaccacctcggcgagtctacccaattgaaagattttaccgcttctcctggcaacaagcgacacattcgcatccggaaacacggccattgaccccgaggcactgaagactcgcgaatgccctggcgacgcgagacagaggcaccacagacgcctcacaacggaacac

SEQ ID NO: 251984 - DNA, 802 bp, Homo Sapiens
cggccggggctggtgaatggagtcgcgttctctgttttgctgttgctgctgcctttgtgacgggatcgctttctcccatcgaaccttctagttgcttattgcaggtatatacgaaagtgctgaattttgtgtttgcatcgtcatcaggcgcgtgttgagccctttagtaatgtagcagtgtattagcttcgtatttctaggtagacggtaatttcgtcaatgaaaaaatttaacggtgatcgtcaccccttgcctcagtcactttctgtccctcgcgcggccccggcgttcacggcggacgttcttgttctgtggagaataacggctgcacctggagattgacgcagagtgggcggcggtggtgctttgtctcctcagcactctgctgtcactcaaggaagtatcatcaagaacaaggagggcatggatgctaagtcactaactgcctggtcccggacactggtgaccttcaaggatgtatctgcggacttcaccagggaggagtggaagctgctggacactgctcagcagatcgtgtacagaaatgtgatgctggagaactataagaacctggtttccttgggttatcagcttactaagccagatgtgatcctccggttggagaagggagaagagccctggctggtggagagagaaattcaccaagagacccatcctggctctgctggccccaggtgttccttggcttgtggatatatcattccagtcttggtctccatgtccacatggtctcttcccctgtgtctgtgtcttttttatggaggaccaccctcatactgga

SEQ ID NO: 251985 - DNA, 780 bp, Homo Sapiens
gcaaaatgcagtgtaccttaaaagtgtctcacctagaaggcctctacctgtaatcacattaatttttctaaagacaatttggtgttttgaagataaatgtcattagtctatgataatagcatcataggacaattagccattttagacttgaccatattttctctttttagcatatagccatcttgatatttaggtgggagactactccaatggagcaacagtttcattttacatgattggatttagaaaatttacaaattttaaactcataagaattctaaataatttgaaaatggaaacatttgacccacagtctagcagcataaatacatttataaaatacttcattgttgatcttaggtcattgatttaaaacagaatttggtgactatgggcaggtggagggggccagtgaggaaggtataaaagagaaatctttatgaattgtgttcagattgattttgtataaacataatatattcatggttgtatctcttatttataatacccaactaacatgaaggtggtccaagggaaggatcaatattttaaataacatatttgcttaaaatatcatacagtggctgcttcataaaaatcttataaacttttattaaccaagttcagaaataattagaggggtgatctccctggatcagaactaaaacaagtgagatcaattaagctcctttgaaataggtctgtccacacttaatattcttttttagaccaatttagctggaaatctattacttaacccacattcattgatatcatagt

SEQ ID NO: 251986 - DNA, 669 bp, Homo Sapiens
ctctgacatttggttctctggaaaggcagtttagttatccaagaccaaagaccacgatgacaggcaacgttcttagaagtactgttgacatttaaataaacacttgggttcagtgataaagtataaaaaaattatttatcttcaactggattttatgagagaaaatctgaagaaccacttttcaacataagcagcagcttacagcccttatctgctttgttataatgtaagttgctacacagtgcacataagaacaattcactgaagtgcagtcaaagaggtgttatgaagtgagatgaaatgcttcatcccaactggaactttcagttccagtaaataaattttttaaaaaagtatctctgtgagttatgttttctagttcacagggttctttacagagatctcaaagaacaagcccattacaaaaaggatctgcatcatgggaaaatattaatgttgctatgactgtgtcaaaactgatgtgtaattgtaataaaaatgttatacacaaatgaattaaaaaagaatcctaatcagtccagctggattttctatttctatttatatatagatctcaaaaaagataatcctttcatttacaagcattcaaatgatggccatgctatttttatatacaaatttgcatatatgtttaattcctgccggccg

SEQ ID NO: 251987 - DNA, 546 bp, Homo Sapiens
  misc_feature (11)..(11): n is a, c, g, or t
  misc_feature (43)..(52): n is a, c, g, or t
cggccggcatngaggtggattataagccccacctcctataacnnnnnnnnnnattgtgtcagaagtttggaaataaaatacatgttattattgaaaacactttattgaatgaggatttcaaaaattaggtcatttcttttcctgttatttctggattgttttctcctgcatgacatttgacactttgtcaagcaaacaattgaggatagcccataaccaaagattacctgtcgttgggaagcaggtgtcacgctgatgaatcagagccagataaatctaggccaacagaggtatgtttgcttatagaactaagcaagactttctatgtggaagaactagaagaccaacagatataagctgttagttttagtgttgacaccaacactgctactataatcccacactagtctccaaatatttttgtgcacattcaaaattcacatgaatttgtcatttgcactttctaacttaacactcctgtgattaatctgtggctggatagttgtagatcagggatctgttagttggaaatgttcccttctgaaa

SEQ ID NO: 251988 - DNA, 475 bp, Homo Sapiens
  misc_feature (24)..(24): n is a, c, g, or t
  misc_feature (43)..(43): n is a, c, g, or t
  misc_feature (65)..(65): n is a, c, g, or t
  misc_feature (81)..(81): n is a, c, g, or t
ccgggtacagccagccaaggtgtnaaggaccaaatccaggggnctttagggatattaatcacccncatacattggaccatntcctttgtgttggggaatatttccaaatccttattgcctatttagaaatacacaaaaaatcctatttatcaggatacaaaatctatgtacacatatcagtagcggtgctatacaccaacatctacccaggctgagaatcaaatcaaacccttttataatagctgtaaaaataaaatacttacgaatataaccaaccaaggaggtgaaagacccctacaaggaaaaccacaaaacaatgttgaaagaaatcatagatgacaaaaacaaaaggaaacacattccatgctcatgaatgggtagactcaatactgtgaaaatgaccatactgccaaaagcagtctccaaattcaatgagttcctatcaatgtaccatcatcattctttatagaactag

SEQ ID NO: 251989 - DNA, 562 bp, Homo Sapiens
tacggccggggatcacaagcctgttcggcgggactgtgatggccagagagatgacgatcttaggatcggctgttttgactctcctgttggccggctatttggcacaacagtatttaccattgcctactcctaaagtgattggtattgatcttggcaccacctattgttctgttggggtgttttttcctggcacaggaaaagtaaaggtgattccagatgaaaatgggcatatcagcatacccagcatggtgtcttttactgacaatgatgtatatgtgggatatgaaagcgtagagctggcagattcaaatcctcaaaacacaatatatgatgccaaaagattcataggcaagatttttaccgcagaagagttggaggctgaaattggcagatacccatttaaggttttaaacaaaaatggaatggttgagttttctgtgacaagtaatgagaccatcacagtgtccccagaatatgttggctctcgactattgttgaagttaaaggaaatggcagaggcatatcttggaatgccagttgccaatgctgtcatttctgtacc

SEQ ID NO: 251990 - DNA, 588 bp, Homo Sapiens
  misc_feature (443)..(474): n is a, c, g, or t
ggccctacgcggcccaagtaattcggcacgaggtgctcctgctttatttctacctcagttttgttacatttctcttggaaagtaaagtagaaaattggaagtggacacacacactgcaatgtagcttgccaaacatgttactttgttttcttccatctttcaccgtaaatctagtttccaaagacatcagcatttgtgcttacttccacctcagtctaccagccccacccctacccatggcataagtggcatttttcttaatttcctatttttctcctgctctctgtcaagttgttctttgtatcctttaatgctttatgtgcaacctttcattgatagtgggctgatgtttggcaatgcttctgaactgtcacagagcaggctgtagctttccacagccactgcccatgcataagcagaacagcctggccttttgaatgtannnnnnnnnnnnnnnnnnnnnnnnnnnnnnnnagtttagagatgcagtaacaaaactgttgcaaagcactggcattttatgtattcaataaataagtgatgtacatttttaaaaaaatttaaataaatgcaatgagaagccccaaa

SEQ ID NO: 251991 - DNA, 574 bp, Homo Sapiens
  misc_feature (452)..(475): n is a, c, g, or t
  misc_feature (511)..(511): n is a, c, g, or t
gaaatctgggctgtagtgctcctgctttatttctacctcagttttgttacatttctcttggaaagtaaagtagaaaattggaagtggacacacacactgcaatgtagcttgccaaacatgttactttgttttcttccatctttcaccgtaaatctagtttccaaagacatcagcatttgtgcttacttccacctcagtctaccagccccacccctacccatggcataagtggcatttttcttaatttcctatttttctcctgctctctgtcaagttgttctttgtatcctttaaatgctttatgtgcaaccttttcattgatagtggggctggatgtttgggcaatgcttctggaactgtcacagaggcagggctgtagcttttccacagccactgccccatggcataagcaggaacagccggggccttttggaatggtattttcccggggnnnnnnnnnnnnnnnnnnnnnnnnagtttaggaggatggcagtaacaaaactgttgtcanagcactgggcatttttatggtatttcaattaaataagtggatgtacattttttaaaaaaattt

SEQ ID NO: 251992 - DNA, 2038 bp, Homo Sapiens
  misc_feature (332)..(332): n is a, c, g, or t
  misc_feature (1910)..(1910): n is a, c, g, or t
  misc_feature (1938)..(1938): n is a, c, g, or t
  misc_feature (2011)..(2012): n is a, c, g, or t
ggccgggggacggcgggtgcggcggggccgagcccgcacgatgcctcacttcaccgtggtgccagtggacgggccgaggcgcggcgactatgacaacctcgaggggctcagttgggtggactacggggagcgcgccgagctggatgactcggacggacatggcaaccacagagagagcagcccttttctttcccccttggaggcttccagaggaattgactactatgacaggaacctggcactgtttgaggaagagctggacatccgcccaaaggtatcgtctcttctgggaaagctcgtcagctacaccaacctcacccagggcgccaaanagcatgaggaggccgagagtggggagggcacccgccggagggcagccgaggcacccagcatgggcaccctcatgggggtgtacctgccctgcctgcagaatatctttggggttatcctcttcctgcggctgacctggatggtgggcacagcaggtgtgctacaggccctcctcatcgtgcttatctgctgctattgtaccctgctgacggccatctccatgagtgccatcgccaccaacggtgtggttccagctgggggctcctatttcatgatctctcgttcactggggccagaatttggaggtgctgtgggcctgtgcttctacctggggaacaacattcgcagcagccatgtacatcctgggggccatcgagatcttgctgacctacattgccccaccagctgccattttttacccatcgggtgctcatgacacgtcgaatgccactttgaacaatatgcgtgtgtatgggaccattttcctgaccttcatgaccctggtggtgtttgtgggggtcaagtatgtgaacaaatttgcctcgctcttcctggcctgtgtgatcatctccatcctctccatctatgctgggggcataaagtctatatttgaccctcccgtgtttccggtatgcatgctgggcaacaggaccctgtcccgggaccagtttgacatctgtgccaagacagctgtagtggacaatgagacagtggccacccagctatggagtttcttctgccacagccccaaccttacgaccgactcctgtgacccctacttcatgctcaacaatgtgaccgagatccctggcatccccggggcagctgctggtgtgctccaggaaaacctgtggagcgcctacctggagaagggtgacatcgtggagaagcatgggctgccctccgcagatgccccgagcctgaaggagagcctgcctctgtacgtggtcgctgacatcgccacatccttcaccgtgctggtcggcatcttcttcccttctgtaacaggcatcatggctggctcaaaccgctctggggaccttcgtgacgcccagaagtctatccctgtggggaccattctggccatcattacaacttccctcgtgtacttcagcagtgtggttctctttggtgcctgcattgagggtgtggttctccgggacaagtatggcgatggtgtcagcaggaacttggtggtgggcacactggcctggccttcaccctgggtcatcgtcatcggctccttcttttcaacgtgtggcgctggcctccagagcctcacaggggcaccacgcctattgcaggccattgccaaggacaacatcatcccctttcctccgggtggttggccacggggaaggtgaatggtgaaccccacatgggcactccctcctgacggcactcatcgccgagctgggcatcctcatcgcctccctcgacatggtggccccccatcttatccatgttctttctgatgtgctacctgttcgtgaacctcgcctgtgcggtgcagacactcctgagggaccccaactggcggccccggttcaagtactatcactgggcgctgtccttcctgngcatgagtctctgcctggcccttatgtntgtctcctcctggtactatgccctggtggccatgctcatcgccggcatgaatctacaatacatcgagtaccanngggctgagaaggagtggggtgacggg

SEQ ID NO: 251993 - DNA, 672 bp, Homo Sapiens
cggccggggactccgcgtgggcggagcctaggtccctggtctgcgggccacgcatcccggccgctgcagggactccagccaatagaggatgtgcggctgccgtcctgtcgaccaatcgcggggaggggagaggcgttagccagcttggcgctggctcccggaatatggagccctgggcgcgggggcggcgtgtcaggtggttgcggagctgaatcatattctaagaactcagccactcaggtatccaccatggtgctgggtcctgaacagaagatgtcagatgacagtgtttctggagatcatggggagtctgccagtcttggtaacatcaaccctgcctatagtaatccctctctttcacagtcccctggggactcagaggagtacttcgccacttactttaatgagaagatctccattcctgaggaggagtactcttgttttagctttcgtaaactctgggctttcaccggaccaggttttcttatgagcattgcctacctggatccaggaaatattgaatccgatttgcagtctggagcagtggctggatttaaggtgaacatctagtcctacccctgtccttttttaagcacataataccctctcacatccttttctccaccctgcatgttggatagtagcctcaggggctacatgcagatacttcat

SEQ ID NO: 251994 - DNA, 562 bp, Homo Sapiens
cacaagagacagctttgtagggccatttcaaaatacgtcaaataaatatattggggggtaaatttcctttggggcctgctgtcatgtgatgctataccagagtcaggttgggatttggtattttattgccacaaagggtctgtttggttagtcttaagatctctgttttaatgttaatgctggtcagttgtatttaaattccaaagggaagagggtaatatgaggcaccctgtaatctgaccataatatgaggcaccctgtcttcccatcatggactagtttttcaggttcctttgagatcccctgggccaagacaggggtccatttcagccggttgggggatttagaatttatttttggtttgctgtatatatatgtatacacacactccccgcataaatgtaaaaattttaaactaccaattcctaggcaaagatgattctaacattctgttccttttgacaagtgtccaattagagaatgctgagaatgtcccctgcatatcggctctgttggagagcccctgatttttagcagacctgtttcattcaacatgggttac

SEQ ID NO: 251995 - DNA, 381 bp, Homo Sapiens
  misc_feature (347)..(347): n is a, c, g, or t
  misc_feature (352)..(352): n is a, c, g, or t
  misc_feature (361)..(361): n is a, c, g, or t
gagggagaggcacagaggcaggcagcctgctgggctcttcctgctgttgaaaacttacccggcccttacagaggaaatcttcctcctctcttctgccctgaatgttttcccaaacatgaaggtgataagcttattcattttggtgggatttataggagagttccaaagtttttcaagtgcctcctctccagtcaactgccagtgggacttctatgccccttggtcagaatgcaatggctgtaccaagactcagactcgcaggcggtcagttgctgtgtatgggcagtatggaggccagccttgtgttggaaatgcttttgaaacacagtcctgtgaacctacaagangatgnccaacagangagggatgtggagagcgttt

SEQ ID NO: 251996 - DNA, 883 bp, Homo Sapiens
  misc_feature (231)..(231): n is a, c, g, or t
gcatcagtagaggctagtcctttccatcccagggctatcccatccacacacactgatcctaacagggtgctgagcggggaaggggagctgaggccaagaagcttccagggcatgccgaagaggaagactggagcttgtgttggggctgtaggcgtgacattaggatttgtcaagacagcaaggtacctgttcgtagaaagtcatatggcactttaaaaagtggcagcaggnaactggtgctaggtatttggtcagtaaaattgtgataaagaactgagctttacttagatgaaatgtgttcaattaaaaaaaccaaaaaggctgggaaagggctatgggcttctaactccagacacctggtatattcagaggtacctactgggatcagagatgccccagcataatggctgattagaaatattatttaggagtatttaggaaacagaaacaaaacccctcaagagactgtcctgccacaaagtcgttttactgcaaggtatatgaaaatattcaagactaggacgtagcactaaacgtgatctcaaaagcatacaggattgttaggtgctgaatctacctccgttttccctcagggtttatccaattactcgttaaaactgaagaaggaattctagtagcacattaggaattcttttcccaaaaatgagaaataatcaaaagtagtaaaagtagtgtaggattttttccctttagattggcctcgtggaattgttttctgttttcttttggatcttaaccaaagaacaaagtagtcaaaccgaaacaacttagaggatagatgcagggaaaaaaatccaaattggaaacaccccaaaacaaactcaaatcatgacagtataaaaagtcatccacattccagata

SEQ ID NO: 251997 - DNA, 863 bp, Homo Sapiens
  misc_feature (587)..(599): n is a, c, g, or t
tgtatatgatcctcagtgactggcttttcctaggtgtctcctccctctcccctgcctcctaacagtgatgttctatccatgcagaaccatctttgtatattctaaaatatagtcccttgcttttatgtgtgctgttccttctaccttttcccctcttgtccagttagtgatgtacttctcacttttataatgctttcttttactccctcttctatgacattaccattgcttctgtttatctctgttaaaacctcattgcattttaattgcaggttatctatttgtctctttccctgagttaaaaactgagtatcttgatgaaaagaactttgttgtatccatccatttattccccatacatagcacattgtctgaagatgctttgtaaatgtttgtagagtgcaggaatagtattatacatatgaaaacacaaaagtctgaaggtgatatacatatcaatgatgatgctgctctaggtatcacaatcaattgtgcttctggttagactgggccccatgtttcctggctccctcagtccaatgctctgccactaaagggaattaattttggttcttaacaaaacatcnnnnnnnnnnnnnctttacagatattgatgatgttaagaagttcaaaccgggttacctggaagctactcttaattggtttagattatataaggtaccagatggaaaaccagaaaaccagtttgcttttaatggagaattcaaaaacaaggcttttgctcttgaagttattaaatccactcatcaatgttggaaagcattgcttatgaagaactgtaatggaggagctataaattgcacaaacgtgcagatatctgatagccctttccgttgcactca

SEQ ID NO: 251998 - DNA, 1190 bp, Homo Sapiens
gggattgacgccatgagcgcgctgctgcggctgctgcgcacgggtgccccagccgctgcgtgcctgcggttggggaccagtgcagggaccgggtcgcgccgtgctatggccctgtaccacactgaggagcgcggccagccctgctcgcagaattaccgcctcttctttaagaatgtaactggtcactacatttccccctttcatgatattcctctgaaggtgaactctaaagaggaaaatggcattcctatgaagaaagcacgaaatgatgaatatgagaatctgtttaatatgattgtagaaatacctcggtggacaaatgctaaaatggagattgccaccaaggagccaatgaatcccattaaacaatatgtaaaggatggaaagctacgctatgtggcgaatatcttcccttacaagggttatatatggaattatggtaccctccctcagacttgggaagatccccatgaaaaagataagagcacgaactgctttggagataatgatcctattgatgtttgcgaaataggctcaaagattctttcttgtggagaagttattcatgtgaagatccttggaattttggctcttattgatgaaggtgaaacagattggaaattaattgctatcaatgcgaatgatcctgaagcctcaaagtttcatgatattgatgatgttaagaagttcaaaccgggttacctggaagctactcttaattggtttagattatataaggtaccagatggaaaaccagaaaaccagtttgcttttaatggagaattcaaaaacaaggcttttgctcttgaagttattaaatccactcatcaatgttggaaagcattgcttatgaagaactgtaatggaggagctataaattgcacaaacgtgcagatatctgatagccctttccgttgcactcaagaggaagcaagatcattagttgaatcggtatcatcttcaccaaataaagaaagtaatgaagaagagcaagtgtggcacttccttggcaagtgattgaaacatctgaaattctgctgtcaagattcccatctctaaggactccaagactctttttccccaagtgctagagacaagggggtctatgagcatttactgacttcctgttaaaacttcattttttcaaactttttgagctatgcaatatataaataaacagtaagaatttt

SEQ ID NO: 251999 - DNA, 635 bp, Homo Sapiens
ggggctcttattgatgaaggtgaaacagattggaaattaattgctatcaatgcgaatgatcctgaagcctcaaagtttcatgatattgatgatgttaagaagttcaaaccgggttacctggaagctactcttaattggtttagattatataaggtaccagatggaaaaccagaaaaccagtttgcttttaatggagaattcaaaaacaaggcttttgctcttgaagttattaaatccactcatcaatgttggaaagcattgcttatgaagaagtgtaatggaggagctataaattgcacaaacgtgcagatatctgatagcccttttccgttgcactcaagaggaagcaagatcattagttgaatcggtatcatcttcaccaaataaagaaagtaatgaagaagagcaagtgtggcacttccttggcaagtgattgaaacatctgaaattctgctgtcaagattcccatctctaaggactccaagtgctagagacaagggggtctatgagcatttactgacttcctgttaaaacttcattttttcaaactttttgagttatgcaatatataaataaacagtaagaatcttaaactaggacaaacaacaaaccagaccaaataaaatcgtgtcggc

SEQ ID NO: 252000 - DNA, 502 bp, Homo Sapiens
  misc_feature (18)..(18): n is a, c, g, or t
  misc_feature (113)..(113): n is a, c, g, or t
  misc_feature (214)..(214): n is a, c, g, or t
  misc_feature (222)..(223): n is a, c, g, or t
  misc_feature (414)..(414): n is a, c, g, or t
  misc_feature (423)..(423): n is a, c, g, or t
  misc_feature (464)..(464): n is a, c, g, or t
  misc_feature (490)..(490): n is a, c, g, or t
atttcggcacagggtctnctggtggcagagagataagcccgggagtgtgagcgccttctggaacaattccctctgtttgaggccttcctcctggctgcctgggagcccctgcnagggtctttgcagcaggggcagagtctggcagtgaatctctgtggttgggccagtctttctaccgttctcctgggcctacattctcccattgccctagatntactgagnnaggcttttgaggaatccttccgtggccagagattggtccccgggcccttcagcctcactgaagtgtacgggcgagatgtggacgatttgagcagcataaaggatgcagtcctgagctgtgctgtggcatgtggtgagcagaatgctatgcctccccttttttcaatagtggtaaatattttggtattcaantgggtatanttatcacatttaatccctcacggtaaactttagagagaagnccccattataatgctcatgtttattnaagacggagacc

SEQ ID NO: 252001 - DNA, 949 bp, Homo Sapiens
  misc_feature (546)..(546): n is a, c, g, or t
  misc_feature (548)..(548): n is a, c, g, or t
  misc_feature (557)..(557): n is a, c, g, or t
  misc_feature (566)..(566): n is a, c, g, or t
  misc_feature (568)..(568): n is a, c, g, or t
  misc_feature (575)..(575): n is a, c, g, or t
  misc_feature (578)..(578): n is a, c, g, or t
  misc_feature (580)..(580): n is a, c, g, or t
  misc_feature (585)..(585): n is a, c, g, or t
  misc_feature (631)..(631): n is a, c, g, or t
  misc_feature (633)..(633): n is a, c, g, or t
  misc_feature (639)..(639): n is a, c, g, or t
  misc_feature (646)..(646): n is a, c, g, or t
  misc_feature (653)..(653): n is a, c, g, or t
  misc_feature (662)..(662): n is a, c, g, or t
  misc_feature (669)..(669): n is a, c, g, or t
  misc_feature (758)..(758): n is a, c, g, or t
  misc_feature (783)..(783): n is a, c, g, or t
  misc_feature (803)..(803): n is a, c, g, or t
tgagcatgtttctatgccggttatcatggcggtgccaatctacataaattgttaaaagcacttggacataccctctgtctacagctctcctggcatttgtttttgattttagcaatgcagcaagagtgtctaaagcaacctttataagactggaattcttcttactaaatggtccaatgattttaaacatcagttccacaactccatttttccctaaggatactgaattcacagagttggcagaatatactcgtaaaagctgaaggcaaggtagaaccaagcgatgattctgcaaattctgcttgaccaaattcagggttatattcagagccccattaattctagcctttaccccaaattttttatcttttggtccaatctttgcaagaatagaatgaatctgtaccattaagtcctcatgtgggggagattctttgctggcattcataagtaactgcaacaatatttgtgaaccacctttggtgactaagaaactcactcttcgacctccaccagctgacaccagctcaacaagaatgcttaagntnttaagtgtngtttgaagntnttttgtnttntntaatnttgacagcagaatttccattcctgtagaacctttggctgtcatttntntccttnttttttnttgactntgagccagntgaagantttttgatgtaacatatcgggcagtgtctgattctgaaggctcagcattgatcttctccagttgagccaggagtcctacgatcctaganttattggtaaggcttttttctggtntcacttttaacttgctcatnttgagttacttcatttcataattgcagataatcggctcaggatggggcgctggcggggaccgcgcagagccgcagcacccggctcggcacctggatcacggcggatccctcgccgcccgccgcccggtgttttcatacaaaccccg

SEQ ID NO: 252002 - DNA, 529 bp, Homo Sapiens
gaggggtacaggtggcgtggacacagctgccgtgggctcagtatttgacgtgtccaacgctgatcggctgggctcgtccgaagtagaacaggtgcagctggtggtggatggtgtgaagctcatggtggaaatggagaagaagttggagaaaggccagtccatcgacgacatgatccccgcccagaagtaggcgcctgcccacctgccaccgactgctggaacccagccagtgggagggcctggcccaccagagtcctgctccctcactcctcgccccgccccctggcccagagtcccacctgggggctctctccacccttctcagagttccagtttcaaccagagttccaaccaatgggctccatcctctggattctggccaatgaaatatctccctggcagggtcctcttcttttcccagagctccaccccaaccaggagctctagttaatggagagctcccagcacactcggagcttgtgctttgtctccacgcaaagcgataaataaaagcattggtggccttaag

SEQ ID NO: 252003 - DNA, 678 bp, Homo Sapiens
  misc_feature (64)..(103): n is a, c, g, or t
  misc_feature (323)..(323): n is a, c, g, or t
  misc_feature (657)..(657): n is a, c, g, or t
tagagaacaggctcttgggcctgtactaaaaaatctctgatgacattcctgtttcattcccttnnnnnnnnnnnnnnnnnnnnnnnnnnnnnnnnnnnnnnnnggacgtcttttgattaacccgttttggtggctagatttccattccagaatttgaataccattttccaaaagaagacaccagatcatctctgtatggaattggtaactttgtttgctgagtatttttccagtcacactccagcttccattgcttcactggcttctgtcacattttcttcactttgaaatcaatggtggcattaagttaatcaaagctgttncaatggaacacctaaatcgcatatttactagagtatacatgttatttcctaagatgtaaatccttcaaaactagagtgcgatgcagcaggaaaatctcaagcatcttttcaaagtatgtttttctgatgagctggcgactagaggaagaaagggcttctaggtatcagtcaccctttttgcttcaataataggaacgcgcagtgcagctgcctatgttacagaagcttgaatctacatgacatgcaacagggtaaatgctactagggaaattatatcaatgacattataatttgcccttgcagagtagctgtgaagttatttggtcctgacttnttggaactgagcatacccggc

SEQ ID NO: 252004 - DNA, 532 bp, Homo Sapiens
ccatggcgctgaagtcagcacctccaactccaacaattatgatggacataggcgagcctggaggcattaactatagcttgtctggtttcatcaaggtctgtgatcacaccatcagtaataatcaaaagcacaaaatattgagaagctgtctgctgttgcgtggctgcagcagcaaacctggccacgtgatttatgattggagaaaaattagttggtccatagagttttatctgaggaagacaagaccgatacgcctctacaatgccttggattccattgcagtagggattggatgggttgaagttcattggaaattcatgtgatacctgccactgaggaggtatctgagcgccaaaaccaaaagctggaaacatcttatcagcatcataatcttgaatgaccagtcccacagaccagagagcagtcaaatactcattaacgccattggggctgatgtaatgaagggagtctggagaccttgggtcaccattggagccagtgaagtccactcccacagtaaaattcgagctgc

SEQ ID NO: 252005 - DNA, 1889 bp, Homo Sapiens
  misc_feature (34)..(34): n is a, c, g, or t
  misc_feature (59)..(59): n is a, c, g, or t
  misc_feature (1168)..(1200): n is a, c, g, or t
  misc_feature (1206)..(1206): n is a, c, g, or t
  misc_feature (1349)..(1349): n is a, c, g, or t
ttgttccccttatggctgcagtcatgaccagtanatgggttggagatgcctttggaggngaaggcatttatgaagcacacatccgattaaatggataccctttcttggatgcaaaagaagaattcactcataccaccctggctgctgacgttatgagacctcgaaggaatgatcctcccttagctgtcctgacacaggacaatatgacagtggatgatatagaaaacatgattaatgaaaccagctacaatggatttcctgtcataatgtcaaaagaatctcagagattagtgggatttgccctcagaagagacctgacaattgcaatagaaagtgccaggaaaaaacaagaaggtatcgttggcagttctcgggtgtgttttgcacagcacaccccatctcttccagcagaaagtcctcggccattgaagcttcgaagcattcttgacatgagcccttttacagtgacagaccacaccccaatggagattgtggtggatattttccgaaagctgggactgaggcagtgccttgtaactcacaatgggcgcctccttggcattataacaaaaaaagatatcctccggcatatggcccagacggcaaaccaagaccccgcttcaataatgttcaactgaatctcacagatgaggagagagaagaaacggaagaggaagtttatttgttgaatagcacaactctttaacctgagggagtcatctacttttttttcctcctttacaaaaaaagaaaggaaatataaaagccgggtttttgcaacatggtttgcaaataatgctggtggaatggaggagttgtttggggagggaaaggagagagaaggaaaggagtgaggtatttcccgtctaacagaaagcagcgtatcaactcctattgttctgcactggatgcattcagctgaggatgtgcctgatagtgcaggcttgcgcctcaacagagatgacagcagagtcctcgagcacctggcctgttgctccaacattgcaaagacacattatcagtccctatttctagagggattactttgaattgagccatctataaaactgcaaggtcttgcccttttttttaatcaaaactgttctgtttaattcatgaattgtatagttaagcattacctttctacattccagaagagcctttattnnnnnnnnnnnnnnnnnnnnnnnnnnnnnnnnnactganctgtaacaaagcctctttaaatcggtgtatccttttgaagcagtcctttctcatattgagatgtactgtgattttactgaggtttcatcacaagaagggagtgtttcttgtgccattaaccatgtagtttgtacccatcaccnaaatgcctggaacagtacacatgcacccacaacaaaggcctcatcaaacaggtaaagtctcgaaggaagcgagaacgaaatctctcattgtgtgccgtgtggctcaaaaccgaaaacaatgaagcttggttttaaaggataaagttttcttttttgttttcctctcagactttatggataatgtgaccgggtcttatgcaaattttctatttctaaaactactactatgatatacaagtgctgttgagcataattaaataaaatgctgctgctttgacagtaaagagaaggaagtattctgattagctgtatctggtattaattgcatgttaaaacactggaatttttaaaattgaaattagatcagtcattcttttcttttctcaagatatctcatggctgacactgaagaagaaatgtaattcataacttgcactaaatgtatattttttttcttaaaaatttaccattcttatttatatttttatggattaaaatttataaaatacagatcagttaatattgcacttaagtaatttt

SEQ ID NO: 252006 - DNA, 454 bp, Homo Sapiens
gtcatatagattttaatagattttctgattaactcatcacagtagtcgtttttactgtaatgatatgcagctttactacactagtataaataaaaacagataaatacagctctaggcaacattacagattaactaagcattcttcgtgaaccaaaactgaaaacaattaattattaagaagaagagatgctgacacccttgcccattctcatcataccttctcaaaaagggtattcaaacaaggcgctacacttattatattggtaaattaatttgccaattagccaggcacaacaatttcatggtctccactatttcattattttggctgaaaaggagacacacttcaatgtatgaaaaagaaaaatggaacagataacgccaaagaaaaccactaaatgcattaaaaatacggcacttttcctgtattttagcagtaagatagaaatactag

SEQ ID NO: 252007 - DNA, 795 bp, Homo Sapiens
  misc_feature (612)..(623): n is a, c, g, or t
ggtatttctataacagatattattcagtcttatttcctaagattttgttgtaacttaaggtatcttgctacagtagacagaattggtaatagcaacttttaaaattgtcattagttctgcaatattagctgaaatgtagtacagaaaagaatgtacatttagacatttgggttcagttgcttgtagtctgtaaatttaaaacagcttaatttggtacaggttacacatatggccatttatgtaaagtccctctaagactacatactttttgtttaaaacaaaattggaatttgttttcccttcttggaagggaacattgatatttaacagagtttttagagattgtcatctcatatatataaaatggacacgtggctataaaacaccatataagagatgagtagtgcgttttattttatatgccaatctactttgtttaaaaaaggtctgaatcaggacttgtgaaaacctgtagtgaaataccttaagctgttaactaactgtaaggcgtggaataggagttgctcagtggattggttctatgttgtggactacttaagtctgcatttgttactgtgctaataaacaatattaaaaacccccttctttctnnnnnnnnnnnntataacttcttgttcgggcgccctcggcccctcaagaagattttctaagaccatttcttttggcccccgcggggccccctaaggtaaagtggaacttggccccttagctggttttccttaggaaaaatctcgggctcctggaacaagtaggcttgggaattcttcccctaat

SEQ ID NO: 252008 - DNA, 1127 bp, Homo Sapiens
  misc_feature (30)..(30): n is a, c, g, or t
gaaacctattacctaaaatcatgcccaagnatggaacagcgcgggtcctgtattttcatttcaagccaaaagcatcaccaagttaatacccacccatccaatcaatccggggcgcaattcacaaaagtatttgagatcaaaagtaccaattcgagggtttaattcacggccaatgaagaaatcatagacagcatttccagagctggcaggcgacaggtcattccggggcgctttcaaagagcgcatgtagagatacacactcaagaccacacaaaaaacagtggccgcaagtgcaaactgaagaaaatgactgtacacgtaatgaaactctacgccctggaagagagatgttccgatgactgcagatgtcaggataaaagcatagaatccatttaatctatacttgagtcttcttccatcaataagaggcgttccttctacaacctttccaattggcagtaggtagaacaggacttgaatcaaaaaccacaggaggtagaccccaaatactctggtttcccataactcatacaaagctggcaaaggaggagggaaattcagaagactgggatctttctgtttacacatcaacagcaacaggaagaggaacacaggcaggccaaacatgatgagaaacacaccaggtactcctccaaactccaagtcctctgcccggatgggggtcacttcaaaggttctcactgccagttcttttgcaacgtatttttcttccttagaatctatttcttttaatttgacttcttctcttcttggacgaaggctatactgtgttgctatgtaactgctttcttgtgacaaattgaatttttcctgtgtatttttatgaggtgcgtcatttctctcaatatgctcaggctccccattatatctgctgatgctatttccaaatggcttcagaatcagcggagtcaatttaacttccacttccctccttgcttccttaatgtcggcctggtgggaagcagaagcagatcggcgggcacttttaggtggtcgaccgggggatcgggagcgtgaccttgatcgactccctcggcgtctggaaggggaactggaagttgagccacctttcctttgcctaaaggaagttaaaggcttaatatcat

SEQ ID NO: 252009 - DNA, 927 bp, Homo Sapiens
  misc_feature (54)..(54): n is a, c, g, or t
  misc_feature (63)..(119): n is a, c, g, or t
  misc_feature (682)..(698): n is a, c, g, or t
  misc_feature (835)..(835): n is a, c, g, or t
  misc_feature (913)..(913): n is a, c, g, or t
tgtggaaccgtccacagggcgggtgcctttttaaaccttgggccattgccaccntgaaatgtnnnnnnnnnnnnnnnnnnnnnnnnnnnnnnnnnnnnnnnnnnnnnnnnnnnnnnnnngcctcgggcatttgtgttgtggcatccttttcctgcgggtggcatgttaagatctctgttctggatgatagagttttactagaatcttttgaaaccattattggcaacttggttaagtataaatatttataattttgtaactaccaacctggctcggtgcctgacccctggtaggtgcataataccctccccttaggtaatggcattagactttaaaatatgtgtttggcccagctctgttaataattagccatttgactttgtgcctgagagtttggattgtgggaattttcaggttgcacttcttgtctgttttcccttaattaaaagcaaataatgaccatttgaactgaaaaagaatcaatatgttaaactatttggaaagttctacaagagataatggtatgtatattgaaaattatacctcagacattgcttatttgcatatttgtgtgtatttagtctgaataatgaaattaagactttaaaaatgaacattgcattgtttcatagtggcgtaagtttcatgtgagccttgggttaatattaattttccacttccnnnnnnnnnnnnnnnnnaaaggattctatgcttttatcctgacatctgcacgtcatcggaacatctctcttccagggcgtagacgtttcatttaccgtgtacagtcattttcttcagtttgcacttgcggccactgttttttgtgtgggtcttngagtgtgtatctctacatgcgctctttgaaaagcgccccggaatgacctgtcgcctgccagctctggaaatgctgtcnatgatttcctcatt

SEQ ID NO: 252010 - DNA, 687 bp, Homo Sapiens
agaatatagtggtattcaagaacttgaggacagaagatctcagcaaaggtttcagtttaatctacaagatttcaggtgttgtgctgtcttgggaagaggacattttggaaaggtgcttttagctgaatataaaaacacaaatgagatgtttgctataaaagccttaaagaaaggagatattgtggctcgagatgaagtagacagcctgatgtgtgaaaaaagaatttttgaaactgtgaatagtgtaaggcatccctttttggtgaacctttttgcatgtttccaaaccaaagagcatgtttgctttgtaatggaatatgctgccggtggggacctaatgatgcacattcatactgatgtcttttctgaaccaagagctgtattttatgctgcttgtgtagttcttgggttgcagtatttacatgaacacaaaattgtttatagagatttgaaattggataacttattgctagatacagagggctttgtgaaaattgctgattttggtctttgcaaagaaggaatgggatatggagatagaacaagcacattttgtggcactcctgaatttcttgccccagaagtattaacagaaacttcttatacaagggctgtagattggtggggccttggcgtgcttatatatgaaatgcttgttggtgagtctccctttcctggtgatgatga

SEQ ID NO: 252011 - DNA, 662 bp, Homo Sapiens
  misc_feature (108)..(108): n is a, c, g, or t
gacaagacccagttggaggctgctgaatggttgggcttacttggggatgatcaagttcctcaggcagagtccattctggatgccctctccaaggatttggtcatgaanctttcctatggtcctgaagaaaaagatatgattgtgatgagagacagctttggaatcagacatccttctggacatttagaacataaaacgattgatcttgtggcttatggggacatcaatggcttttcagccatggctaaaaccgtggggttacccaccgccatggcagccaaaatgttgcttgatggtgaaattggagccaaaggcctaatggggcccttttcaaaggagatctatggaccaatattggagcgaattaaagcagaaggcattatatatactacacagagtacaattaaaccataattgggaattatattttgtttttttcttcccaggcaatacacctctgaacatgtgtgtgataaatgggtttgctaatgtgctgttttaaagtataaagcataatatgttttggttaacacaatgtactttttgaactataaatctttattttaatatggaaatgtttggaacaggagatgcaagccactaacagagaactttaataattctaccctgtattttataaatacgtatgtgaaagtgatgaa

SEQ ID NO: 252012 - DNA, 1046 bp, Homo Sapiens
tgggtccaattaccaagggccggaggccaagggggcaccttttcccctttggttcccgggggccttggggccttggcccttccaaaagcccccttttttcccccggaccttatcataacccggaccttgggaggtaccatccccgccccttaagtaggggtctggttggcacgttcccccaggtagtcttcctctgggcaagcctctttggattatgggtaggcctcgtcctccgattgctcccctggccagggcccctatgggtcggcctaaccgtgcctggatgttactcttacccaggcgctgctttaagctctgcttaagttttaatgctgcctggacagagggtctattctccatctgctgggccagtcttctgtttctggcactggctagctgctgttgttgctgcatcgaagcccgaatattcactggcgtcggctgtttgttcttcagcatattagtaaagcgctcatttagagacatcttggtggtgctttttagcacaactttcggcgctgactgtgcagccatcttcgaatcccgagaatcgaaggaaacagacgccagtgctcctcccggggctgccaccacggctccggcaggcgggccggggaccggccgaacctgagttgacggtggaggggctcgggttagctagatgggcggttggttagatgcgtaagcggtagtatgcgagctcagttcgttgttgctggttggctgtctagtcggccgatccgtctgctcacccggcctgccctttcctgcctttcgtctgcagcggccgccagctcctgctcggtgtccaaaacaaaatggccgccacgtccagtgcttgtctgaccggctaaaatggcgtctacacaattacgtcaggcgtcagatccgcgtaccactagaggacagggaagattttagctgtattgtccgcgtacccagcttagtgcttttagacttttaaccagacccttagacccccacagtaccggacctcaagcattcctaaagtaggcaggtgacatacgccttagccttttcacgaa

SEQ ID NO: 252013 - DNA, 326 bp, Homo Sapiens
cagctagactgtgtggaaactcggttcataccagccattctaggggtggggtgagttgttgtcatccttaggaaagtgtgttgttgtaggatcaaccacatccttcaaaaggactatgcctgtttataagcccagctgtttctgccctgtgaaacacggtaaggatattaatacaaagagaatacagctttatgataaaagatgctcaatgaaggatgaattagggatatactgagaatggggaaggaaactatcatctcagaagtcagcaggcagtaagcaagaggaggaatcaatacagcaacagtttggatcagactgtacag

SEQ ID NO: 252014 - DNA, 241 bp, Homo Sapiens
ctaaataaaaagagaacccatgcttttatggacactaggtacaccccttcagcttaaatttttcgttaaatattttagtttattttatggttatcttccaggtgtctaaatctccagtctgtctgttgtacgggtaatttaactctgtaatggaatagtttcctcccaactatttatattaagtaatttttaaatatttgtaatattgtggactgactaataaactattaagttattggac

SEQ ID NO: 252015 - DNA, 594 bp, Homo Sapiens
  misc_feature (384)..(393): n is a, c, g, or t
acgaggggccacttctctgctttggttgccatggaaaatgatggctatggcaaccgaggtgctggtgctaatctcaataccgatgatgatgtcaccatcacatttttgcctctggttgacagtgaaaggaagctactccatgtgcacttcctttctgctcaggagctaggtaatgaggaacagcaagaaaaactgctcagggagtggctggactgctgtgtgacggaggggggagttctggttgccatgcagaagagttctcggcggcgaaatcaccccctggtcactcagatggtagaaaaatggcttgaccgctaccgacagatccggccgtgtacatccctgtctgatggagaggaagatgaggatgatgaagatgaatgnnnnnnnnnntcaaacagcagaagaccaaggcatcagatctgtaatgaccctaaagttagtgtggtgctccaagcagagtcgacatcatggaatgaaccaaatctggcaggatctgctcggggaagtgttttcctggaccacacacaccttatggagataatgcctctgctgcgtgaggagacagagaactttagttggactacagtttgt

SEQ ID NO: 252016 - DNA, 1695 bp, Homo Sapiens
  misc_feature (27)..(27): n is a, c, g, or t
  misc_feature (95)..(95): n is a, c, g, or t
  misc_feature (99)..(99): n is a, c, g, or t
  misc_feature (119)..(119): n is a, c, g, or t
  misc_feature (137)..(147): n is a, c, g, or t
  misc_feature (1509)..(1509): n is a, c, g, or t
catctgtgtttccaaattcttgctatncaaactggctcaatgtataaaattcccattgaaaataatgagaatttggtatcaaagtgaagtcctanaaanaggtggaaagtgtggggtgnagaagggacaggggaacnnnnnnnnnnntttcaaatagaaagtgcagagggatggggaaaatgttgagtgaccaagctagtccccgacatccgtgtctcggtcccctatgagccagagaacatggaagctgagtgctaggagcccagtgccaagcaggtcccccagagcagtcaagtatgggatggagaagttgtccgggtccaggccccggccccacatccagtgcaccatccagtctgcgatgtacaggagaatcagcacctggagcagtgcagctgtcatatagaagatgatgaagatgagtgtgagggtggtgtgcccgccctgcatacagctgatggtgtagaggaacaccaggtgtcctgggaccacgaggaggaagaggacccgggctgagcgagaattcacatcagggctgaagaaggtggtacaaggactgggacagcggcgaggagcttgctcagagttctctccgggcattccattcatgtgcaggaaggtggagatgcggctggcctgcactgccaccagattgcccccaacaccattaatcacaggcgtgaagacagccatcccagcaaagttggggtctgagacagtcttgtccaagatgaggcctcccacactgctgatggccatggcaatgataacaggctcccagcccgagtacaacacctcccttgtggctggacttcgtcgggccagcaccacccagacaggcagcagggccacaaagaaagcacacaccagtgggtagatgtatcgccagtgattcagttccaggtagagtccccagctgatgcctgagagcagcgccaaggtgatgaggtcgcccaggctggcagcaatgggtgtggccacgttgtctgggttgatcccaatcttgcgagagccaatgatgactccaatcatgatcatacccagtaccagggaggcaatgaaggctgtggccacgctgctagcacagagcaggaaggcgtgcggaatactgaagtggccatcagggatccagccaaagacgacggctgcgatggacgccaggaagcccaccaccgtggcctgcacctggatgagggccatgttcccagtgatcatccgccagagctccttgggtgtgtccatgtgtccaatgttggctgcagtggaaagccttgatgccagggtcatttccaggttccctttgagccccagcagcgcaggcactaggatgaagacctctgtcaccttctggaagacttcccagtgctgcacgatgtccaacaccatgccagcagccacagtcccaaagcctgccaggaggaatggaaacagtacttgcagcccgatggaaaaggaggtctccttgagcggggaaggtggcgcagggccacggtctgtgctgacgtcgtnactttcgttgctctggctcccgttctccagcagggcgtcctcctcccgaacccccttggcgttggcccgagactcaatcaccacctctaccccagccccatcaggccccaggaactctgaggtcccagccaagggctctctccctgggccatctgaagagcagggagaggcagaagggccatcccg

SEQ ID NO: 252017 - DNA, 706 bp, Homo Sapiens
  misc_feature (509)..(548): n is a, c, g, or t
tcctcccatagttctgcacgtttctcatccacccgagcagctaagagccctcttaaagggcaagcgaccctgacacctgctttaggaactgtttgcaggagtcagtgcaggccagctccacatcctgaaggggatgccatccgggtacgaacagctcagaggctgaatggccctatcacccgggaggagcctggagggtattccatctaatcctgtggctaagcggggtggatgagggaacacacggacttgttcgagaatttgcccagcagcacgaaactacttagaagcagaaaactggggcaggacctggcgtgggagttagggagccctccactgccttctcagggatccacatgtgctcctctgtgcaggaactttcaacagcgcctcaagatagagtcacagagaacgatggcaaattccatagcactcactttttctttcctgagaaataaacagatttgggagctcagtacatcagtaatataaaagacagtgggttcagnnnnnnnnnnnnnnnnnnnnnnnnnnnnnnnnnnnnnnnnatgtataaagagcttcataccttttttcgtttttggttacctgtaacgttttagaattcaagaaggtttccaatgaggaaagacggaattattcagaaacagcgttcacctgatacggagaacagctccccagcgggaagtcatcatgtctcatctgc

SEQ ID NO: 252018 - DNA, 750 bp, Homo Sapiens
ggggccccagcccggccgcggcacctccgcctcgccgccgctaggtcggccggctccgcccggctgccgcctaggatgaatatcatggacttcaacgtgaagaagctggcggccgacgcaggcaccttcctcagtcgcgccgtgcagttcacagaagaaaagcttggccaggctgagaagacagaattggatgctcacttagagaacctccttagcaaagctgaatgtaccaaaatatggacagaaaaaaataatgaaacaaactgaagtgttattgcagccaaatccaaatgccaggatagaagaatttgtttatgagaaactggatagaaaagctccaagtcgtataaacaacccagaacttttgggacaatatatgattgatgcagggactgagtttggcccaggaacagcttatggtaatgcccttattaaatgtggagaaacccaaaaaagaattggaacagcagacagagaactgattcaaacgtcagccttaaattttcttactcctttaaggaaactttatagaaggagattacaaaacaattgctaaagaaaggaaactattgcaaaataagagactggatttggatgctgcaaaaacgagactaaaaaaggcaaaagctgcagaaactagaaattcatctgaacaggaattaagaataactcaaagtgaatttgatcgtcaagcagagattaccagacttctgctagagggaatcagcagtacacatgcccatcaacctt

SEQ ID NO: 252019 - DNA, 1340 bp, Homo Sapiens
  misc_feature (140)..(140): n is a, c, g, or t
ggccggctccgcccggctgccgcctaggatgaatatcatggacttcaacgtgaagaagctggcggccgacgcaggcaccttcctcagtcgcgccgtgcagatgccaggatagaagaatttgtttatgagaaactggatanaaaagctccaagtcgtataaacaacccagaacttttgggacaatatatgattgatgcagggactgagtttggcccaggaacagcttatggtaatgcccttattaaatgtggagaaacccaaaaaagaattggaacagcagacagagaactgattcaaacgtcagccttaaattttcttactcctttaagaaactttatagaaggagattacaaaacaattgctaaagaaaggaaagctattgcaaaataagagactggatttggatgctgcaaaaacgagactaaaaaaggcaaaagctgcagaaactagaaattcatctgaacaggaattaagaataactcaaagtgaatttgatcgtcaagcagagattaccagacttctgctagagggaatcagcagtacacatgcccatcaccttcgctgtctgaatgactttgtagaagcccagatgacttactatgcacagtgttaccagtatatgttggacctccagaaacaactgggaagttttccatccaattatcttagtaacaacaatcagacttctgtgacacctgtaccatcagttttaccaaatgcgattggttcttctgccatggcttcaacaagtggcctagtaatcacctctccttccaacctcagtgaccttaaggagtgtagtggcagcagaaaggccagggttctctatgattatgatgcagcaaacagtactgaattatcacttctggcagatgaggtgatcactgtgttcagtgttgttggaatggattcagactggctaatgggggaaaggggaaaccagaagggcaaggtgccaattacctacttagaactgctcaattaagtaggtggactatggaaaggttgcccatcatgactttgtatttatatacaattaactctaaataaagcaggttaagtatcttccatgttaatgtgttaagagactgaaaataccagccatcagaaactggcctttctgccaataaagttgcatggtaaatatttcattacagaatttatgttagagctttcatgccaagaatgttttcttacaaaattctctttttattgaggtttcactaataagcagcttctacttttgagcctcaacttaaagcagaactgttttctactggatttttcattaacagcaagctttttcttttatgtaaaataaatctattgtgaattgaaaa

SEQ ID NO: 252020 - DNA, 637 bp, Homo Sapiens
tcactaccagcaggacctcgcacaggccctgggccagcgcagccgccaggaaggccctgactccgtcctcatcccccagggcctcgggcgcccgcagcttggagtccaggttgtagtagacaccgtccacctggcgcagggccacccagtgccgccggcgcagcggcagtgacagcagccccagcgacacgggcgagggcaggttcaggatcagccccagtacctggggcagggccagctgggacaggggcctcctcctgtcccaccacacggcggccaggcccagcccctgcagagcggccatgatcacattgacatcatagttgccggtgcccaggaggctgcgatgagggttcagccgggagtctggggccaacctcttgcagatctcatcggcagcctcctggctaaagagccgctgctgcagaacgttgttgagggcgtggacagcacacagctccaggcgctgccgttcgtggtacacggtgggtgggctcggctgtgctcccggggcctgggacatgccgtcctcggctcctgcccgcctgcctctccgctccaccgagccaggggtttccgcatccccttcctgggcggcggctctgggctccgagtgcggggcgggcaacaccgcgct

SEQ ID NO: 252021 - DNA, 425 bp, Homo Sapiens
  misc_feature (306)..(306): n is a, c, g, or t
agttattcctcactaaagctgctacaaaatagcccactcaagaacacctactgatgactacattccttcttatccctacattcagtcagtaattaatttccattagatatgagctctaaatttctcttcaaagaatcaatatgttagatatgagtcctaaatttctcttcaaagaatcaatatgtcagtatgttcaattctttgccttctacttttaaacttaacttcctcgtaaagcaaccgatttcctgattaccctctccaccctgactcattccgatttcctgctctgccataaccattttncccgccaaaccactcatcccatcactctctttaaattaggccaactggaattaggtttaggcctgtggcaggtctaaaccctaggccaatagggggggaacggacaagagggccatagg

SEQ ID NO: 252022 - DNA, 771 bp, Homo Sapiens
gaagaacattactttgaagataaactgatagaagatttagcaaaacctggggctgaacctccagaagaagatgaaggcactaagagagttgatcctctacatcagctgatccttctgtttagccggacagctttaacagagaaatgcaaactggaggaagattttttatatatggcctatgcagatattatggcaaagagttgtcatgatgaggaagatgacgatggtgaagaggaagtgaagagttttgaagaaaaagaaatggaaaagcaaaagcttctataccagcaagcccgactccacgatcgtggcgcggctgagatggtgctacagacaatcagtgccagcaaaggtgaaactggaccaatggtagcagctactctgaaacttggaattgctattttaaatggtgggaactccacagtacagcagaaaatgcttgactacctcaaggagaaaaaggatgtgggcttctttcagagcctggccggcctgatgcagtcatgtagtgtccttgacctaaatgcatttgagcgacaaaacaaagctgaaggtcttgggatggtgacagaggaaggatcaggagaaaaggttctgcaggacgatgagttcacctgtgacctcttccgattcctgcaactactctgtgagggacacaactcagattttcagaattatctgagaactcagactggcaataatacaactgtcaacataattatctccactgtagactaccttctgagagttcaggaatcaattagtgacttt

SEQ ID NO: 252023 - DNA, 567 bp, Homo Sapiens
cggccgggggtaaaaatagcttaaaattagtttaagctaacgtcagagaataaacataagggaacaagccaccactaagcagaggttgtccactaaagagacagattgtaaacatttgagcataaaggccgcatatggtttctgttattaactcgccattgtaacgtgaaagcagccatagagaatatgtaaatgaatgagcatgactgtgttcaaataaaactttatttatgaaaaataggtaatggaccagatttttgaggagatatattttaagagagaatggctgcaggtttttgaacactaatgaaaaacatgagtccacagattcatactgtcccaaacaagagagcaaagagaaaagtcatgcctggtgaccaggtcactaggtgactaggtcagggttaaaccctgactagcctaaagaagacctccttgccactgctttgctcatttccttcaatgcacttaccactaaaagaatgtttttgttttttggtctacctccccatatcatagtgaaatgcgtaataccaaagacaaataaatttaaaaagcagctgtaga

SEQ ID NO: 252024 - DNA, 676 bp, Homo Sapiens
  misc_feature (99)..(99): n is a, c, g, or t
  misc_feature (108)..(108): n is a, c, g, or t
  misc_feature (633)..(633): n is a, c, g, or t
ggccgggggcttggggcacgcgcatcttggcaagaggcgaagacggcagcgagtctcctgtcaagggggcacgcaggtccagagctgctggtgctcccngttccccanaccctacccctatccccagtggcagccggagtgcgggcgcgccccactcaccgcacctcaccatggtgctgttggcagcagcggtctgcacaaaagcaggaaaggctattgtttctcgacagtttgtggaaatgacccgaactcggattgagggcttattagcagcttttccaaagctcatgaacactggaaaacaacatacgttggctgaaacagagagtgtaagacatgtataccagcctatggagaaactgtatatggtactgatcactaccatccctgaatattgccgagccttagaagagaatgaaatatctgagcactgttttgatttgatttttgcttttgatgaaattgtcgcactgggataccgggagaatgttaacttggcacagatcagaaccttcacagaaatggattctcatgaggagaaggtgttcagagccgtcagagagactcaagaacgtgaagctaaggctgaaatgcgtcgtaaagcggaattacaacaggcccgaagagatgcanagagacagggcagaatagcaccaggatttggcggttggggctc

SEQ ID NO: 252025 - DNA, 705 bp, Homo Sapiens
cggccgggaggaggatcttagccagaatatttgcaatgacacatgaatttaattttataaatataatggaaaacagatttttcatcatatcatgaataaaatatagaggtaactatgttgtattttcttgaacctagatactttctcatagtgtttgcttagaattaactttgtcctatttgtcaactgggttctggaaaaaaacaaacatgatgaagcttttgaataattgtgcagttttttaactagggaaagctttgtactgctgctaatgatatgcacccagaaaccttgttagacaaaaggcagtttcaagccaatgctatggtttccatgtggacatacagtgcctatgtagcaggcacttagagtaaatggacttgccttaatttataaaggagggaagaggtagaagggaaccatgggtcctccagctagagggggagtttactaaaagggagtccttggagaggggaatggagagaaggtgcctttgactgtcttctatccattagttctgccctggagcacactggggaagcaggctgcgggccttccaaaagtaaaaaatggtgatatgcaatcgaagcttatccttagcctatgcacatttgtctcagctgggcattgtcttttcagagagcttgtagcacaagggctacacatgggcgccaagatggtggtagatacacccttggtgcactt

SEQ ID NO: 252026 - DNA, 925 bp, Homo Sapiens
ggggcgcttcttccgggtggggccccgggccgaggcgatggcgccctgggcgctcctcagccctggggtcctggtgcggaccgggcacaccgtgctgacctggggaatcacgctggtgctcttcctgcacgataccgagctgcggcaatgggaggagcagggggagctgctcctgcccctcaccttcctgctcctggtgctgggctccctgctgctctacctcgctgtgtcactcatggaccctggctacgtgaatgtgcagccccagcctcaggaggagctcaaagaggagcagacagccatggttcctccagccatccctcttcggcgctgcagatactgcctggtgctgcagcccctgagggctcggcactgccgtgagtgccgccgttgcgtccgccgctacgaccaccactgcccctggatggagaactgtgtgggagagcgcaaccacccactctttgtggtctacctggcgctgcagctggtggtgcttctgtggggcctgtacctggcatggtcaggcctccggttcttccagccctggggtctgtggttgcggtccagcgggctcctgttcgccaccttcctgctgctgtccctcttctcgttggtggccagcctgctcctcgtctcgcacctctacctggtggccagcaacaccaccacctgggaattcatctcctcacaccgcatcgcctatctccgccagcgccccagcaaccccttcgaccgaggcctgacccgcaacctggcccacttccttctgtggatggcccctcagggtcctggggagaccctctgggctgaggaaggaggaaaaagggcaacaaccccagcctggtttaaggttgcctggaaagccgggcctacccgccttgtgccctgaaaaaccaacgggggcctggtcccccaactggggggg

SEQ ID NO: 252027 - DNA, 395 bp, Homo Sapiens
ctttacagtcatcaatgagacctattgtatatatttttgcaccttgcgcttgtaaaagcagataaaatatttaatatgtaatttacaatgtattttaccagctcagcatacaggatgtatacacattatatcaaagtagtagacagttacgggcctgtgcaaaccctgcaaaaatagtacttcagatatctgctaattaaaaacaaaaacagtttgctgtttagaagtgatacaatttaaactaccacaaaatacaaagggctgcaaaaatgtaaccattccaacaacatatataagttatctacatgcatattattcctcattaaagaaaaaatatgtaaaaaggccattggtaattgctttgttaacatttgtaggccgggcacggtggctca

SEQ ID NO: 252028 - DNA, 384 bp, Homo Sapiens
  misc_feature (63)..(63): n is a, c, g, or t
agaatccatggatcccccacggaagaccctcggccccctcccagtaaaagctggtaagaggtntcctatggggccctaccatacatttcctgtgacaagtatttgccgtaaattaattttaattgtgtatcaagtgaaaaagaaacactgaggttttaagctgctgtatatagcttgtgagaaacctcttttctttaaaatttacataatcacaagaaaggaaagaattacagttggactgattgtgacagtgccttgtcgtcctctttgaaacaccccgtgttgtccagtataccttataacacttagccacttctccccaccctccagaaggggtccacagttgaattctgaatcatcttgaaaataagattccaaccacaa

SEQ ID NO: 252029 - DNA, 1160 bp, Homo Sapiens
  misc_feature (52)..(60): n is a, c, g, or t
  misc_feature (66)..(182): n is a, c, g, or t
  misc_feature (188)..(204): n is a, c, g, or t
cttctcataggatgcagttacacacacatatgactggaatcacttcagagtnnnnnnnnngtgggnnnnnnnnnnnnnnnnnnnnnnnnnnnnnnnnnnnnnnnnnnnnnnnnnnnnnnnnnnnnnnnnnnnnnnnnnnnnnnnnnnnnnnnnnnnnnnnnnnnnnnnnnnnnnnnnnnnnntgggcnnnnnnnnnnnnnnnnncattggtaaaaagcagttgttcttttagaaggcatcagagagccctctagtgaccacgaaggggagttaatgcagagatgactcgagacagagaagcagtcatgagtgtttacaaaggaaaaagtgagggagggaaagctcttttggttaacagcatatttacaattagttaactgtattcttaaatacttttaacctgagtagacatttataaatatgttataggaaacctcacagtcacaagtcacactagaatccatctgtccagtatctgtgctttccccacaccagaatccatctgtccagtatctgtgctgtcccgagtcttcctctctcataagttcccaatgtcagcagagttgtgagcatgcaacaccaagaatacgcatcccagcccttcaggtgcactgtcaacaggagtggctagaaataggctccgctctctctcagctgctgcttagacaactctcttacattctggacataaaacacactggatatagaaccttcagcttctgcctctccagaccacttctcagctgttcaaagcttcaagcaataggtttactgtgcaccaagaggcttggaagagtggcaccactgcttgggggtcaggggcttcctaccttggcagaatgatgttagtatatactatgcagtggcaccagaggccctcccgggcatctgaggcatttagatcaatggcttgtccttggcccagaggtgatgcacactgtcataatactcagtgataaaagtccctgctgcattagtaagtcagttttgaagctctcctgttatagcaaggcctttcagtcagtgtggatgcagcatttctgaacagaaaattattttcacttatcatcagaaccagttccagctcctggaaatcttggagtcgagcaacatccttgtccttccttaacagagtattgggtaactttctgatcttctcc

SEQ ID NO: 252030 - DNA, 2477 bp, Homo Sapiens
  misc_feature (1513)..(1513): n is a, c, g, or t
ttgtaagatggcggcgcccaggtggagcgcgtcgggcccctggatccggggaaacggccaaggttgcgggagtctcttcactctcgtctcaaagccattttgtgccgctgccgctgcctctacggccataaatgcccggagattagcggagaagctccgagcccagaaacgggaacaagacacaaagaaggagccggtgtccacaaacgctgttcagcggagagtgcaagaaatagtgcggttcacacggcagctgcagcgagtccaccccaacgtgcttgctaaggcactgacccgaggaattctccaccaggacaagaaccttgtggtcatcaataagccctacggtctccctgtgcatggtggccctggggtccagctctgcatcactgatgtactacctatcctggcaaagatgcttcatggccacaaggcagagcccttgcatctgtgccaccggctggacaaggaaaccacaggtgtaatggtgttggcttgggacaaggacatggcacatcaagtccaagagttgtttagaacccgtcaggtggtgaagaagtactgggccatcactgtgcatgtccccatgccctcagcaggagtcgtggacatccccattgtggagaaggaggcgcaaggccagcagcaacaccacaagatgacattgtccccgagctaccgcatggacgatgggaaaatggtgaaagtgcggcgcagccgaaattcgcgcaagttgctgtaactcagtaccaggtgctcagcagcactctctcctccgccctcgtggagctccagcccatcactggaataaaacatcagtcttcgagtatcacttgtcttttggattggatctgtccaatccttggtgatcacaagtacatcagactggaataggttggccccccagtaagctgtctgtgggcaccctgaagaagctggggctagaacagtcgaaggcccgctacatcccccttcacctgcacgcccggcagctgatcctgcctgccctggggtccgggaaggaggaactcaacttggtctgcaaacttcctcgcttctttgtgcattccctgcaccgcctgcgtttagagatgccaaatgaggatcaaaatgagaacaatgaagccaagtgtctgggagcacagtgaagaccatgggagcaccctggcacctgggagcacagtgaagaccctgagagcatcctggcacctgggagcgcaggttggcccctgaactgttctttgtttacaggactctgctaacttctcacttggaacagactgcgtaagagccaggtgggataaggtaaagcaactcagctgctacaggggcttttaatggagaacaaagtctatttactggatagtttggctgcactatggaaaagcctgctggaagtctccctgccgtgggctctcattgccaatatggaacagagcccagggccaggcagactggggcagtgactggaaaaggaaaactaaaggtcagaatccgggatcaggaactgttnttatccagcagtgaagctcttgagctcttaggaaggttcccgtggttggaaagaacataatggttaacaaatatcacagcatccagggattgcccagctatagtgtgggtgccctactgaactctgattagggaacctgtataagggtattgagtgtgaggttgaggtgggacatttgctgagcaaggagaaccgatgtgaatggcaggcagataacatgcacacatgaagctggctgggtgtaaggcagtagcggggagcagcatgctgtctaacagctgttagctccagctggttgttgccatgtgggaatggattttctcatttcttcagagaagctggaaacctagatatttatgtgaaacctcccagtgtattgccaactaaatcaaatttttaaagatgcttaggcacctaagcaaataatacttagaggttgaatttggtctacaggctagcagtttgcagtctatgtttaatgaatggtatagaagtttggggaaaggtgccatcttgaaaattctggatcagtggttggcattttcgctgcgtgtagtatgtatcctttctaggcttggagatggctttggttggtccgtgaatgtagttatgagagtgctgccattaaaaaatcaaaaatctctgttgtggaagcgtatcttctgttcttaggtctcaggaaggagagggctatactgaacaccattagggatagatggaaatgaccttggcctccctgctcagcgggtccatctagtttccaccttgtttcttgcaaacaaatacacctcacactactttttctttctgacagagttggagtgacagcacagttaggggggtacaccccgggacagtctttatatgttccctctgtatagatgatgccactttctagccctttccctgtctccatggtacccattactgtgcataataaatttaactttgaaagcacagaaaa

SEQ ID NO: 252031 - DNA, 511 bp, Homo Sapiens
ggccggggacacacaagatggcggcgcccagcggagtaggggctgcgcttggggtttgctgaagctggctgcctctcccactccccttttgggtgcaaagcgccgctagcgggaagacgggggccgggcggggacaggggcacctgcgtagctggactgagagcctgcgcccagcttacatcgaccccacccggccccggcccgacccgacgcgacccgatccgatccgatcccattccatccgttccccgtctcctcccgtctgacccgttgcccggccgtggttcgccacaccaggcatccaaagctgaggtcgctcctacggcctgggctcgccttcgctttagagatgtttggcctcttccctcccaaacagcccatcttcaaaacctggactcttggactggcacctggccacctttccctctaccaagactccacttccgtcttacccacttcttcctcagattcttggtaccccctgggttggagactgctcattttccttcca

SEQ ID NO: 252032 - DNA, 418 bp, Homo Sapiens
ttcatggagatgatcaccaggactctgatgagttttgtcgcaacacactctgtgcacctgaagttatttcactaataaacactaggatgctcttctgggcatgctctacaaacaaacctgagggatacagggtctcacaggctttacgagagaacacctatccattcctgggccatgattatgctgaaggatcgaaggatgactgtggtgggacggctagaaggcctcattcaacctgatgacctcattaaccaactgacatttatcatggatgttaaccagacttacctggtgtcagaacgcctagaaagggaagaaagaaaccagacccaagtgctgagacaacagcaggatgaggcctacctggcctctctcagagctgaccaggagaaagaaagaaagaaacgggaggagcggg

SEQ ID NO: 252033 - DNA, 2165 bp, Homo Sapiens
agaaatggcagaatcctcaggagtcagtgaagaagctgctgaaaaccccaagtctgtgagagaagagtgcattcccatgaagagaaggcggagggccaaactgtgtagctctgcagagaccctggagagtcaccccgacatagggaagagtactcctcaaaagacggcagaggctgaccccagaagaggagtagggtctcctcctgggaggaagaagaccacagtctccatgccacgaagcaggaagggagatgcagcatcccagtttttggtcttctgtcaaaaacacagggatgaggtggtagctgagcacccagatgcttcaggtgaggagattgaagagctgctcaggtcacagtggagtctgctgagtgagaagcagagagcacgctacaacaccaagtttgccctggtggcccctgtccaggctgaagaagactctggtaatgtaaatgggaaaaaaagaaaccacacaaagaggatacaggaccctacagaagatgctgaagctgaggacacacccaggaaaagactcaggacggacaagcacagtcttcggaagagagacacaatcactgacaaaacggccagaacaagctcttacaaggccatggaggcagcctcctcgctcaagagccaggcagcaacgaaaaatctgtctgatgcatgtaaaccactgaagaagcgaaatcgggcttccacggcagcatcttcagctcttgggtttagcaaaagttcatctccttctgcatccttaactgagaatgagcttttgtgggagcccacaccagtcaagttggatttgaacccagctgctctgtactgcacttagaatgatgtaatattccaggatgctgctgcaggtggcgtatcatcgtacacactcagtgacatttctatcacaatcattttatggaagatgtgtgataatctgtttttactggtattaataaacacatacaatgaagaaaacagataacaaatttttaagaccaagggtaagataactaatcaaggccatttaatcccgtcacattcatctcataatagaaacacgttcatattccagtggtcaatgttagatttcaagttgaaaggcagtccctttagttgggggctgtccagagctgcagcagggctttgcacggaaggggtggccctgttagagttgcttctcctctagtttgtaacttactggacttttgtggaaaatatcagcgtcgctaccctcagaaacaaactaacagcacacgttaggaggagtcctcatcagctgttctcattgccagtgagatatattcagtattgtagatactacactaatttccaacataagaggcaggaagaagttttgattctatccttttttactaaacagttttattatgacactagatacagtaaatttttagaaaaaaataccatttacagtattattgtgaaccatttaacccttttgatccaaggccccggaccaaggggatactgtaatcaggttatgtacaccaacctctgcatcagttgcttctatagagcatcagccctcatgtttcattgtcttaatgtcggggagcagcctggtgtcctgccccaggtgtccgcatttttgcatggtaaggagaaggcttacttgcccttcagctcataaaagcagaaggtgtgctattcacagtaccatgcgagtagcccacagttaattccccggcagattctttggctgtgttttatctttaatgaacgtttctgacctaatattttgttgtaaaccattaagtaatgtaacgcatgtaagatgcttagggtgcctggccaggactccgtggtttcctgttgtgacagtaataatggttataataataaaaatgataaaattgccatcattctatttttatccaaaagtataaattttgctttggcatgaaaagtggtcctcttgactgcattatgcatgcgaggatgaaataaacctagaagtggcagaacactggatttgtgtgtgtggcgctttagggtgctggactgtatggctgagggctggttgggttcctctattggctctgctcaaatgttgcaggatacatagccccaaagatggtctaggagcaatctaagctgtgttactccaaaggacatgaaaaagctcaagagtaaaattaaaattctca

SEQ ID NO: 252034 - DNA, 692 bp, Homo Sapiens
ggtcaggacggtttatgttgtatttggctttcttggggtggacccctaaatagcaaaggcatacagagagactgaaaactcgttagagtgtctcatttgtaaacagaagtcattaacttcacattgtaattcagcacttcctatatttcactgaatgaaaggtaagtgtatatttttatactttttggaaaacatggctatagtgctttatataagcaaattaaatatttccattaagagagctttttaatcttgaaaagatgaattttgaccttgatttgatgaatagaaaaaggcattattgctctgcagaacactaataacttatccttcaaactttatacatactttcatacattatttaagtatgcttaaaaaacagctttaagattaaggcaattagtgggttaacagtttcatcagcttcaggctagttttgataaagtttgatatcttgatcagttcatgctcaaccagaatagtatagtagctactggttatgttgcatgggttacatatgcattcttagcttaaactaaataaacggcttaagcaccaacacttggaaactcatggtcaaacatactttaacatacctacaactaggccttgattaaagacagtgaaatcgtttataattaaaataatgcatttatattccctcaatgaacaatgagaaaatgttgcaatgc

SEQ ID NO: 252035 - DNA, 1477 bp, Homo Sapiens
  misc_feature (1172)..(1186): n is a, c, g, or t
  misc_feature (1453)..(1453): n is a, c, g, or t
ggaaggatgatgaaatttattcctgctgccttaaaaatatgtatcccttcttcacccatcatgactgtccccagtgagtgtcctttactattcttgggagtgactcctgtctaacttttcatactggcgagaagaaaagaagcctattttaacactttagtggtgttgaaacacattacttactttctgaagatgtcccagtgaatcctctgtcaattcactgccatatgtaatctatatgataagggaatgcatcttccttctaaagtactgcccaaactcttgccagctcctctcccattgtcccttcatgtggaatatttcttgggctaccttagtggaaatatagatcagtcttctccccatccatcctctcaaacataatgagattgtttactttttagatttatgcagtgaaaatgcccagtcaggtctgaatcgtcagtgcattatattgactctgagcactttagaatttagagttgcaattgaatgccagctgtggagatggggtgcatatcagatatataaataaagctcaggtttgctagggaaccaggtatagagaaaaataagtctgatatgaggaaaattgcacaatttagagtagttatgccgtagagaaaatttccacaaactaggaaatgtagagagttattctatagaatactcaaaagaggaaagtatgtgatttttgggaaacaggaaaatcttcaaacttctttcttcacttccctttgtgtttagctgaccctccaatgtgatcattgcctttggagtttgggagaggtacgggaagtggcctgatccctgcttccatacttcactcctccatccatccttccctcccttttcccctccagctaaatggacaattctagccaacattgagtcactcaataagtctcaacagtgggtgtgtttgctgagattgtccagcggttgagcagtttggtctcacctccctcgctagttgagaccaaaaagagacaaataactttttcatggtctttgaaacataatgcttatttcgtggtcaatggctttaaaaaaatctgtttcttgttttcttcaacaaactcactagttttcccttaaatgatattgtaaaaattaaagtaatcttgaaaatgttttgacaaaagtaaaattaaagggacatcttttcttgnnnnnnnnnnnnnnnctattgccacacatgaccgttccttcacctttaagcaaagagagtggttcagatggtttctaagatgccaacctgacctcgcattctgtcattctacccagctcttaattcaatttgcttccattatcctaacaggcttctttcttacttaggaacttgggaaagggctgctgtatttaataccctccaacactaacggcaggacttaggatagggtactgtttattggaaaacctactgaggtggaaatgtgcgggttttaggggnccttcattaaacatctcattttta

SEQ ID NO: 252036 - DNA, 777 bp, Homo Sapiens
  misc_feature (178)..(198): n is a, c, g, or t
  misc_feature (301)..(346): n is a, c, g, or t
  misc_feature (355)..(381): n is a, c, g, or t
  misc_feature (618)..(618): n is a, c, g, or t
  misc_feature (639)..(639): n is a, c, g, or t
gcagcgcgcccccaacactattttaataaaccattaaaaaaaacacattttcctgctggctggccacattgagagtgctttgtgaaaagaaaaaacaaagacattcacaaatcagataaaactggagaatgacatttgtctgtaaatggcttcttggtctggaaatggcgtggtttcnnnnnnnnnnnnnnnnnnnnngtcctcctcaaggtgggaggggggattgagagtgctctaaggagacttttcctccaggtgggaagagataaaaagacattaattagttgtttatcaagtgacnnnnnnnnnnnnnnnnnnnnnnnnnnnnnnnnnnnnnnnnnnnnnncctctgatnnnnnnnnnnnnnnnnnnnnnnnnnnnggttaactataaggagatggcctttcctccttttttttcttaaggtgctgttttgggggaaaaaaatgtaatgaaatgaccaaaagaattacacagcattaattaaaaatggaagttttccacttccttgataatttggctatctgaataaatttgtgaatttgctaggttaagacctagttcgtggtcacattttaacaaaacagcttgagaataaagaaaataataaaaggctgntcttaattattttcctttggnggcttttggttggctctttttgcatagggcattactttggtcttctgggtccagatttataaaagcagaaattccctaataaggcaagggctttgggggtatgctttgcaatttcagttggactgggtgctgcttgct

SEQ ID NO: 252037 - DNA, 789 bp, Homo Sapiens
  misc_feature (43)..(43): n is a, c, g, or t
tcttctcactcctatctgttcccctcagcaccccccaggccancttaacaaaccctgttcttgggtgggtgtgggtataatactaagttgagatgatatcatttacgggggaaggcgctttgtgaagtaggccttatttctcttgtcctttcgtacagggaggaatttgaagtagatagaaaccgacctggattactccggtctgaactcagatcacgtaggactttaatcgttgaacaaacgaacctttaatagcggctgcaccatcgggatgtcctgatccaacatcgaggtcgtaaaccctattgttgatatggactctagaataggattgcgctgttatccctagggtaacttgttccgttggtcaagttattggatcaattgagtatagtagttcgctttgactggtgaagtcttagcatgtactgctcggaggttaggttctgctccgaggtcgccccaaccgaaatttttaatgcaggtttggtagtttaggacctgtgggtttgttaggtactgtttgcattaataaattaaagctccatagggtcttctcgtcttgctgtgtcatgcccgcctcttcacgggcaggtcaatttcactggttaaaagtaagagacagctgaaccctcgtggagctcgtgccgaatttctgcagcccgggggaatcactaggtctagagcgggcggcaacggggtggagcttcaggtttttgttcctttaatgaggggttatttcgaggctggcgaaatcatggccataggttggttctgggtgaaaatgtt

SEQ ID NO: 252038 - DNA, 498 bp, Homo Sapiens
catcaaataatgtaattatcagttgtatataattttcctttctcgaaggtattgatctctgatgtttgctggatgtttttaggcaatatatgaaatgtcccgaggtgaacaggatttaattgaggatctcaaacttgcaagaaaggtcagtaaataactttttatcagatgccctagtttttaaaaattacatttcacaaaatctaaaggatagttttcttaacctttagaagtagaagaatagaaaatatctactggtgaatacattttttttaggtgaggtctagacacatcctcaaatacaagtattagtaagagagtttatttggggattaatacatactaatttattttatgtgtagcaaacagaatccacgctagcttttatgtaattaattctctttgtttccaagtatagatccctcatgttttcctcacatgatctctctgtgacacatttctcccctctgacaggcctaccatgaccccatgttaaag

SEQ ID NO: 252039 - DNA, 1252 bp, Homo Sapiens
acccacgcgtcgccgagggtggccgagctctgggaagaaaagcccgtgtgcctctgcatagcgtcgctacagcgctgactcggtgtggattgattggaaaggtttgagggagtaattaaaaagcatgatacaacatgatgagactggaggtctcctacctattaaaaggaccatacgagtcctagatgtcaataaccagtccttcagagaacaagaggagccaagcaataaaagagttcgacctctggctcgtgtcacgtccttggcaaatttaatctctcctgtaagaaatggagctgtcagacgttttggtcaaacaatacagtcatttacccttcgtggtgaccacagatccccagcctctgcccagaagttttctagcaggtcaacagtcccaacacccgccaagagaaggagcagtgcactgtggtcagagatgctggacatcaccatgaaggagtctctcaccaccagggagatcagacggcaggaggcaatatatgaaatgtcccgaggtgaacaggatttaattgaggatctcaaacttgcaagaaaggcctaccatgaccccatgttaaagttgtccatcatgtcagaagaggaactcacacatatatttggtgatctggactcttacatacctctgcatgaagatttgttgacaagaataggagaagcaaccaagcctgatggaacagtggagcagattggtcacattctcgtgagctggttaccgcgcttgaatgcctacagaggttactgtagtaaccagctggcagccaaagctctttctggatcaaaagaacacaggatccaagagtccaacgaattccttccagcgatgtctcgagtctcccttcagtcgagaaactagatcttgggagtttcctagatatccctcgaagtcgcctagtcaaataccctttactgttaaaagaaattcttaaacacactccaaaagagcaccctgatgttcagcttctggaggatgctatattgataatacagggagtcctctctgatatcaacttgaaaaaaagtggaatccgagtgccagtattacatccgacagctggagtacctggatgaaaagcagagggaaccccaaaatcgagccgagcaaagtgctgctggtgccatgggggagctgccggagccagaaggggacataaacctttacctttttcctggtttcaagaacatcctggggttcttggactcggccccgttccccacgggaaacgaaacggct

SEQ ID NO: 252040 - DNA, 2088 bp, Homo Sapiens
gagttagttccctaacccgagtgaagccacttccgggcttcccgggcgccttccgcagtcctcttccgggtgatggcggccgggtgccccggatgtagccctggcgcaagcatctcttcttttttccacctcgccttccgcggattcccagcttgagaaacacctctttgccccgtcatgccaaagaggaaagtgaccttccaaggcgtgggagatgaggaggatgaggatgaaatcattgtccccaagaagaagctggtggaccctgtggctgggtcagggggtcctgggagccgctttaaaggcaaacactctttggatagcgatgaggaggaggatgatgatgatggggggtccagcaaatatgacatcttggcctcagaggatgtagaaggtcaggaggcagccacactccccagcgaggggggtgttcggatcacaccctttaacctgcaggaggagatggaggaaggccactttgatgccgatggcaactacttcctgaaccgggatgctcagatccgagacagctggctggacaacattgactgggtgaagatccgggagcggccacctggccagcgccaggcctcagactcggaggaggaggacagcttgggccagacctcaatgagtgcccaagccctcttggagggacttttggagctcctattgcctagagagacagtggctggggcactgaggcgtctgggggcccgaggaggaggcaaagggagaaaggggcctgggcaacccagttcccctcagcgcctggaccggctctccgggttggccgaccagatggtggcccggggcaaccttggtgtgtaccaggaaacaaggggaacggttggctatgcgtctgaaagggtttggggtgtcagaccctaggaccccacaatcccacacccccaccctccctggacatgttcgctgaggagttggcggaggaggaactggagaccccaacccctacccagagaggagaagcagagtcgcggggagatggtctggtggatgtgatgtgggaatataagtgggagaacacgggggatgccgagctgtatgggcccttcaccagcgcccagatgcagacctgggtgagtgaaggctacttcccggacggtgtttattgccggaagctggacccccctggtggtcagttctacaactccaaacgcattgactttgacctctacacctgagccctgcctgggggcccagtttggtgggcccttctttcctggactttgtggaggaggcaccaagtgtctcaggcaccgaggaaattggaggccatttttcagtcaatttccctttcccaataaaagcctttagttgtgtactggggccttggctgtgctgatggccagaagccaggggccttctccacagtccctttggacttgtcttggtccctgagtactcccatgaagatccttcttggaggtgcctgtcaggtatcctgtggcctccctgcctggactctgcttgccgtgtaaacacccccaactgcgctgctctgtgctcctctcccaggtttcttgttcgattcctcttaggtctttggctttcaggacctcagattctttatccttgtagccaccagaggacagagccccagaagtggatgttttaggcccagaaggaccagggcatcgagaagacattgggaccctgttgggggtgagcatggaaccctcttactctcgcttcaccctctcaagctccttagatgctgggcagaagtgggatgagtggcccaagaccgagatccctaaggttctgagagccagtgtcttccctaatctggctttcctctatccttgccgtcgttcccacagcccttcagtgaagtgcaaactcagtggccaagtgtgggccaagtgtgcattgtactggcacagagaggggcagtgactcactggagatcacaggaatcaaagggctggcccagacccagtgggctcctttcccagacctttcttggcacaaagcctttgctgccctggcctttggaagccctgcggcctacattctctggaccccactatgtgcctggcacaggcctaatgcctttgagaaaaa

SEQ ID NO: 252041 - DNA, 629 bp, Homo Sapiens
  misc_feature (84)..(92): n is a, c, g, or t
tgatcggcttgaactggcaaggtatacctatggaactgctattgaagtcttcacttgagcttaggataaagtttcatttcttcnnnnnnnnnctttagcttacagtgcttgaatgaaacactcacatcatgcacaaaagaagtaggaaaggctgctttggaaaaacagatagaagaaataaatgagcaaatcagaaaagagaaagaggaagctgaggctcgtatgcgacaagcatctaagaacacagagaaatcaactggtggaggtggaaatggaagtaaaaattggtcagaagatgatctacaattactaattaaagctgtgaatctgttccctgctggaacaaattcaaggtactggttttaatgaaacttttcttcaactcacactggagcctggagataatgtatacagactccaaatagcagcacttgttatcacagaaacttgcacagataaattctgtgccacagtagaaaagtgtggcacatatacatatgacagaatacttgtgtctcacgagattgaagatcatgagacacgtcttgagttatgttggcttactctgtcatggcttgtgctaaggattagggtttctgtagcttttcttttacagacttgctctatgt

SEQ ID NO: 252042 - DNA, 2750 bp, Homo Sapiens
  misc_feature (695)..(695): n is a, c, g, or t
gagcaagaagctaaagaaaaacaaagacaagctgaattagaagctgctcggttagctaaggagaaagaagaggaggaagtcagacagcaagcattgctggcaaagaaggaaaaagatatccagaaaaaagccattaagaaggaaaggcaaaaacttcgaaactcatgcaagacctggaatcatttttctgataatgaggcagagcgggttaaaatgatggaagaagtggaaaaactttgtgatcggcttgaactggcaagcttacagtgcttgaatgaaacactcacatcatgcacaaaagaagtaggaaaggctgctttggaaaaacagatagaagaaataaatgagcaaatcagaaaagagaaagaggaagctgaggctcgtatgcgacaagcatctaagaacacagagaaatcaactggtggaggtggaaatggaagtaaaaattggtcagaagatgatctacaattactaattaaagctgtgaatctgttccctgctggaacaaattcaagatgggaagttattgctaattacatgaacatacattcttcctctggagtcaaaagaactgccaaagatgttattggcaaagcaaagagtctccaaaaacttgaccctcatcaaaaagatgacataaataaaaacgcatttgataagttcaaaaaagaacatggagtggtacctcaagcagncaacgcaacgccttcagaacgatttgaaggtccatatacagacttcaccccttggacaacagaagaacagaagcttttggaacaagctttgaaaacatacccagtaaatacacctgaaagatgggaaaaaatagcagaagcggtgcctggcaggacaaagaaggactgcatgaaacgatacaaggaacttgtcgagatggtaaaagcaaagaaagctgctcaagaacaagtgctgaatgcaagtagagccaagaaatgacaatctttgttgtgtgtgcatttttataataaaactgaaaatactgtaaacattttcattcttaaaattatactcatggtaataatttgaaagtatgctgcttccaacataatttctcagagaacaaagactgaccattaatacaaaacaaccttcagaggggtagtctttttatcctttgaaagtatgatacagtatttaattcaaatttccaaatgtatatacatgttcatttttatttttctctagctctgttttataaatacatgtgttcaaacaatcttgattaggagcattttaatcacgaagccaacacatgttactgcgtatctgtttaaaatctggtagttgcttaatgggaccaacagcagcaatagctggactcctattataaatgtatttggtacatacttctcgaattgtctcagcattcacagcatcaattcttgcttcaagctcagggatgggaatccttctattatagcataacatttgcctaccaatatcttcacaaattggagttgaaccatcaagctgcaacaacatgtttgttttcagaagatttctggctcgtgcaacctcactttctgtgacacttgtacagagtcgcatccattctttttgaacaacatgtagcatgtctgcaacagtggatgattcacaaaccatatacagtccccataatcctgtatctgtgtaggaagtgttgaaagactgaaagctatggcaaagattgccatgacaagtgagctgggccagcttgctagataaattcattcctcccccaaaagagcgatcccagttgccaatcagcgtgtgtgcaaccatgagacagattgtatctggatgtgcccaaccaacagcttcaacagctattgcaaggtgcgccaaaggcatcttgtcatccctcacacgaatctcacttcctgtgaatttgcagggaggcagagctggtatttctcctttgtgtgtgcataaagagtcaccgaaatgaaactttgctaagtcaagcaattcatcatgggaaacacctccagcagcagcaagcactattcttggccccttataatgtgtggttatataatccactaagtccttacgacttatagatttgatattttcagttggtcccaaaattgtccgtccaagtgcagtattttgataagctgtggcatgaagataatcaaaaacaacttcttgtaaattggtttcaacttcctgcatctctctaaggattactccacgctcacgttcaatctctgcttctcccaatgtgctgttttgtattatatcagcaagaatttctacagctcttggcaagtctttagagaatgctttggcatagtatacagtctgctctctggaggtataggcattgagatgagcacccatattttcaatctcaagttccagatctaactgggatctcttcttggtgcccttgaaagccatatgctccagaaagtgtgctgttccattgttcttctcattttcgtatctacttccagcatcaatccagagtccaactgtgcatgttgagagcccagagtcttccgaagctactctgagtccactttctaaacatgttactcttgtttcaggaacattcagaacaacttgggtagcagcctgtgtacttcttaatctgttctctccaaaatataatgaccgtcccgcagcgcctcggattagaagactctcgctgaaaccccagagccgccgccgcgccgcggatgacaacaccactcgagccgccgcagccgccatttctgctagaaggaaggtagaggatgaag

SEQ ID NO: 252043 - DNA, 609 bp, Homo Sapiens
actattaaaattaggatattaacattgacatagtacttctagctaattctgtccttattcaaattttgccactaataaactttgtggcaaagaaaaaaagaaactttttctggcccacatgcaatccaggatcagtttatatttttaagtcagaattcacagtacaagactctattctgccactttaaaaaaggattcttacaaagaacttatatttaagaaaacatgataatcttccatctgttatggaaaatttcttttaaaatcacttaccattcctcccccaaaagagcgatcccagttgccaatcagcgtgtttgcaaccatgagaaagattgtatctggatgtgcccaaccaacagcttcaacagctattgcaaggtgcgccaaaggcatcttgtcatccctcacacgaatctagttaagataaagcaggaggacctctagttaagattaacattatataacatgcttattaacaaggaaaaaatcaccagtcccattaactgcaaagttaaaatgcacaccaggactctattttgattttttaactatcaggcctcattacattgtactccagcctgggcaataagagcaaaactccatctc

SEQ ID NO: 252044 - DNA, 440 bp, Homo Sapiens
  misc_feature (255)..(255): n is a, c, g, or t
  misc_feature (401)..(401): n is a, c, g, or t
gattacagttcacgcatatattgcttgatttaatccaagactcctggtccttcaagatgcaactcaaaagatatactggtcaaatacacttgaggaatacagcaaattacagatggccttttcagtgatctacagtgacataaagctttgagacttcctatattaactgtttaactcagtatttcccaaacccatctaaccatttttttcctcttatgacttacaagcatcccagagaactaatgcttcatgggnacacatctggaattgtctgaatgccaatgaccccagttcacaggacaaccaggacatccccaccccacccccaaactgaggcaggtgtttccctgttttactggtctccacttggatgcggtcttctaatttcccgggggggttanccatcacttggtaatggatggtggtttttttcatggtgg

SEQ ID NO: 252045 - DNA, 1039 bp, Homo Sapiens
  misc_feature (645)..(653): n is a, c, g, or t
  misc_feature (728)..(761): n is a, c, g, or t
  misc_feature (886)..(927): n is a, c, g, or t
gcactgctggcagtgggcatcgcagggcacaggtggcagggcagggacgtgctagaagtgggcttggagcccgggtgcacccctggaccgcgtgtgggtgcagggggattgccctgccggcgctgacctcgccccgtcgccgtccccgcagccctcttcgcccgacctggaccgcatcgcggcgagcatgcgcgcgctggtgctgcgagaggccgaggacacccaggtcttcggggacctgccacggccgcggcttaacaccagcgacttccagaagctgaagcggaaatattgaagtccagggagggagcgccccgggccgcgtccgccccgtcccacactacgcccccgccccactcccggggcctgctaatctgaggccgatccgggaccggactccttgcgtctcccattcccaagattgtcccgcctcctgccaatccccgccgtccttccagcccacgacctgccgcgccgaggagcgcgatctgtcccgtttcccgattgggtatgccgtctctctccgcctagcgacacattccctccattaagggattggctcgctgagttctacgctccacatggggccactcccttggtttcccccctaccgacaagggatctgctccgtacggcattgcgctnnnnnnnnntattccctgggaccccctcctttcttggatggctccaatcccgctaacgggtttggcctaccctctcccttagtnnnnnnnnnnnnnnnnnnnnnnnnnnnnnnnnnnaccaagctgggctcccacctttcccggggggcgggggcccaataccctccttcttccccaataaatgggccccggggcccttctcattttccgccttctcccttctacaggcggaccggcgcgtnnnnnnnnnnnnnnnnnnnnnnnnnnnnnnnnnnnnnnnnnnttgtgattcctcccgcgggcatcgcggctcccaaacctgttgcgcctgctccttttgcgattccgcccctcttcttcgggttccccctcctattcccccctacgcattcccc

SEQ ID NO: 252046 - DNA, 877 bp, Homo Sapiens
  misc_feature (844)..(844): n is a, c, g, or t
tgggtggcgatttcggcacgaggggccatgggaggttcttccctggggcggtggacgggagggtgacggcgcgtttataagagatcggtgtttgccaaggccgtgccggattctcgagagccaaggcctgagagaagagctgatcactagacggggcgtttcgcatacactgaagcgagggaatgcgtcctcagtgcttaccctgtagccggctccttccatagtcgccgccgaaggccccactgccccgcctcctccttttcctagtcagcgtgttgtcacttccggagaaaacagttcccctccgggccggacagtggtagcggcccgacccgttctagagacggagcgggtgaaaccatttttcagaagggggttattccactggaacctcgagggtggatcggagtcacgtggcgcagacgctgaaggtggatccggctacggagagtgcgcaggcgcagtgttcgccctctcgccacgaagtaaacaagtgggagggtctgagagctgcaccacctggggcaagcacgccttgaaacgcccacttccttctccatattgtatactggaattgaagccaaggaggtaccattttgctcgagggcatgggctaagccggtcagctaaggccatgttaatacggggctgtccccatctctctgcggggcgcgacagctgagaaaagccgaacggataaaagaaaaggaggtgagaggagctgtacaacacaagaggcactgaggggactcaggataacgggatgaagccgtcagtgcccccagaaacgaagcggccccggacgaatttcttgagtcaccgtcgcgagaaagcgggctgagcnccatttttgaagcctgggcaaaccgaagcaaga

SEQ ID NO: 252047 - DNA, 380 bp, Homo Sapiens
  misc_feature (341)..(341): n is a, c, g, or t
  misc_feature (344)..(344): n is a, c, g, or t
cagggctcgtgggcaccgtgcctgcctctgcacccccgctcagctcccggtgcctctcccacagcatggcctccacgcccagcaggtgccggtagatgagctgggcctcaaggtcatggtcaagagggtcattccactcctgcagggtcaaccgtgaccgggtcttatcgcagccctgacctgtcttctctttttggtggcagcagctccacttgtccccacggaagacgccagggtggtaggagcccagcagtccggtgttgttgatgctcaccttccgcagcgcagacagccactggttaagctcattcacacacttgcactgcaggtaggcagtctgnggntgccggcgtcgtccgtgtagatgacctgcatgacgt

SEQ ID NO: 252048 - DNA, 622 bp, Homo Sapiens
  misc_feature (34)..(34): n is a, c, g, or t
  misc_feature (66)..(66): n is a, c, g, or t
gactagtgagacggctttgccactagtagcaatnaaaatcctgtagactattggatattaaaaatnaattaagaaaaccaacattatcctgaagtccaaagcacattcaaatcagacagtgggctaaatatggatttaacctaccctagtttctctacttgttttctttgggtgatttctaatttatgtgtgtttgggagtaaatgagttttccatggcttcttaaacacagggatcatttctttctactgactggagtatagttaattcccaataaatgtttgataatgaataactgactaactgaaataatattaattccttataactgaacaaaggaacaaatatgcttactagtccttgagaaattatgacttatatagcaggtgaagcaaatcccaatgctgagaatgagggttaggctcacggaaaaaatattcagagagctcatgtgaattttttctgttcaaatatttgttttatggatctaagccttttaaaatcatttctctcgctattaattcattgctccccacataattgtgtatcagtggaagttaaaactaagtctgttacattacacatagcagtgattaggatagaaaactcatctttctgattc

SEQ ID NO: 252049 - DNA, 854 bp, Homo Sapiens
aaaactctcaaactgctattgttattagtcctggcttatttgtttagtggtaaaatggaaaatactaatgctgaacatatcataatggtatgggaaaagagtcataaagaaaaaaatggaattttcatataaataaaaacagtaacatctcaggtggcagaaatcttcttactttacttaaaaagaattattaaaataatataaaattatattctttttaactgaaatatttctggctttacaaacagaaaaaatgaatatttgattcctaaatatacaataggcaggctgtcttggcaaaaaataggccaacaaaagaaagtacagatttcattcaaattcagattctggtgcctgctttgccaacctaaagaactacttacaatgaaagtgaaagaggctgtttattccgcaatgagttcacaagagaatggtggatatcaccaggaaaagtctcagatcttattccactcatactaccactatacaaaaatctgtagccatgggaaccacaatctctaggacagaaatgaacatttgataccaaaatttaagaatgttttggggaatagaaagactaaaggaataatgttgctggaaattaaaattcataattttgactaaaactctgtaaaatttattagtcaatttatacctgggatagagatgagagacaggagagagatatttttggttcacagaagaggaaagggcattaattggagtaatttgctgtgatgggcagtcctgattgcactattttggtaggaaattgttagcaattaacagaggatacctagcccagaggtgggtgagatgagaacaccctcaaaatgaaggttcaggaagccgtt

SEQ ID NO: 252050 - DNA, 509 bp, Homo Sapiens
  misc_feature (321)..(372): n is a, c, g, or t
  misc_feature (416)..(416): n is a, c, g, or t
  misc_feature (459)..(459): n is a, c, g, or t
tgcttaatgatgctagaatgtttcaagtaatttggttatagagcctttcttggtttgtcaggcagatacacctctggcctgattttgctaagagaattcgatgtgagagcaggacttggtactgctagcctgtgtgaggtcctttgaaatagtcatgtttggaacatgtagaggagaaagatctcacaaagaaggtgacatcgtaccagggtcatagttgttaccaactagctcatcctcagattattaagcgattattcacatttaatttaaatagtttgcaagaaaaatcaacactggaaaattaaatactttaagtgnnnnnnnnnnnnnnnnnnnnnnnnnnnnnnnnnnnnnnnnnnnnnnnnnnnnggctacttacctactactttttggaaatggaaaaaggaaaaggnaaaaaacagctattaaatatatctttggggttaccctggaaangttttaaaagtttaaaatttttaatcccctatagcctatattgtttgggt

SEQ ID NO: 252051 - DNA, 626 bp, Homo Sapiens
  misc_feature (549)..(549): n is a, c, g, or t
gtgctctttggatgaatatgatgaggtcccacatttctgaatttattggtttgaggggaaaggctggttagacgtctttgtattgtcaatggttggtttttctctggcagtgtcagtgttagagccatcatcttccttcttaaatggcatgagcaatgagcaaacttccctcctttcaacattcccacctacatcatgtgccccttggctcacctactgagcttgccaacttctctcaaaaccaatgctgcattttgggagagcagctgtgaatgggcactgcctaaattgcctcttggggtaatctggagggtggaggtgttaactcaaacataaccctatgacttgactcagagatatccattgactttgaggattagtgtgtttgctcaggccagttgtacagccagtgtgcaagagatttggtacctttgcactaatgcacacaccagtgtctatttcattgggtttggaatccactggactctgttgacctaaacagttaggggttttaattttttttgatatggcaaatttattattggagantcatttccatattcccgtcttttgggttgtctttataaagctggctggtggtgctgtgtccctaggaattaccctgc

SEQ ID NO: 252052 - DNA, 1039 bp, Homo Sapiens
  misc_feature (459)..(469): n is a, c, g, or t
  misc_feature (806)..(806): n is a, c, g, or t
  misc_feature (972)..(972): n is a, c, g, or t
ggaaggtcaatgtgtgagggtgcatagtggagactggggaccaggctgacaaagatgaattgttttaggtagtgttagcctgacatttgagttatactctgtgctgcctgagcaagatttgtagaatcatataattaccttttcatgtatatttgaaatcagaggtgtttaaaatacctatgagataccaatgtagccttaacatatgtcaaaatgcattgctggttagataattatttggactacacataaactcctaatattgaatcattacctatcaggtattatctttatggaacttttcaatatctttgctttataaagattctaaacatgtatctgagctggtaatattttaaaatctccattatttgtgtaaaactgtttataagcagtgtttgagagggtctgctttaccattaccccctcaatatcatgatcatccaatctcaaatgtgnnnnnnnnnnngaaatttgattttaggtattgtgagtaaacaagtttatatagagagacattgtgaagttaaagttttcagaagttacatttgtgcagttcttaccttttcctcatatagtgccattgaaatagactgaaattatcttggcaaaagttagacaaccaaagacgactttagtggactggttttcaaaacttgagcagctgaaaagcaaaagccgttgtttcccatgacaatgtagcctttgtgggatttgggtttgtgctttgggttgaaaagaagtttttagtcctaggccagtagatggcagcagcttttcattggcagacaaaacctccttgaaancccttcccccatgggcacaaactcgcccatgatgggaaagcatctaggatttctgcctccttttacagttaatccggggggaggggagtcctttgccaactggatgacccaacagttcccaaggccagatagtcttcgtggaacagtggaccaattacaggaaatnagggtgttatttctggtttcagttcttccaccgggcctttgtttctttttaaaaacttgaatttagg

SEQ ID NO: 252053 - DNA, 1016 bp, Homo Sapiens
  misc_feature (84)..(84): n is a, c, g, or t
  misc_feature (940)..(940): n is a, c, g, or t
  misc_feature (948)..(948): n is a, c, g, or t
  misc_feature (974)..(974): n is a, c, g, or t
  misc_feature (982)..(983): n is a, c, g, or t
  misc_feature (985)..(985): n is a, c, g, or t
  misc_feature (994)..(994): n is a, c, g, or t
  misc_feature (996)..(997): n is a, c, g, or t
  misc_feature (1015)..(1016): n is a, c, g, or t
acggccgggggacgccggccaagacagcacagacagattgacctattggggtgtttcgcgagtgtgagagggaagcgccgcggncctgtatttctagacctgcccttcgcctggttcgtggcgccttgtgaccccgggcccctgccgcctgcaagtcggaaattgcgctgtgctcctgtgctacggcctgtggctggactgcctgctgctgcccaactggctggcaagatgaagctctccctggtggccgcgatgctgctgctgctcagcgcggcgcgggccgaggaggaggacaagaaggaggacgtgggcacggtggtcggcatcgacctggggaccacctactcctgcgtcggcgtgttcaagaacggccgcgtggagatcatcgccaacgatcagggcaaccgcatcacgccgtcctatgtcgccttcactcctgaaggggaacgtctgattggcgatgccgccaagaaccagctcacctccaaccccgagaacacggtctttgacgccaagcggctcatcggccgcacgtggaatgacccgtctgtgcagcaggacatcaagttcttgccgttcaaggtggttgaaaagaaaactaaaccatacattcaagttgatattggaggtgggcaaacaaagacatttgctcctgaagaaatttctgccatggttctcactaaaatgaaagaaaccgctgaggcttatttgggaaagaaggttacccatgcagttgttactgtaccagcctattttaatgatgcccaacgccaagcaaccaaagacgctggaactattgctggcctaaatgttatgaggatcatcaacgagcctacggcagctgctattgcttatggcctggataagagggagggggagagaacatcctggtgtttgacctgggtggcggaacttcgatgtgtctctctcacattgaaanggtgtctngaagttgtggcactaatgagaaatcnctgggtgnnanacttgacangnntatggaaactcataaatnn

SEQ ID NO: 252054 - DNA, 904 bp, Homo Sapiens
  misc_feature (106)..(119): n is a, c, g, or t
  misc_feature (833)..(850): n is a, c, g, or t
cggccggccgaatcttacttttaagtgaaggcattgtgaattcacctcaagtaaacccattgttccaaagcaattataactttgactctagtactactatgatttnnnnnnnnnnnnnnccaacaaaaaccttttttcctagtttcagatacactggattctttatagagtttgtctccatatgaaagcatgctgtccagtcgctcttgttaagatcttgtctgagttttgaattgggtgccacacttttccagtcaatataattgcttgttctactgtaccatgtatgattcttgtcctttcctatatccttcatgacagattatgatgtggctttatattgtgccttacttgtacatttaaaactaaacgtcttcattcccttccacttcctacatctttaactttgacctttttggtaagagaatcagaactattacaaaagcatcatgaaggatttcagatgggtagggtttcaaattccctctctttatagttattttatattggtatgaaagaccagttttggatggtctttgaatataggggggaaagattagcagtaatttcactacatcccttttctctgactttcaggcatttttcatacattttctttttgaggcttgactttatttgcttcctagcaatagtctgcatttaaagaaaggtgtgttcaattcatcagcttgaaattgactatttcatttttccaggattttttaggagaagagtacccattttgttttataaaaacagatgccaagtttctttaaaagaaacagaagtccagtacttttgaaatccaatgctgttagtttggatttcttttnnnnnnnnnnnnnnnnnntcatccaatgatctgatgtttgccttcattaataaagctgttagtttattcccc

SEQ ID NO: 252055 - DNA, 2137 bp, Homo Sapiens
  misc_feature (1638)..(1650): n is a, c, g, or t
  misc_feature (2029)..(2076): n is a, c, g, or t
  misc_feature (2106)..(2106): n is a, c, g, or t
ttcggccggggggtttgcaggactggcgcacacagtcccctgcaggtggcagccctcttttctgtttctcgctgtcaagagggtgtaagtattccaccagcccgctgagtgtgcacgaaatgttcgcagtgcaacaaaaagaaaaatccatcaggaactctccgtccccccggggccttccggagggagagagagaggaactgctgtttatctcactcagttacttggtatcaccgcctctcaccttctccatcgtgcatgtccccagccacatgggaagtgaaagctgagaagggaaggcagatgggagaagccaatgggaacttctcagtccttttttcctctttggggaataaaataggaatccattaatgattgctttgctgactgagaatgtagttgaaattattcttaaacatcttttattattattactctcagtagtaaaatatcacactgaattcttccatacacaggtgtgcttctagtcagtgtgtagcaaggaaagccccgttcactgctcctgtgagaggttggtggtgacaggatggggaaccgacctcttcagccagtggaaatgttccataagggagagttcaaggcctgtcagaaggctctggtaggccttcctctggccaggagactccagcagggaatgcccttcactctgtaggtgctcgagccccaatcgaggatacagtgtgggtggtggtgctgggctggactagcaggtagactgctgtaggatttcaaattacgtttttgattcctgtacattttacagtcgcacagcaagcagtctcacagaaggcaggctagtccattcacagcctgacacgttctaataggtagaagctttcagtgtggttattttttctttggttggtttttgtgcccccattctacttcccaccctcctgccccatctccatcccttcttttacccaatgctgtatgctagtaattgtttttattcctaatgtgtgcaacatcacatctccccaagaagcaacagcatggggtccagcagttggggcccaaaagacagtctgaagaggaaggaagcagcagtatctgcgtagcccacagagggcccaggcccctgcccagctgcagtctcccagcctccactttcagagtgaaattcaaggcagcacggacatgtgcccatcaggcacagaagaaaacacgacgtcgtccattttggaagagacgaaagaaaggaaaataaactctttgtatgatatttattaggaggaaagaggactgaaaatgctcttgtgtagaaacagaaggacagcatttctgttagtcatttcctggaaaagtaatattttaaggggaaattatggaaacaatctaattgttcaattgctgtgctagtggtagggtttattttctgggaggtctctcctttgtgtgtctgtatgttgtgtacacacacgtgcccatctgctgtcccagaggggaggggttgtgtgtgcgagtgtatggagttagtgtggaacttaagagctggaagacagctgtagagcaaagcacatccaggagccccagttgtcactgcagtctgggcaaccccagcaatgaaaaggggtgagataacgctcattgctcttcagagagagtggttggagnnnnnnnnnnnnngtatgcttacattattgctcttttagtttgacatggtgtttgggttttgtttttttgaaaggtctgaaaaggtgaagccccctgccgccgctccaccattacccagtttgtgtgtttgaactctgcaattcaggcagctgcaacattccagtgtttgaactgtcactgattcttgcgccctagacaagctaaccaggtttaccatctcactcccagtaatacccagctcctatctaaagccccattctgcatgagaatttggtgtttggaatgttttctgactcttggggcgggattcctcgccttatcatcctcactgtggagtaatgagggggaggagaatctttatcagaaactggttttgtgtagtaaactttcnnnnnnnnnnnnnnnnnnnnnnnnnnnnnnnnnnnnnnnnnnnnnnnnctgtgaagacctgagctgttgaaaatcagntttgcctttaattaaaccatgtttctccaac

SEQ ID NO: 252056 - DNA, 2132 bp, Homo Sapiens
ggctggaccggtccggattcccgggatcgcaggcagaccatgtggaccctggtgagctgggtggccttaacagcagggctggtggctggaacgcggtgcccagatggtcagttctgccctgtggcctgctgcctggaccccggaggagccagctacagctgctgccgtccccttctggacaaatggcccacaacactgagcaggcatctgggtggcccctgccaggttgatgcccactgctctgccggccactcctgcatctttaccgtctcagggacttccagttgctgccccttcccagaggccgtggcatgcggggatggccatcactgctgcccacggggcttccactgcagtgcagacgggcggatcctgcttccaaagatcaggtaacaactccgtgggtgccatccagtgccctgacagtcagttcgaatgcccggacttctccacgtgctgtgttatggtcgatggctcctgggggtgctgccccatgccccaggcttcctgctgtgaagacagggtgcactgctgtccgcacggtgccttctgcgacctggttcacacccgctgcatcacacccacgggcacccaccccctggcaaagaagctccctgcccagaggactaacagggcagtggccttgtccagctcggtcatgtgtccggacgcacggtcccggtgccctgatggttctacctgctgtgagctgcccagtgggaagtatggctgctgcccaatgcccaacgccacctgctgctccgatcacctgcactgctgcccccaagacactgtgtgtgacctgatccagagtaagtgcctctccaaggagaacgctaccacggacctcctcactaagctgcctgcgcacacagtgggggatgtgaaatgtgacatggaggtgagctgcccagatggctatacctgctgccgtctacagtcgggggcctggggctgctgcccttttacccaggctgtgtgctgtgaggaccacatacactgctgtcccgcggggtttacgtgtgacacgcagaagggtacctgtgaacaggggccccaccaggtgccctggatggagaaggccccagctcacctcagcctgccagacccacaagccttgaagagagatgtcccctgtgataatgtcagcagctgtccctcctccgatacctgctgccaactcacgtctggggagtggggctgctgtccaatcccagaggctgtctgctgctcggaccaccagcactgctgcccccagggctacacgtgtgtagctgaggggcagtgtcagcgaggaagcgagatcgtggctggactggagaagatgcctgcccgccgggcttccttatcccaccccagagacatcggctgtgaccagcacaccagctgcccggtggggcagacctgctgcccgagcctgggtgggagctgggcctgctgccagttgccccatgctgtgtgctgcgaggatcgccagcactgctgcccggctggctacacctgcaacgtgaaggctcgatcctgcgagaaggaagtggtctctgcccagcctgccaccttcctggcccgtagccctcacgtgggtgtgaaggacgtggagtgtggggaaggacacttctgccatgataaccagacctgctgccgagacaaccgacagggctgggcctgctgtccctaccgccagggcgtctgttgtgctgatcggcgccactgctgtcctgctggcttccgctgcgcagccaggggtaccaagtgtttgcgcagggaggccccgcgctgggacgcccctttgagggacccagccttgagacagctgctgtgagggacagtactgaagactctgcagccctcgggaccccactcggagggtgccctctgctcaggcctccctagcacctccccctaaccaaattctccctggaccccattctgagctccccatcaccatgggaggtggggcctcaatctaaggccttccctgtcagaagggggttgtggcaaaagccacattacaagctgccatcccctccccgtttcagtggaccctgtggccaggtgcttttccctatccacaggggtgtttgtgtgtgtgcgcgtgtgcgtttcaataaagtttgtacactttcttaaaa

SEQ ID NO: 252057 - DNA, 1009 bp, Homo Sapiens
caggctggtactggtccggaattccgggatatcgtcgaccacgcgtcgactagttctagatcgcgctggggtctgtagtctgagcgctacccggttgctgctgcccaaggaccgcggagtcggacgcaggcagaccatgtggaccctggtgagctgggtggccttaacagcagggctggtggctggaacgcggtgcccagatggtcagttctgccctgtggcctgctgcctggaccccggaggagccagctacagctgctgccgtccccttctggacaaatggcccacaacactgagcaggcatctgggtggcccctgccaggttgatgcccactgctctgccggccactcctgcatctttaccgtctcagggacttccagttgctgccccttcccagaggccgtggcatgcggggatggccatcactgctgcccacggggcttccactgcagtgcagacgggcgatcctgcttccaaagatcaggtaacaactccgtgggtgccatccagtgccctgatagtcagttcgaatgcccggacttctccacgtgctgtgttatggtcgatggctcctgggggtgctgccccatgccccaggcttcctgctgtgaagacagggtgcactgctgtccgcacggtgccttctgcgacctggttcacacccgctgcatcacacccacgggcacccaccccctggcaaagaagctccctgcccagaggactaacagggcagtggccttgtccagctcggtcatgtgtccggacgcacggtcccggtggccctgatggttctacctgctgtgagctgcccagtggggaagtattggctgctggcccaatgcccaacgcccccttgctgctccggatcaccctgcactgcctgccccccaagaaaactggtgtggggacctgaattccagaagtaaagtgccctcctcccaagggagaaaacgctacccacgggaaccttccctcaccttaagctggcctgccgcaaacaaaggtggg

SEQ ID NO: 252058 - DNA, 865 bp, Homo Sapiens
  misc_feature (87)..(87): n is a, c, g, or t
  misc_feature (96)..(96): n is a, c, g, or t
aaattgcaacccaaggaattcccagttgttaaaaaatctgggaaaatggccatggggtctgattcccaatctgtaccctcaagcagnaccccaggnaccccacagggccgccagaccctcggcaattctccagaagccctaaccaaggcccaaaccagaggccctccttcccaggtgtggaaacaaggacagctcttcccaaaaacctttatccctaggctgcaaaagatctggaagaattacctaagcatgaacaagtacaaagtgtcctacaaggggccaggaccaggcatcaagttcagtgcagaggccctgcgctgcccactccggagaccatgtgaatgtatccatggtagaggtcacagattttcccttcaatacctctgaatgggagggttatctgcccaaggagagcattaggaccaaggctgggccttggggcaggtgtgctgttgtgtcgtcagcgggatctctgaagtcctcccaactaggcagagaaatcgatgatcatgacgcagtcctgaggtttaatggggcacccacagccaacttccaacaagatgtgggcacaaaaactaccattcgcctgatgaactctcagttggttaccacagagaagcgcttcctcaaagacagtttgtacaatgaaggaatcctaattgtatgggacccatctgtataccactcagatatcccaaagtggtaccagaatccggattataatttctttaacaactacaagacttatcgtaagctgccatcccctccccgtttcagtggaccctgtggccaggtgcttttccctatccacaggggtgtttgtgtgtgtgcgcgtgtgcgtttcaataaagtttgtacactttca

SEQ ID NO: 252059 - DNA, 1258 bp, Homo Sapiens
cggccggggcatctaaatcccagtttgaaacacacattggcacaattccatttaagtagtcagagctcgctgggtggaccagcagcattttctgctcggcattcccaagaaagcatgtcgcctactgtatttctgcctcttccatcacctcaggttcttcctggcccattgctcatcccttcagatagctccacagaactcactcagactgtgttggaaggggaatctatttcttgttttcaagttggaggagaaaagagaccctgtttgccccaagtcttaaattctgttctccgagaatttacactccagcaaataaatacagtgtgtgatgaactgtacatatattgttcaaggtgtacttcagaccagcttcatatcttaaaggtactgggcatacttccattcaatgccccatcctgtgggctgattacattaactgatgcacaaagattatgtaatgccttattgcggccacgaacttttcctcaaaatggtagcgtacttcctgctaaaagctcattggcccagttaaaggaaactggcagtgcctttgaagtggagcatgaatgcctaggcaaatgtcagggcctatttgcaccccagttttatgttcagcctgatgctccgtgtattcaatgtctggagtgttgtggaatgtttgcaccccagacgtttgtgatgcattctcacagatcacctgacaaaagaacttgccactggggctctgaatcagctaaatggcattgctatcttcatgtgaaccaaaaatacttaggaacacctgaagaaaagaacctgaagataattttaaaagaaatgaaggagaagtttagcatgagaagtgcaaagagaaatcaatccaagacagatgcaccatcaggaatggaattacagcccgggtatcctgttataaagcagggaacgtgaccatgtctctccgacacattcatttttacccccaacctactacttatacctgggggataaagtgggttgcccaaaggtgtcacttaacctctgctggatcccagtctaaagatctttacaaagacagaggcaagtcaattccaaatccaggaccggccagagaaagggttctagtagcgcgcaaaactttcaaaaaacaggggccctactccaaaaggtcctcccctgagggcaacggggaaaaaccggcattctaaatacacagttacaaaattttattgtatgcccgactatagatgccctccaactccgtcgaatatatgttctc

SEQ ID NO: 252060 - DNA, 1025 bp, Homo Sapiens
  misc_feature (693)..(693): n is a, c, g, or t
  misc_feature (957)..(973): n is a, c, g, or t
ggcctgggtggcgattctcggcacgagggctggctgcactggccctgcggcgggccccagagcccagtgccggcaccttccaggagatgcgggccctggccctggacctgggcagcccagcagccctgcgagaatggggccgctgccaggcccgctgccaagagctagagaggaggatccagcaacacctgggagaggaggcgagcccacggggctaccgacgacggcgggcagacggtgccagcagtggaggggcccagtgggggccccgcagcccctcgcccagcctcagctccttgctgctccccagcagccctgggccacggccagccccatcccattgctccctggccccatgtggagaggactatgaggaagagggccctgagctggctccagaagcagagggcaggcccccaagagctgtgctgatccgaggcctggaggtcaccagcactgaggtggtagacaggacgtgctcaccacgggaacacgtgctgctgggccgggctaggggggccagacggaccctggggagtaggcacccccccggatgggagcgcaagcgaagcatcaggtgagatcccagcccaactggtgctaagaggcggagccaacctgccccagtaggaaaaagaagatgaccattgttgggggggacttgggtcccctcccacaacctcctgcgggcanttcctaattggggcctgcaagggccccacccaccgggctggggggccggaacctgattggcctggggaaacaaaaataacgggggccccctttgaggggaggccccggggcccaccccccttgggcccggaaccttgacgcccctggaatttcgggggcaccctgggggctggcttgccccgaaagggccccgggaaaagggcttcccaactctttcccccgggaaacaccctttctttgggggggagcttttaggggcttggnnnnnnnnnnnnnnnnntaagggatttgggggggccggtgtttctcttccgccccccgggggaaacagc

SEQ ID NO: 252061 - DNA, 2023 bp, Homo Sapiens
  misc_feature (554)..(575): n is a, c, g, or t
  misc_feature (1115)..(1125): n is a, c, g, or t
aattggccccaaagtgcctttggtgtgtgttttttaaaaaaacttccttcaattgtaaccccattaacagaaaaagttccaatgtaaattggtaatggaaaaaaccagaggtgtcgtcccttcttaaccccagggaagttgcaaaatgctctgggaaacactaattttcaagtgcttccctacctaacatgtcactgaccgacccagagacctcagcccagggcctgtggctaggggccatccctggaaggcttgcggggccatctggctgccggctgagtgggggctgcagggctggtctggaccagctgctctcccgctgtgcagcctcctcctcagtccagctccacggggctccaaggtcgtgagcttggaggacgtggacggggtcactataccatttttgacccctcatttgcatgaattcccgtctaaaccatctcatggtagttctggaaatgtccaaatgtgccgtgtgaaagaccatccgagtcacatagctcagtgcacttgaagggctagcaacaaaaccttaagaaaagttagagcacttnnnnnnnnnnnnnnnnnnnnnnacaacgtgccatcagaccctcttggcagcaataataataatacatacatacatagtacatagagaatgtgaggggatagcgcgcagtgctcccgctgaatgactccactgctcggattgtcacacctatggcatatcacagatggcaaaaagccgacagagggaggccttccacagtgtccgtacaggccgtgggagcactggacaagtctgcagtgtccacaacactaagaaaaattaacagcttcgaaaagatcttaaagtgattttgtgagcaggattccatttccgtttctaagtttttagatattacaaagtacccatatatatgataaacacttaacccagatataaattttctcctcttttaaaaaactcagttatgtttttgaataataataaaaaatccaccaaatgcgggggaaaaacaccagtttaggaaaagccacgctgtgcaactttcacagataaccacatacgttggagttgacccttcacatttctttttttccaaaattagagcaaagagtcagcttaaacnnnnnnnnnnnccctgaaatttacaatatggtgattagtttaaaaaagaaacgagaagggctctgcgagggagacgccacaaaccaagcgtggaaagcaaaatcatttttgtttctctttggcaacaacaataacgaggaatctttttagtaaaatgaagctaaagcttctccctacagaagaacagacatgcaccaaacttgttagtatggacagttgtgtgtgagaaggagaaggagggagagaaacctatggataatataaattagaagtcattgaaggtggggaggaaaaaaatcctacaaaatttaagaacatttcagaacaggtaaaacaattgtgtactttaaaaatagggataataaagtgagcatctcagaaaaaggccactgcttggtgacctgggcaagtctgccaggtaagtccatcttgtaaatagtgtgctggcgttagaaatacctagttgcaaaaacagacggagagagtgaagctggtgggacggcgtcggcagaggtgctgcccaggtagaaggcctggctcaggtggcctggtccagggctctgaggaggtcccctccttgcaggagcgtggagcttcccagcacgggcacgttcacctcacagtcatatctggtcagttcgggcagcaggtaggactcaaatgagggcccgagcagccggcttgccatgcctgacaccttgtgggctgacgacaggctgtagtcctggtactgggtggcgtagcactgtggggggaacctgctcttgctgttctccccgggactgatggcagatggaggggggaacttatcattgggtacatttgcgctcagtggcttgtccggcatcaaagggcagctcccacccctgaggttcttcatccgtttccacatcaaatgtgaggtgctgc

SEQ ID NO: 252062 - DNA, 1635 bp, Homo Sapiens
aaggagcgaggcctgggtggcgaattcggcacgaggccagactgaatccctgttcaagccccacctgatggccatgaacagcatctttgatagcagtggcaagggggctgtgtctgagaagagtaacttcctattcaccaagctaaaggaggagcccgaggagctggcccagctggctcccaccccaggagacgccatcatctctctggatttcgggaatcagaacttcgaggagtcctcagcctatggcaaggccatcctgcccccgagccagccatgggccacggagttgaggagccacagcacccagagcgaggctgggagcctgcctgccttcaccgtgccccaggcagctgccccgggcagcaccacccccagtgccaccagcagcagcagcagctgctccacgcccaatagccctgaagactattacacatctttggataacgacctgaagattgaagtgattgagaagctcttcgccatggacacagaggccaaggaccaatgcagtacccagacggatttcaatgagctggacttggagacactggcaccctatatccccatggacggggaagacttccagctaagccccatctgccccgaggagcggctcttggcggagaacccacagtccaccccccagcactgcttcagtgccatgacaaacatcttccagccactggcccctgtagccccgcacagtcccttcctcctggacaagtttcagcagcagctggagagcaagaagacagagcccgagcaccggcccatgtcctccatcttctttgatgccggaagcaaagcatccctgccaccgtgctgtggccaggccagcacccctctctcttccatggggggcagatccaacacccagtggcccccagatcccccattacattttgggcccacaaagtgggccgtcggggatcagcgcacagagttcttgggagcagcgccgttggggccccctgtctctccaccccatgtctccaccttcaagacaaggtctgcaaagggttttggggctcgaggcccagacgtgctgagtccggccatggtagccctctccaacaagctgaagctgaagcgacagctggagtatgaagagcaagccttccaggacctgagcgggggggacccacctggtggcagcacctcacatttgatgtggaaacggatgaagaacctcaggggtgggagctgccctttgatgccggacaagccactgagcgcaaatgtacccaatgataagttcacccaaaaccccatgaggggcctgggccatcccctgagacatctgccgctgccacagcctccatctgccatcagtcccggggagaacagcaagagcaggttccccccacagtgctacgccacccagtaccaggactacagcctgtcgtcagcccacaaggtgtcaggcatggcaagccggctgctcgggccctcatttgagtcctacctgctgcccgaactgaccagatatgactgtgaggtgaacgtgcccgtgctgggaagctccacgctcctgcaaggaggggacctcctcagagccctggaccaggccacctgagccaggccttctaacctgggcagcacctctgcccacgccgagccctatgcagtctc

SEQ ID NO: 252063 - DNA, 829 bp, Homo Sapiens
ggtagacgggaattcatgcaaatgaggggtcaaaaatggtatagtgaccccgtccacgtcctccaagctcacgaccttggagccccgtggagctggactgaggaggaggctgcacagcgggagagcagctggtccagaccagccctgcagcccccactcagccggcagccagatggccccgcaaggcctccagggatggcccctagccacaggccctggctgaggtctctgggtcggtcagtgacatgtaggtaggaagcactgaaaatagtgttcccagagcactttgcaactccctgggtaagagggacgacacctctggtttttcaataccaattacatggaacttttctgtaatgggtacaatgaagaagtttctaaaaacacacacaaagcacattgggccaactatttagtaagcccggatagacttattgccaaaaacaaaaaatagctttcaaaagaaatttaagttcctatgagaaatcccttagtcatggtgttgccgtaaatcatattttagctgcacggcattacccccacacagggtggcagaacttgaagggttactgacgtgtaaatgctggtatttgatttcctgtgtgtgttgccctggcattaagggcattttacccttgcagttttactaaaacactgaaaaatattccaagcttcatattaaccctacctgtcaacgtaacgatttcatgaacgttattatattgtcgaattcctactgacaacattataactgtatgggagcttaactttataaggaaatgtattttgacactggtatcttattaaagtattctgatcctaaaaaaaa

SEQ ID NO: 252064 - DNA, 731 bp, Homo Sapiens
  misc_feature (523)..(549): n is a, c, g, or t
cgacggattaacccccggattaacccctagcaccaaagcatcctgaggatccccctagataaacaaacaaaacaaattatactgcccaacaggaggatatttttttcctcccgtggtctctctttaactgatgatgaaaatcttcctaattgggtcttcgaggaattatcatagcaagcagtcatcccactaaggttgtggagattatgtggttgtttcacaacacaaagggaaggttcttatgtgttagttttgttttgtttttaacaaatgcattttcagagaccagtatctagaggaactactggctaggagaaagggtggttttaggattagctgttattgaactgaaatagtaatgccagttcatttccacaaaggtataactggtatttttgtaagaaagaaaataaagttggatttgatttaatggaaagcgatttaaagtacagtactaaatatttaaatgcagtgtgacaaccagatcaaagatgtttcatattgacatgatttataaaatgtnnnnnnnnnnnnnnnnnnnnnnnnnnnattttaagcaattgtgcaaatattctgtaaaaagggtcatttcacattactaaattctagtggtccagaaatgcagaatgcattcattaaaattcatttaaacattagcaagtagtgtttagatcaccggaaatcctttttagcagtcagggatttaagtagcctattactgatccatgatc

SEQ ID NO: 252065 - DNA, 1163 bp, Homo Sapiens
gcggatggcgtctgcgcgccccgaggagctgtgggaggttatggcctaactctgagtgcgcgtgatctaggtggaagtattgatgccaacctggccctgtctggcctcatagagattccatcttaccctctctgtatctacttgattaaccaaaaatggtttggtcggaagcgaacattatcagcatttctgtgcctaggaggactggcttgtcttattgtaatgtttcttccagaaaagaaagacacaggtgtgtttgcagtggtgaacagccattccttgtccttgctggggaagctgaccatcagtgctgcctttaacattgtttatatctacacctctgagctttaccctacagtcatcacgaatgttgggcttggaacttgttccatgttctcccgagttggtgggattattgctcccttcatcccctcactgaaatatgtgcaatggtctttaccattcattgtcttcggagccacgggtctgacctccggcctcctgagtttgttattgccggagacccttaacagtccgctgctagaaacattctccgaccttcaggtgtattcgtatcgcaggctgggagaagaagcattatctttacaggctttggacccccaacagtgtgtggacaaggagagctctttagggagtgagagtgaggaaaaggaagaattttatgatgcagatgaagagactcagatgatcaagtgaagagccccagattccccctaagaagcaaaggatcgtcttttatgcctctggctaaggcaggttcttccatgactcctaagagagttgtaaaaatagaggcttggcttgaatgtacatagatggtacctggcatggactgatgtttttaggcacagaagttggagaagagatttcatgaaagacaacatcactgcattgagagaatagttgttaatttgtttagaatttaaggtctactcagaatcataacatctggcagaacagaccaaacccacattccaaagtggtaggctcatttgcttctagagatatcatcatgtcgcttttccttcatcatgatctaaataaaggcagatatgtaaaatttctcaccattttggtggggtaagataagctattattaagatttaatccttataccatgttggacatttgcccctatcagg

SEQ ID NO: 252066 - DNA, 725 bp, Homo Sapiens
  misc_feature (341)..(389): n is a, c, g, or t
tgcttgtacattaggaaatggagagtgttaatagactctttaaactgcatgtcctcattaggtaatgataaatatttcccttaatatagattgacgtatttctgctgctgttttaaaaatgattgaaatttatcttgccatatctcataatttcatgcacaagttgactgagctaatcttgagaatatattcgtaaaataggagcacatttagttgaggtatacaaggtaggactctagacaaaaccttctattttagctttagtgaatttcaaaagtaatgggtcttggagtatagatttttattagtagcttgaaagagcttaatcatatgcagtaagnnnnnnnnnnnnnnnnnnnnnnnnnnnnnnnnnnnnnnnnnnnnnnnnncctagggccaagtgtagcctgccaccaatcagtaagttagtctataacaaattttaccctaacaggttttaccacctagctaacagtcatttctgaaaatatgttggatagaaagtcactctttggcaaaagtgttagaatttgcttctgtgccatctattccttttatggcatctatcttgaacagtaatcttgtattggagatcgaaagatgctgtcaattcacgaaattaacatgatatcttaaattacctttatgcaactatcagtaccgtataaatagcatagatttgtccttcacacaaactgcaacatctatatatctacaagcatacg

SEQ ID NO: 252067 - DNA, 1259 bp, Homo Sapiens
cggccgggggaggcgggaggcgccgagagtctgtgcgaaggtccgtggacagactgctttgcctgttgttgctcttcggaggcggcgatccccgaaggcgagctgaaatacggctgcaggctacaatttgcagccgaccattatggaagacaacaagccgaagaggtggcccaccctcagggaccgcttgtgctcggatggcttcttatttccccaataccccattaaaccgtatcatctgaaggggatccacagagctgtcttctatcgtgatctggaggaactgaagttcgttctgctcacgcgttatgacatcaataagagagacaggaaggaaaggaccgccctacatttggcctgtgccactggccaaccggaaatggtacatctcctggtgtccagaagatgtgagcttaacctctgcgaccgtgaagacaggacacctctgatcaaggctgtacaactgaggcaggaggcttgtgcaactcttctgctgcaaaatggcgccgatccaaatattacggatgtctttggaaggactgctctgcactacgctgtgtataatgaagatacatccatgatagaaaaacttctttcatatggtgcaaatattgaagaatgcagcgaggatgaatatccgccactgttccttgctgtgagtcaaagaaaagtgaaaatggtggaatttttattaaagaaaaaagcaaatataaatgccgttgattatcttggcagatcagccctcatacatgctgttactcttggagaaaaagatatagtcattcttcttctgcagcacaatattgatgtgttttctcgagatgtgtatggaaagcttgcagaagattatgccagcgaggctaagaacagagtcatttttgaactaatttatgaatatgaaagaaagaaacatgaagagctttctataaatagcaatccagtgtcttctcagaaacaaccagccttgaaggctacaagtggcaaggaagattctatctcgaatatagccacagaaataaaggatggacaaaaatctgggacagtgtcttctcagaaacaaccggccttgaaggatacaagtgacaagaacgattctgtttcgaacacagccacagaaataaaagatgaacaaaaatctgggacagtgtcttctcagaaacaaccggccttgaaggatacaagtgacaagaacgattctgtttcgattaaaggcacagaaataaaagatgaacaaaaatctgggacagtgcttcctgctg

SEQ ID NO: 252068 - DNA, 618 bp, Homo Sapiens
gagagtagggaccatgctgtcccaggttcaaggataaaaaccatcaggcccaagtgccatccatagtccatctccagagtcttcctccacaaactgggattcatccccgctgaaaaagcacaatctaacagcaagggaacaaaaaaaccatgctatcacataatactatgatgaagcagagaaaacagcaagcaacagccatcatgaaggaagtccatggaaatgatgttgatggcatggacctgggcaaaaaggtcagcatccccagagacatcatgttggaagaattatcccatctcagtaaccgtggtgccaggctatttaagatgcgtcaaagaagatctgacaaatacacatttgaaaatttccagtatcaatctagagcacaaataaatcacagtattgctatgcagaatgggaaagtggatggaagtaacttggaaggtggttcgcagcaagcccccttgactcctcccaacaccccagatccacgaagccctccaaatccagacaacattgctccaggatattctggaccactgaaggaaattcctcctgaaaaattcaacaccacagctgtccctaagtactatcaatctccctggggaacaagccatt

SEQ ID NO: 252069 - DNA, 1098 bp, Homo Sapiens
  misc_feature (122)..(192): n is a, c, g, or t
gcctagatccacccactgtacttcagcctgcgtgacagagactccatctcaaaacaagaaaagtgtcagaagtggtccctgagctctaggagaggagcagggcctgggaagagcgtgaggtnnnnnnnnnnnnnnnnnnnnnnnnnnnnnnnnnnnnnnnnnnnnnnnnnnnnnnnnnnnnnnnnnnnnnnnccttggcggggaaggaatgaatgggattgtgtgaacaggtccatgaggggggctcagcacatattggttcccttctaaggagtgatgacaaatagaaaagcaggacctgaatagctcactcaaacctggaggagttcacataaaatgaaatgccacaagcattgaaataattgtcttacaagggaaaattataggtgggaaaagtcaaaactgaaaagtgaacagtggcagactgttgagaagtcgaggaaaggagtgttgaagccgactgtaaaatgggaagcaaaggtgaagagatggtaccaagtgatgtgagttggaagccgcggagggcggtgctgattttgctaaggatccagaggatgagaagcagaaagcacgtgttctgccaggacctggacggtggagtgcaagtccacgtaagactcaggaggaaaagaggctgcaaatggaaacaatcagcatcaaaggaggctcagcagagccatgagagggaaaatggggagggcaaagggaattaaagatgggcagggagagcttccagcacccgtgacgggcacgggaggagcgctcgattaaatggctcccagcagtcttgtgaaaggctcaggtctcagactgaaaactgcgacataaacctttagttctgagggaccagtttctggggctgttgaccagcagaggagaggcagataaagccagtaggtgagagatgagcttggaggaggtgactgctattgcagatagaattggtggagaggcccctgggaagaagaatccttgggtcacagacaggtattctgcgatggagatggagcatagcatttggaaagagatttcagaatgatgaacacagcctcagacttcttgcttcccacaaatgcagagacccttccaccccccacg

SEQ ID NO: 252070 - DNA, 1093 bp, Homo Sapiens
  misc_feature (903)..(937): n is a, c, g, or t
agtttttcttctaatcccccactaaattaacaggtttcaacaaacttgaaattataggggaactatggggaaaaccagagaagtatatggaagaaggaagaagtgtgaataggtcctacagaattttacaatcactttgccaagacaactataaatactatgaataattacttgaaatcaggttgtgtagaatctatagttctcttaaaaacaagttgtgattctcaatattgcatgtgtataccaaataaaaggatgtagatctaacgtattttagtagcatacttactacctgcagactaaattcatttctcaagtactctaaaaaacttcaaatagaacaaactgtatgagatgctataacttatcacaaaagaaatattagcatttataaaattaagataataaaatgtaaaagctaaaaaccaaaatttgccattcatatataaatataacatagaaaaagttatgtggataatatgaaaataaaattgtataggtgaacaattcacttgaagacactcactgtttctccttctgagtaactaaccattatagctttttattgatgaaacatcattatctcacatctgaaattctttggctggaatgttttagtaacataagacactcctgtatataacaactctgacagaacagaggagttgcaaaataaaaaaagtaggagtcatattttaaagcatttgataaatttttaaataaattttttaaaatgtaaagccaatctatcaccaaaaatggcataaatgtaaacacaagctaattttataatccactgctattttaaataaaataatttggggttcattattttgcctttttagttttgcatttagcatagaagtaccctctattgccactaaagacatcacattagttttnnnnnnnnnnnnnnnnnnnnnnnnnnnnnnnnnnnttatgagtttagatttgtgaattttagaactagagagattacagattttctgttactattgtagaagatgggagttatctgaccacagtagttaacattttagagttacatcaaagaagaagatttaaatttttcctttttgtatttttaaaaata

SEQ ID NO: 252071 - DNA, 423 bp, Homo Sapiens
  misc_feature (19)..(19): n is a, c, g, or t
  misc_feature (67)..(67): n is a, c, g, or t
  misc_feature (73)..(73): n is a, c, g, or t
  misc_feature (82)..(82): n is a, c, g, or t
  misc_feature (85)..(85): n is a, c, g, or t
  misc_feature (109)..(109): n is a, c, g, or t
  misc_feature (177)..(177): n is a, c, g, or t
  misc_feature (185)..(185): n is a, c, g, or t
cgacatgaagatgcactgnctgtggccgcctatatctccgactatgccttcttgggcactgcaactntgcctnaccagtggncanacaaggtgcacttcatggtctcantggaccattccatgtggttccacgcccccttccgagctgaccactggatgctctatgaatgcgaaganccctgggncggtggctctcgggggctggtccatgggcggctgtggcgtcaggatggagtcctagctgtgacctgtgcccaggagggcgtgatccgagtgaagccccaggtctcagagagcaagctgtagccagaggtacccagcttcgcctggggcttcaagaacctcccatctatccccattcctgagacaggagttacagtcccttttggccctcacatccaataaagagactgataccactgg

SEQ ID NO: 252072 - DNA, 913 bp, Homo Sapiens
  misc_feature (69)..(69): n is a, c, g, or t
  misc_feature (75)..(76): n is a, c, g, or t
gggacacaggggggcggggaaggaagatggcggcgcccagcgtcccgtgaggagagaggacatcagggnatcccnnggggagcggccccagactcgtaaattatggccgcatctccgcacactctctcctcacgcctcctgacaggttgcgtaggaggctctgtctggtatcttgaaagaagaactatacaggactcccctcacaagttcttacatcttctcaggaatgtcaataagcagtggattacatttcagcactttagcttcctcaaacgcatgtatgtcacacagctgaacagaagccacaaccagcaagtaaaacacaagccagaaccagtagcatctcctttccttgaaaaaacatcttcaggtcaagccaaagcagaaatatatgagatgaaacctctctcacccgcccagcctatctttgtccagaaaagccaaatgaaaaggaattgatagaactagagccagactcagtaattgaagactcaatagatgtagggaaagagaccaaagaggaaaagcggtgggaaagagatgaaagctgcaagtggtatgatttgcccaggaattttggggctcaacctatccaaaaatcaaactccccgggtacctttgggtttttccgaatataccttactttatttgaaaactctaatctttaatgaaaaccaaaaggctaatttttattttaccaccctgaaaaaagaataaatttgtgaaactggcaagaccctggtctttaaaaattttttccctcccctttcattttaaactgggggattttgaaaattaaaatttttcttgaaaattcttatttttacacccggaaattgggtaaaataggctattcgcgcctttggaaagagaaattgggaattttaaaagaataaagtccaccccccttttt

SEQ ID NO: 252073 - DNA, 584 bp, Homo Sapiens
  misc_feature (22)..(22): n is a, c, g, or t
  misc_feature (413)..(448): n is a, c, g, or t
gctgccgaaaacaagccggacncgagaggaaggacagacccagtctctgtccttatggagctaagggggagacggacattaatcaagatgccatatgaaatttcagctgggactcagtgctgtgaagagcgtttcccaaagtgtattctgcggaactagcacctactgtgttctcaacaccgtgccacctatagaagatgatcatgggaacagcaatagtagtcatgtaaaaatctttttaccgaaaaagctgcttgaatgtctgccgaaatgttcaagtttaccaaaagagaggcaccgctgggaacacttaatgagagatccatgatggcagccgtccttttggatttctttttaataatgtgtggaccctttcacctttgatcccctgacctgcattaccttggtaaccnnnnnnnnnnnnnnnnnnnnnnnnnnnnnnnnnnnnggtgtacaagctgtaacatttcatctttcaaagtgtaacacgctgatttcctcaaatagagataccccctttgagtgataaatttgcaaaatggctgccttcattttctgtattaaaattcatttcagtttcaaaa

SEQ ID NO: 252074 - DNA, 546 bp, Homo Sapiens
tcccggtcgcgaggaggaggaggatgtggcgcgcggaggggaaatggctgccgaaaacaagccggaagagcgtttcccaaagtgtattctgcggaactagcacctactgtgttctcaacaccgtgccacctatagaagatgatcatgggaacagcaatagtagtcatgtaaaaatctttttaccgaaaaagctgcttgaatgtctgccgaaatgttcaagtttaccaaaagagaggcaccgctggaacactaatgagagatcatgatgcagccgtccttttggatttctttttaataatgtgtgacccttcacctttgatcccctgacctgcattaccttggtaaccatttcattttctaattcaatttcacttcttcattttggtgtacaagctgtaacatttcatctttcaaagtgtaacacgctgatttcctcaaatagagatacccctttgagtgataaatttgcaaaatgctgtcttcattttctgtattaaaattcatttcagttttaaaataaagtgtaatctgtgttttcatccttat

SEQ ID NO: 252075 - DNA, 401 bp, Homo Sapiens
  misc_feature (21)..(21): n is a, c, g, or t
  misc_feature (235)..(270): n is a, c, g, or t
ccgtgcccaccctatagaagntgatccatgggaacagcaatagtagtcatgtaaaaatcctttttacccgaaaaagctgccttgaatgtctgccgaaatgttcaagtttaccaaaagagaggcaccgctggaacactaatgagagatcatgatgcagccgtccttttggatttctttttaataatgtgtgacccttcacctttgatcccctgacctgcattaccttggtaacccnnnnnnnnnnnnnnnnnnnnnnnnnnnnnnnnnnnnggtgtacaagctgtaacatttcatctttcaaagtgtaacacgctgatttcctcaaatagagatacccctttgagtgataaatttgcaaaatgctgtcttcattttctgtattaaaattcatttcagtttta

SEQ ID NO: 252076 - DNA, 877 bp, Homo Sapiens
  misc_feature (356)..(366): n is a, c, g, or t
ggggttcatgatgacacaggaccttgtctgaacataatgatttcaaaatttgagcttaaaaatgacactctgaaatccagtcagtgtgcctcactagacttttcgatttcaagattttctgcagaaaatgttttgaaaactttgaatacttaaaaatggcaggtgtagtattgcactttgctagttgctcagatacccttttttatttgtatagatattctgagttccttttttttctacatgttgtacgttgtcgaaagctaaaaggaaacttatccttggatcacggaaggcagaggcatttggtgagatggaaacaaggatgtgtaaaaatgagacgaccacctctcggattnnnnnnnnnnngtgccagagttctagggttctaagtgaagtccaggaatgaggaggaaatatatttatggagcatatattatggaacacagtgagtatagtacctgcctttaaatgaatactgttggctttttaggaccgatgctttttctttctgtataagtcacactgcgtgcaagaacgtcacttacggagtagcgaccacgccaaaccccgacgcgatacaaaactacacaatcaataaaccctataagaccaacccgccaatctccccccttaccgacgacgcaacaccccgttttattacacgaattattgccgcctataaaaccaagctatgccccatagatagcccgtgcagtgcgacccgggaaggagatcgtaaatcacaatttccacaagcccaccataggccagatggtcaataatcgcaatagtggactgcatccccacccgaccatatctccttaaccacgacattcagctctgaataactcgcgcatatatgtacccgacctatatt

SEQ ID NO: 252077 - DNA, 313 bp, Homo Sapiens
cccgcctcttctttcaaacagtgtttgaaattttagggctttctgaattttagagctgtaagtttatggttggttttctccaagatttgcctaaacatacttttccagcttactccaatcctgacttacaacaaaaatttatatttttagtgccatgtcataccactctattagctcaattctaactttatggattagagttctaaattttatagatgaaaattctaaatttatcatcagaatgccttttaagatcacgagtttgaaaacagatgggaataaaatgaaatgatatattttctgcaaatgcttt

SEQ ID NO: 252078 - DNA, 709 bp, Homo Sapiens
tgtctcacatacccaaatgcaaaggatgatacaattgaatgcacaatttccttaatcttactgctgcaaaaagaagtaaaaataaaattaatcagatttcttctaacatatattgtaaatttaaccaaaaaacaaaggcccttataaatataattttaaaagaaaattattcagaagttgtataacaaaatgctttttactaatagctaaaatgttattcttcctgctccatgagtattttacttgtttactatgctatccagaagacagtaaactttggatgtttagtaacatttccattgcatgcaaagcccccaaccccaaactttatggccaatactaaacttcaaacttgtggtcatcatctcaaggagtatagcatgaagacagaaaagggtggtagaagagaactgtattttaatgccagccctgggcaaatcatcaaactttggccagatctcagtttccactgcaataaaataaggtttcaggaatgagcatagggagtaaatgatgctcttgtcatcccctcaaactagacacctagtgagcagatatacattagcaagagtcgcatatgaggttgcaaatgaacttcatgaggtaagacattttagtaagatatacttcaaaggagaaacacccgaaagactgggctccttccattaatcaaaggaaggagaacctgtttgatggagcctccaataat

SEQ ID NO: 252079 - DNA, 887 bp, Homo Sapiens
  misc_feature (685)..(709): n is a, c, g, or t
  misc_feature (881)..(881): n is a, c, g, or t
taggatttcagggcccagcagtgttcctccatcagcatgttagacaactacacagtatgttgttagttttgaaagacattcactcaaggaaaacaccatctcaactttgcccgctcaccatgtcccttgcccccatgtagcccatttcccaggttatgctcttttctttctcagggtcctctttggtgggcagccactccccgagatgttgccatcagttttctgcagtccaaagagggtatggttaggtacgggtcttcctgcctcattcctcttcctctttgtgtaggtttcagccacaaaactgtcattcactctaggggacccctactaaagggtaacttcaggtgtgcagccctgagctccaaggctctgcaccatgccacacacttgctgtaaggctagaagtgaagaccttattaataggagcataattgcgagggagaatcatggttctgcagtctggtgtagacactgggaataacagcacagaaaaatctatgactcccaatatcttctagaataaagaattttccctctttaacacaagggccctccttgtcattgaccttagctaaaccatggcaattcataaatagaggaaacattaatgaattaaaagcattccttattttttaactaatatttgtacattttcttagtctctttccaagtctttgcctcnnnnnnnnnnnnnnnnnnnnnnnnncctttgacagatggtatcccttcctggatcattcatttcaccttggtttctaactttaggtttactttcacttgttatttgacttagcaggtgcaacaaaaacaagaaacaaatgtgcccaccccactttccgcttaactgaaaagcttaaaataaatttctgaattatgtntctgaa

SEQ ID NO: 252080 - DNA, 710 bp, Homo Sapiens
  misc_feature (510)..(510): n is a, c, g, or t
  misc_feature (677)..(677): n is a, c, g, or t
  misc_feature (694)..(694): n is a, c, g, or t
cgggtagtccattatcattgatgttcattgagttgtctcagcaatttacaaatttgaaatggaattccagaggcatctgaattatgcttatcctaacaattatgttgtatgaatcaaatgctattacagtaaaagccaaggggaccatccaaattcatttgttatactgaaacacaactgtatgtggggattgcttgaaataatgttttattatatgaagattaacatataaatatggttcaaatgtttttcatgttttagaggttatttgtactgcttcttaggtcattaaaaaataaaacattttactgatcaaggggcatttaaagcatgacagtgataaagtatgccccggctggcaaagcggacttcctgtggctaactgaggtgctcgttaaacagatcaggtggccgtggctgggtgagggagcagtcatgtactctgtgttttgcagagatgctgttaaagtgtcacaggacctccctttctacgatcatgccaaaccagtnttctgttgtcaatgcagagataggctgtagctggaagtcccccagctgaccaccaacagaacacctgacaccaaccaactgaccactgaaccagccaatttaacgaaacgactggtgatttagggcttaaaaggtcatccaagtcaatactattcctcactcccctngactctccttcctctgngtccctacaggttttt

SEQ ID NO: 252081 - DNA, 1081 bp, Homo Sapiens
  misc_feature (17)..(17): n is a, c, g, or t
  misc_feature (22)..(22): n is a, c, g, or t
  misc_feature (40)..(40): n is a, c, g, or t
  misc_feature (43)..(43): n is a, c, g, or t
  misc_feature (45)..(45): n is a, c, g, or t
  misc_feature (50)..(50): n is a, c, g, or t
  misc_feature (55)..(56): n is a, c, g, or t
  misc_feature (61)..(61): n is a, c, g, or t
  misc_feature (66)..(66): n is a, c, g, or t
  misc_feature (68)..(68): n is a, c, g, or t
  misc_feature (634)..(668): n is a, c, g, or t
  misc_feature (1032)..(1040): n is a, c, g, or t
ttctaagttttaccatntgccnacgaaactgctttgaaanaantncttcnatgcnncagtnagatntnattacaacagtgccacccaatcttcgaaaactggatccagaactccatttggatatcaaagtattgcagagtgccttagcagccatccgacatgcccgctggttcgaggaaaatgcttctcagtccacagttaaagttctcatcagactactgaaggacttgaggattcgttttcctggctttgagcccctcacaccctggatccttgacctactaggccattatgctgtgatgaacaaccccaccagacagcctttggccctaaacgttgcatacaggcgctgcttgcagattctggctgcaggactgttcctgccaggttcagtgggtatcactgacccctgtgagagtggcaactttagagtacacacagtcatgaccctagaacagcaggacatggtctgctatacagctcagactctcgtccgaatcctctcacatggtggctttaggaagatccttggccaggagggtgatgccagctatcttgcttctgaaatatctacctgggatggagtgatagtaacaccttcagaaaaggcttatgagaagccaccagagaagannnnnnnnnnnnnnnnnnnnnnnnnnnnnnnnnnnccacctcaaggagaggaagaagaaagcatggaaactcaggagtgacattcccttcactccttttcctacccaagggggaagactggagcctaagctgcctgctactgggctttacatggtgacagacatttccgtgggatagggaagatagcaggaagaaaagtaaactccatagaagtgtcattccactgggttttgatattggcttagctgccagtctcccatttgtgacctatgccatccatctataatggaggataccaacatttcttcctaatattctataatctccaactcctgaaaacccctctctcaactaatactttgctgttgaaatgttgtgaaatgttaagtgtctggaaannnnnnnnnctaagaaaaactattaaagaacttcctagtagggctcaaaa

SEQ ID NO: 252082 - DNA, 857 bp, Homo Sapiens; identical to SEQ ID NO: 164197

SEQ ID NO: 252083 - DNA, 1396 bp, Homo Sapiens
  misc_feature (1215)..(1215): n is a, c, g, or t
gggggacacgccggcaagacgcctcttcagttgtctgctactcagaggaaggggcggttggtgcggcctccattgttcgtgttttaaggcgccatgaggggtgacagaggccgtggtcgtggtgggcgctttggttccagaggaggcccaggaggagggttcaggccctttgtaccacatatcccatttgacttctatttgtgtgaaatggcctttccccgggtcaagccagcacctgatgaaacttccttcagtgaggccttgctgaagaggaatcaggacctggctcccaattctgctgaacaggcatctatcctttctctggtgacaaaaataaacaatgtgattgataatctgattgtggctccagggacatttgaagtgcaaattgaagaagttcgacaggtgggatcctataaaaaggggacaatgactacaggacacaatgtggctgacctggtggtgatactcaagattctgccaacgttggaagctgttgctgccctggggaacaaagtcgtggaaagcctaagagcacaggatccttctgaagttttaaccatgctgaccaacgaaactggctttgaaatcagttcttctgatgctacagtgaagattctcattacaacagtgccacccaatcttcgaaaactggatccagaactccatttggatatcaaagtattgcagagtgccttagcagccatccgacatgcccgctggttcgaggaaaatgcttctcagtccacagttaaagttctcatcagactactgaaggacttgaggattcgttttcctggctttgagcccctcacaccctggatccttgacctactaggccattatgctgtgatgaacaaccccaccagacagcctttggccctaaacgttgcatacaggcgctgcttgcagattctggctgcaggactgttcctgccaggttcagtgggtatcactgacccctgtgagagtggcaactttagagtacacacagtcatgaccctagaacagcaggacatggtctgctatacagctcagactctcgtccgaatcctctcacatggtggctttaggaagatccttggccaggagggtgatgccagctatcttgcttctgaaatatctacctgggatggagtgatagtaacaccttcagaaaaggcttatgagaagccaccagagaaaaaggaaggagaggaagaagaggaggatacngaagacccccctcaagaagaggaagaagaagcatggaaactcaggagtgacattcccctcactccttttcctacccaagggggaagactggaaccctagctgcctgctactggggctttacatgggggaaaaacttttccgggggataaggaaagatacccgggaaaaaaagtaaactccc

SEQ ID NO: 252084 - DNA, 1038 bp, Homo Sapiens
  misc_feature (53)..(53): n is a, c, g, or t
  misc_feature (63)..(63): n is a, c, g, or t
gtccctcctgatcctaaggtccatgaactgtatgtaactcctaaaatttgccnactcctcacnaggggtcaattgaataccccactgaaaccctggcaggaaacaatccctgccagcccagaaatctgccaagccagcgccctgtaatgccaacgtttaaggcccaaaggctgtctggtggggttgttcatcacagccataatggcctagtaggtcaaggatcccagggtgtgaggggctcaaagccaggaaaacgaatcctcaagtccttcagtagtctgatgagaactttaactgtggactgagaagcattttcctcgaaccagcgggcatgtcggatggctgctaaggcactctgcaatactttgatatccaaatggagttctggatccagttttcgaagattgggtggcactgttgtaatgagaatcttcactgtagcatcagaagaactgatttcaaagccagtttcgttggtcagcatggttaaaacttcagaaggatcctgtgctcttaggctttccacgactttgttccccagggcagcaacagcttccaacgttggcagaatcttgagtatcaccaccaggtcagccacattgtgtcctgtagtcattgtcccctttttataggatcccacctgtcgaacttcttcaatttgcacttcaaatgtccctggagccacaatcagattatcaatcacattgtttatttttgtcaccagagaaaggatagatgcctgttcagcagaattgggagccaggtcctgattcctcttcagcaaggcctcactgaaggaagtttcatcaggtgctggcttgacccggggaaaggccatttcacacaaatagaagtcaaatgggatatgtggtacaaagggcctgaaccctcctcctgggcctcctctggaaccaaagcgcccaccaccgaccacggcctctgtcactccctcatggccgccttaaaacacgaacaatggagccgcaccaaccgccccgacgcgtggtcgacgatatcccgtaattccgggccgtacca

SEQ ID NO: 252085 - DNA, 817 bp, Homo Sapiens; identical to SEQ ID NO: 173672

SEQ ID NO: 252086 - DNA, 778 bp, Homo Sapiens
  misc_feature (224)..(224): n is a, c, g, or t
  misc_feature (688)..(688): n is a, c, g, or t
gggggcgcagcgcgcggcgtcagtcttggctggcagacctgtactccgtactccgtacttcgtagtcgcagcggcgcggtcttcggcagtctagtcatccaccgccatcctgggccccacgtgttgcctgaccattcctgagcccaggtgggagccgtggctgaggtgacggtctcaaagtggaagagcttactgtcacagcaactcctttgcaagatgccccnggtaaatcacgttgcagagaccccaactctgccttcctggaactaggcctgcgttttctctgaaccattatttcatggagaaaatgaaatctacttcatgtgcctggtctacttactccttcagaagtgatttctgagccgccaggaatagttgctgaacaccccaggcctgctgaggtccctccttgagtctcatgttcaagcagtctttgtccatgaaactgggaggcgaccgtgttagctgccagttcctgacagccacctctcaccagtggcttcactctgtgtccctgacccagcacatggcacaagagtgcctgccctccgtcagtgtttccacagcagcaatcccaagatgctggagctagaggggacctgacctgagagaagatcccttcagtggctgccaggctgttccttggaacctgtgcagggatgaggcctgcctgtgttactacccctanttgaggagtggaactgaattttgaatgcaagcccttggcccccttaattgagcaagttttgaaacctcccctggttgcccttctgggaag

SEQ ID NO: 252087 - DNA, 534 bp, Homo Sapiens
tggagactggtctgagccggactggacacaggctgggctgccggattcactttcaccgagttacaggaagccacactctcgttgtctgatgagatgcccttctcattgtctgtttggttgaccagacctggtagagagctgcctagggctgttttggaaggctccctcagtttgggcactggcaggcctgcggacttgctgctaatgttggaatctatgctgctggtgctagacctgttcccagccccgttccggctgttggacttactgggcctcggcaaactccggtactgaaggtttgtccgggagcttagggctagatacccgtcatcctgattctgagccccatccatacttgacttccgaccagcagaccgactgacgagtgcagatgactttgggattttgcccagtgtggctgacctgctggtgacagtcaccccgctggctgtgatcatggccaggccggcggcggaaccactctgcttcatgaacccaaagctgttggcattggcagtaggtgtcctagagctg

SEQ ID NO: 252088 - DNA, 563 bp, Homo Sapiens
gatccaaataaacactacttaatgtatgaacatgaacgagtgcccattgcagtctgcgagaaggaacccagctccatcattgcttttgctctcagttgtaaagaataccgaaatgccttagaggaattgtctaaagcgactcagtggaacagtgcccaagaaagggcttccaacaaatagtacttcagatagcagaccaaagagtagcagccctatcagattacctgaaatgagtggaggacagacaaatcgtacaacagaaacagaaccacaaccaaccaaaaaggcttctggaatgttgtccttcttcagagggacagcagggaaaagccccgatctctcttcccagaagagagagaccttacgtggagcagatagtgcttactaccaggttgggcagacaggcaaggaggggaccgagaatcaaggcgttgagcctcaagatgaagtagatggaggagatacgcaaaagaagcaactcataaatcctcatgtggaacttcaattttcagatgctaatgccaagttttactgtcggctctactatgcgggagagtttcata

SEQ ID NO: 252089 - DNA, 667 bp, Homo Sapiens
  misc_feature (640)..(640): n is a, c, g, or t
ggagccgagcggtagctggtctggcgaggttttatacacctgaaagaagagaatgtcaagacgaagtagccgtttacaagctaagcagcagccccagcccagccagacggaatccccccaagaagcccagataatccaggccaagaagaggaaaactacccaggatgtcaaaaaaagaagagaggaggtcaccaagaaacatcagtatgaaattaggaattgttggccacctgtattatctggggggatcaggtccttgcattatcattgaaacacctcacaaagaaataggaacaagtgatttctccagatttacaaattacagatttaaaaatctttttattaatccttcacctttgcctgatttaagctggggatgttcaaaagaagtctggctaaacatgttaaaaaaggagagcagatatgttcatgacaaacattttgaagttctgcattctgacttggaaccacagatgaggtccatacttctagactggcttttagaggtatgtgaagtatacacacttcatagggaaacattttatcttgcacaagacttttttgatagatttatgttgacacacaaggatataaataaaaatatgcttcaactcattggaaattacctcattattcattngcttccaaacttgaggaaatctatgct

SEQ ID NO: 252090 - DNA, 551 bp, Homo Sapiens
  misc_feature (322)..(351): n is a, c, g, or t
tcacccgcctcagcctcccaaaatgctgctagtgagccaccgtgccctgcctcttttgtttatttttgagcctttctgtcctactttccactctttcacactcctacccacccacacattcaaaatcacgtcacattcttgaatctttgggtcttagggcaaactgcaatgcttaactttaatacagagtacattaatggagaaaaagatacagtgagggaagtgggagggatggagggcagtgtgatacatgtaacctcaaaaggtgctgtcacaaatatagtttctctgcaaactcttcttgtaacttaaatttgtgaannnnnnnnnnnnnnnnnnnnnnnnnnnnnnaaaatccaatgtttggatttacctctgaagatttttctcaagatgtgcatcatcatgcttacactgttttcaatgatctctgggtccagaagttaaggaactccaagaatgaaattgtgaaagggtgactactggcccctgctatgtactcaaaatcttatttgcagatctcctatcttgctctttgtaggttacttaaa

SEQ ID NO: 252091 - DNA, 175 bp, Homo Sapiens
  misc_feature (1)..(1): n is a, c, g, or t
nttgtttgacttgtatttgtgaagtttcaatgagattgataattgtcgattttatgttaatccctaatacatggcctgctgtcaacacccaggacacccaggatatggtctttgctgtttgattttcctcatccccagtctcaaggggaagccaggacaatgagaacagccactt

SEQ ID NO: 252092 - DNA, 728 bp, Homo Sapiens
ggccgggggagatccgtgatatggcggggaggaggaggaaaaggcggcggcggaccgagctgcgctctgtcagtaccatttgagccattcgcttcctgacaaggcccgtggcgaggggagaggagctgaaggggccgtgggggatcagtgcctgctgtgtgctgatactgttctgtgtaatggggattcagtgaacaagactgaaaaggtacctgtacttatggcgcttacattttggtggaggaagacagacaaaaatcaaggaaataaacacgataatttcagatagtgtgtgactgtgggaagatggaggagtatgagaagttctgtgaaaaaagtcttgccagaatacaagaagcatcactatccacagagagctttctccctgctcagtctgaaagtatctcacttattcgctttcatggagtggctatcctttctccactgcttaacattgagaaaagaaaggaaatgcaacaagaaaagcagaaagcacttgatgtagaagcaagaaagcaggttaacaggaagaaagctttactgactcgtgtccaggagattcttgacaatgttcaggttagaaaagcacctaatgccagtgattttgatcagtgggagatggaaacagtttactctaattcagaagtcagaaacttgaatgttcctgctacatttccaaatagcttccaagccatacggaacactctactgcagcaaagcttgataaa

SEQ ID NO: 252093 - DNA, 584 bp, Homo Sapiens
cttaatatttaaataggggcgcacgcccaataagcaaggaggaacaaaaaggcaacaaaataatccgcccattctcccatcctcagctaggaaatgggagggtgaggtgaatgccaaaactgctatgaatattatgatcatcttttctttctttgaactcagtggtctcaaatgtcaatgtgtgtaagaaatagtatacagggttggagacacttctggttctagtaacgtgatagactgagtgaacactgaagttgtcaattctgaatatctgaaatactggattaaatataaccaagaaccaaaaaaaggttaaaccatggctgggctcacacccaaaaaaaggtgaatccacaaagaagaggaaacagaaagaggactgtaagctgagtggcaggggatgggagcatgtctggggcctggcactgggctttcagggctagggtcttgggtgttaatgcccaggtgaggcacagtggtgagtctgtataaggcctttacaaaccttctataggaaaaaacaaacagatttgatttcagatagtagtaagagtgatgaagacgacccagggggatggagtgat

SEQ ID NO: 252094 - DNA, 508 bp, Homo Sapiens
acaggtgtgacccactgtgcccggctgaaaattaaatctttatgactaattggatttttgggtaagggattcacaacttgatagatgcttcttgacttagagtggggctatgtcataagtcaaatgagttcaattctcagataaactcatcctaaagttgaaaaatagtaagttgggccacctgtaataggggaccatctgtaattgggagaatgctagtgacattgaaataattagtgatcagttagacataaatatgtaccttgtgaaaatttcccatacaaaatttgagtcattattgaaaatacattttcaaattcttttgattcatcaataagtttgtttgcaaaagttaatgacagtggcatagaattgagtttgtagaccaaattacatggcatagatatgtatttagacgaatatgacctgaaaatggcccttttctgacctaatggtgggaatcaactcttgtttgatgtttcttaaaagattctactttattaattct

SEQ ID NO: 252095 - DNA, 976 bp, Homo Sapiens
tacccaggaactgaccctgctctctcctttccctgttagacatgggcactccacagaaggatgttattatcaagtcagatgcaccggacactttgttattggagaaacatgcagattatatcgcatcctatggctcaaagaaagatgattatgaatactgtatgtctgagtatttgagaatgagtggcatctattggggtctgacagtaatggatctcatgggacaacttcatcgcatgaatagagaagagattctggcatttattaagtcttgccaacatgaatgtggtggaataagtgctagtatcggacatgatcctcatcttttatacactcttagtgctgtccagattcttacgctgtatgacagtattaatgttattgacgtaaataaagttgtggaatatgttaaaggtctacagaaagaagatggttcttttgctggagatatttggggagaaattgacacaagattctctttttgtgcggtggcaactttggctttgttggggaagcttgatgctattaatgtggaaaaggcaatcgaatttgttttatcctgtatgaactttgacggtggatttggttgcagaccaggttctgaatcccatgctgggcagatctattgttgcacaggatttctggctattacaagtcagttgcatcaagtaaattctgatttacttggctggtggctttgtgaacgacaattaccctcaggcgggctcaatggaaggccggagaagttaccagatgtatgctactcatgggtgggtcctgggcttccctaaagataattgggaagacttcattggaattgatagagagaaactgcgtaatttccattttagcatgtccaagatgaaggaaacgggggggatttgcagacaggccaggggagatatgggtgggatcccttttcataccctattttgggaattgctgggattgttcactttttgggagaagaaccagt

SEQ ID NO: 252096 - DNA, 636 bp, Homo Sapiens
  misc_feature (488)..(489): n is a, c, g, or t
  misc_feature (505)..(505): n is a, c, g, or t
  misc_feature (515)..(515): n is a, c, g, or t
  misc_feature (519)..(519): n is a, c, g, or t
  misc_feature (521)..(521): n is a, c, g, or t
  misc_feature (529)..(529): n is a, c, g, or t
  misc_feature (547)..(547): n is a, c, g, or t
  misc_feature (550)..(550): n is a, c, g, or t
  misc_feature (555)..(555): n is a, c, g, or t
  misc_feature (557)..(557): n is a, c, g, or t
  misc_feature (559)..(559): n is a, c, g, or t
  misc_feature (595)..(595): n is a, c, g, or t
gccaaagttgccaccgcacaaaaagagaatcttgtgtcaatttctccctactttataaaagtagatttttcacatcccatgaagcagctggtctctctggcctgcactgtgttcatcccttatcttttagactggccccctctgttccagtgctcctgtatatgctgatataactaccacagtgcatgctggaagttccagcagaccattaactccagttagaccagctgcttagtgggaccccaaatatctccagcaaaagaaccatcttctttctgtagacctttaacatattccacaactttatttacgtcaataacattaatactgtcatacagcgtaagaatctggacagcactaagagtgtataaaagatgaggatcacgtccgatactagcacttattccaccacattcatgttggcaagacttaataaatgccagaatctcttcactattcatgcgatgaagttgtcccatgagatccannactgtcagaccccaanagatgccacncatncncaaatacncagacatacagtattcanaancatcntncnttgagccataggatgcgatataatctgcatgtttcnccaataacaaagtgtccggtgcatctgacttgataataaca

SEQ ID NO: 252097 - DNA, 957 bp, Homo Sapiens
cttgatgctattaatgtggaaaaggcaatcgaatttgttttatcctgtatgaactttgacggtggatttggttgcagaccaggttctgaatcccatgctgggcagatctattgttgcacaggatttctggctattacaagtcagttgcatcaagtaaattctgatttacttggctggtggctttgtgaacgacaattaccctcaggcgggctcaatggaaggccggagaagttaccagatgtatgctactcatggtgggtcctggcttccctaaagataattggaagacttcattggattgatagagagaaactgcgtaatttcattttagcatgtcaagatgaagaaacggggggatttgcagacaggccaggagatatggtggatccttttcataccttatttggaattgctggattgtcacttttgggagaagaacagattaaacctgttaatcctgtcttttgcatgcctgaagaagtgcttcagagagtgaatgttcagcctgagctagtgagctagattcattgaattgaaagttgcatagtatagttttgccattttaacatttctgtatttgaagtgcttatcgaatctaaaagtgactactgttaatattttgtatattgtgttaaattaattttaataaattatataattatacatattgtaaaataaagaccggtattttattttctgctttttattctgaagtcctgttaatctgactacagttctttgtgtatacttctgtgtctgttatgttcaataactgagctaacataaaataactctaggtttctacttgatttttcccccatgtatacctttcatctgttctatagcaagttgatgtaaattggtttgtcaacaagaatgttaactgatgaaagtggatagaacccatacatgaattaaatgatgcacaaaataaatggctgttgaaatttggaatta

SEQ ID NO: 252098 - DNA, 987 bp, Homo Sapiens
  misc_feature (44)..(44): n is a, c, g, or t
  misc_feature (57)..(79): n is a, c, g, or t
  misc_feature (836)..(836): n is a, c, g, or t
ggagcgaggcctgggtggcgaattcggcacgagggagagagaanaactagtccgagnnnnnnnnnnnnnnnnnnnnnnncacctctgatacttttaagtgaaaacatgaattaggcaaactaatcaatttgacaactgttgggatccgggctttctcactgtagtggaaatggcttctttacttgaagtctgctaagatgtcactgaaaatattgaggaacaggtgagcgtggtgatccctgaagaccagcgtgggacggaaacgaatggatttgtcaccacagccacccaacaccacacctttgtttctggcaattaaaatgagcttattccgtatggaatcatcgggagtatcgaaggagcaaaaggtgcctcgtcctctcaccctgctgatgaactgggggtaccgggcctggaggtccagcagtcctgtgagcagggccttcccggcatgggctgcattatttagcaggtcctcccgcttgatgatgttgatgacctcagccagcaacaggttcttggacgggtcccccagccaggtgttgaagatccggtagggagcattaggcctgaactcctccttgtggaagaagcccccagtcatcatcttcttgctgaaggtcatcacgtctgctgggtcatccaggccccagtgctcatgggcccagaacttgcccgtgcagcctcctccggtctggacctcgtccaccaagaaggcgcagccatgctttcctggcgatgtctctcagcttccgaaagaatcatcgaaaggcgtgggttgtctccaccctccggactggatggggctccacgatgatcccggcgttcccaacggncgggcggaaggtaaccccacggaccaaccgggaagggaccctttctcccggcctgagtggaaccccaatggtccgcagggaccaacctccctgggcagggcccccctgtggggggaccgccaccttttggtgcaaggaaccccggggccgg

SEQ ID NO: 252099 - DNA, 562 bp, Homo Sapiens
cagcaaatgaccttcccatcctcctgacagaagagctgcagtttttctccatggtctgcacaaagaactgctttcagctgcttcccagggcccaacactacctctctgagccgcctcactatgttggccagatgccgattaggccgcaggttcccaggctggaagctggtctgacacacaggacagctgctttccccttcttgacaagatcactgactccctgacatttgcagtgatgcaggcttggcagaagctgtggccacaatctaggctcagaggttctgtcaggagctccaggcagatagggcaggtcacctcttctcgtatgtccaccagtactggtgaagtcattgtagctactctcctggatcctgcctgcccaaccctgatttctaagatgtttcctgcctgtagaatcctctctgacccgcacatctggggaatgagaagccaagaagttccagatgtaagcaatatcaggtggtcaaagctcttcagagcaatccaaggcaccttaaactaatcttaaggaacagagcgcgctcacccgcgcttctatctc

SEQ ID NO: 252100 - DNA, 599 bp, Homo Sapiens
  misc_feature (556)..(556): n is a, c, g, or t
catgggtcgggggctgctcaggggcctgtggccgctgcacatcgtcctgtggacgcgtatcgccagcacgatcccaccgcacgttcagaagtcggttaataacgacatgatagtcactgacaacaacggtgcagtcaagtttccacaactgtgtaaattttgtgatgtgagattttccacctgtgacaaccagaaatcctgcatgagcaactgcagcatcacctccatctgtgagaagccacaggaagtctgtgtggctgtatggagaaagaatgacgagaacataacactagagacagtttgccatgaccccaagctcccctaccatgactttattctggaagatgctgcttctccaaagtgcattatgaaggaaaaaaacaacatcatcttctcagaagaatataacaccagcaatcctgacttgttgctagtcatatttcaagtgacaggcatcagcctcctgccaccactgggagttgccatatctgtcatcatcatcttctactgctaccgcgttaaccggcagcagaagctgagttcaacctgggaaacncgcaagaacgcgaagctcatggagttcagcgagcactgtgcca

SEQ ID NO: 252101 - DNA, 600 bp, Homo Sapiens
ggtcctcatcctggattcagagccgcttctgctcttcctggattcagagcctcttctgcagatgggcctttccacacaaagcagctgcaatctggttcgctatggagacttcccggggcttgtggccaggcgttaaaactagactacaaatatcatgtcaggacagcaaaaatcaggaagtcagaaagtggctttcatctgtacatgaacaggagtaatagtgaacacaaaatgaaattgagatgtgtaactaacccaaaagtagatactcggaaaactgttatcatacaatgcagtgttttcctcctggctgttagatgtcttcagagaatccattgtaaactgggcaaatcttgaagactacaatgcatttgaaggatgctttcattctgtaaacctaaaataactctactgatgggagactttaaacgtctcatacagagaagacagagggctagaacccaccaagttgcggatcaattcatcagtcaccttgctcgggtttacaggactcatccctcgttcctggttctacacaattcacgggcacttggaggcccctcaggagtggtgtttcatgttattcccacatggacaagc

SEQ ID NO: 252102 - DNA, 767 bp, Homo Sapiens
  misc_feature (620)..(620): n is a, c, g, or t
  misc_feature (672)..(672): n is a, c, g, or t
  misc_feature (725)..(725): n is a, c, g, or t
gaagtacttcctacaagccaatgatcagcaggacctagtggaatgggtaaatgtgttaaacaaagctataaaaattacagtaccaaagcagtcagactcacagcctaattctgataacctaagtcgccatggtgaatgtgggaaaaagcaagtgtcttacagaactgatattgttggtggcgtacccatcattactcccactcagaaagaagaagtaaatgaatgtgggtgaaagtattgacagaaataatctgaaacggtcacaaagccatcttccttactttactcctaaaccacctcaagatagtgcggttatcaaagctgggatattgtgtaaaacaaggagcagtggtgagtagcttaacaaaatacatgaaataatgaaaaaggattacgttctagcaaactcaaattgacatggaaattgtttgctttattttatgaaagacccaaagtgagagaccggcatgctgaggagagtcaggagataaaataggggatattctctgtttataattcaatgctgttatttgcttggtttgcagggggccaggaaagttaatgcccattaccactgactttcagtttaaatgagctttcctaacagtttaatgttttanaaagtgtttctattcatctttactcatactcaggagtgggtcagggaaaganagctgttgtggggagatggcaggccagcggcaggagaaggagtggtgcctagnaggtctcttccttgtttaggcattggcctgacctccgtggta

SEQ ID NO: 252103 - DNA, 683 bp, Homo Sapiens
ggatactgacacaaatagacttgcatagctggtaagatacttctgtttatggtccaaaagagaccttaatccaaaggaatgatattaggtgattaacacaaaatacacaaacccaataagtactgtgttataaggcacgtttgtaaacgtgttaatagtcttaaaagtaagaaacagtaacattttagatggcaacagcacaatatcctctgaccattgcatctcaaatgttgactattacttttaagttcttagtagcaaaacagagcttgaacggcattcatgtgacagagcattaggcaaacgtgacacgggagcaaatgtcacatgcacagcacattgtgaggcagccctgcccaactacaccaacacggagaatctcaaaacgcacctgttctcagatgcaaccaaaatgtatttactttgaatttacttcaaagtcaacagagcagtcaaatcaacactccaaagccaccatcccatagcaaaaataactcttctttattaacagtgttttccacaaccaaaaacaagtcaggtttttaaaaacttggccaattgcatgttggtgtaatctaatattatgcaatttgtaggaagcagtaaggcttaaatgaaattcctcatttcttactgttacccagtggaaacaagtgtgtgtttaagagcatctcccttttttt

SEQ ID NO: 252104 - DNA, 603 bp, Homo Sapiens
  misc_feature (465)..(505): n is a, c, g, or t
ggcttgagagcaggaatgatgctggaaaggaacgagtgaagttcctggtcacagagagcagagactattcccttcaccccctgaccttcagttatggagaggagtgtttaggggtgtggttgtctacctggaatgggatgagaagctctgctgcccaaagtgtttcctgtttcagggaaagatttctatggctggctatgaggaatggggactgcaaacctcttaagagttgtaggaaagtcagggcagcagacagtggaccagtcttgtgtttacccctcagggatgctactgatctcaaggtcttgccaggtctcacaatctccattgggactgaaaacccagtggaggtaagataataaaaataaccactttgaatctgctccttcattctcttggttgaattgatgctgaaacacaggatggacaagttctcagtgaaggaattcttctggcaattaaacnnnnnnnnnnnnnnnnnnnnnnnnnnnnnnnnnnnnnnnnnctagagtcagggccttgctctgccactccggctagagtacagaggcatagctgctaagttgacttttaataaaaaactgtttgtgcctgagggaaata

SEQ ID NO: 252105 - DNA, 1939 bp, Homo Sapiens
cggccgggggaggtgcagatcacagaggagaagccactgttgccaggacagacgcctgaggcggccaaggaggctgagattagtctgcccgaatcctcctggtaccaggcgtacagactcactctgtggagacaccatacggctctgtcactttcactgtctatggcacccccaaacccaaacgcccagcgatccttacctaccacgatgtgggactcaactataaatcttgcttccagccactgtttcagttcgaggacatgcaggaaatcattcagaactttgtgcgggttcatgtggatgcccctggaatggaagagggagcccctgtgttccctttgggatatcagtacccatctctggaccagcttgcagacatgatcccttgcgtcctgcagtacctaaatttctctacaataattggagttggtgttggagctggagcctacatcctggcgagatatgctcttaaccacccggacactgttgaaggtcttgtcctcatcaacattgatcccaatgccaagggttggatggattgggcagcccacaagctaacaggcctcacctcttccattccggagatgatccttggacatcttttcagccaggaagagctctctggaaattctgagttgatacaaaagtacagaaatatcattacacatgcacccaacctggataacattgaattgtactggaacagctacaacaaccgccgagacctgaactttgagcgtggaggtgatatcaccctcaggtgtcctgtgatgctggtggtaggagaccaagcacctcatgaagatgcagtggtggaatgtaactcaaaactggaccccacccagacctcgttcctcaagatggctgactccggaggtcagccccagctgactcagccaggcaagctgaccgaggccttcaagtacttcctgcaaggcatgggctacatggcctcatcctgcatgactcgcctgtcccggtctcgtacagcctctctgaccagtgcagcatccgttgatggcaaccggtcccgctctcgcaccctgtcccagagcagcgagtctggaactctttcttcggggcccccggggcacaccatggaggtctcctgttgaatggcccttgttgccctagagtgggacccagccctcacctcccccagagctaacctgggaggtgctgaaggggcattgggccaccgtaagcaagggaaaaagggcagatcatgcggggagatgaccttgatctttgattgctaccctaaccttgacctttaacccgtgattccccccagctcctggaagagatgtcctaatatctcttagggacccagacccctaaattctcctcctcccccattttgatgttaaggtggagagggcatatgcatcctctgtcctgatctaggtgtctatagctgaggggtaagaggttgttgtagttgtcctggtgcctccatcagactctccctacttgtcccatatttgcaaggggaggggatttggggctggggctccattcaccaaagctgaggtggcttctcattaaccctttaggactctgaagggtatggacctacgtgaatgtgtgtcagggggagacttgctggtgggttagtggtcctcaggatgtgatagaaacatccagtgtaaaaaggaagttggaatgggagttggcgggcagtgaacgagtgtggggaaggattggtgctggggcaacaggaagggcctggggccgtttggctgcactaactttggtagctcagtgtgcatctagagtgggactggggagggagctaagcttgggctgggctgcttggggcttggcatagggtggaaagggctaccctggggctctgaccacactgtagtatgtgtggagggtgccctcccgtctcccacaacttctgctataacaataaactgtagaggaatctgaa

SEQ ID NO: 252106 - DNA, 450 bp, Homo Sapiens
  misc_feature (15)..(15): n is a, c, g, or t
  misc_feature (48)..(48): n is a, c, g, or t
  misc_feature (126)..(126): n is a, c, g, or t
  misc_feature (183)..(183): n is a, c, g, or t
cctggggcctcccantcccccaaacctcaggtggccttcctcaattanacccctttaggacctctgaagggtaatggacccctacgtgaatgtgtgtccagggggaaacttgcctggtgggttaantggtccctcaggatgtgatagaaacatcccagtgtaaaaaggaagttggaatggganttggcgggcaatgaacgaatgtggggaaggattggtgctggggcaacaggaagggcctggggccgtttggctgcactaactttggtagctcagtgtgcatctagagtgggactggggagggagctaagcttgggctgggctgcttggggcttggcatagggtggaaagggctaccctggggctctgaccacactgtagtatgtgtggagggtgccctcccgtctcccacaacttctgctataacaataaactgtagaggaatctgaa

SEQ ID NO: 252107 - DNA, 937 bp, Homo Sapiens
  misc_feature (45)..(45): n is a, c, g, or t
gtacaagcactgatctaaaattaagccaccaattcctgagtttgntgttcagttcatagaaagagactcatacaactaaaagcataataagaggactattagattagatgcatgcttttagtgtataaagaacagtcatgaataactctgctctttcttaagaaatagtttttgactctttgggtaagaacccataacatttgctctaaaaagaaattttaaaaataaagaacacaactacctatttagtcttagaagatacccatacaaataaaatattatttggaccaaatgaaaacaacatacacgtggataagaccaaagtcctaagaggtgggtcaccagtacaaaatgttaacaaggtttactgatgaaatgatttttgtgataagccaatcaatttgtatgtaattaactaatttaaaccataaaaaagatcaaattgtacaatatttacagaatatcatatatcaatgaataggcagagtgtaacagaatgtgaatacaaaaattatattgacaaatataaaatataaccaaaaacccatttgttctaatatcatgaaaatactgggtataggtagatcttatttaagcttttatcaatttaaaacatcatttcacatgtacatagtggaatacagcattattttgccaagaaaacatgggaaagtggttcttcacagaaacctaaggatacttaagatagctatattggttagggaaaaaagcaggctctttttatcattttgattctcataatttaccaatcaatgtatttatttaccaatcttgtatttatcatggcataaacgattataattttactatttcacagcctcctcctactgaaaggcaaatgtggtcagggcaattattctctctgaccttcattttcattaaaaaaacatttcaaaatctatgctttcaggattct

SEQ ID NO: 252108 - DNA, 572 bp, Homo Sapiens
cttcgaaaaagttatttgaacttgtatatacaaagtccaacagtattaagaaaaaaatttatttaattatcatttatataagtccaaaaatgataaaatatattatttgaggggaaaaggcttccacgaaatagaaatacagtagactaaataaactagattgaatataaaatagtttccttgaaaacatccataaaaagtaaagaccaaatggcacaaagttaaaaaagtaatgcttaaggcaaaccaaataagtaaccttaactgaagtaagagacatactaacccacaagcaataaagtaaccccctctcaaaaatttctgtattaaaatgtgtagagaatatgagtggaagcagaaacaatggctgttgtcagagcttattcttggaagtactgaacagtattatacaaaaataacttgaatacttctgatttaaaatatacttgaatcatttgccccttagctgtcatatagcaagtgaaaaaataaaagtgtattaccccaatgttcatagtataaatctgggaaatgccaaaagttatgtctaaaattgacaaaggtcccggccg

SEQ ID NO: 252109 - DNA, 647 bp, Homo Sapiens
ttactgtagaataatttcagtcctgtcccttatgattctgaatccaattatataaaggaaaataacttttcatgtgaatgtaaaatgtttacacacataagtaagacagtttacaagacaaactggtctacacagacaaaggcctatattaaagttcaatctggaccctagaattcttgtcatgggcctcttgtgaagagtctgccctactcaggaatgggcacatgggttaacaattttcacttatttactgagggagtggagtatagatgtagggaggtgaaattaccattcctgggaataaatgtaggattttaatggaatgatagaatttattgtacaatcacattggtgagtcttattcaggtattaggcttaactatttagataactaattcatacatcagaagtaaaggatttttttgtgggaaaaacattagtacatgtacataatttcttgtctttagtaagctgcaagtgagtgaaaactatgtactaattatttatcaaatcaggaaaaaaaatcagaaacgaagtgccagggaagcatataaagttaaggcaccattatttacaacatcagtgattggcacttattctgaaaaaggctttaaagacatgaataaaaagcagtattacgtttttcc

SEQ ID NO: 252110 - DNA, 863 bp, Homo Sapiens
cggccggggaattctattctaattatgttgttctggctgcttgtagtatcagttcgcccctcttgttagggagatatgtaacaatctgtcatttaattgagcagtctttttcacataacagtaatagcaaaaatcctacctactcagaatcatcttcttaggttgtctcctaaatctgaacaatacagttgttttataaaattacattttgtctcttgagatttaatcaattagaactctttagggagaaaataaataatagaagaaaatatatgcctcatatttcatatgtaattatctgttgatataatttttcaatgtattttgtatttgtgggagcataatgacctgtacattcaatatttttactggtaattcaatttttaaatatgtttttacaatgcttgaacacataaaccttagaaaactggaaaatacgtgtccacagaaagagttattagctactaccttatgtaaagatgcatagaaaatgaaattgttggaaacatgtgcacaaagtgttttatattatatacattgtatttatgaagaataaataaaatattaagattgttttcctgctagccaagagaagaaatccttgggaaatatctaaggagtatatggggctttataagcactgtttctaaaagatattctctggtacttttgcaaaaagtcgactgtgactgtgtagcattatgttctgtagaatttttttcaagtagcataatttatttcattggtgtgaaaacagccaaaggttccaatatcctcacaaatcatttatgccaaacatctgaaggcaaaatttagccggtgttatttactagattctcccctttgaactcccagactccaga

SEQ ID NO: 252111 - DNA, 844 bp, Homo Sapiens
acggccggggtctctggccggctgggcgcgggcgactgctggcgaggcgcgtgggaccttacgctggctccccttcgtctcctctcccggcccgggccactagagagttcgctgacgccgggtgagctgagcctgccgccaagatgccagcctattttcagaggccggaaaatgccctcaaacgcgccaacgaatttcttgaggttggcaaaaagcagcctgctctggatgttctttatgatgttatgaaaagtaaaaaacatagaacatggcaaaagatacacgaaccaattatgttgaaatacttggaactttgcgtggatcttcgcaagagccacttggcaaaggaggggttataccagtataagaacatttgtcaacaggtgaacataaaatctctggaggatgttgttagggcatatttgaaaatggcagaggaaaaaactgaagctgctaaagaagaatctcagcagatggtcttagatatagaggatctagataatattcaaactcctgagagtgttctcctaagtgctgtaagtggtgaagacactcaggatcgtactgacagattacttttaactccatgggttaaattcctgtgggagtcttacaggcagtgtttggacctttcttagaaacaattctagagtagagcgcctgtaccatgatattgcccagcaagctttcaaattctgcctccaatacacgccgtaaggcttgaatcccgtaaactgtgtgacaattttgagaatgcacttatcgcagattcaccgccaccattaaccaaagtacggcaattcaatcttaataatccagagagcccggccctgcattttggaaa

SEQ ID NO: 252112 - DNA, 1690 bp, Homo Sapiens
cggccggggtctgagcagtgtgggcatgggctgagggagcagcctagaactcttccagaacatcggacctctcttcatcaacaagcctctcatagttgtagccaacaaatgtgatgtgaagagaatagctgaactttctgaagatgatcagaaaatatttacagatttgcagtctgaaggattccctgtaatagagaccagcaccctgactgaggaaggtgttattaaagttaaaacagaggcttgcgataggcttttggctcatcgagtggaaaccaaaatgaagggaaataaagtgaatgaggtgctgaatagactgcacctggctatcccaaccaggagggacgataaggagaggccccctttcatccctgaaggagtggtggctcgcaggaagaggatggaaactgaggagtccaggaagaagagggaacgagatcttgagctggaaatgggagatgattatattttggatcttcagaagtactgggatttaatgaatttgtctgaaaaacatgataagataccagaaatctgggaaggccataatatagctgattatattgatccagccatcatgaagaaattggaagaattagaaaaagaagaagagctgagaacagctgctggagagtatgacagtgtatctgagagtgaagacgaagagatgctggaaatccgacagctggcaaagcaaattcgagagaaaaagaagttgaaaattctggagtccaaagaaaagaatacacagggacccaggatgccgcgaactgctaagaaggttcagaggacagttttggagaaggagatgcgtagtcttggtgttgacatggacgataaagacgatgcccattacgcagtccaggcaagaagatcccggagcatcactaggaaaagaaagcgggaagactctgctcccccgtcctctgtggccccggagtgggagttgctctcgaactccacgtgacgtttctggtcttagggatgtcaagatggtgaagaaagccaagactatgatgaagaatgctcagaagaagatgaatcggttggggaagaaaggggaggcggatagacacgtgtttgatatgaagcccaagcacttgctgtctggggaagaggaaagctggtaaaaaggacaggagatagtatccgtttggtctggcgtggcttcgctagagtgttgctgtttatttcctggtttggcacagtatggtttcatgaaattggagctctgtataaactgaaaaagacaaaataagtaaagcacttgttgctttgctgaaaactatggttaaccctatataggtgtgggaaatttttgtcactgcataatattacaaatattttgagtagacagtgtttccacatttaatggagtatcagttgcttcagattttcagaactgggaagatttactggtgtaactgggttgtttttgatggagaaaaaccttattttcttttgtaagagctgggagcaaacacgtttatgagtgtgtcggaatcccgtgcttaaaatacgctcttaaattattttctagtcttattttacaatgtctcattgtagtctgtcttcaactattttatccaaaataaacctccagaagaaagtagttttcatttacttagctcatgttttggtttagttatagtcgctatggatttggccaaataaaaaggcaaacaacatg

SEQ ID NO: 252113 - DNA, 475 bp, Homo Sapiens
  misc_feature (348)..(348): n is a, c, g, or t
  misc_feature (373)..(373): n is a, c, g, or t
  misc_feature (378)..(378): n is a, c, g, or t
  misc_feature (389)..(389): n is a, c, g, or t
  misc_feature (394)..(394): n is a, c, g, or t
  misc_feature (399)..(399): n is a, c, g, or t
  misc_feature (426)..(426): n is a, c, g, or t
aaacatgataagataccagaaatctgggaaggccataatatagctgattatattgatccagccatcatgaaggtttgtgtcactttttaaattgcggattgttttcctttttattatagtagtattgctggaagatagcagcatggcttcggctcagctgggcctgtccgcttcattctcctgcatccctccatcctgactctgccccctacaccaccttccccaccccgagactctggtggagatgctgggcctcttcattctcctgcacccctccatcctgactgtggcctcctgcaccaccttcccccccaccctgtgtcctccgccaggcccctggggatgggnttctggctggtgcttggggcccttncattnttcctggcatnccctnccatncctggactgtggccttcctggcacctntttcccccccaccccgaggaatttgggtgggagatggctggggcccttt

SEQ ID NO: 252114 - DNA, 568 bp, Homo Sapiens
atttgtagatctagttcgttcttcaattctggaaaattttttcaagtagatcctttattgtttcagctccacttgctctgtcctcagtttcaggtattcctattatgcatagattgtatctcctggaccggccctctagatctctctttttctcctcttaatttcttttccccttttctccgtattctgtgacaatttgtcgttttgcacttacttcagtaattcgattttgtggccaatccagcgtgcgcccttctgttaactctctcaacttcctggtattttccaagcgctctaatagtaccctctttatcatcgcgcataggtgtttaagcccctgtattatatgattctcaatccttcttatatcttgtttccatctctatatccgtttcaagaggaggcattttctcgattatttagcgctgctccttttttctcaggggcggtattacgaccttttcagttgcttttcttagaaacagggaccaaaatcaaagattaaagaggtcctctgaagcagggaatgaaatagacgttgaaaactattcccgttacgccatctctc

SEQ ID NO: 252115 - DNA, 789 bp, Homo Sapiens
  misc_feature (601)..(606): n is a, c, g, or t
  misc_feature (608)..(608): n is a, c, g, or t
  misc_feature (610)..(611): n is a, c, g, or t
  misc_feature (614)..(616): n is a, c, g, or t
  misc_feature (619)..(619): n is a, c, g, or t
  misc_feature (627)..(627): n is a, c, g, or t
ggggacgtgaggcgcgcagagatggcgtaacgggaatagttttcaacgtctatttcattccctgcttcagaggacctctttaatctttgattttggtccctgtttctaagaaaagcaactgaaaaggtcgtaataccgcccctgagaaaaaaggagcagcgctaaataatcgagaaaatgcctcctcttgaaacggatatagagatggaaacaagatataagaaggattgagaatcatataatacaggagcttaaacacctatgcgcgatgataaagagggtactattagagcgcttggaaaataccaggaagttgagagagttaacagaagggcgcacgctggattggccacaaaatcgaattactgaaggccactactgattaggacacttatggagaacgtgggtagcactgaagcagcattctagtttccagtgccatcaacctcatacgtatctacctggtctctgatcgaagctaccgtaatgtgttcttgaggtcaacatgttttgtggaagtcactgtatttgccccctttatgtcaattacctattataaaccgagagaaatggggaaaattaaaaacctgttttggaaccnnnnnnanannaannnaanaataaaantaaaacttgtcgggccgccctcgggccctccaagaagcttttctagaacccttcgttttgggcgcgcggggcccaggtaggtaagtggaacatggtccttagcctgttttccttaaggaaaatcccgggccatgaactaagtggcttgggatttcccaccca

SEQ ID NO: 252116 - DNA, 494 bp, Homo Sapiens
  misc_feature (401)..(401): n is a, c, g, or t
  misc_feature (420)..(420): n is a, c, g, or t
  misc_feature (438)..(438): n is a, c, g, or t
  misc_feature (453)..(453): n is a, c, g, or t
  misc_feature (468)..(468): n is a, c, g, or t
caaaacattttctattataagtcagaaggaaaaaagcttactgtatgtgacagtcttcctgaaacctaagagaaagttttaaccaggccctatggcaatgcagaaacactaatacattttacagtgaaaacctactttaacacatctcaaaatgataatcgtataaaactttctagttctaatttgcactctacgcgaaccaatatttttcttttcttaacacatactgctcttctataccaaacacttgcccttttaaccttcaggataaaaaccttcaaatacccaaaaaatggcaacaaggcttttgagggtgttggggggattgttggggttggtttaaaatcccctttttatttttattaattaaatttattacaggggcaatccttggctttttntattttcccccctgggggnttggcttctgggtacccnggctagggttggccnggagggctggggggnacttgggggctttctccctctggacc

SEQ ID NO: 252117 - DNA, 989 bp, Homo Sapiens
gtacaactgaaggcagaaagtgttaggattttgcatctaatgttcattatcatggtattgatggacctaagaaaataaaaattagactaagcccccaaataagctgcatgcatttgtaacatgattagtagatttgaatatatagatgtagtattttgggtatctaggtgttttatcattatgtaaaggaattaaagtaaaggactttgtagttgtttttattaaatatgcatatagtagagtgcaaaaatatagcaaaaataaaaactaaaggtagaaaagcattttagatatgccttaatttagaaactgtgccaggtggccctcggaatagatgccaggcagagaccagtgcctgggtggtgcctcctcttgtctgccctcatgaagaagcttccctcacgtgatgtagtgccctcgtaggtgtcatgtggagtagtgggaacaggcagtactgttgagaggagagcagtgtgagagtttttctgtagaagcagaactgtcagcttgtgccttgaggcttccagaacgtgtcagatggagaagtccaagtttccatgcttcaggcaacttagctgtgtacagaagcaatccagtgtggtaataaaaagcaaggattgcctgtataatttattataaaataaaagggattttaacaaccaacaattcccaacacctcaaaagcttgttgcattttttggtatttgaggtttttatctgaaggttaaagggcaagtgtttggtatagaagagcagtatgtgttaagaaaagaaaaatattggttcgcgtagagtgcaaattagaactagaaagttttatacgattatcattttgagatgtgttaaagtaggttttcactgtaaaatgtattagtgtttctgcattgccatagggcctggttaaaactttctcttaggtttcaggaagactgtcacatacagtaagcttttttccttctgacttataatagaaaatgttttatttgtaa

SEQ ID NO: 252118 - DNA, 783 bp, Homo Sapiens
  misc_feature (751)..(751): n is a, c, g, or t
ttcggccggggagtgcagggaatgtgggaaattctttatggacagctccacactcattaaacatcagagaggtcacaccggagaaagaccttataagtgcaatgattgtgggaaattttttaggtatatctccacactcattagacatcagagaattcacactggagaaaggccttatgagtgcagtgtatgtggggaattgtttaggtacaactccagccttgttaaacattggagaaatcacactggagaaaggccttataaatgcagtgaatgtgggaaatcatttaggtaccactgcaggctcattagacaccagagagtccacacgggagaaaggccttatgagtgcagcgaatgcgggaaattctttcgttacaactccaacctcattaaacattggagaaatcacactggagaaaggccttacgagtgcagagagtgtgggaaagcctttagccacaagcatatacttgttgagcaccagaaaatccacagtggagaaagaccttatgagtgcagcgaatgccagaaggcctttattagaaagtctcacctggttcatcaccagataatccacagtgaagagaggcttgtgtgctccatgaatgtggggaattctttagctaatactccaacctcattaaacatcagagatttcacaatggagaaaggttaccattgactattgtaattgggtagtaatgttatatttccacatttttatgcaactaatctcccaacatttttnctctaccaaggatttttatactcatgactttg

SEQ ID NO: 252119 - DNA, 1381 bp, Homo Sapiens
  misc_feature (296)..(296): n is a, c, g, or t
ggctgcaagcagtgcggcgggggccgcgaccaggacgaggaacttggcattagaattcctcgaccactaggacagggaccaagcagattcatcccagaaaaggagatcctccaagtggggagtgaagacgcacagatgcatgctttatttgcagattcttttgctgctttgggccgtttggataacattacgttagtgatggttttccacccacaatatttagaaagtttcttaaaaactcagcactatctactgcaaatggatgggccgttacccctacattatcgtcactacanttggaataatggctgcggcaagacatcagtgctcctacttagtgaacctgcatgtaaatgatttccttcatgttggtggggaccccaagtggctcaatggtttagagaatgctcctcaaaaactacagaatttaggagaacttaacaaagtgttagcccatagaccttggcttattaccaaagaacacattgagggacttttaaaagctgaagagcacagctggtcccttgcggaattggtacatgcagtagttttactcacacactatcattctcttgcctcattcacattcggctgtggaatcagtccagaaattcattgtgatggtggccacacattcagacctccttctgttagcaactactgcatctgtgacattacaaatggcaatcacagtgtggatgagatgccggtcaactcagcagaaaatgtttctgtaagtgattctttctttgaggttgaagccctcatggaaaagatgaggcagttacaggaatgtcgagatgaagaagaggcaagtcaggaagagatggcttcacgttttgaaatagaaaaaagagagagtatgtttgtcttctcttcagatgatgaagaagttacaccagcaagagctgtatctcgtcattttgaggatactagttatggctataaagatttctctagacatgggatgcatgttccaacatttcgtgtccaggtaaaattgcaacttgtatgcacatgattgactagaaatatctcagtctgacttaaaatacaaaacagccacttagatttgagaactatgctaagtgctttgcaggcagtatctcgtcttgtttcagaataaaaggtgaaagactgtttctaattcatccatggaatcatactgtagtttcaatgtatgtatatcttaaaaattttattgtgtaaatatttaaatatgtaagtatttaattcagatgagttgatactcccagcgttcccaaatattgttaggggccagtgttaaataataactattttaccagaattatgaaaatatttgagaaccataagattttgtttctttgctcaaaaaactaaggggcctggcacaactgtc

SEQ ID NO: 252120 - DNA, 499 bp, Homo Sapiens
cggccgggtgctaggtgaagctgtggaattgagtcctcctccaacaagggagagaaaaggatgtcttgtgacacacccagataactggtagctatagttatgcctgctaagattggggtgcatgggacctggctttcgttagctcccttggtcttactttcccaaaaaagaaacctccgaggtgatgggcaccctatttagtccaatcacctgacaagaattgcaggataattgcccagaactagaatattgatccagatttttacattctcatccccttagctgcttctgagctgcagccagagattgctggttggttcacaggaataagcagggtaagtttaaaatgtaggcaaaaacttaaaaacaacgaatgagtctaaaatataatgacaaatatataagtcttgaaacataatttctctccagttctcatttttgttaaaaataaatcatgataggactgagttgtttgcaaaataaactttagtcttgtaaa

SEQ ID NO: 252121 - DNA, 1339 bp, Homo Sapiens
  misc_feature (1273)..(1273): n is a, c, g, or t
  misc_feature (1295)..(1295): n is a, c, g, or t
  misc_feature (1298)..(1298): n is a, c, g, or t
  misc_feature (1301)..(1301): n is a, c, g, or t
gggaagcgattgcgagccagcgcgcgcgcttcggcgttcccggcggtctgcgaagtttccggagccccggtcccgccgcgggttcgcgcttgtgctcgcgctcgttcctggagtcggcggccgctgcgcgcgctcgttgcccaacccggtccccgcccccagacacgccgggctctcggggcaccacagccatgtgctcgttagcgtcaggcgctaccggcggccggggcgctgtggagaatgaggaggacctgccagaactgtcggacagcggggacgaggccgcctgggaggatgaggacgatgcagatctcccccacggcaagcagcagaccccctgcctgttctgtaacaggttattcacatctgctgaagaaacattttcacactgtaagtctgagcatcagtttaatattgacagcatggttcataaacatggacttgaattttatggatacattaagctaataaattttattagacttaagaatcctacagttgagtacatgaattccatatacaacccagtgccttgggagaaagaagagtatttgaagccagtattagaagatgaccttttacttcaatttgatgtagaagatctttatgaaccggtgtcagtacccttctcataccccaatggactcagtgaaaatacatctgttgttgaaaaattgaaacatatggaagccagggcactgtctgctgaagccgcattggccagagcacgtgaggatctgcaaaaaatgaaacaatttgctcaggattttgtgatgcacacagatgtcagaacctgctcgtcatctactagtgtcattgcggacctccaggaggatgaggatggtgtttatttcagctcatacgggcattatgggatacatgaagaaatgctaaaggacaaaatacgaacagaaagctaccgagatttcatataccaaaatccacatatcttcaaagacaaggtagttttggatgttgggtgtggaactggaattctctctatgtttgctgctaaagctggggcgaagaaggttcttggagttgatcaatctgaaatactttaccaggcaatggatattataagactaaataaacttgaagatactattacactaattaaaggaaagattgaagaagttcatcttcctgtagaaaaagtagatgttatcatatctgagtggatgggctattttcttctgtttgagtctatgttagattctgtcctttatgcaaagaaacaatacttggcaaaaaggagctcggtctaccctgnacatttgcactatcagccctgntancanttgagtgatgtgaataaacatgctggatagaatttgct

SEQ ID NO: 252122 - DNA, 715 bp, Homo Sapiens
  misc_feature (401)..(401): n is a, c, g, or t
  misc_feature (623)..(623): n is a, c, g, or t
cgagactgtgtcgatggttccgatgaagtcaactgcaaaaatgtcaatcagtgcttgggccctggaaaatcaagtgcagaagtggagaatgcatagatatcagcaaagtatgtaaccaggagcaggactgcagggactggagtgatgagcccctgaaagagtgtcatataaacgaatgcttggtaaataatggtggatgttctcatatctgcaaagacctagttataggctacgagtgtgactgtgcagctgggtttgaactgatagataggaaaacctgtggagatattgatgaatgccaaaatccaggaatctgcagtgcaaatttgtatcaacttaaaaggcggttacaagtgtgaatgtagtcgtggctatcaaatggatcttgctactggcgctgntgcaaggcagtagtgcaaagcagcgcaagtctgatcttcactaatcgaagagacatcaggaagattggcttagagaggaaagaatatatccaactagttgaacagctaagaaacactgtggctctcgatgctgacattgctgcccagaaactattctgggccgatctaagccaaaaggctatcttcagtgcctcaattgatgacaaggttggtagacatgtntaaatgatcgacaatgtctataatcctgcagccattgctgttgattgggtgtacaagaacatctactggactgatgcggcttctaagactat

SEQ ID NO: 252123 - DNA, 570 bp, Homo Sapiens
  misc_feature (534)..(534): n is a, c, g, or t
  misc_feature (545)..(545): n is a, c, g, or t
gcgggcgccgagtgtcgggcgcggcaggaggacgaggcagggcgggcgggcgctctaagggttctgctctgactccaggttgggacagcgtcttcgctgctgctggatagtcgtgttttcggggatcgaggatactcaccagaaaccgaaaatgccgaaaccaatcaatgtccgagttaccaccatggatgcagagctggagtttgcaatccagccaaatacaactggaaaacagctttttgatcaggtggtaaagactatcggcctccgggaagtgtggtactttggcctccactatgtggattaataaaggatttcctacctggctgaagctggataagaaggtgtctgcccaggaggtcaggaaggagaatcccctccagttcaagttccgggccaagttctaccctgaagatgtggctgaggagctcatccaggacatcacccagaaacttttcttcctccaagtgaaggaaggaatccttagcgatgagatctactgcccccctgagactgccgtgctccttggggtcntacgctgtganggccaagttttgggactacaacaaa

SEQ ID NO: 252124 - DNA, 921 bp, Homo Sapiens
  misc_feature (765)..(773): n is a, c, g, or t
gggtggcaattcggacgaggccaaacttaccagggaccagtgggaggaccggatccaggtgtggcatgcggaacaccgtgggatgctcaaagataatgctatgttggaatacctgaagattgctcaggacctggaaatgtatggaatcaactatttcgagataaaaaacaagaaaggaacagacctttggcttggagttgatgcccttggactgaatatttatgagaaagatgataagttaaccccaaagattggctttccttggagtgaaatcaggaacatctctttcaatgacaaaaagtttgtcattaaacccatcgacaagaaggcacctgactttgtgttttatgccccacgtctgagaatcaacaagcggatcctgcagctctgcatgggcaaccatgagttgtatatgcgccgcaggaagcctgacaccatcgaggtgcagcagatgaaggcccaggcccgggaggagaagcatcagaagcagctggagcggcaacagctgggaaacagagaagaaaacgagagaaaccggcggagagagagaaagaccagatgatgcgcgagaaggagggagtgatgctgccgctgcaggaccatgaggagaagaccaagaagggaaagaaagagctcctcgagcaaattccgagggccctgcagctggagggaaaaaaggaaccggccacagaaggagggccaaacgcctagaggcttgaccgtatgggctggcctgccgggctaaaggagggactggaaaaaccnnnnnnnnntcccaataaagaagcccggaaccccctgggctgccgggaacttgccaaaaaaccctggccaagaattggcccctccttggaaaaaaggggccggaaggcgcccggggagggattaacattttaagaagggggcgagcaccaggggccc

SEQ ID NO: 252125 - DNA, 755 bp, Homo Sapiens
gggactcggcggacgcaagggcggcggggagcacacggagcactgcaggcgccgggttgggacagcgtcttcgctgctgctggatagtcgtgttttcggggatcgaggatactcaccagaaaccgaaaatgccgaaaccaatcaatgtccgagttaccaccatggatgcagagctggagtttgcaatccagccaaatacaactggaaaacagctttttgatcaggtggtaaagactatcggcctccgggaagtgtggtactttggcctccactatgtggataataaaggatttcctacctggctgaagctggataagaaggtgtctgcccaggaggtcaggaaggagaatcccctccagttcaagttccgggccaagttctaccctgaagatgtggctgaggagctcatccaggacatcacccagaaacttttcttcctccaagtgaaggaaggaatccttagcgatgagatctactgcccccctgagactgccgtgctcttggggtcctacgctgtgcaggccaagtttggggactacaacaaagaagtgcacaagtctgggtacctcagctctgagcggctgatccctcaaagagtgatggaccagcacaaacttaccagggaccagtgggaggaccggatccaggtgtggcatgcggaacaccgtgggatgctcaaagataatgctatgttggaatacctgaagattgctcaggacctggaaatgtatggaatcaactatttcgagataaaa

SEQ ID NO: 252126 - DNA, 922 bp, Homo Sapiens
  misc_feature (823)..(853): n is a, c, g, or t
ggaaactactccatttttagtcatctccttacttagttctttacttacacaggttagctccaagatatatcatttaactactttatgtcaggaacccacaacatcctaaccactgtcaccacaccttctcttcaagatttcaacttagaatcaatccaatttgaaaatccatccccctgtatatcccctatagacccatttcccctcctctacaaatatttctttgcttgatctcccatcccaatgtgatcaatccttagaaatctcataccattttgcattgctggtatccaggatgcaaaataatctctttgcctgagccatggagatttatttctaccactcttatggcgattatttattttaccctattatttgtgaagaagcctagaatattttatatttacacggttaaatggtcacaacatttaaaaagccgtagaacagttatagttcatatattaagtttagaattaaaagaaaaggcaatgtttattagctatttcataaatcttctctgaaaagttctcaattcttctcactgaaacttgtaagcaactgagcagcttctgtctgtatctgtttatcctcctctgtgtgtgctggatagtccttggctttcattagccagaaagcagcaagctttttgttgtgtagtttcaagtatgtctttcctaaaagaagtaagtttttgctgtagaagtttggatccacttgttctgccctgtgaaagtagcctaaggccttctcatagggtgggaactagggagggagttgcaaacaggcattttaggcaattcttctttgataccaaggcatttcnnnnnnnnnnnnnnnnnnnnnnnnnnnnnnntgaattgaagtagcatctttagggtcagttcaattgctttctcaaaatgctccttgatgatatatgcat

SEQ ID NO: 252127 - DNA, 833 bp, Homo Sapiens
  misc_feature (762)..(762): n is a, c, g, or t
  misc_feature (775)..(775): n is a, c, g, or t
  misc_feature (780)..(780): n is a, c, g, or t
  misc_feature (787)..(787): n is a, c, g, or t
  misc_feature (797)..(797): n is a, c, g, or t
ggggcccgcctccttagctgcctgaagtagtgcagggtcagcccgcaagttgcaggtcatggcgctggctgctcgactgtggcgccttctgcctttccgacgtggagccgccccggggtctcgtctccctgcggggacttcgggcagccgcgggcattgcggcccctgtcgattccgcggcttcgaggtaatgggaaacccaggaactttcaaaagaggccttttactctcagctttgtcgtatttgggttttgaaacttaccaggttatctctcaggctgctgtggttcatgccacagccaaagttgaagaaatacttgaacaagcagactacctgtatgaaagcggagaaacagaaaaactttatcagttgctaacccaatacaaggaaagtgaagatgcagagttactgtggcgtttggcacgggcatcacgtgatgtagctcagcttagcagaacctcagaagaggagaaaaagctattggtgtatgaagccctagagtatgcaaaaagagcactagaaaaaaatgaatcaagttttgcatctcataagtggtatgcaatctgccttagtgatgttggagattatgaaggcatcaaggctaaaattgcaaatgcatatatcatcaaggagcattttgagaaagcaattgaactgaaccctaaagatgctacttcaattcaccttatggggtatttggtgctatacatttgccgaaatgccttggtatcaaagaagaattgctaaaaatgctgtttgcnaactccctccctnagttnccacctnttggagaagngccttaggctaactttcacaggggcaggaaccaagt

SEQ ID NO: 252128 - DNA, 646 bp, Homo Sapiens
  misc_feature (572)..(572): n is a, c, g, or t
  misc_feature (605)..(605): n is a, c, g, or t
  misc_feature (630)..(630): n is a, c, g, or t
gacacagagctgcagctcttcaggggaagaaatcaaaacaagatcacaagaatactgaaaaatgaagcctaaaatgaagtattcaaccaacaaaatttccacagcaaagtggaagaacacagcaagcaaagccttgtgtttcaagctgggaaaatcccaacagaaggccaaagaagtttgccccatgtactttatgaagctccgctctggccttatgataaaaaaggaggcctgttactttaggagagaaaccaccaaaaggccttcactgaaaacaggtagaaagcacaaaagacatctggtactcgctgcctgtcaacagcagtctactgtggagtgctttgcctttggtatatcaggggtccagaaatatactagagcacttcatgattcaagtatcacaggaatttcacctattacagagtatcttgcttctctaagcacatacaatgatcaatccattacttttgctttggaggatgaaaggtatgagatatatgttgaagacttgaaaaaagatgaaaagaaagataaggtgttactgagttactatgagtctcaacacccctcanatgaatcgggtgacggtgttgatggtaagatgnttatggtaaccctgagtcctacaanagacttctggttgcat

SEQ ID NO: 252129 - DNA, 365 bp, Homo Sapiens
gtttagagaagcaagatactctgtaataggtgaaattcctgtgatacttgaatcataaagtgctctagtatatttctggacccctaatataccaaaggcgtgctttctacctgtttctcagtgaaggccttttggtggtttctctcctaaagtaacaggcctccttttttatcataaggccagagcggagcttcataaagtacatggggcaaacttctttgcgccttctgttgggattttcccagcttgaaacacaaggctttgcttgctgtgttcttccactttgctgtggaaattttgttggttgaatacttcattataggcttcatttctcagtattcctgtgatcgtgtttatgatttctt

SEQ ID NO: 252130 - DNA, 527 bp, Homo Sapiens
ggccattacgagcccggagatatgtgtaaagcaaagtgtgaaatccaggaaaaggtgtacacaatggctcagaaaaacattcagggtttctcctgagatttttcagtttttgcaacaggtaaactggaaagaattctctaagtgtcttttcatagcacagaagattcttgcactttatgagctagagggtacaactgttctcttaaccagctgttcttctgaagccctgttagaagcagaaaagcaaatgctcagtgccttaaattataagcgcattgaagttgagaacaaagaagttcttcatggcaatgaaatggaaaaggctcactcacaatttgcttaagaaacaaaattcctccccaaacactgtaatcatcaatgagttaacttcagaaaccacagctgaagtcatcattacaggctgtgtaaaagaagtaaatgaaacctataaattgctttttaacttcgttgaacaaaacatgaaaatagagagactggttgaagtaaagccttccttagttattgac

SEQ ID NO: 252131 - DNA, 719 bp, Homo Sapiens
  misc_feature (118)..(170): n is a, c, g, or t
caaataaagcacagaacaggtcactgtggccagcagtcaggacaatggaaaccactgaccctgatgaaacttatggagctatcaggatgtgtttaaaagaaacagaggtggatttccnnnnnnnnnnnnnnnnnnnnnnnnnnnnnnnnnnnnnnnnnnnnnnnnnnnnngggatgggatgtagtggtgaataagaatctccaccatcatgaaaatatgattaataattatttacataagcataagtgtgtgaaggcccaagagggagaagcacagagtgctttggcagagagatcacaggagcctctgacccaggctgaggttcctcagacaaataagacaactgaaaccctggggatggctggagccacagatggggaaatgagagatgaggctggagggggcagtattaatgtttgtttgtgaaacaatttctcaaataccagcttattaccattaaaattatgtagtaaaaacaaataaatatttaaagacatggaacatgttcaatatataataaactaacacaaaacccccaggttattaaatagtatcatagcacagagttaagagagactaggagaagatatttataaagtttgtaacaaacaactcctgcaaattactgtatacaaagaaccactggaaaatcaatacggaaataacaagaagcagttgagaaaatggcagatgatacaaaagatatgagcatgcaattc

SEQ ID NO: 252132 - DNA, 976 bp, Homo Sapiens
gcttagtgcagttggtgagagcgggagccacactcaacgtctccaccacacggtacgcgcagacgccagcccacattgcagcctttgggggacatcctcagtgcctggtctggctgattcaagcaggagccaacattaacaaaccggattgtgagggtgaaactcccattcacaaggcagctcgctctgggagcctagaatgcatcagtgcccttgtggcgaatggggctcacgtcgactacgtaattcgaattgacttgattttttcaagtaatcctagaaagggggagcattccatatagaaactgctgaaactgccacaggcgcttctccgaaaaccttacagttgtggcattgaatgttcagtatcgcttcctttctgcacacgaggcatactgttgagcctgagaaatgccagtggcctgacagcagcagacattgcacaaacccagggtttccaagagtgtgcccagtttctcttgaacctccagaattgtcatctgaaccatttctataacaatggcatcttaaatgggggtcatcagaatgtatttcctaatcatattagtgtgggaacaaatcgaaagagatgcttggaagactcagaagaccttggaagtaaagaaagctagaactgaaggtgaagtaccctttgcgggtgggaagagcacacttatttttcctttctgtaatatgttttctttttatggctgagcgcaccttcgagatgagaccttcacttcaggtggtaatgcgccctggtggattgtgcggtgacggtggagatttctcctgtactgccactgcgaagatgggacttaacaaaagggaatgtgagggaaatactgatggcccaagtgtaaatgtctatgtggaactttttgagcacccatgtttacctgccgtgaattagattttttaatttgttgtatctgtttgaaatatatctattaaagaaaatctgccactgtgcctg

SEQ ID NO: 252133 - DNA, 630 bp, Homo Sapiens
ctgggccgcgcatttcggcaagttggagtgcttagtgcagttggtgagagcgggagccacactcaacgtctccaccacacggtacgcgcagacgccagcccacattgcagcctttgggggacatcctcagtgcctggtctggctgattcaagcaggagccaacattaacaaaccggattgtgagggtgaaactcccattcacaaggcagctcgctctgggagcctagaatgcatcagtgcccttgtggcgaatggggctcacgtcgagtaagtgtctttcgtttattctttccagctaaagatgtagttgaggatgttttgtttaaaggcagtacataagcaggcaaaagtcctaaaactttgttttcaaaattagtaatgtaattttgccttttagaacagttggtgctagtgaggaaaattgcgtggattaaattgatctctacaggagggggtctaattgcacaggcagcctcaatattcttgtccagaggagtgtatttgtactcgctgaccagcttactaattagagttcgatactcggcactatcacttttgccaccattacttgccactacctagttgtgtcactggggtctttaaaacatttctttgcctaatttcggtctc

SEQ ID NO: 252134 - DNA, 910 bp, Homo Sapiens
  misc_feature (22)..(22): n is a, c, g, or t
  misc_feature (60)..(60): n is a, c, g, or t
gcccatggtaatagaaagggtncagatgacaatctggaggttcaagagaaactgggcaanactccttggaaaccccgggtttgtgcaatgtctgctgctgtcaggccactggcatttctcaggctgtacaacacaaaaacactgaattacaccccatccgcgtgctaacctggtctctgctcctgctgaactgactagctatctgaaggtggtatgaaagagtaaacaaattcatagcaaatcttcattaaagaagtagttaatcaatctagctctgtaactaacttctcttatatacatttgatttctaagcaagatttgggagataaactaaatatgctaaacttctaaaaaaggcatcttcctatttaacttctcaaaatcatgttttatgttagtctgaagaatctaaatttacgctaacttcagacttgaaactgaattctatattatatgcacttaattttaatacccattcctttagcgtgaataaaatcataacaaacaacatgtactgagattgtccatggcattcataactgtcttcctaaaaacaaagcaatggctcaccaacgagccagccttcatgcttacatgtgacactgtaagtggaagtttagaaggatgtcctgacattaaaaagtagcctatcatcagattccagagctgaacagctgtgtttttctgtcagattttgattgttttggccttgcttgggaaaacctgcaggagtattgtatttttggcattgtagagcatttgagtagttggttcctttaaaaaggctttgaatactgtcctaaaaactcatccctaccactcacaagaaccaaagttttacctggctaatagtactaaaaaggaaaggtctgagacctctacagtagctaaaactcagattcaagtagga

SEQ ID NO: 252135 - DNA, 1324 bp, Homo Sapiens
gccgcggaagggaaggaggagctttcggatgaaaacacatccctgtaggaaaccctgcacaccgtggacctctcctcagatgatgatttgccccacgatgaggaggccctggaagacagtgccgaggaaaaggtggaagaaagtagggcagagaaaataaaaagatccagcctgaagaaagtggatagcctcaagaaagcattttctcgccagaacatcgagaaaaagatgaacaagctggggacaaagatcgtatctgtagagaggagagagaagattaagaaatctctcacgtcaaatcaccagaaaatatcctcaggaaaaagctcccccttcaaggtttctcccctcactttcgggcggaagaaagtccgagagggagaaagccatgcagaaaatgagaccaagtcagaagacctgcctagcagtgagcagatgccaaatgaccaggaagaggagtcctttgcagagggtcattccgaagcgtccctcgccagcgctctggtggaaggggaaattgcagaggaggctgctgagaaggcgacctccagggggagtaactcggggatggacagcaacatcgacttgactattgtggaagatgaagaggaggagtcagtggccctggaacaggcacagaaggtacgctatgagggtagctacgcgctaacatccgaggaggcggagcgctccgattggggaccccgtgcagcccgccgtgctccaggttgcaccagaacctcctgagcttagagccacccgtgccatccttgttgcttgggctccaagcgggcagccagggctgtgagaaacaaactctttgccatttccgccggatcacccactcctgcgttcctggcccaggcgtatccttggagcctaattagtccatagagaaaccgagaagacacggttttaccccttaaaggcgagcctggcaggggacccaactttaaaatggggcatcaaggccacacacactgtgatgtgcccccatttagagaacaatggaggccgtctggaagagcgagccccccgaggcagataccacagaaacaaaccgggggagtaagcaacacccatctactaagacaaggggctcgtgcagcccataacaacgcgagaagagcatcgcgaggaaattgtttccaccacagcgacgagtagcatattattgaggagggacgactaaagagcgaacacactaacgtaacacacacagcaacgtagatgcactaagtacacgagagcaagaaagcacgagaccctcacctaccagaagatgaatgctgctactaccgttcctactacggacagctcggac

SEQ ID NO: 252136 - DNA, 733 bp, Homo Sapiens
gcacatggaaactgttcttaaagctgctgggccctgaaattttactcagcagtttgaaatcaagacatagcttttctcattcaccctcccacttggggctaatgcacagacatgaacatctattgaggaaaaccacaaaaaacttcaaaacagctacaacgggaaaaagagagttttgtcccacagtcagcaggccactagtttattaacttccagtcaccttgatttttgctaaaatgaagactctgcagtctacacttctcctgttactgcttgtgcctctgataaagccagcaccaccaacccaggcagggactcacgcattatctatggattatgggaacagataattttggaagaatccatatttagccaagattatgaagataaatacctggatggaaaaaatattaaggaaaaagaaactgtgataatacccaatgagaaaagtcttcaattacaaaaagatgaggcaataacaccattacctcccaagaaagaaaatgatgaaatgcccacgtgtctgctgtgtgtttgcttaagtggctctgtatactgtgaagaagttgacattgatgctgtaccacccttaccaaaggaatcagcctatctttacgcacgattcaacaaaattaaaaagctgactgccaaagattttgcagacatacctaacttaagaagactcgattttacaggaaatttgatagaagatatagaagatggtactttttca

SEQ ID NO: 252137 - DNA, 1565 bp, Homo Sapiens
  misc_feature (495)..(495): n is a, c, g, or t
  misc_feature (1231)..(1232): n is a, c, g, or t
  misc_feature (1239)..(1239): n is a, c, g, or t
  misc_feature (1242)..(1244): n is a, c, g, or t
  misc_feature (1266)..(1267): n is a, c, g, or t
  misc_feature (1281)..(1335): n is a, c, g, or t
  misc_feature (1337)..(1337): n is a, c, g, or t
  misc_feature (1351)..(1352): n is a, c, g, or t
  misc_feature (1357)..(1357): n is a, c, g, or t
  misc_feature (1359)..(1359): n is a, c, g, or t
  misc_feature (1453)..(1453): n is a, c, g, or t
  misc_feature (1465)..(1465): n is a, c, g, or t
  misc_feature (1468)..(1468): n is a, c, g, or t
  misc_feature (1494)..(1494): n is a, c, g, or t
  misc_feature (1513)..(1514): n is a, c, g, or t
  misc_feature (1538)..(1538): n is a, c, g, or t
tctccagctggagctgtctgggtatagtcccgaagacctgactgctgccttggagatcttggaagccattatagccacgggttgttttgggattgacaaggaggagctgcgcagacggttctcggccttggagaaggcaggtggtgggcgcaccaggacattcgcagattgcatccaggccctcctggagcagcatcaggtgctggaggtcggtggcaacactgcgcgcctggtagccatgggctctgcctggccttggctcctgcactccgtgcggctgaaagacagagaagacgccgacatccagagagaagacccccaggccagacccctggaggggtcttccagtgaggacagcccccccgaggggcaggcacctccttctcacagcccccggggcaccaagaggcgcgccagctgggccagtgagaatggggagaccgacgccgagggcacccagatgacccctgccaagaggccagcgctccaggactncaatttggcccccagccttgggcccggagctgaagatggggcagaagcccaggccccatctccacccccagctcttgaagacaccgctgcagcgggagcagcacaggaagaccaagagggtgtcggtgagttcagttccccaggccaagagcagctgagcggccaggcgcagcctccagagggctctgaagaccccagagggttcacagagagtttcggagctgccaacatctcccaggcagcacgggaaagggactgtgagagtgtctgcttcatcggccggccgtggcgtgtcgtggatggccacctgaaccttcctgtatgcaagggtatgatggaggccatgctgtaccacatcatgaccaggcctggcatccccgagagctccctgctgcgccactaccagggggtcctgcagcccgtcgccgtgctggagttgctccagggcctggagtccctcggctgcatccggaagcgctggctgagaaagccaaggcctgtctcgctcttctctacacccgtggtggaagaggtggaagtgccctccagcctggacgagagccccatggctttctatgagcccaccttggactgtaccctccggctgggccgtgtgttcccccacgaggtcaactggaacaagtggatccacctctaggacccctgtgggcgtcccctccctcccagccaccgcctgccacaccactcctgcctggtgctcggcagaccccactgnngcccggnccnnngggccgcccggcctcccgcggnnggggccgggggccnnnnnnnnnnnnnnnnnnnnnnnnnnnnnnnnnnnnnnnnnnnnnnnnnnnnnnngngggggctcccccgnnctgcncncccccccgggcgcttttcgggcttttcccctttgggcgactggccctccttcccgcgtgggcgctccggggccttcgtgtgcttctgggcgccnccccgcggtttntgncctccgccttgggccgccgcccttcncttttcgcgcggctcctcnntccctctccccggcccgggttccntcgtgcgcctccctgcggcgcggcccc

SEQ ID NO: 252138 - DNA, 1009 bp, Homo Sapiens
gtagcgaggcctgggtggcgaattcggcacgagggtcagcacccgcaacctcaaccccaacgacagcattgtggtcaactcctgccagatgaagttccagctccgctgcacccctgtgcccgcccggctcaggcccgctgccgctcctctggaagagctaacaatgggaacctcctgcctccctgatacgttcaccaagctgataaacccccaggaaaacacctgcagcttggaggagtttgtcctccagctggagctgtctgggtatagtcccgaagacctgactgctgccttggagatcttggaagccattatagccacgggttgttttgggattgacaaggaggagctgcgcagacggttctcggccttggagaaggcaggtggtgggcgcaccaggacattcgcagattgcatccaggccctcctggagcagcatcaggtgctggaggtcggtggcaacactgcgcgcctggtagccatgggctctgcctggccttggctcctgcactccgtgcggctgaaagacagagaagacgccgacatccagagagaagacccccaggccagacccctggaggggtcttccagtgaggacagcccccccgaggggcaggcacctccttctcacagcccccggggcaccaagaggcgcgccagctgggccagtgagaatggggagaccgacgccgagggcacccagatgacccctgccaagaggccagcgctccaggactcaaatttggcccccagccttgggcccggaagctgaaaaatggggcaaaaacccaggccccatctccacccccagctcttgaagacaccgctgcagcgggagcagcacaggaagaaccagaaggggtggcgggggaattcagtttcccccggcccaagagcagctgaagcgcccaggcggaaccctccagaaggggtctgaaaaacccccaaagggttcaaagaagagtttcgggaattgccaaaattctccccagggcacacgggggaaagt

SEQ ID NO: 252139 - DNA, 1613 bp, Homo Sapiens
gggccatattgtctgtgtgagcagaggggagagcggccgccgccgctgccgcttccaccacagctctatcaaggcttgtcaaagcagtgtgctcatcacatggtaaatcatgcagcgtggaacctcataaaatctccaagaaacatcattcacccatactgactagtttcacatctctttgtttgaagaaaacaggtctgaaacaaggtcttacccccagctgcttctgaacacagtgactgccagatctccaaacatcaagtccagctttgtccgccaacctgtctgacatgtcgggacccgtgccaagcagggccagagtttacacagatgttaatacacacagacctcgagaatactgggattacgagtcacatgtggtggaatggggaaatcaagatgactaccagctggttcgaaaattaggccgaggtaaatacagtgaagtatttgaagccatcaacatcacaaataatgaaaaagttgttgttaaaattctcaagccagtaaaaaagaagaaaattaagcgtgaaataaagattttggagaatttgagaggaggtcccaacatcatcacactggcagacattgtaaaagaccctgtgtcacgaacccccgccttggtttttgaacacgtaaacaacacagacttcaagcaattgtaccagacgttaacagactatgatattcgattttacatgtatgagattctgaaggccctggattattgtcacagcatgggaattatgcacagagatgtcaagccccataatgtcatgattgatcatgagcacagaaagctacgactaatagactggggtttggctgagttttatcatcctggccaagaatataatgtccgagttgcttcccgatacttcaaaggtcctgagctacttgtagactatcagatgtacgattatagtttggatatgtggagtttgggttgtatgctggcaagtatgatctttcggaaggagccatttttccatggacatgacaattatgatcagttggtgaggatagccaaggttctggggacagaagatttatatgactatattgacaaatacaacattgaattagatccacgtttcaatgatatcttgggcagacactctcgaaagcgatgggaacgctttgtccacagtgaaaatcagcaccttgtcagccctgaggccttggatttcctggacaaactgctgcgatatgaccaccagtcacggcttactgcaagagaggcaatggagcacccctatttctacactgttgtgaaggaccaggctcgaatgggttcatctagcatgccagggggcagtacgcccgtcagcagcgccaatatgatgtcagggatttcttcagtgccaaccccttcaccccttggacctctggcaggctcaccagtgattgctgctgccaacccccttgggatgcctgttccagctgccgctggcgctcagcagtaacggccctatctgtctcctgatgcctgagcagaggtgggggagtccaccctctccttgatgcagcttgcgcctggcggggaggggtgaaacacttcagaagcaccgtgtctgaaccgttgcttgtggatttatagtagttcagtcata

SEQ ID NO: 252140 - DNA, 689 bp, Homo Sapiens
catgttcatatttccactagattagaaaacacaaaatttatttttataattttgttgcttgtagcataatcaagtgcaaaatcaagtgcaacctacttgtgactaaatctctttggatttatagctgaggatattgttagctaggttttgtcaatccctaatcattttttaaaatcaatgctgtattcccaggaggctttgagactcctatgaacctgaagcactcccttttgaaccttggaagatcctcaaagagtgagcattcttgtgctcttctaatcataattaattccttaacaaatcagagtaaggaccactgacatatagaacactcaagccaaagaaccatcacagaatttagtaactttagttctgtgaacatgaaaagatttcttttttggtttccaaaggagattatttatttttccacaaggaaaaacatcttgcagagactctgaattccaaatctgagtgagaaagaaaaggaaatctgtttcatggtggatttctaagcaacatatatacatgtttttaagacaaccttttgttggcagtgtttttcctgaacaccatatgcaccctaggcatgtttttccttttcttgttcacatatcagaaaaggacatgaaatgctcatactgggcatacaagtttctatgaagtagttattttttgagctacttgatcac

SEQ ID NO: 252141 - DNA, 928 bp, Homo Sapiens
  misc_feature (142)..(197): n is a, c, g, or t
ggctatttgaaaacacgctccgggagctaaagcctgaggtcggcggcgcacgctgttgccccgtgggcttctgctccctcgcttgtcttctcgggcttctcgccccggccgcggccgggtcctcagtagtcgagaatgactnnnnnnnnnnnnnnnnnnnnnnnnnnnnnnnnnnnnnnnnnnnnnnnnnnnnnnnngaagcccaagttacaaaatgctactcctacaaactttaaaacaaagactatacatctgcctgagcaactcaaagaggatggaacacttccaacaaacaatagaaaacttaacataaaggatttgctgtcacagatgcatcactacaatgctggggttaaacaaagtgctcttcttggacttaaagaccttttgtctcaatacccatttataattgatgcacacctttcaaacatattaagtgaagtgactgctgtgtttacagataaagatgctaatgtacgattagcagcagttcaacttcttcaattcctggcccccaaaatacgagctgaacaaatttctccatttttttcctttggtaagtgcccatctctctagtggcatgactcccattactgaaggaattcaggagggactcctttaaagtttttggacattctggctggaacagtaccccagactctaatttactgggcccgtaacaagcatattggcttaaggaatttttggtagaaccttaatttcctccatccagcagggtggttccaaaagggaacttggataaaattaaaagaacgggattcccccgggcccctgggaattaccttttcctggttaaaaatcccctaaattcggggagagactttcatcctttttctcccaccccaatagtgggggaaaggcctttgcaaaaaaagtcccttttataggttgggcggcaacacctcca

SEQ ID NO: 252142 - DNA, 1079 bp, Homo Sapiens
  misc_feature (794)..(804): n is a, c, g, or t
cacgaaacaaacaagatcaaggatgtactagatggcatctgctagaatcactgaaaaagttagctgcaagaaataaaagcctattatttggagatagataattgtcccctgaatccactggttgttctcttccttacctatgtctgtgaaaggattaatggcacagtttgataaggtaggccaacaatgaatataacatttaaccatcctaaaatcagagctatagtgctataaccacatttttcacaaagggttttaaagttgaaagttgcctgatgttaagacctgtaataaaactgcgtattttccccttgactaccttaaatccctacccaaagcaatgaagctatcatccatgaagtagcagtccatgaggaagtccatgccagtaagaaaaggtgctagagtgctgttatgtgtaatagtcatcaaagatcacggagtaattccagtcattactagtgttcctgcagatcgccaagggagctcacctgatttttttccaggttcatattgggagcagtttttgatcataggttcaacttttttcttgggttgcaaaactgcatctggctgcaagtctaacccaaaatattcgcagcgtatcagctgagaggatgccggcaactgttgaactacatcacagttcaaagtcccatattgtgagagcagtacttgtagtttatgtaaccagcaaatatgagttacctcgttacagtgaacaacctgcactgttagagtttaggaacttttgacattcggttatcacatatttcaaagattttcaactcacnnnnnnnnnnntacatgggcttaattactcagtaacactttactatttgtcacttaatctcaagacaatacacactcagtccaactcttttggtttgattttacatagattttcacttacttctgcaaattaaaaacaagaaatgagtgctgtatttccccctctcccacagtaagaaacaagggtttaaaatggcaattacttagatgtttatttcaatatttcttaaattcactttattaatttaaaaaactaaataatcgcatgaaagttatataaagaaccc

SEQ ID NO: 252143 - DNA, 1173 bp, Homo Sapiens
  misc_feature (586)..(586): n is a, c, g, or t
tggttctattgaatgagattctggagcaagtaaaagataggacatgtctgagagctttggagaaaatcaagattcagtcagaaaaaggaaataaagaattcggtgaccaagctgaagcagcacaggatgccaccttgcactacaactactttccaaaatgaagatgaaacagaataaagaagtatatatgactccactcaggggtgtaaaagcaacccaagcatcaaacgtctactcagctaaacgactaacagaggacagagaaaagtgacagtttcagctaggacgaacaggaggtgtcagactgctgaagccgactctgaaagtgatcatgaagttccagaaccagaatcagaaatgaagatgagactaccaacacgagccaaaaccgcagcactagaaaaaagtaaacttaaccttgcccaatttctcaatgaagatctaagttaggaaagacgatggaggtggaatcctttaagattatgtccagttatttgctttaataaagaagaagttacccttgtcaaaatcagaacaaacctgatgtctttctgaagattttctgctgtgcgcttccacgttactntggcctgtattaaagcagtagagcagcatcagttattatagtccagaaaaagtctgcatcagtcagtcacacagatttatcacaatctgaggtgggcctaggaatctcatttttaaatagtctctccaagtgattcttatgaactctttatgtttaaaatcatgtcattatggaaaacttacaagtgtaactagctagtagcttgcatttgagaagcttatgacttagatgggcagaatcaacaaagatgaaaccgcctgaggacacatttaacaagtaacatttctagggaaaatgaaggaagtaccacaaactagatagaaaggagcttatcaatcaccagtgaggaagaccagtataacgttcaacaacagttattttgacaaaaacttattttgtgattcctacagtgaaaacatttttggtgatatctgcctgggaaatctctcttcctaaagtatttgtatatgggagtccttgtttgtgaatgtttcctggattagggaggtgtcaacataaatgtattattaaccatgaagctgctcgctatatttttggcataacaaaataatatttatttactgtcc

SEQ ID NO: 252144 - DNA, 813 bp, Homo Sapiens
  misc_feature (131)..(243): n is a, c, g, or t
gcccctttggcaagccgttcacggggctgtccgccttggctttcttggcgccctccagcctcctcttggtgttcttcacagacagtggggaaggcttgctccctttaccttctttgggggattccactgannnnnnnnnnnnnnnnnnnnnnnnnnnnnnnnnnnnnnnnnnnnnnnnnnnnnnnnnnnnnnnnnnnnnnnnnnnnnnnnnnnnnnnnnnnnnnnnnnnnnnnnnnnnnnnnngccagcttgggggcaggagagaaccccgaggtaccatccagcacctgtgtgcccccaggcaacaggccccgggcttgggcctttgcctcttcgatagcgtgctttcttttttccacttcaccctccaggtgtgtgagatcaacctttttccgagcataaagctgcaagatctttaagcagatttcctgaatttcttcttcagttgctccaaacaaaagaaacccaatggggacgattgggcaaagggatctccagcgtccgggcagcaagataaatgcaggcacaggcgatgctctctggctggaaccgcacgaagacgtcggtgcgaaggctgtcgttcatgtaattcctggaagccaaacacaggaagaactgcaatgccccacccgggaaccccaggtcttccgcctgcattatctagagaaaatctagataaacgtactactcctctaaggagtctattgctaggactcagagctagacagtcctgtgaatctcaagagttaatggagaaatattctagctgctttttctaaatacagtaaatacaggacagaaaggcacagaaat

SEQ ID NO: 252145 - DNA, 1615 bp, Homo Sapiens
  misc_feature (1505)..(1505): n is a, c, g, or t
  misc_feature (1523)..(1523): n is a, c, g, or t
ggaacgctgaagatccctttgcccaaatcgtaaccattggtttcttttgtttggagcaactgaagaagaaattcaggaaatctgcttaaagatcttgcagctttatgctcggaaaaaggttgatctcacacacctggagggtgaagtggaaaaaagaaagcacgctatcgaagaggcaaaggcccaagcccggggcctgttgcctgggggacacaggtgctggatggtacctcggggttctctcctgcccccaagctggtggaatcccccaaagaaggtaaagggagcaagccttccccactgtctgtgaagaacaccaagaggaggctggagggcgccaagaaagccaaggcggacagccccgtgaacggcttgccaaaggggcgagagagtcggagtcggagccggagccgtgagcagagctactcgaggtccccatcccgatcagcgtctcctaagaggaggaaaagtgacagcggctccacatctggtgggtccaagtcgcagagccgctcccggagcaggagtgactccccaccgagacaggccccccgcagcgctccctacaaaggctctgagattcggggctcccggaagtccaaggactgcaagtacccccagaagccacacaagtctcggagccggagttcttcccgttctcgaagcaggtcacgggagcgggcggataatccgggaaaatacaagaagaaaagtcattactacagagatcagcgacgagagcgctcgaggtcgtatgaacgcacaggccgtcgctatgagcgggaccaccctgggcacagcaggcatcggaggtgaggcggggttgcagtgactggtggccgcaagcccttccctggggagtacctgatggctgccctttgacccccggtggctgccctttgacccccgggtgtgctctcagcgcaagtggtcctagaacaggattctttttggaaatgtctgtcgactggaccttggtggatttggaaatggaactgagggaccggtgacacgtgcttcagaccggtctggggtgcggcgcacacctgggcccgtgcagggctcagctcggcagcagctctgagggcagctcaatgaaaaagtgaatgcacacgcccttgttggcgtggcctggcatggcctggtgctatcggcagccgctctccactccccgactgatactcaattacgtgaagccaagaaagatgatttttagaacctttgcctatattaggttgtacttatgtacatattttgcagtgtttcacaggagaaagtggccttaactgccccttattctctctccacgttgtaaataaacatgtgtttaatacaagttaaagctatgtatgaaaactcagaacttgaatcccgtcagcttcttgtgtagggaatcctgacttttagtgctgagtgcaggccaccagctcctaaatagagggtccctatatgcgcgtatgacatggggaataaacacaactctctccactcaggacatccggagncgtatggacgttgtaggnggccgttctgtgtgcttgtggtgtcaaggcgtgtgcacagccgtgcgcccacttcggctcttgctcctggtgactggttttgatttgcttct

SEQ ID NO: 252146 - DNA, 498 bp, Homo Sapiens
ctgggcccgtgcagggctcagctcggcagcagctctgagggcagctcaatgaaaaagtgaatgcacacgcccttgttggcgtggcctggcatggcctggtgatatcggcagccgctctccactccccgactgatactcaattacgtgaagccaagaaagatgatttttagaacctttgcctatattaggttgtacttatgtacatattttgcagtgtttcacaggagaaagtggccttaactgccccttattctctctccacgttgtaaataaacatgtgtttaatacaagttaaagctatgtatgaaaactcagaacttgaatcccgtcagcttaaaacttgtgtagggaatcctgacttttaaaatgtgagggtatttggatctgtgttgaaagtcgtatatttttatctgtgcggtgctgagtgcaggccaccagctcctaaatagaggttccctatatgcgcgtatgacatggtgaataaacacaactctctcc

SEQ ID NO: 252147 - DNA, 1525 bp, Homo Sapiens
  misc_feature (901)..(1045): n is a, c, g, or t
  misc_feature (1096)..(1110): n is a, c, g, or t
  misc_feature (1185)..(1193): n is a, c, g, or t
  misc_feature (1346)..(1354): n is a, c, g, or t
ggggctgcggggagggcgggacttcctgcgcgggggcccgagccgctcagtctccctgctctccgtggtcccggctcgcgtgtagcggcggcggcggcgtctccgtgaggaggcgcgcggggccatgacgtcagcgtccacaaaggtcggagagatcttctcggcggccggcgccgccttcacgaagctcggggagctgacgatgcagctgcatcccgtggccgactcttctcctgcgggcgcgaagtggacggagacggaaatagagatgctgagggctgctgtgaagcgatttggggacgatcttaatcacatcagctgtgtcatcaaggaacggacagtggcccagataaaggccactgtgaaacgcaaggtatatgaagattctggcatcccccttccagctgagtcacccaagaaagggcccaagaaggtggcatctggtgtcttgtcacctcctccagctgcccctcctcccagcagctccagtgtccctgaggccgggggtccccccataaagaaacagaaggctgatgtgacactcagtgctctgaacgactccgatgccaacagtgacgtggtggatattgaagggctaggagaaactcctccagctaagaaactcaacttcgacccaggcctgaccctggattctggccttctcatgacctctgctgatcctcctctcctctcctgctgagccttccacctctgacctctcactgttcatgccggacctgtggatctcctgggactccgagcaaggcctgcacgagagagggctgaaaggctgctggggctgccacctcgctattcccgcataagcatctgcccccaacccctttgaccttcatctgatggacatttttatacagaaaacaataaagatttccctctcagnnnnnnnnnnnnnnnnnnnnnnnnnnnnnnnnnnnnnnnnnnnnnnnnnnnnnnnnnnnnnnnnnnnnnnnnnnnnnnnnnnnnnnnnnnnnnnnnnnnnnnnnnnnnnnnnnnnnnnnnnnnnnnnnnnnnnnnnnnnnnnnnncgcgggcgcgcccccctcccccgaaaaaatttctaaaacactccttttggnnnnnnnnnnnnnnnaaagaaaagaacacctgcaaaaattttcccccaacgaaacccccgactgtaaaccccgggttcttctcccccccnnnnnnnnncaccccgcggacccccacgttcttcaaacaacatacagggtatcgcacgggctcttttggtttcatcacaccgcacccccaaccaacatttttacaaaattaccccgccccccctgtccctttcgagaggggggcggtaaatcactcccattnnnnnnnnnaagtcaacctctcccccccagtggactgtaaacctttccatcccacccgggctccacacccactcccaccccccaccacaatatcttcccccccggcgcaaaaacacccgccctaaaaaaactttccctctttatcgcccctcaccttacaactcacaagaggtaggcaca

SEQ ID NO: 252148 - DNA, 624 bp, Homo Sapiens
  misc_feature (460)..(514): n is a, c, g, or t
  misc_feature (571)..(582): n is a, c, g, or t
aacatacatatataaactactgtagtttacacgtaggcctttaaatatcttttttaagatctgttaagaataacatttatattgtattgtgtgtaacctgcacaatgtggaaagctgatatacctgtgcaaaatctttgcctctgtgctgtcactgtgatgtgcttactgcatggttatatactactaatgattttatcaaaacttctaaaatttaaattacgtggtaaaagatctgtaaaaggctgcataaatgttagttggcacataaagacaattgtagaagttgaaaaatgattgctatatttcaatggtttattcccactcaaaatactggccttcctaagccttcccttttttttggtccaaagcaccgatccttaaaaaatatgggtttaaagttaatgggatggaaatggccggggggtccctaccccgggaatttttggggcccaatgttnnnnnnnnnnnnnnnnnnnnnnnnnnnnnnnnnnnnnnnnnnnnnnnnnnnnnnnccaaaatttttaaaaacctctcccccaaaaggggaaaaaagggggggtttgggaaannnnnnnnnnnnaattttcaatttgggggaaaaaacattttttcgcggggaaaa

SEQ ID NO: 252149 - DNA, 485 bp, Homo Sapiens
gagggcgggagggggattcgtggcgacggcggcggcagggacagcacgagcaatggtgctttcttctcggtcgtccgacacatgcgaaaaccggggtcggaaataatagggtctgtccctccaattggccctgatgcatctgaatcaacaacggatgaaaatgaaaaccacattcaatttgtcagtgaaggaccattaccaactgttcttgaatacatagatctggtcagcagtgatgatgaaaagcctagcacctcttatactgatgagaatatcaaacgtaaagaccatattgattatcagaaggataaagttggtttaactctggctcgtctagcccgccatgttgaagtggagaaacagcagaaagaagagaagaatagagcattcagagaaaaaattgattttcagcatgctcatgggttacaagaattggaatttattcgacgacattctgatacagaagcagcaagactgtgtgtgga

SEQ ID NO: 252150 - DNA, 834 bp, Homo Sapiens
  misc_feature (545)..(545): n is a, c, g, or t
  misc_feature (598)..(598): n is a, c, g, or t
  misc_feature (660)..(660): n is a, c, g, or t
  misc_feature (683)..(683): n is a, c, g, or t
  misc_feature (783)..(783): n is a, c, g, or t
  misc_feature (787)..(787): n is a, c, g, or t
  misc_feature (789)..(789): n is a, c, g, or t
  misc_feature (794)..(794): n is a, c, g, or t
  misc_feature (796)..(797): n is a, c, g, or t
aggggagtggtggcggctgcggcagtagggacagcaggagcagtggtgctgtcagcgcggccgtcggagacatgggagacccggggtcggaaataatagaatctgtccctccagctggccctgaggcatctgagtcaacaacggatgaaaatgaagacgacattcagtttgtcagtgaaggaccatcgagacctgttcttgaatacatcgatctggtctgtggtgatgatgaaaaccctagcgcctattatagtgatattctgtttcctaaaatgccaaaacgacaggggtgattttttgcattttttaaatatgaagaaggtgaaaacagacacagaaaataatgaagtgagcaaaaatcactgcagattgtctaaggcaaaggaaccacatttcgagtatattgaacaaccaatcattgaagaaaagccatcactttcatcaaagaaagaaatagataatcttgtgcttccagattgttggaatgaaaaacaagcatttatgtttacagaacaatacaaatggcttgaaataaaagaaggtanattaggatgtaaggattgttcagcagttcggcatttgggaatcgaagcagaanagcatgtccatgtgtccaaggaatggattgcatatttagtaacccctaatgggcagtataanactactaggcaagcttctctacngaaaaaaattaggggacatgatggtttctaaagcccatggtaaaatttcaggatttggtaaaggaattcactaatggattcatttttgtattttagtgcntaancnaaatnanntaaaatattgatgcctacctgtaaaaggtttttcatt

SEQ ID NO: 252151 - DNA, 706 bp, Homo Sapiens
tttttaattatttaacaagtagaaatacgatcagtgacaattatcaattaaaacattaaacaacccagttaccttttcttaacagtcatgatgaaatatccctttcctgtcttatcagaagccttaattattctctaccacacacaccacaaaagcttcttaatagagcatcagtgtccatcacacctttgtgtagaatctctggcaacaaggtgctgtctcctcttgccctgcccccacatctgcttaactactcttctttctggaatgcctcttttgctcccattttgtgagctcctgcagatgtgtttaaggtccagctcagtgactacctcctagagccttgcttgaccacttaaacatacaaactaaaagcacaatgtggtcatttcggaaagatgattgataaattctcaagccacaatgtctagtttttaaaaaatgcaagcagggaggaacagaagtgacatatcaagaaattaaaaacacaaattatagattgaaaagactatagtaataaaaaaattcaatttcacactaaaatatttagtgttacagagaaggaaccaaattctagcctttatattttgtcttaaatataaagaaaagctttatatttatagaaatgtttttaagtttggtaaataattactactaaaaatttttagagataagacatttctggttaaataacatgaagcatata

SEQ ID NO: 252152 - DNA, 590 bp, Homo Sapiens
  misc_feature (28)..(28): n is a, c, g, or t
cccctgcttgccatttttaaaacctagncatgtgccttgaagaatttacccaatccacctttcccgaaatgacccacattgtgccttttagttggtatgtttaaagtggtccaagccaaggcctcctaggaggtagtccactgagcctggacccttaaacaccatcctgccaggagctcacaaaatgggagcaaaagaggcattccagaaagaagagtagttaagcagatgtgggggcagggcaagaggagacagcaccttgttgccagagattctacacaaaggtgtgatggacactgatgctctattaagaagcttttgtggtgtgtgtggtagagaataattaaggcttctgataagacaggaaagggatatttcatcatgactgttaagaaaaggtaactgggttgtttaatgttttaattgataattgtcactgatcgtatttctacttgttaaataattaaaaatcatcttaaaattcatactttgactttaatttagacacaaggagatgtaatcgctgtgtaacatcagagaaagctatatggattatcgtcagaagtaaatgtttctaacattgacaaaaa

SEQ ID NO: 252153 - DNA, 934 bp, Homo Sapiens
gtcagaagaaaggcaaagacaggacaaggagaaactgaggctctgcgttccgacacgtggtccgggctgttggccacttggtggcaccctcaccatcgcacccctcccgggagaagtggcccactggctgttcgttcaggatgtgagcctgacccagggagaatgcagagatagcgaccgcccacctgcaggacacggccaaccgcagccagcatccgctccacctgttgtaaggtcttctcgttcctcatctgtcaggacagcatccagggtgcccttgtccaacaccacctggaacgaggcatcaggaaactccatctgcgtcatgtccatcttcaagaagctcatctggggccgtcgggtggcattacattccttcatttgctgtgatgacaacctcactgatgtcgatgttcactatatcccgatagcccacatcatacagttgctcactcagttctgagttgccacacccaatcaccagcaccttttccctgggcttgatatatttatgtagcaccccgcacagttccaggtaggttccataccactcgaaagctttctttcctcgctgctggaagaacttctcccaatagtcaacggagccaaactccctggaacttttaggtaagaggttcatgttcctactgccgaagctgcgttttcaagactcccctattccctgtgagataccatttgaggagcttgcccaccacacgcaggctccgggacactgcagtgggaattctttccacggaaaaacagccacattgatttgttcccccactccaaaccccaggaatgacccttacacgacaaacgcacgcatggaccactgaatctcacacacgcttgccccctcctccgcgcctgctgttccttccccacgtgaagagcccctcacacttttcccgaactagatttccgagcccat

SEQ ID NO: 252154 - DNA, 528 bp, Homo Sapiens
cattctgctatgaattatttatataagccaaagctatatgttgtaactttttttagagaatagctttatcttggtttacctctttagttttattttaagaaggggaaaacaaaaatatcttgcaagcagaaccttggaaaaaaaagccatgaacacttattctaaatgtaaattaaaagttgagccaaactctttgtgtatatagcatcttaaatatattatcacctttgatgtaagtacctatgtattgtatggtcaccagattaaaaagtatatttttgtggattgccgccaatctggggggaaaaggcgaggtcctttattaagtattcactgtttaatatttactattttgttaaatatactgtactttggattttaattattagcccagttttttcagaggattgtataaaggggtttctcccctcactggtggtgaatgtgtgatgttacattgtaatctctgtgctgtatgggttgagcatcattatatatttggtatgtgtacataaatagcaaagtggc

SEQ ID NO: 252155 - DNA, 555 bp, Homo Sapiens
gcacgagtcaaagtgctgaggtcacaggtgtgagccactgagcccggcctgattttgggtgtttattgagtatctgcccagcaccaggcatggcagactctggggacaccgaggaccctgggctgacccaactgtattaaccggaggtttgcgctcatggagggagggaggtggaagtgacaccagtgatcagttatcaagtgggtgcattgtcaccatgcatgcttggttgggggcaggagccaaactctgggggagcacccagccaagaaacctgacaaggggtcacgtatgctttgtccaaggaggaggtgaccctgaagggagagctgtcggatgtgcgggatgatggcaggcgagccttccagacaggaatggggggtgggcggtcagtggggcaggggtgtcagaggccaaaggaaagctggaagggctctcccagcctggggcaacgctggtaacaactcactggtatttcctatttcttcatggataactgtgtacacattaaatagttattaataattaataaaaccattttataatgccggttac

SEQ ID NO: 252156 - DNA, 555 bp, Homo Sapiens
cccacatacctcccaccgtgcaccgcagctctgggggcgtcctgccaaggactagccaaaacgcgagggcacagtccgaagagttcccgttcggattagcccaaagagctgcgggcgagggtcggttaaggaaaaaaaatgtgtgcgcgacatgcgtccgaaagctagacttctgatcctcgctccccgcggggctggacccgtgaccatgagctagtcgcctgactcgccgagcctcagtttcctcacctgtgaaatggggataattgtgaagatgaggagataacttgagcacagcactctgtgcagcgccaggcaccgagtaagggctccataaacgctacccaacccgtgacagggaaaaattgaggctcaggcccatcccgtccaagtgttttgccgaggccccagggcttgtctaggtatgcacgccgggtgtgaacggattcgctcgcagcccagcggccaggagctccgcgaggatcgaggggacgaaactcaccttcttggcccccgggcgtccagcaggtgccatggtcccgcggctctgtggcc

SEQ ID NO: 252157 - DNA, 827 bp, Homo Sapiens
  misc_feature (12)..(12): n is a, c, g, or t
  misc_feature (165)..(165): n is a, c, g, or t
catgttattaanatagtctgtgcaatgtttgtacaaataacatttttattaatacaagtatacatataatctagataaggcctgtaatctttcctaatattaattactgtacttaaaaatttacaggacatgaacataaataaagctgtttaaaactggcaaacngtagtaatagtctgtcattcagtacaaggtatatttatgttatttccaaagccatcaccctaaaatcctaagttgccactcttaaaacctaaaaataatgtcgaaaactaaagtcataaatacatgtatacatacatttgcatatttacacttatgcagaaatcatcaatatactagagcccagctttaacactgtccttcagtttcacactgcaggaccatctgtcacatttaagaaaggtccttctgttactttcagttaaaaaaacaaaacagaacaactttggtcaagtcccagatgcatttgccttatattacattctgtgttgctgcaagactctagtctacagagatccatatataagtactcatttggtttgaaaatgcattttaccatgaactgcaaaacttaaaagagaccacaatcttttagattattttttatgatgacatctgttacagcatcaaaaacaaactgcacattcttagtatctgtggcacatgtgaagtgggtgtatatttcctttgtgtcctttcttttattgaggtcttcaaactgacattgaatatatgcagctgcctcttcatatgtgtttgatcctgcatattctggatagcatatagtgagagggctctttttgattttttcttcaaagagatcc

SEQ ID NO: 252158 - DNA, 454 bp, Homo Sapiens
taataataaggagatgtcatgggctcgggggagggggaaatggggagcgctgttgtttgaatggtatagtttcagtttgggactgagaacaaattctggagatgaatggtggtgatggctgcacagcagtgtgagggcactttatgccactgaagtaacagatgcctttcaaaaataagcccgctaaaatatcaccaagcataaccagcaaaacaatcatttcagtgaaaatacaactttatattaatcatctcaataatacagattacagaactgagtttacagattacaggaacttttcatactttgtgggtcagaaaggataaccataaattactgtctccgctttatgggtggtaaactgagccacagagaatttctctaagaaaatttaaaaggaattgatgttcattaaataaatatcctcactgatttttttaaggtagaaaagtac

SEQ ID NO: 252159 - DNA, 757 bp, Homo Sapiens
  misc_feature (184)..(231): n is a, c, g, or t
  misc_feature (335)..(335): n is a, c, g, or t
  misc_feature (719)..(719): n is a, c, g, or t
  misc_feature (731)..(731): n is a, c, g, or t
  misc_feature (740)..(740): n is a, c, g, or t
actgaagtaacagatgcctttcaaaaataagcccgctaaaatatcaccaagcataaccagcaaaacaatcatttcagtgaaaatacaactttatattaatcatctcaataatacagattacagaactgagtttacagattacagaacttttcatactttgtgggtcagaaaggataaccgtaannnnnnnnnnnnnnnnnnnnnnnnnnnnnnnnnnnnnnnnnnnnnnnntctctaagaaaatttaaaaggaattgatgttcattaaataaatatcctcactgatttttttaaggtagaaaagtacaatgcacagtgttaaaaaaattactgtnaacagcctcatgttcgagaagtctaaaattttaaggctactacatgtgttaattttcagtacatgtccaacagaaaacatcctttaattccagttacatcctgaagataccgaagtcagtcttctctattggtgcgttgagggctgcactaaaactgagacccaagaccagtctggtgtctgctggatcaatgatcccatcatcccatacccttgcgctggaatagtaagggtttccttcctcttcaaacttcttaatgatgggctcttttaaagccgcttcatcagcactggagaactgctttccttcccgggctctttggtcctttgttatcgtggccaacacattggctgcctgctctcctcccatcactgagatacgagnctcgtgccgaanaactggggntcgtagggccaaaaaaa

SEQ ID NO: 252160 - DNA, 642 bp, Homo Sapiens
caggtatctgagagtcatcgggcttggaaaatagatggtggatttggtggaccactgaatctctgaatgtttaaatgatagttcaaactgggaagagggggaccatagggcactataaaaggatatactgactgccattcaggcctgaaagaagtaaatgaagtgtcacaaaatgtaggtattacttgtccattacagggatatttgtctggctcattccccaagttctgctgataatcacaatgtgatggcatagctttattactaagatctttccttcatcaggttttaagagaccattattatgaccctcataaaatggaacaaattgttcctgagaaggttcagattctttacaactgttctcaaaaccatctttttccttttcaagctcttcaatttctttgtaaaactggaataattcattgtcaatctctgatttttcagagttaaatttctgtttctctttttgtcctcctctgtcatttataccatttagaacatgtgcctcattcctcccttcattacgtttctttttctcagggggtttgtaaatgggtcctataaatgctttacttgtgctatatatctcatcgtctgcggatactaatggaggacgtgcttcctgtaaaacctgtgaat

SEQ ID NO: 252161 - DNA, 1287 bp, Homo Sapiens
gatggtgaaaatagtcatcagtgctgaacacaatgccatcacgattctgaccaagcagaattcgagacaatgttgttttcccagaaccaggcagacctcttaaaagaataagtaacttctgcaatttatttaacttttcctcttgaaactgctggttcacaaacctgtctgttccattatgcttgtccatacaatgatctttccagcatctttctctgacttcacagaaaccattactcacatatcgatcttgcatactgcagccatttccagagggatgaacactactcctattctcactacagtcagtatattcattgttctgatcaaaagtcatgcaattccagttaacatgacaattatttacataatatccattttgtatctgagagtcatcttgggcttggaaaatatttgatggtggatttggtggaccactgaatctctgaatgtttaaatgatagttcaaactgggaagagggggaccatagggcactataaaaggatatactgactgccattcaggcctgaaagaagtaaatgaagtgtcacaaaatgtaggtattacttgtccattacagggatatttgtctggctcattccccaagtcttcatcaggaagagaccattattatgaccctcataaaatggaacaaattgttcctgagaaggttcagattctttacaactgttctcaaaaccatctttttccttttcaagctcttcaatttctttgtaaaactggaataattcattgtcaatctctgatttttcagagttaaatttctgtttctctttttgtcctcctctgtcatttataccatttagaacatgtgcctcattcctcccttcattacgtttctttttctcagggggtttgtaaatgggtcctataaatgctttacttgtgctatatatctcatcgtctgcggatactaatggaggacgtgcttcctgtaaaacctgtgaatcaatggattcaataacatctggtctattaccaggcatctcatcatgcaaaggtctatgcaaatctgtagttttgattttgttctcctgcaaataactatgtcctctgacatcaatgatggtcacagggacccaatcatttccagttttctcttggattctgtgaaaatcagcattactatgattgtgaaaaacatacgactctgtggttgacttcaattttttacagcgtggctcactcgttacttcttctctaggtcccaagaatttaccttcaatttcaccataagacatctccgtacgcaagatggcggtcac

SEQ ID NO: 252162 - DNA, 822 bp, Homo Sapiens
  misc_feature (47)..(56): n is a, c, g, or t
  misc_feature (121)..(121): n is a, c, g, or t
gagacagagtctcgctctgcactccagcctgagtgacagacactttnnnnnnnnnntagattttgctattgggtaagggatagtagtcggcagcagaatggactgattgaggacaactatnaaattacaaaaaatatttaaatgcaacttattgctatagaagcaaagagaactaaaggagcaaaattctagagagtggtaaatcccagaaagcacatgcacagaatgcagctctttgctctggggaccctttccacttctggctatagggaagaacctgaatactgaacttgattcaggcagaggaccataacctgggggtcaggggaaggcatgggggggaccagaaaccagaagaacaatcaagactgcaatgaaaaaaatggatacattaggagcttcaaacacatataatttctcaagaaatttccagatgtctcatgctgcatagggcaggagcctgaaaagctaatttgagaagataataagtaggatttttgttttgttttgcattttgcagtacaaaggagaaatgattagaacttaggaagtgccagtgggttgggtgaacatgccatcagtaaaagccctgggaaacaaggtcataccagagattggttgtgccttgtcacaactgcaaacaatacctgagtggagtattcaaaaacttgcttagaaagaaaactctaggaacagatggcttcactgaagttattccaaatatttaagaaataataccaggcttttataaactcttctagaagaaaaaagatggaacttctccaattcagtttttgaggccagtacaaccttgacaacaaa

SEQ ID NO: 252163 - DNA, 886 bp, Homo Sapiens
catattgtaactaaatttaagaataattcagattaagtagttctgaaatttggtatagatagcatagattgtctcatgctcatgagtgacataatgaccctggattctgttacatacttctaaagaaaattgattgttgtcttaggaggcagttaacttggctgaacaccaactccacactctgtcttgtttgtaggtggcagcagctgaaatctcttctcagttgttttagctttagctatgctgctggaagtctttcccatgcaagtgtgtagttcaggggtcaaccagagtttgggcagaaggaagtctgccccttctgtgcctcctgttttttgggggtttcccctttatgttccagctgttgtggttgccccatattctgccctctgatccttaacccaataaaacttgggcttttggtttcccccctcaagtgagaaccccgttaaaaatgagacattgagccagtgctgttcactttttaagtgccaacttccctctactttccacttgtttatagttgtttccagtgcctttagttttttctaaaatatatttgttcagagtttgcagttgctatcagcaggagggttggtctgatatctgtgtgctactttgccattattagaagtgaactctgcatctttttaaaaatttgaaatcccggtatcatgtgaagtgctgtttatgtaaatctcaacatatcccttactcagggaaaaaaaagtttttagttagggaatagtgaaatataatttaatatggaattctagctgtagagttaaatccatctttaagtgtttacattcagtatgagaatgcaaatttatctgtatggggaataaagtcctaggaataaaacaagttttaagtgttcaaaaaa

SEQ ID NO: 252164 - DNA, 519 bp, Homo Sapiens
  misc_feature (25)..(25): n is a, c, g, or t
  misc_feature (39)..(39): n is a, c, g, or t
  misc_feature (55)..(55): n is a, c, g, or t
  misc_feature (112)..(112): n is a, c, g, or t
  misc_feature (118)..(118): n is a, c, g, or t
ggtgcccccccaaatctgcccctcngaccctaacccaanaaaactggcctttgtncccccccctcaagtgagaaccccgttaaaaaaggagacattgaagcccagtgcctgntccacnttttaaaagtggcccaacctccccctcctacctttccccacttgtttaaaagttggtttccccagtgccctttagtttttttcctaaaatatatttgttccagagtttgcagttgctatcagcaggagggttggtctgatatctgtgtgctactttgcccattattagaagtgaactctgcatctttttaaaaatttgaaatcccggtatcatgtgaagtgctgtttatgtaaatctcaacatatcccttactcagggaaaaaaaagtttttagttagggaatagtgaaatataatttaatatggaattctagctgtagagttaaatccatctttaagtgtttacattcagtatgagaatgcaaatttatctgtatggggaataaagtcctaggaataaaa

SEQ ID NO: 252165 - DNA, 1194 bp, Homo Sapiens
  misc_feature (17)..(17): n is a, c, g, or t
  misc_feature (71)..(71): n is a, c, g, or t
ccaacagtgacacatcntacagaagacagactggtaagattagatgaaagcctgacatagcaatcatcaanatacagctttcaactgtaattcacaataaaagtcctaatcagtaaaactactgacaccaatcgagaaagtaattgcaaactggattctatcagtgatttcaacctagcttcctcttgtcacagtgttcagggggaggtgggaaaggagtagctcagtatatagtaaggctgacagagcggttcattttctttccaataagtcgagatgttctattactctgggtggtggacctagtggccatccggtcagtgaagagtgctctttcctcagctgcagcttttgccatctgtgctttcttgagttctttttgtaaaagtgaatttttgaacttttcggcattcaattctattcgtaattgttctgcactctttctagaagcggacagcaatactgaatgctttaccagtgccattgctgaaggtcttctctctggatctggatgaatcataacttttagcaactctgtaaattcttgggaaagcacttgtggtatccgaggtaatctaccctgtctgatttcatgccattgatctccatttctcggaagaggttcagcaccagcagcacataccactgtgagggcaagcgcaaaaatatctgcttttggtagatgggtataattctcctgtaaaacttcatttgcaagaaaacgactatcgccctcttcaacttgtggactggagatccttgttacatgcccaagatcacctattttaaacataactttgttggatgcccaatcatcttcgtctccttcttcagaggcagcatttgggattgaggttcgagatatgaaaatattacgaggttttatatccatgtgaaccaaagacattgaatgaatatacctcaagcctcggccaacttgcaaaaggagatccttcaactctgcttctttaaagtaactcatgattctgtagttttcacttatagcatcagctaaacttccaccattacaatattcattctgtataagcatatgatcatcttctgcccacgcagagaaatatcgaactacatgagaatgctgtccaagcactgcatgagcatatacttctctcaaagcgttctgctcatcaacagagcccgccaatggcttttttgatcgcttaatggcataaa

SEQ ID NO: 252166 - DNA, 587 bp, Homo Sapiens
cagtattcagtatctacataattatgactgacttgacatgagtactattattcacagttgaggtataccgtgtatacagtgtagtttttaaatttttatttttctcagcgttcaaaattatatgttctgttttgttaattttgagaaatatgcattcactaatttatccccacactctttggataatgaaagctctgtaggctgtattcaaatacaccaggtactatatcaattttcattttttaaaatattctacatgagctctccatctttagccatttcctgttgacttcatactgttctcccgtaccactctccctgtttaatatattaccgttttagaaactttatggttaccctgtaagtaatagaaatgtctttccccactcaacaacagacagtacctttcaagtttccactttataaggacataacccccattccatttacttcccccgccctccttcaacattcccacttgtattttccggcatgtatttttaaaacatgggaaataacatttgcactccactttgtaaccataattaaggatgcccttaaacaataaaaaccataaacaacatttg

SEQ ID NO: 252167 - DNA, 660 bp, Homo Sapiens
gtgtgtggaaagtacacataaacatatgcacacagtatgcttcagactattccgcaggactcatggactcacctgatacccagccctgatcaggaatgccagatacaagtcaggtcatccagctacatttgaatttcaggtaagctacaaatcaacttttagcataagtatgtcctcaacactgcctgggacaaacttatactaaagtatgattcatagtttatctcgaaatgcaaaagcaacttgacatcttgtatttttatttgctaaatctagctgttcagacccagacatatagatcccatgtaaagaaaccttgtctcagttcgttcatccctatctgataatgagtagattctaaagatatggaaggccatattacagggagatttaatgtaggaacagattttgacaattctgacagcaaaagtcagctgcgtattcataactgtctgcaaaattatagaagcaaaagtaatgcatctccttgtgtgacagttgattatactgaaatcctgataggttggacgttctgctataggtctatcaagtggttagagcagaatgaacaccgaaacccaaatttcagttctatgataatcaaaaaggcatcagtcttaaaactcaatttctaaccctcctctcctccaacacacaaaa

SEQ ID NO: 252168 - DNA, 822 bp, Homo Sapiens
  misc_feature (681)..(681): n is a, c, g, or t
  misc_feature (717)..(717): n is a, c, g, or t
tcaggctgtaccggcccggaattacgggatatcgtcgacccacgcgtgcgcagagagtgtgcatgtgagaaagcgagagaaagaggaactgaaggacgcggttaatgcctaaaaatggaaacgttaagaagttggaatgttggagatgcaagaatttccaagaactttcttagccttcctggagatggctacatccctactaatataattttaaaatgagaactttatatatattacttaaaattaaatggactattccttgtgcattgcctaatttgctatttaaaggcttctaagaagcgtatacctaactgtaaataaatgtatgtatagcatatgtacatatgtgtgtatatctccatctttactgtatatatgtaaaataccaattttatatagaattgtgtgttttgaaaatgacggtgtctgactcagtgagtcccttcctcacacagttctttccaagtggctctgggccccatctctccactgtcctgtaagctgtgcagaacctgctgctaacaccaaggtgtgaacatgccctgatgcctaaccaaagatgagttaaccaaaggaaaataacattaaaggagacttatgtgttaacactttgtttctgctattcaaaaactgagagtggagatctgggataaagcaaggaaataataattactcctcctnctaagcaatgggggggtgagaagtcattaccaaatntaaagctagatgaggagttgccactgggccccagtagatggaatttcagtgagatatggacccacggagtcagcgagagtgactgaaacagaagcgatacctctc

SEQ ID NO: 252169 - DNA, 831 bp, Homo Sapiens
  misc_feature (582)..(582): n is a, c, g, or t
  misc_feature (815)..(815): n is a, c, g, or t
gagatagcaagtgtttaacagagtgtaatgatttctgagaagcatgcttttaaagattttttttaaattcctgaatttatgagtttatattataataatctataatagagcaatagatttatacactggaaaagaaacaaattaagggaaggagagaatacacaatgacatggaggacatcaagaaaatatgtttggaaacatgtgaaactctccaaatgggaaataaatattcttgagagaaattaatcacagttgcagtttttctcctaaagggactgtttgcacaatgggttatgtaggctcaggtttgatttttgaaaaacatgttaaaaaatagtattcctgttattccacgtttatttttcgagtttaggttctgctactaaatcaagatgatacagataaaaggaaagcccttttatctcccccggcagcatctgttgaataagggggttatatttgatttctaaattctaaaattctgactgtacagcagtatatgccgttgttgacagtaaacagtaaagatttcaagcctgtggttttaaaagaagaagagatgattgggtagaaacttggnaatattaagaagttgtttagttacttgggctgttgccttttcctgttttgttgggagggggagcagggaaaggaagagtattgaactttttgggggcaaccgttttgtgccagacattgtgctggaagcttttacacacattttgtcttttaatccttccagttcccctgtggacatgtagggtatccattttctctagtttaggaggtaagggaaacccagtcttgaaaatngcaggattagtttaac

SEQ ID NO: 252170 - DNA, 1290 bp, Homo Sapiens
tttttttgccattgtctttgggaatgagaaaatgattactttaacattaaacttaaattaaaccagcatatacaaacgttatattgcttttgaaatgagggaggcagtatctagtgatcggtcaaagcaaatctgtattcatgaattatcaaaagacccacaacatagtcacctctggagtctaaacaatccttctcttaaacaaaaatcctgtactgtcaatcctctaagattgtagtgataaaaagccttttcaaatcttatcaaatgaaactgttgccactcttaaattacacaaccgctgtatttcagtgttccactgactcacaacaccaaaaaggcactgtatatatatatagtttaataggaaatacttattttaaaagactgacccctttgtaactacgctgatttgtaggaaatgttggggatgtttcaaacgaagacaaaggggccatgtaaaagataaaatttggttttcatgatctctcatctatctctccttctgtattgtttataatgtgacacattttcagagcattgactagggaaagtaaccataactagagccctgtaaggccaagtttttcatcacaaggaaagtaaccataattagagccttttatgacagtgagaaaatttgtttttcatatcatctcacctatctccccttccgtattgtttataatataatgtgacacatcttcagagcactgactagggaaatcataattagagcccttgtaaggcaagtgttttcatgacaaggacacttaccaaccagaactcatgtggtcctcctgccttagtgtcctgaataccaaagaaaagagtatgaaagggtcaagaatctcaattttctcctctggcggctgcactggtactctgtatgaagacttttagtaacacaggctcctgatcgaacaactatgccaaaaagcctccaaataacaggactaacacgtatcaatctatgaaccagcatacggatcttttattctatactactactgctaacaaagataatttcaacttcagttttaaaaacctagatataacactttcttatgaatgggcccctctttgtttaaaggccaaatttcacataatcgggacaggaggaaattgatactacattagtccatatgaaaaggacttcaaatcaagtatcttaaacacattattaaaagtggtttctggttttcgataccatccaacacatgaacatttttaaactgaccggacgcgtgggtcgacgatatcccaaaagaagttccggaccgggtaccc

SEQ ID NO: 252171 - DNA, 924 bp, Homo Sapiens
  misc_feature (829)..(829): n is a, c, g, or t
  misc_feature (876)..(876): n is a, c, g, or t
gggggtgaagaaggggccggccttcaagcaacagcgacgcaagatggcagccaccacgggctcgggagtaaaagtccctcgcaatttccgactgttggaagaactcgaagaaggccagaaaggagtaggagatggcacagttagctggggtctagaagatgacgaagacatgacacttacaagatggacagggatgataattgggcctccaagaacaatttatgaaaaccgaatatacagccttaaaatagaatgtggacctaaatacccagaagcacccccctttgtaagatttgtaacaaaaattaatatgaatggagtaaatagttctaatggagtggtggacccaagagccatatcagtgctagcaaaatggcagaattcatatagcatcaaagttgtcctgcaagagcttcggcgcctaatgatgtctaaagaaaatatgaaactccctcagccgcccgaaggacagtgttacagcaattaatcaaaaagaaaaaccacaggcccttccccttccccccaattcgatttaatcagtcttcattttccacagtagtaaattttctagatacgtcttgtagacctcaaagtaccggaaaggaagctcccattcaaaggaaatttatcttaagatactgtaaatgatactaattttttgtccatttgaaatatataagttgtgctataacaaatcatcccggtcaagtgtaacccactggtccacgtagttgaaacttctggggatcaagaaagtctatttaaaattgatccccatcataactggggggggcacatctaactcaactgtgaaaagacacatcacacnatcaccttgctgctgattaacgggcctggggtctctgccttctcccncttaacctcccggcttcccaaccttcctggaaaaaacaggccctcttc

SEQ ID NO: 252172 - DNA, 1728 bp, Homo Sapiens
ccggccttcaagcaacagcgacgcaagatggcagccaccacgggctcggacaatttatgaaaaccgaatatacagccttaaaatagaatgtggacctaaatacccagaagcacccccctttgtaagatttgtaacaaaaattaatatgaatggagtaaatagttctaatggagtggtggacccaagagccatatcagtgctagcaaaatggcagaattcatatagcatcaaagttgtcctgcaagagcttcggcgcctaatgatgtctaaagaaaatatgaaactccctcagccgcccgaaggacagtgttacagcaattaatcaaaaagaaaaaccacaggcccttccccttccccccaattcgatttaatcagtcttcattttccacagtagtaaattttctagatacgtcttgtagacctcaaagtaccggaaaggaagctcccattcaaaggaaatttatcttaagatactgtaaatgatactaattttttgtccatttgaaatatataagttgtgctataacaaatcatcctgtcaagtgtaaccactgtccacgtagttgaacttctgggatcaagaaagtctatttaaattgattcccatcataactggtggggcacatctaactcaactgtgaaaagacacatcacacaatcaccttgctgctgattacacggccctggggtctctgccttctccccttaccctcccgcctcccaccctccctgcaacaacagccctctagcctggggggcttgttagagtagatgtgaaggtttcaggtcgcagcctgtgggactactgctaggtgtgtggggtgtttcgcctgcacccctggtttctttaagtcttaagtgatgccccttccaaaccatcatcctgtccccacgctcctccactcccgcccttggccgaagcatagattgtaacccctccactcccctctgagattggccttcggtgaggaattcagggctttccccatatcttctctcccccacctttatcgaggggtgctgctttttctccctcctcctcaagttcctttttgcaccgtcaccacccaacaccttccatgacacttccttgctttggccagaagccatcaggtaaggttggaaagagcctctgacctcccttgtttagttttggaaccatactcactcactctccaccagcctgggaaatgaatattgggtcctcagccctgccaccctctgctgtcatcagctgatgcattgtttttagctcaggttttgataaggtgaaaagaatagtcaccagggttactcagacctgccagctctcggagtccttggtggttgaacttggagaaagaccgcatgaagatacttgtaagcacacatgatccctctgaattgttttactttcctgtaactgcttttgcttttaaaaattgaagaagttttaaacagggctttcatttggtcatccttgcaatccattggggtctagtttggaatctgacaactggaacaaaaagaaccttgaatccggtgcatgccttggttttggtgctgctgctgcttcccaagatcctcagcagggattaagaaggaacccggtgtgcacagcagatccccgaaattggtgggcttgacctcctggcaaattgctgcgtctttccacttgctgttcaggaccactaaatgctgaaatgtggatgcataccgaaataaaagcaattcattgtgtactaaagg

SEQ ID NO: 252173 - DNA, 1021 bp, Homo Sapiens
  misc_feature (524)..(524): n is a, c, g, or t
  misc_feature (551)..(551): n is a, c, g, or t
  misc_feature (555)..(555): n is a, c, g, or t
  misc_feature (632)..(640): n is a, c, g, or t
  misc_feature (658)..(659): n is a, c, g, or t
  misc_feature (696)..(696): n is a, c, g, or t
  misc_feature (736)..(736): n is a, c, g, or t
  misc_feature (772)..(772): n is a, c, g, or t
  misc_feature (815)..(815): n is a, c, g, or t
  misc_feature (824)..(824): n is a, c, g, or t
  misc_feature (867)..(867): n is a, c, g, or t
  misc_feature (870)..(870): n is a, c, g, or t
  misc_feature (892)..(892): n is a, c, g, or t
  misc_feature (908)..(908): n is a, c, g, or t
  misc_feature (932)..(932): n is a, c, g, or t
  misc_feature (958)..(958): n is a, c, g, or t
  misc_feature (965)..(965): n is a, c, g, or t
  misc_feature (972)..(972): n is a, c, g, or t
  misc_feature (976)..(976): n is a, c, g, or t
  misc_feature (1008)..(1008): n is a, c, g, or t
  misc_feature (1013)..(1013): n is a, c, g, or t
cgtgaagagattcctgtcatttaattagatttgccacaaaaagcaataaccttagctaaccacgctgctctcctcctccacctaacccccatctcccttcatatgcacaaacacaggaacccaaagcccctcctccccacaatcctccccactcacattatgggaagaaatgtcactaaatggacttggcctcctccatatagcacggaacaggtgaataaaaatatctttatgaagaattttgttgtgctattatcttagggttgaatcagggccaagatggaggcagaggcaagtgaggtctggggatctcttagagatcagaatttgtctgagaggcacagagcctatagttcacccagaaagggggatatatctaagaggacaggggctagaactggctaggctgaaagtattttcaagtgtatgtgtgagggtaagggtagctataaatccattctctttcctcccccataccttccctagctcccagatagaagggcaggggaccctgaacagggaanagagtcacaattccctcaagtttcatntgantcccacagagcttccagcaggcagtgagttgggcatatcccctggcgctgcatgacccctttccccagctcagggcnnnnnnnnnccacctgtgagcaccagnncctgcaggatgtcagacagtgatacaattcccttgancacatcattttcatccaccactacaagtcggtgaacctcngcttccactagcctgttgatgatggtctccagagtntcatgcaggtagcacttgagaacaccctcaaagtaatgtgatngatgttgcnaggctttagtcacagatacatctaggttgttgtaggtcttttntgntgtcagattgataacatcaaanttggagtagatgtcancacacgccccttctcatccacacnggcaagggctgagactcgacgctgtncaaaatnctcagangcanatagacgggggtggtagtgcgaacatagaaanatggnacaggggc

SEQ ID NO: 252174 - DNA, 1024 bp, Homo Sapiens
gggagaggtgagggagttaatgtttccaaaaactaaacccaaagggaggtccggagggcttttttcccaccctttaccggagaggctttttgcccaaagcaaaggaaggttcaatggaaaggttttgggttggtgccggtgcaaaaagggaacttgaggaggagggaggaaaaaccagcccccctcgataaaaggtgggggagagaagatatggggaaagccctgaattccctcaccgaaggccaatctcagaggggagtggaggggttacaatctatgcttcggccaagggcgggagtggaggagcgtggggacaggatgatggtttggaaggggcatcacttaagacttaaagaaaccaggggtgcaggcgaaacaccccacacacctagcagtagtcccacaggctgcgacctgaaaccttcacatctactctaacaagccccccaggctagagggctgttgttgcagggagggtgggaggcgggagggtaaggggagaaggcagagaccccaggccgtgtaatcagcagcaaggtgattgtgtgatgtgtcttttcacagttgagttagatgtgccccaccagttatgatgggaatcaatttaaatagactttcttgatcccagaagttcaactacgtggacagtggttacacttgacaggatgatttgttatagcacaacttatatatttcaaatggacaaaaaattagtatcatttacagtatcttaagataaatttcctttgaatgggagcttcctttccggtactttgaggtctacaagacgtatctagaaaatttactactgtggaaaatgaagactgattaaatcgaattggggggaaggggaagggcctgtggtttttctttttgattaattgctgtaacactgtccttcgggcggctgagggagtttcatattttctttagacatcattaggcgccgaagcctcgtgccgaattcgccacccaggcctcgcgccgttaggggtttatgcccggcccttaattaatccttccc

SEQ ID NO: 252175 - DNA, 906 bp, Homo Sapiens
  misc_feature (662)..(749): n is a, c, g, or t
gctcgacccgatgtaatgtagcattgagagaggaaggtagttgggtggattgtggccagtgaagagaaggactgtgcggaagttcctcggcaatgcttccagggaagggtttttgaggggaggccccgctttttgcagccagccgttcatggtgttgagtgttttttagggagagccctccgggtctaagtagtgccttggaataggcccagggactggccaggctggccagggacgtttgctgagtggcccaaaggagagtagagatacaggtgcacggccagactcttggaggcccaattatcatcccgtgtccatcttgtaagtgtcaggtcttcgtcatgttgtaggccccaggtaactgtgccatctcatactcctttctggcgtttttcgagttcttccaacagtcggaaaattgcgagggacttttactcctttgccagtgaaattttctagggttcaagtcttccttcatcactcagtttgctgtgtgacttcaggtaagacgcttgaacctctcctggcatcagtttccccttctatgaggatagtagtatcaacctcataggattgctgtggagataaaatgctttcctaaaaccccttgggcacagggaagaggaagggacactagaagagctcataattaccaaggccgnnnnnnnnnnnnnnnnnnnnnnnnnnnnnnnnnnnnnnnnnnnnnnnnnnnnnnnnnnnnnnnnnnnnnnnnnnnnnnnnnnnnnnnnctaacaggtggagaggatgaggattaaaacacaagccttttatctatggtgcccgtaaatgtttactcgcatggattccttggctcttgtaggaaacttcttgcaagtaaaattgacaataataattcccgtgccgagctcatcgcaggaagaggtt

SEQ ID NO: 252176 - DNA, 719 bp, Homo Sapiens
gggaccctgtctccagtgggcgtcttgggccccggatctattctgggctgcgggcctgggaagggctcgccgggtgccaaatgagctgtcctaactctgcggggctgcagcttcctgcatgatgctggggagcttggcgcctgacccaggatctagaaggcactctgggcaggccgcgctccgcccacgaaggtacccaaccctctgggatagatgcaggaagcgatggttaagacccattttcacccaacttctcgccgcaggtctggcttaccacacgctcctccccattcccagtgagccgctttttgcagcaccaggcgaacacttacaccagtgctttgtaaaggaatcttattgtccaccccgtgtcttggcaaaagaacagtgatcacacagattcctacttgggctctttcctttaatccttcggaggctgagtttgccccaactcaggtttaaccacccaaggactctgagagctggcaggtctgagtaaccctggtaacaattctcttcaccttatcaaaacctgagctaaaaccaatgcatcagctgatgatgacagcagagagtggcagggctgaggacccaaagtcatttcccaggctggcggagaataaactgccagggagaagaatgagaagacaggagacaaactgtttggaaagctaaatcttccctcttaatgaataaaggtttttgccttgtcttaaaaa

SEQ ID NO: 252177 - DNA, 902 bp, Homo Sapiens
  misc_feature (787)..(787): n is a, c, g, or t
  misc_feature (878)..(878): n is a, c, g, or t
gggcttcaagcaacagcgacgcaagatggcagccaccacgggctcgggagtaaaagtccctcgcaatttccgactgttggaagaactcgaagaaggccagaaaggagtaggagatggcacagttagctggggtctagaagatgacgaagacatgacacttacaagatggacagggatgataattgggcctccaagaacaatttatgaaaaccgaatatacagccttaaaatagaatgtggacctaaatacccagaagcacccccctttgtaagatttgtaacaaaaattaatatgaatggagtaaatagttctaatggagtggtggacccaagagccatatcagtgctagcaaaatggcagaattcatatagcatcaaagttgtcctgcaagagcttcggcgcctaatgatgtctaaagaaaatatgaaactccctcagccgcccgaaggacagtgttacagcaattaatcaaaaagaaaaaccacaggcccttccccttccccccaattcgatttaatcagtcttcattttcacagtagtaaatttctagatacgtcttgtagaccctcaagtaccggaaaggaagctcccattcaagggaaatttatcttaagatactgtaaatgatactaatttttttgtcccatttgaaatatataaagttggtgctataacaaaatcatccctgtccaagtggtaaccaactggtccacgttagtttgaaaccttctggcggatccaagaaaagtctaatttaaaatttgatttcccatccatagactgggntgggggcaacatcttaaactccacactgttggaaaaagacaactatccacaccaaatcaacccttgtgctggcctggattaacacccgggncctgggggggtctctctgcgcatc

SEQ ID NO: 252178 - DNA, 947 bp, Homo Sapiens
  misc_feature (61)..(84): n is a, c, g, or t
gctgttaatagagctagtttggtagtgcacgtgtatatgtgtacatgtgtgctgcacatgnnnnnnnnnnnnnnnnnnnnnnnngacctcgcagattataagtattagagaaacaggacttctggttcatgaaatattttacttaatagccaggaatgacttatgttaaaaattgtgccgggcttataagtatctctttgatctggccaacagctcttcctctcgtgtttctaaaaacttcaaaatgccctcaggttctattgtggtgccctggtcaggtaacaatttagtttaaaagtgcacacttatggttcagtaaatgggctttgtctagtagtcacagatgctgagtatgaatttcaatggatccgttagctttactactaagatcttgctgagatcagagaagggcttctgggcaggctgagcactgggggtgtgcaacatggtaactctgaataagagaaaccctgagttttactgggcaaagaaagaacaagtggtaggtatgatttctgaacctggaaatagcgaaaatgaaggaaattccaaaagcgcgtatttccaaataatgacaggccagcaagaggacaccaaacctctagaaagaggtattctttcttccagctactgatggctttggcatcccacaggcgcattcctttggccttcaggatcttagatgcggatgtggagagtcaagaggtaggctgactctgagtcttcagctaaattctttggaaattagtttaaaaaaaataaatttataacatttaatttctatgtggatttgctcctctttgaacaaagcagagcccaggagtttctggatgaatacatgttctggtcttgttacaggttctggtaaatcagatggagaaatgttgttgcagaaatgtcagcaaactttacagcagtagttcacacatgcagctactatacattca

SEQ ID NO: 252179 - DNA, 1158 bp, Homo Sapiens
  misc_feature (1066)..(1081): n is a, c, g, or t
gtagcgaggcctgggtggcgattcggcacgagggacgacctaacgtcattggcacaggaatacaaggggaacctgctgctgaaacccatcgtggaagttgcaggccaggatatcagccactggtttgatccaaagaccagagacatccgcaagcacatagatccgctgaccggctgcctgaggtactgcaccccgcggggccgctttgtgcacgttccgcctcagctgccctgttcggactgggccaacgattttgggaagccctggtggcaggggtcgtattatgaggtggggcggctgtctgccaagacccggagcatccgcatcattaacacgctcacgtcgcaggagcacacactggaggtgggggttctggagtccatatgggaaatcctacaccgctatctcccctataactcacatgctgccagctacacgtggaaatatgaagggaagaacctgaacatggattttaccctggaagagaatgggatccgggatgaggaggaagaatttgactatctcagtatggacggtacacttcacacacctgcaatacttctgtacttcaatgatgatctcacggagttgtaggcaaggagatgtacactcgtgtagactcaagacgtatttcgagtttggctttttctgtgccttgaggaaaagtggtggggccgaggggtgcctggacccagatctccactcctctccaggagctagcctgtgcccttctgaagtgtaaaggccctattccctgccttcattacagtttgctctgagaaaattagtgaattaatctttgggaatgatacaagaagatcaagtaccttggtttagggagatgtagaagaggatagtcagagttcaggcaagaactgtttgatacttaagagagaagtagtctaccggggtggagggaacgcaaggcctctcttcgccatggtgggaaatgacgtgtcttccgccccccagcgggggtaacacggaaacacagtcgacgttgctccctcggaccgttaaaaccgttggccttaattcttcccccggtctaacaacgggggtgcgnnnnnnnnnnnnnnnnacggaacacgaccgcgaaacgcccgtgggcctgaagccgcgccctgtgtgcgtcgggcccgcgctcgctggaccgcg

SEQ ID NO: 252180 - DNA, 444 bp, Homo Sapiens
gactggaagccgagaggagaggacagctggttgtgggagagttcccccgcctcagactcctggttttttccaggagacacactgagctgagactcacttttctcttcctgaatttgaaccaccgtttccatcgtctcgtagtccgacgcctggggcgatggatccgtttacggagaaaactgctggagcgaacccgtgccaggcgagagaatcttcagagaaaaatggctgagaggcccacagcagctccaaggtctatgactcatgctaagcgagctagacagccactttcagaagcaagtaaccagcagcccctctctggtggtgaagagaaatcttgtacaaaaccatcgccatcaaaaaaacgctgttctgacaacactgaagtagaagtttctaacttggaaaataaacaaccagttgagtcgacatctgcaaaatctt

SEQ ID NO: 252181 - DNA, 404 bp, Homo Sapiens
  misc_feature (72)..(72): n is a, c, g, or t
  misc_feature (268)..(268): n is a, c, g, or t
  misc_feature (353)..(353): n is a, c, g, or t
gaagtccctctttgggtgacctgtgcctgcttcgtgcctggtgtgacgtctctcaggatgcctgagccgggngaagaagccagtctcagcttttagcaagaaagccacggtcagtggaagtggccgcaggcagccctgccgtgttcgaggccgagacagagcgggcaggagtgaaggtgcgctggcagcgcggaggcagtgacatcagcgccagcaacaagtacggcctggccacagagggcacacggcatacgctgacagtgcgggnaagtgggccctgccgaccagggatcttacgcagtcattgctggctcctccaaggtcaagttcgacctcaaggtcatagaggcagnagaaggcagagcccatgctggcccctgcccctgcccctgctgaggccactg

SEQ ID NO: 252182 - DNA, 550 bp, Homo Sapiens
ggtctccggagaggaagaagagccagcctaaactgtccactttcatgcctgttgatgaacgaggaagccaggaaaagctggccaatggggaggccgccatcatgggtgaccgcaacagaaacctcctgaacaaaaagttgacctcatcctatgagaccttcagtgcagctagtttcagcaaaaatgaggaagccaaccctgaggatattccccttacaaaaacaggggaatataagccatctcctgtcaatactctcactagaagagaagtttacctgtaggctataaaggagcaacagcaaagttctttacatgtatgaaaaggagaataaggggcaaaaaccttacaaagcaaaacgtttaatcacaaagagggggctaccaaagagacaaagctttgcctgccacttctgcctccagatcaggcctttagtgatactgttagcctgattctactgtacaatgtagaaaccatcccttgttacttgcatgtctaaaccccttcactgattcccaacactcacttttctctttcccccacccctctggc

SEQ ID NO: 252183 - DNA, 513 bp, Homo Sapiens
agaggagaaaaatacccaaatacagcatcaggtccacttcatctcggatgttaaacagttgttgctacatactctttatacagagaccagctatgaaagacggcactttcctctcggatttgcaagtgcctgtagcctcagaggccacataacttttcatattcttcccaacaggtttctatgttcacccgttatttgactaaaccagaaaaaaaggcgagggagagagatttttcccactgaactcttaataccttcagatgcccagaacacctcatggtgggtatctatatgaaatgcctctgtctcaaaggagacattttgcaaagagttattaattattgcaacaaggagaccaactaggtcaccttagtagtatttataaacacaaagggacatgtcaattatctgtgctgtgggaagtcaacaggagcaaactcaagaaagaaggcagaagacttaaaataaaagaaaagataattttaatacttctgtcttctatttttaaggaca

SEQ ID NO: 252184 - DNA, 662 bp, Homo Sapiens
cagaactgaggcagagattggaccatgctgaggccgataggcaagaactccaagatgaactcagacaggaacgggaagcaagacagaagttagagatgatgataaaagagctaaagctgcaaattctgaaatcatcaaagactgctaaagaatagaaactgttaaagagattcatctgtgtattactgacaaggttttttttgtttgttgcttgctttggtaattgaattctgaagaatttatctgcatgacgataactaggcattctatccatttgtagatcagagaaagtgaagagattatatattagtacttaaatttttacattttccaaatgaatgaaaatgtatgtttctttgtacttttttaaaaaaatcagcttagtaacaatactatatggtttcaactagtaggtaatctgcttatatttctaatgcaaacttaacaattgtgtactttttaaaagctgcaatatgtgatggaaaatagctgtggtcaattttgttatccatatttcagactcaattttagatacaatggtggctttatattttaagtatatagagctactcaaggagttgaatctccccttttctcattaacacaatttttctaagttgatatggtgtactcattaacatacaccaaatttacttttactt

SEQ ID NO: 252185 - DNA, 577 bp, Homo Sapiens
tgagttgtaatatatttgattatacaccataggttgtttcttctatttactggctaaaaaaatgtaaatttataaaaaactctcactatcttgcccaggctggcctccagtgcttgggcccttgtcattttggtggcaaacacttgtgaatgacttcctttacatgaatgtctttgttctaagtttcctattttctttaaacaaaataattatataaagccatctcagattaccataatttggagaaatctttatagcagtgcagctgaattatgtatttaatagatatcacttttttaaaaaatcctatttgtggcatgaagaacgttgaatagaaacatgtctgtatgtgagataaggaaatagttttaaaggaaaaccttaggatctaattatgaaaatacctgattaagctaggatttacaaatgaattctgttgccatagtgtagtttaaaaatttttagaataattataagaaaatcagtaggaaacttgcttgaggaatagttcttagtgggcagcctccctccttttgctgttccctattttgataatctattttgatcttcaaaaatc

SEQ ID NO: 252186 - DNA, 843 bp, Homo Sapiens
tggtaccggtccggaatttacgggatatcgtcgaacccacgcgtgcgcttgtttacatctggaaccttcagacgaaagagattgtacaggaaactacaaggccacacagatgtcgtgatctcaacagcttgtcacccaacagaaaacatcatcgccttctgtgcgctagaaaatgacaaaacaattaaactgtggaagagtgactgctaagtccctttgctcctgcccgcgagagactgtcgggaagttgacccggattggcaagaaacagggtgtcttggaggtggtcccccagatctgcgcctgggggtcaggacagggcctgatttgagcctcctctctgaagatgatttggccgagcggaaggtgtggaccaccggaaagttcttaaaagttgctggtgacatttcttgccaattctaacactgtctagggaagagttcctagtctattgtgttcaaacagagtcaacaaaagtttttaattttttattacagaagggtgaagttcaatttaacatgcgttgtgttttttcagtaaacgttctgtatcttttgatattccatgacccagtgcacgctgtggcctgtcaccgcaccgtggccccgcagctggctcccctttggcccacgccggcgccccattctctgctgcgtagatgccctggcccagggccctgatcctccattccgccagtagctgtctagtgtattttcgtcttctggaaaacagcattgagtggttgtttctggtaagagcgttgtgtcttgggagttggggccaatgcgtagcggctcgctgatctccgtggctcgtgtctggacagcagcggatgataagggg

SEQ ID NO: 252187 - DNA, 373 bp, Homo Sapiens
aaaataagcctaaacataaaataaaggcaatgcaatttaaccacaaagctatactgaaatccatttattccaaaaactaattaactaaaatatacggaaataaatagggttaagtactacaaacccccttctcttttttttccagaaactaccagatttttaaaaaaatatacagacagaaaacgtaaggttaacaaattgttactccattgggcatctccctttgaggataatcacttgtttacaatagggcttggggtcaccaacttgaggcctaggggaggaggaaacaggatactggcaaggcaaataggattatttcacaggcccaaatggaatttctttggggcaaacaacaggggtggtttaaacc

SEQ ID NO: 252188 - DNA, 467 bp, Homo Sapiens
ggagatctgaatgagtcaaagccggcggcctcggctcctcagctccacctgaaagtaggccgctgatcggccgcgggtcttgtcgaccgctaggccaccaggttcatgtggaggctcccaggcgcccgcgccgcgcttcgggtgatccggacggcggtggagaagctgagccgggctgaagcggggagccagacagcggcgggagcgatggagcgcgctgtagtgcgctgcgtaccttcggaaacccaagctgagcctgtcattcgctttggctgatggtagccacaagaacatgcagcgcgaccagagcgagccgctgggtcgagtcctcagccgcatcgctaccaatgccctaaagggtcacgctaaggcggccgccgccaagaagagcaggaagagccggccgaatgctagcggcggtgcggcctgttcagggccggggcctgagccggctgtgttctgcgagc

SEQ ID NO: 252189 - DNA, 1035 bp, Homo Sapiens
  misc_feature (692)..(713): n is a, c, g, or t
tttttgagactgcatagggctcggcgtggatgtaagacagggggtggggaattctactccatggtatcttcagagctaggataatgctccttatgcaatcccactgcatatgaccatggcagtagaacaagttcaattactacactggatgcgttaagtgtgctttcctagcagaaagcaccagggtggagtcaacagttcacatgctaatacttggaagtatttctagaagggggtgctcaatagagggcagacatgatgcaagttcttcatactagaaaggtgtcctgtgtgtgcatgcacagctggatgggggcacacaggagcaagcgcagaatttggttttctcccagtcaagtctaccctgatgttatctgtgcactgccacaatattatcttgctgcctttctagaagatgctgtagcagggtaagaaatccaaagttaatgttttggccagctgactgggataagaaccttttgtctgaaaggccctatgacatggcctgaatcgccaatcactaataaggagggactaagtctagccaagaggctcatctagagctgcttccggccaatgtagatttgtctcggccatgtattgagtgatctgcagctgatatcaaagcttctgttaaaaaacaaaacaaaataaattcaatacttttagtttaacagtgtgtagttcaaacnnnnnnnnnnnnnnnnnnnnnntatcccagtggaaagggaagtggtagcttaaggatgactattataaaattatgggaatcaaagaacttacctgaagggaacatttaagagaccatcgcttgacaggaagtgaaaaaaggccctggtgactcagctgaaaattgcacccctgtctatgaggtagaagccttcactttccaggatcttgtaggacattggtcagaattctgccattttggtgggttttctccctcttttgatttttttacaaggcagcaaacaaaggggcccaaaacaagcactgatgttgagtaacaagaaacagactcgggtaccttccctc

SEQ ID NO: 252190 - DNA, 421 bp, Homo Sapiens
  misc_feature (101)..(101): n is a, c, g, or t
  misc_feature (136)..(136): n is a, c, g, or t
cagtgccacgagataaacatccggggtaagacttgaactgggaagaaaacccaaaatcctgcgccttgcctccctgtgtgcccccccatcccagctgtgcnatgcaacaacacaggaacacctttcctagtgatgnaagaacttgcatcatgtctgcccctctattgagcacccccttcctagaaatacttcccaagtattagcatgtgaaactgttgactcccacccctggtgctttctgcctaggaaagcacacttaacgcatccagtgtagtaattgaacttgttctactgccatggtcatatgcagtgggattgcataaggagcattatcctagctctgaagataccatggagtagaattccccaccccctgtcttacatccaccgagccctatgcagtctcaaaaactgtgccgaa

SEQ ID NO: 252191 - DNA, 579 bp, Homo Sapiens
aaaatgtcagacaacatgggcaaaatgtcagaaagattaggtcaagacataaagcaatcattttttaaggtgcctcctttaattcctaagactgattcagaccctgaacatcgccgagtttcggctcaacttgacgataatgtggatgacaatattccacttagggtaatgctgcttctcatggatgaagtattcgacttaaaagaaagaaatcagtggttgcgaaggaatatcaaaaacctacttcaacagcttattagagctacatatggcgatactattaatagaaaaatagttgaccatgttgactggatgacttcacctgaacaagtagccgactcagtgaaacgtttcagagatgcattttggccaaatggcattttagcagaggctgttccatgcagagataaaagtattcgaatgagaacaagagtagcaggaaaaacgaaattacttgcaattatgccagatgagctgaagcacattattggggctgagacaacacggaaaggtattcttcgtgtttttgaaatgtttcagcacaaccaattaaataggagaatggtttatgtcttcttg

SEQ ID NO: 252192 - DNA, 942 bp, Homo Sapiens
gggggacacctggagaccaaacgcaggatgaggagttctgcagaggtcacagggaagtcacagaacagtaatacgctagcaggggcatggggagtcgtgggccgagaggaaccgggcccgggaagcgccgtcgtcgtcgtcgccggtcgcgttcccccggagaggtctgagaagctcgggccgcgggcctcgctgcccgccaccccgcggacaggcccgggcgcgcctggcctgcctttgcataggcccgtctgaacgtgggagcgcagcccgcctgacggctgagcccgagccccgcaaccctgcggcgtctaccctcctccggcgcggcccctcatcccggcgagcacggcggcggtgtgggccatggattaagaaggaggcggcctgggaggaggaagatggcggccggcaagagcggcggtagcgcaggggagattacttttctggaagctttggctagatcagagtctaagagagaaggaggttttaaaaataattgggagctttgatcactgaagaagaaagtgaaggacatacagataaagatgggaacaaatctgctcagtgtggatgaagatgaggattctgaaacctcaaaaggaaaaaagttaaatcgtcgatctgaaaatcgttgctaatagctctggtgaattcatcttgaagacatatgtaagacgaaacaagtctgaaagttttaaaactttgaaaggcaacccaattggacttaacatgttgagcaacaataagaaattgagtgaaaatacgcaaaatacgtcattatgttctggaaactgtagttcatggtagacgttttcatcatgctcatgcacagataccagtagtaaaaacagcagcccaaagcagtctggaccgaaaagaaaggaaagaatacccacctcatgtccaaaaagttgaaattaatcctgtaaggttaagtcg

SEQ ID NO: 252193 - DNA, 884 bp, Homo Sapiens
  misc_feature (720)..(720): n is a, c, g, or t
  misc_feature (787)..(787): n is a, c, g, or t
tcatggcgcccgaggagaactcgcggaccgaactcttgctgcagagtttcgagcgccgcttcctggcggcacgcacactgcgctccttcccctggcagagcttagaagcaaagttaagagactcatcagattctgagctgctgcgggatattttgcacaagactgtgaagcatcctgtgtgtgtgaagcacccgccgtccgtcaaatatgcccggtgctttctctcagaactcatcaaaaagccctcgggaggctcggtcacactctccgagagcacggccatcatctcctacggtaccacaggcctggtcacatgggacgccgccctctaccttgcagaatgggccatcgagaacccggcagtcttcactaacaggactgtcctagagcttggcagtggtgctggcctcacaggcctggccatctgcaagatgtgccgcccccgggcatacatcttcagcgactgtcacagccgggtccttgagcagctccgagggaatgtccttctcaatggcctctcattagaggcagacatcactgccaacttagacagccccagagtgacagtggcccagctggactgggacatcgcgacggtccatcagctctctgccatccagccagatgttgtcattgcagcagacgtgctgtattgcccagaagccatcatgtcgctggtcggcgtcctgcggaggctggctgcctgccgggagcaccagncgggctcctgaggtctacgtggcctttaccgtccgcaacccagagacatgccagctgttcaccaccnagcttagccgggccgggattcagatggggagtgggaacctcgtcatgagcagaaactgttttccctacgaagagcacttgggagatggcaatgcctc

SEQ ID NO: 252194 - DNA, 1926 bp, Homo Sapiens
ggcctgggtggcgaatcggcacgagggcgccgcttcctggcggcgcgcacgctgcgctccttcccctggcaggggggcggcgggcgagcggagaggcccgcggggctcgcgggagtccaggggcagacgggatgggtctccgtgctgaaacccccggcgctcctgccacagcttagaagcaaagttaagagactcatcagattctgagctgctgcgggatattttgcagaagactgtgaagcatcctgtgtgtgtgtgaagcacccgccgtcagtcaagaaagcccggtgctttctctcagaactcatcaaaaagtaacctgaagctttcaccgtagacgtgctgtattgcccagaagccatcgtgtccctggtcggggatcctgcggaggctggctgcctgccgggagcaccagcgggctcctgaggtctacgtggcctttaccgtccacaacccagagacgtgccagctgttcaccaccgagctaggccaggctgggatcatatgggaagcggaagctcatcatgaccagaaactgtttccctatggagagcacttggagatggcaatgctgaacctcacactgtaggactcacacacgactccaacgggattgtgagaatcaagtcaatctcatgggaagaatttttatatgggaaagcggataaaactttcattggactggaatgtttggagaatgttaaattccaaatcaggaaccacaaactgccctctaataagacatcggctatctaagcgtgtgggtgccccctttctgccagcagttctggttcttaagaaaatcaccataaatcagacatgaaaattctggctccaaaaatagcattttctttgtgcaaataaaaacgtgtgtatcaagtatgatgttcccccaacgtggacacactcagttcctcacaaagccaagcccactgcagctgccacatccctgggcttacggtgcagcaggtgcttttttcaagacaggaatcaaaatgttaggaacacggcagaaaggggacacctggagaccaaacgcaggatgaggagttctgcagaggtcacagggaagtcacagaacagtaatacgctagcaggggcatggggcgtgaagaacagaagaagagaggaagcgtttccaagcctccagagaagaaatcaaggccaaccaaagcttcccgggtcacagaaccaattcttttaccaggcagtaccactgctgtcatttcagcttctggccactgggaggtgctgctcgaaagggtttgccctgagactccaagaagaagctgcgggaaggacagcaggggtcctggggttttatagcctctggcccaggagttatgtgtccataaccaaagggagcacagtctgcacccagctctcatcccatcggagctgctgcgactcccgcaggttcttccggaactggtttagcttgcccgcaggatcaggaaagtttgagaaaagcatctgcagctgagctgccagttcctctgagtcctcaaagaccaggccattttcttcatgtttcaccagctcatgtaaacacttgaagttcacagcacacacaggcaaacagcacccgaacatgtccaccaccttcatgggcaggtccaggccactggaggacgtgtgcagacagacacccaggtccgccgaccctagaagcagggggtagtcctcggcctccagccagggggtgcagacctggatgtgctggaagtgcttctggtggatgaggcggctataatactccctcagaggccctttgcctgttatcacacagacgagagaaggaaggttgtgtccatcaagagtcagttgttcaaacttttctaaagctgccagcaggatggagaagtcttcgtcctctgtccagctcgtgctgctgaccagcagagctggccgctcacggagacgtgt

SEQ ID NO: 252195 - DNA, 847 bp, Homo Sapiens
tcgatccgcaggcaagctaaccagttctggaagaaccggcaagagtctcacagctctgatgggatgagactgggtgcagacttgtgctcccttttggttatggacacataactcctgggccagaggctaaaaccccagggcccctgctgtccttcccgcagcttcttggagtctcagggcaaagcctttcgagcagcgcctcccagtggccagaagctgaaatgacggcagtggtgtcacctggtgaatgacccgggaagctgtggttggccctgatttcttctttggagtctctgaaatgcttcctgtcttctgttcttcatgccccatgcccctgctaagcgtaattactgttctgtgaacatccctgtgaacctctgacagtactcctcaatcctgcatttggtctcccaggtgtcacctttctgccatgttcctaacactttcattcctgtcttgaaaaaagcacctgctgcaccataagcccagggatgtggcagctgcagcgggcttggctttgtgaggaaccgagtgtgtccagggatgtggcagctgcagcgggcttggctttctgaggaaccgagtgtgtccacgttgggggaacgtcatccttgatacacacgtttttatttgcagaaagaaaatgctatttttggagccagaattttcatgtctgatttatgatgattttcttgagaaccagaactgctggcagaaagggggcacccacacgcctagacagctaatgtcttattagagggcagttttgattcctgatttggaatttaataatctccaaacattccagtccaatgaaagttttatccactttcccatataaaaattc

SEQ ID NO: 252196 - DNA, 460 bp, Homo Sapiens
  misc_feature (361)..(361): n is a, c, g, or t
  misc_feature (407)..(407): n is a, c, g, or t
  misc_feature (412)..(412): n is a, c, g, or t
  misc_feature (438)..(438): n is a, c, g, or t
  misc_feature (449)..(449): n is a, c, g, or t
gcaaagttaagagactcatcagattctgagctgctgcgggatattttgcagaagactgtgaagcatcctgtgtgtgtgtgaagcacccgccgtcagtcaagaaagcccggtgctttctctcagaactcatcaaaaagacgtgctgtattgcccagaagccatcgtgtcgctggtcgggatcctgcggaggctggctgcctgccgggagcaccagcaggctcctgaggtctacgtggcctttaccgtccacaacccagagacgtgccagctgttcaccaccgagctaggccagggtgggatcatatggggaagcggaagttcattcatgaccagaaactgtttccctatgggagagcacttnggagatgggcaatgctgaaccttcacactgttagggattcacacangattncaacggggatttttgaggattcaaantcaatttcatngggaagatttt

SEQ ID NO: 252197 - DNA, 1229 bp, Homo Sapiens
acctcccggccgcggctgccctctgcccgggttgtccaagatggagggcgctccaccggggtcgctcgccctccggctcctgctgttcgtggcgctacccgcctccggctggctgacgacgggcgcccccgagccgccgccgctgtccggagccccacaggacggcatcagaattaatgtaactacactgaaagatgatggggacatatctaaacagcaggttgttcttaacataacctatgagagtggacaggtgtatgtaaatgacttacctgtaaatagtggtgtaacccgaataagctgtcagactttgatagtgaagaatgaaaatcttgaaaatttggaggaaaaagaatattttggaattgtcagtgtaaggattttagttcatgagtggcctatgacatctggttccagtttgcaactaattgtcattcaagaagaggtagtagagattgatggaaaacaagttcagcaaaaggatgtcactgaaattgatattttagttaagaaccggggagtactcagacattcaaactataccctccctttggaagaaagcatgctctactctatttctcgagacagtgacattttatttacccttcctaacctctccaaaaaagaaagtgttagttcactgcaaaccactagccagtatcttatcaggaatgtggaaaccactgtagatgaagatgttttacctggcaagttacctgaaactcctctcagagcagagccgccatcttcatataaggtaatgtgtcagtggatggaaaagtttagaaaagatctgtgtaggttctggagcaacgttttcccagtattctttcagtttttgaacatcatggtggttggaattacaggagcagctgtggtaataaccatcttaaaggtgtttttcccagtttctgaatacaaaggaattcttcagttggataaagtggacgtcatacctgtgacagctatcaacttatatccagatggtccagagaaaagagctgaaaaccttgaagataaaacatgtatttaaaacgccatctcatatcatggactccgaagtagcctgttgcctccaaatttgccacttgaatataattttctttaaatcgttaagaatcagtttatacactagagaaattgctaaactctaagactgcctgaaaattgacctttacagtgccaagttaaagtttaccttattctcggccgggtgcagtggctcgtgc

SEQ ID NO: 252198 - DNA, 2007 bp, Homo Sapiens
  misc_feature (895)..(929): n is a, c, g, or t
gggggaggagggaaagcggcgagtaagatggaagatgaggaggtcgctgagagctgggaagaggcggcagacagcgggcaggaaatccaaatctcctcccaaagtgcccattgtgattcaggacgatagccttcccgcggggccccctccacagatccgcatcctcaagaggcccaccagcaacggtgtggtcagcagccccaactccaccagcaggcccacccttccagtcaagtccctagcacagcgagaggccgagtacgccgaggcccggaagcggatcctgggcagcgccagccccgaggaggagcaggagaaacccatcctcgacaggccaaccaggatctcccaacccgaagacagcaggcagcccaataatgtgatcagacagcctttgggtcctgatgggtctcaaggcttcaaacagcgcagataaatgcaggcaagaaaagatgccgccgttgctgccgtcaccgcctcctgggtcgtccgccacgggttgcactgccgtggcagacagctggacttgagcagagggaacgacctgacttacttgcactgtgatcccccttgtccgcccactgtgaccttgaaccccatgcactgtgacctccccccttctcccccttcccactgtgattggcacatcgacaagggctgtcccaagtcaatggaaagggaaagggtgggggttaggggaaggttggggggacccagcaaggactcagagagtcagacagtgccacttggccacttggggtaaagccagtgccagcaataacagtttatcatgctcattaatttgggatttcaaaacacaaatgaaaactcacacccacccacccccaagtgcatgtctccatcacttaaaaagtaagttccatttgaaaatatnnnnnnnnnnnnnnnnnnnnnnnnnnnnnnnnnnnatacaaatatctgatttgcaagaaaaagtgcatgggaggggttttagtggtttaatgaatttttaattaagaaagggtagtttggtagtctacttaaaaatgtttctgggaaattcactagaaacattaaccaataggattttggtgagcttagcttctgtattcctactgccgcccagaaaaggggcagggctctgcagccgccaggacagacgagcaccccatgcctatacctccctccccgagctaagtcccagggcatctgggccttgcctgggagactgggctagctctgtaggctcggagactgggggagggtgccaaccccacctctagtattttgggagatagggaaagtgaaccgacttccccttcccatacccctcagggtggttccctaccagccaggcttactacttctagaagaaagcagagtgccagggagtgagattgcatccctgggcttagaagtgacggagagaagacttgtttagtattttggccatcagcacaaggaaaaccaggagagagtctgcctccaggactctgagccttctgcctcgtatgttcagaaggtggataggtcttcccactccagcatggcttgaactcttaggggtctgcagtgctccatctccattggtggccccagctcagtaactatacctggtacatttcctgtgtgcaatcagtaccttgaaggcagaacattctgaataaagttggaaaaagaacagctttgctttgcaaagatggatgacagacttggttcctcagaggcctaggctaaccgtcaacccttttaccagagcgagggcctggaatggaaggcagtttatcctctgtccctggagcctggggttagccttggctccttgaggtggaagagactaagagggcagctgcccagagcagctgtggtgtacctggctcctctcaggcttcctgatcccttccgttgcactgcgccttatccctcagccagccagacaggctccctggtcctgaccagcagatacgtttcggaggtggttggggtgggacgggatgaaggggcgccgtgggtggggccaagtgg

SEQ ID NO: 252199 - DNA, 694 bp, Homo Sapiens
agaaaaagctagtctagttgaggggagaaaatatacataaataaaaattaaatatttgagttctcaatttttcaaaaatggataccactagaaatcgtactttaaagaaaataatcttgaaaaaatgggtattttcctgctagaacatgatgagtgattgtacatgagagtaaatgcagcaagaaatccgatatgactcgcagattctgaccatggatgctgagaaaaatacagaatttggaggaggattttttttgtggggggaagataatgagtttggttctggcataccatgtttgaggtgttggagaaagagtaatgcctttggttccctcactaggatgcattttctcttctctttatttatacaaagacaatgtattattcagttaattaaaaccagctcctaatatatatagtagatacttttagagcatttttagtgaatttccacctttgcctcttactcctattcctttctttattgcatttcccctttttagttggatcaatgtatcagttaggattaggtccagctgcaaggacagagaagactccccgaaaaaaaccactggcttaaatgagctgggaaagtttatttttcttatacataaaaggttcaagtcgatgggtcataaagtcagaatccttcttggttacctgcttgcggacgggaccccaattgtgaatgagg

SEQ ID NO: 252200 - DNA, 676 bp, Homo Sapiens
tgacatttgagtggaaaacaaaagttgtctgccctccaaagaagttggagtgcaaattcgtccagaaacacaaaacctacgacctgcggctgctctcctctctcaccgggtcctggtccctggtccacaacggagtctcgtactatataaatctgtgccagaaaatatataaagggcccctgggctgctctgaaagggccagcatttgcagaaggaccacaactggtgacgtccaggtcctgggactcgttcacacgcagaagctgggtgtcataggtgacaaagttgttgtcacgtactccaaaggttatccgtgtggtggaaataagaccgcatcctccgtgatagaattgacctgtacaaagacggtgggcagacctgcattcaagaggtttgatatcgacagctgcacttactacttcagctgggactcccgggctgcctgcgccgtgaagcctcaggaggtgcagatggtgaatgggaccatcaccaaccctataaatggcaagagcttcagcctcggagatatttattttaagctgttcagagcctctggggacatgaggaccaatggggacaactacctgtatgagatccaactttcctccatcacaagctccagaaacccggcgtgctctggagccaacatatgccaggtgaagcccaacgatcagca

SEQ ID NO: 252201 - DNA, 675 bp, Homo Sapiens
gagcataaagttgggagtgacaccagagccttctgcaagatgcttctgattctgctgtcagtggccctgctggccttcagctcagctcaggacttagatgaagatgtcagccaagaagacgttcccttggtaatatcagatggaggagactctgagcagttcatagatgaggagcgtcagggaccacctttgggaggacagcaatctcaaccctctgctggtgatgggaaccagaatgatggccctcagcagggaccaccccaacaaggaggccagcagcaacaaggtccaccacctcctcagggaaagccacaaggaccaccccaacagggaggccatccccctcctcctcaaggaaggccacaaggaccaccccaacagggaggccatccccgtcctcctcgaggaaggccacaaggaccaccccaacagggaggccatcagcaaggtcctcccccacctcctcctggaaagccccagggaccacctccccaagggggccgcccacaaggacctccacagggggcagtctcctcagtaatctaggattcaatgacaggaagtgaataagaagataacagtgtttcaaatgccgtgaaacataatggcatcatgctctaacttcaagataccaataaaacaatcagcttgcaatttctgattatagcatctcct

SEQ ID NO: 252202 - DNA, 1368 bp, Homo Sapiens
  misc_feature (1169)..(1185): n is a, c, g, or t
tccccagacacaaagatctcggagacagacaacagagagcctccgtgttccatcctgcccgaggctgtttgtcaacagttcccttaaaagatgccctggaaatgctcccaacaacaagggactcaagtatggggctgagtttgttaaaaaagcagctaaatgtgtttaggaaacacacgaagtgaaaccagacagtgatggcccatgtacaagacttgtgcttgaagctttggtgtgcctccatggccaatttttcaggcaccaaaacccattcctgattaattattgatatacaatgcaaaccaaactatgaaaacacagactttttttcagaagagggaaataaaggcacagaaacctgccaaaatagatatttttttccataagaatagtatggttgattaaaatagtttatcactagtaaaacttgtatcactagagcagacaatacaaattagttttttaaaaaatgacattcactgaattcttggtctgtgcattcaatgtgaataatcatcaaaaatatattacaattaaaggtttgtaaggagctctgtctgggatttctgcagtatattatttcggaggagaagaaccaccataaagtatgagctatccactgttcctttttatgtcatgtatggtaatcagtctatctcctaatgcaggctcacaaacttccacggtgagatgtctaagtgacttagtgaccttcacactcattaaaggcagccctgtccatcaaactccatacctagaaagttcaataaactgtattacattttaataaatatttctgtgtactttttgttttttgcttttaagctcagcttaaattttgtcaaggaaaccatttcacaagacagtatgtcacagcctactatcagcaatagtccttgtttattagaatctgcagatgtccatattacatcaaatataaatatatattatatttacatttccttcttagctttcaatttaggtgagtgtatttatagataatgccactaacgcaccactattctaatcctcagtgcaactcataccttctttccattagatgctcattaatgtaagacagcatcttaaaagaggggtactgttcttttttaaaataaaaggaaagaaagggaatccaagaatggaggtctagacatttcctaagagannnnnnnnnnnnnnnnnatacttagaaatacttgaaaaatgtggtccctttttgtagtactagtctctacttggggacaagaaaatagaatatgcaactcagaaaggaaagagcccaaagacgagagaacctgcttgttagctcattaacctgtttagtaaagatctgctttaaaatgcctgatgctgtgcagtatcata

SEQ ID NO: 252203 - DNA, 507 bp, Homo Sapiens
ccaaagcccctccaccattagctttaaaatacaacagttcttcctttatggcttctgtctcctgatttaattgaaggttttctttatgggaataggcgtttttctgaatccaatataaatttttcatcacgataggttctttggaaatagcttcctggcacgggggaggtggacagtaacagcagtcaaaggtcatggccaggtgttcatgggtcagggtacggcccagtttgcttggctctacaaggcccaaaacggtttggacttttccacttaaggaagacatttctgatggtaccaccaagagatgttctaaaaagaggatttcttttttctgtagtcgcagctactcaggaagctcaggaggctgaggcaggaagttcgcttgagctcaggaggtcgaggctgcagtgagccgtgatcgcgccaaatgcactctagcctgggaagcagagccagaccctgaatctcgggtaaaacgcgctgccttctccctgggaacttccc

SEQ ID NO: 252204 - DNA, 646 bp, Homo Sapiens
ccaataatgccacacttgatactggttccatcagctccatggagaatttcattcataaggacatcggtaagctgctccactgacatggccctggtctctgaggagtgagttgcatccacataaaacccggctccagatatgatatggacgccagtctcttctgcaagcctcttcaacgtctgtgtgtctcggctaatcccagtggttgtgttttccaccaaagcccctccaccattagctttaaaatacaacagttcttcctttatggcttctgtctcctgatttaattgaaggttttctttatgggaataggcgtttttctgaatccaatataaatttttcatcacgataggttctttggaaatagcttcctggcacgggggaggtggacagtaacagcagtcaaaggtcatggccaggtgttcatgggtcagggtacggcccagtttgcttggctctacaaggcccaaaacggtttggacttttccacttaaggaagacatttctgatggtaccaccaagagatgttctaaaaagaggatttcttttttgtgaatgcggtttctctcctctctctctttctgtcttaaaataccttaatattttcagactgtggttgactacaggtaactcgggtacaacgcgc

SEQ ID NO: 252205 - DNA, 1003 bp, Homo Sapiens
  misc_feature (530)..(530): n is a, c, g, or t
gccaatggaacccacccaaaggtgtctgggcacgtcatcacagacattgtggaggggaagaaagttggtaccttcttttcagaagtaaagcctgcaggccctactgttgagcagcagggagaaatggcgcgatctggaggaaggatgttggccaccttggaacctgagcagagagcagaaattatccatcatctggctgatctgttgacggaccagcgtgatgagatcctgttagccaacaaaaaagacttggaggagacagaggggagacttgcagctcctctgctgaaacgtttaagcctctccacatccaaattgaacagcctggccatcggtctgcgacagatcgcagcctcctcccaggacagcgtgggacgtgttttgcgccgcacccgaatcgccaaaaacttggaactggaacaagtgactgtcccaattggagttctgctggtgatctttgaatctcgtcctgactgtctaccccaggtggcagctttggctatcgcaagtggcaatggcttgttactcanaggagggaaagaggctgcacacagcaaccggattctccacctcctgacccaggaggctctctcaatccatggagtcaaggaggccgtgcaactggtgaataccagagaagaagttgaagatctttgccgcctagacaaaatgatagatctgatcattccacgtggctcctcccagctggtcagagacatccagaaagctgctaaggggattccagtgatggggcacaacgaaaggatcctgcccatggttgtggattccgaggccagggttgataaggcccccaggtaatccaaaactcctaaggtgaatattccgcctggccgtaattgttttggaaactttggttatccccccgggaatttggctccggaaaccccttaatttgggccaaaatccttgaaatggctgaaaaatgggaaacaggtaaaaaaatccttgggaggccccccaattttgcccccctattctgaaa

SEQ ID NO: 252206 - DNA, 834 bp, Homo Sapiens
  misc_feature (657)..(658): n is a, c, g, or t
  misc_feature (661)..(662): n is a, c, g, or t
  misc_feature (664)..(674): n is a, c, g, or t
  misc_feature (676)..(676): n is a, c, g, or t
  misc_feature (679)..(682): n is a, c, g, or t
acggaggccgcggcgagcaggcggagctgcgggtcgggacgctctgcgtggggcggggcgcaagggaggtttcgagcccggaaggtccggcgcccagagctaacgggagtcccaggttaaacactttaagatgagaaaaattgatctctgtctgagctctgaagggtccgaagtgattttagctacatcaagtgatgaaaaacacccacctgaaaatatcattgatgggaatccagaaacgttttggaccaccacaggaatgtttccccaggaattcattatttgtttccacaaacatgtaaggattgaaaggcttgtaatccaaagttactttgtacagaccttgaagattgaaaaaagcacgtctaaagagccagttgattttgagcaatggattgaaaaagatttggtacacacagaggggcagcttcaaaatgaagaaattgtggcacatgatggctccgctacttacttgagattcattattgtatcagcctttgatcattttgcatctgtgcatagcgtttctgcagaaggaacagtagtctcaaatctttcctcataatgataacaaaatgctcttgcatgattttttaacaatatatttaaacaggaagttgtcactgatatactttattaaaaggatttttaaccccnnccnncnnnnnnnnnnnanaannnnccttggtcggcggccccggccccccaaaaagttttcaaaaacattcgttgtgcgccggcgggcccaataggaaaggggaacatggtccaataccggttttcctaaggaaaaccctgggcctggacttagggccttggaattcccccccaaat

SEQ ID NO: 252207 - DNA, 919 bp, Homo Sapiens; identical to SEQ ID NO: 83016
  misc_feature (600)..(600): n is a, c, g, or t
  misc_feature (603)..(603): n is a, c, g, or t
  misc_feature (609)..(609): n is a, c, g, or t
  misc_feature (841)..(849): n is a, c, g, or t

SEQ ID NO: 252208 - DNA, 630 bp, Homo Sapiens
cgaaagagaatggtcagtgtattttctatatggaagatatcttttgggaccattatcaacaagagcaaagaaactttcctgaattaccatatattagaagaattttaaattgacatggaaaacaacattagaaaacaaaacattatttttttaaattaagcacaattttaccatttgcaagattctgatttactgcattctgatgctaaatgaaacagatattatctggaccattcaacaaaacctttactacatgtagactatcaagtctattttacctaaagtacaaatatatctttcctaggtctccagtttgatgccaccagttctcttaagtagcaaaccctgcctggttccaaaggtatctgagagacctcaaacataaaatcattacaagaaaaaaacagatcaaattcacccaaagtaggaatctagcaaaaatctaaccaaatatggctaccttaatcaaacaataattttagctctagacttaaagacagtggcagcaaacaacaataaaacaacaaaaaagcaatcacagcaagctctgtaattcagagagaaaaaccttactgtcactaacatttaaaaggaatttttcagatgcgtcattacacaggtacgttgaac

SEQ ID NO: 252209 - DNA, 1410 bp, Homo Sapiens
  misc_feature (1027)..(1027): n is a, c, g, or t
  misc_feature (1071)..(1163): n is a, c, g, or t
  misc_feature (1237)..(1237): n is a, c, g, or t
  misc_feature (1364)..(1364): n is a, c, g, or t
  misc_feature (1387)..(1387): n is a, c, g, or t
atgatttcttccattgtgaacagtacttactatgcaaatgtctcagcagcaaaatgtcaagaatttgggaggtggtacaaacatttcaagaagacaaaagatatgatggttgaaatggatagtctttctgagctatcccagcaaggcgccaatcatgtcaattttggccagcaaccagttccagggaacacagccgagcagcctccatcccctgcgcagctctcccatggcagccagccctctgtccggacacctcttccaaacctgcaccctgggctcgtatcaacacctatcagtcctcaattggtcaaccagcagctggtgatggctcagctgctgaaccagcagtatgcagtgaatagacttttagcccagcagtccttaaaccaacaatacttgaaccaccctccccctgtcagtagatctatgaataagcctttggagcaacaggtttcgaccaacacagaggtgtcttccgaaatctaccagtgggtacgcgatgaactgaaacgagcaggaatctcccaggcggtatttgcacgtgtggcttttaacagaactcagggcttgctttcagaaatcctccgaaaggaagaggaccccaagactgcatcccagtctttgctggtaaaccttcgggctatgcagaatttcttgcagttaccggaagctgaaagagaccgaatataccaggacgaaagggaaaggagcttgaatgctgcctcggacatgggtcctgccccactctatcaacacaccacccaaacgccctccccaagtgaaaacaactactattgccactgaaaggaatgggaaaccagagaacaataccatgaacattaatgcttccatttatgatgagattcagcaggaaatgaagcgtgctaaagtgtctcaagcactgtttgcaaaggttgcagcaaccaaaagccagggatggttgtgcgagctgttacgctggaaagaagatccttctccagctcagccagaacgtgatgccatttatgaacaggagagcaacgcggtngcatcaccatggcgacaggccgccccacattatccatgttccannnnnnnnnnnnnnnnnnnnnnnnnnnnnnnnnnnnnnnnnnnnnnnnnnnnnnnnnnnnnnnnnnnnnnnnnnnnnnnnnnnnnnnnnnnnnacaggccctcggttccccccacggcaacccacggtggcctctccagcagagtcagatgaggaaaaccgacagangacccggccacgaacaaaaatttcagtggaagccttgggaatcctccagagtttcatacaagacgtgggcctgtacctgacgaagagggccattccagactctgtctgccccagctcgacctttccnaagtacaccattcattcaagttnttttcagaaccagtggtactatt

SEQ ID NO: 252210 - DNA, 1478 bp, Homo Sapiens
  misc_feature (1333)..(1333): n is a, c, g, or t
ggacgtcgtgggctgcagcgcagcagcacccaacgcagtgagtaccttgatctcctgcgtggcctcgtccctggtcttagttccaccgggcagcgggagtcaggaccgcctgtcctcagacccctccgcagcgactgtggcggccgcaggttggcgcctcgtgtgggccgggaacagaggcgggaggcgctgtaccctcccggtggagtcgggagggagggaggcagggaaggggacagggggctgcacctgtaataagcccttgtccccatgcagtctagcaggaaaggagagggagctttccccgaagaccctcctggaccagccccaggctcctgtgctggtgaggccgagggagagggatgtgggcataggacacgtagcaggatttccattttagaggcagccggacctgtcttcaggtcccttccttggtgagagacaggggtacgccagaggaagctgggcgctcggcctctgtgcagcctcatctcctggaatctgagtattgaaaactgggcttttacttcgcacacctcagcacagactcccatgggaatccaggtcacagcaaagcagccctgggcctccattctcctttaagcaagcatgacaatcctcacttcactgagtttttattaaaactagcaatgaccttagaaagcaaggcatgacctcagctccacttttgaggctgcagtccattcagagaggtttcgcagactcggtaacggccagaacagacagcctgggccctgccgcaggctaactcagaatctttgggagtagtgaccaacttctgcttttggaaaaacctctacaggcggttctgagaagtccaagggttgctgggagaggttggtaagtggcgtggtgattacatgtgtcttggaagcatcctgggctgggatttgataagaaaccattaggtggaagaaccttccttttaaaaaagatctcttcattctctgcctagcaggttgcacgccagggcctgtactgaccacctccacgtgccactggggctgtaaggaggaatggcggccgtgggcagcctgcttggccggctgaggcagaacaccgtgaaggccaccggacctgcactccgccgcctgcacacatcctcctggcgagctgacagcagcagggcctaactaactcgtgtgcaccgccaggcttatgcacgactctaccccgtgctgctggtgaagcaggatggctccaccatccacatccgctacagggagccacggcgcatgctggcgatgcccatagatctggacaccctctctcctgaggagcgccgggccaggctgcggaagcgtgaggctcngctccagtcgaggaaggagtacgagcaggagctcagtgatgacttgcatgtggagcgctaccgacagttctggaccaggaccaagaagtgaccgtggctccagccaccccgggacattgctaagatgggagggctgttctcaaat

SEQ ID NO: 252211 - DNA, 731 bp, Homo Sapiens
  misc_feature (564)..(594): n is a, c, g, or t
gggagtgacgtcgtgggctgcagcgcagcagcacccaacgcagttgcacgccagggcctgtactgaccacctccacgtgccactggggctgtaaggaggaatggcggccgtgggcagcctgcttggccggctgaggcagagcaccgtgaaggccaccggacctgcactccgccgcctgcacacatcctcctggcgagctgacagcagcagggcctcactcactcgtgtgcaccgccaggcttatgcacgactctaccccgtgctgctggtgaagcaggatggctccaccatccacatccgctacagggagccacggcgcatgctggcgatgcccatagatctggacaccctgtctcctgaggagcgccgggccaggctgcggaagcgtgaggctcagctccagtcgaggaaggagtacgagcaggagctcagtgatgacttgcatgtggagcgctaccgacagttctggaccaggaccaagaagtgaccctggctccagccaccccgggacattgctaagatgggagggctgttcttaaatcactcgttcctggaagctgccgnnnnnnnnnnnnnnnnnnnnnnnnnnnnnnnccttggtggggcggccctcggccccttccaaaaggtttttcaaaaaccatttcggttggggccgcgcgggcgccccctaagggaaaagggaaaaaggggcccaaaaactgggttttcccaaaagaaaaaacccgggg

SEQ ID NO: 252212 - DNA, 776 bp, Homo Sapiens
  misc_feature (668)..(668): n is a, c, g, or t
gggagtgacgtcgtgggctgcagcgcagcagcacccaacgcagtgagtaccttgatctcctgcgtggcctcgtccctggtcttagttccaccgggcagcgggagtcaggaccgcctgtcctcagacccctccgcagcgactgtggcgtccgcagtctagcaggaaaggagagggagctttccccgaagaccctcctggaccagccccaggctcctgtgctggttgcacgccagggcctgtactgaccacctccacgtgccactggggctgtaaggaggaatggcggccgtgggcagcctgcttggcccgctgaggcagagcaccgtggaaggccaacggacctgcactccgccgcctgcacacatcctcctggcgaactgacagcagcaaggcctcactcactcgtgtgcaccggccaggcttatgcacgactctaccccgtgctgctggtgaagcaggatggctccaccatccacatccgctacagggagccacggcgcatgctggcgatgcccatagatctggacaccctgtctcctgaggagcgccgggccaggctgcggaagcgtgaggctcagctccagtcgaggaaggagtacgagcaggagctcagtgatgacttgcatgtggagcgctaccgacagcttctggaccaggacccagaagtnaccgtggctcccgcccacccccgggacattggctaagaatgggaagggctgttcctttaaatccactccgtttcttgaaagcaaaacatataactaccgcaccgatca

SEQ ID NO: 252213 - DNA, 506 bp, Homo Sapiens
  misc_feature (436)..(436): n is a, c, g, or t
  misc_feature (451)..(451): n is a, c, g, or t
  misc_feature (473)..(473): n is a, c, g, or t
  misc_feature (490)..(490): n is a, c, g, or t
ttcggcacacgcaagaacgcctctgaccacagcctgtgtcactcgaggaagccccgaggtcatcctgccccggcacgtccaccagctctggtaatgtctcctgtggcccggcagtgccaatcacagccagcctcagtcatgttggcactctgctgcagcactgtcggctgaccagagcttgaacatttatctgcagccggctgaggagagcaccgtgaaggccaccggacctgcactccgccgcctgcacacatcctcctggcgagctgacagaagcagggcctcactcactcgtgtgcaccgccaggcttaatgcacgactctaccccgtgctgctggtgaagcaggatggctccaccatccacatccgctacagggaagccacggcgcatgctggcgattgcccatagatctggacaccctgtctccctgaagnagcgccgggccaggntgcggaacgttgaaggctcagntccagtcgaggaaggantacgagcaggagttca

SEQ ID NO: 252214 - DNA, 3092 bp, Homo Sapiens
  misc_feature (2791)..(2791): n is a, c, g, or t
  misc_feature (2941)..(2941): n is a, c, g, or t
  misc_feature (2947)..(2956): n is a, c, g, or t
  misc_feature (3078)..(3078): n is a, c, g, or t
tcaaaggggcaagagctgagcggaacaccggcccgccgtcgcggcagctgcttcacccctctctctgcagccatggggctccctcgtggacctctcgcgtctctcctccttctccaggtttgctggctgcagtgcgcggcctccgagccgtgccgggcggtcttcagggaggctgaagtgaccttggaggcgggaggcgcggagcaggagcccggccaggcgctggggaaagtattcatgggctgccctgggcaagagccagctctgtttagcactgataatgatgacttcactgtgcggaatggcgagacagtccaggaaagaaggtcactgaaggaaaggaatccattgaagatcttcccatccaaacgtatcttacgaagacacaagagagattgggtggttgctccaatatctgtccctgaaaatggcaagggtcccttcccccagagactgaatcagctcaagtctaataaagatagagacaccaagattttctacagcatcacggggccgggggcagacagcccccctgagggtgtcttcgctgtagagaaggagacaggctggttgttgttgaataagccactggaccgggaggagattgccaagtatgagctctttggccacgctgtgtcagagaatggtgcctcagtggaggaccccatgaacatctccatcatcgtgaccgaccagaatgaccacaagcccaagtttacccaggacaccttccgagggagtgtcttagagggagtcctaccaggtacttctgtgatgcaggtgacagccacgggatgaaggatgatgccatctacacctaccaatggggtggttgcttactccatccatagccaagaaccaaaggacccacacgacctcatgttcacaattcaccggagcacaggcaccatcagcgtcatctccagtggcctggaccgggaaaaagtccctgagtacacactgaccatccaggccacagacatggatggggacggctccaccaccacggcagtggcagtagtggagatccttgatgccaatgacaatgctcccatgtttgacccccagaagtacgaggcccatgtgcctgagaatgcagtgggccatgaggtgcagaggctgacggtcactgatctggacgcccccaactcaccagcgtggcgtgccacctaccttatcatgggcggtgacgacggggaccattttaccatcaccacccaccctgagagcaaccagggcatcctgacaaccaggaagggtttggattttgaggccaaaaaccagcacaccctgtacgttgaagtgaccaacgaggccccttttgtgctgaagctcccaacctccacagccaccatagtggtccacgtggaggatgtgaatgaggcacctgtgtttgtcccaccctccaaagtcgttgaggtccaggagggcatccccactggggagcctgtgtgtgtctacactgcagaagaccctgacaaggagaatcaaaagatcagctaccgcatcctgagagacccagcagggtggctagccatggacccagacagtgggcaggtcacagctgtgggcaccctcgaccgtgaggatgagcagtttgtgaggaacaacatctatgaagtcatggtcttggccatggacaatggaagccctcccaccactggcacgggaacccttctgctaacactgattgatgtcaatgaccatggcccagtccctgagccccgtcagatcaccatctgcaaccaaagccctgtgcgccaggtgctgaacatcacggacaaggacctgtctccccacacctcccctttccaggcccagctcacagatgactcagacatctactggacggcagaggtcaacgaggaaggtgacacagtggtcttgtccctgaagaagttcctgaagcaggatacatatgacgtgcacctttctctgtctgaccatggcaacaaagagcagctgacggtgatcagggccactgtgtgcgactgccatggccatgtcgaaacctgccctggaccctggaagggaggtttcatcctccctgtgctgggggctgtcctggctctgctgttcctcctgctggtgctgcttttgttggtgagaaagaagcggaagatcaaggagcccctcctactcccagaagatgacacccgtgacaacgtcttctactatggcgaaaaggggggtggcgaagaggaccaggactatgacatcacccagctccaccgaggtctggaggccaggccggaggtggttctccgcaatgacgtggcaccaaccatcatcccgacacccatgtaccgtcctcggccagccaacccagatgaaatcggcaactttataattgagaacctgaaggcggctaacacagaccccacagccccgccctacgacaccctcttggtgttcgactatgagggcagcggctccgacgccgcgtccctgagctccctcacctcctccgcctccgaccaagaccaagattacgattatctgaacgagtggggcagccgcttcaagaagctggcagacatgtacggtggcggggaggacgactaggcggcctgcctgcagggctggggaccaaacgtcaggccacagagcatctccaaggggtctcagttccccccttcagctgaagacttcggacctggtcaggaaaggggccgtaccaactttggcggagacaggctatgagtctgacgttagagtggttgcttccttagcctttcaggatggaggaatgtgggcagtttgacttcagcactgaaaacctctccacctngggccagggttgcctcagaggccaagtttccagaagcctcttacctgccgtaaaatgctcaaccctgtgtcctgggcctgggcctgctgtgactgacctacagtggactttctctctggaatggaaccttcttaggcctcctggtgcaancttaannnnnnnnnnaatgctatcttcaaaaccgttagagaaagttcttcaaaagtgcagccccagagctgctggggcccactggccgtccctgcatttctggtttccagaccccaatgccttcccattcggatggnatctctgcgttttt

SEQ ID NO: 252215 - DNA, 671 bp, Homo Sapiens
aggcatcgtaagggaggcctgaaaccaatgccccatggatactgagaggcgactgtctcataacattccatttacaaagtgtgtgttttaacttacgaattgtgcagaattatcttctgaaagttatggcttccaataacagccatcttgcttgctctcgttcttacaatttagtcagctgagttcaagtgacccaagtataaatacccttcaagttgctagcaattgatcttcgatgaaacacaatgacaaagatattacatatgaaatggtataaatatgtgcctcctacctaatacgcaagtaagatcacctatagcctattatacatttactcatttttaaaatgaatcttttgaagatccatttattcacatttttccaagtaatagaatattaactataactactaactataatcttttaaagattcattttaaaagtgaataaatgtgcttagaaattttaggggggagaacacacataacatacatataaccagaggtgccaagtattttaacatctcctaactaagggcagttaaaagacaaagaatcgattcctgttcacttctcctcccacggacttaatgtccagcagagtgctagacaatattgcttcaatattctattactttaatattaaaagcagttacccaacccaaaagcata

SEQ ID NO: 252216 - DNA, 429 bp, Homo Sapiens
gtaaacatacacattacgtgaaatgacagcaacccacattgcagaggagaaaagtctattagctgtacagtttacatttcaatgcccaaacttatttatatatttacataaagatgctaccttgattaatcaatgtctatttgcatttccacatgtgaatttcttcagttttgatattccatatgaaggagctacagtgaaaacacttttgaataaagcagtgaaccctaagaatcttatcttgagatgagatgtgtgaaccaccatttgaatgttatttctccctgctgtgtacattagtctggctgggtgttggtcacagacatggatgcactgacggctattcccataaccgagccaggcgggaagggggaaaaggaagacattatttgtcaccaacaacccagtatcccaagtcaaaattctcaa

SEQ ID NO: 252217 - DNA, 596 bp, Homo Sapiens
  misc_feature (414)..(532): n is a, c, g, or t
gtggcagtgggaaccaggtcccttctctagtttctgtgcctctgttaaggttggagcacctctcattccaccctaacagcaaggtccaaactgcccatgaggaaccctttccatgaattaaaggccaaccttcctcgagtgcccacaaatcactgaacctcgctcagaccttcccctctactggggattcgactcggtttcactgggatttcacctctaagaaactgaagtcatcaaccaactgggcctctggagaaaaacaaaaagcctataaaccaccatcccccagacacatcacatcctcatacccacacctaccatgcaaccacagggacacacatacctccaaactcctctacattcaggaggccacaaaaaaaagtaagaacacagccaggcacagtggttcacacnnnnnnnnnnnnnnnnnnnnnnnnnnnnnnnnnnnnnnnnnnnnnnnnnnnnnnnnnnnnnnnnnnnnnnnnnnnnnnnnnnnnnnnnnnnnnnnnnnnnnnnnnnnnnnnnnnnnnnnatgtgttggcaagcacctgtattcccagctactcaggaggctgaggtgggagaatggcttgaac

SEQ ID NO: 252218 - DNA, 668 bp, Homo Sapiens
  misc_feature (559)..(559): n is a, c, g, or t
  misc_feature (587)..(587): n is a, c, g, or t
ggggattttgatgagtgaagcgtatgatgatcttgtccacactgaaacagcctcctagggaacacggtctcctgtctgcgtcccacctcccccaaccacttctaccagcctccaagccccgcggtccccatgcggacctcagcgccagctgaggttcaaggtccaggttttcaaactgggttccggagcaccctagaggccccaagaaggtagggccacgtgggagatggagcagggagggttctgagggacccctccttcctgcggaccagatcagtgttgtcacttctgttttgtggcttacaattccatgttaagattttggtgtgcattttgaaagaaagtcattgttttaaagaaaggaaaaaaataaggcttgaaaatgatgcttcaaggaaatgactcagcctgctccctctcctcgatggaccctttttggatttgctggatgtcccctctttaatgacacctccacctttggctctttactccaaggtgctgtggcttctggaccaaatgccctctagttcgcttgggcttttgcccctcaggagagggnaccacactcccaccccagatgtgtgganaccctcctgccctcagcctcggcacctcctctacctctggggtgccacaagctagaagctctgaatggccagcggggctga

SEQ ID NO: 252219 - DNA, 1988 bp, Homo Sapiens
ctcacttttcccagggcggatgcgcctgcgctcagctgcctgggcgggctgggaggcgcgggttgaaaagtctcgttccaagtttggagagagagagaagagcgcctcagacctcggtacccgcgagcggggaggaggcaggaaagaaggacgcggcgtctggggagcacccaggcagcaagacggggcccgggctttcgacagtggggagtgtgacgcgcttgggaaaggcaggagcgccagcggtcgggctgctcttggctaacgagaggagtccgaggcggcggcgaggggcgaacgacccgacgcaagatggcgagtaaagagatgtttgaagatactgtggaggagcgtgtcatcaatgaagaatataaaatctggaagaagaatacaccgtttctatatgacctggttatgacccatgctcttcagtggcccagtcttaccgttcagtggcttcctgaagtgactaaacctgaaggaaaagattatgcccttcattggctagtgctggggactcatacgtctgatgagcagaatcatctggtggttgctcgagtacatattcccaatgatgatgcacagtttgatgcttcccattgtgacagtgacaagggtgaatttggtggctttggttctgtaacaggaaaaattgaatgtgaaattaaaatcaatcacgaaggagaagtaaaccgtgctcgttacatgccgcagaatcctcacatcattgctacaaaaacaccatcttctgatgtgttggtttttgactatacaaaacaccctgctaaaccagacccaagtggagaatgtaatcctgatctcagattaagaggtcaccagaaggaaggctatggtctctcctggaattcaaatttgagtggacatctcctaagtgcatctgatgaccatactgtttgtctgtgggatataaacgcaggaccaaaagaaggcaaaattgtggatgctaaagccatctttactggccactcagctgttgtagaggatgtggcctggcacctgctgcacgagtcattgtttggatctgttgctgatgatcagaaacttatgatatgggacaccaggtccaataccacctccaagccgagtcacttggtggatgcgcacactgccgaagtcaactgcctctcattcaatccctacagcgaatttattctagccaccggctctgcggataagaccgtagctttatgggatctgcgtaacttaaaattaaaactccataccttcgaatctcataaagatgaaattttccaggtccactggtctccacataatgaaactattctggcttcaagtggtactgaccgccgcctgaatgtgtgggatttaagtaaaattggggaagaacaatcagcagaagatgcagaagatgggcctccagaactcctgtttattcatggaggacacactgctaagatttcagattttagctggaaccccaatgagccttgggtcatttgctcagtgtctgaggataacatcatgcagatatggcaaatggctgaaaatatttacaatgatgaagagtcagatgtcacgacatccgaactggagggacaaggatcttaaacccaaagtacgagaaatgtttctgttgaatgtaatgctacatgaatgcttgatttatcaagcgccaaaaaggcattgtatagtaggaaatgtaagtggggtggcttatggcttctttatcctctgattctagcactttcaagtgagctgttgcgtactgtatcatattgtagctattagggaagagaagaatgttgcttaagaaagaacatcaccattgattttaaatacaagtagcagggtattgcctttgattcaactgttttaagtcctcattttctcaaactaagtgcttgctgttcccaaatatgcaagaataacttttacactttttccttccaacacttcttgattggctttgcagaaataaagttttaaaataaaacttgtgttttttt

SEQ ID NO: 252220 - DNA, 765 bp, Homo Sapiens
ggggacgcagcaggaggaaactgctcgggctgcaagcagtcttccaggctttgcggctgccaaaggaataattgagacgtctgagttgagcaggtggaatgtcagaagactgagaacattgttccttcttcatactgctgctctgttgccagagaatcccaacttacactcaaagcttctttgattaagtgctaggagataaatttgcattttctcaaggaaaaggctaaaagtggtagcaggtggcatttaccgtcatggagagcagggatcataacaacccccaggagggacccacgtcctccagcggtagaagggctgcagtggaagacaatcacttgctgattaaagctgttcaaaacgaagatgttgacctggtccagcaattgctggaaggtggagccaatgttaatttccaggaagaggaagggggctggacacctctgcataacgcagtacaaatgagcagggaggacattgtggaacttctgcttcgtcatggtgctgaccctgttctgaggaagaagaatggggccacgccttttatcctcgcagcgattgcggggagcgtgaagctgctgaaacttttcctttctaaaggagcagatgtcaatgagtgtgatttttatggcttcacagccttcatggaagccgctgtgtatggtaaggtcaaagccctaaaattcctttataagagaggagcaaatgtgaatttgaagcgaaagaccaaaggaggatccagaagcggcctgaaggaaaggacgg

SEQ ID NO: 252221 - DNA, 1223 bp, Homo Sapiens
  misc_feature (1038)..(1046): n is a, c, g, or t
  misc_feature (1197)..(1197): n is a, c, g, or t
ggggtgggagaggagagggtacccggctggctcggctggcggcctctgcctggatcccgcccctgtctcccgctccgcagccccgggcacggcggaggcagcggagccctgggccatcgtacctggagtagaacagaaaaattattatgtctgtgttcccttgggactcattggaaattgtacagtgacatcttctgggatttagtctggattgtgcagactggtgcttaaaatggaagtcgatattaatggagagtctagaagtaccctgaccaccttgcccttccctggggctgaggccaactccccgggaaaggcggaggcagagaagccccgctgctccagcacaccctgctccccgatgcggaggaccgtgtcaggctaccagatcctacacatggactcctaactattttggttggcttcaccgactggcgagggaactcctgaagttagctcacaagtgcccaggacgtgaagagagcaaagcagaagccatgccatccttacgctccaaacagctagatgcaggacttgcccgttcctctcgtttgtataaaaccagaagtaggtactaccagccatacgagattccagctgtcaatggcaggaggcgaaggcggatgccaagctcaggagacaagtgcactaaatctttaccttatgaaccttacaaggccctccatgggcctctgcctctttgtcttcttaaaggtaagagggctcactccaaatctctggactacctcaatctagataaaatgatccaaggagccagctgatacagaagtgctacagtaccagcttcaacaccttaaccctccgaggggaccgtgtgtttgctaggaataattacaggaatgactgggagagagcttaaaccaatttaggtcagcctacgcttggctagaaaaaacccactgctgtactctgtacatgactcttcacactatagatggttatatcagctaagtgttcctggaacataaaaattgtttgggtcaaatttgaatactggaatgaaatcacaggtacttnnnnnnnnnatatcattctagagcacgcaactgcaaagaaaacagaatgttgactgttagtttgtatagctttttagctaggagaaaaaggctttggtacagtaatttcatctttatgattctgacactcaaattggggaatgttacctgcttgggttgntgctgacttgatatgattcattagaa

SEQ ID NO: 252222 - DNA, 759 bp, Homo Sapiens
  misc_feature (386)..(386): n is a, c, g, or t
  misc_feature (507)..(639): n is a, c, g, or t
  misc_feature (659)..(659): n is a, c, g, or t
  misc_feature (677)..(677): n is a, c, g, or t
  misc_feature (736)..(736): n is a, c, g, or t
gtcctattccattggtatatgtgtctgtttttataccagtaccatgctgttttgtttactgtagccttgcaatatggtttgaagtcaggtaatgtgatgcatccagctttattccttctgcttaggattgtcttggctctttgagctcttttttgctttcatatacattttagaagttttttctaattctgtgaaaagtgatgttggtcatttaataggaatactgttgaatctatagattgctttgggcagtttggacatttcattgatattgattctttcaacccatgagcatgaaatgcttttccatttgttcgtgttgtctgatttctttcactggtattttgtagttctcctcatagagatagttcacaaccttggttagnacatactcctagtccattttttggggggtgtggctatttttaataggattgcattcttgatgatgtgtttctcagcttgaacattattggcgtttaagagtactgctgactgggccgggcnnnnnnnnnnnnnnnnnnnnnnnnnnnnnnnnnnnnnnnnnnnnnnnnnnnnnnnnnnnnnnnnnnnnnnnnnnnnnnnnnnnnnnnnnnnnnnnnnnnnnnnnnnnnnnnnnnnnnnnnnnnnnnnnnnnnncgtggtggtgcatgcctgtnatcccagctgcttagganggctgaggcaggagaattggttgaaccggggaggcaggggttgtggtgagccaagatgngcactccagcctgggcaaggaag

SEQ ID NO: 252223 - DNA, 372 bp, Homo Sapiens
ccaaaggaaacgcatccagtactgaaggttacccatcgctccctggtatcaaactccatcttccactttgtgttgtttactccagactgcatgttattgcgagcaggaacaaagatcctgacctagtttttatatgctcttctggaacgccagttaaagtagtgatatccaatttttcatcaactgttatgagttgtgtgtcttgagtctggtcctgtgccaatctccatgtggaagtcctcaacgacctggtcggaaccctggaaacggaaagggcagctacagccactgcccttctccgccacaacgtctgcctcagtaccactgacattgagaccgccgccatcgtgcctcgtgccaattcctgcagcc

SEQ ID NO: 252224 - DNA, 718 bp, Homo Sapiens; identical to SEQ ID NO: 14355
  misc_feature (688)..(688): n is a, c, g, or t
  misc_feature (700)..(700): n is a, c, g, or t

SEQ ID NO: 252225 - DNA, 1142 bp, Homo Sapiens
tgggtggcgaattcggcacgagggatcccctggtgccatccctgccaaagaccctatcagtgtcatgagcctgaggatgaaatctcccgatggatgacagacaaccttctgtgccttcatcaagctggttgtgtacccaccatgtccctggcgacaggatgggaaagaaaaagccctaattaaggatcgtcagaaaccacagttggaggaggacggcagagacagtttccctccccgctataccaacacccttccttcgaggtcctcgctcctgagggaccctggactgtcacagagattaatgaccccttatcttctttggatgtgaaaggaaatcactggttaaagcttgatcgagagacattatcagctctttaaggattgcaggagaataggctactttattttctgaaaaggtaaatatatgcaagcaaagccaacatgccacgaatggcgttggtctaccacacagccgtgtctgggacacagttgggggtcatcccccagcaggagtgaagtcgagcttagcggcccttgtgtcctcccttggaattcctgccatcccttttgattgagcctccacctctgggatttttcttccatttttctcctctcttaggagggagttcctgctacccatcgtgggaggccaccatcaggactgcgaagatggtgaccctgcggaagaggaccctgaaagtgctcaccttcctcgtgctcttcatcttcctcacctccttcttcctgaactactcccacaccatggtggccaccacctggttccccaagcagatggtcctggagctctccgagaacctgaagagactgatcaagcacaggccttgcacctgcacccactgcatcgggcagcgcaagctctcggcctggttcgatgagaggttcaaccagaccatgcagccgctgctgactgcccagaacgcgctcttggaggacgacacctaccgatggtggctgaggctccagcgggagaagaagcccaataacttgaatgacaccatcaaggagctgttcagagtggtgcctgggaatgtggaccctatgctggagaagaggtcggtgggctgccggcgctgcgccgttgtgggcaactcgggcaacctgagggagtcttcttatggtcc

SEQ ID NO: 252226 - DNA, 919 bp, Homo Sapiens
ggcaattcggacgagggagattaatgaccccttatcttctttggatgtgaaaggaaatcactggttaaagcttgatcgagagacattatcagctctttaaggattgcaggagaataggctactttattttctgaaaaggagggagttcctgctacccatcgtgggaggccaccatcaggactgcgaagatggtgaccctgcggaagaggaccctgaaagtgctcaccttcctcgtgctcttcatcttcctcacctccttcttcctgaactactcccacaccatggtggccaccacctggttccccaagcagatggtcctggagctctccgagaacctgaagagactgatcaagcacaggccttgcacctgcacccactgcatcgggcagcgcaagctctcggcctggttcgatgagaggttcaaccagaccatgcagccgctgctgactgcccagaacgcgctcttggaggacgacacctaccgatggtggctgaggctccagcgggagaagaagcccaataacttgaatgacaccatcaaggagctgttcagagtggtgcctgggaatgtggaccctatgctggagaagaggtcggtgggctgccggcgctgcgccgttgtgggcaactcgggcaacctgagggagtcttcttatgggcctgagatagacagtcacgactttgtcctcaggatgaacaaggcgcccacggcagggtttgaagctgatgttgggaccaagaccacccaacatctggtgtacccctgagagcttccgggaagctgggagataatggcagcatgatcctggtgcccttcaagacatccacttggaaaggggtgggtgaaccccctccccacggggcaccattttccccaccctacatccccggttcctggcaaaaatccaagtgtaaaccg

SEQ ID NO: 252227 - DNA, 1370 bp, Homo Sapiens
  misc_feature (696)..(709): n is a, c, g, or t
  misc_feature (980)..(980): n is a, c, g, or t
  misc_feature (996)..(996): n is a, c, g, or t
  misc_feature (1135)..(1145): n is a, c, g, or t
ggctggaaggtttagcagcagcctggtgcagtgccctgtcatcaagacaaacccacggtcctcctggtgtgcctaccaagcttggtttgtacaaaagcaaggtgggagtctatttttgtacatgagatacatcacacttacctgtgggccagtattgtgaagtgagtctgagttgtttacactgatgccttccctgcccaccacaaattgtgtacatagtcttcagatgataccacccctttccccagctcccaaccaagagctggttctaggcctgtggtatatgtcatatttagcgtttttatatatgacctttgatttctgttgtttgtattttagcacagtgtatgcaccttcatttaaatacatctgtgtgcatacagatacgcatatatgtgtgtgcgtatgcatatatctctcatctgtagtttccaagagttcagctgaagcagatggagtcctgcagcccaggagacaccctgcatccctgctaatagtgtttgccacaagtattagtgagtcttccttattaatattttcatttcagaagactgaagcaaagctgatagtgtttgctgtttctttggcagctaagtgagggtcttgggatgacttgctgtgttcctcaagctgcactttggggccatctctgcagtattagccccctttttgcttggtggtactctgtctgtgccnnnnnnnnnnnnnnatagtcactcttgcatggcttccatgtctggtttgtggcatttggggataaggtgctgaagccagagcatttgcagtttgtttgaggcctcgttgccaatgatagatcactcctgttgacctggtatgtctgcttgcttgctgcttttccttgctttctcttggaagaggaaaggactctggtcaggcccaggctgagtgagatgagctgcagctggctcatggccttcttagagcagagagaggagtatgtcattttactaagttcctanacaaacatttatgcangcaacactccttgcagatccagaaactgaggcacaataggggttatgacttgctcaagaatatgtagctgctagggggtaaatcaaagcatcacaatgtctgttcagcgggcaggaataggctgtgaattgctaccacnnnnnnnnnnnagccaatcactttttgacttggttctcctgaaagtgcgagaggcggtacaccctttcccaaatggtagactaaaaatctgccaggatgccacccactggtataagttctgcttttcccagaagaaggaagaactttttaaaaacccaaaatgatccttaaatgtggtatttggccccaccccctgggctttttctcgggggtagaaaaaatttccccggcgaagc

SEQ ID NO: 252228 - DNA, 380 bp, Homo Sapiens
ccaaatgcgagcacctgtttgacccagacaaccttcactgtaactatcacctcggacttgtccattcgatactgcattaatcattaggaaggctatggttgctataacaccacaggcatggtatgagtggttgaaatctttcatggtgggataaataacagctgcatctatgataatccaccccccccagtcaatgcattctgagcatctcaagccctctagaaatccagacatttcaggtcagtccagccccgtcgtgcagtggttccggagcccggtgtcgcgccgcgccggcccgcctcactcccccgattttagccaagaaaacaaaacggccacagcctccagacacccggatgcagcagtaccatccacccggc

SEQ ID NO: 252229 - DNA, 633 bp, Homo Sapiens
  misc_feature (23)..(23): n is a, c, g, or t
  misc_feature (42)..(42): n is a, c, g, or t
aaatggccttacaaaaggttggnagtgagcagtaaaaaacanacaaacccatgcaggcctgttgtgctgtgggaaatcagatgtgttcactgccataagtctcaagtgcggccaaacttaaaaacaagccctccaaaatctttagcaacataacctccaaaaagaatccacatagatgcaatcagagatccaaaggccaacatgaaaccaacgaaaagccaaatgcgagcacctgtttgacccagacaaccttcactgtaactatcacctcggacttgtccattcgatactgcattaatcattaggaaggctatggttgctataacaccacaggcatggtatgagtggttgaaatctttcatggtgggataaataacagctgcatctatgataatccaccagcctgtaaaaaatagtacaccagcagcaatggaagcaatagtattgcgcttttccccccagtcaatgcattctgagcatctcaagccctctagaaatccagacatttttttcaggtcagtccagccccgtcgtgcagtggttccggagcccggtgtcgcgccgcgccggcccgcctcactcccccgattttagccaagaaaacaaaacggccacagcctccagacacccgga

SEQ ID NO: 252230 - DNA, 2082 bp, Homo Sapiens
ccggtccggaattcccgggatgccgggtggatggtactgctgcatccgggtgtctggaggctgtggccgttttgttttcttggctaaaatcgggggagtgaggcgggccggcgcggcgcgacaccgggctccggaaccactgcacgacggggctggacgattaatgcagtatcgaatggacaagtccgaggtgatagttacagtgaaggttgtctgggtcaaacaggtgctcgcatttggcttttcgttggtttcatgttggcctttggatctctgattgcatctatgtggattctttttggaggttatgttgctaaagaaaaagacatagtataccctggaattgctgtatttttccagaatgccttcatcttttttggagggctggtttttaagtttggccgcactgaagacttatggcagtgaacacatctgatttcccacagcacaacagccctgcatgggtttgtttgtttttttactgctcactcccaaccttttgtaatgccattttctaaacttatttctgagtgtagtctcagcttaaagttgtgtaatactaaaatcacgagaacacctaaacaacaaccaaaaatctattgtggtatgcacttgattaacttataaaatgttagaggaaactttcacatgaataatttttgtcaaattttatcatggtataatttgtaaaaataaaaagaaattacaaaagaaattatggatttgtcaatgtaagtatttgtcatatctgaggtccaaaaccacaatgaaagtgctctgaagatttaatgtgtttattcaaatgtggtctcttctgtgtcaaatgttaaatgaaatataaacattttttagtttttaaaatattccgtggtcaaaattcttcctcactataattggtatttacttttaccaaaaattctgtgaacatgtaatgtaactggcttttgagggtctcccaaggggtgagtggacgtgttggaagagagaagcaccatggtccagccaccaggctccctgtgtcccttccatgggaaggtcttccgctgtgcctctcattccaagggcaggaagatgtgactcagccatgacacgtggttctggtgggatgcacagtcactccacatccaccactgaaggaaaggaaaaaagggcagagacttgacactccagtcttagacaggggacaatttctttgtagttgttctgataataaactgggttccatgttgcatttcatctgtgtactgaaccactagcctaatagaccagcacggtcaactagaatgacaaacattagctactgggaactcttgttgtctcttcctcttcagaactcttgtccccccaggctccccacctctgcaagatgggatacactcttcaggaccacagtttgaaatgtctttcataaaatgtgctacaattagccttcggaatatttgctgggtgatttaaatgtgtgggtctcatttccatgctagccatggtcatctgacagtctctacactgtgaatattgcctggtgatcaagactctcctcaaagaaatgacttgctgtcatcccacatgaactcctgatgttttttctacaaaagtccataaaatgtgaaaactggagaagatcttagaggttgaagcccaccttctcttttcacataggagggaacagaccatggaaatttaaacgacttcctcacggtcacagaactagttttttaatcctcaggcagtgcatccccccaccctacaactgagcacaacctctttccccacagtgcaattcagaatatgctcagggaatgccagccaccttgtaaaactgctgggagaaaagcatgattcccacaaggactaagtatcagtgatttgtaattttcctgttttgtattatctgctttgctgatgtagacaagagttaactgagtagcatgctttattaagcatgagaaagaatcttaagaattgtcaataaaattaacccaaaactttaataatgtgtctgtaaccaagaaaatattgatagcatcatcctaatgaaactaaacatttattttaaacttattaaattgactcttaaactaa

SEQ ID NO: 252231 - DNA, 1371 bp, Homo Sapiens
  misc_feature (11)..(12): n is a, c, g, or t
  misc_feature (15)..(15): n is a, c, g, or t
  misc_feature (33)..(33): n is a, c, g, or t
  misc_feature (50)..(50): n is a, c, g, or t
  misc_feature (1005)..(1005): n is a, c, g, or t
  misc_feature (1016)..(1016): n is a, c, g, or t
  misc_feature (1345)..(1345): n is a, c, g, or t
tttggcctcannatnaaaaaactacatgacaanccatatttcttttgtanttctttttattttacaaattataccatgataaaatttgacaaaaattattcatgtgaaagtttcctctaacattttataagttaatcaagtgcataccacaatagatttttggttgttgtttaggtgttctcgtgattttagtattacacaactttaagctgagactaaactcagaaataagtttagaaaatggcattacaaaaggttgggagtgagccagtaaaaaaaccaaacaaaacccatgcagggctgttgtgctgtggaaaatcagatgtgttaactgccataagtcttcagtgcggccaaacttaaaaaccagccctccaaaaaagatgaaggcattctggaaaaatacagcaattccagggtatactatgtctttttctttagcaacataacctccaaaaagaatccacatagatgcaatcagagatccaaaggccaacatgaaaccaacgaaaagccaaatgcgagcacctgtttgacccagacaaccttcactgtaactatcacctcggacttgtccattcgatactgcattaatcattaggaaggctatggttgctataacaccacaggcatggtatgagtggttgaaatctttcatggtgggataaataacagctgcatctatgataatccaccagcctgtaaaaaatagtacaccagcagcaatggaagcaatagtattgcgcttttccccccagtcaatgcattctgagcatctcaagccctctagaaatccagacatttttttcaggtcagtccagccccgtcgtgcagtggttccggagcccggtgtcgcgccgcgccggcccgcctcactcccccgattttagccaagaaaacaaaacggccacagcctccagacacccggatgcagcagtaccatccacccggctcagtcgcgcatgcggacacggggcggagggcggggcgccgggtccggaaggnagccacgcccnaccacaacaaacgcgtctgcacatgcccgggcgctgggttcaggggctttccgccgctctgggttcacagctggacgtcgggagtgctagtttggagtacgccatttgagagtaggcgtgagaagttgctctgtgtgctgagcgttctaaaggaaggcgtccgttggccttcgtacccgtcttgagtgaggtgacgagtgttttctagtactggggtcggccgcgcagccctctcaggggtgggtggcaggaagagtgccgggtcccgcgtggtgcaaaaggtgggttcaggtttgcggccacacagcgctactcaggactttttagtncttgtttattttctcctgtgccgaat

SEQ ID NO: 252232 - DNA, 645 bp, Homo Sapiens
  misc_feature (134)..(187): n is a, c, g, or t
  misc_feature (254)..(264): n is a, c, g, or t
gagcttcaacaaaggtgcttgaataatatacaattaaaatgaagtagtttctattttgtagaatcagtatataataaggaaaaagaatccccaaacagtctttttaaaaaaagtttcttcttaagctagagctnnnnnnnnnnnnnnnnnnnnnnnnnnnnnnnnnnnnnnnnnnnnnnnnnnnnnngtgaaatatagcccctggaaatgcctggtgttcgtcaccctctccctcctcttcctgtcacgttgtnnnnnnnnnnngctccagtgctcacatcaagaaatgacttagatcttgttcatgtgctgactctgctaggaactggctgattgattggcttggaagaaaataaaagcagcaaaaagtgtaactgtatatatccttaataacccgctttagagaaatgccgctatcgcatttctctggcttcctcactgcctactgcagttgtgactgtatagaaaagaaacttgtggctttagacctgggatggctgtcaaagggttctgatgtgctcgtctggtagttctaaggtggttatggcagctgggtcgcaaggccttttttgtttcctgctcattcaggcctgagctttgcagcaaccactgcagtcttcagagcaataggaaaaaaataacctc

SEQ ID NO: 252233 - DNA, 535 bp, Homo Sapiens
  misc_feature (465)..(465): n is a, c, g, or t
  misc_feature (478)..(478): n is a, c, g, or t
  misc_feature (485)..(485): n is a, c, g, or t
  misc_feature (490)..(490): n is a, c, g, or t
  misc_feature (494)..(495): n is a, c, g, or t
  misc_feature (499)..(500): n is a, c, g, or t
taaggcccacagttcatgcaggttattctgcaaaggtgtcccagttaggagcaagcggttagtcgacttgaactcacgaacaatctctgaaagcccagaccccccaccctttaccctgtgagcttcatcaatgaccaggtatcgccagtgaaactttttgaatacagatttctctttaattaccatctcataagaagtaacgcaaacatcccactctcctggcatcatttcatcacgaataaaagcagctctggcatccttgtctccgacaaaacaaatgacacggagagatgggacccatcgttgaaattcattcatccagttgtgtaaagtagactttggaactaaaaccatgtgaggtccaggaatatttcggtagtgtgtcaggtaaccaagcaaagcaattgtttgtaaagttttcccagaggcccatttcatcgagccaaaatgccattgactccattntcatataaagagntcaaccnattcngtcnncgannctgataatctctcagtggcccccctctcacatatg

SEQ ID NO: 252234 - DNA, 797 bp, Homo Sapiens
tcaaacaatcggactgacttctggatagcttctatgggtcctagtttagaagcagtatctttactctggctgattagtgtccgaagttcccaacttcttcttgtggacccacttgaatctcctcttggatatgctggttcatctcgctcctccgtggggcttgagtgacgactcagggacctaaactgcaattcagcagctatggaagccaatcgatcattttcaggaacgctggaacccctgaatccctctggagtggggataatgaggtgtgggttaggagggtcactatggcatcgaggtaccttcataggacgggggctgttccgatgaatggcaaggtacaaacctgtaacaggactgtgtggttttcctatgacatggccaatgcattcattcatcaaggcttgtaaactcaagaagtcatcttctggtaaagctgaaataaaggcaggttcaattgcttgtagaaaatcaaatccttgagtcgcccacctgggtcttgtacctctaccactctcacatttagtcaggacataattcatccacttccgggcaaagcttatatatttgtctcctatcttctgtctaaactccccagacatcaaacgaacaacttctttatgatactcaaatccaaaattgtacccctgaatcattgcttctcggtagtactgttgcaaggtgacagattcagattcatcaacctcagcatcaaattctgatgtgaacatgtggtccacgcggtcaatggcattgcttatcctgttgcatagctccaatgcatcattcttcag

SEQ ID NO: 252235 - DNA, 478 bp, Homo Sapiens
atcttaaaagtaatcagagtttgacagctctttagtaactgttaataaaagaatctttcatcacaggataagcaatagattgtgtgggaaataataacacaagagtaaagatgctgaaggactcttctggaactcaaagtgacagttttgaaggttctggcacagtaggaaaggatcacaacccatataaatggctaatgttgaatttctctgaacactgtcacatatggggcatcaatttggaaaactctcaattgaggccccttccctaagattacaacattgataacctgtctttttctctctcttctttactatccgcccaagtctactattccaagtttaaatattgttcagaaagttgtcagccttgttagtcagaaaaactccatttagagccatccaaactagcataagaaattccttaagcactcaaagcattatctctgttttaagtaagaaactaaatccagagctt

SEQ ID NO: 252236 - DNA, 827 bp, Homo Sapiens
aaggctttccaagcaacgggttgcccagtcaagcccattggcccaggggcccagactggatttcaccgaatttccacgtaggcaatgcccttagaacgacggtgattccgattcgaaatgatacgtacttcgcgaaccttgccttcagcagagaaaaagtcttccagatctcgaggccggaattggggcagttaactgcatacagaaaactgtgcgggcatcacgctcctcaggactcagattatcaactggctccctgactgggctcttctctctgaaatgaggactcttactgtgtccatatctataaccagtggcaagtggaggactcctgtaatgcacacgatcctcacgacgatggtcccgacttcgcgactcactaccatgtcgacgatcccagctacggctacggtgacgacactgccgacctggacttcggctccgactatttctccgtctataccgatcccgatctcgactacgattgcttgtctccccgatggtgctgcttccactggtctcattgccactgttgctggtgctgctggtggtattgctaggataatcctttttaacttctttcctttgttgctcatcctcttcttttttatagggagcttccagcatggcctcaatcactatgtcaaagtcatcagatgccatcctgtcagatcagttccgggtccccgcaggggggtcccggttctctccgttcctttgagtatgttgtggggagtggagctcggatagttcctagagtctaggcaagaaaagcagcactgcaggtacagcgcctcctcttcccgcaaaatggcggcagctctccc

SEQ ID NO: 252237 - DNA, 752 bp, Homo Sapiens
  misc_feature (591)..(650): n is a, c, g, or t
  misc_feature (711)..(711): n is a, c, g, or t
tttacaaaacagaagtaattattctgtcacaaaaggaaagacgccacttttagtacgtacatatattccatattaagaacaaaattaagtaactaaacttaagtttcttagagttgcctggatagtgattaaatgttcttctcatcttaaaatattgtttgtcatcttgaaatttatgcaagtaagtacaaagttatataaatatactgagttttcattattgcttttctgaaattaaccccagccctagcctgaataattatccttttgactatgcaaaaggtatatttgtatgtcctccaaaacacacattgtgctttgcatatagtagggcctcaatacatgtacaatgtaaggatggatataatgatgtttgtaatttcccacggtaatgtcccatgtatagtctcttgatttagaaaatctccattaatattttctcagagtactgcatttaaaacaatggtgaaaaccattgggactttaaatgtaaaatttatacaaggattatttatagtcccttatgtgtgcatgtgcaaggagtactatgcttgaagtcagaaaaaacgcatttgatttctggccacaagnnnnnnnnnnnnnnnnnnnnnnnnnnnnnnnnnnnnnnnnnnnnnnnnnnnnnnnnnnnntgaaagagtgtccccatctaggcattccaaattctttgggaattctaggactggattaccnggaaaattcaaggcccttacatttgtttttcctggatttat

SEQ ID NO: 252238 - DNA, 853 bp, Homo Sapiens
attcataggggagagatttgaacaagcagaattaagtgttagcaaaaatgctgcattgctttgattcatgtttaaagacctaaatttctatgcacaaggaataaagggcctacttaccaagtgtaaatcacaacataggctaccaaaatatttcttatttgctaggagaacaaagctgtcacggtgcatgatagttggacagagatggctaaaaaagaggcaaattcagatttggaaacagggtggcctcttcattatttattgccaagatctgaaaatcttcaacatcttataagacaacaatgaagtagcccctgaacagcatggagttgctgtgagtttgttcgttgcagacctttgtgttgggtcctgggaatctgagctttgttccctgtgcatggtggataattgaaaccaagaggacatgggatagaccttgtgacagaccaattctgtgacccctgtcttctgggtcacattattcattgttgatttaaatacaggactaccaaacagtacaaatctatcatgagtctggtagaaaagtaaaagtaaaagctgcacacgttacatactgtttattgttctaatgtacaactaactatttgcatataatgtgatttaatttattgctgttttgtgtagaaaaggagaactaatgactgtggatataacccatgttttgtataatatattttatttcttgtgcgaactggtcatttaaaatatctacttcatttgatgtttggatataaatgtgtatgtgtccttgtaaatgtttctatcaagcaagaatgccacgtactcagagtataacaatgtgttctcattaaaaaatacatcccacggaaaa

SEQ ID NO: 252239 - DNA, 439 bp, Homo Sapiens
ggaggcaggcgctttggaagtttgtaaacaccgactttctgagtaagggaggagcactttttttccaaaaaggaaagaacgtctctactgggtttttttcctcctgatattcagcattagagtagaaaagaaactattgtttggccacattagccgtggttagcaggtgctgcagcctttgccactgttattatttttaaagggcagaaatgcctgaaggtgaagactttggaccaggcaaaagctgggaagttatcaattccaaaccagatgaaagacccaggctcagccactgtattgcagaatcatggatgaatttcagcatatttcttcaagaaatgtctctttttaaacagcagagccctggcaagttttgtctcctggtctgtagtgtgtgcacattttttacgatcttggggaagttacattcctggggtta

SEQ ID NO: 252240 - DNA, 617 bp, Homo Sapiens
  misc_feature (35)..(35): n is a, c, g, or t
  misc_feature (57)..(57): n is a, c, g, or t
  misc_feature (60)..(60): n is a, c, g, or t
  misc_feature (81)..(81): n is a, c, g, or t
gcttccctaaccttgttagaaaggccaacagtcanatttcaggagataccaaagaantcntacaagattttacacaagacnatcctcaagacacataaacatcaggttttccagggtcgaaatgagggaaaatatgttaaaggcagccagagagaaagggcaggccatctacaaagggaaccccattaggctaacagcagatctctcagctgaaatcctacaagccagaagggattgggggactatatttaacattattaaagaaaatcttcaaccaagaatttcatatacagctaaactaagctttctaaatgaaggagaaatgagatcatttacagacaagcaaattctgaggtaattcattaccaccacatctgccttacaagagattttagaaaggaggactaaatatagaaaggaaagaccactacacgctaatgcaaaaacatacttaaacacacagaccggtgacactataaagcaaccacacaaaaaagccaacataataaccagccaacagcacaatgacaagatcaaatctacacaaatcgatactagccttgaatgtaaatgggcaaatgccccacttaaaaggcacagagtggcaagctagattt

SEQ ID NO: 252241 - DNA, 1158 bp, Homo Sapiens
tggacggccggaattccgggatatcgtcgaaccacgcgtccggtcataaatgatcatcgggtcattagtgagaaacggggatgtgggttaggtgctggttcctagacatgtgagtatgcgttgtgtgtgtgcgtgtatgtatgtgtatattaaatgtatatatccacacattttatattgacattctgtagatatgtttgaatatagaaactttttttaccccaactactgaatccaggagtaccaaataatatatagtaaaactaagatttaaggttgtgtcaaaaaggtacagtgattcagccatttccatttgtcatttgtttcaaccttttttaagttgagtgtttttatttctgcagttattagttggatcctccacatcttgcatatatacatgggctcaattattatgtttgtcaggataatcaaatgaaaatactagttcagtgatcagcattgaatggttgttaggcagccatgtgctcaacactgatttcacctcttgagtataaactttttaaatttaaattggtttacatgaaagtggattaaaaggcctttcaaaagaatgggtttgaaaaacctcagtaccctttaatacatgtacatttctttccttttttcatttaatgtaacatgtctgttgtaactatgtttcttaaatattattttaaggttatgtgttctttaattatggtcaaatataatttggtcaccaaaaatgaaataatagtttaaaacaagtagctgttactaagtgtgctaaaaatactcattttataattaattttagtttttttagtatattattataaattgtgccctaagtcaggtacaaatgtacacatcaaaatgcccatattgtatctatctgtagtcgtttaatgtgaattatatgtgaatttttttcaaaattttactaaccagaattctgttataggcacctaaccacgcagcatgaggaaaacggcacaacacaatcttgaggtgccttctgaatcatcagattaaattatgcttcatatgtttttgcttttactgtatttctttaaaaactctaaatctttattcatgtgtcactggattaatttatctgataatgtgtctcacaagaatctgttagatcgtttattcttcagttgtactttgaatggt

SEQ ID NO: 252242 - DNA, 1642 bp, Homo Sapiens
  misc_feature (457)..(457): n is a, c, g, or t
  misc_feature (461)..(461): n is a, c, g, or t
  misc_feature (463)..(463): n is a, c, g, or t
  misc_feature (466)..(466): n is a, c, g, or t
  misc_feature (470)..(470): n is a, c, g, or t
  misc_feature (573)..(573): n is a, c, g, or t
  misc_feature (579)..(579): n is a, c, g, or t
  misc_feature (586)..(586): n is a, c, g, or t
  misc_feature (588)..(588): n is a, c, g, or t
  misc_feature (598)..(598): n is a, c, g, or t
  misc_feature (600)..(600): n is a, c, g, or t
  misc_feature (608)..(610): n is a, c, g, or t
  misc_feature (615)..(615): n is a, c, g, or t
  misc_feature (617)..(617): n is a, c, g, or t
  misc_feature (623)..(623): n is a, c, g, or t
  misc_feature (941)..(941): n is a, c, g, or t
  misc_feature (1249)..(1249): n is a, c, g, or t
  misc_feature (1329)..(1329): n is a, c, g, or t
  misc_feature (1376)..(1376): n is a, c, g, or t
  misc_feature (1444)..(1444): n is a, c, g, or t
  misc_feature (1464)..(1464): n is a, c, g, or t
  misc_feature (1577)..(1577): n is a, c, g, or t
  misc_feature (1627)..(1627): n is a, c, g, or t
  misc_feature (1630)..(1630): n is a, c, g, or t
  misc_feature (1634)..(1635): n is a, c, g, or t
agcgacagccgagaagcagaaacacgacgggcgggtgaagatcggccactacattctgggtgacacgctgggggtcggcaccttcggcaaagtgaaggttggcaaacatgaattgactgggcataaagtagctgtgaagatactcaatcgacagaagattcggagccttgatgtggtaggaaaaatccgcagagaaattcagaacctcaagcttttcaggcatcctcatataattaaactgtaccaggtcatcagtacaccatctgatattttcatggtgatggaatatgtctcaggaggagagctatttgattatatctgtaagaatggaaggctggatgaaaaagaaagtcggcgtctgttccaacagatcctttctggtgtggattattgtcacaggcatatggtggtccatagagatttgaaacctgaaaatgtcctgcttgatgcacacatnaatncnaanatanctgattttggtctttcaaacatgatgtccgctggtgaatttttccgcccccgttgtggctcacccaactatgctgcaccagacgtcctttccggacgcttgtntgcagncccagangnaaatatatgnancagtgggnnnattcncnatgctnaattatgtggaacccttccatttgatgatgaccatgtgccaactctttttaagaagatatgtggatgggatcttctatacccctcaatatttaaatccttctgtgattagccttttgacacatatgctgcaggtggatcccatgaagagggccacaatcaaagatatcagggaacatgaatggtttaaacaggaccttccaaaatatctctttcctgaggatccatcatatagttcaaccatgattgatgatgaagccttaaaagaagtatgtgaaaagtttgagtgctcagaagaggaagttatcagctgtcttacnacagaaatcaccaggatcctttggcagttgcctaccatctcataatagatcacaggagaataatgaatgaagccaaagatttctatttggcgacaagcccacctgattcttttcttgatgatcatcacctgactcggccccatcctgaaagagtaccattcttggttgctgaaacaccaaggggacgccatacccttgatgaattaaatccacagaaatccaaacaccaaggtgtaaggaaagcaaaatggcatttaggaattagaagtcaaagtcgaccaaatgatattatggcagaagtatgtagngcaatcaaacaattggattatgaatggaaggttgtaaacccatattatttgcgtgtacgaaggaagaattcctgtgacanggacttactccaaaatgagtctacagttataccaagtggatagtagnacttatctactggatttccgtagtattgatgatgaaattacagaagccaaatcagggactgctactcnacagagatcgggatcagttngccactatcgatcttgccaaaggagtgattcagatgctgaggctcaaggaaaatcctcagaagtttctcttacctcatctgtgacctcacttgactcttctcctgttgacctnactccaagacctggaagtcacacaatagaattttttagatgtgtcaaaantanttannatttttg

SEQ ID NO: 252243 - DNA, 459 bp, Homo Sapiens
  misc_feature (442)..(442): n is a, c, g, or t
ttaattagatttgcacacatctcaaaaaattctattgtgtgacttccaggtcttggagttaggtcaacaggagaagagtcaagtgaggtcacagatgaggtaagagaaacttctgaggattttccttgagcctcagcatctgaatcactcctttggcaagatcgatagttgctaactgatcccgatctctgtggagtagcagtccctgatttggcttctgtaatttcatcatcaatactacggaaatccagtagataagttctactatccacttgggtataactgtaggactcattttgggagtaaggtgcttgtcacagggattcttcccttcggtacacggcaaataatatgggggtttacaacccttcccattccataatcccaattggtttggattgctcctaccataccttctgcccataatatccatttgggtcgnctttggactttctaatt

SEQ ID NO: 252244 - DNA, 400 bp, Homo Sapiens
  misc_feature (369)..(369): n is a, c, g, or t
  misc_feature (389)..(389): n is a, c, g, or t
tgaagccttaaaagaagtatgtgaaaagtttgagtgctcagaagaggaagttctcagctgtctttacaacagaaatcaccaggatcctttggcagttgcctaccatctcataatagataacaggagaataatgaatgaagccaaagatttctatttggcgacaagcccacctgattcttttcttgatgatcatcacctgactcggccccatcctgaaagagtaccattcttgggttgctggaaacaccaaggggcacgccattaccctttgatggaatttaaatccacaggaaatcccaaacaccaagggtgttaaggggaaggcaaatggggcttttgggggttttgggaggttcaaagtcgggcccnattgtttttttggggccggngttttgttagg

SEQ ID NO: 252245 - DNA, 460 bp, Homo Sapiens
ggacgctgaggcggcgagggtgagtcggcgccggccgctaccgcacctcgggcgctcgtccctcatttctctgtggtgaatggcgacaggatggagcgcgaggggagcggcggcagcggcgggtcggccgggctcctgcagcagatcctgagcctgaaggttgtgccgcgggtgggcaacgggaccctgtgccccaactctacttccctctgctccttcccagagatgtggtatggtgtattcctgtgggcactggtgtcttctctcttctttcatgtccctgctggattactggccctcttcaccctcagacatcacaaatatggtaggttcatgtctgtaagcatcctgttgatgggcatcgtgggaccaattactgctggaatcttgacaagtgcagctattgctggagtttaccgagcagcagggaaggaaatgataccatttgaagccctcacac

SEQ ID NO: 252246 - DNA, 789 bp, Homo Sapiens
  misc_feature (554)..(554): n is a, c, g, or t
agcagaagtgtagaggcctgaaatccatagctgggacttagcatttttcttgtaatcactgatgctgcccatggtgatataaggagaaatgctacatagaaccaaaaataagaaaaaggaaccatccggcaacccagtccagagtcctatgtggctaagaggaaatgggcttgactcaattcgaatatgttgtgtgtgattaaacatttgaagtagcccattgctgatagtattcataagaattggaaaacagtgcaatctcttggtattacacacaactgaaaatctataatccttttgtttaccagaaactatgatagctccattgtatgagaggccatcagtaccatttctgttttcaaagtcatctacttccaaaagtatattttgatgcttcagtgattttataaaatcttcagtatttgattctgtgttattgatgatcaacaggctggtacggggttcctggggaagttgtccaggagagagaaaatacaattcgtttttaaattcccaatcgatcttttcatttaacatagcatacattatatttncaacaatcaaagggaatattgcgattccaaataccaataatagggtcaataacactttagtttgacgttttaactttaagaaacggagccgtgccatggcaaagacttgcattctccagaggcccatgtcactcacagctgtctgcatttcagagaaggaagagtgagccagctccatttcattgagggctttctgagtctcttatcatctccactttgttcgaaatcttgttcg

SEQ ID NO: 252247 - DNA, 1040 bp, Homo Sapiens
gatttaaagacttgtattgcaagtactactcagactattgaacagatgtactgcgatcctctccttcgtcaggtgccttatcgcttgcatgcagttcttgttcatgaaggacaagcaaatgctggacactattgggcctatatctataatcaaccccgacggagctggctcaagtacaatgacatctctgttactgaatcttcctgggaagaagttgaaagagattcctatggaggcctgagaaatgttagtgcttactgtctgatgtacattaatgacaaactaccctacttcaatgcagaggcagccccaactgaatcagatcaaatgtcagaagtggaagccctatctgtggaactcaagcattacattcaggaggataactggcggtttgagcaggaagtagaggagtgggaagaagagcagtcttgcaaaatccctcaaatggagtcctccaccaactcctcatcacaggactactctacatcacaagagccttcagtagcctcttctcatggggttcgctgcttgtcgtctgagcatgctgtgattgtaaaggagcaaactgcccaggctattgcaaacacagcccgtgcctatgagaagagcggtgtagaagcggcactgagtgaggcattccatgaagaatactccaggctctatcagcttgccaaagagacccccacctctcacagtgatcctcgacttcagcatctccttgtctactttttccaaaatgaagcacccaaaagggtagtagaacgaacccttctggaacagtttgcagataaaaatcttagctatgatgaaagatcaatcagcatttatgaaggtgggctcaagcgaaactgaaaggaaattggtccagatgacatggaatatgggaagagtacaaaaagtggcatgaaaaattatagtttggttccgaaaatggcctggggtatctcctaaacagggcctaaaacctccttttaaaaagggaaagtaccagaagggacttttcctacctggggatattgcctacccaaaaccattgctgc

SEQ ID NO: 252248 - DNA, 519 bp, Homo Sapiens
ccccagccccagcttcctccggccgcagaaccagcatcgggtgttcactgtcgagtctcgagtgatttgaaaatgtgccttacgctgccacgctgggggcagcttgcctccgcctccgcccacgtaccagcagccgcctccatgccctaggttgggcccctgggggatctgagggcctgtggcccccagggcaagttcccagatcctatgtctgtctgtccaccacgagatgggaggaggagaaaaagcggtacgatgccttcctgacctcaccggcctccccaagggtgccggcactctgggtggactcacggctgctgggccccacgtcaaaggtcaagtgagacgtaggtcaagtcctacgtcggggcccagacatcctggggtcctggtctgtcagacaggctgccctagagccccacccagtccggggggactgggagcagttccaagaccaccccacccctttttgtaaatcttgttcattgtaaatcaaatacagcgtctttttcactctga

SEQ ID NO: 252249 - DNA, 633 bp, Homo Sapiens
gggaggtgtttggtgaattcatggctgcaccctggaatcttgttcactgtaaatccaggaaggtgtgatgtgagttcatggctgtgccctggaatcttgttcgctgtaaatccagggaggtgtttggtgaattcatggctgcaccctggaatcttgttcactgtaaatccaggaaggtgtgtggtgaattcatggctgcaccctggaatcttgttcactgtaaatccaggaaggtgtgatgtgagttcatggctgcatcctggaatcttgttcactgtaaatccagggaggtgtttggtgaattcatggctgcaccctggaatcttgttcactgtaaatccaggaaggtgtgatgtgagttcatggctgcaccctggaatcttgtttttaagggtcctgcaaagcccgctgggctgttgtgagatgaggcatgccgtccgtacctggttctgagtggtgaaagggtctgggtgatgtcttcgttaggggcttttgacctcagtggaattgatttttaacagagacattgcgtttggaagttgcccacggccctttttccttctttttaccaaaacatctattgggatagtttcctcttttaaaagtaatattgaggccaggtgcaatggctca

SEQ ID NO: 252250 - DNA, 656 bp, Homo Sapiens
gaccagggcatttgctgacatctgaggcccttcccaggaagacatagcctcgttcttggtgtggccactgaggacggcgctgagagggggaaagtcatgggcagggcctggtgtgggatgtggaggagacggcgcccggggaggaggagaattgtctctctccaaccttgtcatctcaaagtggcgtcgaaccccctgacaggtggacgggaacccccggctggccctccagagaccaggaggcccctggctcaatgatgccacctgcagctgcccaaccctccgcccatggtgcccttgttccacctgccaccgctcatgaacctgtggatcacccagctctgcactggcttgcctgctgctgctgtctcagtttaccggggcagttgcccctggctatccggctgggatgggacttggacttagaagcaggcccctcctctggaaagctgtgtcctcgggccaggaggtggcagcctctaccttcctgagacagggacccttttctgtccatcagaggacagctgtatgaagacacagagagaaggcagccatctgtaagccaggaagagagccctcaccaagactggaatcagcagcaccttgatattggacttccagcctccagaactgcaagaaataagcacctgctgttt

SEQ ID NO: 252251 - DNA, 501 bp, Homo Sapiens
gtgtgcagcattgaaagtttactgcaactctaatttcctttttaacacaaatgtcctttttaatataaacattatatgtattcagtattcaagtaaaattccctaacagttaatgacatttaaaaaatgtgcaaaactgcaaaattcattgtaatagaatgtgtaaggtcaaaagggtggaacggctgacagctattgaataagtgcatcataaatcttcaaagaaaaaaaacgcttactgtagaatctcaaattgaaaatttctgtgcagcattacaaaatattttatatttaatgagaaaaaagaagcttgcaggcagcacatgaagcatccacagcaggtattatgattgaaaactagtaaaataagtgtaagttgttgactgatgtaggtactaacagcatctgaattttagcactggccttgattacacaggagatggagaagtcgttacaattgagaaaacatatttaataaatcattgtcaatttttataatgt

SEQ ID NO: 252252 - DNA, 926 bp, Homo Sapiens
  misc_feature (171)..(171): n is a, c, g, or t
atgactgtgaaatgtgagaagaaaagtgcatgcagatgctttaaatgatcactaaagcagagacggaagtggcaaaaccgtcttttgcctggtccttgtctttgccctctgctggcttccccttcacctcagcaggattctgaagctcactctttataatcagaatgatcncaatagatgtgaacttttgagctttctgttggtattggactatattggtatcaacatggcttcactgaattcctgcattaacccaattgctctgtatttggtgagcaaaagattcaaaaactgctttaagtcatgcttatgctgctggtgccagtcatttgaagaaaaacagtccttggaggaaaagcagtcgtgcttaaagttcaaagctaatgatcacggatatgacaacttccgttccagtaataaatacagctcatcttgaaagaagaactattcactgtatttcattttctttatattggaccgaagtcattaaaacaaaatgaaacatttgccaaaacaaaacaaaaaactatgtatttgcacagcacactattaaaatattaagtgtaattattttaacactcacagctacatatgacattttatgagctgtttacggcatggaaagaaaatcagtgggaattaagaaagcctcgtcgtgaaagcacttaattttttacagttagcacttcaacatagctcttaacaacttccaggatattcacacaacacttaggcttaaaaatgagctcactcagaatttctattctttctaaaaagagatttatttttaaatcaatgggactctgatataaaggaagaataagtcactgtaaaacagaactttaaaatgaagcttaaattactcaatttaaaattttaaaatcctttaaaacaacttttcaattaatattatcacactattatca

SEQ ID NO: 252253 - DNA, 539 bp, Homo Sapiens
gggctcaaaggaatgtgctctgaagactctcccagcactcccccaacatggggagaagaaaaaaacaaattttctttattcttctttctcctatggtatgagtaaacttatgagtttatagattcttgttttctataactagtaacttcaagcattgttttatctaagcagctcagtgaaagtcatgagacatgcctgagcaggcctggattgcagccacctagacaccatagtgaaggttataagataagccaacacaaggcactagagcaagcctagataacagccatctaggccacatagcaagagtcatatgtaagcctgagttataaacctgtcaaagtatgattaactgcctttgttctgcttctgtatccttgctttcacatcactacactttgtgccactgtaggcttgtttcaagttagcccaccctctttagaagtgtatgtaaaagttaaatgctgtctttgtccttggcccagtctctggatgttaatccactgggtctgagtgcactcaataaaatcctccttttc

SEQ ID NO: 252254 - DNA, 402 bp, Homo Sapiens
  misc_feature (65)..(126): n is a, c, g, or t
atttttaaagaactacctcctgggaattcgcacgccacagctaaacttagaaactacaatccaannnnnnnnnnnnnnnnnnnnnnnnnnnnnnnnnnnnnnnnnnnnnnnnnnnnnnnnnnnnnnactgtccacccctttaaggaggaaggacccataactgacctcgctgccccccaccagtgttaaaatagatcagtctagtgatgctcaagtggatacgattcagaagcgagacgcaaagaggttaaacacgggtaaaccgcacgcaaaattctgatatcactgcaacacgtccgtggggtgggggtggcaagagtgctctagcatcgcagctccggcgcagatcggaatcccgcagtcaccctggcggcctcgtggtggcctcgtgccggcacgagg

SEQ ID NO: 252255 - DNA, 341 bp, Homo Sapiens
gagcagaaggggcccccctagccccagggacctgagcctccctcccatctaccgcagggcgagcacacaccctggaggagcccagatggccgtgctgagtggtgcacagaacggtgctgctaggtgggagatgaagtcagcacctgctggggcgagcacggcttcccaaagcaggaaatcctggagaaatcgagcggtggtctgatcaggccaagaggttgcacagggcatgatactgcaccctgcctgacccagctgggctcacaggtcaggggagagttggggcaggtgaatgtcagcatcaggcttctgaaactaaaaaaatacactctttggcttcc

SEQ ID NO: 252256 - DNA, 2011 bp, Homo Sapiens
  misc_feature (748)..(776): n is a, c, g, or t
cggccctggcgggcagatgacatcctggccagcccccctcgcctgcccgagccccagacccaccccggagccccgcaccacagctcctacgtgcacctgcggccggcgcgacccacaagcccacccgcccacaggcaccgcgacttccagccggtgctccacctggttgcgctcaacagacccctgtcaggcggcatgcggggcatacgcggggccgacttccagtgcttccagcaggcgcgggccgtggggctggcgggcaccttacgcgcctttctgtcctcgcgcctgcaggacctgtacagcatcgtgcgccgtgccgaccgcgcagacgtgcccatcgtcaacctcaaggacgagctgctgtttcccagctgggaggctctgttctcaggctctgagggtccgctgaagcccggggcacgcatcttctcctttgacggcaaggacgtcctgaggcaccccacctggccccagaagagcgtgtggcatggctcggaccccaacgggcgcaggctgaccgagagctactgtgagacagtggcggacggaggctccctcggccacgggccaagcctcctcgctgctggggggcaggctcctggggcagagtgccgcgagctgtcatcacgcctacatcgtgctctgcattgagaacagcttcatgactggctccaagtagccaccgcctggatgcacatggccggagaggaccggcggctcggaggaagcccccaccgtgggcagnnnnnnnnnnnnnnnnnnnnnnnnnnnnnacctggctgccatactttcctgtatagttcacgtttcatgtaatcctcaagaaataaaaggaagccaaagagtgtatttttttaaaagtttaaaacagaagcctgatgctgacattcacctgccccaactctcccctgacctgtgagcccagctgggtcaggcagggtgcagtatcatgccctgtgcaacctcttggcctgatcagaccacggctcgatttctccaggatttcctgctttgggaagccgtgctcgccccagcaggtgctgacttcatctcccacctagcagcaccgttctgtgcacaaaacccagacctgttagcagacaggccccgtgaggcaatggggagctgaggccacactcagcacaaggccatctgggctcctccagggtgtgtgctcgccctgcggttagatgggagggaggctcaggtccctggggctagggggagccccttctgctcagctctgggccattctccacagcaaccccaggctgaagcaggttcccaagctcagaggcgcactgtgacccccagctccggcctgtcctccaacaccaagcacagcagcctggggctggcctcccaaatgagccatgagatgatacatccaaagcagacagctccaccctggccgagtccaagctgggagattcaagggacccatgagttggggtctggcagcctcccatccagggcccccatctcatgcccctggctgggacgtggctcagccagcacttgtccagctgagcgccaggatggaacacggccacatcaaagaggctgaggctggcacaggacatgcggtagccagcacacagggcagtgagggagggctgtcatctgtgcactgcccatggacaggctggctccagatgcagggcagtcattggctgtctcctaggaaacccatatccttaccctccttgggactgaaggggaaccccggggtgcccacagggccgcctgcgggtgaacaaagcagccacgaggtgcaacaaggtcctctgtcagtcacagccacccctgagatccggcaacatcaacccgagtcattcgttctgtggagggacaagtggactcagggcagcgccaggctgaccacagcacagccaacacgcacctgcctcaggactgcgacgaaaccggtggggctggttctgtaattgtgtgtgatgtgaagccaattcagacaggcaaataaaagtgaccttttacactgaaaaaa

SEQ ID NO: 252257 - DNA, 1032 bp, Homo Sapiens
  misc_feature (15)..(15): n is a, c, g, or t
  misc_feature (431)..(619): n is a, c, g, or t
  misc_feature (643)..(652): n is a, c, g, or t
  misc_feature (681)..(771): n is a, c, g, or t
  misc_feature (835)..(835): n is a, c, g, or t
  misc_feature (865)..(875): n is a, c, g, or t
aagcccggggcagcnatcttctcctttgaggccaaggacgtcctgaggcaccccacctggccccagaagagcgtgtggcatggctcggactccaacgggcgcaggctgaccgagagctactgtgagacgtggcggacggaggctcgcctcgccacgtgccaggcctcctcgctgctggggggcaggctcctggggcagagtgccgcgagctgccatcacgcctacatcgtgctctgcattgagaacagcttcatgactgcctccaagtagccaccgcctggatgcggatggccggagaggaccggcggctcggaggaagcccccaccgtgggcagggagcagccggccagcccctggccccaggacctggctgccatactttcctgtatagttcacgtttcatgtaatcctcaagaaataaaaggaagccnnnnnnnnnnnnnnnnnnnnnnnnnnnnnnnnnnnnnnnnnnnnnnnnnnnnnnnnnnnnnnnnnnnnnnnnnnnnnnnnnnnnnnnnnnnnnnnnnnnnnnnnnnnnnnnnnnnnnnnnnnnnnnnnnnnnnnnnnnnnnnnnnnnnnnnnnnnnnnnnnnnnnnnnnnnnnnnnnnnnnnnnnnnnnaaagggggggggcccccgggggcnnnnnnnnnntttctaaaactttttttggggggcccggnnnnnnnnnnnnnnnnnnnnnnnnnnnnnnnnnnnnnnnnnnnnnnnnnnnnnnnnnnnnnnnnnnnnnnnnnnnnnnnnnnnnnnnnnnnggggggaaccgaggcctgggaaaaaaccgagggggggctcgggaggttcccggggctttacccnagggggaagaaggggggtcatataaaaaannnnnnnnnnngggcaaattttaaagagggggggaaaaactttaacaccccgcgcgcaggggaaccctccccccacgggggtaaaaatatctcacaaggcgccgagaggaaaccccccccgggccgcctgtcataaaaaaatctccccccgggaaaaagagggggggg

SEQ ID NO: 252258 - DNA, 893 bp, Homo Sapiens
  misc_feature (531)..(531): n is a, c, g, or t
  misc_feature (541)..(541): n is a, c, g, or t
  misc_feature (549)..(549): n is a, c, g, or t
  misc_feature (555)..(555): n is a, c, g, or t
  misc_feature (591)..(591): n is a, c, g, or t
  misc_feature (604)..(604): n is a, c, g, or t
  misc_feature (685)..(685): n is a, c, g, or t
  misc_feature (738)..(738): n is a, c, g, or t
  misc_feature (753)..(753): n is a, c, g, or t
  misc_feature (780)..(780): n is a, c, g, or t
  misc_feature (792)..(792): n is a, c, g, or t
  misc_feature (826)..(826): n is a, c, g, or t
  misc_feature (851)..(851): n is a, c, g, or t
  misc_feature (854)..(855): n is a, c, g, or t
  misc_feature (858)..(858): n is a, c, g, or t
  misc_feature (872)..(872): n is a, c, g, or t
gtccggaattcccgggatcgcggatggagtcggtgagcgcgtttcccgcctgagcgcaactagcggcgggtcgtgggcacctccaggagagcttgtttcatatccatatcccactgtattcctgctaatctgctaatgcagtaaattggaggaaaactgttaccaggataacctgtaatgggcaaggagccacaaagaagaaaacatttcttttaatttttaaacttggtttgaaagaccagcatgttttggaaatttgatcttcactcatcatcccacatagacacacttctagaaagagaagatgtaacactgaaggagttaatggatgaggaagatgttttacaggaatgtaaagctcagaaccgcaaacttatagagtttctgttaaaagcagaatgtctcgaagatttagtctcattcattatagaagaaccacctcaagacatggatgaaaagatcagatacaagtatccaaatatatcttgtgagttgctcacttctgatgtctcccagatgaatgatagactnggagaagatnaatccttnctaatnaaattatatagcttcctcctaaacgattcccctttnaatccactacttnccagtttcttcagcaaggtgctaagtattcttatcagcagaaaaccagaacagattgtggatttcttaaagaagaagcatnattttgtagaccttattataaagcacataggaacttctgctatcatggatttnttgctcaggctcctnacgtgtatcgaacctccacagcccagncaagatgtgctnaattggttaaatgaggagaaaattatccagaggnttgtggtaatagttcatccatcgcnagnnagnagatcgacattcanatgcatcacaatcactttgtg

SEQ ID NO: 252259 - DNA, 396 bp, Homo Sapiens
agttgacaaaatctatcctgcttttctatgcatttttccattgtattgtatccacttttgtacattttttcaatgtccttcatttgactctgtttttgctttagctcactttgcacgtgttcaaaaaccaaagccttttctttcagagcctctcctgtgtaatggagctcagtttcgaggactctgaacttactctcagctttagaaagttgcagagaaagaatcagaacatgagaattcaaattttcctgtaaatgacaacatttatctactgtgccctggaaagcaagctcttggtctctttttgatgagtgactttgatcatgatcacatagagcagcattcagtctacaacggtatgattgcatttctgtttccagtctttgcccgctctct

SEQ ID NO: 252260 - DNA, 1318 bp, Homo Sapiens
  misc_feature (17)..(17): n is a, c, g, or t
  misc_feature (25)..(25): n is a, c, g, or t
  misc_feature (43)..(43): n is a, c, g, or t
  misc_feature (76)..(76): n is a, c, g, or t
  misc_feature (102)..(102): n is a, c, g, or t
  misc_feature (126)..(126): n is a, c, g, or t
atttcaggttccacttnaaccaccnaaagggcatccttacaanggtctccaatgctttcaggcacccagcattatntcccacacatttgtattacctctgtnactgggacacatcagaacatctantaaactgtggtgaatacagctatcactgtctttaagtggaaaacatcactgaatcacccaagcatcgtgagtgggagagcagcagcttatgacttggagaacacgttgatgagcagcctcactctcaccctctaggtaccagtgactgggaacagggctggagtatgggtggtggtgagccacatacttcaccaatggcttgtgaaaatgcttctcaaaagaagacataccaggttcatgcaaacaacgttcagcagcactagccattagggaaatgcaaattaaaaccacaatgagattacctcacacctgctagaatgcattttctcaaatagatgaaagatcagtgttagcaacaatgcagagaaaagtgaactcttctacaccgttgctgggaatgtaaattagtacagccaccatggaaaatggtatagaggttcctcaaaaaactaaaaatagaattaccatatgatccagcaaacccacttctgggaatataaaaggaactgaaatcagtatctcaatgggatatccgtacttccatgttcactgcagcattatttacaatagccaaaatacaaaatcaactgagaattatccatcagtggatgaagacaatgtagtatagacacattatactatccggccttttaaaataacaaaattctctcatatgggacaatgtggatggatcttagaggacattatgccaaataaaataaaccaggcacagaaagacaaacattacatgatctcacttacaggtaaaatcttaagttgaactcctagaagtagagaacagaatgatggttatcagaggatgagggtggggtgctggggaaggtgggaaagagaatgggtagaaggctgcagctaaactcaaggaataaattttgagatctactgcacaacagggtgactacagtcaataatatatattgaaacagcaaatttcaaatgtattaccactgaaaaaaatgaaagatgttaattagcttgatctaataatttcacattatgtacctgcaaagcatcacactgtattccacaaatgcaatacaatgacttgtcgattaaaaataaaacttaaaacatttttaaatccaaaacagtgaaaaactgctacacgtattcaagacaggtttacttgatgatctttagggcatgcttccttttcatctactcctttttc

SEQ ID NO: 252261 - DNA, 419 bp, Homo Sapiens
acacaaccacaaacagagagacacagtcaagaagataataaaccactcctgcactaatctatagattggcttctcaacacttgcatccttgaagattctcattgagtaatagaagacaacattgattccagaaagctactgagagagctggagcatgatggaaatgacagtgggttgttggtagctgggtactctaaagagcgccagtgtagtgacttgcttttcttgtatcatcctagcactcttatctcctagatgtcctgggacacatcctgagtcccctacaattgctgaaggatctcattagtactcttcctttctgttaatgagcaaaaacttacgacttccagggcaaaatggaagggctacactttataggacagctggaaggatggtaaagcccagtatcactgggcata

SEQ ID NO: 252262 - DNA, 643 bp, Homo Sapiens
caagatgtaacaaaaatacataggcatgccatgccccaaagcaccaacacacaaactagataatattgttcaggaagagcaatccacctagaaagttgaaggtccagttggagcaaccagccactgctattgcaaactgaagagtgtggccacagtattccagggaacggagtctggtccaacttcagagaaggccacaaagaccaagatagccccactacagacaaagctcatcccaccatactcatcctttaataacaaagaaacaatcatgaggacagaacaaaacgccatgcctcaagacctatcatatgtaaagtccttcctgccctttcaaccacaaacagagagactacagtcaagaagataatattaaccactcctgcactaatctatagattggcttctcaacacctgcatccttgaagattctcattgagtaatagaagacaacattgattccagagagctactgagagagctggagcatgatggaaatgacagcttgtatcatcctagcactcttatctcctagatgtcctgggacacatcctgagtcccctacaattgctgaaggatctcattagtactcttcctttctgttaatgagcaaaaacttacgacttccagggcaaaatggaag

SEQ ID NO: 252263 - DNA, 1016 bp, Homo Sapiens
  misc_feature (817)..(826): n is a, c, g, or t
ctggagcaaggcctgctgagaatacaccagctatatgtggctgctgagctgctgctaatgcatattgctgctgttgagctgcagttaactgttgaactgttagtgcattagtcctctgaaagagctgctgctgggaattgtagtcaaaaaggcctacagtagctcctgaagagtccattggtacctgattaccaggatagtcaaactgtaaggattccagaccaacttgttccatggcatccagattctgagtttcaggatttgaaaattcttcaacaagtggtttattagctgtaggattaggaagaggccccagtccttctgagggattagtattggggcccaagcgctcaactacttcagttggagaggcttgacgacttccaggagtacgattaaaatctttgcaatcggcatccattccatttggcaaacctctgccatttattttagaatcatcatcatctccttgtttaagatctctgttttggtcctcctcaaatggagaagccttgcctttttgatctcctttctcaggtccatctgtttcagcatctctagtgccaaaatttcccttcctaaatcgagaatccaattcaccagcaggagaagaacttaatacatattctaccatgctcacaccaaggcctccactttctgatcgcggagacagtattgcatttacttcactgtttccatgaaaaccctgtccagatcttctctgtaccataataggctgggacattgaatggtgagaagctccccacgcagtctctctccattcatcatccccaagaaaaaagcctttttgtccatnnnnnnnnnntcatcaggttcccaaaactttttggtaggcaaaagctctcccattcgccgagattctaatgcaagagcttgaaaatcatgattcatttcatccacagatctgtcagggacatggctgccaccgccgcctgccctccccggccgtaatggcctttttcccgggtacccgccgaaaaccagctttccctata

SEQ ID NO: 252264 - DNA, 1772 bp, Homo Sapiens
gggagagctgagtggagcccggctgcggatctgggaagcgcctcttcacggcactgggatccgcatctgcctgggatcatcaagccctagaagctgggtttctttaaattagggctgccgttttctgtttctccctgggctgcggaaagccagaagattttatctagcttatacaaggctgctggtgttccctctttttttccacgagggtgtttttggctgcaattgcatgaaatcccaatggtgtagaccagtggcgatggatctaggagtttaccaactgagacatttttcaatttctttcttgtcatccttgctggggactgaaaacgcttctgtgagacttgataatagctcctctggtgcaagtgtggtagctattgacaacaaaatcgagcaagctatggatctagtgaaaagccatttgatgtatgcggtcagagaagaagtggaggtcctcaaagagcaaatcaaagaactaatagagaaaaattcccagctggagcaggagaacaatctgctgaagacactggccagtcctgagcagcttgcccagtttcaggcccagctgcagactggctccccccctgccaccacccagccacagggcaccacacagccccccgcccagccagcatcgcagggctcaggaccaaccgcatagctgcctatgcccccgcagaactggctgctgcgtgtgaactgaacagacggagaagatgtgctaggggagaatctgcctccacagtcacccatttcattgctcgctgcgaaagagacgtgagactgacatatgccattatctcttttccagtattaaacactcatatgcttatggcttggagaaatttcttagttgggtgaattaaaggttaatccgagaattagcatggatataccgggacctcatgcagcttggcagatatctgagaaatggtttaattcatgctcaggagctgtgtgcctttccatcccttccggctccctacccctcacttccaagggttctctctcctgcttgcgcttagtgtcctacatggggttgtgaagcgatggagctcctcactggactcgcctctctcctctcctccccccaggaggaacttgaaaggagggtaaaaagactaaaatgagggggaacagagttcactgtacaaatttgacaactgtcaccaaaattcataaaaaacaatagtactgtgcctctttcttctcaaacaatggatgacacaaaactatgagagtgacaaaatggtgacaggtagctgggacctaggctatcttaccatgaaggttgttttgcttattgtatatttgtgtatgtagtgtaactattttgtacaatagaggactgtaactactatttaggttgtacagattgaaatttagttgtttcattggctgtctgaggaggtgtggacttttatatatagatctacataaaaactgctacatgacaaaaaccacacctaaagaaattttaagaatttggcacagttactcactttgtgtaatctgaaatctagctgctgaatacgctgaagtaaatccttgttcactgaagtctttcaattgagctggttgaatactttgaaaaatgctcagttctaactaatgaaatggatttcccagtaggggtttctgcatatcacctgtatagtagttatatgcatatgtttctgtgcatgttctctacacaattgtaaggtgtcactgtatttaactgttgcacttgtcaactttcaataaagcatataaatgttgataaaaaa

SEQ ID NO: 252265 - DNA, 454 bp, Homo Sapiens
  misc_feature (282)..(318): n is a, c, g, or t
gggacaccatatgtgtcctgttccagtgcgcgggtctgtggagagccgggtgcgagcggcggcagcacgaggggaaaagagctgagcggagaccaaagtcagccgggagacagtgggtctgtgagagaccgaatagaggggctggggccacgagcgccattgacaagcaatggggaagaaacagaaaaacaagagcgaagacagcaccaaggatgacattgatcttgatgccttggctgcagaaatagaaggagctggtgctgccaaagaacaggagcctcnnnnnnnnnnnnnnnnnnnnnnnnnnnnnnnnnnnnngcaggactttgatgaagatgatatcctgaaagaactggaagaattgtctttggaagctcaaggcatcaaagctgacagagaaactgttgcagtgaagccaacagaaaacaatgaagaggaattcacctcaaaagat

SEQ ID NO: 252266 - DNA, 451 bp, Homo Sapiens
agagctttcagggagggctgttcaagtttggtttttgaatagacagaggtttcattttcatctcattagggctttttggtacatagccaactgtagccaccctggcatgctgtctctaattgattcaagggcctagatttggagactttgttccttagcatccatggatgcagaaatgagtgataaatttggccatgaaagccctggaattttaggaaagttgtgattctttgatatgttgatgaaattctggatcaggaggggtgttaaaacatcaaaatgatggcgacttgtataagtagaattcttaccatcttactcctgcccccccattccttgcctgtcaggaccattttagaagagttaccttggttaacttaagggttttttagaaaaccccacaaaaatctctcacccagttcaggtgtatagggaattttcattttcatta

SEQ ID NO: 252267 - DNA, 822 bp, Homo Sapiens
gggtgtgggaaaagtatgtcggcaagtcagctggtttcccagtgcaggacgcgctgacagctcgagtgagcggactgcccaggacttcggaactagacgagttctgtagaaatcctgtcaaagaatatgaagaaaaacagagaaagattctgcaatagagagagagaatttgtatataaatttaaagtaggaagtcagtgcttagaactgagagtgccactcaaatttcctgttcaagagaatgccagtcatttgcatggacgtctgatgctgctgcacagtttaccgtgctttatagaaaaagacttaaaagaagctctgactcagtttatagaagaagaatccctcagcgattatgatagagatgctgaagcatccctggcagctgtgaaatcaggtgaagtagatttacatcagctggcgagtacatgggccaaagcttatgctgagaccacgttagagcatgcaaggcctgaagaacccagctgggatgaagattttgcagatgtgtaccatgacttaattcattctcctgcctctgaaactctcttaaatttggaacataattactttggtaggatctcacaactgatgggggaaagagaagtggagcttgaaaaaattacgagagagaccaaggtattgaaatggaaaaaggcatgcaggaattgggaaaatcactgacagatcaagatgtaaattcactggctgctcagcattttgaatcccagcaagacctagaaaataaatggtcgaatgaattaaaacaatcaactgccatccaaaaacaagagtatcaagaatgggtaataaaacttcacc

SEQ ID NO: 252268 - DNA, 857 bp, Homo Sapiens
  misc_feature (23)..(23): n is a, c, g, or t
  misc_feature (78)..(78): n is a, c, g, or t
  misc_feature (373)..(381): n is a, c, g, or t
  misc_feature (455)..(455): n is a, c, g, or t
  misc_feature (579)..(579): n is a, c, g, or t
gcccacccatgccctagctgaangcaagcatttcctttgccctttaaaatagaaggaaaaaaactactgattttttcnagtacccaagtctaacaaagctcatcatgagaaaaaaccccaatacttcaaatagggcagcacttttataaaaggtcatggtaatggttcacttatttaattataaaatcttcagagaagtatcacagattttttaacaagcacaagaggcaagatctgtgctttcaaaactgtctggaagacaagaagtgtcaccaacataacccttgaactgtcttgaaatgtctttcatttctaactccctgtctaggtttattcctcctttattcaataaagacctgccacaagtgagttnnnnnnnnnttaagacacaatggagagagcactactatacttaaccctaacatctaaacaaaggcattttaatttccatttgncaaaatccaaaggactacaaaactatcccacaatctgaattaaaacatttaatactttgaccttatgaaatcagtttaaaattaatgccaagaaaatatctttgatgtccagaaaggaaatganctgtttcacagcaacaactaacaagagcaaataaataaagcgttggactgaataacctataaaacctgcaaatatctaacaggctgtacatgatacaatacacagaaaattaatgagagatttaaagtttctacactgaacagcatggctattaaagacacaacattcttttaataaatttcatttatttgctgatctaatctgggagggaaattcaatgtaaaagcacttttaaaatggaccccccttccatccacaccccaaaagttgactgttta

SEQ ID NO: 252269 - DNA, 881 bp, Homo Sapiens
  misc_feature (703)..(712): n is a, c, g, or t
  misc_feature (757)..(757): n is a, c, g, or t
tctccggggtctcattacccccatggaggtgatgcgggcaagggtcagagtactgatcggctactatcaacagaacctcatgaggaagtacctaatattcttcagcaaccattggcccttggttactttgtatcaactgccaaagcaggtccattacctgactggttctggtcagcatgtcctcaagcacaatatcagtgtcccctttttcttaaggcctctttgcacctccacgtgccttcagtgcaatctgacgagctgcttcacagtaaacactcccacccacttgactcaaatcagacttcagatgtcctcaggtttgttttggaacagtacaatgcactctcctggctaacctgtgaccctgcaacccaggacagacgctcatgtctcccaattcattttgtggtgctgaatcagttatataactttattatgaatatgctgtgatcttcatttgatggaactgtgcaagaaaagaacaaggaaaaatggatgtttcgctgcaggattaagttacaattatcttctcagtgaaggtcatttgtgatggggtctaattcttattacttcaacaaatattgttttgacttgggggggaggggctataaccctgctatttttcattgactctattgaactctttaggatgatgactgatcatacaaaacgtattataacattttcgtagcaaaattaaccnnnnnnnnnncccggccccagtatttgtgaaaagtaatgaaccatagtaccccgntcatgttaaatggatattaaaagcctggaaaagaaacatgaggaacaatgaatttcaacatatggctccagaacatgaaaaagttcctggtatggattatagaacctagaaattcaaaaatgct

SEQ ID NO: 252270 - DNA, 527 bp, Homo Sapiens
  misc_feature (460)..(470): n is a, c, g, or t
agaactttgcaacaggtttttatttttgctttatatctattacagtgtttgaaacctaaagaaatacattttctcttcaaatttggatgtgtatataaataacatttgtctggactcagcacactcaatgccatgttttcttcgcctatgtctgctctgaaatcaagctgtgtctgtctacccaggggccctgagaacatggaaaatagagtttattgttattagaaaaataaaagcaaatgaatttgcaaagaaaaaccagtgagaaggattagattcatcttccaagggtccatagctggtaacccaagccattctcgggggatatccagtctcttgagtggctgggactccattacccactttccttctttaataggtcaaaggcaattcccacaaaagctggctaaaaaagccgacacccaactccagagtctgagggttcatgaagatgtggacnnnnnnnnnnngagacaagagcctcaccctgtcgcccaggctggcacaatcttggctcactgcaacct

SEQ ID NO: 252271 - DNA, 278 bp, Homo Sapiens
gggggcaggaggagaaattaggtatggatgacttgactaagttggtacatgaacagaaacctaaaggcagtcagcgaagtcggaaaagaggccatacggcttcagaatctgatgaacagcagtggcctgaggaaaagaggctcaaagaagatatattagaaaatgaagatgaacagaatagtccgccaaaaaagggtaaaagaggccgaccaccaaaacctcttggtggaggtacaccaaaagaagagccaacaatgaaaacttctaaaaaaggaagc

SEQ ID NO: 252272 - DNA, 973 bp, Homo Sapiens
  misc_feature (178)..(188): n is a, c, g, or t
  misc_feature (762)..(762): n is a, c, g, or t
  misc_feature (870)..(905): n is a, c, g, or t
  misc_feature (914)..(914): n is a, c, g, or t
  misc_feature (933)..(933): n is a, c, g, or t
ggtgctcatggacctgtcatcctttttataaaaaggctcactgacaagagacagctgttaatttcccacagcaatcattgcagactaactttattaggagaagcctatgccagctgggagtgattgctaagaggctccagtctttgcattccaaagccttttgctaaagttttgcacnnnnnnnnnnncatttcccatttttaagtagttactaagttaactagttattcttgcttctgagtataacgaattgggatgtctaaacctatttttatagatgttatttaaataatgcagcaatatcacctcttattgacaatacctaaattatgagttttattaatatttaagactgtaaatggtcttaaaccactaactactgaagagctcaatgattgacatctgaaatgctttgtaattattgacttcagcccctaagaatgctatgatttcacgtgcaggtctaatttcaaagggctagagttagtactacttaccagatgtaattatgttttggaaatgtacatattcaaacagaagtgcctcattttagaaatgagtagtgctgatggcactggcacattacagtggtgtcttgtttaatactcattggtatattccagtagctatctctctcagttggtttttgatagaacagaggccagcaaactttctttgtaaaaggctggttagtaaattattgcaggccacctgtgtctttgtcatacattcttcttgctgttgtttagtttgttttttttncaaacaaccctctaaaaatgtaaaaaccatgtttagcttgcagctgtacaaaaactgcccaccagccagatgtgaccctcaggccatcatttgccaatcactgagaannnnnnnnnnnnnnnnnnnnnnnnnnnnnnnnnnnnagacagagnctctcttctggtttgcccngggttggagtggcagtgggcgcaatctcaggttactgcaa

SEQ ID NO: 252273 - DNA, 481 bp, Homo Sapiens
cctgcttagaggcaccaccggaggactgtgtaaaggaaactgaaaactacaggttgaagagatgaacaatggagtctagatttttcgcaagaatttcgagattttaaaaatagagtcggggaacaggagtttgaagcttggggagttggaatgtcactagagaacaaaaggccggaaatgtttccatgataaaaaatggttaaagaaaaatcccaggagttctgttgtcttgaaagtcatagaaacaacttaaaagtagaaaatggttaggtgttacggctttctcgtcgttttgcttccgtatgttaaacatacagcactcaccaacgttgaaatgggcattttccgctgttggaacagcaaatctgttaatttcaagttgctccagagaaaacctgagctgtccctttaaggggttctgcttttcctatttgtgttggcatttgaaagattgtggaggcagaaaactttctggaatgtc

SEQ ID NO: 252274 - DNA, 664 bp, Homo Sapiens
  misc_feature (12)..(12): n is a, c, g, or t
  misc_feature (28)..(28): n is a, c, g, or t
  misc_feature (72)..(72): n is a, c, g, or t
  misc_feature (164)..(164): n is a, c, g, or t
tgccccagaacnagtttctactcagctnggggctctcccaccactgtcagtgaatgagatcagagtgaatcnagccgtacgtcactccttaatacattcaaaagcacagaggacgtccctggatgcaaaatcaggagagggtaggagccctggaagggaatatncctgcccaagtgcagtacttcactataattattacagtaatacactatttctgtttaagaccatttcaaagggcactaactggcataaagtaaaataagtctgcttcctccccacacctagctgcactctctagggaccaccatgtatagcttctggtatacctttcagaaattttctatcctagtgtattctgttgaatgcatgtgcaaggattttacttatagatcattcaactaacaataatcactaatttataaaatgcatattattgacactgacattggaggtggaaaaacaactaaaaatgataaaagtgaacgtttaattcttccagagtgcagtttttgaaatgaccaccaggtgtcagagttatcaacagtaatccccaaattacgactggaaagttacaagaacagaaaagtgcctggctggaaatgagaccgcgagattcctcccttaacaggattccttggccctttggcccaatatttcgtctact

SEQ ID NO: 252275 - DNA, 1442 bp, Homo Sapiens
aagcaggctggtaccggccggaattctcgggatatcgtcgacccacgcgtccggctttgttgttctgttgttgttattgttcccagagtagttgcctctgccccagcctcttcctctggctcgaaaaaaggttcctcgagctctgccacctcctctttcacttggacccacaaagtcttggtccccagtcttgatttgtcaaagcccgtggtgctctcctctctttcctctgtctcttcagtgtactcttctgcttgtaggagtgagatgactgggaggaagaggaggaggatctggacctgtctcttgctctccgatgcttcttctgtttctttgatcctttatgagttttctctgttttttcagctgacctttcccttgagtgactggagtctcgggaatccactgattctctcgatttacctcgtttaagatctctctccttatgttttttacgacgttcaatatcaaggcggagatcaacaggatcatctttgtattttccctcagccttgtagccaggttcccggggacttttcatttcatcatgagccaaaccatgttttctgaatgtactgggggaaatgtctattctcctgtgtatctctgggcttttcttgtttttggctgcctcctgctcagttcctctctttaggtatttagtaaagcgttcatgtaatgtcattcctgaggacccaaagtgatgctctttaacatggtgaacaatggtcactatatgttgggcaaacagttctgaggggctacgctgagactgagctgattgtatgtgctggaaaatggaacgaaactcctgttcctttttgttgctatggactagatctcggcaaagcttgcgttcctgagccaataagccactgggtcgtgcgaggtcctcatcaaaagagtccatccggacattgacctgtgcctctcgagtaatggaaaaggaagactttcctgtgggaaaatctcctttcgctcccagcttgtctcggctctcagaggtctttcttgggggaggtgatgagcttttctcctggactgctttataagcagtcactcggaaattcttctcaggcacaaagcccctgtgcccaccttcgcttctcttgccccgatcttcctttttggatctctctgggaaagactcctcctccagctcctctgtttttctctgcttttccttccctggaggtgcatataccaggccctcccatttgcctgacttctcctcctcctggtttttgtttgcacctatgactttagacataaatttgggttcatcatcaaactcagattcctttcttcccttagctttgtccttatcttgatcatccatctcctccttgtggaagtcagccatcttcttctcaaagtcatctcggagcttataccttttgggagactgactgccccgaaaaggcttctcagaatcagttttg

SEQ ID NO: 252276 - DNA, 560 bp, Homo Sapiens
aaggggtctgggctcactgcctggtgaagtttcaagtgttcagcagacctctctggtaacatatctggaatattgttgttgttttttaaccgagttttcccatcagtgccaaaactcaactcaatctgaaagtagagtgtctgagaggacagaaggtaatgggaactgtagctggaggcctcaggccatgggtcaaacctgggagggaaagagaccctacacatggcctagaaatgagagaagagagaggtaattacccagaggattttcctatggttggggatgcaaatattagaaaacagattgtattttgctgaggggagtggctgtcatgagcatgtcagttctaaaaggggttttcattatcctggaaatgtataaactaaagtaagctgattggctttgcaaacatgttcatttgtttttcagacagtatgggttaagttctctgccctccccaggggtctgaggaggctctgggtttctcagatctgtctcttgctgcgttttcacatcagctgtgctgcttggtgcctctctgatatgaatacactgacacg

SEQ ID NO: 252277 - DNA, 568 bp, Homo Sapiens
agagggaaccatgtaaagagctgaaggaacaatgttccagggaggggaaagaggatgtatcagggtcctggaagaaaagtaaggtaacagtatggctgcagtgaggtgctcaagcaagaaagcagtggaagagggtcagaggagataagaggcccagataagtaatctgggctgaatcttaaatataataaaaactgttggaatgttttcagtagggaatgaaatgagcaatcttaaaatactgccatagttgctatgtggagattagaatttagtagatatgtgggactaaggatttatgagtgattttcagctttttggcttgagcatctctgaggttcctttaccgaaaatagagaagatttgtggtagggcaagtttggggaagaaaagtcaaattttgttttagacatagtaagtttgagatgcctgttaagacatccatggtatgatgctgataggtagatacgaacctggaatatagggaataggttagggctggaaacacaaattggggattcatcagttactaagggtagtatttaaagttataaatctggatgacatt

SEQ ID NO: 252278 - DNA, 862 bp, Homo Sapiens
tatgttgaccatttcacaagaacaacaacgtggcagaggccaacactggaatccgtccggaactatgaacaatggcagctacagcgtagtcagcttcaaggagcaatgcagcagtttaaccagagattcatttatgggaatcaagatttatttgctacatcacaaagtaaagaatttgatcctcttggtccattgccacctggatgggagaagagaacagacagcaatggcagagtatatttcgtcaaccacaacacacgaattacacaatgggaagaccccagaagtcaaggtcaattaaatgaaaagcccttacctgaaggttgggaaatgagattcacagtggatggaattccatattttgtggaccacaatagaagaactaccacctatatagatccccgcacaggaaaatctgccctagacaatggacctcagatagcctatgttcgggacttcaaagcaaaggttcagtatttccggttctggtgtcagcaactggccatgccacagcacataaagattacagtgacaagaaaaacattgtttgaggattcctttcaacagataatgagcttcagtccccaagatctgcgaagacgtttgtgggtgatttttccaggagaagaaggtttagattatggaggtgtagcaagagaatggttctttcttttgtcacatgaagtgttgaacccaatgtattgcctgtttgaatatgcagggaaggataactactgcttgcagataaaccccgcttcttacatcaatccagatcacctgaaatattttcgttttattggcagatttattgccatggctctgttccatgggaaattcatagacacggggtttttctttacca

SEQ ID NO: 252279 - DNA, 691 bp, Homo Sapiens
gattgatgcttcattggaagttcagttctttctgaaacgtaaataagcttttcttcttggagactacaagcggaaaacctattggcatctgtcccagccccacaaccaacagcagatgacgggttatgtgggactgtgacaccactgacttgttcaaaggatttactaaatacagtcgctgcggtcttagccaaaccatggctactaggcttaggtagggattggctggttgttaaagtaagtctcttcaaagagagaagctcaagattctcactttgggctctctgagtttgttttcgagcaaagtgatctttgcaagattcccctgtagtttctttttcttttcctccagttttgcttcctcctgaccgtctgtggttctttcctatacttggcttgttactacaattgtgactactgtttgataaacccgactggctggtactagacgcagccctggaataaaatccctcgtcaacttcagatatctccatcagttcttcttgacctgttaattctgtatttccttggagtgcagttataaagtgctctgctaaaactgcactctgccaggtgagtttattccatcctccatcatttttcttacagatttttgcctcctgatctctggcaagcctttgctctcagttctaggatctgtggctgtttcctgcacaccctgtatatgctg

SEQ ID NO: 252280 - DNA, 779 bp, Homo Sapiens
ggaagatctccagttataatagataacactaatatacaagcttgggaaatgaagccatatgtggaagtggccataggaaaaggatacagagtagagtttcatgaacctgaaacttggtggaaatttgatcctgaagaattagaaaagaggaataaacatggtgtgtctcgaaagaagattgctcagatgttggatcgttatgaatatcaaatgtccatttctattgtaatgaattcagtggaaccatcacacaaaagcacacaaagacctcctcctccacaggggagacagaggtggggaggctctcttggctcacataatcgtgtctgtgtcacaaataatcattaaattagctattttcagctaacacatttgttgttgcacttgaaaaagagttagtgagcctgtcttggagtttaagtagtttcaaataaaaaaaggctacagtgcctcacaaaggatgttcccagcaagttgtttaaattcccagcaagttgttaaagtgtaaataaaaatatatgaaattgtattttaaatgtttttatattctcttgttgtaatactcttggctgttatggaagcacctgagtaatagagtggtgggtaggagctaggatgtttttctacaatcgaattttaaactaatttatctattttatagacactattgaacagttttttaatagttcatatctaaatctaacttttcataaaactttacggtttttccttcactaccttaaatatgcaagaaatactgacttggtatagggtacctt

SEQ ID NO: 252281 - DNA, 1369 bp, Homo Sapiens
actcaaactcctctctctgggaaaacgcggtgcttgctcctcccggagtggccttggagggtgttggagccctcggtctgccccgtccggtctctggggccaaggctgggtttccctcatgtatggcaagagctctactcgtgcggtgcttcttctccttggcatacagctcacagctctttggcctatagcagctgtggaaatttatacctcccgggtgctggaggctgttaatgggacagatgctcggttaaaatgcactttctccagctttgcccctgtgggtgatgctctaacagtgacctggaattttcgtcctctagacgggggacctgagcagtttgtattctactaccacatagatcccttccaacccatggagtgggcggtttaaggaccgggtgtcttgggatgggaatcctgagcggtacgatgcctccatccttctctggaaactgcagttcgacgacaatgggacatacacctgccaggtgaagaacccacctgatgttgatggggtgataggggagatccggctcagcgtcgtgcacactgtacgcttctctgagatccacttcctggctctggccattggctctgcctgtgcactgatgatcataatagtaattgtagtggtcctcttccagcattaccggaaaaagcgatgggccgaaagagctcataaagtggtggagataaaatcaaaagaagaggaaaggctcaaccaagagaaaaaggtctctgttttatttagaagacacagactaacaattttaaatggaagctgagatgatttccaagaacaaaaaccctagaatttcttggaagctaatggaaacttttctttggcttttccagttgtgacccgttttccaaccagttctgcagcatattagattctagacaagcaacacccctctggagccagcacagtgctcctccatatcaccagtcatacacagcctcattattaaggtcttatttaatttcagagtgtaaattttttcaagtgctcattaggttttataaacaagaagctacatttttgcccttaagacactacttacagtgttatgacttgtatacacatatattggtatcaaaagggataaaagccaatttgtctgttacatttcctttcacgtatttcttttagcagcacttctgctactaaagttaatgtgtttactctctttccttcccacattctcaattaaaaggtgagctaagcctcctcggtgtttctgattaacagtaaatcctaaattcaaactgttaaatgacatttttatttttatgtctctccttaactatgagacacatcttgttttactgaatttctttcaatattccgaggtgatagattttt

SEQ ID NO: 252282 - DNA, 1114 bp, Homo Sapiens
ttcggcacgagggcttcccacaaactggggaggaaaactgagacctcctggtcacccgccgccgggccttttagaaactcccacaagctctgccttccctccctggtcctcttcagaccccctcttagttcttcgcggctaacggctcgcgctcggggcagggtgtggagctggaacagagggctggcaaggcgcgcatcacacggagggtggagccgctgagcacagaaccggaaacttagagacaaagttcggagccccgcccccgccgcgcgccgctgagttgtctggccccgccgacccacggcccacgacccaccgacccacgaatcggcccggccgtcgcgtgcaccatgtctggctcctccagcgtcgccgctatgaagaaagtggttcaacagctccggctggaggccggactcaaccgcgtaaaagtttcccaggcagctgcagacttgaaacagttctgtctgcagaatgctcaacatgaccctctgctgactggagtatcttcaagtacaaatcccttcagaccccagaaagtctgttcctttttgtagtaaaatgaatctttcaaaggtttcccaaaccactccttatgatccagtgaatattcaagagagctacatttgaagcctgtacaaaagcttatccctgtaacacatgtgccataatatacaaacttctactttcgtcagtccttaacatctacctctctgaattttcatgaatttctatttcacaagggtaattgttttatatacactggcagcagcatacaataaaacttagtatgaaacttttaaaaaagcaagacacagaaggaaaacaaaacttgtcgggccgccttcggccccccaaaaagctttcttaaacccattccgtttgggcgccgcggggccccaggagaggaaaagtggaacattgggcccttagcttgttttccctagggagaacccctgggcccatggacctagggggccttgggaatcccccaccccaaatcaacaaaaacggcccccgggggggagacaacccggaacgcggttttcttgaagaacacaaattcccagagatggggggcagacttcctgcgagggggctcccctctaat

SEQ ID NO: 252283 - DNA, 1922 bp, Homo Sapiens
ggctgcaggattcggcacgagaaaccgtcatgtttctggggagtcacctcagctggcagttaccaccgtgttagaaagcagcctcaggaccggccacctccatcactggcgtcaccatgggggctgtgctgggtgtcttctccctcgccagctgggttccatgcctctgcagcggtgcctcatgtttgctgtgtagttgctgtcctaacagtaagaattccacggtgactcgcctcatttatgctttcattctcctcctgagcactgtcgtatcctatatcatgcagagaaaagagatggaaacttacttgaagaagattcctggattttgtgaagggggatttaaaatccatgaggctgatataaatgcagataaagattgtgatgtgctggttggttataaagctgtgtatcggatcagctttgccatggccatctttttctttgtcttttctctgctcatgttcaaagtaaaaacaagtaaagatctccgagcggcagtacacaatgggttttggttcttcaaaattgctgcccttattggaatcatggttggctctttctacatccctgggggctatttcagctcagtctggtttgttgttggcatgataggggccgccctcttcatcctcattcagctggtgctgctggtagattttgctcattcttggaatgaatcatgggtaaatcgaatggaagaaggaaacccaaggttgtggtatgctgctttactgtctttcacaagcgccttttatatcctgtcaatcatctgtgtcgggctgctctatacatattacaccaaaccagatggctgcacagaaaacaagttcttcatcagtattaacctgatcctttgcgttgtggcttctattatatcgatccacccaaaaattcaggaacaccagcctcgctccggcctcttgcagtcctccctcatcaccctctacactatgtacctcacctggtcagccatgtccaatgaacctgatcgttcctgcaatcccaacctgatgagctttattacacgcataactgcaccaaccctggctcctggaaattcaactgctgtggtccctacccctactccaccatcaaagagtgggtctttactggattcagataattttattggactgtttgtctttgttctctgcctcttgtattctagcatccgcacttccactaatagccaagtagacaagctgaccctgtcagggagtgacagcgtcatccttggtgatacaactaccagtggtgccagtgatgaagaagatgggacagcctcggcgggctgtggacaacgagaaagagggagtgcagtatagctactccttattccacctcatgctctgcttggcttccttgtacatcatgatgaccctgaccagctggtacagccctgatgcaaagtttcagagcatgaccagcaagtggccagctgtgtgggtcaagatcagctccagctgggtctgcctcctgctttacgtctggacccttgtggctccacttgtcctcaccagtcgggacttcagctgaacctctgagtgccaaggacaccactggaactcacaaaggtctccttcaccgaaaacccatataccttttaagtttgtttcaactaaaatattaagtgaatgctttgcaagtttgactgtatgcaggtttatatcagaaggtgagattgaataatgcttgatgcagaatcgaaacttctcatttatctgtatattatgtttacttctaaggatatagcacaaagggaacattttttgtttaaagtgaactacagctgtgctgtgaagagagttctttataaagcctgtaggttcttttaactttggtttaaaatgtaagataggaaaatgttggatatttgaggccatgcttaatatatttatattgcagtatcctttaaaagc

SEQ ID NO: 252284 - DNA, 439 bp, Homo Sapiens
  misc_feature (403)..(403): n is a, c, g, or t
ttgcttttaaaggatactgcaatataaatatattaagcatggcctcaaatatccaacattttcctatcttacattttaaaccaaagttaaaagaacctacaggctttataaagaactctcttcacagcacagctgtagttcactttaaacaaaaaatgttccctttgtgctatatccttagaagtaaacataatatacagataaatgaggaagtttcgattctgcatcaagcattattcaatctcaccttctgatataaacctggcatacaggtcaaacttgcaaaggcatttcacttaatattttaggttggaaacaaacttaaaaggggtatatgggggttttcgggtgaaggggaggaccctttgtggaggttccagtgggggtcccttgggggcactcngaggggttcaggctggagggccccgactggggtgag

SEQ ID NO: 252285 - DNA, 1030 bp, Homo Sapiens
ggggcgccaaacttgaccgcgcgttctgctgtaacgagcgggctcggaggtcctcccgctgctgtcatggttggttcgctaaactgcatcgtcgctgtgtcccagaacatgggcatcggcaagaacggggacctgccctggccaccgctcaggaatgaattcagatatttccagagaatgaccacaacctcttcagtagaaggtaaacagaatctggtgattatgggtaagaagacctggttctccattcctgagaagaatcgacctttaaagggtagaattaatttagttctcagcagagaactcaaggaacctccacaaggagctcattttctttccagaagtctagatgatgccttaaaacttactgaacaaccagaattagcaaataaagtagacatggtctggatagttggtggcagttctgtttataaggaagccatgaatcacccaggccatcttaaactatttgtgacaaggatcatgcaagactttgaaagtgacacgttttttccagaaattgatttggagaaatataaacttctgccagaatacccaggtgttctctctgatgtccaggaggagaaaggcattaagtacaaatttgaagtatatgagaagaatgattaatatgaaggtgttttctagtttaagttgttccccctccctctgaaaaaagtatgtatttttacattagaaaaggttttttgttgactttagatctataattatttctaagcaacttgtttttattccccactactcttgtctctatcagataccatttatgagacattcttgctataactaagtgcttctccaagaccccaactgagtccccagcacctgctacagtgagctgccattccacacccatcacatgtggcactcttgccagtccttgacattgtcgggcttttcacatgttggtaatatttattaaagatgaagatccacatacccttcaactgagcagtttcactagtggaaataccaaaagcttcctacgtgtatatccagaggtttgtag

SEQ ID NO: 252286 - DNA, 838 bp, Homo Sapiens
cctgcctgcgggagagggcgagcatgaactggcccggaggacccagttcgagccgccaggacacagacgtgcaggcctcctcgggagggagcgcctccccaccactgagccatcctcagcagcgtccgctgcgtctgcactgatgaccgtctgagcccagctcagcgttcctggacaaacagcctcactcctcagcgttaccgccacacttgaatttctccgaatgtcaaggttccctcccactctatttttttaggttaaagttaattggcatatggaatgttttaatctcctctgaaatgtgtagcgtaggcttttcccaagggtcgctagaaactcgtcttcgcgttgccccctttctggctctcagcgccgtcgccactcgggagaggctgggtgaggcccgtgtgaggactgaccctggattcctcgaaactgccattgtgatcattactctgctctttggaaatggctgtatcatttttttgtactaatgtgaattgttcctcagaaacgcttcttttccatcctagtgagaagctggccctgcaggtggtggcagcaatggtggtgtaagatttcctcctgtagttttttctcctcatggatttgaatgaaatgccaataacacgtccactttcaacgtgtagttctacgcggagcactttcgaggcctggccgggttgggcctacttctcacctgggcctatcttctgaactcgctaggttcttatcaacatttgggagataactttgtatatttttttcatatggcttttctttaccagtttctgatttttattctcaatatatttatgctaaacctatttcacaaatc

SEQ ID NO: 252287 - DNA, 1058 bp, Homo Sapiens
cttcaaggttgccatgcacatcctcaacaatggaaggtttggcatggctgcggccctggcaggtaccatgagaggcatcattgctaaggcggtgagtaccctgcccgagtccctaggtaacccaaacagaagtctcactgtcccccttgccatgtgtccctgatcacttgcaggcactccctacactagcaactcctcccctaccagcagcccgacttgctagcttaggtctccatccagcgtagactgaactctggttgtatgcaaaacccatccctctggcgcaagcccagcccctctcctagggagactgcagaaccacactgaaccacagcgggatgtgtggaccctcttccaggtagatcatgccactaatcgtacccagtttgggggagaaaattcacaactttgggctgatccaggagaagctggcacggatggttatgctgcagtatgtaactgagtccatggcttacatggtgagtgctaacatggaccaggagccacggacttccagatagaggccgccatcagcaaaatctttggctcggaggcagcctggaaggtgacagatgaatgcatccaaatcatggggggtatgggcttcatgaaggaacctggagtagagcgtgtgctccgagatcttcgcatcttccggatctttgaggggacaaatgacattcttcggctgttgtggctctgcagggctgtatggacaaggaaaggaagctctctgggctggcaggtgctctagaagaataccttggggaatgctggacttccttgtaggagaggcaggaaaacagttgaagggggggcagctgcgcaacggctgaagtctacagggaatgttcaaccgggattgagtcggaatgggcagcgggaagaggctttgggacattgccttggggatgcgcattgtttaaccaacaggtttcagcaagtctgttgaaggatggaaggacagacattaaaggggggttcataaggcacaaaccagtgggcgccgccaaaaattgacatgttgactggacaaaagagagacggtaccgaaatac

SEQ ID NO: 252288 - DNA, 1355 bp, Homo Sapiens
  misc_feature (13)..(13): n is a, c, g, or t
  misc_feature (157)..(157): n is a, c, g, or t
gccccgccaccgncagcagaacctgcatgcaatccccttctgtgtttacagcttgcctccaccacagttgcaactgctccaagcccgtactgccagctgccactcggactcaattcggggtgacaagtccgctgagactcaggccgctgcccagccntgcccgccgcctcagctgtttgcctgcctctcctagcaggaggccagcattcccaaagggattctttagagcactgccaagcccagagagctcctttcctttgtccatacagccctgcagagccacaaacagccgaagaatgtcatttgtcccctcaaagatccggaagatgcgaagatctcggagcacacgctctactccaggttccttcatgaagcccataccccccatgctgatggcggcctcaatctgcaagtccgtggctccctggtccatgatagcactcaccaggtaaccaatggactcagttacatactgcagcataaccatccgtgccagcttctcctggatcagcccaaaagttgggaattttctccccaaactgggtacgattagtggcatgatctaccgccttagcaatgatgcctctcatggtacctgccagggccgcagccatgccaaaccttccattgttgaggatgtgcatggcaaccttgaagccactcccaacctcacccagcacgttctccgatggcacccgtactccatcaaagaacacctctgctgtgtttgaagccttgatgcccatcttcttctcagggggcccatgggtaatgcccccgaagcccctctccaccacaaaagctgtgatcttctccttcacggctcctgtggctggatctgtaactggtgtcttggcaaagaccgtgaagatgtctgctaggcccccattactgatccaaagcttgcttccattgagggtatagtattttccacaggggctgggcacagcagaggttcggatggaggctgcatctgacccgcttgagggctcggttagacagaaagcggccacagtctccccagatgccagcttggggaggtatttttctttctgggcctttgtaccaaagagcaggatgcctttgaaaccgatgctctgatgggcccccagggtaatgcccacgccaaggtcatgcatgcccacgatctccaccaaacgggcgtactgggtgttgcaaaggcccacaccacccagctcactgggcacttgcagaccaaaggcccccagctccttgaggccctgccaagtggtctcctccaccatctccagagcgtcattcttggcgggatcgttcacttcctcgaagaaacgggacacagcctcgtgccgaattcgccacccaggcctcgctac

SEQ ID NO: 252289 - DNA, 948 bp, Homo Sapiens
  misc_feature (91)..(91): n is a, c, g, or t
  misc_feature (101)..(101): n is a, c, g, or t
  misc_feature (502)..(502): n is a, c, g, or t
tccatgcttacatgtgagtctacatgaccaggagccacgactccagatagagccgccatcagcaaatctttgctcggagcagcctgaagtnacagatgaancatccaaatcatgggggtatggcttcatgaaggaacctggagtagagcgtgtgctccgagatcttcgcatcttccggatctttgaggggacaaatgacattcttcgggctgtttgtggctctgcagggctgtatggacaaaggaaaggagctctctgggcttggcagtgctctaaagaatccctttgggaatgctggcctcctgctaggagaggcaggcaaacagctgaggcggcgggcagggctgggcagcggcctgagtctcagcggacttgtccacccggagttgagtcggagtggcgagctggcagtacgggctctggagcagtttgccactgtggtggaggccaagctgataaaacacaagaaggggattgtcaatgaacagtttctgctgcagcngctggcagaccgggccaccgacctctatgccatggtggtggttctctcgagggcctcaagatccctgagtgagggcccccccacggcccagcatgacaaaatgctctgtgaaacctggcgatatcgaggctgcagctcggatcccaaagggcatggccgccctacagtatcacccctggcagcaagagctctaccgcaacttcaaaagcatctccaaggccttggtggaacgaggtggtgtggtcaccaccaacccacttggcgtctaaaaactcccggccagggcctgtcccagttatgtgccttcccgcaagccaaagccaaagcccctttccttaaggccctggtttgtcccgaaggggcctagtgttcccaacactgtgcccgctctctaaagcactaatgtcctcgcaaaaaattaaaagttctagccccgccaaaaaaaa

SEQ ID NO: 252290 - DNA, 611 bp, Homo Sapiens
  misc_feature (453)..(453): n is a, c, g, or t
gcaaaacccatacctctggcgcaagcccagaccctctcctagggagactgcagaaccacactgaaccacagcgggatgtgtggaccctcttccaggtagatcatgccactaatcgtacccagattggggagaaaattcacaactttgggctgatccaggagaagctggcacggatggttatgctgcagtatgtaactgagtccatggcttacatggtgagtgctaacatggaccagggagccacggacttccagatagaggccgccatcagcatggggggtatggggctctcatgaaggaacctggagtagagcgtgtgctccgagatactcgcaatcttccggatcttttgaggggacaaatgacaatctttcggctggttggggctctgcagggctgtatggacaaaggaaaggagctctctgggcttggcagtgctctaaagaatccctntgggaatgctggcctcctgctaggagaggcaggcaaacagctgaggcggggggcagggctgtgcaagcggcctgagtctcagcggacttgtgcacccggagttgaagtcgagtggcaagctgtacgggctctggagcagattgccactgtggtggagg

SEQ ID NO: 252291 - DNA, 1094 bp, Homo Sapiens
  misc_feature (1040)..(1040): n is a, c, g, or t
  misc_feature (1044)..(1044): n is a, c, g, or t
  misc_feature (1060)..(1060): n is a, c, g, or t
  misc_feature (1062)..(1062): n is a, c, g, or t
  misc_feature (1065)..(1065): n is a, c, g, or t
  misc_feature (1071)..(1071): n is a, c, g, or t
  misc_feature (1073)..(1073): n is a, c, g, or t
  misc_feature (1082)..(1082): n is a, c, g, or t
taccggtccggaattcccgggatcgcaaccgtccgccgcccggtgcactgtggacgatgagtcagggttaggggcgccaggacgtgggcgtgcaggacgccagagctgggtcagagctcgagccagcggcgcccggagagattcggagatgcaggcggctcggatggccgcgagcttggggcggcagctgctgaggctcgggggcggaagctcgcggctcacggcgctcctggggcagccccggcccggccctgcccggcggccctatgccggggatgccgctcagctggctctggacaagtcagattcccacccctctgacgctctgaccaggaaaaaaccggccaaggcggaatctaagtcctttgctgtgggaatgttcaaaggccagctcaccacagatcaggtgttcccatacccgtccgtgctcaacgaagagcagacacagtttcttaaagagctggtggagcctgtgtcccgtttcttcgaggaagtgaacgatcccgccaagaatgacgctctggagatggtggaggagaccacttggcagggcctcaaggagctgggggcctttggtctgcaagtgcccagtgagctgggtggtgtgggcctttgcaacacccagtacgcccgtttggtggagatcgtgggcatgcatgaccttggcgtgggcattaccctgggggcccatcagagcatcggtttcaaaggcatcctgctctttggcacaaaggcccagaaagaaaaatacctccccaagctggcatctggggagactgtggccgctttctgtctaaccgagccctcaagcgggtcagatgcagcctccatccgaacctctgctgtgcccagcccctgtggaaaatactataccctcaatggaagcaagctttggatcagtaatgggggcctagcagacatcttcacggtctttgccaagacaccagttacagatccagccacaggagccgtgaaggagaagatcacagcttttgtggtggagaggggcttcgggggcattaccatgggcccctgagaanagangggatcaaggttcaananagnagagtntntttgatggnttcggtgcatcg

SEQ ID NO: 252292 - DNA, 1354 bp, Homo Sapiens
gaaccaaaccactggaaataatcaaatgcaaaaaggtaacaaattcataactggaaagcaaagagaagaacaagtatgatttggatgataaagcattgttttaatggtgaaaacttcacagatcactaatgtttctagaggttaacttcaagtgggcaagctggggtttttaggtagtcagtggcctagttcctaaagccacagtataggatctgttaaactgaatgtctgttgaaagtttgttttagctgcttggaggcttccttttaagacaaactgtatgtgattaagttgttttgagggaactgaagaacctgatgtagcccctggccagataactgcctgatttctcagatattatttctctgggaaacattctacatagcacaggagcttaagagtggcattatcttctcgccttaatttccagagattatttctgtactgagaatcctggaactactatgctaggaaatttaaagctgcatggtctgtcttgttttcatttaattattgtgaatacctagaatctttcttggtcctgatttctcttgcttaatccagtctttatctctaactgccccttatttgatcaccatgtactaggagctctgatagccagctcagctcctaatccttgaggcaacattctttttctatttgaacttcagttctgtccttgaatcccgactagatatttcttgccctctggtctcagaattctcttggcttttattccttgatccacttgccagttttatcactttacccttgttcctcatggcttcccatcaagccatgggtattaggtgacagtgtaatttattagattctggttttgcccaaatactgggcatgctttaataataactgaaccatttcattatttggataggcatgggtaccttatcaagcagattaaaaggatatggtacccgtcctttagaaaagaacagctaaaaccttgttgtggattatggatttagcctaaagaaaaataatctggcataaattaagagtaagagagaagattaatagaaatttcacttcacataacttaaaacatggctatttcaataaaggactaaagtttctcctggatcccagaattcaaccggtatttataaatgtataatgtatttagctacttttcggtttaaatgaacttgttgggttagcttggtaaatgttataatttttactattttctacaaagaaaatattttctaatttaagttggagctatctgtgcagcagtttctctacagttgtgcataaatgtttttactataaaatgagctaatgtataaaatactgctgtataccataataaagatagtaatacttcaaaaaa

SEQ ID NO: 252293 - DNA, 2345 bp, Homo Sapiens
  misc_feature (1151)..(1151): n is a, c, g, or t
  misc_feature (1196)..(1196): n is a, c, g, or t
  misc_feature (1205)..(1205): n is a, c, g, or t
cggtccggcaatgtttggatatcgtcgacccacgcgtcggcaggacgcgggcgtcaggacgccagagctgggtcagagctcgacgccagcggcgcccggagagattcggagatgcaggcggctcggatggccgcgagcttggggcggcagctgctgaggctcgggggcggaagctcgcggctcacggcgctcctggggcagccccggcccggccctgcccggcggccctatgccgggggtgccgctcagctggctctggacaagtcagattcccacccctctgacgctctgaccaggaaaaaaccggccaaggcggaatctaagtcctttgctgtgggaatgttcaaaggccagctcaccacagatcaggtgttcccatacccgtccgtgctcaacgaagagcagacacagtttcttaaagagctggtggagcctgtgtcccgtttcttcgaggaagtgaacgatcccgccaagaatgacgctctggagatggtggaggagaccacttggcagggcctcaaggagctgggggcctttggtctgcaagtgcccagtgagctgggtggtgtgggcctttgcaacacccagtacgcccgtttggtggagatcgtgggcatgcatgaccttggcgtgggcattaccctgggggcccatcagagcatcggtttcaaaggcatcctgctctttggcacaaaggcccagaaagaaaaatacctccccaagctggcatctggggagactgtggccgctttctgtctaaccgagccctcaagcgggtcagatgcagcctccatccgaacctctgctgtgcccagcccctgtggaaaatactataccctcaatggaagcaagctttggatcaggcaacctgcctcccatttctccccttctcctccgcccaattccaggccccactgctccccgtcctccacgccctgaatatcccattcttccacagtaatgggggcctagcagacatcttcacggtctttgccaagacaccagttacagatccagccacaggagccgtgaaggagaagatcacagcttttgtggtggagaggggcttcgggggcattacccatgggccccctgagaagaagatgggcatcaaggcttcaaacacagcagaggtgttctttgatggagtncgggtgccatcggagaacgttctgggtgaggttgggagtggcttnaaggttgcnatgcacatcctcaacaatggaaggtttggcatggctgcggccctggcaggtaccatgagaggcatcattgctaaggcggtagatcatgccactaatcgtacccagtttggggagaaaattcacaactttgggctgatccaggagaagctggcacggatggttatgctgcagtatgtaactgagtccatggcttacatggtgagtgctaacatggaccagggagccacggacttccagatagaggccgccatcagcaaaatctttggctcggaggcagcctggaaggtgacagatgaatgcatccaaatcatggggggtatgggcttcatgaaggaacctggagtagagcgtgtgctccgagatcttcgcatcttccggatctttgaggggacaaatgacattcttcggctgtttgtggctctgcagggctgtatggacaaaggaaaggagctctctgggcttggcagtgctctaaagaatccctttgggaatgctggcctcctgctaggagaggcaggcaaacagctgaggcggcgggcagggctgggcagcggcctgagtctcagcggacttgtccacccggagttgagtcggagtggcgagctggcagtacgggctctggagcagtttgccactgtggtggaggccaagctgataaaacacaagaaggggattgtcaatgaacagtttctgctgcagcggctggcagacggggccatcgacctctatgccatggtggtggttctctcgagggcctcaagatccctgagtgagggccaccccacggcccagcatgagaaaatgctctgtgacacctggtgtatcgaggctgcagctcggatccgagagggcatggccgccctgcagtctgacccctggcagcaagagctctaccgcaacttcaaaagcatctccaaggccttggtggagcggggtggtgtggtcaccagcaacccacttggcttctgaatactcccggccagggcctgtcccagttatgtgccttccctcaagccaaagccgaagcccctttccttaaggccctggtttgtcccgaaggggcctagtgttcccagcactgtgcctgctctcaagagcacttactgcctcgcaaataataaaaatttctagccagtcaaa

SEQ ID NO: 252294 - DNA, 1027 bp, Homo Sapiens
  misc_feature (283)..(293): n is a, c, g, or t
taaattaaaatggaaattatataaaggaaagtgatttttaaggatatacataaagatatatttagaattttcatgatactgttctcctcatctactgcttatgttaagtgagaactttcttagtaatacataatgcatgatgttactgcattttctaaatgactagtaagtgattagttttttcacttatgcctattaatttgataccaatttaatcatgataaaacaataaccgttaacatatattttgttaaatggacatttaaaagaatgttgttcaggnnnnnnnnnnnaaatactgatatggggcatacaatctattcacatgttttctactgaagtactaagtaaaaaaattaaatcattatcagaataaaaatatgtgttctaaaattagcaacaatttctggggatacatgcagatgttgttaaacgtacctctgcatacagatatattataaaacacaagcaatgttatttatgaaactgtgatgcagtcttcaacatcaagaaaaaatgacaactataataaaatttacaacacagtttcacagtctaaatgctatgttcctttaagtattttcatatttttaatcatttattaagagaaaattgtgaaaagttaatttggccttatagagagattcaggatagatgtagcctatagatgtgtcattttaataagttgggatacatgtttagtttttccttatattcctgttcagtgaacagattttcataattctcacttgttaaagtgctgcaaaaattgcattttcagtactctaaattactacattagaagagagcatttctccattgtctttattttctgttatatatgtgttgtcatgtgttgttaaagtacatgcattcttagactaactctcagatgctttgctcttttgagctgaagaatgtttgatggtgatgtcatatatctgattaagtttcagtgttctaatttacttttatacgtatttcttaactatattagtggtgccggccgtggacctagggtgctttg

SEQ ID NO: 252295 - DNA, 771 bp, Homo Sapiens
  misc_feature (80)..(98): n is a, c, g, or t
  misc_feature (107)..(222): n is a, c, g, or t
  misc_feature (248)..(360): n is a, c, g, or t
gaggaatgaaaacaaagtgaagtacacttagaaaagggccaagtggacatcttggatgtcaagtgcctagttcagtatcnnnnnnnnnnnnnnnnnnngagacagtnnnnnnnnnnnnnnnnnnnnnnnnnnnnnnnnnnnnnnnnnnnnnnnnnnnnnnnnnnnnnnnnnnnnnnnnnnnnnnnnnnnnnnnnnnnnnnnnnnnnnnnnnnnnnnnnnnnnagcacccaccatcacacccagctaannnnnnnnnnnnnnnnnnnnnnnnnnnnnnnnnnnnnnnnnnnnnnnnnnnnnnnnnnnnnnnnnnnnnnnnnnnnnnnnnnnnnnnnnnnnnnnnnnnnnnnnnnnnnnnnnataagccactgagcccagccctagttcagtatcttttatgtaaattacaaacatctgcaacattatgtatcatatgcagatacttattgcatttcttttattagtggtgaaggtgttctatgcatttattggctcttgaatttcctcatctatgaattgtcattcatacacctacttttctgcttcgtttttacatatgtctttgcctattaaagatattatccctctggtttatattttctctcattcttggattgccttttaaattttgttatgatgtttcattaataacagtgttttgttttcctctataatcaaatctagattttccctttgtgatttccgacaccacttccattcttagaagtacttttccattcataaagtagtaaaataaaatagttttttctc

SEQ ID NO: 252296 - DNA, 485 bp, Homo Sapiens
gactttggagtattagaaaccactgtatatatgtggaaagccaggtcagccagacctgttagaattggtgtgcactcacctgagagatctggcaggttggatatatttatgtgtatttctccacagtgcttgctttgccctgttggtaaggattttaaataaccatgctcaaaagagctgttctaatctgcgttttgcatgttaagtgttaatatcaaacattctttacgtgctcgaggtattgcttttaacattctactttgccagtttcttcattagattaattgacatgtattatttaaatgaccagtgatgctttgtgcaattatgaatgttgaagattaaagtacatagttactaatttgtcgtttgctattaatatgctgaaaactgccaacttctctcttcttttctgtcgagatgatttgggggagccacaggagactggtgtgatttttgctgcatctcctaggaaagcatttttt

SEQ ID NO: 252297 - DNA, 701 bp, Homo Sapiens
caaaaaggtagtttagggggatataaaactatgaataagtagcttaaaaattcaatcaataaagttgtgttacaacacctggggggaacagcatgcagctactcaattggacaaatattttcaaagcaaacaagagtgctatgggtcagagtacagggattgtgtgggaaggtcaacaggaatttatcactttggtcatgcagaaagatttgcctccaaagttctgatttgtaataaattcttcttggctttagaaactaaaatgtaggctatgaaatgtgttagattcaggagatagagaccaatgaaacacaaaacaaataagggcttaataacgatgcaagtgctataagattatggtaaaaaataaaataagtatatgaaaagggcacgcatgaagaattgaaagaattcatccttggtaaattaggctaggtcttgtggcaaaggcacccaaagctaatgaagaagagtaaatgatatttgactgttacatatgtatataaggacgaaaaagaaaatacaccaataaacatcttcatcaatatggaattaaatacatttacctattttagagatattttaagtatgctagtatcaacataatgagaatagtattttactgtctatttttaatagaaaaacatgtatgtatacatatctatatatatttaaggagcaccccttccccatttgagtat

SEQ ID NO: 252298 - DNA, 589 bp, Homo Sapiens
  misc_feature (76)..(325): n is a, c, g, or t
cgtctctttggtattctctagtctagaagttatttggcatgtctttcatgactgccatttgtgaaatatacagacnnnnnnnnnnnnnnnnnnnnnnnnnnnnnnnnnnnnnnnnnnnnnnnnnnnnnnnnnnnnnnnnnnnnnnnnnnnnnnnnnnnnnnnnnnnnnnnnnnnnnnnnnnnnnnnnnnnnnnnnnnnnnnnnnnnnnnnnnnnnnnnnnnnnnnnnnnnnnnnnnnnnnnnnnnnnnnnnnnnnnnnnnnnnnnnnnnnnnnnnnnnnnnnnnnnnnnnnnnnnnnnnnnnnnnnnnnnnnnnnnnnnnnnnnntcctcactgaactttgatacattaactttagtatcccctcatgatttttgcctgaatcaattattacgatggttgccaaatgacaataattttaatatctttaacagttagccgggcacaataaatattagtttttaaacatgagataaattgatttaacacagtgccctttccaaaggcctcatacaatacttcttcctaacttctgactactacttactggttaccctattatggtgagaaaagccaccataataaaggaga

SEQ ID NO: 252299 - DNA, 1325 bp, Homo Sapiens
  misc_feature (634)..(642): n is a, c, g, or t
  misc_feature (862)..(883): n is a, c, g, or t
  misc_feature (1103)..(1103): n is a, c, g, or t
  misc_feature (1272)..(1272): n is a, c, g, or t
cactctctttctaatgcttcccaccttaccttttagattcttttgctaggtgggagattgttataaggtctttaaaccatttccatttgtttctttaacattaccaaaagcagggaacaaagctcttattcaactgcgaattccatagtgggctctggcttttcttgaatagatatcacaaggttgcttattatcaaaagaataattaaaatcatgtaaccatttaaatgtcactgttaacacttttcactctttctgttgattcacctaactcattattttgctttattaaaagtcttccttcaccaccgagatatgctaatttaacttacaaatgattttaataaaatcttgagtttgtatcaaaaaagcccaacgcggaacaacatgcaaaagcaaaacaatccggccgccgagaacgatgtggcaaaaaaactggcgggcccgcccccggcccctcgaaagaagctttcttaaaaccatttcctttgggggggcgcgggcccccttaaaggaaaagtggaaacagggaggccattggcctgggttctcccaaggggaaaaccccgggggccaagacgactagggggcgtggggagcttcccccacccaaataaaaaaaacaccctcctcnnnnnnnnnctacacccgcggcagtggttgttcctgtgcaaacacaaaacttcccagacgaggggggggaagttttccccgggaggcggcgccacatttccacgccgtggggaaatccccctatctcgcaccccactcgggtgggcggacgcgtctctcctcgacacgtcggagcacacgccccccttcttgaatgatatattcacctcctgcgcgcgcatttgtttgnnnnnnnnnnnnnnnnnnnnnnggagctcatctgtcgcggggggccgcgatccccactctttctagttgttggtgcaccggagtgagagtgagcgcgcggtggggtcgagagatgatacacactgcgcgcccactgtatgataaaaaacgcgcctattattttcccgcgcggggcccccacagaaaacgccgcgtggggggggagaatcgcgctcgctcgtgtttgttaccggcaagcaccnagcgggcggggggacgggttcgggcggtcgggaaagaaaaagtctcgtgatgcaaaaaaagctgcggccccaccgagcgggcggtggggcttgttatctctgccggacacccgccccggttgggtgttgtatgccgcgcctgcctagtgggagcgacgtaacacccaanaacttctattgtgtgtgcgccacccccacgcgagggtgtttaatatacacccc

SEQ ID NO: 252300 - DNA, 815 bp, Homo Sapiens
  misc_feature (21)..(21): n is a, c, g, or t
  misc_feature (32)..(32): n is a, c, g, or t
  misc_feature (105)..(105): n is a, c, g, or t
  misc_feature (107)..(188): n is a, c, g, or t
ggatcctctaaactaggatangaaagacaccngcagagtttgcttaaacacaactgctagcccctgcccctgcccctgcccctagagtatctgatttaagaagancnnnnnnnnnnnnnnnnnnnnnnnnnnnnnnnnnnnnnnnnnnnnnnnnnnnnnnnnnnnnnnnnnnnnnnnnnnnnnnnnnntttgacagtcactgcccaaggtatctggtaagaatgcatactcttgggccccatgcttaaatttgaatttctgagattggggtcttcagatctgcatttaacaacatcctgggcaagtgtgagaaccacagtttaagaatcactgtgacaatttggctgggttaatttgactattactggccaatgcatcagacgtcatatatcatatacataaaaatggaaataatgctacatgaatagccccaagcctgatacggttccaatgaacacacagggttttgaatataaatcctacctctgttacttactagctttgtgacagtgacaaagttactttgcctctgagcctcagtttccttatctataataggggtataacacccaaattttgaggattaacactattatacacagattatctaagcacagtacctagcatacagttggcattggataaatactagctattacttatccttcagtatctggtcaaagcaaatttttcattcacttaaatgcagtacttacactccaaggtaacagaataataatacaatcttctatttattgctccctatcaatgttctaaaaaccttacatttatttaatcctcataaaaatcctgcg

SEQ ID NO: 252301 - DNA, 534 bp, Homo Sapiens
  misc_feature (24)..(24): n is a, c, g, or t
  misc_feature (37)..(37): n is a, c, g, or t
  misc_feature (45)..(45): n is a, c, g, or t
  misc_feature (54)..(54): n is a, c, g, or t
taccccggggcccccagcctaaanttgaaattccganaatggggncctccaganccggcatttaaacaacatccccggccaagtgtgaagaacccacagtttaaaaaatccactgtgaacaatttggcctggggttaaatttggactattaactgggcccaatgccatcagacgtcatatatcatatacataaaaatggaaataatggctacatgaatagccccaagcctgatacggttccaatgaacacacagggttttgaatataaatcctacctctgttacttactagctttgtgacagtgacaaagttactttgtctctgagcctcagtttccttatctataataggggtataacacccaaattttgaggattaacactattatacacagattatctaagcacagtacctagcatacagttggcattggataaatactagctattacttatttccttcagtatctggtcaaagcaaatttttcattcacttaaatgcagtacttacactccaaggtaacagaataataat

SEQ ID NO: 252302 - DNA, 541 bp, Homo Sapiens
aagtttacaggctagtaggggggaaaaagaatagtatgcaagacccttattggcttttaattatacctgaaaccaaaatggatatttttagtctctctgcatgtgagatttggtgtaacaagatagaactataatatatacagtatatggaaggatagatatagtgctttgttcattttaattgcaaagctgccaaaatagttgaagcttaattacttgacttgccttgatttataggactggggcttggagaaaatgagcagatgttcctctaagacatcgattacagaagccttatatacatggatttgattttgtatttgtagctgaaagtcactgttgtctaaaactaacttttctaagttatcaaaacaacctaatttcttttccaacaaggagaacttaatggcatgaaggattgtgtgacacattggaaaagccagcttactgccactctcttcctttggccattagagggaggtgttgcctttcattgacgcttagaagcaaattgttcacttgttaagaaaagtaaatcctt

SEQ ID NO: 252303 - DNA, 683 bp, Homo Sapiens
gtaaaaaaccaagtcagcagaagaaattagaggagagaccagttaataaatgtagtgatcaaataaagctaaaaaataccactgacaaaaagaataatgaaaatcgagagtctgaaaagaaaggacagagaacaagtacatttcaaataaatggaaaagataataaacccaaaatatatttgaaaggtgaatgcttgaaagaaatttctgagagtagagtagtaagtggtaatgttgaaccaaaggttaataatataaataaaataatccctgagaatgatattaaatcattgactgttaaagaatctgctataaggccattcattaatggtgatgtcatcatggaagattttaatgaaagaaacagctccgaaacaaaatcgcatttgctgagttcttcagatgctgaaggtaactaccgagatagccttgagaccctgccatcaaccaaagagtctgacagtacacagacgaccacaccctcagcatcttgtccagaaagcaattcagttaatcaggtagaagatatggaaatagaaacctcagaagttaagaaagttacttcatcacctattacttctgaagaggaatctaatctcagtaatgactttattgatgaaaatggtctgcccatcaacaaaatgaaaatgtcaatggagaatctaaaagaaaaccgtcatcac

SEQ ID NO: 252304 - DNA, 761 bp, Homo Sapiens
  misc_feature (30)..(30): n is a, c, g, or t
caaaatggagaagtcagagcaaagtttctnctcaggaagtagaatgcagaatcccctccttcctcagacaattctcctttctggtggagtattggctcttaaaacgttttcaaacattatcaagctcttctgtgtacactctttaaaatataaagataggtattaagtctactacttgatgttagtcttacattcttcaaacagagcatcactaggtgtttcacctttatgtcacatggcatactctgaacatcttcaattttctgcatagataggcatgagtgaaaagacttcaagattataatggtgtttgaatatttctaatgctccgactcaagaaaattcacaaagaatgtatattaaattacttaccatttcttctatgttgtcaattatagttaggtcggcatgttgagtggaacagttgtatttacttgaattccaatctccttcttctttagagaaataatagcatttgttttggaaaccaatccaatcataggggcataaactctgagaatctcgagttagtttaactatcagagtaataatattagttgttattaaaacaccaacaattataaaacactttttatgtttggtcatcataccgtgcttcttttaatcagcgttttgattttctgctagcagctttgtgtcatgtcttgcagaaactctcttcaaagttgtaactttatttaactttaatataaaaatgtcactcgtgtttttacagcacagctccaaactagaggtatacc

SEQ ID NO: 252305 - DNA, 463 bp, Homo Sapiens
  misc_feature (266)..(303): n is a, c, g, or t
aagaaaagtaactgaaaatgcctactcttgtgtgagatattttgtaaggactttaatataagatagctttttttgcctggagtataaaagagaaaagtcatcttcttacatgggcatatatggcaaagtgggttgtcttctctcttcgtcaatgttctaaaacctgaaaaagccaaggaaatatttagttggcaaagttcagagaattttctaagtgtatatggatgaattttgtcctggtcaacatgatgctgagatcacacacnnnnnnnnnnnnnnnnnnnnnnnnnnnnnnnnnnnnnncagcagggaaatatgtaagtatcagtgtttgaggtgatatttctcctactgaaataccaaatactatagaggaacacaaatacaagtttaaatcaatgcttataccagtaactagtaacaacaacaataacaaaatctctgcaaaaggggatttcaacca

SEQ ID NO: 252306 - DNA, 983 bp, Homo Sapiens
  misc_feature (842)..(928): n is a, c, g, or t
atgggtcccggcccacagaattacggcagcggcatgagaccaccacccaactccctcggccccgccatgcccgggattaacatgggcccgggagctggcagaccctggcccaatcctaacagtgctaactcaattccatactcctcctcatcacctggtacctatgtgggaccccctggtggtggcggtcctccaggaacacccattatgcccagtcccgcagattcaacaaattccagtgacaacatctacacaatgattaatccagtgccgcctggaggcagccggtccaacttcccgatgggtcccggctcggacggtccgatgggcggcatgggtggcatggagccacaccacatgaatggatcattagggtcaggcgacatagacggacttccaaaaaattctcctaacaacataagtggcattagcaatcctccaggcacccctcgagatgacggcgagctaggagggaacttcctccactcctttcagaacgacaattattctccaagcatgacgatgagtgtgtgatccccccttctccgagacgctgagagagcaggcattgcaggcgggaagatgccagaaattatgcaagaagtgaggtgtcattatccaggagctggtggggagggcatctccctgctcccctcaaccccctcccaccccatccacgccccctacctttcccaattttagcttcatgcaataaaaaggccaaactttttattccataaaacaagaaggacaaaactctcaaaaatgtatttcaagtcagtgaccagaaaaatcccaccccttgccctttccccaaaggacccttttctgtacatgacacnnnnnnnnnnnnnnnnnnnnnnnnnnnnnnnnnnnnnnnnnnnnnnnnnnnnnnnnnnnnnnnnnnnnnnnnnnnnnnnnnnnnnnnaaatggaagcttctagcaagccccccaccccaatcaacctctatgctttcttctt

SEQ ID NO: 252307 - DNA, 702 bp, Homo Sapiens
ctttgtggagtggagagcatttgtgtttgtcactgtgcagtagggcaggctgtcattgaactaattacctataattgcagccttttatgtcaccgcgatacgcaggcggccccaggcccccgatcagaatgggaaaccagcctccgggaggagttcctgggacacagccattgctgcccaattctatggatcccacacgacaacaaggccaccccaacatgggaggatcaatgcagagaatgaaccctccccgaggcatggggcccatgggtcccggcccacagaattacggcagcggcatgagaccaccacccaactccctcggccccgccatgcccgggattaacatgggcccgggagctggcagaccctggcccaatcctaacagtgctaactcaattccatactcctcctcatcacctggtacctatgtgggaccccctggtggtggcggtcctccaggaacacccattatgcccagtcccgcagattcaacaaattccagtgacaacatctacacaatgattaatccagtgccgcctggaggcagccggtccaacgtaagtctgctttctaataatttacatatcagacaccataacaaatcataattaacttcatcagctgaggggaaagcaagtttaattgatttcagccgatttgttaccaaagatgaataaaataaaccgtcagaaaagtgaa

SEQ ID NO: 252308 - DNA, 596 bp, Homo Sapiens
gacagacagaaacgagggaagagagagaaattggggaccctgaagaaagggggccagcagcaggtaggtgccatcagggacaagaacagcacctcccagggtgggagaccccaggcctttctggcagcaggtctggatggaaagtggacaggacgctcacccgcctgcatcccctgctcctgaccctgctcggctacaaaaaccaaagggacagcagctgaccacaccccggtagccactactgcataaagctctcccctcctgggaccagctgaggacctcaggctgtagcgtggccatgcccagatacacggtgcacgtacgtggcgtatggatggcaatggccgtgcaggacgcgcaggtcaatgtggacatgctgggcacggatgcctataggcgctatatcaagaataagctctgcaacagccgatatacctttcggggtgactcgcactttcatgtgccgcggagcaaaggcatgggcctttggtcaactaggaccgagtattgatggcctatcacccagttcggcgatttgtaatgacggtgatgcaggggtactgcttcatacatctgaccggggggttcttatcggg

SEQ ID NO: 252309 - DNA, 1223 bp, Homo Sapiens
  misc_feature (1031)..(1031): n is a, c, g, or t
  misc_feature (1080)..(1080): n is a, c, g, or t
  misc_feature (1084)..(1084): n is a, c, g, or t
  misc_feature (1118)..(1118): n is a, c, g, or t
  misc_feature (1125)..(1125): n is a, c, g, or t
  misc_feature (1144)..(1144): n is a, c, g, or t
  misc_feature (1157)..(1158): n is a, c, g, or t
  misc_feature (1166)..(1166): n is a, c, g, or t
  misc_feature (1168)..(1169): n is a, c, g, or t
  misc_feature (1183)..(1183): n is a, c, g, or t
  misc_feature (1187)..(1188): n is a, c, g, or t
  misc_feature (1191)..(1192): n is a, c, g, or t
  misc_feature (1198)..(1198): n is a, c, g, or t
  misc_feature (1201)..(1201): n is a, c, g, or t
  misc_feature (1210)..(1210): n is a, c, g, or t
  misc_feature (1215)..(1215): n is a, c, g, or t
  misc_feature (1218)..(1218): n is a, c, g, or t
agagagagaaattggggaccctgaagaaagggggcgagcagcaggtaagtgccatcagggacaagaacagcaccttccagggtgggagaccccaggcctttctgtcagtaggtctggatggaaagtggacaggaggctcacccgtctgcatcccctgctcctgcccctgctcggttacatctcccctcctgtgaccagctgaggacctcaggctgcagcgtagccatgcccagatacacggtgcacgtacgtggggaatggctggcagtgccctgacaggacgcgcagctcactgtgggctggctgggcccggaggccgtgaggcgctatatcaagaataagcccgacaatggtggcttcacctacgtcgatgacgcgcacttccttgtgcgccggtgcaagggcctgggcctgctggacaaccaggaccggctcgaggtggccctagagaacaacgagttcgtggaagtggttatagagggtgatgccatgtctcctgacttcattccatctcaaccagaaggagtttatctatacagcaagtaccgggagcctgaaaagtacatcgagttagatggagaccgtctgaccacggaggatctggtcaacttgggaaagggacgctacaaaataaagctcaccccaacagctgagaagagggtgcagaaatccagggaggtcatagatagcatcataaaagagaaaacagatcagaggatgaggcttgggttaccttgcatggagcttcaggtcaacttagtacgctcacattcttcaggtgttgggaaaccactaagtcctgagaggtgtcggatgctcttggctttaaggatcaatgtcttagccaaaggatacagtggcatttccctggagaccctcaaacaagtcatagaaatgtttaatgcctcctgcctgccctatgtcccagagaaaggaaccgttggtgccagtggagaccttgccccgctctctcatcttgctcttgggctagttggagaagggaagatgtggtctccgaagagtggctgggntgatgctaaatacgtgctagaagcccatggattgaaaccagttattttnaaancaaaagagggcctggcactcatcaatgggacgcngatgatnacatccctgggctgtgaantgtagagcgagcnnttctattncnngcaggctgacattntggnnccnnaccctnagngctgaaggnacacnaanccttt

SEQ ID NO: 252310 - DNA, 845 bp, Homo Sapiens
  misc_feature (30)..(30): n is a, c, g, or t
  misc_feature (730)..(790): n is a, c, g, or t
taggattgaagttatggtgggtatttggcnatgtgtgtgtgaaataaatatgtagatagtcacatatacacagactgagagataaattgttcttgattgctttattatcatcatactagtgtgttcattatagagtatctgtagaggtgaatgtaaaagtaagtccaatctattttcttatgtcattgaatttgtagtgttaacttgcatatatgttattggatgggttgtcttttaaagcatttactaatgtactctgaaatttttaaaagccttcagatttgttttctagtcacttttttccatatcatttctaattatagtttatatccttaaaagaaggatgccacagtagtatgtaaaacccaaacaagtagaacccaagcaaataaaattatttaaaataattttaaagtggcttagtactgccagtcatgtaaattgattctgctgagggtcttataagaattgagatataacaatggtaaaacgagcattcaagcacttttacaaaattaccaaattcttaaaatgaagccacagctagacttgcatttcaggtattaaaattgctttcttaactgtcaagaatcacaaaataacaaatcatattatgagtgaatatggggagggcggggccaatcagtcaatgataatctgaacaaattttaagagcagattttagattaataatgttttatcaccactaatttgcccacaacaaactcannnnnnnnnnnnnnnnnnnnnnnnnnnnnnnnnnnnnnnnnnnnnnnnnnnnnnnnnnnnnaatggcaacaccatagaatataggtgttctctggacctattctaaccacttaaaa

SEQ ID NO: 252311 - DNA, 639 bp, Homo Sapiens
ggtctcttgacttctcatggaaaaattattttttctattatggtgtgaaatattgtgtgaatatctaggcaaaacataacaatttggctcaattttcttctttagaggattcgtgctgtttttgttcataaagggtagtgaaatcattgaactgtattttagaatgaaaatttttgattttattaaaatgattttttcaaggcagaaagtaaaaggaaagattgatagcggagtgcatatagagctagagcatatcatccttgaactctgcaaatcctttcttccattttaatatagcaagaacaattttgtctttactacatcttaaagaattagaacttgggttggtgtaagtgacttacttccagggaatcatgccctatttctaccagcaggtcatacccaaatgtcacactatctattgttaaccatgaatgatattcagatctattacttttcgtgaaaagtggaacatgttacttccaaccatggcctgtcaccgtgagtgtgatcagctttctccaaaaccacatgggtcgcaggagctaaggggtggtacccaaatgttaggaacagtgttaggaaagggcaagggaaaagaagtgactggatgtcttatgagaaaccggtaaatgactt

SEQ ID NO: 252312 - DNA, 437 bp, Homo Sapiens
cgggggcgccggccctggctgtatctcgggggctgcggcgggaactgccgagcgggcttgactggacgcactgcctgaggacctgcggaggagacgagggagcgcggcgggtcagccccgaggttaggccgcgggtcccctgtccgtggcgctccgtccttttcccagccgtcttggctacagaatctgcgacctccccacactccttctcttttgagtatgtcacttaagtcttcctcgccggatgctttttcctccttgcttttgccggaaaggagagagatacatgtgaaggatatctgtcctcgttgcttcccctgccctctcaaaagtttaacttctgtgggaatgtgtatcttccttttctggaccatttgacagtcccgccccagccgccgtgtgatttagcaaccggtatcatattcagatcaaatctt

SEQ ID NO: 252313 - DNA, 2109 bp, Homo Sapiens
  misc_feature (1492)..(1514): n is a, c, g, or t
  misc_feature (1670)..(1696): n is a, c, g, or t
  misc_feature (1802)..(1810): n is a, c, g, or t
  misc_feature (1856)..(1875): n is a, c, g, or t
gggaaggggtcactcaagggacagcccggagacatctaccaccagacctgggccagatactttgtgaagttcctggatgcctatgctgagcacaagttacagttctgggcagtgacagctgaaaatgagccttctgctgggctgttgagtggataccccttccagtgcctgggcttcacccctgaacatcagcgagacttcattgcccgtgacctaggtcctaccctcgccaacagtactcaccacaatgtccgcctactcatgctggatgaccaacgcttgctgctgccccactgggcaaaggtggtactgacagacccagaagcagctaaatatgttcatggcattgctgtacattggtacctggactttctggctccagccaaagccaccctaggggagacacaccgcctgttccccaacaccatgctctttgcctcagaggcctgtgtgggctccaagttctgggagcagagtgtgcggctaggctcctgggatcgagggatgcagtacagccacagcatcatcacgaacctcctgtaccatgtggtcggctggaccgactggaaccttgccctgaaccccgaaggaggacccaattgggtgcgtaactttgtcgacagtcccatcattgtagacatcaccaaggacacgttttacaaacagcccatgttctaccaccttggccacttcagcaagttcattcctgagggctcccagagagtggggctggttgccagtcagaagaacgacctggacgcagtggcactgatgcatcccgatggctctgctgttgtggtcgtgctaaaccgctcctctaaggatgtgcctcttaccatcaaggatcctgctgtgggcttcctggagacaatctcacctggctactccattcacacctacctgtggcgtcgccagtgatggagcagatactcaaggaggcactgggctcagcctgggcattaaagggacagagtcagctcacacgctgtctgtgactaaagagggcacagcagggccagtgtgagcttacagcgacgtaagcccaggggcaatggtttgggtgactcactttcccctctatgtggtgccaggggctggaggcccctagaaaaagatcagtaagccccagtgtccccccagcccccatgcttatgtgaacatgcgctgtgtgctgcttgctttggaaactgagcctgggtccaggcctacggtgagctcactgtccgtacaaacacaagatcagggctgagggtaacgaaaagaagagactacgaaagctgggcccaaaactggagactgtttgtctttcctggagatgcagaactgggcccgaggaacagcagtgtcagcatcagggcggaaaccttaaagcaccagcggggagtgcccaggcaccccaaatgattcctattggcaccagccaggaaaaatggcagctcttaaaggagaaaatgtttgagcccaaaaataaaatacataaagacaacaaagnnnnnnnnnnnnnnnnnnnnnnncttggtcggccgccttcggcccctcaaaaagcttttcataaaccattccgttgtggcggcgcgggccccagtaagggtaagtggacacatggcccactaccctgttttccctaagaaaaacccctgggcccatggaactagatgctttgggtattnnnnnnnnnnnnnnnnnnnnnnnnnnngggggggtacaacccggaagcggtttcttgaaaaacaatttcccagaaatgggggggtttccctcgggggccccattttcccgtggggaattcttattcccaaccnnnnnnnnnctccctaacgccgcaaggctcccaacttttctccaaaaaattttannnnnnnnnnnnnnnnnnnnttgccgcaattctttattctgggcagggaaacctgggtttgggaaaaattctaaattttaaaggcctatcttctctccgccccagcactattggggaaaaaagcccgcatttccacaaaaagaagcggggccctttttctatgaaaaacccctgtgggaattccgcgcccatggcgggggagctaatttctgagccaaccccttttgtgtagctccgccacctttaggggaaac

SEQ ID NO: 252314 - DNA, 420 bp, Homo Sapiens
gtacagccacagcatcatcacaaacctcctgtaccatgtggtcggctggaccgactggaacccatcattgtagacatcaccaagcacacgttttacaaacagcccatgttctaccaccttggccacttcagcaagttcattcctgagggctcccagagagtggggctggttgccagtcagaagaacgacccggacgcagtggcactgatgcatcccgatggctctcctgttgtggtcgtcctaaaccgctcctctaaggatgtgcctcttaccatcaaggatcctgctgtgggcttcctggagacaatctcacctggctactccattcacacctacctgtggcgtcgccagtgatggagcagatactcaaggaggcactgggctcagcctgggcattaaagggacagagtcagctcaaaa

SEQ ID NO: 252315 - DNA, 850 bp, Homo Sapiens
  misc_feature (666)..(675): n is a, c, g, or t
  misc_feature (704)..(714): n is a, c, g, or t
ggaaggctgattatgcctataatggaggccagtaagtgctgcaagagtagataggggaggtgctttgccgcggccacaagatcctggcacacggagatgatcgaagctgcagtttgtcaacacacatctggaacctggccccaggaagccaaggctggggtggcagtttcctgcgcgccaaaggagctgccaaacagtgctgtattttcttccccagtattttttcttccctttttttcctgccccgtaggttgcagaggtactatagtaaagtaaaaggttaggataagggtcctggaatccagataaaaaagtttattttccgtagttctggctgcctgttggttgtcttgacgaccaggcatagctgtgcctggtgagaaggctctggccaggcccaccagcaggtcagcagctcttaaggttcctgggtgctgtgggaagctgaaaggtaggcctcttccaggtagctcctcctctcacctccggcattgccatcagcgcagtctgccctcagcctgtgtgaagtcttaaaccaactgggaaggcaccaggaatggggtgatgctgccaacctgaaggggcctgctttgtgggagaggctgctggctctgacctaaattcccggggcgcctatccgcccttcctgcgggagaacacgcccgnnnnnnnnnntggggccggtcccgtgtgggtgccccgtnnnnnnnnnnnccaacagaacgtgcggcgcgccacctcctgccgcgcggcgctcccgcgccgcccccggcctttgaggagagaatggcacggggccgcgcgcgcttccgtcgtatcgcggcacgcccgtgtgtcgctgcgcgtcccg

SEQ ID NO: 252316 - DNA, 680 bp, Homo Sapiens
cactgtaatgtacagccattaggaatccaggattccagaacctctgaccatcttcaacatcgtaacaccacggcaagaattctaactgtttgtcttcagctttctctgtatggtatgtttttgtacaaacaagcttacaggtctccttcttattaaacgtaaacttatatggtgaaggttcaattctttccccgaatagtacctgaccaagattttcagatgggcgctttccttctgatgcttggcaaaaatcaaacgctgtgtattcataaggaagaactgattccactgaatcaagtctgttcacaaatagttctatttcggccttgcactcgtcgctctttttttcttcgtcgcagaagttgacgggcgccaggccgggcaggtagaaagcgccgctccggcgcgggccaggaaccgcccccagcaggagcagcgacagcagcaacagccgcggccaccgaggtggagacaacaccggcagcctcgcgctcatgatagttgtttcggggaaagggcaatcaaacctagggggtcaagagggaaggaggggtggggagtctcggagacgactacaaggccgccagagataaaggaagccggcccccagaaggctagttccggttgcgctaggagacaccccgggtcccgcaacagaaaccgaagcggaccgcaacccc

SEQ ID NO: 252317 - DNA, 758 bp, Homo Sapiens
aacgggtgtgagccacggcgcccagcccaggaagagtttttaaattagagctctgtttaattataccactgggaaatcatggttacgcttcaggcatattcttccccagagtactacttacattttaaatttcattttgtaaagttaaatgtcagcattccctttaaaagtgtccattgttctttgaaagtagacgtttcagtcattcttttcaaacaagtgtttgtgtaccttttgccaagctgtgggcatcgtgtgtgagtacagggtgctcagctcttccaccgtcattttgaattgttcacatgggtaattggtcatggaaatgatcagattgaccttgattgactgtcaggcatggctttgtttctggtttcaatctgttctcgttccttgtaccggattattctactcctgcaatgaaccctgttgacaccggatttagctcttgtcggccttcgtggggagctgtttgtgttaatatgagctactgcatgtaattcttaaactgggcttgtcacattgtattgtatttttgtgatctgtaatgaaaagaatctgtactgcaagtaaaacctactccccaaaaatgtgtgggctttggggtctgcattaaacgctgtagtccatgttcatgccaaaaatggctgggaacgtttgctttatttacattcagtcagcgttgctttcagatcacactcttatccacacaggaaagccagtcagcctataatgaagtagttattaaaataaatgta

SEQ ID NO: 252318 - DNA, 1421 bp, Homo Sapiens
  misc_feature (11)..(11): n is a, c, g, or t
  misc_feature (44)..(44): n is a, c, g, or t
  misc_feature (80)..(80): n is a, c, g, or t
  misc_feature (781)..(781): n is a, c, g, or t
  misc_feature (1279)..(1288): n is a, c, g, or t
cggagcgcgcncgcgggatgttcgcggagcgcggtcggagcggnaggaggcgcgccgccgagatttggaagacccttagnagctccaccggaggggcggccgctctagaactagcggaggcccccgactgcaggaattcgacacgagctggcatggcggcctgcattgcagcggggcactgggctgcaatgggcctaggccggagtttccaagccgccaggactctgctccccccgccggcctctatcgcctgcagggtccacgcggggcctgtccggcagcagagcactgggccttccgagcccggtgcgttccaaccgccgccgaaaccggtcatcgtggacaagcaccgccccgtggaaccggaacgcaggttcttgagtcctgaattcattcctcgaaggggaagaacagatcctctgaaatttcaaatagaaagaaaagatatgttagaaaggaggtactccacattccagaggtctatgttggaagtattcttcgtgttactacagctgacccatatgccagtggagctactttcatccttaagaatgtgtatcgaaggacaaggtgtcgagatatgctttgaactttataaacctcgggtccaggagattcaagtggtcaaattagagcggctggatgatagcttgcgatacttacgagatgcccttcctgaatatagcacttttgatgtgaatatgaagccagtagtacaagagcctaaccaaaaagttcctgttaatgagctgaaagtaaaaatgaagcctaagccctggtntaaacgctgggaacgtccaaattttaatattaaaggaatcagatttgatctttgtttaactgaacagcaaatgaaagaagctcagaagtggaatcagccatggcttgaatttgatatgatgagggaatatgatacttcaaaaattgaagctgcaatatggaaggaaattgaagcgtcgaaaaggtcttgattctgagaatgaatttggttagttgcagaagatacattggctctaagaggatatattttgagaccaatttaatttcatttataagaacatagtaattaagtgaactaagcattcattgttttattaatactttttttctaaaataaaacttgtacaccagtttattactctaaaaagagaattacacatgccaaatggaccaatgtccatttgcttattggaggcaaagctacaatagaagtcagagcatcaccagaatggtctttaatgagcatggaacctgagcaaagggaataggtgggatgaannnnnnnnnnaattgtgaaacaattcataagcacaatatgatttacagaataataaacattcatgtacccactatcaggttaagaaatagaacatttattaatatgtaggaatgttaagaaataaaacatttaataagaaaaa

SEQ ID NO: 252319 - DNA, 2161 bp, Homo Sapiens
  misc_feature (2094)..(2094): n is a, c, g, or t
cagctcctcgcgctcacggtggatgcgctcctgctcgcgcctgcgctcgtgctccacgtgcatgcgttcgcgctccagccgttcccgctccatgcgctcccgctccagccgctggcgctggaaggccagcctctctcgggcaatctccagccgctcacgctcctcgcgctcccactgcgcctgcatgcgttgttcgcgttcactgcgttcacgcaccctatgggactctgagtctcttgacttccgaggctccttgaccttatcaaaggacacgacggaccgcttctctctgctggctgatttgcgatcctggcttttggaagctctctctttggacccggacgtttttaccactaatcacaggcacccctgtggatttatccattactacagtccgttcggtccctcgacttcctgactttgtggctcgagatcgctctgaggggccaggtttctgatcatcttggtccttactcttttctccacttccgtcgtcacccttcttagcatcatcttttctgtcacatttatcatccctcttaaggtttgtagatctgtcactgttgctcgacttctcctttttacccgtcactgtctcttttgtcagaggtattctttcccacaggttcatttttggctttctccacggagatcatctttccgtggagctccgtcttgtgcaggtggttaatgcattttgtggcctcttctgctgtggacatcgtgacaaaaccgtaacagcgagctccaggactccgggcatttgtcacaaccttggcgcccaccaccttcccatatttgctgaaaagattcttcaaatctgtagctctggttgtagaagagagtccactaacccagaaatttctaccacaactgctgcgacccttttcctctttggaaagcctttttgtatccgagtcatcttcgggagaactcattttctgatcagcgccctcactggttgaggactctttaggagccggagggacttcattacaagcgtcaaaatcaaacttcctcccgtcttctttgctatctctggcttctgggcttggggcttccgtgggtgcttctgcgagctcctcgctagaggcctccgcgagctcggaggccgcactactctgctcaactgccggctctagccctacaggctcacagtccgtcctctcgccatcgcctggctgctccgcgggctcccttttcactaccgctaacaggctgtctgccttgctcgactgagcgtgtgctgttgactcgctggccaaatctaaatcaccctcttccggatgggcgctgtcaaataggtcctcttcctccgcaagctttctgtctggccccacgctacttgtgtcctgtgcaaatggctgctccagctcggaactttcttcttttactggctcagatttacaagtttcccccaaaatgtcgagtattttctcattttctggctccagggatggctcttcaatttcctgtaatatagtgaagtcagatgatgaagtatctaaattgtttatagtttctttgtcctctatagcatgttcctgaagctgctccggaagctctttcatttccccctcgactagctctctactatccgacagggactcctggaggttatcagcatcatctcttcgacacaatctgcaacgcttccattatcaatttctgcttcatccaaacacactgatatccatgatgtcgatgtcctgcaagttctccagactggtctcaacatcctcctgtccatccccagagttttcctccagcccgttatcttccacaccctcttcttctggtttgcgccctttgctagacctctttgatgttttcttgtttccctcggaggtaatttcaatttcgtcaggattaccaccttcatcttcaattgccttcttcaagccgctccatcaaaacgctcttgttgccgctcgagtccacattccgtttcctcagctccgcccgcagatcgatcactcgcaggtcgctgaggcgccgcgtcccggtctctgacgaggcggagctcagaagccgccgcgcccgccgctccagaatcacctaggcctgacagagtctccgccattccagggaccnctggctccgccgcccactttccacagaaccgggccggttttatcaggctcctagcacaaaaatggcg

SEQ ID NO: 252320 - DNA, 535 bp, Homo Sapiens
gggacgcttgtaatgaagtccctccggctcctaaagagtcctcaaccagtgagggcgctgatcagaaaatgagctcttttaaggaagaaaaagatataaagcccaatcattaaagatgaaaaaggtcgggtcggcagcggttctggtcggaaacctgtgggtcagcgggctgtcctccacaacacgcgctacggatctcaagaaccttttcagcaagtatgggaaggttgtcggggccaaagtggtaacgaacgcccggcagcccgggggctcgatgctatggattcgtcaccatgtcgacatctgacgaggcgaccaagtgcatcagccatctccacagaactgagctgcatggacgaatgatctccgtagagaaggccaaaaatgagcctgctgggaaaaagctttccgacagaaaagagtgcgaagtggaaaaaggaaaaattatcgagtgtccacagacatcattctggggagatccaattgggaaaatacgtaattaaacaaggaagaagaacattggagaacaaggagg

SEQ ID NO: 252321 - DNA, 405 bp, Homo Sapiens
cttaattaactcctgtgggtctgaaatcttatggttaggtcagattttcaatacaagtttgtcggggtatcattttttcagaactaaatttcgggtaggtatgcaacctcagcacgaattttatggttttgagtttgtttcctccatgctgcttccttgtggagtgacattgtcttttgtctctagttctcccgaagatgactcggatacaaaaaggctttccaaagaggaaaagggtcgcagcagttgtgggtaggaaatttctggggttagtgggactctcttctacaaccagagctacagatttgaaggaatcttttcaggcaaatatggggaagggtgggtggggcgccaaggttgtggacaaatgcccggagtcctggagctcgctgttacggttttgtc

SEQ ID NO: 252322 - DNA, 1079 bp, Homo Sapiens
atatacacctgtattaaagcaggctggtacggtccgcaattcctgggatatcgtcgacccacgcgtcgaataattccacccacttaaaccattcttcatggctcttgttttccagggcctaataattttcactgctgtaatgtttctcagcttcacacttagtttagttgcccaaacaatgttggtgccttactcacattggtgccttgtgaagacgaggctcaggatggggattatggggaaattcttgcacacccagctcctcttaccacttaaaaatataatggcactttcacaaaatgatatgtcacctatattcattgagaattatttgactaccacatttttcccctgatgatagtcatctatcataacttgtgtttgttttcctcctgagatcaaacacttggtgcttattcctgatgtatactctgagaccagctcttaccttctgagtggcagctacccctccctcccaattttagatcctatttttacacatctctatagatatcacctttatttcatgactcacaatattaaatggtacagacttcagtttaaccactggtgtggtaacagcagtagttgctaagtaccaccttcccattgctgtgtgagggctaatttgcaaagacatttgaatctcccagtgaagatgtctggggaattttggccagttgtcttccctcttgcccttttgttctttaaaattcagcttggaccatagacaactccaggatctgttatgtctgctctccaatgaccaggcactgcgtttgcaccatcaggagttctccaaaagcaacaggtattactggctatctgatgtttatatccctataaaattcaggaggatccgagccacttcattgtgctgagtttacccattctgctccctggtgacccaaatgcccgggttcccaggggcgctcgggtaacaggtgccgcgggcagcgggcaccgcggccacttggagccagcggcaccaggcaataacagcgggaaccttcacacacggttggttccccccgcgagaacaggataggtcgaccacaaaagatatgagatgtgttggg

SEQ ID NO: 252323 - DNA, 1161 bp, Homo Sapiens
taacagcctcgcgtcatgttaaagcggctggtacggtcggaatcctgggatatcgtcgaccacgcgtccgagcaagttggagaaacatcagcacctggagcatctgggaatatggagagaatcactagtcctgtgctcatgggggaggaaaacaatgtggttcataaccagaaagtagaaattctgagaaaaatgttacagaaagaacaggaacggctacagttattgcaggaagattacaaccgaacacctgcccaaagattgctaaaagagatccaagaggccaagaaacacattcctcagctgcaagagcagttatccaaagccacaggctctgctcaggatggagctgtagttacaccctccagacctttaggggacaccctaacagtcagtgaggcagaaacagatcctggagatgtactgggcaggactgactgtagcagtggagatgcttctcggcccagtagtgacaatgcagatagtcccaagagtggcccaaaagagagaatttatctagaggaaaacccagagaaaagtgaaacaattcaggacactgacactcaatcacttgtcggaagtccctcaacccgtatagcacctcatattattggagcagaagatgatgattttggtactgaacatgaacagatcaatggacagtgcagctgtttccagagcattgaattactaaaatctcgcccggctcatttggctgttttcttacaccatgttagtttcacaatttgaacctgcgaatttgctctgttatctctattcagaacctgtataaacataccaattccaaagaaactcgtcgcatcttccttgagtttcatcagttctttctagatcgatcagcacacctgaaagtttctgttcctgatgaaatgtctgcagatctagaaaagagaagacctgagctcattcctgaggatctgcatcgccactatatccaaactatgcaagaaagagtccatccagaagttcaaaggcacttagaagattttcggcagaaacgtagtatgggactgaccttggctgaaagcgagctgactaaacttgatgcagagcgagacaaggaccgattgactttggagaaggagcggacatgtgcagaacagattgttgccaaaattgaagaagtattgatgactgctc

SEQ ID NO: 252324 - DNA, 585 bp, Homo Sapiens
  misc_feature (346)..(372): n is a, c, g, or t
gggcttagatgagcctagtaacaggctgctttctgcaatagtctagggggagccttctccaaaacatgtgtgtttagagaatacttgaggtagaaacaaataagaaacaaacagggtccttttacaaatacaaatcgctgtactgagaagacagtgagacttgcaaaagcaaactccatgggtgagaggcagcaggaacttaaaataatttaacataaagagtggaaatgcagcaaacatgggctgtcacctaatgttgaggtcctttactaaggctctttttatcttttaaaatttcatgtgacaggcatttagtacaaccatccctcttttcgcatacttgaannnnnnnnnnnnnnnnnnnnnnnnnnnaatttagctttaatgtcacacagccagtaagtgatagaaccaagaacggaacacacatttgctggagtccgtaacccgtgctctttctgttacacttggctgcctagtttagagacactgggggcaaaagtcatgcaagttgcaatgttttttgggatggcttcaaagttagtgactgggtagctacaaaaagctggaaaacaaaatgagtcc

SEQ ID NO: 252325 - DNA, 967 bp, Homo Sapiens
ctccactatcaccaatagtggaatttggaaacaataagagttgtctgatgttactccagtccacacacatagtaggtactttggtgctacagtgctcatgaaatttgtagccacaagtctgacatcgaaatccattgagcaggaatttctgacagatgtcacagaaggcaagcttcaggaacgtcttccgagcaaagttgtgtgttgtgaggggaacatgatccaggaaatctacttgaagttcttctccaatcaaagacgcagcatcagtattccaatctaagcgtgcttttttacctttgtgttcgtggagaagtctgaacactgcacagcactctggttgcaggcccctcaccttgagtgctttcataaggcagtcatgcaagctcattccatttcgcacattgaccactgttctttgcttgttcggcaagaaaacacggatagtgttgcttgtcttagaaggatctgtgagtttgccatcatctgatgcccggcgctgatagccaaactgctgaactattgtaggagagatgcagctggagccatcaaacacggcatctttgaatccaaaaccattgctgatcgtcttccaagctccctgtatgtgctccattgatgcagcttaaacaattcttaaacctgagggagccaggccgccccaacgtcctgtcgttcggcggcagcttctcgcccgctcctcctccccgcggcgggtgagggagcgggaggcggtcacattcggcgcgtccccagcccaggggacggagccccgagcagcccccgcatcgtagcaaacgcgctccgcgcctcagggcacgcgccccaaagcccggccagctgacccttttcggggcccaaaaaaggcagcagaaagccgttcccgcctcacaatcgttttcctcttactcccgccatataagatggcggcccaagcgcccgcgattaagactctcgggcggcccag

SEQ ID NO: 252326 - DNA, 577 bp, Homo Sapiens
cagcccaaatgtaaagaacacagtgaaccgtaaagccttaaagaccgagcgcaaaagaaaactgaatcagcttccaagtgtgactcttgatgctgtactgcagggagaccgagaacgtggaggttcattgagaggtggggcagaagatcctagtaaagaggatccccttcagataatgggccacttaacaagtgaagatggtgaccatttttctgatgtgcatttcgatagcaaggttaagcaatctgatcctggtaaaatttctgaaaaaggactctcttttgaaaacggaaaaggcccagagctggactctgtaatgaacagtgagaatgatgaactcaatggtgtaaatcaagtggtgcctaaaaagcggtggcagcgtttaaaccaaaggcgcactaaacctcgtaagcgcatgaacagatttaaagagaaagaaaactctgagtgtgcctttagggtcttacttcctagtgaccctgtgcaggaggggcgggatgagtttccagagcatagaactccttcagcaagcatacttgaggaaccactgacagagcaaaatcatgctgactgctta

SEQ ID NO: 252327 - DNA, 549 bp, Homo Sapiens
accatgcctggccacttctttgcttttatttccatttttaaaatatttaatctaaactgatataaactaagtatcatttgattcaatctttttctttttatcttaaaggtgatcttaattattttagttcctgttttagccgaggacctttttgttttatagggtaatttgtgtgctaattaaagaagtagagcttttttatatttgatggttgtgaataaattgtgtgtcagacataatcaacactatgtacgtgtacttatggtgaaacatgtttattcctttcaggagaagaaagcaaccgtctttatttctacgaaaattctggggtgttttatttggggttgtgcgcgttgagtccatttctccttccagtctgccaaaagaattgttttggcattttacagatcagttcttctagttcttcatgggatcctaaaggacattttttcaaatgaagtaagaaatttaaatatgaattttggcaagaatttaacactttcttttgaacacaataccaactaaattatatcaaacttttttttaaaa

SEQ ID NO: 252328 - DNA, 482 bp, Homo Sapiens
  misc_feature (23)..(23): n is a, c, g, or t
gaggcaatgagccttggtggaangcaacctctctgttcgatatttaaagtaagtgagggctgtgggtattcatatgttagaaatgcgcaatttcactttgaaaccatagtccaagtctctaggttggtagaagggaaaggaaggaagtggtcccagtgattctagatctggttgggaaacttctgcctcatgactctgtcctttgagtcctttggacagcagcacaaaacataacaatttttatttttaaacagacccattctttttgatcccacaggagctgtggttgggtcggccgtagccccgggatgtggtttaagtggattactgcctagctgagccaaaatgtttgcttgtacctgttggaccactacagcaaaccgctgcttacagtgcattgtgtatttctgtagtactgttttgcattttccatagagacagaaaactttgcaagtcaatcactgttgttcccatggtactgt

SEQ ID NO: 252329 - DNA, 965 bp, Homo Sapiens
  misc_feature (780)..(815): n is a, c, g, or t
  misc_feature (896)..(921): n is a, c, g, or t
gtgcctcagctgcaacaacaagtccaggttctctctcagatccagtcacaggttgtggctcagatacaggctcagcaaagtggtgtgccccagcaaatcaaactccagttacctatccgaattcagcaaagcagtgctgtgcagactcaccagattcagaatgtggttacagtgcaggcagccagtgtgcaagagcagttgcaaagggttcagcaactcagggatcagcagcaaaagaagaaacagcaacagatagaaattaagcgtgaacacaccctccaagcttctaatcaaagtgaaatcattcagaaacaggtggtgatgaagcataatgctgtaatagaacatttaaaacagaaaaagagcatgactccagctgaaagagaagagaatcaaagaatgattgtctgtaaccaggtgatgaagtatattttggataagatagataaagaagaaaaacaggcagcaaaaaaacggaagcgtgaagagagtgtggagcagaaacgtagcaagcagaatgccactaagctgtcagctctgctcttcaagcacaaagagcagctcagagccgagatcctgaagaagagagcactcctggacaaggatctgcaaattgaagtgcaggaagagctgaagagagacctgaaaattaagaaagaaaaagacctgatgcagttggctcaggccacagcagtagctgcaccccgccccccagtgacaccagctcctccagcccctccagcccctccaccttcacctccccctccacctgctgtgcannnnnnnnnnnnnnnnnnnnnnnnnnnnnnnnnnnnctttcaccacaatggtaatgcttctgtaaatgcctctatttgtccagttggctgaaaatgttgtaatctttattagacaannnnnnnnnnnnnnnnnnnnnnnnnnttaaatattggctttttccagtgagctattatgtttagtgtaca

SEQ ID NO: 252330 - DNA, 672 bp, Homo Sapiens
gaaagttgagagaaaagtcttcacagcggaagaagaaatcacttttttgtcccgaatcagtgggtggaggcaaaacccttcagcaagaagagaagcaacttcagccgtgtatgcaaatggataaccggttgcctcccaaaaaagttccaggtttctgttcctttcgctatggattgtctttccttgtgcactgttgtaatgttataataacagcacagcgtgcgtgcctgaacctcacaatggtagtcatggtgaatagcacagatccacatggtttgcccaacacctccacaaagaagctcctggataatataaagaaccctatgtataattggagcccagatatccagggaatcatcttgagttccacctcctatggtgtcatcatcatccaagttcctgttggatacttctctggaatatattctacaaagaaaatgattggctttgcattatgcctcagctctgtgttaagcctgctcatcccaccagcagctggaattggagtagcttgggtcgttgtatgtcgagcagttcagggagcagcccaggggatagttgcaacagcccagtttgaaatatatgtcaaatgggctcctcccctggaacgaggccgacttacttctatgagtacatcaggtaaagaattaaagcctagaatgtttgaatcct

SEQ ID NO: 252331 - DNA, 640 bp, Homo Sapiens
  misc_feature (316)..(316): n is a, c, g, or t
ccacgtgatcttattttaaaagaacactgctatagaagaatttacacaccaaattccctgaaagctaaagtattgttccataacttacacttgaggcaatctgctcagtgtgtaaccactttataaaaaataacttaccattgataacctggaaggtggactacttgtaagtagctggtgtttattgattaaaccatggaagttttcatgatacccaagcatgttgctgaaactgatgcatttgaaagagctgttgaaataatgcaaaactttggttttataagaatctactcatgttttaaaagtatttaactcntgtagaccacaattatagaaagctcagtaatgctgctaatgacatttgtaaactatatctgtaatgtagtgcaatatttttatatttcactgggagaggcagtagagacatcatagttgtactttagtgcaagtgggggaacactccaaatagcctagagtatagtaaggtacaaagcttcaatgaaaaaagctgtattatattacattactgatgtaatcttgctgccatgctatgtatcaatagctaaaaaataataataaagactaccacagaaaacaagaatatcttcatttaatgaaatctttaaaaaggtgattgctg

SEQ ID NO: 252332 - DNA, 940 bp, Homo Sapiens
agaggcgtgacggagattcctgaggtgtagtagcctgaggttcccttatgtggccctatagctgttactgaaggaagtagcctacgtccacgcctacaactgaagtctcttgacaaacacctcacccctgcctccgggatgaaagggggtaacctagacctgaatgggcttgaccatctcacaactgctcgcgtgacgaccgcattcgtggcaggtaagaagattgctgtatcaactcaagaaagcagtaacttcactgtctttgtattttgaattgcaacaacaactttgatatcaacaatgaagcaatgatatctaagaacaaaagagtatttgccaacagtcatcataatatcaagtgattgtataagcagaaacaagctgtcacagacctgtgcgtcagctaatatatggagaatgctttcttctgatactatttacttagaggcagttttaatataaatcatttcaattatatctacatcaaataaaataaaaatgagtgaagcccccagattcttcgttggaccagaagatacagaaataaatcctggaaattatcgacatttcttccaccatgcagatgaagacgatgaggaggaagatgattctccaccagaaaggcagattgtggttggaatatgttccatggcaaagaaatccaaatccaaaccaatgaaggaaattcttgaacggatctccttatttaaatatatcacagtagtagtatttgaagaggaggttattttgaatgaaccagtggaaaactggcctttatgtgattgtcttatttctttccattctaaaggtattaaggggagtgggggagaaactcctttatcctctctgtttataaaactaatacatattaattgtagactatgagataaaacagaaaaataaacattaactcactttcatggacaggtccaaaaaaaac

SEQ ID NO: 252333 - DNA, 837 bp, Homo Sapiens
  misc_feature (383)..(391): n is a, c, g, or t
  misc_feature (810)..(810): n is a, c, g, or t
agcgtgggtctctacgtccctgtttcccttgtatcaagacaccctcctcagcttccatgcctttggatcttccatgttcctccccatattcctggacttcggagatggcctctcccaagccaggtcaaggaggtttgggggagggttgcccctctgcccctctgttctgtggctgagcactttcccagtccagggcagggaaatattggccctatcttgacccccaaatccagtgagctccagattcttccaaggcaaaagaggtaagcagatcacacctctttctgcctctacatatggcctattctgggctagaccagatttgggggccaggagggaagaactccatatgggatggagaagggaatctactttctccctgnnnnnnnnncctgatggtttctcccagactagaccaaatagccagaaaaatgataggggtcggatgggtgggtaagcccaggatttgcacatgaccttccatccttacctgtattcccatctccccagtgtcactcccctcaccaatcactccagatggttttgggggaaccattctactcttctggtgggctttggggtatccccaccaactttcccttcaaaatagcaccttacaccccatctttgactcagttccccacacccaaagatcccagcctagggatgggggtacagggactttaaatagtccctaatccctaatttgcactagttaaccctggtcagggtccctgtaattccttccaagtggggggagataaatgttttggcttcctaattctccttttgaaaaatgggggctccctngctctggtgattgggataaataatttt

SEQ ID NO: 252334 - DNA, 792 bp, Homo Sapiens
aaaagggataaaaaagaattggcttttaaaaacactgcactcaaagtaatgtttccaataataacctttaaagtttcaatgaaaaagaaaaatctgtgcttatgggcacatgggatttctgattgtgttacttcattttaggtcattcaaaatggacttggtttaatgcatacactatggcaataacttacggagggccacagttcctcctcaaccaaatcaaatctagctgagaacactctggagtgaaggcatgtggtgatgagtttttcaaaagtctaatcaaccaccccaaatctctacatcctctcagggagttaacttcccctagacaatcaaggactctgaaagtctagttttgctataaatataaaatatttgtagcagaaaaatatagcctctctaagaagcagatttcatgtttcttgttcactgacgaaactctgagttggctggacaacatgagttaccacataactgtagaccacagatcagcacctcaaattccagctctacttaaacaaaactttaaaagcacttgagccatctggtcaggtacaaatgttggttcccttcttccccaagggaggaaattcagaatagagtcaacagtgactgccctgttagagagtccctttcgctgaagcaggggtgggaaatggcaggggtaggaaatggcagcgccaagtcctcctgtgcagacctcgaggtggcaccccatgtgctgtggctcctcctcaccgctccgacgtgggctgactttcagcacagtaatgagaagtcagagctggg

SEQ ID NO: 252335 - DNA, 1927 bp, Homo Sapiens
ctagcaacaggagataaaggtggtagagttgtcatctttcaacaggagcaggagaacaaaatccagtctcatagcagaggagaatataatgtttacagcaccttccagagccatgaaccagagtttgactacttgaaaagtttagaaatagaagaaaagatcaacaaaattaggtggttaccccagaaaaatgctgctcagtttttattgtctaccaatgataaaacaataaaattatggaaaatcagtgaaagggacaaaagaccagaagggtataacttgaaagaggaggatggaaggtatagagatcctactacagttactacactacgagtgccagtctttaggcctatggatctaatggttgaggccagtccacgaagaatatttgccaatgctcatacatatcacatcaactcaatttctattaatagtgattatgaaacatatttatctgcagatgatttgcggattaatctttggcatctggaaattacagacaggagttttaacattgtggatatcaagcctgccaatatggaagagctaacagaggtgattacagcagcagaatttcatccaaacagctgtaacacatttgtatacagcagcagtaaaggaactattcggctatgtgacatgagggcatctgccctctgtgatagacattctaaattgtttgaagaacctgaagatcccagtaacaggtcatttttttccgaaatcatctcctctatttcggatgtaaaattcagccatagtggtcgatatatgatgactagagactatttgtcagtcaaaatttgggacttaaatatggaaaacaggcctgtggaaacataccaggtgcatgaatacctcagaagtaaactctgttcactgtatgaaaatgactgcatatttgacaaatttgaatgttgttggaatggatctgacagtgttgtcatgactggatcttacaataatttcttcagaatgtttgacagaaacacaaagcgagacataaccctagaagcatcgcgggaaaacaataagcctcgcacagttctgaagcctcgcaaagtctgtgcaagtggcaagcgaaagaaagatgaaataagtgttgacagcctagacttcaataagaaaatccttcacacagcctggcaccccaaggaaaatatcattgccgtagctactacaaacaatctgtatatatttcaagacaaagtgaattagggttggcattcctagcagaagaacccacttcctgcttagttgagatagttgaatctagcattcgttcctataaaagagagaggtccattgtggcgcccctttccagtgtttgacagtgtgccattcgacaacacattgttatagctacatggagaaagctctgtggattcatcactgtggtgttctccatgtctgctagccatttaggtaagggtagggcacttttaatttaaatgacttcttgcaccatcttgcctaatggactagattggactgtatcaacattgatttactccactttttatgccttccattgtgatgacgtcaaacacagtgaaagccttcagtcatgctatgggatttaattgtgtatcctcattactgtatcatttgtggggtacaccccttccccctttttttaaattaaatacagctcattcttactgtggcttgtagcattcctcctcttctggcctcctggactgctccccttcatctcttacccttgccccctccacccggtcttggtggtggtatattaaaaaaagaaagaatgaaagcacacaaaatgagtcagtttggggtcagtggtataaagggggtatatgttgcaaacaaatgttttagtaacagttggctgtaatcactcctcgccgtgtctggcactgaaaataaggaaaaaaacctactactgaataaaagtgacaaa

SEQ ID NO: 252336 - DNA, 613 bp, Homo Sapiens
gggagacggacggcaggatggattcacttggcgacatggcggggagctgggaagacggacaccgacctaagtcaatgttagtctaccactgtacgtctggtaacctcaatccctgcaaccggagccaaatgtgattccaggtcttggcaacctctgaaattccaactccatttgcgagagctttgaggaggccatatgctgatttcaccacaagcaacttcacaacccagtactggaatgccatcagccagcaggcccctgccattatctgtgacttctatctgtggctcattggaaggaaacccagctaccgaaggaagataccctcatcaacccaattttacaaatggagaaatagaagctcagggaagaatctgaagtagtctcaaaggaagtgacaggaaggatgtggagaaagctgagtgtcaaagtcagtattcaagaccggatttactgctacttagagatgaatgaagaaatcagagggaacgcagtgtgctgatgctaaagcggctgtcaccacccagctgtgtgacataggacatcttctttctctgtctcacttgactaatatgttgtgtcaggggagacatgattgtaattgcctaaagca

SEQ ID NO: 252337 - DNA, 1015 bp, Homo Sapiens
  misc_feature (22)..(22): n is a, c, g, or t
ggcgggccggggtgcggagccnacatgcgcccgcttctcggcctccttctggtcttcgccggctgcaccttcgccttgtacttgctgtcgacgcgactgccccgcgggcggagactgggctccaccgaggaggctggaggcaggtcgctgtggttcccctccgacctggcagagctgcgggagctctctgaggtccttcgagagtaccggaaggagcaccaggcctacgtgttcctgctcttctgcggcgcctacctctacaaacagggctttgccatccccggctccagcttcctgaatgttttagctggtgccttgtttgggccatggctggggcttctgctgtgctgtgtgttgacctcggtgggtgccacatgctgctacctgctctccagtatttttggcaaacagttggtggtgtcctactttcctgataaagtggccctgctgcagagaaaggtggaggagaacagaaacagcttgttttttttcttattgtttttgagacttttccccatgacaccaaactggttcttgaacctctcggccccaattctgaacattcccatcgtgcagttcttccttctcagttcttatcggtttgatcccatataatttcatctgtgtgcagacagggtccatcctgtcaaccctaacctctctggatgctcttttctcctgggacactgtctttaagctgttggccattgccatggtggcattaattcctggaaccctcattaaaaaatttagtcagaaacatctgcaattgaatgaaacaagtactgctaatcatatacacagtagaaaagacacatgatctggattttctgtttgccacatccctggactcatttgcttatttgtgtaatggatgtggtcctctaaagcccctcattgtttttgattgccttctataggtgatgtggacactgtgcatcaatgtgcagtgtcttttcagaaaggacactctgctcttgaaggtgtattacatcaggttttcaaaccagccctg

SEQ ID NO: 252338 - DNA, 2068 bp, Homo Sapiens
  misc_feature (1477)..(1619): n is a, c, g, or t
cagagtctcccagtggattttctaagcacattcaatccaatttggacttctctccagtaaacagtgcttctagtgaagaaaatgtgaagtactccagttctcagccagaaccccgcacaggtctttccttatgggataccagcccctcatacattgataaattggtacaagggatcagcttttcccagcccacatgtcctgatcatatgcttttgaatagtcagttacttggcaccccaggatcctcacagaacccctggcagcggttggtcaaaagaatgacacgattctttaccaaattggatgcagacaaatcttatcaatgcctgaaagagacttgtgagaagttgggctatcaatggaagaaaagttgtatgaatcaggttactatatcaacaactgataggagaaacaataaactcattttcaaagtgaatttgttagaaatggatgataaaatattggttgacttccggctttctaagggtgatggattggagttcaagagacacttcctgaagattaaagggaagctgattgatattgtgagcagccagaaggtttggcttcctgccacatgatcggaccatcggctctggggaatcctggtgaatatagtgctgctatgttgacattattcttcctagagaagattatcctgtcctgcaaactgcaaatagtagttcctgaagtgttcacttccctgtttatccaaacatcttccaatttattttgtttgttcggcatacaaataatacctatatcttaattgtaagcaaaactttggggaaaggatgaatagaattcatttgattatttcttcatgtgtgtttagtatctgaatttgaaactcatctggtggaaaccaagtttcaggggacatgagttttccagcttttatacacacgtatctcatttttatcaaaacattttgtttaattcaaaaagtacatattccatgttgatttaattctaagatgaaccaataaagacataattcttgtgacttttggacagtagatttatcagtctgtgaagcgaagccagcttcaaaacatatccccaagatttgtacttatattgtcaaaagggcctggccagttatataaacctgtttttgaattataatgattaattaaaattgcaagtaggtgttttttccagtgtagttagtaaaatacttgtattttacagtgttgcataaactctagtgcttaactaactttactctaaaaattactgttgaacatcttaaatatttttctatattttctactttcatagccatattttaaccttttcaacttactggtgaccaagcttttaggtgataaagaataaaagagggaagggaagagtaaggaagctataagaaaaatagatctgattctttgttcctttacctgttagacttacaaaaagtttgtttttctaataaaatttgtatcaactttggggcatattaggttgaggcctnnnnnnnnnnnnnnnnnnnnnnnnnnnnnnnnnnnnnnnnnnnnnnnnnnnnnnnnnnnnnnnnnnnnnnnnnnnnnnnnnnnnnnnnnnnnnnnnnnnnnnnnnnnnnnnnnnnnnnnnnnnnnnnnnnnnnnnnnnnnnnnatttttaaaattgtaaaacattataaaattaatcagttattttaatctgaagccaagaacatgtagaatgttatgattagagtttatcacatattaatgtatactggcaaattgtgttactggagtatacccataggaggaataaattcaaacctgttttatttatttgaacctatttacggtatgcttaagaattgaatcagtataaattctcaaatatgggagaaattttgttcttgagaattatctgagtcattaatatttttcaaaaacagctctcactgacttgaacctcttctgtaagctctaaccttttacctgctttacatttccacttgaatgtctagtaggcatctcttgaccaaaaacagcttttgattcctgttctccaacctgttcctctcctagttttctccatctcagaaatgttacttcctctgcaaagtctt

SEQ ID NO: 252339 - DNA, 898 bp, Homo Sapiens
  misc_feature (24)..(24): n is a, c, g, or t
ggatagagtgatgggactggtacncatttttgttctctagggttggtaagaggaatttgggtgtaatttgtgtacatcatgaaaacatgccaatgaaaccaaatggtctgagttcagatgcatttaatccctatattgtctttttcttggatctcattgacacatatttctattctactcatcgacacgtttcttctctaagtctactctaatgacacaatttctgctctaatccacaaatacttggacattctagctcttctcattgtcccaaccttttaaaacaacttcagtaatagcacctttcttaacctctggggtgataaaatggtgctacttccaatgactgtttgaggccttatctatagggtaacacacagccatcaaagtatagatcaaaagctcaaaaggtttaagttcatcagtagaaaaaccagggagtttttttctcctgttctagagaaaaaagctcacagattgcaggactgtagttaactagtatttatacttgtcctgggttgaagcaattgtaatagtatgggtgacagtaggtttataaaatacacttttgtagttttgtatgatttttagattttacttggggtaaaattggaagcgacaccttaaaaagaactttgtgggaagaaatgtgtacaattgagtttccctgttaagttcttttacttatttgctctttcattggcccttgtatgtgtagttgttagaagtggggtgaaggtaaattgtgtagtggagagaaccaaggtggcagaattccagctatagcattgtttcttgctggtgagttgttagcttgtttgtgagtgctgttttcatgttctgtcagtttcattaatagacaaaacagtgaaattaatgaaagtctactggcatcttc

SEQ ID NO: 252340 - DNA, 889 bp, Homo Sapiens
gccttgactcacgcagtttcagagcaagaacggctcagcatttgtgagggggcgggcttcccagatccaggagcctctgcatgcacccatgcggagtagatccttctagttttgaagctctccagagttagctgtgaagactaaaggaaagaagagatgcactcacaggttgtccaagttgtctctaaacagactccattcctttctggtaagaaaagtaagatacagttgaaggacggcaggggagaacgcaaagatgtgtgagtaattaaggaagaggtgaaaggccgcaccctactttcaaagcacctctctccagaatgcttgcctcacaagctgcctcattcaaaggcaaggctctgctgctccccgccttcttgctgtgaccacattcctcaggacgctatccccacagccagctgaccccataagctgatgctagacagtagtcctccttacatgtcagtggttaaaaaggcagagcatacactggagggaagagatttatgtctagtgtctgaaaagtcattcaaaaggataaaaaccccattaatgtattcatttaaaacaaacatgccagacaaggcaaaaagtaacagtgttaattgtggtgtttttctctctacctgtttgaaaccgtttacagatgtaaaacacccctttcagcttcatttaccagaatgcctctgtgagaaatgctgtcattgccaggcccaccagggagagggagtctccaatccgtgctagacagctcagcttactcccccttggtgtctagaaaaacagacctcacttgtgcgtgcccacaggccactgaggtggaagtctgttttcatcatgtgctaaagttgcctgcctggcacctcagggaacaaagatctcaaagtca

SEQ ID NO: 252341 - DNA, 867 bp, Homo Sapiens
ctcaaataagcacaatatccagaatgggtgtgcattaaatgaatgaaaaatcgaatcagtggaaaccatttgaacatgcatgtgtggcatagctttaaataaaattcactttatgaatcaataagtgaaatggcaaaaaggagaggtggatattatttaaaagaagatgactgtttaaacacaaaaccatcacagagggaagagaggtttagaaaggtacagaaaaaaaattctacaccaggtaacactggaggatgcagggctacatttgccactgaagaaacattgttctcttgcatctgaattccagtgctttccaaatagatgggtagatgatgaaaaatggagcagcttcttttatttcttcttctttcctccttgaattctagtacgagacagttctctgcctgccaccaaggcagaaagcagcattttgctcacctgctcttcagtctggcagggtcccacgctcagttttccagcatagctgcagggtgctattgtaatgactcagggatggtgctgacaacgtgggttgcctctgtggctgcgggaggggagccaaagaaggtgttggtttgattcctctgctgatctcggaggtaaggaggaaccgacgaacttttgatatggaggatcctggtgtccatcacctgacagtcaatctgcatcatcacttcgtagtcctgcccattgatcacattctcatttatgtttattgctggtaacacaattgacatttttggtcttgtggtcttgttatgggtggtagctggtaacagcaggtgatcccttcgaaatgacacaacataaaaatgtgtctccccttctgcggatggcttaaaaaaagtcttgataactttctgg

SEQ ID NO: 252342 - DNA, 592 bp, Homo Sapiens
catagtgcctgacaacggtagacactctgtaaatgtgtattacattaatgaatgaatgattctaagctggtttgtagttaattaagccaacttcaaataaaaactataatttttcatcatcccaacgaaatattgacctcttagaagccctgaatttggcctgttctaggactaagccaattgttatatataacagattgttctttgttaattttaggatcacctgctgttaccagctaccacccataacaagaccacaagaccaaaaatgtcaattgtgttaccagcaataaacataaatggtaagttgaaattctgatgtatgaacaatatgagatttctttgtttaaccaggattctcttcattagttcaaagacatttaaaatgttcagttaaatgagtatatatccgtacaatatttcttaaacaattttccactggtttactattttttaagagccattattcttttaaaacaaattactacatttcctaaaagaaaaagtagctttctttttctttcaaaaattggaaaagctagcctttttgcctgctggtaaggacttggcttttgggaccccttttagtgat

SEQ ID NO: 252343 - DNA, 575 bp, Homo Sapiens
tgtcagagaaccagaggcttaaagtccctagtccaaggcgaagagttgtctgtgtgatgatagtattggcatttataatactgaactatggacctatgagcatgttggaacaggattccaggagaatgaaccctagtgtgagccctgcaaatcaaaggaggcaccttctaggattttctgctaaagaggcacaggacacatcagatggtattatccagaaaaacagctacagatatgatcattctgtttcaaatgacaaagccctgatggtgctaactgaagaaccattgctttacattcctccacctccttgtcagcccctaattaacacaacagagtctctcaggttaaatcatgaacttcgaggatgggttcatagacatgaagtagaaaggaccaagtcaagaagaatgacaaataatcaacagaaaacccgtattcttcagggtgctctggaacagggctcaaattctcagctgatggctgttcaatacacagaaaccactagtagtatcagcaggaactcagggagtgagctacaagtgtattatgcttcacccagaagttatcaagac

SEQ ID NO: 252344 - DNA, 1176 bp, Homo Sapiens
  misc_feature (186)..(211): n is a, c, g, or t
  misc_feature (216)..(216): n is a, c, g, or t
tatatccgttgaaggcgcgctatatcgctgtgtcgtgagtcatagctaactcttgatgtcaacgtcgtccccgcgttttatgtgagatccagcctgtcagccagtctctagaaacacttgacagtcactactatggccgcgcgcaacgatgtctgaagctctcgaggccgagccggcccgacaagnnnnnnnnnnnnnnnnnnnnnnnnnntttcnaactcacataaagtttaatcatcaagttaatgaaaatatcaaaatttttgagttagtgtatggcagagaaaatttagttgcaaataatacagtttttggtgtttccattattgacaagctatgctgcagaaagagcaatcgcattaaatcttagttcatcagggtcgcgctccataaacttcttgcaaacttctatggcatcctctaataaagtttcatcactagtttcaccatggttaattggaaatggcttccgcccatctaattcatagagatgcccatctacatgaactaatgcaataaaatgaagatctactttctcatctatacttggtgcctcagtctgaccttcatgggcactggtctcatgagtaactcggatggcatcatagttctccaggtatctggctcgttcttcagggctcattgacacagattcctccaggaattttttcaaggttgatccagattcaaagtgcatcttgtctttattgtttgcaatagcatgaatcagtccaattgttccacaggcattgctgattgtttgcttcatgaaatatactgatgatgtaacatcttgtccctgagattttattttttcttcctcttctgttctgaatacttcatacttttctgtaataggaaagagaagtaagactgcacagactggtcttggtaccatgctaaggagttcaggatccattccatatacatcaacgaattgccagttaggatgtagacctaattgtttaagaaactggttggtgaccctcttaaccgctccgtgcagggccgtaggtcaagtgtcatattttaaattaagatgctgccgaggagaaaaaaataagccaatttcctatttcgggagaaaaacagtatctgaatccacagccctcttccctcacgcttggactcttccgagccgagccttgccaagcgctcgcgttctacgcatgcccc

SEQ ID NO: 252345 - DNA, 591 bp, Homo Sapiens
  misc_feature (30)..(30): n is a, c, g, or t
  misc_feature (367)..(367): n is a, c, g, or t
  misc_feature (461)..(461): n is a, c, g, or t
ggtcgctgacgtggaggcgtccgaaggcangcaggggtgtgtcggggctcggattaagacatcggagtcggcagacctgagcagatgttaaccaaattcgagaccaagagcgcgcgggtcaaagggctcagctttcaccccaaaagaccttggatcctgactagtttacataatggggtcatccagttatgggactatcggatgtgcactctcattgacaagtttgatgaacatgatgggtccagtggcgaggcatttgacttccataagcagcagccactgttcgtctctggaggagatgactataagattaaggtttggaattacaagcttcggcgctgtcttttcacattgcttgggcacttanattatattcgcaccacgttttttcaccatgaatatccctggattctgagtgcctccgatgatcagaccatccgagtgtggaactggcaatctanaacctgtgtttgtgtgttaacagggcacaaccattatgtgatgtgtgctcagttccaccccacagaagacttggtagtatcagccagcctggaccagactgtgcgcgtttgggatatttctggtctgagg

SEQ ID NO: 252346 - DNA, 594 bp, Homo Sapiens
cctttttaaagtttgtttcaaaagaaagagagcacgagggaggtcatggattctagtgaaaggtgtgtaaaaacacaagctaaaaaaggtactgccatcaatatgaaatttaaaaagaaatatatatatgtatatacgtgcagctaatttgtgtatatataatttttacatacatacatatatatgtctgaacagtgcaaatggatgaagttcatagttccagttttaaaaatatagtacaaggagaggctgttggtatgaggcccaggtgaaaggacaaagatacctttggcaagttggttgggcttatttcttttcctgccttaactcagttgacttctggtgctgaccgatctgctgttcactaccacctcaattccagagacatgaaattcagagggggttattaataatatttagtttagggcttttgaatataacgactttaactttttctcttcatttttgttaatggttactctgtctgaaatgggacatgaaaggagtaagaggatgggggtgaagggaagggaaggggataaggaaaggctaggtggccacatctctctgctgtgacctcgccatctggaaaat

SEQ ID NO: 252347 - DNA, 719 bp, Homo Sapiens
gagacagacagacgctgggacccacgacgacagaaggcgccgatggccgcgctggctgagccctgcgcggggcagggggtctggaaccagacagagcctgaacctgccgccaccagcctgctgagcctgtgcttcctgagaacagcaggggtctgggtaccccccatgtacctctgggtccttggtcccatctacctcctcttcatccaccaccatggccggggctacctccggatgtccccactcttcaaagccaagatggtagctgccatccctgggagcctggaaccaggcaatgttcgggggaggcaggggacaggctggaacctggtgaagtcttaaagtagactcctcctatcggggtgtagaagggaatctgttaatcaaacagagcaatattagaaaggctacagaggtcaactcagtggaacacggttcttcccaaacagattttgtaattccgaaaatccacgcatgcgcaaacatacgcatacactcccatgttcctggacagtttatagctaccataacctggcattttccaaaacataccatgtagactcttggatacacaaggtaattttagagccacattaggatgaaccttttaaaaagttatgcatttatttttatgttcccccactggctgtattataggacaatttttatatgtgatatgtatttaccttagtgtgttaaataaacactggcattccaag

SEQ ID NO: 252348 - DNA, 861 bp, Homo Sapiens
ggcctggggtggcgcttgggacccacgacgacagaaggcgccgatggccgcgcctgctgagccctgcgcggggcacccggtctggaaccagacaccagcctgaacctgccgccaccagcctgctgagcctgtccttcctgagaacagcaggcgtatgggtaccccccatgtacctctgggtccttggttccatctacctcctcttcatccaccaccatggccggggctacctccggatgttccccactcttcaaagccaagatggtgcttggattcgccctcatagtcctgtgtacctccagcgtggctgtcgctctttggaaaatccaacagggaacgcctgaggccccagaattcctcattcatcctaactgtgtggctcaccacgatgagcttcgcagtgttcctgattcacaccaagaggaaaaagggagtccagtcatctggagtgctgtttggttactggcttctctgctttgtcttgccagctaccaacgctgcccagcaggcctccggagcgggcttccagagcgaccctgtccgccacctgtccacctacctatgcctgtctctggtggtggcacagtttgtgctgtcctgcctggcggatcaaccccccttcttccctgaagacccccagcagtctaacccctgtccagagactggggcagccttcccctccaaagccacgttctggtgggtttctggcctggtctggaggggatacaggaggccactgacaccaaaagacctctggtctcttgggagagaacactcctcagaagaacttgtttctcggcttgaacaggagtggatgaggaacagcagtgcagcccgggagcacaacaaggcaatagcatt

SEQ ID NO: 252349 - DNA, 889 bp, Homo Sapiens
gaaaactgggacagaggaaggaagctacagttacgaaggagagctgcaaaagttgcagcagaaaggttgggagtcccgacaggttccgtagcccacagaaaagaagcaagggacggcaggactgtttcacacttttctgcttctggaaggtgctggacaaaaacatggaactaatttccccaacagtgattataatcctgggttgccttgctctgttcttactccttcagcggaagaatttgcgtagacccccgtgcatcaagggctggattccttggattggagttggatttgagtttgggaaagcccctctagaatttatagagaaagcaagaatcaagtatggaccaatatttacagtctttgctatgggaaaccgaatgacctttgttactgaagaagaaggaattaatgtgtttctaaaatccaaaaaagtagattttgaactagcagtgcaaaatatcgtttatcgtacagcatcaattccaaagaatgtctttttagcactgcatgaaaaactctatattatgttgaaagggaaaatggggactgtcaatctccatcagtttactgggcaactgactgaagaattacatgaacaactggagaatttaggcactcatgggacaatggacctgaacaacttagtaagacatctcctttatccagtcacagtgaatatgctctttaataaaagtttgttttccacaaacaagaaaaaaatcaaggagttccatcagtattttcaagtttatgatgaagattttgagtatgggtcccagttgccagagtgtcttctaagaaactggtcaaaatccaaaaagtggttcctggaactgtttgagaaaaacattccagatataaaagcatgtaaatctgcaaaagataa

SEQ ID NO: 252350 - DNA, 680 bp, Homo Sapiens
caaaagttgcagcagaaaggttgggagtcccgacaggttccgtagcccacagaaaagaagcaagggacggcaggactgtttcacacttttctgcttctggaaggtgctggacaaaaacatggaactaatttccccaacagtgattataatcctgggttgccttgctctgttcttactccttcagcggaagaatttgcgtagacccccgtgcatcaagggctggattccttggattggagttggatttgagtttgggaaagcccctctagaatttatagagaaagcaagaatcaaggtatgtggtcgtggcagacggggtctccagaggagacaatgctttcttttttaaactttctttcattgactcttaagtgcagggctagaacacggggaacatacctgcttgcctcaactaaaagatctagtcatttctgaattcctctactaacaattaacaacaatatcctgtgcaaaattgtgcgaaagaaatgaaatacaattgcagcgtgcatcgacatttttgggaagtagagataaacttttcgtatttttacttcatcgaagtaaagtccaaatgtgtatgtggtaagtaaatgttttcaagtattgggaaaagataagtgtgatccaatttaaagttgggaaaatgaataaatcggattcaaattggaggtaacacc

SEQ ID NO: 252351 - DNA, 1425 bp, Homo Sapiens
  misc_feature (1341)..(1341): n is a, c, g, or t
  misc_feature (1362)..(1362): n is a, c, g, or t
  misc_feature (1370)..(1370): n is a, c, g, or t
  misc_feature (1377)..(1377): n is a, c, g, or t
ttagctctttctcctactcccttcctacaaacacccacaccctttcctcaggaatggaactgagatctccagaggggaatggtgagaaaggagaatgctagataggaaatgagaactgaagatattgattttgttgctacctgggctgaaagatacagccacaggcagaaatcaagacggtaaatcctctgggggtctatgaagaaagaggaccagagaaagccagtctatgtttatttcaggtcctgctggtcaatctttgtgaaggaaccttcttaatgtcggttggtgatgaaaaagacatcctgccaccgaagcttcaggatgacatcttagactctcttggtcaggggatcaatgagttaaagactgcagaacaaatcaacgagcatgtttcaggcccctttgtgcagttctttgtcaagattgtgggccattatgcttcctatatcaagcgggaggcaaatgggcaaggccacttccaagaaagatccttctgtaaggctctgacctccaagaccaaccgccgatttgtgaagaagtttgtgaagacacagctcttctcacttttcatccaggaagccgagaagagcaagaatcctcctgcaggctatttccaacagaaaatacttgaatatgaggaacagaagaaacagaagaaaccaagggaaaaaactgtgaaataagagctgtggtgaataagaatgactagagctacacaccatttctggacttcagcccctgccagtgtggcaggatcagcaaaactgtcagctcccaaaatccatatcctcactctgagtcttggtatccaggtattgccttcaaactggtgtctgagatttggatccctggtattgatttctcaggactttggagggctctgacaccatgctcacagaactgggctcagagctccatttttttgcagaggtgacacaggtaggaaacagtagtacatgtgttgtagacacttggttagaagctgctgcaactgccctctcccatcattataacatcttcaacacagaacacactttgtggtcgaaaggctcagcctctctacatgaagtctgtggacatgtaaggacgagagtaaagaggaaaatcttatttttatatgtgtctttggcttttactatgggtaaaagtattttcctcgtggaaaataaggcaatgaatatgacaatcaagtggactacaagtggaagacctggccatggggatatgtttggagtgatagaatcatggggggcagcagctctacttcttctaaccggaagggtaagagatactggtaaaagcagcagcagcacttggacacagggcatcttaagtccnttggtttggagtcaggttttncttttccngaatccntggggagggagaagcttcttcactttaagggaaagccgcttcaattct

SEQ ID NO: 252352 - DNA, 898 bp, Homo Sapiens
  misc_feature (40)..(40): n is a, c, g, or t
  misc_feature (142)..(142): n is a, c, g, or t
  misc_feature (173)..(173): n is a, c, g, or t
  misc_feature (224)..(227): n is a, c, g, or t
tttgggttgaggtaattcccaaagccacttaagtccatgngcccaagggttctccttagggaaatccagcatattggcccaagggtccgcttacctatacgggggcccgggcgtccaaaaagaattgtctagaaaagtttcnttgagggccgacggcggccgtcaggaatttntggtatatatacattcttcatcactcgcccatgttgttcatcatttcagannnnaggatggggtgtgataggttaataaactagttaattgtctagttgtttattttttaaatagaacagtccattcaacttaatatgtaggtacaacctcaatgctattagagattgattagttctttaaaaagattcacaaacttccaaattgtggtaagagtatcgtggactcacctctgaacaccggagagccagctagctcttttgagccgagtcctcctccccctccaaatacaacaccctggtaaaaaaaactacagttctgggaacctcacaggtgacctcccctgaggaatgctcagacaaggggaagaggctaactcacataaaacagcaaacccctatgatttacagtggaagaaatacctacctacttatggtaggattacagtacctagcacagtgccttgtcggtagaaaatgcttaataataaatgcatggctgcttttttagcctgacgttcaacccttttgtaccaaaggaataaaaaataggtaacctgatacttgcccacctgtcagggaattttctgtccttaacaaagatgaaggcaaaataatgatgaactctatcatctttttctaaaagccatgacagaccattacccttatgtttacatttgccttcaacactgccatccgctacaaatttttccctagtgttataattt

SEQ ID NO: 252353 - DNA, 1038 bp, Homo Sapiens
  misc_feature (960)..(960): n is a, c, g, or t
  misc_feature (1000)..(1000): n is a, c, g, or t
ggctgtatcttaaagttgtgaggtttaggattaacttccataatttcagaggaatagatgttttgaatattattgccatatatatttcctgaaaacaacatttccatgagttgaaaatgggcagggtactgtcctctaaatgctcccattctgtagctgtgtttacagctgccactagcacatgatttatagaagaggcatatcagctggacccaaggagatgtactcatggacttaagatgattagattataaatgccatcccacacaatctttaataaacaaaacccaggtgagctatatcattcttttgctgcatcaaaagatgggaaaccaaacagttgtcctcttgtggtttttcccagcaatacaatttataaagttcctataatcaggtgccctgtgacccagcaggatccttggtaccatgacctaaattggttgtatttattatcatggtatggaatttgactgtgaaagttgattagagaccttgagggaaagcctccctggagatccagaacatcagatttgctatgctggcttagaactgtgtcctatcctactacagatgtgtctgtcagccatgaagagatgttttaggtgtctcttccagaagttgatttccgctaataacccacagtggatctatgaataccagagttgtacgtgattttccaagtgaataggcgccatttggtttggttttaaataccctttccagtaatgactggtattttttaaaaacctaccctagcatgttgatcaggctaaattaagttcctctctcaagccttattgatggctcagtgcccattatattttaactacaggtaacagcagtttgtcctaaatgcattagtttgcacttgtccaggttgtagctcttttatgcctctgctttttcccacatggtcttatgagaacatattgcatatatttcccttcagctgagcatttncaatacccagacaagtgtttgtcattttaggcctcatcanatacttgaaaattccaagtccttttttaaaagaaatgt

SEQ ID NO: 252354 - DNA, 1903 bp, Homo Sapiens
ggcgtggcctggatgcgcgggcgcccgggacggcacgtctcagaccaaactacaactcccaggacccagcgggcgctgccgcccacgcgacgtcacggcggcggagggcgcaggcggctgggcgcctggcgagtggactgttcgagcccttccgctgggacccgggccctggctccggccccgcgatgggagctgctctccgcgggctgagcctgtcagcatcctcgacgcaccctggtccctgaagtcggagaagagcccctacccacccacacccccttgccccattttgggtcgcctgggtcctcagtcctagcggatcctcagtcctagcggccaccgggtctgaaaggagcaagacgatgatcctggcgtcggtgctgaggagcggtcccgggggcgggcttccgctccggcccctcctgggacccgcactcgcgctccgggcccgctcgacgtcggccaccgacacacaccacgtggagatggctcgggagcgctccaagaccgtcacctccttttacaaccagtcggccatcgacgcggcagcggagaagccctcagtccgcctaacgcccaccatgatgctctacgctggccgctctcaggacggcagccaccttctgaaaagtgctcggtacctgcagcaagaacttccagtgaggattgctcaccgcatcaagggcttccgctgccttcctttcatcattggctgcaaccccaccatactgcacgtgcatgagctatatatccgtgccttccagaagctgacagacttccctccgatcaaggaccaggcggacgaggcccagtactgccagctggtgcgacactgcctggatgaccacaaggatgtggtgaccctcttggcagagggcctacgtgagagccggaagcacatagaggatgaaaagctcgtccgctacttcttggacaagacgctgacttcgaggcttggaatccgcatgttggccacacatcacctggcgctgcatgaggacaagcctgactttgtcggcatcatctgtactcgtctctcaccaaagaagattattgagaagtgggtggactttgccagacgcctgtgtgagcacaagtatggcaatgcgccccgtgtccgcatcaatggccatgtggctgcccggttccccttcatccctatgccactggactacatcctgccggagctgctcaagaatgccatgagagccacaatggagagtcacctagacactccctacaatgtcccagatgtggtcatcaccatcgccaacaatgatgtcgatctgatcatcaggatctcagaccgtggtggaggaatcgctcacaaagatctggaccgggtcatggactaccacttcactactgctgaggccagcacacaggacccccggatcagccccctctttggccatctggacatgcatagtggcgcccagtcaggacccatgcacggctttggcttcgggttgcccacgtcacgggcctacgcggagtacctcggtgggtctctgcagctgcagtccctgcagggcattggcacggacgtctacctgcggctccgccacatcgatggccgggaggaaagcttccggatctgaccccacagcctttggcctgctcacccgaccagcctgggccgcattccctgcaggacctcccgggtcaggcagggcggccccctgctccacacactgctgcatcttgggtctcagggacccagacagatggacttacatggagctgggcactgccctgcctcaacagggtccattgcctcctcgcctccagaacttggagcagggaagtgggcaccctgaggcctccagcaccagttccgtcattctcgttcctggggaacccccactctgacctgttattaaagttcacattttgaatgccc

SEQ ID NO: 252355 - DNA, 922 bp, Homo Sapiens
  misc_feature (903)..(903): n is a, c, g, or t
gactttgtcggcatcatctgtactcgtctctcaccaaagaagattattgagaagtgggtggactttgccagacgcctgtgtgagcacaagtatggcaatgcgccccgtgtccgcatcaatggccatgtggctgcccggttccccttcatccctatgccactggactacatcctgccggagctgctcaagaatgccatgagagccacaatggagagtcacctagacactccctacaatggtcccagatgtggtcatcaccatcgccaacaatgatgtcgatctgatcatccaggatctcagaccgtggtggaggaatcgctcacaaagatctcgaccggctcatggactaccacttcactactgctgaggccagcacacaggacccccggatcagccccctctttggccatctggacatgcatagtgccgcccagtcaggacccatgcatcgggtgagaccctgccaggccagaatggagggttgggggaccccaggagactcaagcctctgaagcctcctgtcctgtccccctgcccacccccagctttggcttcgggttgcccacgtcacgggcctacgcggagtacctcggtgggtctctgcagctgcagtccctgcagggcattggcacggacgtctacctgcggctccgccacatcgatggccgggaggaaagcttccggatctgaccccacagcctttggcctgctcacccgaccagcctgggccgcattccctgcaggacctcccgggtcaggcagggcggccccctgctccacacactgctgcatcttgggtctcagggacccagacagatggacttacatggagctgggcactgcctgcctcaacagggtccattgcctcctcgcctccagaacttggagcagggaagtgggcancgtgaggcctccagcatac

SEQ ID NO: 252356 - DNA, 1095 bp, Homo Sapiens
gtagcgaggcctgggtggcgaattcggcacgaggctccggccccgcgatgggagctgctctccgcgggctgagcctgtcagcatcctcgacgcaccctggtccctgaagtcggagaagagcccctacccacccacacccccttgccccattttgggtcgcctgggtcctcagtcctagcggatcctcagtcctagcggccaccgggtctgaaaggagcaagacgatgatcctggcgtcggtgctgaggagcggtcccgggggcgggcttccgctccggcccctcctgggacccgcactcgcgctccgggcccgctcgacgtcggccaccgacacacaccacgtggagatggctcgggagcgctccaagaccgtcacctccttttacaaccagtcggccatcgacgcggcagcggagaagccctcagtccgcctaacgcccaccatgatgctctacgctggccgctctcaggacggcagccaccttctgaaaagtgctcggtacctgcagcaagaacttccagtgaggattgctcaccgcatcaagggcttccgctgccttcctttcatcattggctgcaaccccaccatactgcacgtgcatgagctatatatccgtgccttccagaagctgacagacttccctccgatcaaggaccaggcggacgaggcccagtactgccagctggtgccacagctgctggatgaccacaaagatgtggcgaccctctttggcagaaggcctacgtgagagccggagcacatagaggatgaaaagctcgtccgctacttcttggacaagacgctgacttccgagcctgggaatccgcatgttggccacacatcaccctggcgctgcatggagacaagcctgacttttgtcgggaattatctggaactcggcctctcccccaaagaaaaatatttgagaaatggggggggaatttttgcccggaagccctgtggtgaagacacaaaaatgggcgaatggcgcccccgcgtggtcccgcaattaaagggggccattggtggggttgccccccgggtttccccctttctttccccttatggccccctggggaactaaaattcccctg

SEQ ID NO: 252357 - DNA, 455 bp, Homo Sapiens
  misc_feature (24)..(24): n is a, c, g, or t
tggaagtttgctgttgaaatgggnaaaccgggatgacgttgccatgtatccaggctttggtgctgctgtcctaagaagggtcaggcctggtcagcatatggtgctctcctttggtgctatttggctccagtgtctttggagtctgaggaggtttggcctttaaaaatcaaactgccaccggaactgctttaaaaatgtttggttcacagccttcactggattacctattggagcaaacaaagtgtaaccatgtaaaacctgtgagcttgtattgatatctcatggctagagttccaaggtaaaagctattggatcttcgtttgtgtgtgtgtatacatgtctagatgtgtttatttgtatgtacacttattgttatatgttgtgtcaaccaaatcagcttataaataaaaaaacactcataaattaaataaataagtccaagcaattttcaagtt

SEQ ID NO: 252358 - DNA, 1550 bp, Homo Sapiens
  misc_feature (1303)..(1391): n is a, c, g, or t
  misc_feature (1405)..(1405): n is a, c, g, or t
  misc_feature (1441)..(1459): n is a, c, g, or t
ggaaatagaagaagtgagtgaaaatgtattacaagttcacttaaatggactgctgcagatcaatgacaaaatcgccctaaaggaaatcacaaggcagttaaatctggaaaatgtagttggagataaagtttttggaagctttgctgaaaacctttcatttcttctggaagctttaaaaaaaggtgaccgaactagcagttgcccagtgatcttcatattagatgaatttgatctttttgctcatcataaaaaccaaacacttctctataatctttttgacatttctcagtctgcacagaccccaatagcagttattggtcttacatgtagattggatattttggaactcttagaaaaaagagtgaagtcaagattttctcaccggcagatacacttaatgaattcatttggttttccacagtatgttaaaatatttaaagaacagttatctctacctgcagagtttccagacaaggtttttgctgagaagtggaatgaaaatgttcagtatctctcagaagatagaagtgtgcaagaagtactacagaagcatttcaatatcagcaaaaacctgcggtcattacacatgctattgatgcttgctttaaatcgagtaacagcatcgcacccatttatgactgccgtagatctaatggaagcaagccaactgtgtagcatggactcgaaagcaaatattgtacatggtctatcagtcttggaaatctgtcttataatagcaatgaaacatttaaatgacatctatgaggaagagccatttaattttcaaatggtctataatgagtttcagaagtttgttcaaaggaaagcacattccgtttataattttgaaaaacctgttgtcatgaaggcttttgaacacttgcagcaattagaattaataaagcccatggaaagaacttcaggaaattcacagagagagtaccagctgatgaaactgcttttggataatactcaaattatgaatgctctgcagaaatatcccaactgtcctacagatgtgaggcagtgggcaacatcctcactaagctggttatgaatataaccagtgacttcaactttggcatttcattcatacttctgtagagaacggaaaactattgtccattaacatgatatgctaaacattctataaacattcttgtatttatgtgagacttgcccatctactgtcttggctgtgtcttgccttttaatcatgaacagttacatgatttataatttcactgattgagattactttgtaagtagctgttcagaagaataaaatatgactgttttaggnnnnnnnnnnnnnnnnnnnnnnnnnnnnnnnnnnnnnnnnnnnnnnnnnnnnnnnnnnnnnnnnnnnnnnnnnnnnnnnnnnnnnnnnngagccgacaaaaanaaacccgttttgttgcgggccccctccggccccttnnnnnnnnnnnnnnnnnnncctcttccttttgtggggcgcgggggccccccaaagagaaaagggaaaccgggggccaaaaggtggtttccccaaagaaaaaccggggccc

SEQ ID NO: 252359 - DNA, 1092 bp, Homo Sapiens
aatggcccagagtcaccaaggcaaagttggggtggccccagccagtgtcctagtagcctggtgtctccattagggagacctgagaagctgccaggagaggcttctgctagcgcaaggcagggccggcccagcagctgacaaggaacatgctgaatatagaggacagaggagttaagaagacacctgccggccaggccagagaggggcagctctaagggggtacagcggcctgtggtgctgtaggcccagaaagggtggggatcagcccaagtcacagagcatggccctggtgggcggcgaggggtgcgagtggacaaggacacccctgcagagtcccacccccactctattccctccaacaagggaacgccccagcaggaagcctgctgtctttccaggagcccctgtgccacctagtctgacccctctcagccacaaggctaccctcccgtccagcctgactggaggtagaggaggaggaggaggcaaggccgactgcagtggggagcccgggtgccccgtcctctgtcagcaaatgcctcccttccatctgcctctagccccggcctctgaccacccaggctctgccccaggcctgcaaccacctcagcggaagccagaggggctgcctggcagatgccgctctgacccttcaggagtgcccactgcacctgaatcaggcccaggcctggagagcccaggcctgtacccaggatgctctggtctggccctgcctcggcccttgcagtggtccgagccaggatctaggctcgggaggcacttgtgggtccctctgctccaggcaccatcctcccctacctaggcccacatgagtggcctcatcgtaggccaggcaggactctcctttgcccatccatccccaccttgagggcagagctgggtcaggatgccaatgccactcctccttctgcctagcgtggagcccagcacagaggggtatcaataactgggggggcccagtgggtggagcagggtgggccaggctggtctaggaggctactccagctggaacagagtatggctggagaccgacgcgtgggtcgacgatatcccgaaattccggaccgtacc

SEQ ID NO: 252360 - DNA, 852 bp, Homo Sapiens
  misc_feature (125)..(134): n is a, c, g, or t
  misc_feature (819)..(819): n is a, c, g, or t
gccgatcagtcacccagtcggctggagtcggaggcgatatttctaggggtgtacttgttggggtcagggtaagcaccagccacaaaaacctacaaaagaagggaaattactgtctttaaatattnnnnnnnnnncaagatccatgagtgggcatcgatcaacaaggaaaagatgtggagattctcacccggagtccccagtgggcttcgggcatatgagtactacaggatgtgtattaaataaattgtttcagttaccaacaccaccattgtcaagacaccaactaaagcggctagaagaacacagatatcaaagtgctggacggtccctgcttgagcccttaatgcaagggtattgggaatggctcgttagaagagttccctcctggattgccccaaatctcatcaccatcattggactgtcaataaacatctgtacaactattttattagtcttctactgccctacagctacagagcaggcacctctgtgggcatatattgcttgtgcctgtggccttttcatttaccagtctttggatgctattgatgggaaacaggcaagaagaaccaatagtagttctcctctgggagaactttttgatcatggctgtgattcactatcaacagtttttgtggttcttggaacttgtattgcagtgcagctggggacaaaccctgattggatgtttttttgttgttttgcgggggacatttatgttctattgttgcgcactggcaaacgtatgtttctggaacattgcgatttggaataattgatgtgactgaagtgcaaatcttcataataatcatgcatttngctggcagtgaattgggaggaaccacccttttt

SEQ ID NO: 252361 - DNA, 483 bp, Homo Sapiens
ttgtcaagacaccaactaaagcggctagaagaacacagatatcaaagtgctggacggtccctgcttgagcccttaatgcaagggtattgggaatggctcgttagaagagttccctcctggattgccccaaatctcatcaccatcattggactgtcaataaacatctgtacaactattttattagtcttctactgccctacagctacagagcaggtaagagtttcttaacagatctcaacatttgctatataccaaaaacgttgtaattgggatcgtggggtcattttaactaaagataaagtaatctgacagctgtcaactattttaaaatatcacacacactgtgataaagcttgtaagtacagcctacacacttgcttattggaaaccagaagcaaacggtagactgtgatcctagtgcttaaattaatgttagcagggattaacatgtaaaatgttccttttaaagtcactaaatctcaa

SEQ ID NO: 252362 - DNA, 1930 bp, Homo Sapiens
  misc_feature (338)..(338): n is a, c, g, or t
  misc_feature (349)..(349): n is a, c, g, or t
  misc_feature (1745)..(1754): n is a, c, g, or t
atgtttgagctactctgtgacatttaatcattaatagaagatttggggtatacactacagatgggccctgtttgctgaaatgttggggccaaacaacttgatagagcctatgatgttcctttcaagctttctaaagtttccaccaacctcagatgaaaatgtaactgtgagaagtaaatttaacaacattgttgtctgcatatgtgtgccaaaatggaagacagaatcatgaaaaagaagcttattttataaccatggtggtggctcatgtttgagtagtaatgctccttggtctggccactgaagaatgacagagcccagggcccccggtcccatcntgccatcactngctttggagccccagggtaactcctgccagtaacagagaccaagaagcgggacgttcaccatgggaagaaaatcgctgtaccttctgattgtggggatcctcatagcatattatatttatacgcctctcccagataacgttgaggagccatggagaatgatgtggataaacgcacatctgaaaactatacaaaatttggctacatttgtggagctcctgggacttcaccattttatggattcctttaaggttgtcgggagctttgatgaagtcccaccaacctcagatgaaaatgtcactgtgactgagacaaaattcaacaacattcttgttcgggtatatgtgccaaagagaaagtctgaagcactaagaagggggttgttttacatccatggtggaggctggtgcgtgggaagtgctgctctaagtggttatgacttgctgtcaagatggacagcagacagacttgatgctgtcgtcgtatcaaccaactacagattagcacctaagtatcatttcccaattcaatttgaagatgtatataatgccttaaggtggttcttacgtaaaaaagttcttgcaaaatatggtgtgaaccctgagagaatcggtatttctggagatagtgcaggagggaatttagctgcagcagtgactcaacagctccttgatgacccagatgtcaagatcaaactcaagatccagtctttaatttatcctgcccttcagcctcttgatgtagatttaccgtcatatcaagaaaattcaaattttctatttctatccaaatcactcatggtcagattctggagtgaatattttaccactgatagatcacttgaaaaagccatgctttccagacaacatgtacctgtggaatcaagtcatctcttcaaatttattaattggagttccctgctccctgagaggtttataaaaggacatgtttataacaatccaaattatggcagttctgagctggctaaaaaatatccagggttcctagatgtgagggcagcccctttgttggctgatgacaacaaattacgtggcttacccctgacctatgtcatcacctgtcaatatgatctcttaagagatgatggactcatgtatgtcacccgacttcgcaacactggggttcaggtgactcataaccatgttgaggatggattccatggagcattttcatttctgggacttaaaattagtcacagacttataaatcagtatattgagtggctaaaggaaaatctatagtaaaacatgtagctataacatattttaaaaataaaatctgaaaacctcagaaaatttgcattagaaattggtctttcttaaaatggtctagttaagttccacatgtagcataattcttaaataggcacttttctgnnnnnnnnnncttactgtgggatttcatttcaattttctacattgtctatctgctttttctgagattttccttcttacactgttaatcttattttaaaaaatattacattcttgtatactttatttttgtgagttggctactatttacgatgcaagagaataaatgtgagcaaatattgccaaaaa

SEQ ID NO: 252363 - DNA, 715 bp, Homo Sapiens
ggggctgctgtagccggaccctttgccttcgccactgctcagcgtctgcacatccctacaatggctaaaacagcaatggcctacaaggaaaaaatgaaggagctgtccatgctgtcactgatctgctcttgcttttacccggaacctcgcaacatcaacatctatacttacgatgatatggaagtgaagcaaatcaacaaacgtgcctctggccaggcttttgagctgatcttgaagccaccatctcctatctcagaagccccacgaactttagcttctccaaagaagaaagacctgtccctggaggagatccagaagaaactggaggctgcagaggaaagaagaaagtctcaggaggcccaggtgctgaaacaattggcagagaagagggaacacgagcgagaagtccttcagaaggctttggaggagaacaacaacttcagcaagatggcggaggaaaagctgatcctgaaaatggaacaaattaaggaaaaccgtgaggctaatctagctgctattattgaacgtctgcaggaaaaggagaggcatgctgcggaggtgcgcaggaacaaggaactccaggttgaactgtctggctgaagcaagggagggtctggcacgccccaccaatagtaaatccccctgcctatattataatggatcatgcgatatcaggatggggaatgtatgacatggtttaaaaagaactcattat

SEQ ID NO: 252364 - DNA, 1194 bp, Homo Sapiens
  misc_feature (1024)..(1024): n is a, c, g, or t
tgtgtttctccaggccaaaatcatcagtcagtttggataccatcaagacacctgaaatcttgtcatgggccagatgccaaggaagagattccgggaggatcctgaggacccccccggttgcagccatgtcaaggctgggtgccgaggaggacccccaactgtcacgagcaacaccccatcgaatacaggccaccgaccctggagacagatcaagaagctgtcacagatcccaggaagacaacctgaggaaagcagggacaacccactcacagtgaataatttaatggtagctatgatggcagtgatcaccatttctgtgagtattccttcaacaaaggctgacacagagaacaattgtacttattaggcatatttatcaatcttagctggtaataatgcctggatgtaaatcactgtatgacacagttacacatgctttctgatctcagtatttaccataataaatctgctcctgtaattgaggcatacaacccccaaaaacctatttgtaaacaggattggactcagttagacaaaatgaacatacttgtttaggaagattgcattgcagaacaggcagaggtgctgcacaacgattcctatggaatcattattaattggtcccctaaggggatgtttagcttgaattgcacctctcagtctgtgtgccactgctacactatgtttagatgatctgaacaaaatggtcagatggtagaaatgataaaaagtacggcaagagttcctcttatctgaaaccatggcggtatagtggcacctcaacctcagatgatatggcccgttgtaggagctaaacataagataaggatttgtggcttaataagatcaaaaatttgggaaagaataaaaaagcatctagaaagacactctacaaatttgtctttagatattgcaaaattaaaagaacaaatatttaaagcatcccaggcacacctgaccttaatgccaggaactggagtgcttgaaggagctgcagacagattagcagctagtaacccattanaatggataaaaacacttggaagctctgtgatttcaatgatgattgtgcttttaatttgtgttgtttgtatagtctgcagatgcgggatcctgacttccgcgagaagtagctcaccatgacaaagctgccttggccttttattgctttgccaaataaaagaaagggaaaaa

SEQ ID NO: 252365 - DNA, 729 bp, Homo Sapiens
  misc_feature (681)..(681): n is a, c, g, or t
tcccaaactaatatagaccagaaactagctaatcaaatcaatgatctccaacaaactataatgtggctaggagatcgagtaagtagtctagaatatagaatacagttacaatgtgactgaaatacttctgatttttgcattactcctcatctgtataaagaaacagagcatgagtgggaaagagttaagagacatttaaagggtcatactggaaatttatctttggatattgcaaaactgaaggaacaagcatttcaagcctctcaggcatatctgacgctaatgccaggaactgaagtgcttgaaggagctgcagacggattagcagctattaacccgttaaaatggatcaagacacttggagggtctgtgatttcaatggtgattgtgcctttaatctgtgttgtttgtctttgtgcagtctgcagatggggatccccaatcctgtgagaaggagcccaccatgacaaagctgcctttgcctttattgctttgcaaaaacagaaaggcaggacacgctgggaacaatccctaaccctgtcacaaacagaccttaaagaaactggccagaaacaggatttctgcagcaatgggacatgctcttgatggctatcacacacactgctaaaagttgttggtttactagagcagggcaaggaacacctgggccccgcccggagncaaaaaactgcttcaaaccacaaacgataggcagggaaaggcctgtgg

SEQ ID NO: 252366 - DNA, 869 bp, Homo Sapiens
  misc_feature (131)..(131): n is a, c, g, or t
ggaccatggaggccacgtcccgggaggcggcgccagcgaagagctcggcctcgggccccaacgctccccccgccctgttcgagctgtgcgggcgggcggtgagcgcccatatgggggttctggagagcggnggtgtgggccctcccaggcccaatacttcaaagcatcctacctctgctcaatatatattacttggagaggattgaggaaactgccctcaagaaaggcctctcaactcaggccatctggcgccgactctgggatgaactgatgaagacaaggccttccagtttggaaagtgtgacatgttggcgagccaagtttatggaggccttttttttcccatgttctacgtggggaccatttgatgtgtcttctgacaggcgtctttgtgatcagcggttctcacctcttctgcacagctcccgccatgtccgacagctcaccatctgtaacatgctgcagggtgcaaccgagctggtggctgagcccaaccgcagggttctggagaccctggccagctccctgcacactctcaagttccgccaccctgctggttctctgatgtgggctgctcagcagtcacttcggcagctgggtgcctcagctcattcaccatgggggctgtcagtcaagggtcgcctatactccctggcctgtgcctgagtcagccctttttctccttattctccccatgagtgctggcttctggccacccggggcctggtgggcccaccctggccgcctctggtgaagagggctccccgagggccgggccccatccccaagatggaagggttccctccttaattggggggtccggacggccaccccgcgggattcttgcttggagcaaggggcctgcagcc

SEQ ID NO: 252367 - DNA, 669 bp, Homo Sapiens
  misc_feature (194)..(194): n is a, c, g, or t
  misc_feature (197)..(197): n is a, c, g, or t
ggggagagtcttattacagtgacctcatcgacttgcatctgggtggtatgtatggcagcgcctgtgctgacactaaccccgctgacgccctttctccacccacgcttcccagtccctgctcacaaaaacaaggagaaatcaacccaataaccaaatggcaaaagcacagacccttttccagctcaaaacagagnagngtgctgatctccccgctgcccacatgtgctccagaggaagatctgagcttgcttttgctgcctggggtcgtttttaattttttataataaaactttgcccacccgactccaccagccttgcatctgcgtcctggtcccctaaatacacacactccaacacagcttttgccctgaatctcatccctcactgcttgtaggaatcatatctgctagggagctcactgcctgccacacttacgcaaagaagcaaacatgccaagatctcagcccgaccattttcactgggtcgtggtctcgtttctcccagaagagctgagtgcgagggaaaggcttctctgtagtgatttctgcccggagtcaccaaactcaaagccaggttgacgggtgcccataacaacgtccctccctccttgctctgtcctggggctcactttgtacttcttttcagtgaagacaggaaaagctccaggcc

SEQ ID NO: 252368 - DNA, 654 bp, Homo Sapiens
  misc_feature (318)..(382): n is a, c, g, or t
  misc_feature (505)..(566): n is a, c, g, or t
gggggggtagcatggtccatacagagaggaattatgggggcattgtggacaagggtatctctgtgggtaaggggtcatcggagtcagtaaggttagaatagccacactttccctgtggtctatatggttgggccagggctgccatgttgcccagctcacaagggtaccattatacactgtataatatttgcatggcacctgctggagctgagcaatgtggcagctttggttaaggagatcaatgtgaccaatattacgtgatgtcaaattggtagtgaacacactggttctctctctgtctctctgtctttttgtctnnnnnnnnnnnnnnnnnnnnnnnnnnnnnnnnnnnnnnnnnnnnnnnnnnnnnnnnnnnnnnnnngctcaagcaatcctcccacctcagcctcctgagtggctggaactacaggcctgccaccacacccggctagtttttttgtatttttagtagagacagggtttcaccatgttagccaggatggtnnnnnnnnnnnnnnnnnnnnnnnnnnnnnnnnnnnnnnnnnnnnnnnnnnnnnnnnnnnnnntgagccaccgtccccggcctgaatttaatgaattttaatggtgcagtatataaaatgttctaaatgaatatgtataattaataggatt

SEQ ID NO: 252369 - DNA, 1049 bp, Homo Sapiens
  misc_feature (541)..(541): n is a, c, g, or t
gcggcctgtgcgagtatgcgcttgggcactcagtctccctggcgagcgacgggcagaaatctcgaaccagtggagcgcactcgtaacctggatcccagaaggtcgcgaaggcagtaccgtttcctcagcggcggactgctgcagtaagaatgtcttttccacctcatttgaatcgccctcccatgggaatcccagcactcccaccagggatcccacccccgcagtttccaggatttcctccacctgtacctccagggaccccaatgattcctgtaccaatgagcattatggctcctgctccaactgtcttagtacccactgtgtctatggttggaaagcatttgggcgcaagaaaggatcatccaggcttaaaggctaaagaaaatgatgaaaatttgtgggtcctactaccactgtttttgttggcaacatttccgagaaagctttcagagcatgcttattaagacaactcttagcttaaatgtgggtttggttttgagctggaagagagtacaaggtgcttccggaaagcttcaagccnttcggattctgtgagtacaaggagccagaatctaccctccgtgcactcagattattacatgacctgcaaattggagagaaaaagctactcgttaaagttgatgcaaagacaaaggcacagctggatgaatggaaagcaaagaagaaagcttctaatgggaatgcaaggccagaaactgtcactaatgacgatgaagaagccttggatgaagaaacaaagaggagagatcagatgattaaaggggctattgaagttttaattcgtgaatactccagtgagctaaatgccccctcacaggaatctgattctcaccccaggaagaagaagaaggaaaagaaggaggacattttccgcagatttccagtggccccactgatcccttatccactcatcactaaggaggatataaatgctatagaaatggaagaagacaaaagagacctgatatctcgagagatcagcaaattcagagacacacataagaaactggaagaagagaaaggcaaaa

SEQ ID NO: 252370 - DNA, 1306 bp, Homo Sapiens
  misc_feature (80)..(80): n is a, c, g, or t
  misc_feature (890)..(890): n is a, c, g, or t
gccatgaccccatcagacccccaaggtactcccttgtcaggtcccaaagcacatgttatcctatgcctgtgaacctggcntgccatccagcccacgtcccagaccacaggcacacgctgccctcctcttgggtggggctgggggcactgctgacctgtcagctgctccctccccagggacccgtctccactccctgggggctactcagtcagtgaacgactttgctttttctctttcctacagattccacctcccatctacccctttcctctcccacctcttgacctgaaccccttttaacctcagggtcaaatgtacctgaggtctgtaccccccacctcttgtcatgcagtagtcatggctggtaggaccttggcccagggcatggggtgaggagagcctggcctggagaggtcagaccaagagtgaggtgcctagctccccaggctgggattttgggggccacccgtctgggcactcctgggtcagtggaggagcttgggggaggctgtggggccagccaccagccctcagccagggtcctccttgcagccagctcaaaaagatgccagctcccccagcttggatgggggtgcaccaaggggtaggctgttcttcctttcggtctagctcccaaacccatgtgctgtaccacctcctcgtctgcccagtgataagagaggagtggagggacctgtgtagtgcggaagagaggactcccagggctggcaccttgcaaggtgtccctggctgcactgagctaaggtgaagtgacagagcagatcatggactctggtaccatccaccggcagcagtcccaagcctggtgagttggcatcagcaggaagggggatggggagattcctgtgttcgtaacggctctttgttcnccgggcacagtgggtggacaggaggtgggagaggacacccgtagaagcagcacatctggcttctccttgtccactggatgcccaccctcaaagtcttccccggtcccatctgcccgtgcactggccctgagacctctttgtagccttgggggcaaggagatatagccccctccccactggggtcctggggcccgcccctcgcctctcccagtgccaggggggcaccaagctgagtctgtctgggctcagaagcccccgctctcagagctgctccggctgtggtagctgggactgggggtcctcgaggggctgcgtgtccggctgcgggtcccatggctgcgactgctgtagctcccgtggctgtggccggggctggggctgcggctgtggctccgggtcgagtagtcgctgctccc

SEQ ID NO: 252371 - DNA, 1902 bp, Homo Sapiens
  misc_feature (1877)..(1878): n is a, c, g, or t
tggcaaagtttgaaaggaaggggggagcccagaagtttgagttccttaataaaatatgtgatccatctcataaaacccatccacccatccatactgtggctacttctcattcctaactcaagcgaatccacggtgaagcaaacagccttagatcctacagcaatgactctaatctttaagacagatggggctccctcacaggatcttcccaaacgttggaaaggaacccaacccctaattttcaccaaaacatgatctggggagcctgaaattgaatggacagcctgagtgctacaaaggtgaacaatgttgccccaagctcgagaattggacttacttaaaaggaaggggaaaggagcagacatattctctgtctgtacatggctgaattagggccccatcatggtgaggacaagccactagctgaagcccaaactataagggggggctttccagacagccacagtgatgagttcttgcatggcaggacaggccacaggctatctctcctctgacctcggaagcagagcctagagggagagggctagggtgacttaagggtacaatgacagacatacaggacttctgtgcaatttgtcccatgggcttagatgcaggtcacagacaggcctcaccttaagaaaaccacatcccaccatctggattgacacaggaaatcaatgaaggggcagtggttcattctacaaaaggattcttcactttacaaaaggacttgcagtggttatttctttaaaagatgaaggataaggatgtgatttacaaaaatttcatgtacaactttcagaggggagcacttctattgcattaaaccaacctcccagacgcacccttgatgaccaaaagctgcacaactgaggggtgtttaaggttctgctaagtgaatgtgcatatgtttgggtcttagccagggcctggtctcagattggatttcccataccctagaagtgaggctggatcctggtcctattgagcgctaaagactccaccaataactgaagtcaagcaaaaattccaaatgcaaagcattcataggacaggttttgtgctcaattcggaacatagaccagaccatcagcaaacagacatcttacagcaaagaaatccctctaagcatccaggagaatgcacagatggggctgcgcatctactcagcaccagcgtacgcccatcagcacactggcattcactcgccagcatgaacagtgatgtcgaggagttgaagcccacatgcccaaaatatctcttgctccatatcactctactatcattgtccctttctctgccttcacacaaagcccgacagggtttcttcagggctgcagacatggtctccacagccacaggcttaggaaggcaagtctcattggggagaaagcagaactttgatccccagggcaagaagtaagggcgactgggtttcctgaccctccggcccagctcatctagagcagactgtccactgatcatcttcttcaaccaggccctgaagaaggcacctcgaggcttgtgactctgcagcatctggcaagctggatggatcaacataggcctgggtgaagatggggctcacgaaaatgggcagctattgggtacctataaataggaacagaaatgccacacaggccaccccagccagcttgggaggggctaaaggcaaggcagagactgctggatgcctcagatgagagctgacaaccccaggtcttaggaaagacagggatcccaaactccaggccaaaagcagtgacaactccagcctcttacttgggaaggatttgggactgagggaagagggaagaccgtgccgtcttcacaaaaagtacctaccactttgctccatttttctgatacctacnngtacaggaaacagaaaagccagcc

SEQ ID NO: 252372 - DNA, 334 bp, Homo Sapiens
tgggtgaaaaatggggcctcacgaaaatgggcaagctattgggtaccctataaatatggacaagcaaaatgccacacaggcccacccccagcccagcttgggaggggctaaaggcaaggcagagactgctggatgcctcagatgagagctgacaaccccaggtcttaggaaagacagggatcccaaactccaggccaaaagcagtgacaactccagcctcttacttgggaaggatttgggactgagggaagagggaagaccgtgccgtcttcacaaaaagtacctaccactttgctccatttttctgatctcctactggtacaggaaacagaaa

SEQ ID NO: 252373 - DNA, 632 bp, Homo Sapiens
  misc_feature (48)..(48): n is a, c, g, or t
  misc_feature (85)..(85): n is a, c, g, or t
  misc_feature (122)..(122): n is a, c, g, or t
taaatttccccacgaacactaagaatttcctacgatcccacgaggaanctgccttatttagttgcccaaagtaggaaattggtgnaagcccaacgtaagtcatagcccagagagatggcttncgaccccgtgggtccatatattgctgcatatgtgtggcacagaatgacacttgctctggggtaagggccagtggttacactgccagaaagtggtagagctgggacttgaacctatgatcctcttatgccaaagagttcctctattcactgtgctgtttgattaccaagtggatccctaaagactccaataagttagcgtgtgggtgggtggctccagatagtgtctggaagaccacatcattttctttttgtaacagctttgtcgaggtatgattgataaagaattgcacctttaatgtgtacagtttgatgagtttagacaattggatgagtttgtgcaaaacgataccatcatgtatgtgaccctttgtaatctggtttctgcttaattgttttccctttcactttctgttactatcttcttaccttatgctttaggtattaggaaaatctgttttctcaagttcctttgcacacacacttgcctttgcctgaaacacttaggcgttc

SEQ ID NO: 252374 - DNA, 1340 bp, Homo Sapiens
  misc_feature (681)..(681): n is a, c, g, or t
  misc_feature (695)..(695): n is a, c, g, or t
  misc_feature (884)..(930): n is a, c, g, or t
gtttgaacagaatgccagtaccttccttcaatggatcctggaaaccagggcttactttctggatggatcattgctcaaagaaacaggaactctggaatctcagctggaagcaaataaaagaaaacagaaggagatccaggcgatgaagcgtcaactaaccaagattgtggacctgggggacaacttggaagacgctctgatccttgatatcaaatacagcaccattggattggctcagcagtgggaccagctctaccagcttgggttgcggatgcaacacaacctggagcaacagatccaggccaaggacaccaaaggtgtgagtgaagagactctaaaggaatttagcacaatctataaacactttgatgagaatttgacagggcgcctgactcacaaagagttccggtcctgcctgagaggactcaattactacttgcccatggtggaggaggatgaacatgagcccaagtttgagaagttcctggatgctgtggatccagggaggaagggctatgtctcactggaggactatactgctttcctgattgacaaggagtcagaaaacatcaagtccagtgatgaaatagagaatgccttccaagccctggcagagggcaagtcatatattaccaaagaagacatgaagcatggcccttaccccagagcaagtgtcattcntgtgccacacatantgcagcaatatattggacccacggggtcgaaagccatctctcttggctatggactacgttggcttcaccaattcctactttggcaactaataagcagctcctcgtggatcgtagaaaatcttagtgtcgtgggaaatttactgggggggcaaagagtacaggcaaatgtggaagataaagatggcctcnnnnnnnnnnnnnnnnnnnnnnnnnnnnnnnnnnnnnnnnnnnnnnncatattacatttattgtaggatcttaaaaaatctcaagggtgggagatagaaaggttaatagagttggaggagtggaagctattttgtatgcaactagtcactgctgaggggtgtcaaagtttctatttttatttgttctgttttgcacgtctttatcattttgctttattccgattatagaataaagtaattctttttaaaaatattttttggggcaaagttaagtaaaatgttgagcttctatatttctgggaactgtactcatataagagtgggcagctaattttactgtaaagaagggccatggtatagtagataaataaaatccaaggcaattttcaaacaatttttttaaactttggaatgtgtttaaatttaaatttgaaaataaagatatttgattttctgg

SEQ ID NO: 252375 - DNA, 1448 bp, Homo Sapiens
  misc_feature (109)..(194): n is a, c, g, or t
  misc_feature (196)..(196): n is a, c, g, or t
  misc_feature (198)..(198): n is a, c, g, or t
ggggcggccgcaagacctacacggtacgcgtccccaccatcttcccgctgcgcggcgtcaatgagcgcaaagtagcgcgcagacccgctggggccgcggccgcccgccnnnnnnnnnnnnnnnnnnnnnnnnnnnnnnnnnnnnnnnnnnnnnnnnnnnnnnnnnnnnnnnnnnnnnnnnnnnnnnnnnnnnnngngnagtcctcaccctctgcctccactgcccagactgcccagctgcagccgaacctggtatctgcttccgcggccgtgcttctcacccttcaggccactgtagacagcagtcaggctccgggatccgtacagccggcgcccatcactcccactggagaaggcgtgaagcccgtcgatctcacagtgcaagtggagtttgcagccgcagagggcgcagccgctgcggccgccgcgtcggagttacaggctgctaccgcagggctggaggctgccgagtgccctatgggccccccagttggtggtggtaggggaagagggcttccctgatactggctccgaccattcgtactccttgtcgtcaggcaccacggaggaggagctcctgcgcaagctgaatgagcagcgggacatcctggctctgatggaagtgaagatgaaagagatgaaaggcagcattcgccacctgcgtctcactgaggccaagctgcgcgaagaactgcgtgagaaggatcggctgcttgccatggctgtcatccgcaagaagcacggaatgtgaactggtgccccggcagcctgctggactcccagaccccatccagccaggggaccgcaggccattgttgaactcctctatactcctgggcactggttgacagtactgaggcttaaggcagctggactctcttgctggtgacctggcatcctcaattgtttcctcctgaagtggaagctggggccttagactctgccctggtgacaccagcaattatgactttgtctacccttcctccccagttattgttgcagattctggttaagcagaggcttcagaaccactgaacttgaaacttaccctctagggatgcaggtgggatgtccagggactataggtttgggaaaaccataccttaaggttggtcagcagtcagacaactctaatgtgtgtagtgataagagattcaagtaacatcagttctcctccttttcatgcttttccttcccaggtgcagcctgtgattctgatggggactggtaaatctgtgcctctgcctcctaggacttattttcccaggaggccatttacaaggggatctggatgacctgctgatggagatccagcttgccagggacttaggtttatcctgttttgtttgctactggttacaaattctattttctgtacaattagtcagactaaagttttcactgtgtttgtttggcaaaacaaattaaacaaaaagtaaggtttctacc

SEQ ID NO: 252376 - DNA, 918 bp, Homo Sapiens
  misc_feature (37)..(37): n is a, c, g, or t
  misc_feature (41)..(42): n is a, c, g, or t
  misc_feature (48)..(48): n is a, c, g, or t
  misc_feature (56)..(56): n is a, c, g, or t
  misc_feature (61)..(61): n is a, c, g, or t
  misc_feature (787)..(787): n is a, c, g, or t
  misc_feature (825)..(825): n is a, c, g, or t
  misc_feature (866)..(866): n is a, c, g, or t
ctgctcccacccgcccactccccatcgaacccctttngaanncctggngaattcgntctantttaccgacaccttcgggctgcaggaattcggcacgagctagccctctttggtcctccttgacgtcccgggcctgtgggcccgctttctgccgagatgccgaaggtcaagtcgggggccatcggccgccgccgcgggcggcaggagcagcgccgggagctgaagagcgctggaggactcatgttcaacacggggattgggcagcacattttgaaaaatcctctcattattaacagcattatcgataaggctgccttaagaccaactgatgtagtgctggaagttggacctggaactggcaacatgactgtaaagttgttagaaaaggcaaaaaaggttgttgcttgtgaacttgacccaaggctagtagctgaacttcacaaaagagttcagggcacgcctgtggccagcaaacttcaagtactggtgggtgatgtgctgaaaacagatttgccattctttgatacttgtgtggcaaatttgccttatcagatctcttcaccttttgtcttcaagctgttgctacatcgaccttttttcaggtgtgctatacttatgtttcaaagagaatttgccctccgactggttgcaaaacctggagataagttatactgcagactctcaattaatacacagctgttggcacgtgtggaccatctaatgaaagtgggaaagaataacttcagaccaccgcccaaggtggaatccagtgttgtaaggatagaancctaagaatccaccaccaaccatcaattttcaaggaantggggatggtctaagtaaggataacccttttgttagggaanaaacaagaacccttctcctggctggcattttaaaatccaagtggcaggtgcc

SEQ ID NO: 252377 - DNA, 834 bp, Homo Sapiens
  misc_feature (103)..(159): n is a, c, g, or t
  misc_feature (723)..(773): n is a, c, g, or t
cgagactatcaggatccggagacggaaatgtccgaaggccgcagtacttgaccctgtattttgggagtcgaacggagaatggaaactgaaagtggaaatcagnnnnnnnnnnnnnnnnnnnnnnnnnnnnnnnnnnnnnnnnnnnnnnnnnnnnnnnnncggtcacgagttaaacaggtgcttgcagatattgctaagcaagtggacttctggtttggggatgcaaatcttcacaaggatagatttcttcgagaacagatagaaaaatctagagatggatatgttgatatatcactacttgtgtcttttaacaaaatgaaaaaattgactactgatgggaagttaattgccagagcattgagaagttcagctgttgtagagcttgatttggaaggcaccagaatccggaggaaaaaacctctgggggaaagaccaaaggatgaggatgaacgcacagtgtatgtggagttacttcccaaaaatgttaatcacagctggattgaaagagtatttgggaaatgtggcaatgttgtttatataagtataccacattataagtctactggagatccaaagggatttgcgtttgtggaatttgaaacaaaagaacaagcagcaaaagcaattgagtttcttaacaacccaccagaagaagcaccaagaaaacctggcatatttcctaaaacagtgaaaaataagcccattccagccttaagagttgtnnnnnnnnnnnnnnnnnnnnnnnnnnnnnnnnnnnnnnnnnnnnnnnnnnncaatatccaagccaaagaagaaaacatgggacacaagcaacaccagccttcagttaaaatt

SEQ ID NO: 252378 - DNA, 415 bp, Homo Sapiens
  misc_feature (115)..(171): n is a, c, g, or t
ggggaaagtaaccgagactatcaggatccggagacggaaatgtccgaaggccgcagtacttgaccctgtattttgggagtcgaacggagaatggaaactgaaagtggaaatcagnnnnnnnnnnnnnnnnnnnnnnnnnnnnnnnnnnnnnnnnnnnnnnnnnnnnnnnnncggtcacgagttaaacaggtgcttgcagatattgctaagcaagtggacttctggtttggggatgcaaatcttcacaaggatagatttcttcgagaacagatagaaaaatctagagatggatatgttgatatatcactacttgtgtcttttaacatgaattgactactgatgggaagttaattgccagagcattgagaagttcagctgttgtagagcttgatttggaaggcaccagaatccgggg

SEQ ID NO: 252379 - DNA, 516 bp, Homo Sapiens
aacaaaaaacatttatttatatttttaagatggaatttatttgagaaacgtataaaaacacaacagaacccttcctaggccactttacacaatcaataggcaagaataacatgcatatatttgcaagcgtaaaactcaggtatgctaacgatagtctcacgggtataatggtaatgagcagatgagttgtatttgtaaagaaatgggtcaaaaagcaaaatgtataaaagcgtggttggtaactgggtgaactcagctttataacttaggtcatctggaatactgtgacagacaacctaagtcttttgaccagattcatcaaaagctgggatgggtcaccatgtaatattcagtcaaagagctgagatcctaaggaattttctctttcccaaatgcaaatgtgcaaaaggatatcttctcatttattgaggaaattttaatgtttttatgtacatgtacaatgcttacacacaaagtcagtgttgtgataatacactcttgtggagtcaaatttgc

SEQ ID NO: 252380 - DNA, 439 bp, Homo Sapiens
gagatgatgtgtctctctgtcaccaggttggagtgaggaaattagttaatgtggatgaatgacgttacccatggagaatgaagtaagtagctagaagacaaaagcctcagaacacataaatctcaatgggtattgagtagaggactcagagctctgagataattggagctcatggctatcctagaacttggataacataaagttcttgtttctacaaagtgtgtatcctttccatatgtgagaactgtgaggaagtacaaacttggaacaaaagaaatagtaaggtaatcttagaaagatgttgaaaagaaagctatggtggcatcttaactgtttcactgcctggcaatctatatgtattgtcactttgggacgcttatgattccacatgaagtggataaccagctcatagttcttgtggtactgaaaaccaagtatt

SEQ ID NO: 252381 - DNA, 1267 bp, Homo Sapiens
  misc_feature (1152)..(1153): n is a, c, g, or t
aggtcacctgggaagagtctgcagagcctttgcccgccagcgccttcgctctttggctccctgagttagtccggttgtttgcgatcgccgcggccggggctgcgaaccgaagggctcgctccgcgccgcctgggtctctacctcatccgtaggtgtggccctgatggtgtggcaggctctggactcctaaagctctggagcgaatttaagattttattcatgtgcatggcatagaagatgaattcttccacttccaccatgagtgaagagcctgacgctctatcggtagttaaccagttacgggatctagcagcagatccgttaaacagaagagccatcgtccaggatcagggatgtctgcctggccttattttatttatggaccatcccaaccctccagtcgtccactccgctttgcttgctcttcgatacttggcagaatgccgtgcaaacagagaaaagatgaaaggagaactgggtatgatgttgagcttacaaaatgttatacagaaaactacaactccaggagaaacaaaacttctggcctctgaaatctatgacattcttcagtcctccaatatggcagatggtgatagttttaatgagatgaattcacgtcgaaggaaagctcaatttttttctgggaactacaaacaaacgtgccaaaacagtggttttgcatatagatggccttgatgatacgtctcggagaaatctatgtgaagaggctttgttaaaaattaaaggtgttattagctttacttttcaaatggctgttcaaaggtgtgtggtgcgaatccgttcagatttgaaagctgaggctttggcatcagcaatagcatcaaccaaggttatgaaagctcagcaagttgtgaaaagtgaaagtggagaagagatgttggtcccattccaagatactcctgtggaagttgaacagaacacagagctacctgactacctgcctgaggatgagagtcccacaaaggaacaggacaaagcggtgtcccgggtcggctcacacccagaaggtggagctagctggcttagcacagctgcaaactttttatccagatcattttattgggtgacttccactttggggcttcaaggactggtgtgaacccaacaagggggccaagtttttccattggnntggggtggaactggccaagtgccaattttgcaataaggttatccatggaaaaagtttttaaattatacccgattcgccttatggcttgccatttttcaccttttttaattgggc

SEQ ID NO: 252382 - DNA, 1252 bp, Homo Sapiens
  misc_feature (67)..(79): n is a, c, g, or t
  misc_feature (91)..(143): n is a, c, g, or t
cccaaaaatatttccccccccaagcggggggggtgtttcccacaaaaaagagggaaattgggggggnnnnnnnnnnnnncccacaaccccnnnnnnnnnnnnnnnnnnnnnnnnnnnnnnnnnnnnnnnnnnnnnnnnnnnnnaaaaccagggccccttggccaattttccaaaaaaattccaaaaacccaatcggttcttttggccaacatccctttcaaggaaagtttttcctagggaagcccttcccaacccaggcccaggggaaggcaggtaattttcctgaaagagggttccggatctcctgggtgtatccacgagtcacttgtctccgatcctcagagagaattagttcgtgatgagctgtatctggatccagagtcacactaacttgatgactccttaacattttcttcacatcgaagtaaagcttggaaacattgcacatagtatgaagttccaaggagacagcctctgatgtttccgagcttcacagcccaactcctagaataagcagaggcgagagatttcttcagaggtgcattccatccatttctatatacgcacacccctcccctcctgcattcaaacaggacttacctgctcaaagtgtcattcacattctataaagaaacaaaaagaaaaggtgagcatgggaacatcggtatttcatggggcttgtcatgcagggctattcttctttgctttacccgaagaagtaaagagagttaccctagtcttagtcttagatattgatggatactcaaacaaagtaattcccaccagtcttaggtattgatggatacccagatggaataattcctaccagcttctgggagattcagcatggcaggatgtttatcaacatttgcatctattctcatccttgctgaagtctgagggccaggagctttgtccatgctccctctgtaaggactagcttttggtgatcggatttccttcacagtgagcccagattagagaacacttatcataaaggtccttagtggtgaatctgtgcacagccctgagactgggccactgccactaagatggtggtagcaggtatcacacagtggtaaagcaatcatgctatacactcagccttacagtatagtcaccaatcctgttagttagaaccagaattaatggctccagatgtttatcttcctacagataaagctgtagattgtaccataacagctctggagcaagggttctacaagcaaatcagggaaaaggttatcactca

SEQ ID NO: 252383 - DNA, 1468 bp, Homo Sapiens
ggtgagagggcacggggaaaaggtggctctggccggggtggctcggtttcctggggctatgtaactgagctcgtcgacttaggggtccttcttcgctgccctcgccgcgtgctagcagggagtttccgctcgggagagagactgtcctcacgcccgctgcgcctcctcgacggcagagcaggcttgctcgcccgtgggagcgtcccggccgagaagccctgaggggggaggggaggccattttgtcccgaccgactccccggaaccgggcggagcggctgggagaggctgcggagccgcggtcgccgccctcggaggcactggacgccgccactgtcggggcttcctcaaagctgttcgtaggtcgcccgcgccgtctcgagcctttttcccacgcttccccggtcctccggcctgagaacgcccgagtgaggagttggccgtagtgagagggaccgatcccttggggccgccggcggcgagagcccgagccgctcctcccaatggcgaagaagacgtacgacctgcttttcaagctgctcctgatcggggattccggagtggggaagacctgcgtcctttttcgtttttcggatgatgccttcaatactacctttatttccaccataggaatagacttcaagatcaaaacagttgaattacaaggaaagaagatcaagctacagatatgggatacagcaggccaggagcgatttcacaccatcacaacctcctactacagaggcgcaatgggtatcatgctagtatatgacatcaccaatggtaaaagttttgaaaacatcagcaaatggcttagaaacatagatgagcatgccaatgaagatgtggaaagaatgttactaggaaacaagtgtgatatggacgacaaaagagttgtacctaaaggaaaaggagaacagattgcaagggagcatggtattaggttttttgagactagtgcaaaagcaaatataaacatcgaaaaggcgttcctcacgttagctgaagatatccttcgaaagacccctgtaaaagagcccaacagtgaaaatgtagatatcagcagtggaggaggcgtgacaggctggaagagcaaatgctgctgagcattctcctgttccatcagttgccatccactaccccgttttctcttcttgctgcaaaataaaccactctgtccatttttaactctaaacagatatttttgtttctcatcttaactatccaagccacctattttatttgttctttcatctgtgactgcttgctgactttatcataattttcttcaaacaaaaaaatgtatagaaaaatcatgtctgtgacttcatttttaaatgtacttgctcagctcaactgcatttcagttgtattatagtccagttcttatcaacattaaaacctatagcaatcatttcaaatctattctgcaaattgtataagaataaagttagaattaacaattttaa

SEQ ID NO: 252384 - DNA, 782 bp, Homo Sapiens
  misc_feature (533)..(580): n is a, c, g, or t
atgagcatttattttccctttgtgtgtaccaacactctaagaacaatacaagagcccccacttgtgcttctgaaaaacaagtggaaaaacttgtgggttgcatggaaagaacttcacaagtaaattacttgaggaatccacaaagcagtattgtgggtggcattgtcagaagagtgacagaatggtaatttaccagttattaccaatgtctagcaaaatttacaaactcttgcattttagacctctagacctttgttacctgcattttcttagcccaaaatatcttcattccccttctctgcctggctacagcctatgtggtcttctatgtctcagcttaagaattactggctgcagaaagccaccctcaacaccctcttctattcttgcatcaccctccatgcctcctactacagcatttatcacactgcattacagttgtcattgtatgtggctcatgtccctactagacattaaatttttttgaagaattgcatcttattcatttttgtttcctctagaccttagtcctnnnnnnnnnnnnnnnnnnnnnnnnnnnnnnnnnnnnnnnnnnnnnnnngtctttattaaagatgttaatcaacttgaaaaccattatacagccaattcacattattcttgagttctgtatttgcaaatttgcctacttcctaaaatatatgtgtaattccaaaatcaataaaggggaaatttgagtcaccctacacacattcccagtcgaggtcaaacaaggcaacattatggcttctggttcaattcac

SEQ ID NO: 252385 - DNA, 1254 bp, Homo Sapiens
  misc_feature (578)..(641): n is a, c, g, or t
tgtgtttatattagttaacttgtgatttagttctttcatcaagctacacagctctaattcgtgcatggttctctgaagctgtctcttttccttttgaagttgtacctgaagttcttcaagttcatttacagtagtggcatgttcctttatcttctgttctttctgaagtttttcagcttctaattctttgtctaccattgctttggctctctggacttctaaaatctgtacttctaataatttggcattagactgtaatgtctcaatacgagccaggagatcttcattatcagaatttattgtttcacactgcaaagtcgaatttcttaattgtcttgtaaggtcttcaatacgatgctcaaaattattagcacgttctttttccacatccagttgctctgactgcttttcatattctaataaaagattcttatagctttctgctccttgaatgagatctctcatggaagcagataactggtccttttctgatcgaagagattcaagttcttccttcacagtctgggtctcttttctgctggaatctagctctttctttgcctttacggcaactaatnnnnnnnnnnnnnnnnnnnnnnnnnnnnnnnnnnnnnnnnnnnnnnnnnnnnnnnnnnnnnnnnccaactcttttactgaaaacagaggatcattttttacagaaggtgattttgctaaggaatcctttaatagtatcaactctgctctcctatctcgtaattctttttgttctagtagtggctttaggttttcatgttcctttataaaacatttttctttttcattatggatttcacttttgctacatgtttgagatacttcttcaacttgaattaaaagattctgattttcaagccttgttttttcattagcattcttcatttctagaaaatcaaactgcagggcctctttttctgactgtatttcttctaactctttccttaaaagaactttctcttgctcatagtctctcaataaagacttaagttcttcacactgaactacactctcttcttgaaggcacttaatctctttttctaactctaatactttttcatcacgctgaaaagccaggttgcatttttcctcatttatttttgccaaggattcaccgactgcctgtaggagattaacaacatctttctcttcactgtcttctgaaacttctgatcccatttctttaagaaaaccatacaactgagttttaacaaataacttctgaacttgctcattttc

SEQ ID NO: 252386 - DNA, 443 bp, Homo Sapiens
ccatgttctttcctacaggttggttgagaagagtaccctgaagcgcaaccataatgcatgttctcttgaattttatacaataactttacatcagagatgtaaccattactcaggtcaggcttagtgcattttttgaagcaccttggctctggagaccagccttctgttgtacacgtggtttgctcttcttgtcttccactttcagtggtataaccagccaagcagaaaaatgacaattttttgtctatgctcattggaaagtaaaagcttttaaaagtatagtaatattgggcaattcttccattttccacatgaggaaaaccacagggtttctcttctgcatagagttctcctgagattatcaatatgatgataaaagtcaggtttttcaacctcatcttcagtggtgtgcttcacaaagattttaacaattctaagcactc

SEQ ID NO: 252387 - DNA, 1628 bp, Homo Sapiens
  misc_feature (1543)..(1543): n is a, c, g, or t
  misc_feature (1555)..(1555): n is a, c, g, or t
  misc_feature (1562)..(1562): n is a, c, g, or t
  misc_feature (1613)..(1613): n is a, c, g, or t
ggatattggagcagcaagaggctgggaagccatcacccaccttgcactgagaaaagaagacaaaggccagtatgcacagctttcctccactgctgctgctgctgttctggggtgtggtgtctcacagcttcccagcgactctagaaacacaagagcaagatgtggacttagtccagaaatacctggaaaaatactacaacctgaagaatgatgggaggcaagttgaaaagcggagaaatagtggcccagtggttgaaaaattgaagcaaatgcaggaattctttgggctgaaagtgactgggaaaccagatgctgaaaccctgaaggtgatgaagcagcccagatgtggagtgcctgatgtggctcagtttgtcctcactgaggggaaccctcgctgggagcaaacacatctgacctacaggattgaaaattacacgccagatttgccaagagcagatgtggaccatgccattgagaaagccttccaactctggagtaatgtcacacctctgacattcaccaaggtctctgagggtcaagcagacatcatgatatcttttgtcaggggagatcatcgggacaactctccttttgatggacctggaggaaatcttgctcatgcttttcaaccaggcccaggtattggaggggatgctcattttgatgaagatgaaaggtggaccaacaatttcagagagtacaacttacatcgtgttgcggctcatgaactcggccattctcttggactctcccattctactgatatcggggctttgatgtaccctagctacaccttcagtggtgatgttcagctagctcaggatgacattgatggcatccaagccatatatggacgttcccaaaatcctgtccagcccatcggcccacaaaccccaaaagcgtgtgacagtaagctaacctttgatgctataactacgattcggggagaagtgatgttctttaaagacagattctacatgcgcacaaatcccttctacccggaagttgagctcaatttcatttctgttttctggccacaactgccaaatgggcttgaagctgcttacgaatttgccgacagagatgaagtccggtttttcaaagggaataagtactgggctgttcagggacagaatgtgctacacggataccccaaggacatctacagctcctttggcttccctagaactgtgaagcatatcgatgctgctctttctgaggaaaacactggaaaaacctacttctttgttgctaacaaatactgggaggtatgatgaatataaacgatctatggatccaggttatcccaaaatgatagcacatgactttcctggaattggccacaaagttgatgcagttttcatgaaagatggatttttctatttctttcatggaacacagacaatacaaatttgatcctaaaacgaagaaaattttgactctccagaaagctaatagctggttcaactgcagggaaaaattgaacattactaatttgaatgaaaaacacatggtgtgagtcccaaaaggaggtggttttccntgaaagaactgntctattntttctcagtcattttttaaccctctagaagtcactgggatacacagaatantaatcttaattttat

SEQ ID NO: 252388 - DNA, 1129 bp, Homo Sapiens
  misc_feature (852)..(852): n is a, c, g, or t
  misc_feature (888)..(888): n is a, c, g, or t
gaaaccagtccagagacgagcaggtcttctgacgcttttaccactcagcatgctctccgtcaagcgcagatgtctaaggagctggttgagttgaataaagcgcttgcactgaaagaggccctggctaggaagatgactcagaatgacagccaactgcagcccattcagtaccaataccaggataacataaaagagctagaattagaagtcatcaatctgcaaaaggaaaaggaagaattggttcttgaacttcagacagcaaagaaggatgccaaccaagccaagttgagtgagcgccgccgcaaacgtctccaggagctggagggtcaaattgctgatctgaagaagaaactgaatgagcagtccaaacttctgaaactaaaggaatccacagagcgtactgtctccaaactgaaccaggagatacggatgatgaaaaaccagcgggtacagttaatgcgtcaaatgaaagaagatgctgagaagtttagacagtggaagcagaaaaaaagacaaagaagtaatacagttaaaagaacgagaccgtaagaggcaatatgagctgctgaaacttgaaagaaacttccagaaacaatccaatgtgctcagacgtaaaacggaggaggcagcagctgccaacaagcgtctcaaggatgctctccagaaacaacgggaggtcgcagataagcggaaagagactcagagccgtggaatggaaggcactgcagctcgagtgaagaattggcttggaaacgaaattgaggttatggtcagtactgaggaagccaaacgccatctgaatgacctccttgaagatagaaagatcctggctcaagatgtggctcaactcanagaaaaaaaggaatctggggagaatccacctcctanactccggaggcgtacattctcccttactgaagtgcgtggtcaagtttccggagtcagaagattctattacaaagcagattgaaagcctagagactgaaatggaaatcaggagtgctcagattgctgacctacagcaaaagctgctggatgcagaaagtgaagacggacccaaaacaacgctggggagaatattgcccacatttctggaagcccagtgttgccctggaaaaatttggattgg

SEQ ID NO: 252389 - DNA, 1698 bp, Homo Sapiens
ggtacggtccggaattccgggatatcgtcgaacccacgcgttccgctggtctcctccaaaatacaggtcagcaaacttgaaagcagcctgaaacagagcaagaccagctgtgctgacatgcagaagatgctgttggaggaacgaaatcatttggccgagtatagagacagagttacaagctgagctggtcagaatggagcaacagcaccaagagaaggtgctgtaccttctcagccagctgcagcaaagccaaatggcagagaagcagttagaggaatcagtcagtgaaaaggaacagcagctgctgagcacactgaagtgtcaggatgaagaacttgagaaaatgcgagaagtgtgtgagcaaaatcagcagcttctccgagagaatgaaatcatcaagcagaaactgaccctcctccaggtagccagcagacagaaacatcttcctaaggatacccttctatctccagactcttcttttgaatatgtcccacctaagccaaaaccttctcgtgttaaagaaaagttcctggagcaaagcatggacatcgaggatctaaaatattgttcagagcattctgtgaatgagcatgaggatggtgatggtgatgatgatgagggggatgacgaggaatggaagccaacaaaattagttaaggtgtccaggaagaacatccaagggtgttcctgcaagggctggtgtggaaacaagcagtgtgggtgcaggaagcaaaagtcagactgtggtgtggactgttgctgtgaccccacaaagtgtcggaaccgccagcaaggcaaggatagcttgggcactgtcgaacggacccaggattccgaaggctccttcaaactggaggatcctaccgaggtgaccccaggatagagcttctttaatcccgtctgtgccacccccaatagcaagatcctgaaagagatgtgcgatgtggagcaggtgctgtcaaagaagactcccccagctccctccccttttgacctcccagagttgaaacatgtagcaacagaataccaagaaaacaaggctccagggaagaaaaagaaacgggctctggccagcaacaccagcttcttctctggctgctcccctatcgaagaagaggcccactgaagttggagtcatcatctctacccccagtctggcttgggagatgctttcaggttgcagccagaaggggtttttttaaatgacttctctggatttcaggtttcttgctgttgaaaaaaggaacaaagcgttactgaaaagaaggtaacctttgttggatgtgggccttagcctccaggtccagactactactctatgttctccagaagggtgctaagtcacctactgaagagagaaccaactgactttcctattgactcatcaggaaccagtcctcagtctggtcaagttgtttcttatttgtgagcagttcaggctatctcctgatggggatgaggccgaggctttcttatcttttggttgtctctgcttaatggaggagcctggcctaggatggaggcctggcttagatctttcattccacctcaggaatgaggttgtgatctttcctgtcctgaccctctctgaattatgtttcaatagtactcttgattgtctgccatgttgttgaagcaaatgaattatttttaaatgttaagtaagtaaataaaccttagcccgtctactgttaaaaa

SEQ ID NO: 252390 - DNA, 538 bp, Homo Sapiens
  misc_feature (14)..(14): n is a, c, g, or t
  misc_feature (80)..(80): n is a, c, g, or t
  misc_feature (82)..(82): n is a, c, g, or t
  misc_feature (104)..(104): n is a, c, g, or t
  misc_feature (108)..(108): n is a, c, g, or t
tacatgctccctgncctgaatgtatcctctttttaaaccaacagtacaactcccattatactatatacattttgttgtcntntcatcatcaaaaattatatgcntgtngttttcttcccattcagtttaagagactgtagacatgaacaaatactgccctaggaaaatagtttacctggtattggtactgaatgggctgcagttggctgtcattcctggagtcatcttccttagccagggcctctttcagtgcaagcgctttattcaactcaaccagctccttagacatctgcgcttgacggagagcatgctgagtggtaaaagcgtcagaagacctgctcgtctctggactggtttctacttgctggaaaaaaatcaggataatgatttataagagaaacaagcaaatggagttccttaggcactatttcatcaagtctcacaggcacttctccattaacaatatctctgttcctttacaacagtggctctgcatacatttgttttaagtatctgaaataaatagctagcctagttc

SEQ ID NO: 252391 - DNA, 1038 bp, Homo Sapiens
aatgaatgtccttcataaaatattggatgcagcgtaacactatccaaggcagtgacttcagctttatatacatataaaatatagttagttttaaaattattgacatttatttaaacttttagattggattgtttgctatgctctgtgtgaggatacataatctttcagtaaactgtatttttaacttttccataagctgattttggttcattttatcaacgtaagcacaccctgttcatagggaaaataaaccttgggttataagcattagcctgagagacaatgaagccacttaacctaatttatagctttcgactgttctagtttccagagaggaaagcctttacaaattactctcagttctttaggggcagaaggcttgtttcaagaggtttgacagaagaaaggaatatatgaacttaatgagatgtcgacttggttcaggtctaaaaatgagggcaaaacactaaggctctagcagtgacttgttcactaaaaagagagagtcctgtccccagacggttagtacaaagccttggatacagtttgcttgtaatatttttaataatgtgaggagtacagtgttttctaattcattcaagtatatatgatttaaacctgggctactgacacacacacagtagccattagttagactcttcttagtgaatatcaggaacatcccatctgtgcttaaccagaatccagcaagtcagcacacaagtgattttattgttattttgttgtatttacttgcatttgttgtatttactttcatctgcagcatttggagtttaaaaataatgtaaagggttctagtagaaatagtgtcctaaggccaattacctaccatactaacaatcagcagataaaattctggacgtgagattccttataactctaattatacctgaggttgagcaagaaattgtcttcctttagaaaatctcattcaagtcaggttcttctctacagttcaaaatgagaatggatttacttaactagcatttagccagctttttcttgccctggagaaaa

SEQ ID NO: 252392 - DNA, 837 bp, Homo Sapiens
ggggccgccgtcgtctttctctgtctcggctgaggcagccatctttctcttgccgcgtgctggtgttggaggaccctcccagcttcagatttaccaacagcatgaatcaagaaaagttagccaaacttcaggctcaggtccggatagggggcaagggtacagctcgcagaaagaagaaggtggtacatagaacagccacagctgatgacaaaaagcttcagagttctctaaaaaaactggctgtgaataatatagctggtattgaagaggtgaacatgattaaagatgatgggacagttattcatttcaacaatcccaaagtccaagcttccctttctgctaatacctttgcaattactggtcatgcagaagccaaaccaatcacagaaatgcttcctggaatattaagtcagcttggtgctgacagtttaacaagccttaggaagttagctgaacagttcccacggcaagtcttggacagtaaagcaccaaaaccagaagacattgatgaggaagatgatgatgttccagatcttgtagaaaattttgatgaggcatcaaagaatgaagctaactaaaagtttggtttttggaagctggcatggactagatttaacaaatcagctatgtggttccaaagttttacagacatggagaacatcacctgttactagttcagtaatataaatattttgtatattaataatgctgtttgttcagcatttttcggtcatttgattttgcattttgcacttcctcccaggatatttttttggtcaaaatatgaagtattggtgcagtttgagggtgttttggtttttgattcctggttttttt

SEQ ID NO: 252393 - DNA, 684 bp, Homo Sapiens
  misc_feature (577)..(577): n is a, c, g, or t
  misc_feature (660)..(660): n is a, c, g, or t
caccagccctggagctgcagggccccccagtgtggagtgcccccacctcccgaagtggactgcctaggcctaggcttaaacaacttcttgagtcaccttccccactggatgagtcaggcacggtgcaggcaagtggggacaaaaaggacaagcaaagacgtgaaacccagccctcaagaaactctggggacatctggcatctttggtcttctctggtccctgcaatcattcctcacttggccgaccataatgtcccacaactcatcagtgttccttggcgggtggtgctgaagcactggtctcaccctaaaacatgtctggctgatggccagtcaacatgttgcaatctctttttagtttcctaggtttctgaaagagcctgcgcttgactgataccttctgtaccaccatgccagctcctctttgccttttatgtcactgcaaatatgaactgtagaggtcagtcctctaagcaggctgaatttccactccccacctggtagctgaggtgctgtcagcagaggctgggaaccacgcaaggaacctggattgctcctgcgcctctagctgcctaccncgccccaatggtgctcctcctcctgaccagagagttggagaatttcagaaagggattcttgaaatgtgaatagaaggtcctgncagaggccctcgtgacttctgtgt

SEQ ID NO: 252394 - DNA, 992 bp, Homo Sapiens
  misc_feature (662)..(662): n is a, c, g, or t
  misc_feature (672)..(672): n is a, c, g, or t
  misc_feature (702)..(702): n is a, c, g, or t
  misc_feature (725)..(725): n is a, c, g, or t
  misc_feature (728)..(728): n is a, c, g, or t
  misc_feature (747)..(747): n is a, c, g, or t
  misc_feature (838)..(838): n is a, c, g, or t
  misc_feature (870)..(870): n is a, c, g, or t
cggaaatttgggacgcaaatgtatgagcagcaggtggtgaagctgagtgaggctgcggctttggctgggcttcaggagcaacgggtgtatgcgcttcacctgaggcgctacaatgacgcgctgctcatccatgacaccgtccgcgccgtggatgccttggctgcgctgcaggatttctatcacagggagcacgtcactaaaacccagatcctgtgtgccgagcgccggctgctggccctgttcgatgaccgcaagaatgagctggcccacttggcaactcatggcccagagaatccaaaactggagatgctggaaaagatcctgcaaaggcagttcagtagctctaacagccctcggggtatcatcttcacccgcacccgccaaagcgcacactccctcctgctctggctccagcagcagcagggcctgcagactgtggacatccgggcccagctactgattggggctgggaacagcagccagagcacccacatgacccagagggaccagcaagaagtgatccagaagttccaagatggaaccctgaaccttctggtggccacgagtgtggcgaaggaggggctggacatcccacattgcaatgtggtggtgcgttatgggctcttgaccaatgaaatctccatggtccaggccagggcgtngccgggcgantccagagtgtatacgcgtttgtagcaactnaaggtagccgggagctgaagcgngantgattcaacgaggcgctgnagacgctgatggagcaggcagtggctgctgtgagataaatggaccaggccgagtaccaaggccaagatccgggatctgcagcaggcagccnttgaccaagcgggcggcccaggcagccaagcnggatgaaccagcggcacagtttcccagtggagcacgtgcagctactctgcatcaactgcatggtggctgtgggcatggcaagcgacctgcggaaggtggagggcaccaccatgtcaatgtga

SEQ ID NO: 252395 - DNA, 532 bp, Homo Sapiens
  misc_feature (443)..(443): n is a, c, g, or t
  misc_feature (461)..(461): n is a, c, g, or t
  misc_feature (484)..(484): n is a, c, g, or t
  misc_feature (491)..(491): n is a, c, g, or t
  misc_feature (503)..(503): n is a, c, g, or t
agctctgggtctggaagaccagcccagcaccagaagtcggcggtgtttccattcggtgatcagcactgaacacagaggactcaccatggagttcgggctgagctgggttttcctcgttgctcttttaagaggtgtccagtgtcaggcgcaactagtgcagtctgggggaggcgtggtccagcctggggggtccctgagactctcctgtgcagcctctggattcaccttcaaaaactatggcatgcactgggtccgccaggctccaggcaaggggctggagtgggtggcagttacaccacatgatggaagcaataaatactatgcagactccgtgaagggccgattcaccatctccagagacaattccaagaacacgctgtatctgcaaatgaacagcctgagagctgaggacacggctgtgtattactgtgtcgaaagatctnggtgaaagcaattgactnactggggccagggaaccctgggncaccgtnttccttcagggngtggcattccgccccaacccttttttccc

SEQ ID NO: 252396 - DNA, 677 bp, Homo Sapiens
  misc_feature (598)..(598): n is a, c, g, or t
agaagctgagtgacgaggaggtggacgagatgatccgggccgcggacacggacggagacggacaggtgaactacgaggagtttgtccgtgtgctggtgtccaagtgaggccggcgcccaccatgctcctgggcgcccacgcggcccacagggcaagaacccggggcctcccgcctcctcccccatccccctgcctcccctgggcactgtggcttcctcctgcgcctggttgattcagcccacctttcctgccccctcttcctccagtagccctcagtgtcaaaggtgagcttgtaggtgcctgccttcatctggtccaggacagtgaccatctgggtctgtgtagctggggagaggatgaggctgcagagatggggaccaaaagccccccaccccagctttcctgggtctgcatcccagtgggcctcagacgctgccctgccacctgtcagacttgggtgagcaaacacagtgaggctgttaggtcctgcagttccagagcagtctagggacaccactgccctgtctttaggaaatcacaacacagagaagcaaaaagggaaaaagtctcccacaatttatcccatgagcaagaaccnctttatagctggcatatatttttccagattttctctatgcataagtatatttgtttaaaaacttataaagtggattata

SEQ ID NO: 252397 - DNA, 626 bp, Homo Sapiens
ctcccgctgccagtcttcgctctaactccctcggtaggtgatgtaggaccaggggcacgtggaacttctgggccttgctggtgatggttaaaacaaccagagggacactccacagaagctctcccgctgccagtcttcgctctaactccctcggtaggtgatgtaggaccaggggcacgtggaacttctgggccttgctggtgatggttaaaacaacctccacatgtgggtagaaactttcctgccccctcttcctccagtagccctcagtgtcgaaggtgagcttgtaggtgcctgccttcatctggaccaggacagtgaccatctgggtctgtgtagcttgtcctcagctccgcccactaatggccgtggtcctccagccagcacaagcggaggcagaggaatctggctgggagccctgaggcggtgtccagcacgtgggtggtcagtatgttgtccggaggctccgtgctgctgccctcctgggggcctaggtgtcgctggaaaagcggaggcagaggcctctggctgggagccctgaggcggtgtccagcacgtgggtggtcagtaggttgtccggaggctccgtgctgctgccctcctgggggcctaggtgtcgctggaaa

SEQ ID NO: 252398 - DNA, 946 bp, Homo Sapiens
  misc_feature (895)..(895): n is a, c, g, or t
  misc_feature (900)..(900): n is a, c, g, or t
aatgtggaatgatactgtgtacaaaacaatcagaatcttcttttatctcaggtgacatcaatagcacttcaacacttaatcaaggacattcactgaacaatgccagggatacaagtgccatggatactctaccgctaaatggtaattttaacaacagctactcgctgcacaagggtgactataatgacagcgtgcaagttgtggactgtggactaagtctgaatgatactgcttttgagaaaatgatcatttcagaattagtgcacaacaacttacggggcagcagcaagactcacaacctcgagctcacgctaccagtcaaacctgtgattggaggtagcagcagtgaagatgatgctattgtggcagatgcttcatctttaatgcacagcgacaacccagggctggagctccatcacaaagaactcgaggcaccacttattcctcagcggactcactcccttgctgtaccaactcccagaagaaagtgaagtccgagggaagctgacagctatgtctcccaactgacagcagaggctgaagatcacctacagtcccccaacagagactctctttatacaagcatgcccaatcttagagactctccctatccggagagcagccctgacatggaagaagacctctctccctccaggaggagtgagaatgaggacatttactataaaagcatgccaaatcttggagctggccatcagcttcagatgtgctaccagatcagcaggggcaatagtgatggttatataatccccattaacaaagaagggtgtattccagaaagagatgtttagagaaggacaaatgcagctgggttacaagtcctttaatcattacagctaaggaattccaagggccacatgcgagtatttaattaatnaaagncaccttgggccttgacggcagcttccctcaaattctggtttgtaag

SEQ ID NO: 252399 - DNA, 1200 bp, Homo Sapiens
  misc_feature (558)..(558): n is a, c, g, or t
cggccggtatcaatggaactcagagatgaacatctaacccactagaggaaaccagtttggtgatatatgagactttatgtggagtgaaaattgggcatgccattacattgctttttcttgtttgtttaaaaagaatgacgtttacatataaaatgtaattacttattgtatttatgtgtatatggagttgaagggaatactgtgcataagccattatgataaattaagcatgaaaaatattgctgaactacttttggtgcttaaagttgtcactattcttgaattagagttgctctacaatgacacacaaatcccgttaaataaattataaacaagggtcaattcaaatttgaagtaatgttttagtaaggagagattagaagacaacaggcatagcaaatgacataagctaccgattaactaatcggaacatgtaaaacagttacaaaaataaacgaactctcctcttgtcctacaatgaaagccctcatgtgcagtagagatgcagtttcatcaaagaacaaacatccttgcaaatgggtgtgatgcggttccagnatgtggatttggcaaaacctcatttaagtaaaaggttagcagagcaaagtgcggtgctttagctgctgcttgtgccgctgtggcgtcggggaggctcctgcctgagcttccttccccagctttgctgcctgagaggaaccagagcagacgcacaggctggaaaaggcgcatctaacgcgtatctaggctttggtaactgcggacaagttgcttttacctgatttgatgatacatttcattaaggttccagttataaatattttgttaatatttattaagtgactatagaatgcaactccatttaccagtaacttattttaaatatgcctagtaacacatatgtagtataatttctagaaacaaacatctaataagtatataatccctgtgaaaatatgaggcttgataatattaggttgtcacgagtgaagcatgctagaagctgtaacagaatacatagagaataatgaggagtttatgatggaaccttaatatataatgttgccagcgattttagttcaatatttgttactgttatctatctgctgtatatggaattcttttaattcaaacgctgaaaacgaatcagcatttagtcttgccaggcacacccaataatcagtcatgtgtaatatgcacaag

SEQ ID NO: 252400 - DNA, 1323 bp, Homo Sapiens
  misc_feature (174)..(174): n is a, c, g, or t
  misc_feature (535)..(545): n is a, c, g, or t
  misc_feature (807)..(922): n is a, c, g, or t
  misc_feature (1309)..(1309): n is a, c, g, or t
gagggcgcaatgtgcgcactcttgttatccgcgataaagaggaggcgggctataatcggggagacaataagggtctatggttggtaatatcgtacgcgacgcgcacctaatttggcgaggggggatcgtcgcgcccgctaggtcgtgatagattctaaatagcggcggatgcanccaatacgaagggaaacggcactcgttgttgtttggggctcgcgcggttgttgttggtctcacgcgggcggcaagaagatgtatatctctctcgtcaagcagaggggcgggaaggtccgctctcctgacagtcgcgtgcgccggggcggacaaagtcgggggggtggcttcttgcatggatgccctcccggcggggaccatggggtggtgtgcaccagttacccccgcgacaatcagctattttttaccgcgatttgcttcgcaccccccccgcgttttttgcaacaagggagttacaaacgggggggcggtggggagaaatttttgcatttgcgatcgccgccgccctgaggcatcgccnnnnnnnnnnnaacagagccccgcagtgagggataaccgtggggacgctccgatttgaggtagttggatggaaaggggaagtcgggggggcccgccgaggcgggttttgtttttgtggaaggagagaacccgacgtgagatgtgtgtgccgggggcggccggttaggaggggaaggtaaggagaagttctctcgtcggttttgggggcgccgcgccccgaaagggagaggttttgggactttttttggggggcgatggtggccgcccggttannnnnnnnnnnnnnnnnnnnnnnnnnnnnnnnnnnnnnnnnnnnnnnnnnnnnnnnnnnnnnnnnnnnnnnnnnnnnnnnnnnnnnnnnnnnnnnnnnnnnnnnnnnnnnnnnnnnaagccatagaagaatatttattgacatggaaaatgttaacaatatacttctatatgaaatatgtaggctacaaaacagtatatacagtttaataccatttttatggaaagaaaaataaccatatatacaaaatcatgcataagaaaaaaataatataaggatgtacataccaaatattaataataatggctatctctggatagtggaatcagagggattatgtaattttcctgataaattttcctgtcctccaaacagcatccgcttcatactattatttcttgggttgtaattaggtttgatataattctcttcagaaagggctctgtttcactatatatacccccaaaggcatacttttggatgcaggcttctgccaattccccntcctaaaaggtggg

SEQ ID NO: 252401 - DNA, 1173 bp, Homo Sapiens
  misc_feature (35)..(35): n is a, c, g, or t
  misc_feature (47)..(47): n is a, c, g, or t
  misc_feature (54)..(54): n is a, c, g, or t
  misc_feature (59)..(59): n is a, c, g, or t
  misc_feature (66)..(66): n is a, c, g, or t
  misc_feature (139)..(139): n is a, c, g, or t
  misc_feature (149)..(149): n is a, c, g, or t
aagctgccaccaagttaacccttgctagaaaagcnaggacgaggagnctggttncctcnggtttgncaagaccttagggattaacggtctcggccagatacttaacactagtcccaagactaactaataaaaaagctgnaagaattagnttgatttgaaaacaaactttaagtggttacccctattcctcctgtgtaagtcccattaataagaatatcaaaaagatgtcttttggtctattggtgagtgcaagctgcccatcccagatttaaattatcagctgccccaaagatctgaaaaaaagttcaccttcctagtcaattattaatatactagaaaaatcttcagccatgttcacctggggacttttataaataattgcatcctgacccacggatggctcagtgtcctacactcataatagctaaaagcactgatggatggctaccgacattctaaatgaccaatacctttggcacaggatgtttatttccttttgcttagaaggaagaggggcaggagatgcagatgcattttctttatccatggactggatatactggccatcacaatgctactgttagtagccaaacttttccttcatagaaacaagagtactgagactgaggaggttctgctggtatcgatgagacaggggagggctacttgctctaccccagcatacatgggctcacacgatgtgcttatgccactgtacagtaacgtaggatgccacgtcctcacgcaatcagaagggaaagtgtgggtaaggtagcaacgtgaatggaagagacactttattagataaaaccctttgttcccgattcaggatgtttaatttgcttctctttaaactctgtgacttttcctggttcaaaaggacagtcatggacagcagcagaggagtgggggtctgaaaaatgtaatctttgtgtcaaggcactctgtggcctcacaactgcccccctgtcagagggatgctgccttccagccctaaagacactagggcttttcaatggacggggtgttgaagcagccagatggtaaggtcttcctgatgtcctccagattgcgaatgtccttcatgatctcctcgatatctcggcttatagtccatgatgcagcctcctgcttcttggcttcattccggacgcgtgggtcgacgatatgaac

SEQ ID NO: 252402 - DNA, 919 bp, Homo Sapiens
  misc_feature (156)..(196): n is a, c, g, or t
  misc_feature (215)..(462): n is a, c, g, or t
  misc_feature (760)..(782): n is a, c, g, or t
taagacaggtagaaaattggtgaacgattttacggtcatttaaaatgcattcaagtagggcgcagcagcacatgcctgtattcctagctacctgggaggatcgcttgagcccaagtgtttgaggccagcatgggcaacatagggagatcttgactnnnnnnnnnnnnnnnnnnnnnnnnnnnnnnnnnnnnnnnnngaccggatacagtggctcnnnnnnnnnnnnnnnnnnnnnnnnnnnnnnnnnnnnnnnnnnnnnnnnnnnnnnnnnnnnnnnnnnnnnnnnnnnnnnnnnnnnnnnnnnnnnnnnnnnnnnnnnnnnnnnnnnnnnnnnnnnnnnnnnnnnnnnnnnnnnnnnnnnnnnnnnnnnnnnnnnnnnnnnnnnnnnnnnnnnnnnnnnnnnnnnnnnnnnnnnnnnnnnnnnnnnnnnnnnnnnnnnnnnnnnnnnnnnnnnnnnnnnnnctatctgaaacaaacaaacaaaaacattttgcagtgtgggatgtaaaacccacattaatttaagataaaacagtagaccttaagcaattttgaactctgggctaggaccctcaaaataacctaggaatacatgttgacacaaggttttcagctgtttctctttcttttcctttcactagttacaatcctcttagtctcatagagttccataggtagcaattacttatgaaaaaaatgcacacaaaacttatgtctggttgattttctgaacataactcttattttatatgtgtgtgtnnnnnnnnnnnnnnnnnnnnnnntatcttcaaagagctatcatagtagttgcattaatgtatttttttcctcatagtctaacactatttctatttgttgtatagcacttatttctattcattcttaacagttaattaacaaaagagaaaaaccttggtca

SEQ ID NO: 252403 - DNA, 1137 bp, Homo Sapiens
cccccagccctggaatccactagttctggttcattctattgcatttagctctgcgatatggcttcccaatgcaggaataaagtaggctgagacagatttccacagaggaagctttcttggtataaaccaattttcccatgtctgatgctttgagggatagaagatacgaaaataactatttctgctccttctaagtataactgatggaggtgccacacattcttagctggggagaaggggacagaggaaaagtgattctaaatttgtgattcggtcttttctaactgtgagtgtgatactgggtacgtaactcagctctaactcagagcaagagtcgggtggggattaggtaagggcccagaaagccctgtctgcatgtggcaaacctaagcctctgtgctttgtggccatatatgcttctctctaaggggtttcaaagggctggaccaatgccaaatgcatgccgggaaggaagcagtggtttaagaaggttctccactggatgagcctcagtctggccttggggccactgaagggtggctagatccctgtggggcaggactgggcactgtggtcagatgtccaggggactcacaatggtgaagccagagtccttgctgctgtcgtcatcaggactggagctggggttgctggaggaagctgaggctgggcccatcagtggatctgagaacaccagtggggagcagactggggcctggcttttcccagaggtgcttctgagggtgcgaagaggctgggctggccggagaaggacccctgcactgctccatcatcactttggaaataggatgaagtatcgaatccctctatagtcacctggcgtttctaaaggctgttaatgccctacatttaaccctggcttgctcggcctggcctgcgctgacagtatgtttcgcatgtattgtcgtccttcgctcactgcctgtaaaccagacttagagcttactgttactgcagacagatgatcttcaatctgaaccactaatcagaagctacttccaatcagacacatatcttagagaattgcatataattcaattggagagaagattttggggcccccccggagtaactcgttgcccccggcacaataaaactgtgttggactcgggacct

SEQ ID NO: 252404 - DNA, 659 bp, Homo Sapiens
  misc_feature (524)..(524): n is a, c, g, or t
  misc_feature (643)..(643): n is a, c, g, or t
ctcttgagagctggctgtcctttgaaagaaagaagtaatgttctttgaaagaaagaaaaatctcttgctgtgtcaaacctcaaaatgttgctattggggttagaaggcctcctctttatgctttttaatgctctttcaaacgtgttcttttagaccagttttctaataagctttgtaaaatgtactatccaaattagaagcggatttggaaatgcaaactaacgtgcacttagatatccaagtgggtgagcttagccactcttacccatgctctttccctggtatccctggagacctgtccaagatgatttccatataccagcatagaaaatcagaatcaagagcaaactctgagactggcacaatccaagaagatttcctggctctggcttttagtaatttgggactccaactgccactgtactggactgtaatttataaatccagtagctacgcagggtggaggctgggctgaggattaccataatgaaatgtactaaatcttcatttaggtatgcaattgntgaagtgaaggcatctgctttctttacagtattcagagtccaagaacaggatgttcaccataggatgaaaagcctcataacaaagggcagaactaacactccaaatttgaatgtgtttnaaattggtgggggcac

SEQ ID NO: 252405 - DNA, 739 bp, Homo Sapiens
ggttttggttcccggttggtgcttcctgttcgcagctgcggcacttcaaggttactgactttttatgatgtttggtggctatgagactatagaagcatacgaagatgatctttatcgagatgagtcatctagtgaactgagtgttgatagtgaggtggaatttcaactctatagccaaattcattatgcccaagatcttgatgatgtcatcagggaggaagagcatgaagaaaagaactctgggaattcggaatcttcgagtagtaaaccaaatcagaagaagctaatcgtcctttcagatagtgaggtcatccagctgtcagatgggtcagaggtcatcactttgtctgatgaagacagtatttatagatgtaaaggaaagaatgttagagttcaagcacaagaaaatgcccatggtctttcttcttctcttcaatctaatgagctggttgataagaaatgcaagagtgatattgagaagcctaaatctgaagagagatcaggtgtaatccgagaggtcatgattatagaggtcagttcaagtgaagaggaagagagcaccatttcagaaggtgataatgtggaaagctggatgctactgggatgtgaagtagatgataaagatgatgatatccttctcaaccttgtgggatgtgaaaactctgttactgaaggagacgatggtataaactggtccatcagtggacaaagacattgaggcccagatagctaataaccg

SEQ ID NO: 252406 - DNA, 886 bp, Homo Sapiens
  misc_feature (404)..(412): n is a, c, g, or t
ggggggaaagcggaatctacaccttcccggccagcggtagcaactgcagaactgcaggagactatctttctagacaaggcagttgaggaggagggagcgcttgagggggactggcctggcgtgcactccgcacctcggggacattattgcgcgtggaacggctgcttttggaagactattgcccagaagaaaagatgtttggttttcacaagccaaagatgtaccgaagtatagagggctgctgtatttgcagagctaagtcctccagttctcgattcactgacagtaaacgctatgaaaaggacttccagagctgttttggattgcatgagactcgttcaggagacatctgcaatgcctgtgtcctgcttgtgaaaagatggaagaagttgccagcaggatcnnnnnnnnnctggaatcatgtggtagatgcaagggctggacccagtctaaagactacattgaaaccaaagaaagtgaaaactctatctgggaacaggataaaaagcaaccagatcagtaaactgcagaaggaatttaaacgtcataattctgatgctcacagtaccacctcaagtgcctccccagctcaatctccttgttacagtaaccagtcagatgacggctcagatacagagatggcttctggttctaacagaacaccagttttttcctttttagatctcacttactggaaaagacagaagatatgttgtgggatcatctataaaggccgttttggggaagtcctcattgacacacatctcttcaagccttgctgcagcaataagaaagcagctgctgagaagccagaggagcaggggccagagcctctgcccatctccactcaggagtggtgactgaggtttttatgtagaaggggaac

SEQ ID NO: 252407 - DNA, 454 bp, Homo Sapiens
ttttccacaatgtcagatcatttatttcagagcagttacacccagcagaggggcacaggcttaaacgccggcatattagttttcccgcacgcgagccctgcatggcggtgggctggggagccggggcggtgcgattctgccacacgccacgctctactaggcccccttactcctaattaattgcctgctcaccagactgtgagaaaataattgccactataaattttccctcctctgcataaaatattcgggggaaccagcacttaaaaaacagacttcatgaaagaagggcagcaaggcgtggatgctgcgccccccacaacccccactgcagaggacacagagaggccaggagccctcttcctggttccccctggttccaaatgagacagaaaggctcaaagagctcccaggaatggtcacagctgaaaaaaagtcgagtgagtggctgcat

SEQ ID NO: 252408 - DNA, 712 bp, Homo Sapiens
  misc_feature (601)..(609): n is a, c, g, or t
tctggtttggtactcaggctccccacagtgtgggtaatgcctaactggatggcacctttcaaggctgatgaggttgtctttttatatgttgtctctcctgaggaatcaacacttctatggcctattttcttgatgggcatgccagaggcataaggcacctcagatgccatgggtctcttgattccagatgctgaggacaaggtacaggaagggaccgcgggatcaaaggatgaaaaaccgaccgaagacgacggcccggaggaggccgacgccatcttagcagccccctccccctcagcggcctggctctctttcaatccggttcttcctcttctcggaatcgaatcttcccaacgtctctttacagaacccgcgttctgtgggccacctccccgccccctccggggcctccctcagacacgtcgagccggctcctggaccagctcaaggccacaccattcgcctggcatggggaagaactcacgtcccgcaccccctccacaagtttaaccgctttccacaggggatactttcccctttcacagaagagtaagcttaagctggctgctgggaccttgcgcccagaccaagccacatctgnnnnnnnnncgaggcatgaaaagtcccaaaggagcgaacgccccttctccgtccttcctaaccacggcctgttaatcgcccaacccggccgcttcactccgggtagccaagc

SEQ ID NO: 252409 - DNA, 1722 bp, Homo Sapiens
  misc_feature (1665)..(1665): n is a, c, g, or t
  misc_feature (1676)..(1676): n is a, c, g, or t
ggaattggtgaagaagatgagcgaactcagggcattaaactcttgaaaaccatattgaaatggctgatggcaagtgcaggaagatccttttctacagcagttacagaacaacttcagcttctacctttgtttttcaagattgccccagtggaaaatgacaatagctacgatgaactgaaaagagatgcaaagttatgtttatcattaatgtctcaggggttgctttaccctcatcaagtgcctttggtacttcaggtgctaaaacaaacagcaagaagcagttcttggcatgcacgatacacagtactgacctacctccagaccatggtattttataacctctttattttcctaaacaatgaagatgcagttaaagatatcaggtggctggttataagtcttttggaggacgaacaactggaggttcgagaaatggctgctactaccttaagcggtctgctacagtgtaactttcttaccatggacagtcctatgcagattcattttgagcaactttgcaaaacaaaactacctaagaaaagaaagcgagaccctggttctgtaggagataccattccttctgcagagttggtcaaacgccatgctggggtgctaggacttggtgcatgtgttctttctagtccttacgatgttcccacctggatgccccagctcctcatgaatctcagtgcacatctaaatgatcctcagcctattgagatgactgtaaaaaaaaccttatccaatttccgaaggactcaccatgacaactggcaggaacataaacagcaattcactgatgaccaactgcttgttctcaccgatcttcttgtgtcaccatgctattatgcatagaaagatgactagtcctcacttcaggctcttttcatcaaaaattccacaccctcaggtaccatctgtggtggctctctgcaagttttaaaactgcctctgctgagctctcatcattttggtggtttctgtgttagatctcgttagtctgcattccacagcttctcagttgccatttgatttcccaacttgtccggaagtgtttccagaatactgatcacctttgttttttgaggcatctgacaaagtcacaaagtctcagactagaaataattacccagtatgatcatggcatccaagaccagagtctcagaactcattaagaaacagtttacttggaatggagaatacccatctgtaatacaggtcctgtcatttcattcatctcaaattattttgaattcttcccaaatggctgctggatttaggtggtaataggggctgtgggccataaatctgaagccttgagaaccttgggtctggagagccatgaagagggaaggaaaagagggcaagtcctgaacctaaccaatgacctgatggattgctcgaccaagacacagaagtgaagtctgtgtctgtgcacttcccacagactggagtttttggtgctgaatagagccagttgctaaaaaattgggggtttggtgaagaaatctgattgttgtgtgtattcaatgtgtgattttaaaaataaacagcaacaacaataaaaaccctgactggctgttttttccctgtattctttacaactattttttgaccctctgaaaattattatacttcacctaaatggaagactgctgtgtttgnggaaattttgnaattttttaatttattttattctctctccctttttattttgcctgc

SEQ ID NO: 252410 - DNA, 430 bp, Homo Sapiens
agagccctcaagaacctcattaaagaaaacagtttaccctgggaaatgggagaaataccccccatcctgtaaataccagggtccctgtcatttccattccatcctcaaattattttgaaattcctccccccaaatggctgcctggatttagggtgggtaataggggctgtgggcccataaatctgaagcccttgagaaccttgggtctggagagcccatgaagagggaaggaaaagagggcaagtcctgaaccctaacccaatgacctgatggattgctcgacccaagacacagaagtgaagtctgtgtctgtgcacttcccacagactggagtttttggtgctgaatagagccagttgctaaaaaattgggggtttggtgaagaaatctgattgttgtgtgtattcaatgtgtgattttaaaaataaac

SEQ ID NO: 252411 - DNA, 424 bp, Homo Sapiens
  misc_feature (70)..(70): n is a, c, g, or t
agagttggagggtttaataaaaatataaaacaaatggcaccccggcccgcaaaataccttattaaaaaangggaacccatggagggtttccttttaaaattggactgaaatttcccgttttcctaaaaacttaaaattttaccctcccagttgttccgtccctcccaaaagacttaataacccagcccacctgatatctttaactgcatccttcattgtttaggaaaataaagaggttataaaataccatggtctggaggtaggtcagtactgtgtatcgtgcatgccaagaactgcttcttgctgtttgttttagcacctgaagtaccaaaggcacttgatgagggtaaagcaacccctgagacattaatgataaacataactttgcatctcttttcaggttcatcgtagctattgtcatttt

SEQ ID NO: 252412 - DNA, 1046 bp, Homo Sapiens
  misc_feature (68)..(68): n is a, c, g, or t
gtggtgagagatgcaggacatacacattattcaagagaccacctgacatgcatctcctccgcagaatnacattcgtcctctcttagagaagtttaacgcacatagtattattttactaagagaatatctcttggtgtcatatctaggggaagagaattaactagaattaaatttaatgtttgaatctaaatcattgggcaaacttctaataataacaattaataataggttacaggaaagccagccagaggaagtgtcagcactttaaaattctaggaccccaaaaaactacaaaatcagaaaaagtatttttatgtttctagcttgaggagaagggctttagggctaaccagaggtctgaccctagaatgccaaggaactgagaatgggctccgatggaaaaccttccttttcagattccctgtctggctcaattaaagatgtttgtatccaaaggaagtcagggaagaaaaagtgtggaaaggaagagaactgattcctactgaaaattcaaattctattaccattctaactttcataaaaaagttgggatcaagaagcagctgatttcctgccagggcttatattaggggggtgattcttaaaggacattaggattggtgctcagaaatggttaatcatgctgtgtgcttagccagggccagctggtaccttctttgccatgagcattcaagggacagctaacctttattgacaatctatattgcaaaagtcaggaaagaggttgtgagctgattggattaaagacctggcacttcagtaactcagcacgcttccacttcactcaacttaagagagttcattgacagtgttaggatgtgaaggctgggaaacacttattttgcttcaagagttccacttggctctcccaaataggtacctcaaaaactgttagcaagcggcatttggatgtcttgacaggggctttgcagggatttttagggttttttccacattgtccacattaatggttggcatgattgtgcttgcaggccaagaaatgatcataccccttgccaaaggta

SEQ ID NO: 252413 - DNA, 491 bp, Homo Sapiens
gtgctattatcatttacaataatttatcatgatgtttacactcctaatgataataaatgctatgtgcaaaaaacttggttctctttttctggtcccttttatcattttatgtccagtcctgaatccattcgactgtttattaggattcacactaaaccatacctatcagtgatagctgccctaagaagcttttttggcatgtttcctcagcatttaatcattttaggacttcgcctacagaacttctctaatcccatcctctttatgttcactcatgcatgtactttttatctggccgcttttttgcctcactggatcttaattttctcagtccttcattaattcgttcgacaaatatttactgagcacctacgctatgcaaaggtactgttctaggctctcagtgcacagtgttgaacaagacagaacagcttttaccctcataaaaagtttactgtagtggggagaaagacaaaaagaagaaaaaaggg

SEQ ID NO: 252414 - DNA, 2418 bp, Homo Sapiens
  misc_feature (94)..(94): n is a, c, g, or t
  misc_feature (720)..(720): n is a, c, g, or t
  misc_feature (722)..(722): n is a, c, g, or t
  misc_feature (724)..(724): n is a, c, g, or t
  misc_feature (727)..(727): n is a, c, g, or t
  misc_feature (1502)..(1517): n is a, c, g, or t
ccgggatgggagagaggcggcggcgacaccatgtcatctcccagtccgggcaagaggcggatggacacggacgtggtcaagctcatcgagagtnaacatgaggttacgatcctgggaggacttaatgaatttgtagtgaagttttatggaccacaaggaacaccatatgaaggcggagtatggaaagttagagtggacctacctgataaataccctttcaaatctccatctataggattcatgaataaaattttccatcccaacattgatgaagcgtcaggaactgtgtgtctagatgtaattaatcaaacttggacagctctctatgatcttaccaatatatttgagtccttcctgcctcagttattggcctatcctaaccccatagatcctctcaatggtgacgctgcagccatgtacctccaccgaccagaagaatacaagcagaaaattaaagagtacatccagaaatacgccacggaggaggcgctgaaagaacaggaagagggtaccgaggacagctcatcggagagctctatgtctgacttttccgaagatgaggcccaggatatggagttgtagtagaaaaagcacctgcttttcagaaagactattatttcctaaccatgagaagcagactataatattcatatttaaacaaagcaattttttttattactaaacaaggtttttatgaataatagcattgatatatatatntnanatntcaccctttagatcttgatttcttggtcatttctcaacctgaggtgcatagcatattcccacattccatttggtagcaatatgcggtctgaatgcatgcattcatgagtccatgtggccaagtcagcctgtgtgctactgaactgtcgaaggaaatagccgctctgataggtagatgtgagtaaaaagaacaggaaaaaattgcttcttttattggtttccaaagaaacaaaccaaaccaaccagctcttggatgtgaagataaaatagtgcttttttgaaatggagaggaaaaagttggggaggaagaggcctgctgtgggggcatcggagccagccatgtaagaatcagagctgctccttcctgtgaatcctaggtggccctatgtcttctgtggagttacagtataaagcagggagctaattaagagtattaaaacttaaaaccatttttttgactctgattttaagtacatttttatatgtcagttgctgcccttcacactaccaggccctgcagccacagtgttctgttggagaaacttggggaagtgttttctgaaccagttctttttcttggggtagagcgtgaaatccagacctgtttttgaaaggacagcacaggaggagaaaagtgactgggacgatgcttcctctcatccaaaacacatgcagagtcacatcctcatcctagtgtttggcagtttgagaccgctaccctgaacttaagagctttaaatatgagggttgtgtttctgggggggttatttttttgnnnnnnnnnnnnnnnnattgtgcttagaaaggttgcagatttcatcttcacctaccaaagagcggccgcctccttggacaagccgctcatggaccattagacttgagaagacgacccacgtggtgactgcaaagccctgggtacttgccttcatgttctggtttggttttccctttttctgctgctcttggcagcagcctggtcatcatctgcttgtgggagtgggaaatgggtattttagacccaacacaggttctaaatttaaaacaaataataattggaacaaataaaggttcttgtacccagagtgattctacatgggaaaaacaaaccagcttttttcagagagtgaccgaataggaagaagggattcagaaatatgatgtagtagaacatgccctgcaggaagaaaatgttttctctcctgcgtatgttaagaggaaatcagtttaaaatgcctgctaatcaaatgtcgactcagctaaccatatgtccaggttgctgcagagtttctttcaaatctgagtgttgcctgctgaactcggaggggagtttggagaaattttagacagcagctctgtgttctttttttgccgcagccaataagataatagcagaattagccaatcctaaaaccttctaaagacgatttttgagcatcccactgggattatttaatttttctttttgacgtgtgtttttagtttagaagtgctgtattccacaaggtttaagtcagtgaggttggaagataccctatcttttttattcaaaaagcacaatcaatcttttgtttgaaaatctatataaagtacaacttgcttttagcatgattattttcctaaataaaaagacaaagaatttacttactttatgttaattacgggcatgaagcaaaaggttttctttaaaaaaaa

SEQ ID NO: 252415 - DNA, 754 bp, Homo Sapiens
  misc_feature (318)..(318): n is a, c, g, or t
aagacataagcctggaatccaccactgttgccaaagttgggcttagtgattctcaccccaccgcggcactcttggcatttgggaagagtgtacacaaacaattaacctgttactctatttagcatttgttctttatcaaactcccaaatttttaagttgcagatgctaaaagcagtctgaggaccttggtcatttatagcttataaatcactgacaatcagaaagaaaaactagtatacaagcatttaacagttacacttcagttactcatgtattggtaaactggtacttgcttaatagaaacaaattgtaccccanaccctaaattccatgcttaaaaaaactcatctttacacattgctttaaacagagcggcattctctctaaatttaaatacttgagtaatatatgagcaacataaattaacttttagattaagtaaaatatcctggaataacactaactccaaagaaagcaaaaagatatactctaactttacagatgatcatcaggtatacagtatgtttagtcatatcgcaatacttaacagccaaataaatctaacaacaaaaaatatagccagaatttatactgccaaatctgacacgcaaccccaaaagtgaaatgtttttgaatgaaaacaagacaagatgtatttacacaaaaagttacacattttctttaatatttcatgtatcttgtacatttaacagtggaagtcgaaatcttcagtaatatttaattctcaaaatct

SEQ ID NO: 252416 - DNA, 1443 bp, Homo Sapiens
  misc_feature (582)..(746): n is a, c, g, or t
ggtacaatatatttttagaaactcatttttctactaaaacaaacacagtttactttagagagactgcaatagaatcaaaatttgaaactgaaatctttgtttaaaggggttaagttgaggcaagaggaaagccctttctctctcttataaaaaggcacaacctcattggggagctaagctaggtcattgtcatggtgaagaagagaagcatcgtttttatatttaggaaattttaaaagatgatggaaagcacatttagcttggtctgaggcaggttctgttggggcagtgttaatggaaagggctcactgttgttactactagaaaaatccagttgcatgccatactctcatcatctgccagtgtaaccctgtacatgtaagaaaagcaataacatagcactttgttggtttatatatataatgtgacttcaatgcaaattttatttttatatttacaattgatatgcatttaccaatataaactagacatgtctggagagcctaataatgttcagcacactttggttagttcaccaacagtcttaccaagcctgggcccagccaccctagagaagttatnnnnnnnnnnnnnnnnnnnnnnnnnnnnnnnnnnnnnnnnnnnnnnnnnnnnnnnnnnnnnnnnnnnnnnnnnnnnnnnnnnnnnnnnnnnnnnnnnnnnnnnnnnnnnnnnnnnnnnnnnnnnnnnnnnnnnnnnnnnnnnnnnnnnnnnnnnnnnnnnnnnnngcctagggattagccacaaggacatggacttggaggcaaattctgcaggtgtatgtgattctcaggcctagagagctaagacacaaagacctccacatctgtcgctgagagtcaagaacctgaacagagtttccatgaaggttctccaagcactagaagggagagtgtctaaacaatggttgaaaagcaaaggaaatataaaacagacacctctttccatttcctaaggtttctctctttattaagggtggactagtaataaaatataatattcttgctgcttatgcagctgacattgttgccctccctaaagcaaccaagtagcctttatttcccacagtgaaagaaaacgctggcctatcagttacattacaaaaggcagatttcaagaggattgagtaagtagttggatggctttcataaaaacaagaattcaagaagaggattcatgctttaagaaacatttgttatacattcctcacaaattatacctgggataaaaactatgtagcaggcagtgtgttttccttccatgtctctctgcactacctgcagtgtgtcctctgaggctgcaagtctgtcctatctgaattcccagcagaagcactaagaagctccaacctatcacctagcagataaaactatggggaaaacttaaatctgtgcatacatttctggatgcatttacttatcttta

SEQ ID NO: 252417 - DNA, 555 bp, Homo Sapiens
  misc_feature (18)..(18): n is a, c, g, or t
  misc_feature (36)..(36): n is a, c, g, or t
  misc_feature (97)..(97): n is a, c, g, or t
  misc_feature (428)..(428): n is a, c, g, or t
  misc_feature (431)..(431): n is a, c, g, or t
  misc_feature (434)..(434): n is a, c, g, or t
  misc_feature (436)..(436): n is a, c, g, or t
aggaaattgtgaagcggnataaccaattccaccacnggaaaacagcctatggacaggattaccgaatttaaatacgactcacctatagggaaatttnggccctcgaggcccaagaattcggcacgagccctgcatgtatccccataatgatgcctctccctgttaaatttaccaatgaaaggaaacacatcaccttaactgtaaagaatttccccaaaatgaactgatgacccagtgatctctctatcagagaaatgtcagatttcctagcctcccagaactttgatttttctggacattcaatagttcctctttctcagatctttttcaactgatgccagaaacacttgggtatttgtttttaatccaacccttttgttttgagggctttgggagggtaacacattttcataccctgtgagtcccanggnatncntctgctgtggtcttagaagccactgaaacattggtgaatgtgaagtcacttttggggtgcctgccctcatccctctgtctctctgcttccgtgtaaataaagacctgtttcaattgtaa

SEQ ID NO: 252418 - DNA, 481 bp, Homo Sapiens
  misc_feature (227)..(227): n is a, c, g, or t
  misc_feature (426)..(426): n is a, c, g, or t
  misc_feature (438)..(438): n is a, c, g, or t
  misc_feature (443)..(443): n is a, c, g, or t
  misc_feature (448)..(448): n is a, c, g, or t
  misc_feature (462)..(462): n is a, c, g, or t
agagagctaagacacaaagacctccacatctgtcgctgagagtcaagaacctgaacagagtttccatgaaggttctccaagcactagaagggagagtgtctaaacaatggttgaaaagcaaaggaaatataaaacagacacctctttccatttcctaaggtttctctctttattaagggtgggactagtaattaaaatattaatattcttgctgcttatgcgcttgnacattgttgccctccctaaaagcaaccaagtaggcctttattttccccacagtggaaaggaaaacgctgggccttttcagtttacatttacaaaagggcagatttttcaggagggattggagttaggtagtttggggtgggctttttcattaaaaaaccagggatttccagggaggaggggtttcctggcttttagggnaacttttgtttnttacnttccntcaccatttttacngggggggttaaaactttgt

SEQ ID NO: 252419 - DNA, 557 bp, Homo Sapiens
  misc_feature (106)..(106): n is a, c, g, or t
gagcgagcactccgtctcaaaaaaacgaaaagaaagcaagtttcacatgaataatgctgtgttggaaggctttttgatttaaaatcttttcggatttataacatcnctgttaagttttaggagaacccgttttcccagagcagattcaagcttctaaaaataaatgctttcagtagcgggaatggcattgtttaaaaagctgatggcagggtaagcatttgggttagtgttttattaacatatttgtaagtacttgttcattgtggaaatgtgtccttgactaaaaccatacgtggctatggaaaccatgtttgtagttctgaatacacaggttttgtgtgtatttactctatgtattaaattattattgcccttagtttaaagtaaggattacaattggatttaagtagatcactgaatgttattgtttatgaaacttaactttttgtatgctgcttataaacatgatctataaatcagtgcttgggaaaattttactttcttaatctactgatacaggaataaaaatatgaacaattaaacaggttgatcccttg

SEQ ID NO: 252420 - DNA, 1863 bp, Homo Sapiens
ggatttagtctgaggcgaagcttcggagcggccggtactgttgaaagcgacaagtggaggcgccgctctagcggccgggactctgaactatggcggctagtgatacagagcgagatggactagccccagaaaagacatcaccagatagagataagaaaaaagagcagtcagaagtatctgtttctcctagagcttcaaaacatcattattcaagatcacgatcaaggtcaagagaaagaaaacgaaagtcagataatgaaggaagaaaacacaggagccggagcagaagcaaagagggaagaagacatgaatccaaagataaatcctctaagaaacataagtctgaggaacataatgacaaagaacattcttctgataaaggaagagagcgactaaattcatctgaaaatggtgaggacaggcacaaacgcaaagaaagaaagtcatcaagaggcagaagtcactcaagatctaggtctcgtgaaagacgccatcgtagtagaagcagggagcggaagaagtctcgatccaggagtagggagcggaagaaatcgagatccagaagcagagagaggaagaaatcgagatccagaagcagggaaagaaaacggcggatcaggtctcgttcccgctcaagatcaagacacaggcataggactagaagcaggagtaggacaaggagtaggagtcgagatagaaagaagagaattgaaaagccgagaagatttagcagaagtttaagccggactccaagtccaccccccttcagaggcagaaacacagcaatggatgcacaggaagctttagctagaaggttggaaagggcaaagaaattacaagaacagcgagaaaaggaaatggttgaaaaacaaaaacaacaagaaattagcagcagctgcagctactggaggttctgttctcaatgttgctgccctgttggcatcaggaacacaagtaacacctcagatagccatggcagctcagatggcagccctgcaagctaaagctttggcagagacaggaatagctgttcctagctactataacccagccgctgttaatccaatgaaatttgctgaacaagagaaaaaaaggaaaatgctttggcagggcaagaaagaaggggacaaatcccaatctgctgaaatatgggaaaaattgaattttggaaacaaggaccaaaatgtcaaatttaggaaattgatgggtattaagagtgaagatgaagctggatgtagctcagttgatgaagaaagttacaagactctgaagcagcaggaagaagtatttcgaaatttagatgctcagtatgaaatggcaagatcacaaacccacacacaaagaggaatgggtttgggtttcacatcttcaatgcgaggaatggatgcagtttgaaaatgatcacacttgtaaagtttgggacttatagacttcttgttctgatgtcacgtccttgttcaccaaacagctagcactctagcttgcatgggtgttgcattgactttaatttattgaaaaatacaaatttttgtaaatatcagatcagtgatactggtgttagtgttgtaatcaggttaaacccacttccattaaacttgacaggactatagaaggataatattttttagttcatgaattctacttttcaaatatataaaagctgcaggtggggataaaatctcatacatggattttttcgtgtccgctgtcttgtgtacttttgtacttaaccttgtacagttattttcatctcttgaaacatgaaagaaatgttatgtagatgttctttagaagatctggccatttggtacataatccagcacagataagctgggtggtaatgataataaaaatggttttcgc

SEQ ID NO: 252421 - DNA, 731 bp, Homo Sapiens
  misc_feature (61)..(61): n is a, c, g, or t
  misc_feature (63)..(63): n is a, c, g, or t
tttatggctaagtcctcaaaagcaactgcaacacaaccaaaaattgatgattgggacctantnaactaaagagctttgcacagcaaaagaaactatcaacagatttaactacctacctacagaatgggagaaaatattcttaaactatgtatccaacagaggtctaatatccagactctatatcgaacttaaatcaacaagcaaaaaacaaccccatttaaaaatgggcaaaggacatgaacggacacttctcaaaagaagacatacaggcagccaacaaacatgaaacaatctcaacatcattcatcattagagaaatgcaaatcaaaaccacaacaagataccatctcacaacagccagaatgtcaactactaaaacgtcaaaatgtaacacatgctggtgaggctgtggagaaaagggaatacttatacactgttagtgggaatgtaaatgggtccagctgtggtggagagcagttgatttctcagagaacttaaaacagaactaccattcgacccagcaatcccattactgggtatatacccaaaggaaaataaatcattctaccacaaagacacaggcacatgtatgttcactccagcactattcacaatagcaaagacatggaatcaacctagatgcctaccaacagtagactggataaagaaaatgtggtacatatataccattgaatactatgcagccataaaaattatgaaatcatgtccct

SEQ ID NO: 252422 - DNA, 1625 bp, Homo Sapiens
  misc_feature (16)..(16): n is a, c, g, or t
  misc_feature (41)..(41): n is a, c, g, or t
ggaaaccagcctggtncccccggtagggaaatgggtgttgncctgaaaggggaggccggaggcccagtgccgagcctgaaccttggtgccagccttagcccaagacaaagcagtgtttttccagcagacggctgatgggacaggaattgaagaagagaattgactcgtatgaacaggacagggtgaaaatgctgggaattataatgggaaacaaaactatctatgttcatattttgtaatatttcatttgttaagtttatatctggatataatgttctttttaaacaagtataatcatatcgtcggaggttaagattatgaaattttagaatctctattcaagatgatgttcactccaaatacactacagaatttagtcaacattttatataatgtttcaataaatgtttctttcaataaagatactatgtgcccttcatagtaataaaatctcaatcttaaagcatgaatctaaaacataaatatttatattacagactcaattttacaaaattactaattgctctagtgcatatttgaactacaagcaactttttaggaatacctctttatacgtctacatattttagtatataaaaatagataatgctcttggacacattttgtattattcatgatctgaatagtagttagttaaaagatcatttgtaatattatgatcaactgttataaattaaggtcttaataccttttctgctctttcaaataactctaatgaatattcaagatattttagccttttaaaaagttgagatttagctcatggatatattttttggtagggaaacattagggtctccttttcttccttttacctagaatgcctcatttaaaagtgccttgaaaacatttagctccccttcttcatgagcatctgtagagctgaaagtattctggaactttagacagaaagctgaaaggaatctgcagtctcctgctgcagttcaactctgctgtttttcagtcatttcctactgtgagtggagtgatgtttgtgtgtgtgttggcaacatgcctaatgttttcttaatgatgacaacaaatattttaaaactgcatttatcattttttaggtcttcattaaattttaaaatgtaatatctgtttcccaccccctacattaggaggataatttcttaaaccacattgttttaattgatttttcttatcttgatttctttcattagaaactatccctaaatgtaaagatcttttgccttcaaatttggcttattttttctgatttatgagggtttgaaagaaagaattcacctaaaagattcatttccagttttataatgtatttcaggttctgaatacaatatttttccaaattggaaggctacactatcaagacgtgaatagccggggttaaaagttagatcctctattaccaatctaagcccattacctctatattggacggttggcacacatcctcttccttagtaacaaccggtacccctctttcccagatttaaagcacggtacacgggcttaaacgctaaaaccttaaaacgggtcgttagtcccaatttacagtggggccgactactcgtggggagacttcacatctggtttaatataattacgattatttaaag

SEQ ID NO: 252423 - DNA, 620 bp, Homo Sapiens
aagattatcttctaaagatctaagctgagcagtactcttaaaatgaaatacacatgaaaatgttagaatgaaatataatactcatctttaaatgaagctatgtctacctctcttttaattaaaacgtagtcactgtataaggtttaagatttgttccaaaaaatctaagtgactctgtataaccacattagcataatctgaagtaaacttctctaggaacaaggtaatcgagatgaaatacactaataattcaacaattaaaaactataaactaggttgtcctacttttggtatgatctagctgatcatattactgtcaaattttttagagttgtgtttgcaattatgaatgtcttaatttactcaagaaagttccgaagcaagcgccaagacacttcaagaagcagctctccagggacaaactcataaagcatagtttaagaaaaagatcctttctctagtcacaaaggttatgagaccagctcccaccatgcccactgggctcagaagagttttgccagtaggaaggacatgactgtcaactcttgacacttaggttccacttccaatcttgactccagctcccggcacagaggaatacagacaagcctatacttctt

SEQ ID NO: 252424 - DNA, 526 bp, Homo Sapiens
cattgagagttgagttgtggacttagtcattgagtgaatgttgaactttcttccttgaatcagcgttagagtcaaatgtgggtttaatgtgaatgctaaatgaatatgcaacatagtttcaaatggaacatagaaatttcacttttgaaaataataaacccacaacctaattgcatggttttgggctgaccgtcctgtctcattcatgattttactccctgcccagcttgcagatacatgcatttgaattttagtagtctgtcatatttaaaatcccacatatgtgagttaaatatgcaataaagaatacgccttgctgattagccacacccaggcaatttaatatccatggtcttctataatgtttataccacattgtaaatattcagagaacttgttttaaagtttatgctttctgattctgtgattttcaaaagaggaatttttttggaaattaaggactatcgtttgataattatatatgtaattaagatttagccaagcattaaattaatttttaaataag

SEQ ID NO: 252425 - DNA, 665 bp, Homo Sapiens
aaaagccataacttgaatgtggaaaaaaatcagaattacagcctatgccccattttgggattcgtgctttgtcaaactcaagaagccctgctctataatgtaaccacactcttacctacatgtagtggcaatagcccagaaggaacagctggccagtggcctaaagcagtaagtgggaaatagaacttaggcaacattagcccttactctctgaccccaggccaataggcacaagcatgcaaaaccacacacaaatgtgcaccttacccaaataggctaaaagatgaaggacccaagtcaaagctgtatggtatgtatacacagaaagtttattgcctcatgtgacccttgagaataaagccacacagaaacaatcagactttcaaacagaggctgaaaaactttcaaaaagccaatgccagggtactggccccttttcatattaagtctaagtggaaaacagctacatcatcttgaacataaaggcttcagactgtatgagaccaaggtagggaatgaaaaagcagtcaataataagaaggccaaagttcagagtttttactgatgtatatcacttggcacatccatacataaatcctgccatcaccaagctaacgtctgtatttccaaacatttctagtaaagctattaaactatctttcatc

SEQ ID NO: 252426 - DNA, 595 bp, Homo Sapiens
ggagtcaacgtcatctaggagcaccgagcagcttggctaaaagtaagggtgtcgtgctgatggccctgtgcgcactgacccgcgctctgcgctctctgaacctggcgcccccgaccgtcgccgcccctgccccgagtctgttccccgccgcccagatgatgaacaatggcctcctccaacagccctctgccttgatgttgctcccctgccgcccagttcttacttctgtggcccttaatgccaactttgtgtcctggaagagtcgtaccaagtacaccattacaccagtgaagatgaggaagtctgggggccgagaccacacaggtgggaacaaggacagggggatttaagcagtcaaaaggaaaaacatgttaagaccctagacttgtatattgacacacttgtaccttgtaaggcagaggaatgtaattaaaaagcacttatttggctccttttgcatgtagcatgtgtacaggagtcagagagtagaatacaaagcaataggtaattggtctatgcttctaaagacaatttgggtaattgaagaaaatgggccatacacaggaagtgccgtgacattttccttcataccctt

SEQ ID NO: 252427 - DNA, 1088 bp, Homo Sapiens
atccagcttgggctccagttttctgcccgcctccttttacgttattgcggagcgacggcgccggacagtcaacgtcatctaggagcaccgagcagcttggctaaaagtaagggtgtcgtgctgatggccctgtgcgcactgacccgcgctctgcgctctctgaacctggcgcccccgaccgtcgccgcccctgccccgagtctgttccccgccgcccagatgatgaacaatggcctcctccaacagccctctgccttgatgttgctcccctgccgcccagttcttacttctgtggcccttaatgccaactttgtgtcctggaagagtcgtaccaagtacaccattacaccagtgaagatgaggaagtctgggggccgagaccacacaggccgaatccgggtgcatggtattggcgggggccacaagcaacgttatcgaatgattgactttctgcgtttccggcctgaggagaccaagtcaggaccctttgaggagaaggttatccaagtccgctatgatccctgtaggtcagcagacatagctctggttgctgggggcagccggaaacgctggatcatcgccacagaaaacatgcaggctggagatacaatcttgaactctaaccacataggccgaatggcagttgctgctcgggaaggggatgcgcatcctcttggggctctgcctgtggggaccctcatcaacaacgtggaaagtgagccaggccggggtgcccaatatatccgagctgcagggacgtgtggtgtgctactgcggaaggtgaatggcacagccattatccagctgccctctaagaggcagatgcaggtgctggaaacgtgcgtagcaacagtaggccgagtatccaacgttgatcataacaaacgggtcattggcaaggcaggtcgcaaccgctggctgggcaagaggcctaacagtgggcggtggcaccgcaaggggggctgggctggccgaaagattcggccactaccccccatgaagagttacgtgaagctgccttctgcttctgcccaaagctgatatccctgtactctaataaaatgccccgcgccccgttttaatctgtt

SEQ ID NO: 252428 - DNA, 730 bp, Homo Sapiens
cctctaaggaatcaatttagactagcctttttgaactagtatcctagctttgacatttccttttctgggttctcatagcaccttgaacaaagttcttaaaacacttcacataattatgaaaacaattatttgtgtgacgcttttctacctcaaaagctcacacaaattaaataaaatttcagtccagtaatgtcatcagggcttgaaggagaccaaggcaaaaaagacatgctaaatcttgtgtatatgcaatgcacaagtgtgcatttctttttttggggtgaaagattcagctttcatcagattttgaaagggattagtaacctaaaaagatcaagcagcattgcactaaaatggttcttactcatttttacatagcttactcatttttatatattcttactgcctatgacagagactgcgtctcttattagatgctcaataactgttgaataaacaaagtaaacattttccagaaaacaataaatttaacagaatactgtcatacaaacacttaatttgttcataatttttgcattaatgtagtaaattgccatctgaaatgtatatcaaacattatcaaaacttttgtccaacaaaatcatttatattagaggagaatgaaacaatatagtttgtcattcaagatttgatgaactaatttgtaagtaaatgttctgtgtataaatattacagataagaacatctacataggttcatgaaaaatgct

SEQ ID NO: 252429 - DNA, 785 bp, Homo Sapiens
  misc_feature (542)..(542): n is a, c, g, or t
atcataaatacttcaggttcacagctacttcttcgtaatgccaaaactggaatgtttgcagtggggaagttatagcagtgtgcacaaatactaagatggaaacattagtgctggagatgtttgacaaagtgatttgcactacaaatgtaaaacaaaacaaggctttgacaagaacaagggaatctaaagacatgcctgaaaaatctagctcaatcacgctagacatgcaacaggatgttaagcaagcacggaggtggcgcaggcagacactgacagatggcaaggatctgacagatagtgggtctaaaagccaattaaaacagagctgggagggaagacaatcctgttgggacagctaatgtaagacacattttttgacagctctgcattctttattgattagacagcaataaaataaaatagaaaaatggtacactattgttggctttttcttttgtgggaataactgtgaactaggaacttaagggttggtattatgatttttaaaaacaatgtatggaaatgctaatgaagttagtaanaaaaaaatcatgtctgcatgcactcatgcaacttgcttctctcactctctttgagcctgacaactctaataccctcccccaaaagcagctgcatgtaacctccttcaacatcttgcccatttcctcagaaaccctcttcaggaacctttactgtttttctctagagttacatctatgtatgacgtgggaacgtagccttcttcaccgttctgtctccgagctcttgtccatccgtcacctttg

SEQ ID NO: 252430 - DNA, 1149 bp, Homo Sapiens
gttcgtccaaagacaagaagtataaacagatttcctcttcattctgaaagttcatcaaagaaagcaccaagaagcaaaaacaaaaccttggatccacttttgatgtcagagcccaagcccaggaccagctcccctagaggagataaagcagcctatgacattctgaggagatgttctcagtgtggcatcctgcttcccctgccgatcctaaatcaacatcaggagaaatgccggtggttagcttcatcaaaaggaaaacaagtgagaaatttcagctagatttggaaaaggaaaggtactacaaattcaaaagatttcacttttaacactggcattcctgcctacttgctgtggtggtcttgtgaaaggtgatgggttttattcgttgggctttaaaagaaaaggtttggcagaactaaaaacaaaactcacgtatcatctcaatagatacagaaaaggcttttgataaaattcaacttgacttcatgttaaaaaccctcaacaaaccaggcgtcgaaggaacatacctcaaaataataagagccatctatgacaaaaccacagccaacatcatactgaatgagcaaaagctggagcattactcttgagaagtagaacaaggcacttcagtcctattcaacatagtactggaagtcctcgccacagcaatcaggcaagagaaagaaataaaaggcaaccaaaaagaaaggaagtcgaagtatctctgtttgcagacgatatgattctatatctagaaaaccccatgatcttggcccaaaagctcctagatctgataaacaacttcagctaactttcaggagacaaaatcaatatacaaaatatggtagcatttttatacaccaacgacatccaagctgagagccaaatcaagaatgcaatcctattcacaattgccacaaaaagaataaaatacctaggaatacagctaacccagggagatgaaagatctctacaacaaaaattacaaaacactgctgaaagaaatcagagatgacacaaatggaaaaacattccatacttatggataggaagaatcaatattgttaaaatggccatactacccaaagcaatttatagattcaatgctattcctatcaaactaccaataacattcttcacagaatcaga

SEQ ID NO: 252431 - DNA, 1012 bp, Homo Sapiens
  misc_feature (67)..(102): n is a, c, g, or t
ctgaaggcaaacaccaagcatactcaggatcaaactgtacgttgagcttgaatactgccattcaacnnnnnnnnnnnnnnnnnnnnnnnnnnnnnnnnnnnngttttggatggactggtggcattatgtaagacttagggtgggagaactcccacaatatttaaaatcctctttccagcagaatcatgatcacttggcacatcggacccttctgcaagccagtttgtttttaatgagcttaatgcctgcaatatattccaattatttggtgtttgttttttaaatacattcataatgaagtaagaattccacaactgttttccccagaagtgagatttctactgtcagttttctgattgagaacattcatcgcccaagaaacagctcatgatcctttaaaagtttaaataccctaaatttccgtacagctggatcaactgctgagaagacagttcttagagcaaccctgtagaattctccagaatttaaatttcctttacaattttgtttttggccaagtgctggtttataaacatagatctttctattaaaaactatacaaatataccatatttctttctacaggtatcttgagcttcacgtaagcaactactcaaaaattctgagaacttgaaatcccttagtatacattatattctacttcattgttccttggcatataacacattctcatttgcagcttgctcatgaatttgtttcttaaatactagcttccttgataaagttgttcttcatttttctttccaaggtgccatcctattgacatcacaaatcagtgaatgaccagacattactaagcttttaaattatccacttagccatcacgtggataataaaaatgctttgactgaagaaagccacattctttcattaagtgttcactgttgtcatacagagcaaagagttgctatctgctgtactttgcccatgtcaattaggagctgttttatgtggcgtttaagttggggcatcttgcaagaggatctggtgg

SEQ ID NO: 252432 - DNA, 690 bp, Homo Sapiens
ggacatgagtataggcacaaaggtgggacatgttaggtgtgttgaaactataaacagtcactctctcctgaatgagaagaatagagtttgggtaggttcattgagtatatgtcagaggggaccttaaatgctgtgagtaggagtgaaaagctttcttcagttttgagaagtgtggtctgggatatattgagtagaatcactcctcttggtgataaatagaaaaagcgacaactagggattgggaatagcaaaaggaaagtcaggcagttctcagaggaaaagcagaagtttgcattgaaaccagggagtagaggaagccaaaacaaggtaatcctgggccctaaaactccctacctggtggctgaactgtgagaggatgacgctaatgggatttgccaaggcatgaaattgtcatgggcagagcagaggctgcataaccctggttacccagggagggaacggattgaggaatacaaggttacctaaactcttttcacaagaatccaagtcaccatgggtctctggaaccacagtgggaccgtgaggcagtcagcagcaccgagtcatataatttgaagaacaatgaagatttgaatggagaactaggcccccgggaaaaggactgcaaagcaaatacgtattctctacattcctaagaaagcaaatgtctaaggcagctattcaaacagt

SEQ ID NO: 252433 - DNA, 845 bp, Homo Sapiens
  misc_feature (14)..(14): n is a, c, g, or t
  misc_feature (46)..(46): n is a, c, g, or t
  misc_feature (141)..(141): n is a, c, g, or t
  misc_feature (149)..(149): n is a, c, g, or t
  misc_feature (157)..(157): n is a, c, g, or t
  misc_feature (178)..(178): n is a, c, g, or t
  misc_feature (217)..(217): n is a, c, g, or t
tcagacatttatgntgataaaaatgtattttaatcatgtgatatcnctgttttccaagaaacttcacatctttagaaaagattattaatccagatcaacatgagttaaaatgctgtttgaatctgtacttttccctgcttntgtcattntattcccntgagatctgcaaagcagtcancattgattaggcacggaacctcctaggagtgctctgganagataaaaagtgtcactgtggattaggacaaatatgcttcaaaaccttgctatcttcactccaacctactaagagtatttttttgagatggaaagacatgctcaaatgaagactgaaactatttcctctgattaactgaggtttcctttctggaggtattgaaaatacacctaaatattgtgaatccttgagtctagttagctatttttaatcacatgaaagctattaaattaaatctataatgatggtactgtaaggaaaagatgaccctggaacagatctagccaagtgaagaaatgaaacatggcttaaaaataaaggagatcatgcgcctgagaatagacagaaatgaaaataatcaaacagaaaaaaaagaatccattctactttagaaggggtggtttttaagcacactgagggactttttctgtaaaattccaatttatcagaaaaaagtaacattgaggttttccgggtgataagttttatgcccttcatgatctaagttttacattttccagtttctgcatcgctagctgaaactgaaaaataatacatgaggaaatggcaatagttgagactcatatttgccaaagtgatttaacttacacattctcattagtgattc

SEQ ID NO: 252434 - DNA, 210 bp, Homo Sapiens
actatgatttgcatattttccagtatcctaatacatgcatacttatcttttatagattataataatctacatttaaaattccattttaatattgtggcatgaaaaatacaaacaccaatacagtatgttttatacttactcaaagttaactggctcagagttttaaaagctttcccggataaagcagagtcaagtctaccctatatcccc

SEQ ID NO: 252435 - DNA, 909 bp, Homo Sapiens
  misc_feature (23)..(23): n is a, c, g, or t
acacctagttacacttgtgaatnttttttaaggtctcttttaatttccagacagttaaaaacaatctagttatcttaaagcattagaaagttattatctggagagtgcagagatttcagtccatacacctttctccacaaagcagagccagaagtaactgactattgtgcctaaaactctgtttcatttttaaaaacaagtgccattaaaatggaatatctaatgataagcatatgaaataatgtgtaattagctcaatttaactattccacaacttacatattccaaaacaatgttatacatgataaatatatataatttttgtcagttaaaacaaattaaaaaaatggctatcgtcgcacagaagcctagaacaaaaatatgaagagaaatatctgacatttgtaaagaaattataagaagaaaaaaagatacagaacagaaaacattcactactttagaaacactttatgcatggcttcttgccccaaacttttattgtgatggccctaataaagcagattattggaaaaattggaggacaagggttgtataaaaattttattttatgaagaaaatatgtagcggaaactgaattttcaagacatttacaatgtgaaatcatgttgcatttaacaatgtactttattagcaacttcaccaaatattccccaagtcataagcaacaattatttttattaggtttggggggtggagtagttttaataaagtgcacagaacggtgacacccacaaagccttatataaaggcaggattcatgcatcctgctgcaagtacctctgcactaatataccagatcctaaaatgcatataaggtggactagcatcttaattctgctagttgattgtgtctttactgaaaagaacccagctacaatttggcctttt

SEQ ID NO: 252436 - DNA, 1015 bp, Homo Sapiens
acttgtatgatctcacctgaccagtgatttcttttcctcctaaccccatgctaccaccattttctggaaatcaaagagatgtggtagtaaatcatacagtacacacgatcatctgagatcaatatgagcacaaaactcatcaagtaggtctgcctggaatgtatataaaaaatgtaaataaaaatttgtaaattagtgtgaactgtatcttgcatatgagactgtgtattgttttgcattctcttcccttttgtagaaatttttctgtaaggaaatgattcagcttgttggttttagagtaaaaatagccaacagttgtggctacacagtgagatcacaggaactggaaatagggtttgtcggctttggttaatgtcagtactcatttatttagcctctcagtgcttaataagacttttctttattttttagttagccgttaggttttgtgaggttagattcctggaagcagtgaatttatacactgttatattaatagagctccgttctttgagtcatgattccaagctaaaggaaattaaaaatgtaatttaataatttcctatttttagggttgttaatttttttctacaaaaaaaccttgaaattttagatatcccaatgtgaatctaatttccatatatacagaaattagacaaataataagtctttagttcaacttaagcatatctcaaatgacttctctaaatttaaagttgatcatgataggatcataaaagacagaaaagacttaagtaatcttgtaatgacaattatttccatttttgctgaactaaaaatatttaacttcataaatatgttactacagcttccagatttaaagaaaaaaagtttcccccactctcaattaaaagttagaaccctccacttttaaaattatacaaatacttcttttttacattacacagaagccttctgtaccattttacgaatttctgtcttcataatataagtgaaaatactgtcatttcaattttctgctttaaattgtttt

SEQ ID NO: 252437 - DNA, 333 bp, Homo Sapiens
aaatcaaaatgaaaaaaaggaaaactaagccccaaacccaccacaaaatcaagccttcaaaacctgacagacctcagctggtgagtgggaatgagcagggctggggcttataccccttgtcatgtggtgtcttgtggggagaacggctcctaaaagtcaattccttgctctagaagggtgtcctcaggcaggttcctgttgggagaagaaaggtcaaaaaagaaaaacccttctctgagccacattccttgtcatttgggatgaaaaaaaggcccaggatcagacagaagtaaccccattcccctgtgtgaagtgcacactctcaaaactaga

SEQ ID NO: 252438 - DNA, 385 bp, Homo Sapiens
ttttaaacaacccacttggaaaaacacacaaaaaatgtcctcatacttactgatgacttgggcaaaaataaaatctctaaaaatcataaagttggaaggatctacaggatcacctaattcccactattttaaatcagggctgctattaaatatgccataccttccttcaggaattcactgggatatttttctcttctatattgaacaatctctcctgctaaagcttttcttcgcaagtctttactttctaagccctttaaatattcttgtaaatcccatgagtcaaaaagtgaaaattactaaattatctttatagactctagaacctgtcacctaaggataagcttcgaccagtacaaaacacgttaggatcatcttaattcct

SEQ ID NO: 252439 - DNA, 706 bp, Homo Sapiens
ctggatataagatactcaactcttcattctgctcagtcacgccgggatgtcgtggtatttcataggttctgcatttaagttgaagtactgggtcctcattcaaaagctgtgcaagcaagagcacaccattctcagtgtagaagcgtacataacctgaagtaaaacccaccacaatgcaggtccagtcaggacgcccagtggaactcctcttttggcttgctagtgggatacatagagcactggttacacattccccttcttcgacatttaaggaaccactccagccaacagcaaattgcatttcttcctttcctttatcactatatttccattttggcactagaaatacagctttttgctctcgagctatcaccataagatcattggttggagataaggataaaacacaatcttggagccaggaagtttttttgtgttttgcaagtatttccttcttcttcaggttcttgtggttcattttcttcccatgctccccaaccatcatcttcccagtctgttgatttactggggtccctccgcaaggcgccgctgaggatctcctcccgcaggtgaggaaagaggaagtcccgggcggcctggaggtcctggaagtagcagaactggacaatggagcaggccatggctccagggaaccccactacggcactcaccttacctcaccacgccctgccccctccaccccact

SEQ ID NO: 252440 - DNA, 1606 bp, Homo Sapiens
gagagtcgcatgaagtatgaaaaggttcacagtatatataacagacttctggcaattgaggatattgaccctaccttggtatatatccaatatatgaaatttgcacggagagcagaaggcatcaaatctggaagaatgatatttaaaaaagcaagagaagataccagaacccgccaccatgtctatgttactgcagcactcatggaatattactgtagtaaggacaaatctgttacctttaagatttttgagctggggctaaaaaaatatggagacattccagagtatgtcctggcctatattgactatctttctcacctcaatgaggacaataatacccgagttttgtttgaacgagttttaacatctggaagccttcctcctgagaagtctggagaaatctgggcccgatttctagcatttgaaagtaatattggtgatctagctagtatactcaaagtggagaaaagacggtttacagcattcaaagaagagtatgaagggaaagaaacggctttactagtagatagatacaagttcatggatttatatccttgctctgcaagtgaattaaaagcacttggttataaggatgtctcccgtgctaagctagcagctataattccggacccagttgtagctccttctatagtgcctgttctgaaagatgaagtggatagaaaaccagaataccctaaaccagacactcagcagatgattccatttcagccacgacatttagcacctccaggtttacaccctgtacctggtggagtgttcccagtccctcctgcagctgttgttttaatgaaacttctccctcctcctatctgtttccagggtccttttgtacaagtggatgaactgatggaaattttccgaagatgcaagataccaaatactgttgaggaagctgtgaggatcattactggtggggccccagagctagctgtagaaggcaacggccccgtggaaagtaatgcagtactcaccaaggccgtcaaaaggcccaacgaggattcagatgaagatgaagaaaagggagccgttgtcccccctgttcatgacatttacagagcacggcagcagaagcggattcggtagggttttaaacgcctctacagaaaactcctgtccaggattccttttgcctcaagtggtatgtttaaaagagacaacgctttgttacaaggttcttggaaacaaagttgtattgtcattggtgcctctatcacatggttcttgagaaaaaacaaaccaacctgtgtgaattttagaatacggaacagacctatgctctaagcaaaattaggttttcaaaaatgtgagaacagtacaaagtggcagaaccacattttgttcccccttcaagggtgtcttgtatgtgccgcttgaagatttgtgagtttttcaacagttttattttaaaaactggatggcttatgattgtaaagcattttatcacattttctgaaaacaattgttcttggtttgcttatgtagagtcctgccttattgtttgtttttatttatggcagaatgtatgaaatccgttttgtagtttcaaattttaaaagtcctttaaaaaataaaaggattcagaaac

SEQ ID NO: 252441 - DNA, 1017 bp, Homo Sapiens
gcatgggaccctgcgcccgggggtcaccaatgaacagctctggagtgcacagaaaatcaagcaggctattctacatccggacaccaatgagaagatcttcatgccatttagaatgtcaggttatattccttttgggacgccaattgtagtcggtcttctcttgcccaaccagacactggcatccactgtcttctggcagtggctgaaccagagccacaatgcctgtgtcaactatgcaaaccgcaatgcgaccaagccttcacctgcatccaagttcatccagggatacctgggagctgtcatcagcgctgtctccattgctgtgggccttaatgtcctggttcagaaagccaacaagttcaccccagccacccgccttctcatccagaggtttgtgccgttccctgctgtagccagtgccaatatctgcaatgtggtcctgatgcggtacggggagctggaggaagggattgatgtcctggacagcgatggcaacctcgtgggctcctccaagatcgcagcccgacacgccctgctggagacggcgctgacgcgagtggtcctgcccatgcccatcctggtgctacccccgatcgtcatgtccatgctggagaagacggctctcctgcaggcacgcccccggctgctcctccctgtgcaaagcctcgtgtgcctggcagccttcggcctggccctgccgctggccatcagcctcttcccgcaaatgtcagagattgaaacatcccaattagagccggagattagcccaggccacgagcagccggacagtggtgtacaacaaggggttgtgagtgtggtcagcggcctggggacggagcactgtgcagccggggagctgaggggcagggccgtaaactctacggctgcacctgcagggagcagcacgccaaccccagcagtcctgggccccctgggagagtgctcaacctacaggggagggagactgacccattcacattttaacataggcaagaggagttctaacacatttcgtac

SEQ ID NO: 252442 - DNA, 736 bp, Homo Sapiens
tcttgcagatatactttcacatgttaaaaatgactagtacaaggttattattgcggcatggtttatcatgataaaagactgaaaaaaccttgagtgtatccatgagactttatcagtgatatagccttagaaacagtaggcagctgtataaatgaatgaagaaggtaactatgtatctatataaaaggaactgcaaaatatattaagtgaaaaaaagatacagaatgttatacatagtatattttttctttcatgtacaatatggggtaaggtaggaaataaggatacatatttatatctgttgcaaattgcttagaaaaaccctggaaagataccatgacacaataataaagtatttacctcttgttgggaggcatgaggactggatagatggtgaatagagtggaaacttcattctgcatcattttatggtttttaaaaaacttgtgtaagtatattacctctgagactgctgatttcctctcagtgtccatttttcatttcttccttttacaagtaggacatcccccctgagtttttggagggcatatcctagcctcctctgcagctaagtacattcctgtgactgaatttttgccagtggaatgtgaacacaggtgacttatattatctccatgtcacttccttaaatggaaactaatatcttccactttcttttctttaccctttccatgggctagaatgtggatatggtgctggtgagactgttttgatc

SEQ ID NO: 252443 - DNA, 1664 bp, Homo Sapiens
accagctccccctccctccccttgcctgtgccaggtgaggtcagcacatctcaacaggcctcagggctccttgtgggcctgggctcctggacccccctttcacaggcagccagtgccctgagccagggtctccagaaagccccacccaggccaggcatgtggcaggggttagagcaggactgatgtctcctaagcacctgtaatgtgcgagggacccagctaataactgatctcgttttttcttcactgcaacatgatgaggtagtaccttttatatcccatttatagatgggggaaagcaaagcacagagagtctggataacttccacagggtcccacagccacgtgtttagacctagatgtataactaggagctttgactcaggagcctgtgacataccccctcccccaccgttgtctcatgccagtaacaggctcaaacaatgacaaagcagattcagaaatgaggccatggactctgtcctgaaggcctgaggttactggaaattaggggattaacccactagctcttgttgagccgtgggaattgtctgaaaagtgaagacagaaccacagggctattttgtttgcttcatgtgtcccagaagatgactgagggtgagttggcttacctggcccatcagggtaggctggagttagggactgaccagcagctttagaatcccagccccctgaccactcagagacatgcagagattgggtttttggacttctggggtaagtggtctaagtccagtccagtcctatctgggcttcctggagcagaagcagcaacttgtcctagcacagatggccagccccttagacagaggccctcaagtctttctctttccctggtcccttgtatcccctgcaggctgagtgcatttggagggagtgagtggccctttcggatccagggaggctggtcctatggcctcatgttaaataggcggggcttgccttctggtgtcggacaagcttctgagacgtcatgaggagattctgcctttgccaggtgactgtctggggagcgggtctgctcccaaggggcctgagcagtccttggcctgctaaggtcttggaacttgcctgcctttccatccatggccagcagcacctgccctacctgccccacttgtccttagcctggacctctgacagcagcatctctaccttctccccagctcccaggaccacaggctcaggcaggggcctccatgggccccaggggaacactggggacttggcctctctctagggtacatggtgctggttcaggctgggagaggcagcccaggaagtctcatctggggagcaggcagccagcatctgggccttggcctggagcacaaagaccctggctttcattttctctcaggtgaaaggaaattaaggcaacaaaagaagcccggctcctggtcacctaggaagcctcagattccttcccatggagggagggagtggtttgcaggtggccaagttcctctaacttggctcacactcgacatgaaaattcagaattttatactttccctaccctctagagaaataagatcttttttgtcagtttgtttgtatgaaactaaagcctttatttgttaatagttcctgctaaaacaatgaataaaaactcaaggagcaactaaaaaaagtgagaaaaa

SEQ ID NO: 252444 - DNA, 475 bp, Homo Sapiens
  misc_feature (412)..(412): n is a, c, g, or t
  misc_feature (445)..(445): n is a, c, g, or t
acgtgtttagacctagatgtataactaggagctttgactcaggagcctgtgacataccccctcccccaccgttgtctcatgccagtaacaggctcaaacaatgacaaagcagattcagaaatgaggccatggactctgtcctgaaggcctgaggttactggaaattaggggattaacccactagctcttgttgagccgtgggaaattgtctgaaaagtgaagacagaaccacagggctattttgtttgcttcatgtgtcccagaagatgactgagggtgagttggcttacctgggcccatcagggttaggctgggagttaggggacttgaccagcagctttaggaatcccagccccctgaccactcaggaggacatggcagagattggggttttttggaacttctgggggtnaagtgggtcttaaggtcccagtccagttcctantcttgggctttcctggggagccagaagcag

SEQ ID NO: 252445 - DNA, 903 bp, Homo Sapiens
ggctgctgtccctggtgctccacacgtactccatgcgctacctgctgcccagcgtcgtgctcctgggcacggcgcccacctacgtgttggcctggggggtctggcggctgctctccgccttcctgcccgcccgcttctaccaagcgctggacgaccggctgtactgcgtctaccagagcatggtgctcttcttcttcgagaattacaccggggtccagatattgctatatggagatttgccaaaaaataaagaaaatataatatatttagcaaatcatcaaagcacagttgactggattgttgctgacatcttggccatcaggcagaatgcgctaggacatgtgcgctacgtgctgaaagaagggttaaaatggctgccattgtatgggtgttactttgctcagcatggaggaatctatgtaaagcgcagtgccaaatttaacgagaaagagatgcgaaacaagttgcagagctacgtggacgcaggaactccaatgtatcttgtgatttttccagaaggtacaaggtataatccagagcaaacaaaagtcctttcagctagtcaggcatttgctgcccaacgtggccttgcagtattaaaacatgtgctaacaccacgaataaaggcaactcacgttgcttttgattgcatgaagaattatttagatgcaatttatgatgttacggtggtttatgaagggaaagacgatggagggcagcgaagagagtcaccgaccatgacggaatttctctgcaaagaatgtccaaaaattcatattcacattgatcgtatcgacaaaaaagatgtcccagaagaacaagaacatatgagaagatggctgcatgaacgtttcgaaatcaaagataagatgcttatagaattttatgagtcaccagatccaa

SEQ ID NO: 252446 - DNA, 802 bp, Homo Sapiens
  misc_feature (151)..(256): n is a, c, g, or t
tccttttactaattactagccatggagccctgggaaaattaaccttcttgagcttcatttttctccttcagggataaaaattcttctcagatttatgaggaagattaggtgagataatgcacataaaaacacttagcacttactcactggnnnnnnnnnnnnnnnnnnnnnnnnnnnnnnnnnnnnnnnnnnnnnnnnnnnnnnnnnnnnnnnnnnnnnnnnnnnnnnnnnnnnnnnnnnnnnnnnnnnnnnnnnncagttgctaccatggctgccctttggtaataagggacaaatgacaactgtcttgagttttcttgtttttggctcatacaagtgactgatcctttctactctctgagcagctgtgtatgagtgttaggtttgcagctataacaacagttactatatgcttatgtggataagaagagtccacacaccctttttaactatcagataccagtatagtactgtatagtaaaaggagtaggaggtagaatcccatgagttttgccaacagggaatctaggaaaaaagcagacaatatgagtcaatataaactgtgttctagaaaaagcactgtgacttggagtgagaaaacctggatttgagcttctgccactaagaaactgtattcctcttggcaagccacttgtcctctctgggcctaggctgtcctgcctctgaaggagagttaaacaatctcataaactttttgtgaggatcaaatgaaacaatataggtgacagcactttgttaactgaaaacaccaagcaatagaagtttcaattattgccataag

SEQ ID NO: 252447 - DNA, 1026 bp, Homo Sapiens
  misc_feature (560)..(800): n is a, c, g, or t
gactgagtcatgcatactaaaattattacatattttcaccactttgacttagaaaatgcactagaaaaataaactttggtcaaaacaaacactgaagtacatgaatccaccatgtatccctatactcaaagccaaactgaatttcagtttgaagcaaggaatgtgaccagtggctgaaacagtgccctaagctggtcagagaattagctcacctcccactccatcagaggctcttggtcagagaggtttcaagtatttcacttgtaacaggttcctacctgatatgccaagaagccgaggcatagctacaagaatccacagcagcagcatctcactgcctcactaaacctgctgcccagtgagatgaaaagaaaaacagccccatgaaacaggaatttcatcactatcatctccatccacaaatcacattgatccttcgcatgaagcaagctcctgttgactgtgatgtttgttactagcattttaagcaaaccatttctctaagtcaggagagcagaagaatgaatttatttatttgacacagaatattgctttgtcannnnnnnnnnnnnnnnnnnnnnnnnnnnnnnnnnnnnnnnnnnnnnnnnnnnnnnnnnnnnnnnnnnnnnnnnnnnnnnnnnnnnnnnnnnnnnnnnnnnnnnnnnnnnnnnnnnnnnnnnnnnnnnnnnnnnnnnnnnnnnnnnnnnnnnnnnnnnnnnnnnnnnnnnnnnnnnnnnnnnnnnnnnnnnnnnnnnnnnnnnnnnnnnnnnnnnnnnnnnnnnnnnnnnnnnnnnnnnnnnggcatgaactactgcacctggccaagagcagaagaatttagatttacaaaattaacagatcccaatacagagaggtgttaccagaactgacatctttcctgaacagtaggcatgtttctgttcggtatagccacacctctcatggccacaggagatacagtgtatagtatatagtatataattggtttagctaacattttactccctaaattaaaggaggcttcaa

SEQ ID NO: 252448 - DNA, 440 bp, Homo Sapiens
  misc_feature (24)..(24): n is a, c, g, or t
  misc_feature (44)..(44): n is a, c, g, or t
tccctgtttccaggggctgttttnccttatcaacctcactgggncagcaggtttagtgaaggccagtgaagaatgctgcctgcctgtggaatccttgtaagcctaatgccctcggcctccttggcatatcaggtaggaacctgttacaagtgaaatacttgaaacctctctgaccaagagcctctgatggagtgggaggtgagctaaatctctgaccagcttggggcactgtttcagccactggtcacattccttgcttcaaactgaaattcagtttggctttgagtatagggatacatggtggattcatgtacttcagtgtttgttttgaccaaagtttatttttctagtgcattttctaagtcaaagtggtgaaaatatgtaataattttagtatgcatgactcagtctgaaacaataaaaatctctgaaaaatgtga

SEQ ID NO: 252449 - DNA, 1244 bp, Homo Sapiens
  misc_feature (1225)..(1225): n is a, c, g, or t
ctcagttgagctcacaggtttgaagaaagcactcttgacatgtctcttactaccacatatcacaatctaagacatacacataaaataccatatctctcctgcttctgaatcacagattggcttaatgaaaattaagagtttattattaagcatcttttaatttttaagtgatgttcatacttgacggttcagaaactgccactgccactgtggttaaatcacttggtgtatggaatttaaaataatctaacctagagctatttcccattaatcaaactcatccctaagtgtctcatagaaaggtcttctttaaagaagatcgagtagggctcatgaaaaattagtggtgtgctcttcaaaatgcaaagttacatacccttattttttagccaatttgattatttggtaaagcaagggcataattttaagaaactaattttaatcaaaaatttttacttgcctcaaactaaagctaaccagtagcaaaatgactggactgaatttcatatttaatcttccctgcccacaaagataaatgaaactgctcaaaggcaaaaataaagaaatataattgtgattagaaaagatccagggccaaaacaaataaataggccacaaggaataaaaaattaattgtattcgtttcttttctatctttacatatacgcatctgtcaatttcactaatactgaacagggaagttcataaaaatgctactctaccacttaaacaataaatgtaagcaatgaatgtacatacaaaggccactggttaatactgccccaagtaacaaaacaatgaaatgtcaggattgtgtcccctacacaatagacaataagcaacaatgaccaaacagaaaagaaacttaaaatgggatactttataaatttaagtgtaatctatcaattgcaaattatttttaaaaatcgtaaatttctacaaagcacaatattaaaagcttgcaaattattttaaaatatcctagccaaaagggcataccttacagagcctagaagaatggctcattaggtaacccatttatcccttctacaaacaccctataaattccagaaaacataaacaagaaataaaccttacttctctgaccctcaatatccttaagttgaaattaaacaaacaaaataatcattaagtgcttccagttattaaaaatgaaacagtgctaatattggtgcccaagaaagtgccaagtgattaacaccanatatatggcattcccaccc

SEQ ID NO: 252450 - DNA, 541 bp, Homo Sapiens
ggggtcggggttacatggcggcgactgcggcaaagcgagagcctcggagacgccgctgccgccagcacagccggagacctgagccgacactgggggcagtccgcgagccccgcactctctcgatgagtcggagaagtcccgttgtatcagagtaagatggacggtagctttgattgtgattgtggtgagctggagccacctgatcactaacaaaagacatcttctgttaaccaacagccgccagggcttcctgttgaaataaatatatagcaacaaaggaaaaaaagaagcaaaacggaaatagtgcttaccagcaccttagaatgatgctgctcaggaccagtccaacactgaatgtatctgcactgtgaggagaatgttcatagaagcctgttgtgtgcatatttattcacatttttgttaaatgttaaatcgtttagcacggtaatctgagtgcacagtatgtcatttcattccgtttgagtttcttgttttcgttaaatgtctgcagagttgctgcccctttcttgaactatgagta

SEQ ID NO: 252451 - DNA, 713 bp, Homo Sapiens
gtggaggaaactttctgcctcaacttcacgatctgccgagaaagctatggagtgattgaacagaagaagctgatacctgggggagataatgtaactgtgtgcaaggacaacaggcaggaatttgtggatgcttatgtgaattatgtcttccaaatctcagttcatgaatggtacacagccttctctagtggcttcctaaaggtgtgtggtggcaaagtacttgagctcttccagccttcagaactgagggctatgatggtggggaacagcaactacaactgggaagaactggaagagactgccatctacaagggagattactcggccacacatcccactgtaaaactattttgggaaacatttcatgagtttccattggaaaagaagaagaagtttctcttgttcctgacaggcagcgatcggattcccatctacggcatggccagtctgcagattgtcatccagtccacagccagcggggaggagtacttgccggtggcccacacttgctgacaaccttctttgacctccccaagttacagcagcaaagagattctgagtgcccggctgacccaggcccttgacaactatgaagggtttagtttggcctgaggcttctcagcttgtccagtatttcccttcgttcctcagtgtccacattgaggcctatacagaaaatcatggggagtgatttctatttttttattggctaa

SEQ ID NO: 252452 - DNA, 1819 bp, Homo Sapiens
  misc_feature (1432)..(1468): n is a, c, g, or t
  misc_feature (1608)..(1662): n is a, c, g, or t
  misc_feature (1664)..(1666): n is a, c, g, or t
  misc_feature (1670)..(1670): n is a, c, g, or t
aaaacgcaggctggtcccggccggaattccgggatatcgtcgacccacgcgtccgggagcctgttcgcgtcgactgcccagagtccgcgaatcctccgctccgagcccgtccggactcccccgatcccagctttctctcctttgaaaacactaagaataatgtcactgcatcagtttttactagagccaatcacctgtcatgcctggaacagggatcgtactcagattgccctcagtcccaataatcacgaagtgcacatctataagaagaacgggagccagtgggtgaaagctcatgaactcaaggagcacaacggacacatcacaggtattgactgggctcccaagagcgaccgcattgtcacttgtggggcagaccgcaatgcctatgtctggagtcagaaagatggtgtttggaagccaaccctggtgatcctgagaattaatcgcgcagctacttttgtgaagtggtcccccctagagaacaaatttgctgtgggaagtggagcacgactcatttctgtttgttactttgagtctgaaaatgactggtgggtgagcaagcacattaaaaagccgattcgctccacagtcctcagcttggattggcatcccaacaacgttttgctggcagcaggatcatgtgacttcaaatgcagagtgttttctgcctacattaaagaagtggatgaaaagccagccagcacgccctggggcagcaagatgccttttgggcagctgatgtcagagtttggtggcagtggcactggtggctgggtccacggggtaagcttctctgccagtgggagccgcctggcctgggtcagccacgacagcaccgtgtctgttgctgatgcctcaaaaagtgtgcaggtctcgactctgaagacagagttcctgccgctcctaagtgtgtcatttgtctcagagaacagcgtcgtggctgctggccatgactgctgcccaatgctctttaactacgatgaccgcggctgcctgaccttcgtctccaagttagatattccaaaacagagcatccaacgcaacatgtctgccatggaacgcttccgcaacatggacaagagagccacaactgaggaccgcaacacggccttggagacgctgcaccagaatagcatcactcaagtctctatttatgaggtggacaagcaagattgtcgcaaattttgcactactggcatcgatggagccatgacaatttgggatttcaagaccctcgagtcttccatccagggcctccggataatgtgaagctgagtgagcctccgccatccagcatgacaaactgtggccgaccgcagctgtgccgtggcacgatggcgaggaagccagccccaaggaaacactgaaaacacatatcacgccaatgccgtgtggttttgtttgaatataaaattggtgaaagtgttgnnnnnnnnnnnnnnnnnnnnnnnnnnnnnnnnnnnnngcgatttcattccattcttgaccaaagcttctctttaagtagtttattatggaaaattgtcacactaacttaaaagacagggtgagggagatatgtaaattgtccactagaaaattaaataaaagaactgaatgtgggannnnnnnnnnnnnnnnnnnnnnnnnnnnnnnnnnnnnnnnnnnnnnnnnnnnnnnannnaaanaaaaattgtggggccgcctcggcccttagaaaaactttccaaaaccatttcttttggcccgcgggccccctaaggaaaggggaaattgggccaaaccgtgttccccaagaaaacccggggcatgaacaaaaggcttggaattccccccc

SEQ ID NO: 252453 - DNA, 540 bp, Homo Sapiens
  misc_feature (450)..(450): n is a, c, g, or t
  misc_feature (478)..(478): n is a, c, g, or t
  misc_feature (521)..(521): n is a, c, g, or t
gcactggtggctgggtccacggggtaagcttctctgccagtgggagccgcctggcctgggtcagccacgacagcaccgtgtctgttgctgatgcctcaaaaagtgtgcaggtctcgactctgaagacagagttcctgccgctcctaagtgtgtcatttgtctcagagaacagcgtcgtggctgctggccatgactgctgcccaatgctctttaactacgatgaccgcggctgcctgaccttcgtctccaagttagatattccaaaacagagcatccaacgcaacatgtctgccatggaacgcttccgcaacatggacaagagagccacaactgaggaccgcaacacggccttgggagacgctgtcaccagaattaggcatcactcaagttttctaatttatggaggtgggacaaggcaagatttgtcgcaaatttttgcattattgggcntcgatgggagccatggacaatttggggntttcaaggacccttcgagtttttccttcccggggtcttccggntaattttgaaggttgagtt

SEQ ID NO: 252454 - DNA, 2145 bp, Homo Sapiens
  misc_feature (519)..(526): n is a, c, g, or t
  misc_feature (640)..(640): n is a, c, g, or t
  misc_feature (658)..(701): n is a, c, g, or t
tttgattgcctagcatgattcaggcagggaggtaaatacttactcacattatctcatttaattttcacaacagcctcctgagtcccatcattatcatggtttataggtgaggaaattgagactagggtggtgaagtcacttgcctcaagatgaacagctggtagatcacatgcgtggtggcaccgggtgtggccctggaggactcgtgctagtggatctgtttttctagtgattcttttgttttgtcccttacagtgatgatgcgggtgtgctggttggtgagacaggacagccggcaccagcgaatcagacttccacatttggaagcagttgtgattgggcgtggcccagagaccaagatcactgataagaaatgttctcgacagcaagagttgaaagaagagtgcaacaagaaacatggcaaggaaacacacaggaagagaaagagatcacaccaacagtgactcaatagaaattgggaaggaccaagaggtgaagctgcagcctggccaggttctnnnnnnnncaacactggccaatgatctgtacccataaagaagggaaaatgaggaacagatcaaaaaggaatccctgggccactggaaacaaagcaggaagagaaagagatcaggcaacagtnattctatagaaagggatnnnnnnnnnnnnnnnnnnnnnnnnnnnnnnnnnnnnnnnnnnnnccactctggccaatgctctgtgcccctaaagaagggaaaagatgcacctatcaaaaaggaatccctgggccactggagtcaaggcttgaagatttctatgcaggaccccaaaatgcaggtttacaaagatgagcaggtggtggtgataaaggataaatacccaaaggcccgttaccattggctggtcttaccgtggacctccatttccagtctgaaggctgtggccagggaacaccttgaactccttaagcatatgcacactgtgggggaaaaggtgattgtagattttgctgggtccagcaaactccgcttccgattgggctaccacgccattccgagtatgagccatgtacatcttcatgtgatcagccaggattttgattctccttgccttaaaaacaaaaaacattggaattctttcaatacagaatacttcctagaatcacaagctgtgatcgagatggtacaagaggctggtagagtaactgtccgagatgggatgcctgagctcttgaagctgccccttcgttgtcatgagtgccagcagctgctgccttccattcctcagctgaaagaacatctcaggaagcactggacacagtgattctgcagagcctgagctgctgctgtggtgtggcccactggagcaaactgctggcacctattctgggttgcttgtgaacttctactcatttcctaaattaaaacatgcagctttttcacaaatttattctattattgagtggccacaatgtagagtggctcaaagtacttcaggattaggaatttgggtttgtcatagatgtattctctggtgagggtggctgggatatacctgacccaccatcttcagaaggacccatgtcaggtctgaccattgggagcaaagccatgttcacactgacctaatgcagagtatggaagcattgggctggttatacatttctgtttcttagatttatcctccgcctctgtaggcatggacaacctttaatcagagcatctagagtggcctcttgtttatcctgaagaaactgatgggtcttgttttctgttagtctgttttgtaatattcttttcccttccttcatggggaggcttagtttgtccagtccttccatgcccttctatcccagattacctaaatgttcccttctcaggaattctgtctcatcagttcttcacagtgagaaaagaggctagatgatggtgtggggggttggagttttcttctaataccgagggttcctggctgtgaggaaacagccacatgttcgtcatgattgagctgtgaagtcttcttggacctgttgtctgaaaataaagttaatttgtttgaggcatctctcttaagtaggtggaaactattgaagttcagctaacaatcacagcataggttctgatgcatggaaaggtggttggtgaatgaaaaagtacgtagagc

SEQ ID NO: 252455 - DNA, 436 bp, Homo Sapiens
  misc_feature (43)..(43): n is a, c, g, or t
  misc_feature (193)..(193): n is a, c, g, or t
cccccttccccttcaaggggaaggccctaagtttggccccagnccccttcccaagcccctcccaacccccagattaccctaaatgttccccctcctcaggaattcctgtcctcatcagttccttcacagtgagaaaagaggcctagatgatggtgtggggggttggagttttccttcctaatacccgagggtnccctggctgtgaggaaacagcccacatgttcgtcatgattgagctgtgaagtcttcttggacctgttgtctgaaaataaagttaatttgtttgaggcatctctcttaagtaggtggaaactattgaagttcagctaacaatcacagcataggttctgatgcatggaaaggtggttggtgaatgaaaaaagttgcgtagagccactactttctttttccctgagaataaatttggataaaacaa

SEQ ID NO: 252456 - DNA, 974 bp, Homo Sapiens
  misc_feature (94)..(94): n is a, c, g, or t
  misc_feature (735)..(743): n is a, c, g, or t
gctataagttggtatcactgcaaatctcaagtcccaaataatctctttttctggatagaaagttattcaaaagggagcacaaaagagcaagctntggggcatactgacaaacacttcattggttagaagagaataattttaaaaatcaaataaaattgaggctggcataggaagtacagattaaatacaggttaaatagctaccagaaacacagaagaggtggttaataaaaactgagattgcttcagaggacacaggagggttgatgagacagtctattttccttccaccatcttccacgagagtcaggaaaagggttctgtgagcacccaacctggagcggtcacctgtctcttccatacacaggaggatgctaagacccagttagctttaaatggtttttagaaagacttacctagtcaaaagtggttaatttgaacttttcaaacttgcaaaagcatatacatttgatatcatcatctgagaagcaattcttagaaaaaaatgtttgcttcaatgtctaaagaaatccagtgaaagttttagaaacattgccagctagacgtctccgagttagagttgattgatatactggattgggatggagaggatgagaactgaaaaagaactgctccagcctctgcctcagaagaggaaactcagcttggagatgacagaattgggtagcggagtagatgctagagcccatgacagatagaaaactacccccatttnnnnnnnnncaacaactcattaactctatctctttgaggttttggagaacaggaagtttatgtgaagttattgaacacgtcatattaagaacatttcataactaaccccaaaccaaaatgtagatgcatagctagctgtgcaagtttcccaatgctcttcctatctcctaataagtcacacagaaagactatgtgatagcctggattttcttgaagaaattttaaaagaactgattttcc

SEQ ID NO: 252457 - DNA, 640 bp, Homo Sapiens
gtgcccacccagattgaggatggtctgcctttcccagtccactgactcaaatgttaaatctcctttggcagcaccctcacagatgtacccgggaacactttgcatccttctattcaatcaagttgatactcagtattaaccatcacagtccatttgggcaactataccaaattaccatagaccaggtgacttaaacagcagttatttctcacagttccggaggctgggaaatccaacatctaagtggtagcatatctggtgtctggtaaggcatgctcccagatcttaccagatgtcagtcttttgatgttctcacatggcagaaaaagaggatgcaaactctcaagtatatccttaagggcacaaattccattcatgaggactctaccctcatcacctaattacctcccaaaggccccaccttctgatactgtcactttggggatactgtctcccctttgaattctgggggggatacaaacattcagtttgtaacaatagccttatgatttagaggttacttgttcattcacctagacctcaaattgcattttacagctagtcaagtatatctttctctgatttgatagtgtgacctaaaaggggaccattgtttgaaatatcattagagttgcttatt

SEQ ID NO: 252458 - DNA, 839 bp, Homo Sapiens
  misc_feature (71)..(109): n is a, c, g, or t
ggggtcataatatgaagtagcccattaacctttccctttaaacaggccttttgatgttagttcttatcccnnnnnnnnnnnnnnnnnnnnnnnnnnnnnnnnnnnnnnncaacaatacatgaagatgtaagggaagagattaacgagatacaattcattaagtataaaaatatgttgtttcaaattcagaataatttaataactcttcgttatttcatatgtatctggaaatgggacagatacgtgtcctgatcctgtcacaagaggtagaattccagcatttggtacgacgttccaagacagggtcaaagtgacattcctgtttcccttgagaccatttccatcgtcaaagaaaaaatattttgttttcatatctttcagcagcagcttcggattatcacctctcaaaacaatcttgtcccataggacaacttggttcagagcattattttttgttgaatattctgctgataaataaagaaacaactgcttaacattccaatcaaatatattctctagatcagcagttatatcaaatgtgataaatcccagatcacttctttctctaggtccagtgaaatcttctacattttttagcatgatccgcgagacgtgcagccgcaccgggacgctcctgtctttgaaggcggtggtgatgaagcagccgaaggtgagcgccgccatcacgctcagcgagaaggcgaacagtgagttcgcccgcgacagcaccgtgttcatcgcgatcgtctcccacgagtccggactccacacgcacacccaggctcccgttccggcggcggaccggctccctgcgatccgcgccgtctgcggtgcgcccc

SEQ ID NO: 252459 - DNA, 988 bp, Homo Sapiens
  misc_feature (552)..(552): n is a, c, g, or t
gcgcgggcggcggcgcggccatgaagctgaagctgaagaacgtgtttctcgcctacttcctggtgtcgatcgccggcctcctctacgcgctggtacagctcggccagccatgtgactgccttcctcccctgcgggcagcagccgagcagctacggcagaaggatctgaggatttcccagctgcaagcggaactccgacggccaccccctgcccctgcccagccccctgaacccgaggccctgcctactatctatgttgttacccccacctatgccaggctggtacagaaggcagagctggtacgactgtcccagacactgagcctggtgccccggctgcattggctgctggtggaggatgctgagggtcccaccccgctggtctcagggctgctggctgcctctggcctcctcttcacacacctggtggtcctcacgcccaaagcccagcggcttcgggagggcgagcctggctgggttcatccccgtggtgtcgagcagcggaacaaggccctggactggctccggggcagagggggtgctgtgggtgggngagaaggacccaccaccaccagggacccaaggagtcgtctactttgctgacgatgacaacacctacagccgggagctgtttgaggagatgcgctggacccgtggtgtctcagtgtggcctgtggggctggtgggcggcctgcgattcgagggccctcaggtacaggacggccgggtagtgggcttccacacagcatggggagcccagcaggccccttccctgtggatcatggctgggatttgcccgtggcccctgccccttggctgtttagaataagccccaatggcccaaattttgaattccacccggtttcccccgggggcccaccttgggaaaaaacaaatccttttcttgaaagcccacccctttttgggaatcccccaagggacccgggaaacccccggggcttgcgcaaaattgaacctttggggaaacc

SEQ ID NO: 252460 - DNA, 1284 bp, Homo Sapiens
  misc_feature (979)..(979): n is a, c, g, or t
  misc_feature (1027)..(1027): n is a, c, g, or t
  misc_feature (1262)..(1262): n is a, c, g, or t
tgcctactatctatgttgttacccccacctatgccaggctggtacagaaggcagagctggtacgactgtcccagacactgagcctggtgccccggctgcattggctgctggtggaggatgctgagggtcccaccccgctggtctcagggctgctggctgcctctggcctcctcttcacacacctggtggtcctcacgcccaaagcccagcggcttcgggagggcgagcctggctgggttcatccccgtggtgtcgagcagcggaacaaggccctggactggctccggggcagagggggtgctgtgggtggggagaaggacccaccaccaccagggacccaaggagtcgtctactttgctgacgatgacaacacctacagccgggagctgtttgaggagatgcgctggacccgtggtgtctcagtgtggcctgtggggctggtgggcggcctgcgattcgagggccctcaggtacaggacggccgggtagtgggcttccacacagcatgggagcccagcaggcccttccctgtggatatggctggatttgccgtggccctgcccttgctgttagataagcccaatgcccaatttgattccaccgctccccggggccacctggagagcagtcttctgagccaccttgtggatcccaaggacctggagccacgggctgccaactgcactcggggactgggtggggcatactcggaaagagaaccccaagatgaaccaagaggaacagctgcagcggcaggggccgggactcagacccagcaattgaggtgtgatggcggccccaccccaactaccacctcttttcaggcacagaccttgtggggactgggccccaggcctgccccaggatgtgggttttccaagtccctgaccccttggagagcagaaagtgggcccctctggcccctcccaggccccaggggcaatggtccctggcttgcttcaaccccctccccctaagnccttgcccgtggggggcactggccccaacaggcttgggggacacaaancaacccccttgtgggtttgaaagtaaggttttggccccttgttcttagcggggggggaacccgaaaggcggcccgtctcgggccccccccggtaaagggaagggggtcaccctctgacctacaccgcggggcaccacttttttttgggggactctgggcctctctagcccatctggtggggcgccccttcacagaggactacttcgggtgtcctggaccagcacccttctgtcgncccctatgagaaccccacgtcg

SEQ ID NO: 252461 - DNA, 1302 bp, Homo Sapiens
  misc_feature (1160)..(1206): n is a, c, g, or t
gagataggaacggtcatacttagtactgaaaggcagacaataaaatgggccatgaaaggggggggaaaggtactgtctattgttcgagggattcaaccagagataaaacctatatacaagcatgtgtgtagctcgaaataaaaataaaaggactatttcatgtcatgactgcttgttggcttcctcttcatatgcattccctgtgccattctgtacataggatgaaccagaaccaaggccatacaaatgaccacaatatttggcatcatcaatatgatcttcaaagaacattttgagatttttgcagctcttcatgaggtacttcacatcataaatgacaggaaaaaacaatcgaaggatctcaaagaagtcaagttcttcttcaggcaagttagagttggttacagatcttcatgaagtacctcaaagtcataaatgacaggaaaaaacaatcgaaggatctcaaagaagtcaagttcttcttcaggcaagttagagttggttaggattttgattaagtagccaaagtcgtaaccgctatgaaatgacaaccatttgaccccttcacagaggaccactccagaagtcataagaagttctgcaaagtactgggtttcaattccttcctcctcatgttttttaaactggataccagatgttgttagtagctctatagagtcctgggcatacatgtcctccgtcaaattaaatttaaaattaaactgccaagttgaagttcctggagggtattctccttgctcattcataaatgtcagtcctagctgaattatctttaacaagtctacattacaccgcaatagttggtattgatagtcagcattgctcctgaattctccaatgggtcttgcaaccacacctggaaactcggtgtccatagcaacgtaattatattttcggataacttgacgaattttcttcatctcttcatccaagttgcaagcccaaacttcacaaattctttggctatgatctacagttgccgctggcatagtgagggcacaagggagtctagatgccaagcatcaaaatgttatacttgattgaagatttgtttcataaaatattttatcctttatttatgtacttgtgtcgctgagctcgcgctcctcctcctcctcctcgccatagagacagcactnnnnnnnnnnnnnnnnnnnnnnnnnnnnnnnnnnnnnnnnnnnnnnngccccatagacacctctcgcccagcgaagggaaaggcgagcaggagctgcgccgcaccgtgctgcgccgtcgcttttcgcacgtcctgacgggccc

SEQ ID NO: 252462 - DNA, 674 bp, Homo Sapiens
  misc_feature (663)..(663): n is a, c, g, or t
aggatttgaagaagatgaagagcatatccatatacaacaatgggcacttactgaaggccgtcttaaagttacgttgttagaatgtagcaggttactcatttttggatcctatgacagagaggcaaatgttcattgcacacttgagttaagcagtagtgtttgggaagaaaaacagaggagttctattaagacggttgaattaataaaaggaaatttacaaagtgttggacttacacttcgtcttgtccagtcaactgatgggtatgctgggcacgtcatcattgaaactgtggctccaaactcgcctgctgcaattgcagatcttcagcggggagatcgacttatcgccattggaggtgtgaaaatcacatcaacactgcaagtgttgaagcttatcaagcaggctggtgaccgagtcctggtgtactatgaaaggcctgttggccagtagtaatcaaggtgcagtgctgcaagataactttggccagttggaagaaaactttttgtcaagctcatgccaatcgggtcatgaagaggaagctgccaggttgacagtagatactgaaagtagagagctggattctgaatttgaagacttggcaagtgatgtcagagcacaaaatgagttcaaagatgaggcacaatcattaagtcatagtcccnaacgtgttcca

SEQ ID NO: 252463 - DNA, 383 bp, Homo Sapiens
tagtggatcccccgggctgaggaattcggcacgaggctgatcgacttcgaggtgcgctcgcagtttgaagggcggcccatgccccagctcacctccatcatcgtcaaccagctcaagaagatcatcaagcgcaagcacaccctaccgaattacaagatcaggttgaattaatggaaatttacaaagtgttggacttacacttcgtcttgtccagtcaactgatgggtatgctgggcacgtcatcattgaaactgtggctccaaactcgcctgctgcaattgcagatcttcagcggggagatcgacttatcgccattggaggtgtggtcctggtgtactatgggcctgttggccagagtaatcaaggtgcagtgctgcaagtct

SEQ ID NO: 252464 - DNA, 582 bp, Homo Sapiens
  misc_feature (328)..(341): n is a, c, g, or t
  misc_feature (459)..(459): n is a, c, g, or t
  misc_feature (534)..(534): n is a, c, g, or t
  misc_feature (561)..(561): n is a, c, g, or t
aacacgcatcatgggtccctgatctatgaaatgaacacaacctctctgaggctggatgatctggaggaagggggcatggagcaaatttgaggctctgattgctgagccagcctcctcccaggcggtttccccaggactctcgtaggaaataaatagccctttcaagattcctcagctgcctcaccccctgcacatgtgcctggggtgtggcctagaagggagtgatgttcttactctggtggtctgtgcttctgaacacaggctacatgcacacactgacaactaccaataaacagacaggggaaggtctttcagccattttctcttnnnnnnnnnnnnnnttagatggagtcttgctctgtcacccaggttggagtgcagtggcacaatcagctcactgcaacccctcctcctaggttcaagcgattgagtagctgagattacagggcatgcattcantatgccggggttttttgttattttttagtaggagatgggggttttaccatgttgggccagggttagttttcaaantcctggacctaggtgatggcacccacnttgggccttcccaaagtgttt

SEQ ID NO: 252465 - DNA, 1224 bp, Homo Sapiens
  misc_feature (1194)..(1194): n is a, c, g, or t
  misc_feature (1212)..(1212): n is a, c, g, or t
ggaacttagggctgcttgtggctgggcactcgcgcagaggccggcccgacgagccatggttgctgggagcgacgcggggcgggccctgggggtcctcagcgtggtctgcctgctgcactgctttggtttcatcagctgtttttcccaacaaatatatggtgttgtgtatgggaatgtaactttccatgtaccaagcaatgtgcctttaaaagaggtcctatggaaaaaacaaaaggataaagttgcagaactggaaaattctgaattcagagctttctcatcttttaaaaatagggtttatttagacactgtgtcaggtagcctcactatctacaacttaacatcatcagatgaagatgagtatgaaatggaatcgccaaatattactgataccatgaagttctttctttatgtgcttgagtctcttccatctcccacactaacttgtgcattgactaatggaagcattgaagtccaatgcatgataccagagcattacaacagccatcgaggacttataatgtactcatgggattgtcctatggagcaatgtaaacgtaactcaaccagtatatattttaagatggaaaatgatcttccacaaaaaatacagtgtactcttagcaatccattatttaatacaacatcatcaatcattttgacaacctgtatcccaagcagcggtcattcaagacacagatatgcacttatacccataccattagcagtaattacaacatgtattgtgctgtatatgaatggtattctgaaatgtgacagaaaaccagacagaaccaactccaattgattggtaacagaagatgaagacaacagcataactaaattattttaaaaactaaaaagccatctgatttctcatttgagtattacaatttttgaacaactgttggaaatgtaacttgaagcagctgctttaagaagaaatacccactaacaaagaacaagcattagttttggctgtcatcaacttattatatgactaggtgcttgctttttttgtcagtaaattgtttttactgatgatgtagatacttttgtaaataaatgtaaatatgtacacaagtgactaggtggtttggctactgttttcctaaggataggaaaaataaggggtcacatacccttttaaaatctatactctttctcccttggctttagggggaaaaattaatnccttgtagggggccttcntgggggtgaggg

SEQ ID NO: 252466 - DNA, 1063 bp, Homo Sapiens
  misc_feature (359)..(453): n is a, c, g, or t
  misc_feature (457)..(468): n is a, c, g, or t
  misc_feature (475)..(475): n is a, c, g, or t
  misc_feature (600)..(600): n is a, c, g, or t
  misc_feature (720)..(720): n is a, c, g, or t
  misc_feature (904)..(904): n is a, c, g, or t
  misc_feature (920)..(920): n is a, c, g, or t
ccgccacagcagccccctcctccttctccacctcaaccttctcgcctggccccctacccacatcctgccaccacccgaggggaccgcaagcgggcagagggtgaggccctggagggcgagtgccaggggctggaggcacggaatcgcgagctgaaggaacgggcagagtccgtggagcgcgagatccagtacgtcaaggacctgctcatcgaggtttacaaggcccggagccagaggacccgtagctgctagaagggcaggggtgtggcttctgggggctggtcttcagctctggcgccttcatccccctgcctctaccttcattcccccctctcggccgggtgcagtggcttatgctnnnnnnnnnnnnnnnnnnnnnnnnnnnnnnnnnnnnnnnnnnnnnnnnnnnnnnnnnnnnnnnnnnnnnnnnnnnnnnnnnnnnnnnnnnnnnnntatnnnnnnnnnnnntcaaccnttcttccccaccaaaccacccaaatcctctctactcttatccttttatcctctgtctctgcttatcacctctcttgcgtatttctggatctccttccctcctttctcgtccaaatcatgaaatgnatgaccttaatcaatgtctatgcccgtcacataacagccgaggcaccgaggcccacagggaagcagctgggagcttggaaacctggtctcttgaatttcaaacctggtttcttacaggtngttgtctggggtgggtggagttgcgacaggatagagctgaaggactatgcaaatgaggaagtaagtcagggcgggctttaagaaaggggacccatatcctacaggcaaaaagcaggctaggtgaccttgggacactacgctaagggagggaggctaaaggcggccaggtttgcagtgcgggaanctgagcaggccattgngaggtggtgcagggcagggctgtagttgttgactgggtgttcattttagctctaagaaaaaaaatcagtgtttcgtgaaggtgttggagaggggctgtgtctgggtgagggatggcggtgtactgattttttttggcggttat

SEQ ID NO: 252467 - DNA, 1206 bp, Homo Sapiens
  misc_feature (17)..(17): n is a, c, g, or t
  misc_feature (23)..(23): n is a, c, g, or t
  misc_feature (26)..(26): n is a, c, g, or t
  misc_feature (46)..(46): n is a, c, g, or t
  misc_feature (50)..(50): n is a, c, g, or t
  misc_feature (52)..(52): n is a, c, g, or t
  misc_feature (101)..(101): n is a, c, g, or t
  misc_feature (109)..(109): n is a, c, g, or t
  misc_feature (124)..(124): n is a, c, g, or t
  misc_feature (128)..(128): n is a, c, g, or t
  misc_feature (160)..(160): n is a, c, g, or t
  misc_feature (184)..(184): n is a, c, g, or t
  misc_feature (315)..(315): n is a, c, g, or t
  misc_feature (492)..(600): n is a, c, g, or t
cccaaccccctttttgntacttngantggtgtcattactgcgcacngagncnggcaggagaagtgagatgccgctttgccgccgcaaagcacaccctcgtnctattcancttaaccttttcgcntgcnccctacacacatcctgccaccacccgaggggncgcaagcaaaagagagagaccagnacaagtcgccggctctgaggtaccgccagcggaagcgggcagagggtgaggccctggagcgcgagtgccaggggctggaggcacggaatcgcgagctgaaggaacgggcagagtccgtggagcgcgagatnccagtacgtcaaggacctgctcatcgaggtttacaaggcccggagccagaggacccgtagctgctagaagggcaggggtgtggcttctaggggctggtcttcagctctggcgccttcatccccctgcctctaccttcattccaaacccctctcggccgggtgcagtggcttatgctnnnnnnnnnnnnnnnnnnnnnnnnnnnnnnnnnnnnnnnnnnnnnnnnnnnnnnnnnnnnnnnnnnnnnnnnnnnnnnnnnnnnnnnnnnnnnnnnnnnnnnnnnnnnntcaacccttcttccccaccaaaccacccaactcctctctactcttatccttttatcctctgtctctgcttatcacctctcttgcgtatttctggatctccttccctcctttctcgtccaaatcatgaaatgtttggccttagtcaatatctatgcccgtcacataacagccgaggcaccgaggcccacagagaagcagctgggagcttggaaacctggtctcttgaatttcaaacctggtttcttacaggtggttgtctggggtgggtggagtggcgacaggatagagctgaaggactatgcaaatgaggaagtaagtcagggcgggctttgagaaggggacccatatcctacaggcaaaaagcaggctaggtgaccttgggacactacgctaagggagggaggctaaaggcagccaggtttgcagtgcgggaagatgagcaggccagtgggaggaggggcagggcagggctgtagttggtgactgggtgttcattttagctctaagaaaaaaaatcagtgtttcgtgaaggtgttggagaggggctgtgtctgggtgagggatggcggggtactgatttttttgggaggttatgagcaaaaataa

SEQ ID NO: 252468 - DNA, 981 bp, Homo Sapiens
  misc_feature (14)..(14): n is a, c, g, or t
  misc_feature (585)..(693): n is a, c, g, or t
  misc_feature (829)..(829): n is a, c, g, or t
  misc_feature (839)..(839): n is a, c, g, or t
  misc_feature (848)..(848): n is a, c, g, or t
  misc_feature (901)..(901): n is a, c, g, or t
  misc_feature (905)..(905): n is a, c, g, or t
  misc_feature (974)..(974): n is a, c, g, or t
caaaaaaacaaaancccgccaaccctcacccaaacacagcccctctccaacaccttcacgaaacactgattttttttcttagagctaaaatgaacacccagtcaccaactacagccctgccctgcccctcctcccactggcctgctcatcttcccgcactgcaaacctggccgcctttagcctccctcccttagcgtagtgtcccaaggtcacctagcctgctttttgcctgtaggatatgggtccccttctcaaagcccgccctgacttacttcctcatttgcatagtccttcagctctatcctgtcgccactccacccaccccagacaaccacctgtaagaaaccaggtttgaaattcaagagaccaggtttccaagctcccagctgcttccctgtgggcctcggtgcctcggctgttatgtgacgggcatagacattgactaaggccaaacatttcatgatttggacgagaaaggagggaaggagatccagaaatacgcaagagaggtgataagcagagacagaggataaaaggataagagtagagaggagttgggtggtttggtggggaagaagggttgannnnnnnnnnnnnnnnnnnnnnnnnnnnnnnnnnnnnnnnnnnnnnnnnnnnnnnnnnnnnnnnnnnnnnnnnnnnnnnnnnnnnnnnnnnnnnnnnnnnnnnnnnnnnagcataagccactgcacccggccgagaggggtttggaatgaaggtagaggcagggggatgaaggcgccagagctgaagaccagcccccagaagccacacccctgcccttctagcagctacggggtcctctggctcngggccttgtnaacctcgantgagctaggtccttgacgtactggagtgtcgcgctctacggactctgccggtncttnagctcgcgattccgtgcctcagcccttgcacgtgccctcagggctcaccctctgccgcttcgctggggncctagag

SEQ ID NO: 252469 - DNA, 1471 bp, Homo Sapiens
  misc_feature (6)..(6): n is a, c, g, or t
  misc_feature (11)..(11): n is a, c, g, or t
  misc_feature (16)..(16): n is a, c, g, or t
  misc_feature (20)..(21): n is a, c, g, or t
  misc_feature (24)..(24): n is a, c, g, or t
  misc_feature (26)..(26): n is a, c, g, or t
  misc_feature (28)..(29): n is a, c, g, or t
  misc_feature (35)..(35): n is a, c, g, or t
  misc_feature (41)..(42): n is a, c, g, or t
  misc_feature (53)..(53): n is a, c, g, or t
  misc_feature (57)..(57): n is a, c, g, or t
  misc_feature (94)..(94): n is a, c, g, or t
  misc_feature (99)..(99): n is a, c, g, or t
  misc_feature (119)..(119): n is a, c, g, or t
  misc_feature (127)..(127): n is a, c, g, or t
  misc_feature (129)..(129): n is a, c, g, or t
  misc_feature (139)..(139): n is a, c, g, or t
  misc_feature (152)..(152): n is a, c, g, or t
  misc_feature (161)..(161): n is a, c, g, or t
  misc_feature (324)..(324): n is a, c, g, or t
  misc_feature (442)..(550): n is a, c, g, or t
  misc_feature (795)..(795): n is a, c, g, or t
  misc_feature (1211)..(1231): n is a, c, g, or t
  misc_feature (1332)..(1351): n is a, c, g, or t
gccggnaagangaagngggnnccncntnncccccncaacannaccccctcctncttntcaccttaaccttttcgcttgccccctacccacatcntccanccacccgagggaccgaaagnaaaagaananagaccagaanaagtcggcggctntgagtaccnccagcggaagcgggcagagggtgaggccctggagggcgagtgccagggctggaggcacggaatcgcgagctgaaggaacgggcagagtccgtggagcgcgagatccagtacgtcaaggacctgctcatcgaggtttacaaggcccggagccagaggacccgtngctgctagaagggcaggggtgtggcttctgggggctggtcttcagctctggcgccttcatccccctgcctctaccttcattccaaacccctctcggccgggtgcagtggcttatgctnnnnnnnnnnnnnnnnnnnnnnnnnnnnnnnnnnnnnnnnnnnnnnnnnnnnnnnnnnnnnnnnnnnnnnnnnnnnnnnnnnnnnnnnnnnnnnnnnnnnnnnnnnnnntcaacccttcttccccaccaaaccacccaactcctctctactcttatccttttatcctctgtctctgcttatcacctctcttgcgtatttctggatctccttccctcctttctcgtccaaatcatgaaatgtttggccttagtcaatgtctatgcccgtcacataacagccgaggcaccgaggcccacagggaagcagctgggagcttggaaacctggtctcttgaatttcaaacctggtttctnacaggtggttgtctggggtgggtggagtggcgacaggatagagctgaaggactatgcaaatgaggaagtaagtcagggcgggctttgagaaggggacccatatcctacaggcaaaaagcaggctaggtgaccttgggacactacgctaagggagggaggctaaaggcggccaggtttgcagtgcgggaagatgagcaggccagtgggaggaggggcagggcagggctgtagttggtgactgggtgttcattttagctctaagaaaaaaaatcagtgtttcgtgaaggtgttggagaggggctgtgtctgggtgagggatggcggggtactgatttttttgggaggttatgagcaaaaataaaacgaaacatttcctctagatgatacctcgcccccaaccccctctccgtagtctnnnnnnnnnnnnnnnnnnnnngcaactccaacacccactacctcccctcgtccttctttgatttatctacttccatgaccgccatcccgttaaaaattttttggtcacccttcgcccccctnnnnnnnnnnnnnnnnnnnncctcccttggggccccgccggggcgccagctggtgtaagggaaaacggggcctatatagtgtggttccctagaaaaacaccgggggactagaaacagacggggttgggttatttcccccc

SEQ ID NO: 252470 - DNA, 1449 bp, Homo Sapiens
  misc_feature (572)..(680): n is a, c, g, or t
  misc_feature (1177)..(1271): n is a, c, g, or t
  misc_feature (1355)..(1395): n is a, c, g, or t
ccccgccatccctcacccagacacagcccctctccaacaccttcacgaaacactgattttttttcttagagctaaaatgaacacccagtcaccaactacagccctgccctgcccctcctcccactggcctgctcatcttcccgcactgcaaacctggccgcctttagcctccctcccttagcgtagtgtcccaaggtcacctagcctgctttttgcctgtaggatatgggtccccttctcaaagcccgccctgacttacttcctcatttgcatagtccttcagctctatcctgtcgccactccacccaccccagacaaccacctgtaagaaaccaggtttgaaattcaagagaccaggtttccaagctcccagctgcttccctgtgggcctcggtgcctcggctgtaatgtgacgggcatagacattgactaaggccaaacatttcatgatttggacgagaaaggagggaaggagatccagaaatacgcaagagaggtgataagcagagacagaggataaaaggataagagtagagaggagttgggtggtttggtggggaagaagggttgannnnnnnnnnnnnnnnnnnnnnnnnnnnnnnnnnnnnnnnnnnnnnnnnnnnnnnnnnnnnnnnnnnnnnnnnnnnnnnnnnnnnnnnnnnnnnnnnnnnnnnnnnnnnagcataagccactgcacccggccgagaggggtttggaatgaaggtagaggcagggggatgaaggcgccagagctgaagaccagcccccagaagccacacccctgcccttctagcagctacgggtcctctggctccgggccttgtaaacctcgatgagcaggtccttgacgtactggatctcgcgctccacggactctgcccgttccttcagctcgcgattccgtgcctccagcccctggcactcgccctccagggcctcaccctctgcccgcttccgctggcggtacctcagagccgccgacttgttctggtctctcttcttttgcttgcggtcccctcgggtggtggcaggatgtgggtagggggccaggcgagaaggttgaggtggagaaggaggagggggctgctgtggcgggggcagaggcggcatccccacttcctcctgcccggcctcgttgcggcagtagatggccagcaagtccagagtatccaagacnnnnnnnnnnnnnnnnnnnnnnnnnnnnnnnnnnnnnnnnnnnnnnnnnnnnnnnnnnnnnnnnnnnnnnnnnnnnnnnnnnnnnnnnnnnnnnnggaggagcggggcatctaggaagaagtcttccatctgttccagctccttcttgaggagggaggccatagcttccaggtcaggtnnnnnnnnnnnnnnnnnnnnnnnnnnnnnnnnnnnnnnnnnaggctccagagggaggagagctgtgaaatcaactcgctcagtcatccaggtcag

SEQ ID NO: 252471 - DNA, 930 bp, Homo Sapiens
  misc_feature (678)..(679): n is a, c, g, or t
  misc_feature (681)..(681): n is a, c, g, or t
  misc_feature (683)..(683): n is a, c, g, or t
  misc_feature (704)..(704): n is a, c, g, or t
  misc_feature (706)..(707): n is a, c, g, or t
  misc_feature (709)..(709): n is a, c, g, or t
  misc_feature (712)..(712): n is a, c, g, or t
  misc_feature (718)..(718): n is a, c, g, or t
  misc_feature (721)..(721): n is a, c, g, or t
  misc_feature (724)..(724): n is a, c, g, or t
  misc_feature (737)..(737): n is a, c, g, or t
  misc_feature (742)..(742): n is a, c, g, or t
  misc_feature (747)..(748): n is a, c, g, or t
  misc_feature (758)..(759): n is a, c, g, or t
  misc_feature (763)..(763): n is a, c, g, or t
  misc_feature (766)..(766): n is a, c, g, or t
  misc_feature (768)..(768): n is a, c, g, or t
  misc_feature (782)..(782): n is a, c, g, or t
  misc_feature (796)..(796): n is a, c, g, or t
  misc_feature (808)..(808): n is a, c, g, or t
  misc_feature (823)..(823): n is a, c, g, or t
  misc_feature (835)..(835): n is a, c, g, or t
  misc_feature (856)..(856): n is a, c, g, or t
  misc_feature (863)..(865): n is a, c, g, or t
  misc_feature (868)..(868): n is a, c, g, or t
  misc_feature (872)..(872): n is a, c, g, or t
  misc_feature (884)..(884): n is a, c, g, or t
  misc_feature (886)..(886): n is a, c, g, or t
  misc_feature (888)..(888): n is a, c, g, or t
  misc_feature (896)..(896): n is a, c, g, or t
  misc_feature (904)..(905): n is a, c, g, or t
  misc_feature (907)..(907): n is a, c, g, or t
  misc_feature (911)..(912): n is a, c, g, or t
attccctgtcctcggatacagtctcttctcactacagtgtcgccgcctctgcctgcgtaccccggccatggctctgtagcctcgacccctttgtgcccccggcccgtctccgcgctcaccacgcctgcgctctccgctcccaccttctttcttcagccgaggccgccgccgcctctccttgctgcagccatggagtcttccactttcgccttggtgcctgtcttcgcccacctgagcatcctccagagcctcgtgccagctgctggtgcagcctctcctgttgccatcagtgcccagcacctgtgctacagccatgtcactcctggcgaccctggggctggagctggacagggccctgctcccagctagtgggctgggatggctcgtagactatgggaaactccccccggcccctgcccccctggctccctatgaggtccttgggggagccctggagggcgggcttccagtggggggagagcccctggcaggtgatggcttctctgactggatgactgagcgagttgatttcacagctctcctccctctggagcgtcccttggggcccggaagcctcccccaaccttccccaaccccacctgacctggaagctatggcctccctcctcaagaaggagctggaacagatggaagacttcttcctagatgccccgctccnncnanggcccccccgccgccactacnannancancactancancanccccctcctcccnctgtnccttnnctccttttanntccncancncctgttttggatantctggacttgctgnccatctattgcngcaacgaggccgggnaggaggcagtgnggatgccgcctctgccccgcnacagcannnccntctncttctccacttnancntctcgctngcccctannanatcnngcaccaccgaggggacgg

SEQ ID NO: 252472 - DNA, 1126 bp, Homo Sapiens
  misc_feature (3)..(3): n is a, c, g, or t
  misc_feature (5)..(5): n is a, c, g, or t
  misc_feature (11)..(11): n is a, c, g, or t
  misc_feature (19)..(19): n is a, c, g, or t
  misc_feature (24)..(24): n is a, c, g, or t
  misc_feature (26)..(26): n is a, c, g, or t
  misc_feature (33)..(33): n is a, c, g, or t
  misc_feature (36)..(36): n is a, c, g, or t
  misc_feature (39)..(39): n is a, c, g, or t
  misc_feature (45)..(45): n is a, c, g, or t
  misc_feature (52)..(52): n is a, c, g, or t
  misc_feature (62)..(62): n is a, c, g, or t
  misc_feature (67)..(67): n is a, c, g, or t
  misc_feature (96)..(96): n is a, c, g, or t
  misc_feature (107)..(107): n is a, c, g, or t
  misc_feature (142)..(142): n is a, c, g, or t
  misc_feature (151)..(151): n is a, c, g, or t
  misc_feature (170)..(170): n is a, c, g, or t
  misc_feature (174)..(174): n is a, c, g, or t
  misc_feature (329)..(329): n is a, c, g, or t
  misc_feature (401)..(509): n is a, c, g, or t
  misc_feature (754)..(754): n is a, c, g, or t
  misc_feature (1116)..(1116): n is a, c, g, or t
  misc_feature (1123)..(1123): n is a, c, g, or t
aananaccccncctctttnacacntnaactttncgntgnccctanacccacncctcccaccncccgngggaccgaaagaaaaagaagagaacccanaacaattcgcngctttgaggtaccgccagcggaagcggccagaggntgagccctngagggcgagtgccaggggntgangcacggaatcgcgagctgaaggaacgggcagagtccgtggagcgcgagatccagaacgtcaaggacctgctcatcgaggtttacaaggcccggagccagaggacccgtagctgctagaagggcaggggtgtggcttctgggggctggtcttcagntctggcgccttcatccccctgcctctaccttcattccaaacccctctcggccgggtgcagtggcttatgctnnnnnnnnnnnnnnnnnnnnnnnnnnnnnnnnnnnnnnnnnnnnnnnnnnnnnnnnnnnnnnnnnnnnnnnnnnnnnnnnnnnnnnnnnnnnnnnnnnnnnnnnnnnnntcaacccttcttccccaccaaaccacccaactcctctcaactcttatccttttatcctctgtctctgcttatcacctctcttgcgtatttctggatctccttccctcctttctcgtccaaatcatgaaatgtttggccttagtcaatgtctatgcccgtcacataacagccgaggcaccgaggcccacagggaagcagctgggagcttggaaacctggtctcttgaatttcaaacctggtttctnacaggtggttgtctggggtgggtggagtggcgacaggatagacctgaaggacctatgcaaatgaggaagtaagtcagggcgggctttgagaaggggaccccatatccctacaggcaaaaagcaggctaggtgaccttgggacactacgctaagggagggaggctaaaggcggcccaggtttgcagtgcgggaagatgagcaggccagtgggaggaggggcagggcagggctgtagttggtgactgggtgttcattttagctctaagaaaaaaaatcagtgtttcgtgaaggtgttggagaggggctgtgtctgggtgagggatggcggggtactgatttttttgggaggttatgagcaaaantagaaangaa

SEQ ID NO: 252473 - DNA, 1007 bp, Homo Sapiens
  misc_feature (397)..(399): n is a, c, g, or t
  misc_feature (412)..(412): n is a, c, g, or t
  misc_feature (459)..(459): n is a, c, g, or t
  misc_feature (560)..(561): n is a, c, g, or t
  misc_feature (568)..(568): n is a, c, g, or t
  misc_feature (572)..(572): n is a, c, g, or t
  misc_feature (578)..(578): n is a, c, g, or t
  misc_feature (581)..(581): n is a, c, g, or t
  misc_feature (585)..(585): n is a, c, g, or t
  misc_feature (588)..(588): n is a, c, g, or t
  misc_feature (591)..(592): n is a, c, g, or t
  misc_feature (594)..(594): n is a, c, g, or t
  misc_feature (596)..(597): n is a, c, g, or t
  misc_feature (599)..(602): n is a, c, g, or t
  misc_feature (697)..(697): n is a, c, g, or t
  misc_feature (701)..(701): n is a, c, g, or t
  misc_feature (721)..(769): n is a, c, g, or t
  misc_feature (772)..(772): n is a, c, g, or t
  misc_feature (942)..(942): n is a, c, g, or t
ggatctcggatcacagtctcttctcactacagtgtcgccgcctctgcctgcgtacgcccggccatggctctgtagcctcgacccctttgtgcccccggcccgtctccgcgctcaccacgcctgcgctctccgctcccaccttctttcttcagccgaggccgccgccgcctctccttgctgcagccatggagtcttccactttcgccttggtgcctgtcttcgcccacctgagcatcctccagagcctcgtgccagctgctggtgcagcctctcctgttgccatcagtgcccagcacctgtgctacagccatgtcactcctggcgaccctggggctggagctggacagggccctgctcccagctagtgggctgggatggctcgtagactatgggaaannncccccggcccctncccccctggctccctatgaggtccttgggggagccctggagggcggngcttccagtggggggagagcccctggcaggtgatggcttctctgactggatgactgaacgagttgatttcacagctctcctccctctggagcttcctttanncctcggnaccntctccnaantttnttnaanntnanntnnnntggaagctatggttctctcttcaagaaggagctggaacagatggaagacttcttcgtagatgccccgctcctcccaccaccctccccgccgccantaanaccaccaccactaccaccannnnnnnnnnnnnnnnnnnnnnnnnnnnnnnnnnnnnnnnnnnnnnnnngtnttggatactctggacttgctggccatctactgccgcaacgaggccgggcaggaggaagtggggatgccgcctctgcccccgccacagcagccccctcctccttcttccaccttcaaccttcttcgctggggccccctaacccacattcctggccaaccacccgagggganaccggaaggcaaaaggaaggaggaggaccaggaacaagttgggtgtttttgagggttaccgccag

SEQ ID NO: 252474 - DNA, 1015 bp, Homo Sapiens
  misc_feature (12)..(12): n is a, c, g, or t
  misc_feature (19)..(19): n is a, c, g, or t
  misc_feature (24)..(24): n is a, c, g, or t
  misc_feature (33)..(33): n is a, c, g, or t
  misc_feature (47)..(49): n is a, c, g, or t
  misc_feature (53)..(53): n is a, c, g, or t
  misc_feature (60)..(60): n is a, c, g, or t
  misc_feature (67)..(67): n is a, c, g, or t
  misc_feature (78)..(78): n is a, c, g, or t
  misc_feature (85)..(85): n is a, c, g, or t
  misc_feature (92)..(93): n is a, c, g, or t
  misc_feature (99)..(100): n is a, c, g, or t
  misc_feature (110)..(110): n is a, c, g, or t
  misc_feature (112)..(112): n is a, c, g, or t
  misc_feature (116)..(116): n is a, c, g, or t
  misc_feature (122)..(122): n is a, c, g, or t
  misc_feature (127)..(127): n is a, c, g, or t
  misc_feature (141)..(141): n is a, c, g, or t
  misc_feature (151)..(151): n is a, c, g, or t
  misc_feature (158)..(158): n is a, c, g, or t
  misc_feature (189)..(189): n is a, c, g, or t
  misc_feature (202)..(202): n is a, c, g, or t
  misc_feature (208)..(209): n is a, c, g, or t
  misc_feature (213)..(213): n is a, c, g, or t
  misc_feature (217)..(217): n is a, c, g, or t
  misc_feature (221)..(221): n is a, c, g, or t
  misc_feature (238)..(238): n is a, c, g, or t
  misc_feature (246)..(246): n is a, c, g, or t
  misc_feature (337)..(445): n is a, c, g, or t
ccaatacttccncccccgnggccncaactaagnagaggcccgaaaannngcgntttaagntccccancgaaacggcanaggtgancccctgnnggcgannccagggctgnanaaangaatcncgagntaaggaacgggcanagtccgtgangcgcganatccagtacgtcaaggccctgctcatcgagntttacaaggcccngagccnnaggncccntagntgctagaagggcagggntgtggctnctgggggctggtcttcagctctggcgccttcatccccctgcctctaccttcattccaaacccctctcggccgggtgcagtggcttatgctnnnnnnnnnnnnnnnnnnnnnnnnnnnnnnnnnnnnnnnnnnnnnnnnnnnnnnnnnnnnnnnnnnnnnnnnnnnnnnnnnnnnnnnnnnnnnnnnnnnnnnnnnnnnntcaacccttcttccccaccaaaccacccaactcctctctactcttatccttttatcctctgtctctgcttatcacctctcttgcgtatttctggatctccttccctcctttctcgtccaaatcatgaaatgtttggccttagtcaatgtctatgcccgtcacataacagccgaggcaccgaggcccacagggaagcagctgggagcttggaaacctggtctcttgaatttcaaacctggtttcttacaggtggttgtctggggtgggtggagtggcgacaggatagagctgaaggactatgcaaatgaggaagtaagtcagggcgggctttgagaaggggacccatatcctacaggcaaaaagcaggctaggtgaccttgggacactacgctaagggagggaggctaaaggcggccaggtttgcagtgcgggaagatgagcaggccagtgggaggaggggcagggcagggctgtagttggtgactgggtgttcattttagctctaagaaaaaaaatcagtgtttcgtgaaggtgttggagaggggctgtgtctgggtgagggatggcggg

SEQ ID NO: 252475 - DNA, 2454 bp, Homo Sapiens
ggtgcttgcgcgcgtgagctgagccggtgggtgagcggcggccacggcatcctgtgctgtgggggctacgaggaaagatctaattatcatggacctgcgacagtttcttatgtgcctgtccctgtgcacagcctttgccttgagcaaacccacagaaaagaaggaccgtgtacatcatgagcctcagctcagtgacaaggttcacaatgatgctcagagttttgattatgaccatgatgccttcttgggtgctgaagaagcaaagacctttgatcagctgacaccagaagagagcaaggaaaggcttggaaagattgtaagtaaaatagatggcgacaaggacgggtttgtcactgtggatgagctcaaagactggattaaatttgcacaaaagcgctggatttacgaggatgtagagcgacagtggaaggggcatgacctcaatgaggacggcctcgtttcctgggaggagtataaaaatgccacctacggctacgttttagatgatccagatcctgatgatggatttaactataaacagatgatggttagagatgagcggaggtttaaaatggcagacaaggatggagacctcattgccaccaaggaggagttcacagctttcctgcaccctgaggagtatgactacatgaaagatatagtagtacaggaaacaatggaagatatagataagaatgctgatggtttcattgatctagaagagtatattggtgacatgtacagccatgatgggaatactgatgagccagaatgggtaaagacagagcgagagcagtttgttgagtttcgggataagaaccgtgatgggaagatggacaaggaagagaccaaagactggatccttccctcagactatgatcatgcagaggcagaagccaggcacctggtctatgaatcagaccaaaacaaggatggcaagcttaccaaggaggagatcgttgacaagtatgacttatttgttggcagccaggccacagattttggggaggccttagtacggcatgatgagttctgagctgcggaggaaccctcatttcctcaaaagtaatttatttttacagcttctggtttcacatgaaattgtttgcgctactgagactgttactacaaactttttaagacatgaaaaggcgtaatgaaaaccatcccgtccccattcctcctcctctctgagggactggagggaagccgtgcttctgaggaacaactctaattagtacacttgtgtttgtagatttacactttgtattatgtattaacatggcgtgtttatttttgtatttttctctgggttgggagtatgatatgaaggatcaagatcctcaactcacacatgtagacaaacattagctctttactctttctcaaccccttatatgattttaataattctcacttaactaattttgtaagcctgagatcaataagaaatgttcaggagagaggaaagaaaaaaaatatatgctccacaatttatatttagagagagaacacttagtcttgcctgtcaaaaagtccaacatttcataggtagtaggggccacatattacattcagttgctataggtccagcaactgaacctgccattacctgggcaaggaaagatccctttgctctaggaaagcttggcccaaattgattttcttctttttccccctgtaggactgactgttggctaattttgtcaagcacagctgtggtgggaagagttagggccagtgtcttgaaaatcaatcaagtagtgaatgtgatctctttgcagagctatagatagaaacagctggaaaactaaaggaaaaatacaagtgttttcggggcatacattttttttctgggtgtgcatctgttgaaatgctcaagacttaattatttgccttttgaaatcactgtaaatgcccccatccggttcctcttcttcccaggtgtgccaaggaattaatcttggtttcactacaattaaaattcactcctttccaatcatgtcattgaaagtgcctttaacgaaagaaatggtcactgaatgggaattctcttaagaaaccctgagattaaaaaaagactatttggataacttataggaaagcctagaacctcccagtagagtggggatttttttcttcttccctttctcttttggacaatagttaaattagcagtattagttatgagtttggttgcagtgttcttatcttgtgggctgatttccaaaaaccacatgctgctgaatttaccagggatcctcatacctcacaatgcaaaccacttactaccaggcctttttctgtgtccactggagagcttgagctcacactcaaagatcagaggacctacagagagggctctttggtttgaggaccatggcttacctttcctgcctttgacccatcacaccccatttcctcctctttccctctccccgctgccaaaaagga

SEQ ID NO: 252476 - DNA, 1333 bp, Homo Sapiens
  misc_feature (1163)..(1172): n is a, c, g, or t
tcggcacagagcccgcgcgtcccctcgccgagtcccctcgccagattccctccgtcgccgccaagatgatgtgcggggcgccctccgccacgcagccggccaccgccgagacccagcacatcgccgaccaggtgaggtcccagcttgaagagaaagaaaacaagaagttccctgtgtttaaggccgtgtcattcaagagccaggtggtcgcggggacaaactacttcatcaaggtgcacgtcggcgacgaggacttcgtacacctgcgagtgttccaatctctccctcatgaaaacaagcccttgaccttatctaactaccagaccaacaaagccaagcatgatgagctgacctatttctgatcctgactttggacaaggcccttcagccagaagactgacaaagtcatcctccgtctaccagagcgtgcacttgtgatcctaaaataagcttcatctccgggctgtgccccttggggtggaaggggcaggattctgcagctgcttttgcatttctcttcctaaatttcattgtgttgatttctttccttcccaataggtgatcttaattactttcagaatattttcaaaatagatatatttttaaaatccctggcaaaactgttcccaaggaaatcctgcttgtcggtcgccttggccctcccacaaattactagacccttcggtaggcgcgctttcccaacacgtaaatgagcatgttcatagccgtttccgaggagatcttgggcatgactactggttgcattctcactaataaccaccgcccggcggtaaccgagtgctggtgacaaatcctaatggcatttcggaggcctttaacccatcctatcaccggggaggcgaacgcgaacctccatatcggatttaggcccctgggccggccctctcataaaaaaaaccgggccggtagtttcaaaaaccgcgttgcccgcccgaacttggtaaaaccttttcccccaaccggttatagaatgaaaaccctggggaatccccctcccgccccagtgaattcccctttgggcccctcttagaccttttatttccttttttcccccctcgctttaaagaacacagaggcgcaagcaacccttttcccaatgattcccgctccgcccttcaagaaccacaaatcggggggaaaannnnnnnnnngggaattttgccccgcaggacgaaacaaaccctttttctccaatacaaacgcctctcacgccaaagcccgcgcgaaccacccccccgccaaaaattggggttaaatccctttttcacaattatactccgttaccaccacccgcctttccacatgccccttg

SEQ ID NO: 252477 - DNA, 462 bp, Homo Sapiens
  misc_feature (17)..(17): n is a, c, g, or t
cttctttcttcaaccgnagccgccgccgcctctccttgctgcaacccatggaatcttcccactttcgccttggtaccctgtcttcgccccacctgaacatccctcccaaaacctcgtgaccaactgctggtgcagcctctcctgttgcccatcagtgcccagcacctgtgctacagccatgtcactccctggcgaccctggggctggagctggacagggccctgctcccagctagtgggctgggatggctcgtagactatgggaaacttcccccggcccctgcccccctggctccctatgaggtccttggggggaccctggagggcgggcttccagtggggggagagcccctggcaggtaagggcaggtggaaggtggagctggggagtggagggcaggggaagatgggggaggaagaactcatccatgtattcaataaatattgagtgcctacaaaaaaaa

SEQ ID NO: 252478 - DNA, 521 bp, Homo Sapiens
  misc_feature (476)..(476): n is a, c, g, or t
  misc_feature (483)..(483): n is a, c, g, or t
ttaatagagacagggtcttactatgttgcccaggctggtattgacctcctggcctcaaacgatcctcctgccttggctcccaaagtgctgggattacaagcataagccactgcacccggccgagaggggtttggaatgaaggtagaggcagggggatgaaggcgccagagctgaagaccagcccccagaagccacacccctgcccttctagcagctacgggtcctctggctccgggccttgtaaacctcgatgagcaggtccttgacgtactggatctcgcgctccacggactcttgcccgttccttcagctcgcgattccgtgcctccagcccctgggacttcgccctccagggcttcaccctctggcccgcttccgctggcggtaacctcagagccgccgacttggttctggtctctcttctttttgctttgcgggtcccctcgggtgggttggcaggatgttgggtaaggggnccaaggngagaaggtttaaggttggagaaggaagaagggggttct

SEQ ID NO: 252479 - DNA, 520 bp, Homo Sapiens
  misc_feature (16)..(16): n is a, c, g, or t
  misc_feature (34)..(34): n is a, c, g, or t
  misc_feature (55)..(55): n is a, c, g, or t
  misc_feature (81)..(81): n is a, c, g, or t
  misc_feature (144)..(144): n is a, c, g, or t
  misc_feature (164)..(164): n is a, c, g, or t
ccctatcccccccgtnaacataacaacccgagcnccccgagccccccacaggaanccacctggaaccctggaaaacccccngtctcctgaatttcaaaccccccctgttcccctacaggtggttgtcctggggtgggttgaaantgcccgaccaggataagaancctgaaggaccctatgccaaatgaggaaagtaaagtccaggccggccctttgaaaaaggggacccccatatcccctacaggcaaaaagcaggcctaggtgacccttgggacacctacgcctaagggagggaggcctaaaggcggccccaggtttgcagtgcgggaagatgagcaggccagtgggaggaggggcagggcagggctgtagttggtgactgggtgttcattttagctctaagaaaaaaaatcagtgtttcgtgaaggtgttggagaggggctgtgtctgggtgagggatggcggggtactgatttttttgggaggttatgagcaaaaataaaacgaaacatttccttat

SEQ ID NO: 252480 - DNA, 691 bp, Homo Sapiens
  misc_feature (64)..(72): n is a, c, g, or t
gggctcaagtgattcagcaagaatcacacgatttttaaaagacatggcagatcctgtgtctttnnnnnnnnntcaaaaccttgtaaatagtggttgaggtctatcccgatggggcttttcctgtagcctgcacatcgttggaaacgcctcatagagtaactctgtggttttactttactcacaggactattgttagatctgtgggaaggaattacaagacagttgctaaaagtttgaaaaagacggttgctaaacgtcatgaaaaaccagataatctacttttttaccttaggtattggcatactccacacatctgtaccattcttgagtgatcgcttaggtaagttttaattggtggcagtataatcttttgggaaataatgattacagttcagatgatgaatttaactgttcaactgctgaatgataacgggcatgaactaaaacttaattctgacagagctggatatggctgtataataaactggatcttaaatttatacttgggttttagttttaataactggaaatgtatcctttctaaatctttaattggtactttctataggaatgaatgtgatttgaactcattcatgttgagaggtaagtaaaatatttaacttataataatcaaggactcaaaagatgaaaatagaaattacaccatcccagtatttcaggtataacacaa

SEQ ID NO: 252481 - DNA, 1461 bp, Homo Sapiens
tagaaaatgaagattttgacagtcgtagatacaaatttttggatgatgatggatccatttctcctattgaggagtcaacagcagaggatgaggatgcaacacatcttgaagataacgaatgtgatatcaaattggcaggggatagtttcatagtaagttctgaattccctgtaagactgagtgtatacttagaagaagaggatattactgaagaagctgctttgtctaaaaagagagctacaaaagccaaaaatactggacagagaggcctgaaaatgtgacaggatcatgaatgtcaaaggcttttatcttgagaacatggtgtctggagttaaaggtattggcatactccacacatctgtaccattcttgagtgatcgcttaggaatgaatgtgatttgaactcattcatgttgagagggtgtcaaattgagaaccaggtagatccccaccacctacagtaaaaaggaccctaaagtaaattggttgaagaaattagatcccaaagattcttggtgaattttgaagtcttcatcagtatatccatattaaaacgagatgacagaagccaaagtaattatgggctgacaggacaactggatcagtttcattaaaaagggcaaacttgaagataaatcttttgactccagctctttagaggatctaaagtgaccttgatggacagtggaagaaatcacaacatggaattcctcgaataacaatttattgactttaaataattttgtctaatgctacatatacacaattaaaaaacctttacactatttctagaaagtcagcatgtatttttggctcgaagtttctctagtgttttctgtggaaggaataaaaatttgagtttcagttgtgtaaccacaaacaacccaaataataaaaaaatcttgtcggccgcctcgggccctccagaagctttcctaaacccattccgtttgcgcgcgccggcgccccataacgctaacctgaaacactggtccataagctggttttccataggaagaatccctgggcccatgaacctaagtggctttgggaattctctccccccaaataaacaaaaactgccccccgggtcgggacaaaaccccgaaagcccggtttaccttggaaacaaaaaattccccacaaagtgggcaccgtttccttggagaggggcccattttaacctgggagaattctttactccaaacgagggaagcgtccccacaggcggggagccttcccgaattatccctaaatttttacacgcaccccccgggtccctgtgataaaattcttattcgcaacaagaaacatggggctgcggaaaattttcccttctaaggccattttcctgggcccgaacacgtggggaaaagcccctttctccataaaacggggcaattgtaatagaaaaccctggaaattggcaccagggggggttatctcacgaccacctttggt

SEQ ID NO: 252482 - DNA, 1279 bp, Homo Sapiens
  misc_feature (1122)..(1122): n is a, c, g, or t
  misc_feature (1199)..(1232): n is a, c, g, or t
attagttgaaaactgggttttggagcaatgaaaagaaatgaagggtgggttttctagtgaagaaacattgcattaattcttctcagttgtttctatgctgaagaatcagtaacttattaatttccttgctggaaaaatcaaattatctgaagcagcaaaggttgattcttgttggtttatgtgacacaatagttcttataaatttacagccacgtacaaggaagactttcctatggcttttaaaacaattaagagtaatccttccctacctatcccactgccatttccccattcctccatctcccaagttttctcattttcagcccggtttaacacagtattagctggccttgatgaagtaacacactaagctttcttgctcaagaaaatggaattggcctgtttctgtttgaaaaaaagagaaaacaccaagaggaaagtagaggaaacaagggcaatatttcgtgcaggataaggaagaaaaaaagtccactttgttgttatatcaacttaatcttttttctccatctcataaaaatataagttgtcaactgtaatttcaataccatctaagtttttctaattagcactcctacctgctagtaatataaataggaaaacagtgagagcagaagccactatcttaacatacagaacaatcgaaagggaaagaatctgtgaacaaaattagaaaacgttcatttgacaatgaattggaaccaatgcctctcatcatttctattgagcattttgactatcagtaataacaaacatttaactgagacttattattctgatcaacaaaacaatacagtattatacattttgaaaatgtattcttaaatatttcaagcatattccaaggaaatatacaatttaaaacatatacaaaccaaaacacatggcacataattgaaggaagtaagagcaaattaggcttctaaaattttgaactctaaagaaggcttcctaatgcctaaaagaaagactagaagactagatactcaaaaaatggtaatctcaccagcagtttctgtgagcaaaagtatataaaactctttaaggtcccttagaagaaaaacctcaaatgagaaacaattatatactaagatatttacacancttttctaataccaaatcctaatacaatactgtacaaacagctgagtttgaactaaaagtatataccatgaaattcnnnnnnnnnnnnnnnnnnnnnnnnnnnnnnnnnngcagtacccaatttcatcagttctttcagaaatcacaagttgaactc

SEQ ID NO: 252483 - DNA, 538 bp, Homo Sapiens
gaaaggaatagcgatagatttatataaatatctaaatgtctcagtagaggagtagaattcatctggttatcacctggtcctctgaagttaactgatgggctaaccgatttgtgcacacacttaggatggatttatgttaagggaattacttactgactgttcaatggaaggaagtattaataatagggaataagtttgcaactaatctcatgctgcaaacttgtgttaattctgtttaatatacaaatttggatagcttaattataaacatatttttatatcaaatatacagttctaatataaaagttataaataattatttttgttaacaaagacactaaaacagtatgttctggttttggccctcttgcagaaagaagcattagaaaaattactttaaaagtagctatatgttactgtattgcaaaatctgttaagagcaggaccacatcgatagtatttaataatttgttttacctcccaaaacacagttcttctttcagcttgtcttaagaatggttgccaaaaacaacagcca

SEQ ID NO: 252484 - DNA, 804 bp, Homo Sapiens
  misc_feature (728)..(728): n is a, c, g, or t
  misc_feature (768)..(768): n is a, c, g, or t
  misc_feature (787)..(787): n is a, c, g, or t
ggggccgcgccagtgacagcgatggcggcggagtcggcgctccaagttgtggagaagctgcaggcgcgcctggccgcgaacccggaccctaagaagctattgaaatatttgaagaaactctccaccctgcctattacagtagacattcttgcggagactggggttgggaaaacagtaaatagcttgcgaaaacacgagcatgttggaagctttgccagggacctagtggcccagtggaagaagctggttcctgtggaacgaaatgctgagcctgatgaacaggactttgagaagagcaattcccgaaagcgccctcgggatgccctgcagaaggaggaggagatggagggggactaccaagaaacctggaaagccacggggagccgatcctatagccctgaccacaggcagaagaaacataggaaactctcggagctcgagagacctcacaaagtgtctcacggtcatgagaggagagatgagagaaagaggtgtcacagaatgtcaccaacttactcttcagaccctgagtcttctgattatggccatgttcaatcccctccatcttgtaccaagtcctcatcagatgtacggtcgaccacctacaggatccctgggaaggaggaccagggagcccattgtttcacaccagaagcctggggaaaggccacagcaatgccttttcagggacagattcggggccagccaaggaacgacaccttgggttnaaccccatggggaaaaggggtttttgagttccaaaaacangggagccaccaattttttncccaccagggacaaacg

SEQ ID NO: 252485 - DNA, 1367 bp, Homo Sapiens
  misc_feature (102)..(164): n is a, c, g, or t
  misc_feature (816)..(830): n is a, c, g, or t
cttttttagtctaaagaaagaaagacaaaagtagtcgtccgcccctcacgccctctcttcctctcagccttccgcccggtgaggaagcccggggtggttgcnnnnnnnnnnnnnnnnnnnnnnnnnnnnnnnnnnnnnnnnnnnnnnnnnnnnnnnnnnnnnnnatgcatcccttctacacccgggccgccaccatgataggcgagatcgccgccgccgtgtccttcatctccaagtttctccgcaccaaggggctcacgagcgagcgacagctgcagaccttcagccagagcctgcaggagctgctggcagaacattataaacatcactggttcccagaaaagccatgcaagggatcgggttaccgttgtattcgcatcaaccataaaatggatcctctgattggacaggcagcacagcggattggactgagcagtcaggagctgttcaggcttctcccaagtgaactcacactctgggttgacccctatgaagtgtcctacagaattggagaggatggctccatctgtgtgctgtatgaagcctcaccagcaggaggtagcactcaaaacagcaccaacgtgcaaatggtagacagccgaatcagctgtaaggaggaacttctcttgggcagaacgagcccttccaaaaactacaatatgatgactgtatcaggttaagatatagtctgtggatggatcatctgatgatgatggataaatttgatttttgctttgggtgggctcctcttggggatggattatggaatttaaaccatgtcacagctgtgaagatctggcacaagatagaatggtnnnnnnnnnnnnnnnttttaagtgacagtgccatagtttggacagtacctttcaatgattaattttaatagcctgtgagtccaagtaaatgtacataaagacaaactagtaagcatgacctggggaaatggtcagaccttgtattgtgtttttggccttgaaagtagcaagtgaccagaatctgccatggcaacaggctttaaaaaagacccttaaaaagacactgtctcaactgtggtgttagcaccagccagctctctgtacatttgctagcttgtagttttctaagactgagtaaacttcttatttttagaaagtggaggtctggtttgtaactttccttgtacttaattgggtaaaagtcttttccacaaaccaccatctattttgtgaactttgttagtcatcttttatttggtaaattatgaactggtgtaaatttgtacagttcatgtatattgattgtggcaaagttgtacagatttctatattttggatgagaaatttttcttctctctataataaatcgtttcttatcttggcattttaatc

SEQ ID NO: 252486 - DNA, 956 bp, Homo Sapiens
  misc_feature (261)..(261): n is a, c, g, or t
  misc_feature (269)..(269): n is a, c, g, or t
  misc_feature (916)..(916): n is a, c, g, or t
  misc_feature (924)..(924): n is a, c, g, or t
  misc_feature (941)..(941): n is a, c, g, or t
tcccgggattggaaatgcagctattgagatcttcgaatgctgcggactggaggcggaggcagctggggaggtccgagcgatgtgaccaggccgccatcgctcgtctcttcctctctcctgccgcctcctgtctcgaaaataacttttttagtctaaagaaagaaagacaaaagtagtcgtccgcccctcacgccctctcttcctctcagccttccgcccggtgaggaagcccggggtggttgctccgccgtcggggccgcnccgccganccccggccgccccgggccgcccccgcacgccgcccccatgcatcccttctacacccgggccgccaccatgataggcgagatcgccgccgccgtgtccttcatctccaagtttctccgcaccaaggggctcacgagcgagcgacagctgcagaccttcagccagagcctgcaggagctgctggcagaacattataaacatcactggttcccagaaaagccatgcaagggatcgggttaccgttgtattcgcatcaaccataaaatggatcctctgattggacaggcagcacagcggattggactgagcagtcaggagctgttcaggcttctcccaagtgaactcacactctgggttgacccctatgaagtgtcctacagaattggagaggatggctccatctgtgtgctgtatgaagcctcaccagcaggaggtagcactcaaaacagcaccaacgtgcaaatggtagacagccgaatcagctgtaaggaggaacttctcttgggcagaacgagcccttccaaaaactacaatatgatgactgtatcaggttaagatatagtctgtggatggatcatctgatgatgatggataaatttgatttttgctttgggtgggctctcttggggatggattatggaatttaaancatgtcanaactgtgaaaatctggnacaagatagaatggt

SEQ ID NO: 252487 - DNA, 937 bp, Homo Sapiens
  misc_feature (230)..(292): n is a, c, g, or t
  misc_feature (873)..(873): n is a, c, g, or t
  misc_feature (895)..(895): n is a, c, g, or t
  misc_feature (910)..(910): n is a, c, g, or t
  misc_feature (914)..(914): n is a, c, g, or t
  misc_feature (932)..(932): n is a, c, g, or t
atgcagctattgagatcttcgaatgctgcggactggaggcggaggcagctggggaggtccgagcgatgtgaccaggccgccatcgctcgtctcttcctctctcctgccgcctcctgtctcgaaaataacttttttagtctaaagaaagaaagacaaaagtagtcgtccgcccctcacgccctctcttcctctcagccttccgcccggtgaggaagcccggggtggttgcnnnnnnnnnnnnnnnnnnnnnnnnnnnnnnnnnnnnnnnnnnnnnnnnnnnnnnnnnnnnnnnatgcatcccttctacacccgggccgccaccatgataggcgagatcgccgccgccgtgtccttcatctccaagtttctccgcaccaaggggctcacgagcgagcgacagctgcagaccttcagccagagcctgcaggagctgctggcagaacattataaacatcactggttcccagaaaagccatgcaagggatcgggttaccgttgtattcgcatcaaccataaaatggatcctctgattggacaggcagcacagcggattggactgagcagtcaggagctgttcaggcttctcccaagtgaactcacactctgggttgacccctatgaagtgtcctacagaattggagaggatggctccatctgtgtgctgtatgaagcctcaccagcaggaggtagcactcaaaacagcaccaacgtgcaaatggtagacagccgaatcagctgtaaggaggaacttctcttgggcagaacgagcccttccaaaaactacaatatgatgactgtatcaggttaagatatagtctgtggatggatcatctgatgatgatggataaatttgatttttgctttgggtgggcnctcttggggatggattatgganttaaacatgtcacantgtnaagatctggcacagatanatggt

SEQ ID NO: 252488 - DNA, 1006 bp, Homo Sapiens
  misc_feature (6)..(6): n is a, c, g, or t
  misc_feature (10)..(10): n is a, c, g, or t
  misc_feature (18)..(18): n is a, c, g, or t
  misc_feature (23)..(23): n is a, c, g, or t
  misc_feature (26)..(26): n is a, c, g, or t
  misc_feature (36)..(36): n is a, c, g, or t
  misc_feature (41)..(41): n is a, c, g, or t
  misc_feature (55)..(55): n is a, c, g, or t
  misc_feature (59)..(59): n is a, c, g, or t
  misc_feature (62)..(62): n is a, c, g, or t
  misc_feature (76)..(76): n is a, c, g, or t
  misc_feature (87)..(87): n is a, c, g, or t
  misc_feature (117)..(117): n is a, c, g, or t
  misc_feature (120)..(120): n is a, c, g, or t
  misc_feature (141)..(143): n is a, c, g, or t
  misc_feature (146)..(146): n is a, c, g, or t
  misc_feature (148)..(148): n is a, c, g, or t
  misc_feature (152)..(152): n is a, c, g, or t
  misc_feature (160)..(160): n is a, c, g, or t
  misc_feature (163)..(163): n is a, c, g, or t
  misc_feature (167)..(167): n is a, c, g, or t
  misc_feature (185)..(199): n is a, c, g, or t
aggagnactntctgggcngacgnccntccaaaactnctatntgtgacttttcagntaanatntgtctgtgttgatntcgatgatgangaaaaattgattttgctttggggggccccnctnggggatggattatggaatttnnnccntnttanttctttgnagntctngcacaagatagaatggtnnnnnnnnnnnnnnnttttaagtgacagtgccatagtttggacagtacctttcaatgattaattttaatagcctgtgagtccaagtaaatgatcactttatttgctagggagggaagtcctagggtggtttcagtttctcccagacatacctaaatttttacatcaatccttttaaagaaaatctgtatttcaaagaatctttctctgcagtaaatctcgcaggggaatttgcactattacacttgaaagttgttattgttaaccttttcggcagcttttaataggaaagttaaacgttttaaacatggtagtactggaaattttacaagacttttacctagcacttaaatatgtataaatgtacataaagacaaactagtaagcatgacctggggaaatggtcagaccttgtattgtgtttttggccttgaaagtagcaagtgaccagaatctgccatggcaacaggctttaaaaaagacccttaaaaagacactgtctcaactgtggtgttagcaccagccagctctctgtacatttgctagcttgtagttttctaagactgagtaaacttcttatttttagaaagtggaggtctggtttgtaactttccttgtacttaattgggtaaaagtcttttccacaaaccaccatctattttgtgaactttgttagtcatcttttatttggtaaattatgaactggtgtaaatttgtacagttcatgtatattgattgtggcaaagttgtacagatttctatattttggatgaaaaatttttcttctctctataataaatcgtttcttatcttggcatttcaaa

SEQ ID NO: 252489 - DNA, 361 bp, Homo Sapiens
  misc_feature (264)..(315): n is a, c, g, or t
tcttcgcctctcggagctggaaatgcagctattgagatcttcgaatgctgcggagctggaggcggaggcagctggggaggtccgagcgatgtgaccaggccgccatcgctcgtctcttcctctctcctgccgcctcctgtctcgaaaataacttttttagtctaaagaaagaaagacaaaagtagtcgtccgcccctcacgccctctcttcctctcagccttccgcccggtgaggaagcccggggtggctgctccgccgtcggnnnnnnnnnnnnnnnnnnnnnnnnnnnnnnnnnnnnnnnnnnnnnnnnnnnnatgcatcccttctacacccgggccgccaccatgataggcgagatcg

SEQ ID NO: 252490 - DNA, 494 bp, Homo Sapiens
  misc_feature (328)..(328): n is a, c, g, or t
  misc_feature (416)..(416): n is a, c, g, or t
  misc_feature (422)..(422): n is a, c, g, or t
  misc_feature (434)..(434): n is a, c, g, or t
  misc_feature (466)..(466): n is a, c, g, or t
  misc_feature (476)..(476): n is a, c, g, or t
ccattctatcttgtgccagatcttcacagctgtgacatggtttaaattccataatccatccccaagaggagcccacccaaagcaaaaatcaaatttatccatcatcatcagatgatccatccacagactatatcttaacctgatacagtcatcatattgtagtttttgggaagggctcgttctgcccaagagaagttcctccttacagctgattcgggctgtctaccatttgcacgttgggtctggttttgaggtgctacctcctgccgggtgagggcttcatacaggcacacagatgggaggccatcctctccaattctgtaggggncactttcatagggggggtcaacccagaggtgtggaggtttcactgggggaggaaggcctggaacaggctcctggacttgcttcaggtncccatnccgttgttggcngtcccgttcccattagagggggtccctttttngggggttganggcgggatacaacggtaa

SEQ ID NO: 252491 - DNA, 276 bp, Homo Sapiens
  misc_feature (176)..(176): n is a, c, g, or t
ggcgaaatgcagctattgaggtcttcgaatgctgcggactggacggcggaggcagctggggaggtccgagcgatgtgaccaggccgccatcgctcgtctcttcctctctcctgccgcctcctgtctcgaaaataacttttttagtctaaagaaagaaagacaaaagtagtcgtccngcccctcacgccctctcttcctctcagccttccgcccggtgaggaagcccggggtggctgctccgccgttcggggccgcgcgccgagccccggccgtccc

SEQ ID NO: 252492 - DNA, 621 bp, Homo Sapiens
  misc_feature (346)..(450): n is a, c, g, or t
ggccatcaggccagagtattgcaagttagtttggatcatttgctaagcagcttgtggtgccttcagaaaggaacagtttcaaagaactttcacatctgttggctcatttcgccctaatgacagtcttctctttgatatttgcatggcattaaattttgcctttcttgttttctccagaaaacgcccactcctggatcttcacattgaactcaatggctacatgtatgattggaacagcagagtttctgccaaggagaaatattatgtctggctgcagcacactctgagaaagaaacttatcctctcctacacataagaaaccaaaaggctgggcgtagtggctcannnnnnnnnnnnnnnnnnnnnnnnnnnnnnnnnnnnnnnnnnnnnnnnnnnnnnnnnnnnnnnnnnnnnnnnnnnnnnnnnnnnnnnnnnnnnnnnnnnnnnnnntacaaaaattagctgggtgtgggtgtgggtacctgtattcccagttacttgggaggctgaggtgggaggatcttttgaacccaggagttcagggtcatagcatgctgtgattgtgcctacgaatagccactgcataccaacctgggcaatatagcaagatcccatctcttt

SEQ ID NO: 252493 - DNA, 378 bp, Homo Sapiens
ctggaggacagcagcctcttggaggtggatgggccagcgatgaagaatgtggaattcaaggctcagaagcgagggctgtgcacagttcaccgagaagctgacttcttctggagcctgtgtactgcggacatgtcccctgctggagcagtctcacagctcaccatccctgtacctgcagtgcctctcccagaaactgagacaagaaagaaaacgcccactcctggatcttcacattgaactcaatggctacatgtatgattggaacagcagagtttctgccaaggagaaatattatgtctggctgcagcacactctgagaaagaaacttatcctctcctacacataagaaaccaaaaggctgggcgtagtggctcacac

SEQ ID NO: 252494 - DNA, 530 bp, Homo Sapiens
ccccgccccccatcgggggcaaccattgttccgccggtcgcgccggagctgggttgctcctgctcccgtctccaagtcctggtacctccttcaagctgggagagggctctagtccctggttctgaacactctggggttctcgggtgcaggccgccatgagcaaacggaaggcgccgcaggagactctcaacgggggaatcaccgacatgctcacagaactcgcaaactttgagaagaacgtgagccaagctatccacaagtacaatgcttacagaaaagcagcatctgttatagcaaaatacccacacaaaataaagagtggagctgaagctaagaaattgcctggagtaggaacaaaaattgctgaaaagattgatgagtttttagcaactggaaaattacgtaaactggaaaagattcggcaggatgatacgagttcatccatcaatttcctgactcgagttagtggcattggtccatctgctgcaaggaagtttgtaaatgaaggaattaaaaacctagaagatctc

SEQ ID NO: 252495 - DNA, 1871 bp, Homo Sapiens
  misc_feature (1704)..(1712): n is a, c, g, or t
  misc_feature (1809)..(1817): n is a, c, g, or t
cccgccccccatcgggggcaaccattgttccgccggtcgcgccggagctgggttgctcctgctcccgtctccaagtcctggtacctccttcaagctgggagagggctctagtccctggttctgaacactctggggttctcgggtgcaggccgccatgagcaaacggaaggcgccgcaggagactctcaacgggggaatcaccgacatgctcacagaaaagcagcatctgttatagcaaaatacccacacaaaataaagagtggagctgaagctaagaaattgcctggagtaggaacaaaaattgctgaaaagattgatgagtttttagcaactggaaaattacgtaaactggaaaagattcggcaggatgatacgagttcatccatcaatttcctgactcgagttagtggcattggtccatctgctgcaaggaagtttgtagatgaaggaattaaaacactagaagatctcagaaaaaatgaagataaattgaaccatcatcagcgaattgggctgaaatattttggggactttgaaaaaagaattcctcgtgaagagatgttacaaatgcaagatattgtactaaatgaagttaaaaaagtggattctgaatacattgctacagtctgtggcagtttcagaagagctgcagagtcaagtggtgacatggatgtcctcctgacccatcccagcttcacttcagaatcaaccaaacagccaaaactgttacatcaggttgtggagcagttacaaaaggttcattttatcacagataccctgtcaaagggtgagacaaagttcatgggtgtttgccagcttcccagtaaaaatgatgaaaaagaatatccacacagaagaattgatatcaggttgatacccaaagatcagtattactgtggtgttctctatttcactgggagtgatattttcaataagaatatgagggctcatgccctagaaaagggtttcacaatcaatgagtacaccatccgtcccttgggagtcactggagttgcaggagaacccctgccagtggatagtgaaaaagacatctttgattacatccagtggaaataccgggaacccaaggaccggagcgaatgaggcctgtatcctccctggcagacacaacccaataggagtcttaatttatttcttaacctttgctatgtaagggtctttggtgtttttaaatgattgtttcttcttcatgcttttgcttgcaatgtagtcaataaaacctcatgtactattaaaccaaccgcactacagcaatgggcgaataaacattgcggccgccctcgggccctcgagaaactttctaaaaccatttcgttttggcccccccggggcccctgttagggtaaaggggaaacatggggcccataagcctgtgtttccctaacgaaaaactccctggggcccttggaactaagcggctcttgggaatctctcccgcccgacattaagaataaagcccccccgcggcccgcgccaaacccgagagtgggatcttccttgagaacaaaaaatcccccaaaaatgggaaggtttctcttgagagggtcctatttacttgggggggtgccaattacaaaccggggcaaattccccccgggggggaagcgcttcccataatttctaaagatttaaggggcacccacgggcgcgctggggggagcttacatatgggacggatacccnnnnnnnnnaaaagttccaatttaaaagcaatttctgtcgcccccaccattgaaaacacccgcaccacaacaaaacgggcccttgcatgggaaccccctgaaaatnnnnnnnnnggggggttcattcacccacaccccatgggggggccgcttgtggcagtgaaaaaa

SEQ ID NO: 252496 - DNA, 1439 bp, Homo Sapiens
  misc_feature (13)..(13): n is a, c, g, or t
  misc_feature (298)..(306): n is a, c, g, or t
  misc_feature (529)..(529): n is a, c, g, or t
ctatattaactcntccccccaggaacaatctgctacccattccttgatgaggaatgaaccttagcttaccacagtggaaacctgccaccaactgcaaggccggggttctgccccttttctagttctctgtgcacaaggttatgccacctactccaaggcagtcagagagacaggtgagctcaggggagcttctctcaccaacctgctaactcagcaggagtaagtttacccaaatgagctctggcctccatatctgttcataattttatgaagtatctaaatgtcattcattagtttnnnnnnnnngaatagaaaactctggaccaagtaaattgtgaactcaaaaagttaggagggataccaattacattaacaacgctttctttaaaaaatagaatcactttcttttgaatcaaccacagtggtgagacgtgtttttcttttcaggtgccccatgatggcatacagctttacccggcaaatcctgccagcttccaagtcccaggatacctgaccctgcaccagcacngtggggcagcattacctcccaacagtgtggagaagagcacatgtcaccactgggcaatgagagagttgacagagactcttggcttctcaacgccagacatggttggagagctttccttgttctattagaaaagttcatgaggaagctgtgaataggatcagtccagagaagtaaaactcttttattttcaccgtccaaacatcagtcaatatactgggagagccagcggaaaaccctcgccgtaaccttgccctcttgagcacactgcaacatgaacacttcccatggggcgagcattcagctccttcagggtcacattcccctttcctgtggtctgtccataaagcccaaatatctcacggagtttttcttcactgattgcatctgttctgtcaattttgttacccaagataaggattggcacattggatattgtttcatcagtcattaaagcattaagctcaactttggattccacgaggcgagaatgatctgcacagtccaccagaaagacaatcccattaattgctgggagataatttttccaaacgcgacgtgcttgctcgtgcccaccaagatcaaaagttgtaaaggtcattccagcaattgttagctcttctgatgtcggatgtagtgttggaacatgttggcccaatctgtcatctttgagcatgtgaagaagagtggttttgcctgcattatccaaacctaagaatacaagttttccagatttcttgtacagtcctaggaactggagcacactgctgaagccattgtagatccactcaaagatgaaagacattattaatgcttactacggcctgaggggctcctccggcaaaacagcggctggctcggaccctccctcagagcacactaaccagcagcacccgggaccgccagctactcg

SEQ ID NO: 252497 - DNA, 1235 bp, Homo Sapiens
  misc_feature (461)..(636): n is a, c, g, or t
  misc_feature (641)..(641): n is a, c, g, or t
  misc_feature (652)..(652): n is a, c, g, or t
  misc_feature (1093)..(1105): n is a, c, g, or t
cccaggtaagatggggacaataaaagtaccaacttttagggttgttagaagaattttaaaatagttaacatttgtgcagttactagagtagtacatggcaaatagtgttatatgagtaattaaattaatgaatattcataggttaatttcagatcaggaacattgttgaactctaatagtttgtatggttttttaaattggatgatatcatctgtaagctaatagttttatctcttccaattcttaacgtatctttttccaaaaagagaaaaatgttgattagaactttcagtactgtgtcagacagtatcagtctcagtcaacatggttatctttagctaatttcactctttgctgttgttgttgttgtagagaagagtctcattctgtcacccagactggagtacagctggtgtgatcatagctcaccacacagcctccaactcctgggctcaagcagnnnnnnnnnnnnnnnnnnnnnnnnnnnnnnnnnnnnnnnnnnnnnnnnnnnnnnnnnnnnnnnnnnnnnnnnnnnnnnnnnnnnnnnnnnnnnnnnnnnnnnnnnnnnnnnnnnnnnnnnnnnnnnnnnnnnnnnnnnnnnnnnnnnnnnnnnnnnnnnnnnnnnnnnnnnnnnnnagccntgagccactgngtccctgcccctgacttcacttttaaaggaaatgtatctcatcttattcaggataatgtttgcttaaagattttggtagataacctttaccaagttgagaaagttacattctctttctagtttggtaaaaatgttttgtcttttaaataataaatacatggtggtcaggaactaacaaaagttatccacattcaataaaattctctctttttttcctttagttctggtaatttatactttttttaatttgagctattcttactttcctgggataggccatatttgataataacattctttttaatgtactgttggattctgttaagtgatatttaggattttgcaagtgaagtgagcctatacttttcttgtttggttcatctctaagtttgggatttatttttattatctttataaaagtagctggtcagttttcatgcnnnnnnnnnnnnngtggaacagcttatatagaattggtgataggatcacaacttctgaggtcccagcaagagtcctaacatctagcagctctaccaccaggacaggccccctaaaactaattccaacaagcacctctgaaggt

SEQ ID NO: 252498 - DNA, 622 bp, Homo Sapiens
ggtaagtgcttcaatgtgttcattaaaaagcttctctttctcctctctttccaataaggatccagattcccagcggtgatcttttcggagggtcctacgagtatcagaccatgacacatctgaagaacgtaccatgtcagacagaagagctttgaaattctggatagcttcttctcgtttgtgctgctctctctctcgatctatttcttttgtttgttctgaacgggccttttgaacctccctttctcgttctcgaaggcttgcctcaatgcgggcttgcctttcaagctccttttctttttctgagtctaaattcttggctattttttcaatgtactgtttgaaaaggtcttctctcattgatgaactatctactgctttgtaacgtggatcactttctactttgtcttttactttgctccatcgagactgactgtccaagtgatgattagataatagttcaaagaaatccgatttaatctgtattttaaaacaggtagtgggatgggagggaaaataatgtaccatgagaaattcatcatatcttaaatatttacaactagaaaaaaagttcacctaccttaaatatgagaataataacttttaaaatataggcatttag

SEQ ID NO: 252499 - DNA, 1086 bp, Homo Sapiens
  misc_feature (316)..(344): n is a, c, g, or t
  misc_feature (642)..(657): n is a, c, g, or t
cccttaaagcaggaagatttatccttcctcagcaggtgatgtactttggtaacctcaacattcatttatgggatgatttttcatctgttttattgaataatgaaatctaaatgtggctagattggcatttgggaaaacaagggccttttaataaaagtcctgacactggagctcctcccaccactaggcaccaattttatcagcatatcgccacaaccgtgcctgggactttaagcttcatcagcaacatcagtcaatttaaacgagaaaggaactaataaaagaatttgactttataaaccaggtactttgaacnnnnnnnnnnnnnnnnnnnnnnnnnnnnngttttgtttttaacccgcagtccttactcttaagttctctgtaaactattatgcacacagaaaccttggtattagctgaagccggcctgggtcttgcacagtgggggtttacttaagtaaaagtagcacaaacacttcaaagacaatctcaatttttcaaatactgccaaaccgagataccaataacatctgaaatctttgcagagactatttataaaaacatggaagtgttcttattttcccatcataaaaatataatcacgatagagtggaaatgtctaactgtattagtttagtnnnnnnnnnnnnnnnngtatgaccactgatggtactggtactacaagtcttcatcccataactgacacaggcttaaccccccataaatattacaacatctcaacttatctatcgtctaaaatgaaagatccagagagcgactgttcttagttgagcctgggattgaatcaattccactttattgtttaatctgaaccattattgcttttggctaattcatcttgctgaggactttccaaataaaaatactctgtcaccatactgtcaagcaaaaacgacaatgaaagataaaaatgggtataggcaaaataaggaacaacttaatttaaatgttcatggtttgagtttaaagcctgtgggagtatgcttagttttaatattcctcatagacatgtttgccacaacagagcttccttgttaccccaattttgtttcactgcttccc

SEQ ID NO: 252500 - DNA, 685 bp, Homo Sapiens
ttctgtgataaccagctttgattgaaatgtactcatattaggtaaacattaggcaatgataggaggaaagcaaaactaattctttcaaaatgtcaacaaaatttagaaatatccttcccgatggcactaaaaccctgagaggtatttgcttttattcatactcacacaactttagcatttaaaaactatgagtactaaactgtgaccttcaggatttatgttagatggcagaaagaaaatttgggtattagtctaccatataaatgaacttctttaaaaccaaggttcagaactgagaatcatattggttcctcttcaagttagttcaagttgcccacttcagagatccacaaaatctgacattatttccagaaaccccaaactttggtataagtgaccactgctcaaatatgtgatcacatgatcacacagcattcctgtgagttcctttttgtctgataattatcctaattagctctacagagctaccctgcaatccaggttgaaattcaaactctcagctactactacagatttctgaactaggccaagttttaaccaaaaactataggtaatggtgaattactaattagccacaatgcatcaggatttagaaatattttttcttttataaaataacttggtatttttctgataatcttccaatagataaataaaaactttt

SEQ ID NO: 252501 - DNA, 1468 bp, Homo Sapiens
ttctcgccaaacactttgccgacgcacgcattgtgggcactgacatccgagactcactgatgcaggccctggccagctacgtgtgctacccacactccctgcgggctgtggagcgaatccccgaggagcagcgtatcgccatggtgaggaacctcctggcgccctatgagcagcggccctgggcccagaccaactggatcctggtgcggctctggaggggctgtggcttcgggtaccgctatacacggctgccacatctgctgaaaaccaaacttgaggacgccaatttgcccagcctccagaagccctgcccttccaccctgctgcagcagcacatggcggacctcctacagcagggtcctgatgtggcacccagcttcctcaacagcgtcctcaatcagctcaactgggccttctctgaattcattggcatgatccaagagatccagcaggctgctgagcgcctggagcggaactttgtggacagccggcagctcaaggtatgtgccacctgctttgacctctcggtcagcctgctgcgtgtcttggagatgactatcacactggtgcctgagatattccttgactggacccggcctacctctgagatgctgctgcggcgtcttgcacagctgctaaaccaggtgctgaaccgggtgacagctgagaggaacctgtttgatcgtgtggtcaccctacggctgcctggcctagagagcgtggaccactatcccattctggtggcagtgacgggcatcctggtgcagctcctggtgcgtggcccagcctcagagagagagcaagccacatcagtgctcctggcagatccctgcttccagctacgctcaatatgctatctcctgggacagccagagcccccagcacctggcactgctctgccagcccctgaccggaagcgcttctccctgcagagctatgcggattatatcagtgccgatgagctggcccaagtggaacagatgctggcgcacctgacctctgcatctgcccaggcagcagctgcctccctgcccaccagtgaggaggacctctgccccatctgctatgcccaccccatctctgctgtgttccaagccctgtggccacaagtcctgcaaagcctgtatcaaccagcacctgatgaacaacaaggactgcttcttctgcaaaaccaccatcgtgtctgtagaggactgggagaagggagccaatacgagtactacctcctcagctgcctagccctcacagcctgtgccatcctggaacctccacctttgaacccagagccaggctgggccctatttatgagctccctttgcccttctcctgtatcccacaccaccacatccaacctccttgcctgcctgtatcctcattggtgggagcccagccatggccctaattgtgcctgagcttgactttcagtcagggccacagtgagcattaaattattattccatacaaaaaa

SEQ ID NO: 252502 - DNA, 977 bp, Homo Sapiens
ggcctgggtggcgaattcggcacgaggcctcggagaaagtgaaggtccgcacgctgagcgtggagcagaggacccgtgaggacattgaaggcagccactggaatgagggcttgctgctggggcggccccccgaggagcctgagcagcccctcaccgagaactcgctgctggaagtcctggatggggcggtcatgatgtacaacctcagcgtacaccagcagctgggcaagatggtgggtgtctccgatgatgtcaatgaatacgctatggctctgagggacacagaggacaagctccgccggtgccccaagaggaggaaggacatccttgcagagttgaccaagagccagaaggttttctcagaaaagctggaccacctgagccgccgtcttgcctgggtccatgccactgtctactcccaggagaagatgctggacatctactggctgctgcgcgtctgcctgcggaccattgagcacggtgatcgcacagggtctctctttgccttcatgcccgagttctacctgagcgtggccatcaacagctacagtgctctcaagaattactttggtcccgtgcacagcatggaggagctcccaggctatgaagagaccctgacccgcctggctgccattctcgccaaacactttgccgacgcacgcattgtgggcactgacatccgagactcactgatgcaggccctggccagctacgtgtgctacccacactccctgcgggctgtggagcgaatccccgagagcagcgtatcgccaatggtgaggaaccctctggcgccctatgagcagcggccctgggccccagaccactgggatcctgggccgggtttgggaaggggctgggggcttcgggtaacgcctattacccggctggccacatctgcgtgaaaaccaaactttgaggaagccaattttgcccagcccttcaaaaggccctggccctttccaccctggcttgaa

SEQ ID NO: 252503 - DNA, 872 bp, Homo Sapiens
cttatgggaaagttcctaaaaatggttgaagaacaagactgaaggctagaatatgaaacaactggtatttctaaaactgtgccaaggcacccagggcattagagtgacctcacaagagtatctcagaatatttaaaaatttgaacacacaaacacaatgaaactcaacatctgtcagacatcacgtgaactactagtgaggtagttcattctttcaacataagattgcactataatccttctgataatttcatatttttgtgagactgggttttccaggccatctgataaaaaatcaagtactatatggacaccaacatggagcagaaaatgagggcagcagtgtccaatctcattccaggtgagaagttgcacagtgtccaataggtgcatacatctccttagtaagtagttgtgattaacaatgaaatagaaatgaaaaatatatttttttatttatgtgtattatatttttcaagcagctaataagttggtaggacataatatttaattcgttggggacctaattatttataaattgaatggttagatatttcttttggcctaagccaccatgaaaaaatcactgaggcgctaagggaaacatgaactaagaagcccttctgagtctctgttttctcaactgtaagatgaagaaacctgctccaccttcctcttgcgattgttgaacggcagttgagatactgcgcagaatggaccttattgatggcctacccaacatccattctctactccctctactctgatggcacccggattagattgtggaatctaccccttcctcacacgcctttaggaagttgagtccagggaagctccaggagcaggctggttttatgtaaagacaatccc

SEQ ID NO: 252504 - DNA, 353 bp, Homo Sapiens
caagacaatcatagaatatccaagttaatcaatgacacagccaagcatgtggcttgataaaagttaagaggtccagttgttcatatccatttctaacatacagataagtttcttaaaaaaactaagcaaagcaaaaaagttcacttattctgcactcagaagaaccagcgaggaatctgcacttcaaaaggaagtgaaactgaaaacattaggtgaaatttcatagtagttgagtttactcaacactggcatcagatggactgagtttgagtttgagtggtgccaattaatggccacctccaggtgcattgtgtacccaatccaaaacaatcaaggccatgcttccggtcatc

SEQ ID NO: 252505 - DNA, 987 bp, Homo Sapiens
  misc_feature (311)..(334): n is a, c, g, or t
  misc_feature (739)..(739): n is a, c, g, or t
tggtaccggtcggaattacgggatatcgtcgacccacgcgtcggaaatctgtacgaaagatcggggctttgttcttcctgttaatgtggtgtactggtgatgaccggaagcatggcttgatgtttggattgggtacacaatgcacctggaggtggccattaattggcaccactcaaactcaaactcagtccatctgatgccagtgttgagtaaactcaactactatgaaatttcacctaatgttttcagtttcacttccttttgaagtgcagattcctcgctggttcttctgagtgcagaataagtgaacnnnnnnnnnnnnnnnnnnnnnnnnaagaaacttatctgtatgttagaaatggatatgaacaacaaaaccacgagtctcgggttaagggaagtgacaattttattccattccagagaatggacaaactcttaacttttatcaagccacatgcttggctgtgtcattgtttaacttggatattttatgattttacttgaatgtgcctaatggaaccatttgatgtgagaaacaattctttttaatttacagcaaaatattgaataaccattgacaaaaacactattattttttgtaccaaaaatacttaaagacctcagaagcactcttttacttttaagaaattgcttttttgaactttattcagaagcagttatcaataaatccataaatatgcctggaattcagcagatttaacctagcaagggtgcncttgggggcctacaggccaaatacttcttcccaaatacttctgcagacacgtgctcgtggatgggccgatagagcaggtgtcattaaagcgcactagagatggttagccaccgacaaggcacgggacaatcttgcccccaacgggccagagagggctcacataacgaaccacgggcacaccgtgacccgatagactccataagtggggctcggtcacgtctgataccacactacttcccggttctgtc

SEQ ID NO: 252506 - DNA, 836 bp, Homo Sapiens
  misc_feature (306)..(357): n is a, c, g, or t
  misc_feature (628)..(628): n is a, c, g, or t
  misc_feature (632)..(754): n is a, c, g, or t
  misc_feature (756)..(756): n is a, c, g, or t
  misc_feature (780)..(780): n is a, c, g, or t
  misc_feature (801)..(801): n is a, c, g, or t
ctctttctgtcatactctacagctgcagaataggttcattattgtttcttcatagagaatagactttaatttgggttagtttagaagggaaagtaatccttttacttctccacttaactgtttttccaggccagctgggttgaccagtctcagtgggaaagaaagaacctgacagtatagtgagaatcaaatttgggtggtaggacctatatttactagtgggagaagatcattgagtctctagggtgaaagaggttagaatttagagtatttgtgatttaagtttttaaaatttaggtttaggannnnnnnnnnnnnnnnnnnnnnnnnnnnnnnnnnnnnnnnnnnnnnnnnnnnttaatgagacacttgaaacagaatatggagattttgtttactttaaagcagtgagatggctagtttatggaaactttgagatttgttaagcagtaccctcagattaaagattattaggattagcgtacttttatatatctttagtggctgagaagatagtgtagccctgtgtcgccttaacaacagggatacactttaagaaatgtcgttaggcaattttgtcattgtgtgaacatcatagaatgtacttatgcctggccaggcattggtntcannnnnnnnnnnnnnnnnnnnnnnnnnnnnnnnnnnnnnnnnnnnnnnnnnnnnnnnnnnnnnnnnnnnnnnnnnnnnnnnnnnnnnnnnnnnnnnnnnnnnnnnnnnnnnnnnnnnnnnnnnntntggtggtgcacgcctataatcccngttatttgggaggctaaggcnccagaattgcttgaaatgggaagcagaggttgtgg

SEQ ID NO: 252507 - DNA, 588 bp, Homo Sapiens
cagttctcggagagacctgtggaggtcgaattttcccgaagtctagtccctgagtcctatctacctcggccaccgtcgttctgcgggcacccagttggtttgacactgactctcagagatgcgcctggagaaggacaggttctctgtcaacctggatgtgaagcacttctcccccagaggaactcaaagttaaggtgttgggagatgtgattgaggtgcatggaaaacatgaagagcgccaggatgaacatggtttcatctccagggagttccacaggaaataccggatcccagctgatgtagaccctctcaccattacttcatccctgtcatctgatggggtcctcactgtgaatggaccaaggaaacaggtctctggccctgagcgcaccattcccatcacccgtgaagagaagcctgctgtcaccgcagcccccaagaaatagatgccctttcttgaattgcattttttaaaacaagaaagtttccccaccagtgaatgaaagtcttgtgactagtgctgaagcttattaatgctaagggcaggcccaaattatcaagctaataaaatatcattcagcaacaaaa

SEQ ID NO: 252508 - DNA, 375 bp, Homo Sapiens
aggaatcagtatgtagctcgctccccaagagcgcccctgtagacgctctgctgcccctattctcccgcttatcccaaatgggcgccaagcttctggcctcagtgagagtctttcctctgaaagacagatgtgccttccgagagcactccaaggcactgtggttttcacctcccagctccatattaacgccagtcagaggctcatcatggcccagactcttgcctctaggtctagagtcatcaacctcagtgtctactgaccttcttttcactcttcaggaagctccctgaactcaacaggccagcaagggctgcttcatctgcatctgctgcttcctcagtcatctaagccaaaatcttacaggtcatcccaaag

SEQ ID NO: 252509 - DNA, 652 bp, Homo Sapiens
  misc_feature (333)..(333): n is a, c, g, or t
  misc_feature (342)..(342): n is a, c, g, or t
  misc_feature (351)..(351): n is a, c, g, or t
  misc_feature (383)..(383): n is a, c, g, or t
  misc_feature (444)..(444): n is a, c, g, or t
  misc_feature (503)..(503): n is a, c, g, or t
  misc_feature (584)..(584): n is a, c, g, or t
  misc_feature (634)..(634): n is a, c, g, or t
ccggagcgaaacgctacaaatatctgagaaggcttttccgctttcggcaaatggactttgaatttgctgcctggcagatgctctacctgttcacatccccacagagagtttacagaaattttcattatcgaaaacagacgaaggaccagtgggccagagatgaccctgctttcttggtcctgttaagtatctggctctgtggtaagtgtgtttatctgagatagaattgaacgctgagtgtttctgattagattttttgttataaatgtgttgtgggtcagaatctggaaatattggaaactatttctcctttttactgaagcctcaaaaaanctcacaggnaagaaagtngtagtcttggttctacaggtcccaagcagatnccagagtaaactgttaccctaggacattgaaaagcaggggacaagattcactccatatctntttaagtacttgaatcggtacccaaatgtcagctgactgtgaataggaatatgaaactngaaattgcatttcacaggcaaatccacagtgagaattgtaaaggtattgatggggaacctgagaaactgaggttctccaantccataatgcaagggtctgcatttacctgtaggggtgttggaagtggggnaaggatattgcaagtttt

SEQ ID NO: 252510 - DNA, 1119 bp, Homo Sapiens
gcggcgcgccccaagggccggctccgttgagggaagggaagcccgcccggtggcggcgggggtcggctgctgggaggaggtggtgggctggttcggacgtgggttgaggctgtagcaggactccaggaagatgttaccgagtacttcagtgaattccttagtgcaggggaacggagtcttgaattccagggatgcggcaagacacacagccggagcgaaacgctacaaatatctgagaaggcttttccgctttcggcaaatggactttgaatttgctgcctggcagatgctctacctgttcacatccccacagagagtttacagaaattttcattatcgaaaacagacgaaggaccagtgggccagagatgaccctgctttcttggtcctgttaagtatctggctctgtgtgtccactataggatttggctttgtgctggacatgggattctttgagacaataaagcttctcctttgggttgtactcatagattgtgtaggcgttggtcttctgatagcaactttaatgtggttcatctctaacaagtatttagtgaaacgacagagcagagactatgatgtggaatggggctatgcttttgatgtgcatctcaatgctttttatccactcctggtcattttgcattttatccagctttttttcatcaaccatgttatcctgacagacacatttattggatatttagttggaaataccttatggttggttgcagttggctattatatctatgtaactttcctgggatacagtgcattgccatttttgaaaaatacagtaattcttctgtatccatttgcacctctgattctgctctacgggctttccctggcactgggatggaacttcacccatactctctgttctttctataagtacagagtgaaataaaaagtgagaagaagattcaatcgtaactgtgtcaacagtattgtgaagtgatcatttcttgtaaaacttgtaaataaactatcatctttgtagatatcttaaaggtgtaaagtttgcaaatttgaagaaatatatattaacactgtggtcaggtacattccttaaaactaattaaatgtacatttctataataaatattttttaaacta

SEQ ID NO: 252511 - DNA, 457 bp, Homo Sapiens
  misc_feature (87)..(87): n is a, c, g, or t
caaattccaaaatcccatttgcccgaaaagcggaaaaagccttcctccagatatttgtaacgttatcgctccggctgtgtgtcttgnccgccatcccctggaattcaaagactccgttcccctgcaactaaggaattcactgaaagtactcggtaacatcttcctagatggaagaaaaacatttcttttacacgtattctgaagaaacatttggctaccgacactcctcttctgagttatttggcagggaggtcactttccatgttcttcccaaccctagagaaaggccaggagtcaaaagcaaatgcagttagttctgaggcgggtcttggggcttgggaaccgcagactgcaacctcaggcaaaggcaacagcccacccttctgaatcacctaataacacttatccaggggcagctaccattacagagacagggatgatgtgacctgtgccgaat

SEQ ID NO: 252512 - DNA, 1164 bp, Homo Sapiens
aactgtgcgaaccagacccggcagccttgctcagttcagcatagcggagcggatccgatcggatcggagcggatcggagcacaccggagcaggctcatcgagaaggcgtctgcgagaccatggagaacggatacacctatgaagattataagaacactgcagaatggcttctgtctcacactaagcaccgacctcaagttgcaataatctgtggttctggattaggaggtctgactgataaattaactcaggcccagatctttgactacggtgaaatccccaactttccccgaagtacagtgccaggtcatgctggccgactggtgtttgggttcctgaatggcagggcctgtgtgatgatgcagggcaggttccacatgtatgaagggtacccactctggaaggtgacattcccagtgagggttttccaccttctgggtgtggacaccctggtagtcaccaatgcagcaggagggctgaaccccaagtttgaggttggagatatcatgctgatccgtgaccatatcaacctacctggtttcagtggtcagaaccctctcagagggcccaatgatgaaaggtttggagatcgtttccctgccatgtctgatgcctacgaccggactatgaggcagagggctctcagtacctggaaacaaatgggggagcaacgtgagctacaggaaggcacctatgtgatggtggcaggccccagctttgagactgtggcagaatgtcgtgtgctgcagaagctgggagcagacgctgttggcatgagtacagtaccagaagttatcgttgcacggcactgtggacttcgagtctttggcttctcactcatcactaacaaggtcatcatggattatgaaagcctggagaaggccaaccatgaagaagtcttagcagctggcaaacaagctgcacagaaattgggaacagtttgtctccattcttattgggccagcattccactccctgacaaagccagttgacctgccttggagtcgtctgggcatctcccaacaagacccaagtagctgctacctttcttgggcccttgctggagtcatgtgcctctgtccttaggttgtagcagaaaggacaagatccggtcttcacctttccaactttcttctaccagaccctttcctggtgcagatcctc

SEQ ID NO: 252513 - DNA, 2036 bp, Homo Sapiens
  misc_feature (79)..(79): n is a, c, g, or t
  misc_feature (291)..(291): n is a, c, g, or t
  misc_feature (297)..(297): n is a, c, g, or t
  misc_feature (1534)..(1640): n is a, c, g, or t
  misc_feature (1652)..(1662): n is a, c, g, or t
  misc_feature (1731)..(1811): n is a, c, g, or t
tcaccagacttaaactttctgaaagtagagataataatgagtcttttacttaattacaacctaacattttgagcagagntgttaactcacagtaggtgcttaatggatatgtgttgcatgaaaatataatcccattcatttctctttctgttttgtatacagtgccaggtcatgctggccgactggtgtttgggttcctgaatggcagggctgtgtgatgatgcagggcaggttccacatgtatgaagggtacccactctggaaggtaagtcagagggataggtccggttngatctngaagaggcaggagagaactatctagcctctttcactacctagctatctgggctaggtggatttttggtcctctccttccttttctttcacgatgtatgtcatgcatttcagtgtagctgaattaatgaaattttgtaaatttttttcggattgtttgcttcgaaggtgacattcccagtgagggttttccaccttctgggtgtggacaccctggtagtcaccaatgcagcaggagggctgaaccccaagtttgaggttggagatatcatgctgatccgtgaccatatcaacctacctggtttcagtggtcagaaccctctcagagggcccaatgatgaaaggtttggagatcgtttccctgccatgtctgatgcctacgaccggactatgaggcagagggctctcagtacctggaaacaaatgggggagcaacgtgagctacaggaaggcacctatgtgatggtggcaggccccagctttgagactgtggcagaatgtcgtgtgctgcagaagctgggagcagacgctgttggcatgagtacagtaccagaagttatcgttgcacggcactgtggacttcgagtctttggcttctcactcatcactaacaaggtcatcatggattatgaaagcctggagaaggccaaccatgaagaagtcttagcagctggcaaacaagctgcacagaaattggaacagtttgtctccattcttatggccagcattccactccctgacaaagccagttgacctgccttggagtcgtctggcatctcccacacaagacccaagtagctgctaccttctttggccccttgctggagtcatgtgcctctgtccttaggttgtagcagaaaggaaaagattcctgtccttcacctttcccactttcttctaccagacccttctggtgccagatcctcttctcaaagctgggattacaggtgtgagcatagtgagaccttggcgctacaaaataaagctgttctcattcctgttctttcttacacaagagctggagcccgtgccctaccacacatctgtggagatgcccaggatttgactcgggccttagaactttgcatagcagctgctactagctctttgagataatacattccgaggggctcagttctgccttatctaaatcaccagagaccaaacaaggactaatccaatacctcttggattttatttaatgtcataatgttgtcagaataaagagaaagatgaaatnnnnnnnnnnnnnnnnnnnnnnnnnnnnnnnnnnnnnnnnnnnnnnnnnnnnnnnnnnnnnnnnnnnnnnnnnnnnnnnnnnnnnnnnnnnnnnnnnnnnnnnnnnncttgggggcccnnnnnnnnnnnaaaaaatttttaaaaactttttttggggcccgggcccccaaaagaaaagaaaaagggccaatatttttnnnnnnnnnnnnnnnnnnnnnnnnnnnnnnnnnnnnnnnnnnnnnnnnnnnnnnnnnnnnnnnnnnnnnnnnnnnnnnnnnacccaaagggggtttggggggcttttcgggatttttcaaagggagccccaggggatccaaattaaaattcccccccgcccttgcatctttcggaggatgggtgaaattccttaaaccttttcgcccacgggggaaccctttccaaaggcggtttggaagaacctgaaatccgcacggggaatccaaaccctttggccccccttgggataaaaaatttttcgcccc

SEQ ID NO: 252514 - DNA, 1383 bp, Homo Sapiens
ggcctgggtggcgaattcggcacgaggcgggagctgccacgtccgagacctggagcagccaccgccgcaatcatggtgtcagtaattaacactgtggatacctcccatgaggacatgattcacgacgcccagatggactactatggcacccgcctggcaacctgctcatcagacaggtccgtcaaaatctttgatgtgcgcaatggagggcagatccttatcgccgacctcaggggtcatgagggtcctgtgtggcaagtggcctgggctcaccccatgtacggcaacatcctggcatcgtgctcctatgaccggaaagtcattatctggagagaggaaaacggcacctgggagaagagccacgagcatgcgggacacgactcctcagtgaactcggtgtgctgggccccccatgactacggcctgatcctggcctgtgggagctcggatggggccatctccctgctgacttacaccggggaaggccaatgggaagtaaagaagatcaacaacgctcacaccattggctgcaatgccgtcagctgggcccctgctgttgtacctggaagcctcatagaccacccatcggggcagaaacccaattacatcaagaggtttgcatcaggtggctgtgacaacctcatcaagctgtggaaggaggaggaggacggccagtggaaggaggagcagaagctagaagcgcacagtgactgggttcgagatgtggcctgggccccctccatcggcctgcccaccagcaccatcgccagctgctcccaggatggtcgtgtgttcatttggacctgtgatgatgcctcaagcaatacgtggtcccctaaattgttgcacaagttcaacgatgtggtgtggcatgtgagctggtccatcacagccaacatcctggctgtctcgggtggagacaataaggtgaccctgtgggaaggagtcagttgatgggcagtgggtgtgcatcagtgatgtcaacaagggccagggctccgtatcagcatccagtgacagagggccagcagaacgagccagtgacaaagacaggtggggccctggctcccccacccgccagctcccaggactgccccttcccgggccaactaaccaaacaactgggaagagcccccaactccaacaggattattttcccaggaggagttacagatgcagccacagattgatcatctgccttaacgtgatcggagatgctttgtaatctactgtccagctgaaagcactcatgttacgaggaagaaactacaagtgatgttcaaatctattttgggtcatttttatgtacctttgggttcaggcattatttggggggttttgtttccaaaggaactaaataaagtcatattgcttataaaaaaa

SEQ ID NO: 252515 - DNA, 766 bp, Homo Sapiens
aacactgtggatacctcccatgaggacatgattcacgacgcccagatggactactatggcacccgcctggcaacctgctcatcagacaggtccgtcaaaatctttgatgtgcgcaatggagggcagatccttatcgccgacctcaggggtcatgagggtcctgtgtggcaagtggcctgggctcaccccatgtacggcaacatcctggcatcgtgctcctatgaccggaaagtcattatctggagagaggaaaacggcacctgggagaagagccacgagcatgcgggacacgactcctcagtgaactcggtgttgctgggccccccatgactacggcctgatcctggcctgtgggagctcggatggggccatctccctgctgacttacaccggggaaggccaatgggaagtaaagaagatcaacaacgctcacaccgtgagtccatcccctgcctttcgtgcagtgagagcgcctgccttgccccgtgtctgctgcagcctccctagagggtggcacgggagggtccccgctggacagtgggccggggagtggtcagctgaccagacatgattgctctagagcagctttgagcctctctgccctgaagccagaccaggcagggcttggcactgcttccttgttgtgtgctcccaagcaggggagggctggtgcagcagcagcctgctcactgccaccttagctatggttgcctccaggtgacatgccctgcagtagtcattgggaccctgtagaatggagtggtgt

SEQ ID NO: 252516 - DNA, 696 bp, Homo Sapiens
  misc_feature (442)..(482): n is a, c, g, or t
  misc_feature (613)..(650): n is a, c, g, or t
ccaagtcatcaacagtaacgtgttctagtcctttttctttaattacctcttatgcaaaagcaaaaaacaaatcatatcatttaaaatcattatctttacagtgtgccttcaactgatccttccagccacattcaattaatttagctctcagcaactctttgaggcgttctctttctccagtttctatcaacttttggttaatcgctgctctcatctgcgcatctttgttcatcttgctaacctggacatcgacatgtactttcagatatagaacatttacaaagcattttctgctaaatcctctaggcaggcatcctaacatgtttaccattctattaactgaaggggagatacatttcaagtgtgttaataatatcattactctttttaaacatcacatttaattcccagaacgtattgttacatatttatattaataaannnnnnnnnnnnnnnnnnnnnnnnnnnnnnnnnnnnnnnnntagaaagtggaaaggcaaaatttgaactcaagtactttggccctaggagctccaaaactgaacataactgccgatcacttctgcagagactgcatccaaaaattgggagaagtcatacatactaaacatcnnnnnnnnnnnnnnnnnnnnnnnnnnnnnnnnnnnnnnaccaggccgggcacagtgggtcacacctgtaatcccagcactttgg

SEQ ID NO: 252517 - DNA, 848 bp, Homo Sapiens; identical to SEQ ID NO: 6521
  misc_feature (648)..(652): n is a, c, g, or t
  misc_feature (656)..(656): n is a, c, g, or t
  misc_feature (659)..(659): n is a, c, g, or t
  misc_feature (689)..(690): n is a, c, g, or t
  misc_feature (692)..(692): n is a, c, g, or t
  misc_feature (698)..(701): n is a, c, g, or t
  misc_feature (757)..(757): n is a, c, g, or t

SEQ ID NO: 252518 - DNA, 455 bp, Homo Sapiens
  misc_feature (104)..(104): n is a, c, g, or t
  misc_feature (128)..(128): n is a, c, g, or t
  misc_feature (180)..(180): n is a, c, g, or t
  misc_feature (195)..(195): n is a, c, g, or t
  misc_feature (203)..(203): n is a, c, g, or t
  misc_feature (221)..(221): n is a, c, g, or t
  misc_feature (395)..(395): n is a, c, g, or t
cccgagctactgagggtctaagtccgggcagccgaagagtgtggtaggtaacggtcctcagcgcaagggtcatttcgtcgctgggaagggacggccctcgcccngcggtgatggtggttagcaagatngaacaaagatgcgcagatgagagcagcgattaaccaaaagttgatagaaacntggagaaagagaacngcctcaanagagttgctgagagctanaattaattgaatgtggctggaaggatcagttgaaggcacactgtaaagaggtaattaaagaaaaaggactagaacacgttactgttgatgacttggtggctgaaattcactccaaaaggcagagcctgggtacctgacagtgtaaagaaggagctcctacaaagaataagaacntttccttggttcagcatgccagccttttaaggtttgaatttaggtttgttgttgttgtgg

SEQ ID NO: 252519 - DNA, 1215 bp, Homo Sapiens
  misc_feature (756)..(765): n is a, c, g, or t
cattaaggaagatcctcgatgtattaagttctcctccagtgacaggaaaaaacaaagagaatttgaagaatatatcagagacaaatatatcacagccaaagctgacttcaggacgcttttgaaagagaccaaatttataacatatagatccaaaaaattaatccaagaatcggatcagcacctgaaagatgtagaaaaaattttacagaatgacaaacggtatctagtactggactgtgtgccagaggagaggcgtaaactgattgtggcatatgttgatgacctggatcgccggggtccacccccacctcccacagcatcggagcccacgagacgatcaacaaaataattctaaatactcttccatagggacatctattcaaaatgcttgcatgagccaattttcaggtttttacatatatgtgcattagtcaacctattgcgaaaccatctgacaaacagaaggagaagcatttgtgaacagtttctgaacagaacactttggaaatatttatgcttttctttgtgtggcatgactgacatacatactcaaatataggctgtctctagtaaatcttaaaatcttgaagctaaaattcatccttttatgaggtgtggaagtcagtgacttggtgacgttcttcctagcagtgttaatacatgcaagaagtaagagcatttgtggcttgaacttgccagatgcaaataccacagactccaagaaaacccgagttggggtttgctttggtttgattnnnnnnnnnnaaagcgggtaaaagagaaaacactgaaaattgaattcttatcttccagaggctacaattattataatggacaatacttttacctttgtctctaaagatcagattagttttatttgttcacttacgtgctttgattatcccctctgaattatagaccgagtcttgttgtttagcctaagagaagatttatgtagtaatttcttctcaggtatggaaccacggtcataactaacatgttggccagaatagaaccactggttaaacatattttattcaccattaagtgatctttatcaatattctggattagacaacaaattacctttctgggtgtttcttgtaaactatactcctgtttgaatgttaaactttgttgctaaagtttaattttaagatgtttgaatgttcagtttatgtatttgaactacaataaaccaaccctttttataaa

SEQ ID NO: 252520 - DNA, 727 bp, Homo Sapiens
  misc_feature (304)..(364): n is a, c, g, or t
ttaatgacaatattctgttgaacggttgtaccatactcagccatgccctttcattttgacgatagtgtttctaatattttgtatttttattcccctccccccattttagtattacttaagatagattatcagaaagacagttactttgtcaaagagtatgggcacttgatacataatgccaaattattcttcataagagctgttgccaaatcagtgataatgttcatttaattgtattcttgccagccatgtttactggggtgatagttgttattgtggttgttattgttctttaggggtaggnnnnnnnnnnnnnnnnnnnnnnnnnnnnnnnnnnnnnnnnnnnnnnnnnnnnnnnnnnnnntgtcaggtacaaagatatttatgatacatgtatgacttgtctaagttattaacattttctctagccttaggtaatgcatgaaagcacatgtttcagtgccactcacataagaagtgcccggtaagtgttagctattattgtctacttgagttactactttctaaaagtatgttgaagtctttttctgtaattgcagatttgttgattttgcatttgagtattttctatattttgaagctgttagatgcatagtcatgatttttggtggaatgttttatcaatttttgaaaattgcctttgtctcatataatgcttttcatattgaactatattttgtctgctattaaatacttccaagcctga

SEQ ID NO: 252521 - DNA, 1244 bp, Homo Sapiens
ggaacctgaataccttattcttactctcctgagattttcatatgatcagaagtatcatgtgagaaggaaaattttagacaatgtatcactgccactggttttggagttgccagttaaaagaattacttctttctcttcattgtcagaaagttggtctgtagatgttgacttcactgatcttagtgagaaccttgctaaaaaattaaagccttcagggactgatgaagcttcctgcacaaaattggtgccctatctattaagttccgttgtggttcactctggtatatcctctgaaagtgggcattactattcttatgccagaaatatcacaagtacagactcttcatatcagatgtaccaccagtctgaggctctggcattagcatcctcccagagtcatttactaaggagagatagtcccagtgcagtttttgaacaggatttggaaaataaggaaatgtcaaaagaatgggtttttatttaatgacagtagagtgacatttacttcatttcagtcagtccagaaaattacgagcaggtttccaaaggacacagcttatgtgcttttgtataaaaaacagcatagtactaatggtttaagtggtaataacccaaccagtggactctggataaatggagacccacctctacagaaagaacttatggatgctataacaaaagacaataaactatatttacaggaacaagagttgaatgctcgagcccgggccctccaagctgcatctgcttcatgttcatttcggcccaatggatttgatgacaacgacccaccaggaagctgtggaccaactggtggagggggtggaggaggatttaatacagttggcagactcgtattttgatcctgagagagtccaaaatgcactggtcacgaaacgtctaatactatgactgttaaaatgtcagactataacaaatatctatcttttatttttcattagacccttatacttcaagagaacacactcagtgcttgtttttattttcttgacacatttattaacaaaatgcatcatggaaaaaaaatctacctcttaaaattccatttgcttttatggttagacatgcttgaccaaaaatgttcagaagaaaatatgtacctggtccctaattaagctgcgttaaatttggtagaagcatttaaatggtctatcttcagttttactgaacaaaaaatgtaatatatttagcattctttataaaagaattgatgctagaggtaa

SEQ ID NO: 252522 - DNA, 1535 bp, Homo Sapiens
cggatctcatcctgcccctgcatggactgaggaacgtcaaagccatcgactatgacccactggacaagttcatctactgggtggatgggcgccagaacatcaagcgagccaaggacgacgggacccagccctttgttttgacctctctgagccaaggccaaaacccagacaggcagccccacgacctcagcatcgacatctacagccggacactgttctggacgtgcgaggccaccaataccatcaacgtccacaggctgagcggggaagccatgggggtggtgctgcgtggggaccgcgacaagcccagggccatcgtcgtcaacgcggagcgagggtacctgtacttcaccaacatgcaggaccgggcagccaagatcgaacgcgcagccctggacggcaccgagcgcgaggtcctcttcaccaccggcctcatccgccctgtggccctggtgggtagacaacacactgggcaagctgttctgggtggacgcggacctgaagcgcattgagagctgtgacctgtcaggggccaaccgcctgaccctggaggacgccaacatcgtgcagcctctgggcctgaccatccttggcaagcatctctactggatcgaccgccagcagcagatgatcgagcgtgtggagaagaccaccggggacaagcggactcgcatccagggccgtgtcgcccacctcactggcatccatgcagtggaggaagtcagcctggaggagttctcagcccacccatgtgcccgtggacaatggtgggctggctcccacatctgtattgccaaggggtgatggggacaccacgggggctcatgcccagatccacctcgtggctccggcagaacctgctgacctgtggagagccgcccacctgctccccggaccagtttgcatgtgccacaggggagatcgactgtatccccggggcctggcgctgtgacggctttcccgagtgcgatgaccaaagcgacgaggagggctgccccgtgtgctccgccgcccagttcccctgcgcgcggggtcagtgtgtggacctgcgcctgcgctgcgacggcgaggcagactgtcaggaccgctcagacgaggcggactgtgacgccatctgcctgcccaaccagttccggtgtgcgagcggccagtgtgtcctcatcaaacagcagtgcgactccttccccgactgtatcgaccgctccgacgagctcatgtgtgaaatcaccaagccgccctcagacgacagcccggcccacagcagtgccatcgggcccgtcattggaatcatcctcctctctctttcctcatgggtggtggcctattttagtgggccagcccctgggggtgccaccgctatgcggggggaccacgggggcccttcccccgcacaaagtattttcaaccgggaaccccccaccgtgccccctcaatttcataacaccccgggcggatttccaaacatggtcccctttcaaacggcctttcccaggtaagaaattccttgaatcaacccccgttgacccaggagaggg

SEQ ID NO: 252523 - DNA, 1896 bp, Homo Sapiens
gggggcgcagtgcggcggtcacaggctgagtgctgcggcgcgatccttgcttccctgagcgttggcccgggaggaaagaagatggtgctggatctggatttgtttcgggtggataaaggaggggacccagccctcatccgagagacgcaggagaagcgcttcaaggacccgggactagtggaccagctggtgaaggcagacagcgagtggcgacgatgtagatttcgggcagacaacttgaacaagctgaagaacctatgcagcaagacaatcggagagaaaatgaagaaaaaagagccagtgggagatgatgagtctgtcccagagaatgtgctgagtttcgatgaccttactgcagacgctttagctaacctgaaagtctcacaaatcaaaaaagtccgactcctcattgatgaagccatcctgaagtgtgacgcggagcggataaagttggaagcagagcggtttgagaacctccgagagattgggaaccttctgcacccttctgtacccatcagtaacgatgaggatgtggacaacaaagtagagaggatttggggtgattgtacagtcaggaagaagtactctcatgtggacctggtggtgatggtagatggctttgaaggcgaaaagggggccgtggtggctgggagtcgagggtacttcttgaagggggtcctggtgttcctggaacaggctctcatccagtatgcccttcgcaccttgggaagtcggggctacattcccatttataccccctttttcatgaggaaggaggtcatgcaggaggtggcacagctcagccagtttgatgaagaactttataaggtgattggcaaaggcagtgaaaagtctgatgacaactcctatgatgagaagtacctgattgccacctcagagcagcccattgctgccctgcaccgggatgagtggctccggccggaggacctgcccatcaagtatgctggcctgtctacctgcttccgtcaggaggtgggctcccatggccgtgacacccgtggcatcttccgagtccatcagtttgagaagattgaacagtttgtgtactcatcaccccatgacaacaagtcatgggagatgtttgaagagatgattaccaccgcagaggagttctaccagtccctggggattccttaccacattgtgaatattgtctcaggttctttgaatcatgctgccagtaagaagcttgacctggaggcctggtttccgggctcaggagccttccgtgagttggtctcctgttctaattgcacggattaccaggctcgccggcttcgaatccgatatgggcaaaccaagaagatgatggacaaggtggagtttgtccatatgctcaatgctaccatgtgcgccactacccgtaccatctgcgccatcctggagaactaccagacagagaagggcatcactgtgcctgagaaattgaaggagttcatgccgccaggactgcaagaactgatcccctttgtgaagcctgcgcccattgagcaggagccatcaaagaagcagaagaagcaacatgagggcagcaaaaagaaagcagcagcaagagacgtcaccctagaaaacaggctgcagaacatggaggtcaccgatgcttgaacattcctgcctccctatttgccaggctttcatttctgtctgctgagatctcagagcctgcccaacagcagggaagccaagcacccattcatccccctgcccccatctgactgcgtagctgagaggggaacagtgccatgtaccacacagatgttcctgtctcctcgcatgggcatagggacccatcattgatgactgatgaaaccatgtaataaagcatctctggggagggcttaggactcttcctcagtcttcttccccgggcttggt

SEQ ID NO: 252524 - DNA, 754 bp, Homo Sapiens
  misc_feature (331)..(331): n is a, c, g, or t
atggagatgaagatttgccgggacctccagtaagatactacttcagtcctgacactgattaatacaagttgtcttaacgttactccaggaccacttgattttggaaagagtgcacttaattcagaagctaaagaaaatcagttcataatactatggatttctctttcattaagccttaattttaagggaaacatcagtaagaaactgcactgaagaattataaaacattttggggcatagcatacacttgtctaacggttcacacgtggctatgatcacaagcaactttgaactggaatgctatttacaaaagttttgtgtattaatctgngtattaatctctctggataaaaagaaggaaaaaatatgtatgacccgaacagatatggatgaagaaattgaaagcaacgaatgcaactattcaaaaagtttaattttatgaatttcttttttgtttagtcttgaagactgattttctatgcaaatagtgtttggcatcctgcacctctgatatgatttggctttgagaatttaataccactgggaagaagtatggtagtggtggatgaagggtggatattttaaattgtgcagttacagtttactgtcctattacctctgctcgtttaaccagtttgttatatcactgtgtccccagacatattaacttagactaaacgtgaacagtattatatggactctcacaacgctcttagagaatccgtgaatgtgaacagactgtggctccatttgt

SEQ ID NO: 252525 - DNA, 934 bp, Homo Sapiens
gaggcacgcgcaggaaacatggcggcggcgggtgttgtgagcgggaagattatatatgaacaagaaggagtatatattcactcatcttgtggaaagaccaatgaccaagacggcttgatttcaggaatattacgtgttttagaaaaggatgccgaagtaatagtggactggagaccattggatgatgcattagattcctctagtattctctatgctagaaaggactccagttcagttgtagaatggactcaggccccaaaagaaagaggtcatcgaggatcagaacatctgaacagttacgaagcagaatgggacatggttaatacagtttcatttaaaaggaaaccacataccaatggaggtatgaattaaatcttttgaaatcttaaactgatttgctacagtatactaataaacaaaaatgcaaagaagattcgtgaatgctcctcagtgagaaggatgattaatttctttggttaataggtataaatctcatattttagttatattcccttttcatctctgttttattggttgtggcttcaaaaaatattttaaaatacttgctctattttatagttattaatggcagaaagtagaaccactttaaaacattcctttggctgtccttcatgcacatttttcttaatttagtagaattataataatcatgttattttatcctaaagtaacagagggagatggagtataccactaaatcataccattctaatttcagcatcttgctggactcttcatggctcattgcagttttcccttaatatgtgttgagtgactattctcctttctacatatataccatcatgtgccacataacagcatttcaatgactgatcgcctatatgtcagtggtcccataagcccataagattataatggagctgaaaatttcctgtcacgtagcgacatcata

SEQ ID NO: 252526 - DNA, 511 bp, Homo Sapiens
tagaggatgtagctattttatacctttcataacatttgagagtaagatatccttcaggatgtgaagtgattattaagtactcatacctgaaatctgttgtcaagattagaactggggttcatgttaaaaaccttccatattacctgagggtacctgtggggaacagttccttcccctgtgtggtagtattttgttggaagagaatgtgtatacaaaaaatgaaattcttccaacagcagagaaactctaaaaagtttgatagtacctatcaaagtgctgtacttctgtgatagagaacatctgatgtaccaatttagatctatttctttatactttttctaaccaattgcttaatagtactttggatgattatcacctttgccactttactgagttcagccttttgtgatgacttatattttggacttacattttaactttaaagaatgtcagataccttctttgtgttactaggtaaatcctcacctaatctcttgggtatgaatataaa

SEQ ID NO: 252527 - DNA, 597 bp, Homo Sapiens
  misc_feature (343)..(343): n is a, c, g, or t
  misc_feature (499)..(499): n is a, c, g, or t
cggggagagcagggcggcggcgactcgggtaccaccatcttaaggacagaaaagctacaggactctaggaggccaccgtcctgatttgggaagtccaacctactttggccagacagcagctaagctggttcatcccatcagcctggattggtgaaactgaatcacaggagatatttccaggtttgctgggatgggaaacctgctcaaagtccttaccagggaaattgaaaactatccacactttttcctggattttgaaaatgctcagcctacagaaggagagagagaaatctggaaccagatcagcgcccgtccttcaggattctgagaagcatccttgcangacctgcaggcttacaaaaggcgcaggcccaagaagatcccgaagatgcaattcaaaatcccaatggacattcaagcttcaagaaaaagcttggaatgcggtgtgccctctttgttgtgaggctaaagagattttacgagttttccattagactanaaaaagctcttcagagtttattggaatctctgacttgtccaccctacacaccaacccaacacctggaaagggaacaggccctggcaaaggagtttgcc

SEQ ID NO: 252528 - DNA, 881 bp, Homo Sapiens
  misc_feature (25)..(25): n is a, c, g, or t
  misc_feature (36)..(36): n is a, c, g, or t
  misc_feature (56)..(56): n is a, c, g, or t
acccaagtcctacttcacctaatgnacgaatgcccntgtgtcctcgtctccctganatgtcctcaaagacgctccctgaagttaggtcattacctaacccatagttatttaccttgaaagatgggtctccgcacttggaaaggttttcaagacttgatactgcaataaattatggctcttcaccctgggcgccaactgctgatcaacgaaatgcttgttgaatcaggggcaaacggagtacagacgtctcaagactgaaacggccccattgcctggtctagtagcggatctcactcagccgcagacaagtaatcactaacccgttttattctattcctatctgtggatgtgtaaatggctggggggccagccctggataggtttttatgggaattctttacaataaacatagcttgtaacttgagatctacaaatccattcatcctgattgggcatgaaatccatggtcaagaggacaagtggaaagtgagagggaaggtttgctagacaccttcgcttgttatcttgtcaagatagaaaagatagtatcatttcacccttgccagtaaaaacctttccatccacccattctcagcagactccagtattggcacagtcactcactgccattctcacactataacaagaaaagaaatgaagtgcataagtctcctgggaaaagaaccttaaccccttctcgtgccatgactggtgatttcatgactcataagcccctccgtaggcatcattcaagatcaatggcccatgcatgctgtttgcagcagtcaattgagttgaattagaattccaaccatacattttaaaggtatttgtgctgtgtgtatattttgataaaatgttgtgacttaatggcaaacagg

SEQ ID NO: 252529 - DNA, 1087 bp, Homo Sapiens
  misc_feature (431)..(483): n is a, c, g, or t
ggggcttcctgctgtggctgtctcggaacccgtggtcctccgcttcatgattttctgccgtctcttggcaaaaatggcaaataatgatgctgttctgaagagactggagcagaagggtgcagaggcagatcaaatcattgaatatcttaagcagcaagtttctctacttaaggagaaagcaattttgcaggcaactttgagggaagagaagaaacttcgagttgaaaatgctaaactgaagaaagaaattgaagaactgaaacaagagctaattcaggcagaaattcaaaatggagtgaagcaaataccatttccatctggtactccactgcacgctaattctatggtttctgaaaatgtgatacagtctacagcagtaacaaccgtatcttctggtaccaaagaacagataaaaggaggaacaggagacnnnnnnnnnnnnnnnnnnnnnnnnnnnnnnnnnnnnnnnnnnnnnnnnnnnnnacagcaatcaatagctggaagtgccgactctaagccaatagatgtttcccgtctggatcttcgaattggttgcatcataactgctagaaaacaccctgatgcagattctttgtatgtggaagaagtagatgtcggagaaatagccccaaggacagttgtcagtggcctggtgaatcatgttcctcttgaacagatgcaaaatcggatggtgattttactttgtaacctgaaacctgcaaagatgaggggagtattatctcaagcaatggtcatgtgtgctagttcaccagagaaaattgaaatcttggctcctccaaatgggtctgttcctggagacagaattacttttgatgctttcccaggagagcctgacaaggagctgaatcctaagaagaagatttgggagcagatccagcctgatcttcacactaatgatgagtgtgtggctacatacaaaggagttccctttgaggtgaaagggaagggagtatgtagggctcaaaccatgagcaacagtggaatcaaataaaatgcttccactaccaaaagacattagagaaaaccttaaaagtaataaagagaaatatatttgtcacttataaaa

SEQ ID NO: 252530 - DNA, 802 bp, Homo Sapiens
  misc_feature (73)..(125): n is a, c, g, or t
gacatcagtaaggtagcattcattacctgtgtattctctgctgcatcttacagaagagtaaactggtgagagnnnnnnnnnnnnnnnnnnnnnnnnnnnnnnnnnnnnnnnnnnnnnnnnnnnnntgacttgttacatgaagatgttaaaatcggttttcaaaggtgatgtaaatagtgatttccttaatgaaaaatacatattttgtattggtctaatgcaacagaaaagccttttaatctctttggttcctgtatattccatgtataagtgtaaatataatcagacaggtttaaaagttgtgcatgtatgtatacagttgcaagtctggacaaatgtatagaataaaccttttatttaagttgtgattacctgctgcatgaaaagtgcatgggggaccctgtgcatctgtgcatttggcaaaatgtcttaacaaatcagatcagatgttcatcctaacatgacagtattccatttctggacatgacgtctgtggtttaagctttgtgaaagaatgtgctttgattcgaagggtcttaaagaatttgtttaatcgtcaaccacttttaaacataaagaattcacacaactactttcatgaattttttaatcccattgcaaacattattccaagagtatcccagtattagcaatactggaatataggcacattaccattcatagtaagaattctggtgtttacacaaccaaatttgatgcgatctgctcagtaatataatttgccatttttattagaaatttaatttcttcatgtgatgtcatgaaactgtacatactgcag

SEQ ID NO: 252531 - DNA, 1679 bp, Homo Sapiens
  misc_feature (1361)..(1382): n is a, c, g, or t
tttaagagtatttattccaaacacaatgttcactttaaatgcaaaatagctggtagaaaaaaaacactgaaaaatatactgaccctttgccccatatacagacatcagcctttggtatttgctttcaggtaattaggtaaaacaaacaaacaaaaacttgaaactattatttatctccaagaaaacaacgtagagttgaggtattctatttaacagatgtgatctccatccaataaggtctctctgttaattaacagccttgtgacatgctgttccaatcctttcctcctaaagtagaatttcatttgagcatatgttcataaaactgacagtgttccttaataatcactaaggttgccatagaaactccctggtgctggtgcccagccgcacggaggacaggaggccttcacagggcactgaggagggcctggcacggaccctgaactggcccgcctgcccctccgtgtgcagcccctgcccacggctgcacgggacagctgggtgcagggctcttgcctcaaagggtcacaggttgcccctgcatctccaaattaagaccaccaactccacctgggagctggtgtcagcatcctccccacctgggttagccttctggacgtgctgtgagataatagagctcagcaccaaagcagctgggaagacattcctgaacattctccaggaaacaaacccatagaccacaacatgcccagcctgccccactgggccctgttcactaccaggtgggcttccagcctggttccagcaacagattccacaacctgccgcggcaaccagtttcctttctcccaagacagcagggaagtgccagaggctccgtgtgaactcagagcctgataaagaaagcgtaagggcaagtccccatcagggccaagagctctctgagttaccaaaggcctcgtcaacatagccagtgctacccctggacacatttcttgaaaatatttcattaatgctacaaacattattgatcattttactttaggccttgaaccagcatattttttactttccccacccagcaggataagctgtcgtatttaacctaaatggtctctgtctcagcgtttcacgtctggctgcgtggcagatggctacaggtgttaggcaaataacagcactgctggggactcaaggcagtgggggtgctgcagaaacacaggtagaaatgccccgtgcattgagacacatgttcagtcaccacagattagagaacatagagagcttaggatgtatacctgtgtacgctgagccaggcctacagcccagagaagacattttttcttcatttacattagcttatgaaaaataaagggaaaacaaccctcttcaatacnnnnnnnnnnnnnnnnnnnnnngcaattccattacaataaaaatgaaagcaataacaatttggagatcaaagctgcctagctcttggcaataatgagctatctggatttcacatcttccgctagcatggttctgcccggctttggtaacaccacatgtgggtaaaacggtataaagaattgaagaactgtgggcacagaatcacccttactgcagattctcattcttaatatttccctttaacagcattttgctgttctcaagtctcagaaactttatgtggtgggatgggagggaaccaccataaccgcctgcctgcc

SEQ ID NO: 252532 - DNA, 1517 bp, Homo Sapiens
  misc_feature (1208)..(1328): n is a, c, g, or t
gacaagctgttcctaaggtgcctgggaatcccagcccttatggccctcttcatttagcgtcttgcttccatgcctctggttccatcccacgtggtgacagtacacatgaaacctgtctgctccttgatttccacaaaagaccccattgcacacagccgctggaggtacaataaataagctttaatgagattctgggtgctggagacagacaaggagcttacgtgccaccaaagcaaccaatgttcctttatctccccaactctgtggggtcccactggcctcctcacccttgagccctttgcccctgccatcctgctggttcctatctcttccccacacttctctgttcccggctcttccatctctgtccagagcaaatcctctgtcctgcttattttctcttgcagagcagctcaagctttgcattcccatttagcatcttggcccaaggtcttctctccctcaacgtattttcccaaacagttttctttataagaggaattctgctgtctgccctcaagatcatagacctttttaacttgtcagttgcactgagcagctgggcctcctgggtcttgggtcgcatccatcttggtcctataggagcgtgtcctgagcaactgcagcgctgcctccccctgcatcccttcccccttgtgttggaaattgcatttgcttcttttgtgggttatttcctgccagtcccagcttgctggctgcagatgctggcagaaagtggctgcagatgctggcagaaagtggctgcagctgacaaccttcttcaagttcacatctagtagttttctctgctccttggacaccccccaggcagctgcttgcggcctgaattgcagcctctggtgaccagggtcagtggctgtttcttgtaaccacagagatctgacggatacagagatttagaagctcaaggccagaggccaaatttttaccaaaattctctggtggcccacacccttctgtgtggtctgctatgcagtaaaggcttaaccttgcccaaagaaagatcgggccctttatcctcagctcctgggcattcatctctaagcccttggaatatcctgcctggtagctgatctgggagtcttgggccactctgggtggttcatgctaatgatgtgatttatggtgggggtcttgggccacacggtattggcttgatgtatgaggtcagccgtgtggatggtgannnnnnnnnnnnnnnnnnnnnnnnnnnnnnnnnnnnnnnnnnnnnnnnnnnnnnnnnnnnnnnnnnnnnnnnnnnnnnnnnnnnnnnnnnnnnnnnnnnnnnnnnnnnnnnnnnnnnnnnnacgtggtggcacatacctgtagtcatagctactcaggaggctgaggtgggaggatgacttggcgttgagaagtcaaggctgcaatgaactgtgatctcaccactgtactctagtctgccaacagagccagaccctgtctcaagacaaacaaaaaactctggacacaaagatctcgagtgagctgctctg

SEQ ID NO: 252533 - DNA, 1180 bp, Homo Sapiens
gagcccaacatggcgatgcacaacaaggcggcgccgccgcagatcccggacacccggcgggagctggcggagctcgtgaagcggaagcaggagctggcggaaacattggcaaatttggagcgacagatctatgcttttgagggaagctacctggaagacactcagatgtatggcaatattattcgtggctgggatcggtatctgaccaaccaaaaaaactccaatagcaaaaatgatcgaaggaaccggaagtttaaggaagctgagcggctcttcagtaaatcctcggttacctcagcagctgcagtaagtgcattggcaggagttcaggaccagctcattgaaaagagggagccaggaagtgggacggaaagtgacacttctccagacttccacaatcaggaaaatgagcccagccaggaggaccctgaggatctggatggatctgtgcagggagtgaaacctcagaaggctgcttcttctacttcctcagggagtcaccacagcagccataaaaagcgaaagaataaaaaccggcacaggattgatctgaagttaaacaaaaaaccacgagctgactattagaagacacattagtgcagaagcttccaggctgtagagccctgcttcccttctctgacctcacaaagataaacatccttcacctgagttcgtggccatccacctctgctctcccagacccagtgcctgtgactttgagtagtttgttctaaatgtggtgacaaacaagtcatttctgtaagacattgggtcttactttatgtgatttttagtaacagaactgcaggaagatcaagacaatgttgtaatcccggcaagttgctaactgtgcgtttctcccttcttagaatgaatgtctcccccaaaactggctggcaccagcttcatctgtgatacccttcaagaaatgttctctggttttgttttatgctgaaagtagaacacaagtcacatttcagatggaggctgtaaatatctggcattttcctatattggtttatggtgtccttgtttttctcttgggggtttttatcttaatttccctggggggtttttttgtaaatggcccttgggacagcttcatacctttcccgggtggacataaccgggatcctcccccttttcaagggcagtgtggccccattttccctaaaacggg

SEQ ID NO: 252534 - DNA, 649 bp, Homo Sapiens
  misc_feature (89)..(90): n is a, c, g, or t
  misc_feature (92)..(92): n is a, c, g, or t
gcacacaaggaaccacactcaaagtcacagcactgggtcttgaagagcagagttgaatggccacgaactcaggtgaaagatgttaatcnntntgtgaggtcagagaaggaaagcagggctctacgtttaacttcagatcaatcctgtgccgggattctttcgcttttaatggctgctgtggtgactccctgaggaagtagaagaagcagccttctgaggtttcactccctgcacagatccatccagatcctcagggtcctcctggctgggctcattttcctgattgtggaagtctggagaagtgtcactttccgtcccacttcctggctccctcttttcaatgagctggtcctgaactcctgccaatgcacttactgcagctgctgaggtaaccgaggatttactgaagagccgctcagcttccttaaacttccggttccttcgatcatttttgctattggagtttttttggttggtcagataccgatcccagccacgaataatattgccatacatctgagtgtcttccaggtagcttccctcaaaagcatagatctgtcgctccaaatttgccaatgtttccgccagctcctgcttccgcttcacgagctccgccagctcccgccgggtgtccgggatctgcggcggc

SEQ ID NO: 252535 - DNA, 943 bp, Homo Sapiens
agtttttgggggagaccattcattctaagaaagggaggaaacgcccagttacgcaacttgccggggattccaccattgtcctgatcttcctgcagttctgttactaaaaaccacataaagtaagacccaatgtcttacagaaatgacttgtttgtcaccacatttagaacaaactactcaaagtcacagggcactgggtctgggagagcagaggtggatggccacgaactcaggtgaaggatgtttatctttgtgaggtcagagaagggaagcagggctctacagcctggaagcttctgcactaatgtgtcttctaatagtcagctcgtggttttttgtttaacttcagatcaatcctccatcacgtttttctgtttttaaaaaaaacttcccagcctaacctaatatacatacctgtgccggtttttattctttcgctttttatggctgctgtggtgactccctgaggaagtagaagaagcagccttctgaggtttcactccctgcacagatccatccagatcctcagggtcctcctggctgggctcattttcctgattgtggaagtctggagaagtgtcactttccgtcccacttcctggctccctcttttcaatgagctggtcctgaactcctgccaatgcacttactgcagctgctgaggtaaccgaggatttactgaagagccgctcagcttccttaaacttccggttccttcgatcatttttgctattggagtttttttggttggtcagataccgatcccagccacgaataatattgccatacatctgagtgtcttccaggtagcttccctcaaaagcatagatctgtcgctccaaatttgccaatgtttccgccagctcctgcttccgcttcacgagctccgccagctcccgccgggtgtccgggatctgcctcgtgccgaattcgccacccaggc

SEQ ID NO: 252536 - DNA, 329 bp, Homo Sapiens
ggtcccaaggtgggcgaggcctaggaagagggtcattcttaagccacacattagctacgctcaccctaaacttttggtggcctggggcatgtcttgaggcccagactgttaagcaggctctgctggcctgtttactcgtcaccacctctgcacctgctgtcttgagactccatccagccccaggcacgccacctgctcctgagcctccactatctccctgtgacgggtgaacttcgtgtactgtgtctcgggtccatatatgaattgtgagcagggttcatctattttaaacacagatgtttacaaaataaagattatttcaaaccacc

SEQ ID NO: 252537 - DNA, 882 bp, Homo Sapiens
  misc_feature (725)..(725): n is a, c, g, or t
caagggttgcccaccagtcttcaatactttaagatcattatacaaagacaaagaaaaggtggcaatcatagaagagttagtagtaggttatgaaacctctctaaaaagctgccggttatttaaccccaatgatgatggaaaggaggaaccaccaaccacattactttgggtccagtactacttggcacaacattatgacaaaattggtcagccatctattgctttggagtacataaatactgctattgaaagtacacctacattaatagaactctttctcgtgaaagctaaaatctataagcatgctggaaatattaaagaagctgcaaggtggatggatgaggcccaggccttggacacagcagacagatttatcaactccaaatgtgcaaaatacatgctaaaagccaacctgattaaagaagctgaagaaatgtgctcaaagtttacaagggaaggaacatcagcggtagagaatttgaatgaaatgcagtgcatgtggttccaaacagaatgtgcccaggcttataaagcaatgaataaatttggtgaagcacttaagaaatgtcatgagattgagagacattttatagaaatcactgatgaccagtttgactttcatacatactgtatgaggaagattacccttagatcatatgtggacttattaaaactagaagatgtacttcgacagcatccattttacttcaagggcaggcaagaanttgctataggagatctatttgaaggcttcatgacaacccccttacagatgagaataaagaacacgaagctgatacagcaaacatgtctgacaaagagctaaagaagctacgtaataaacaaagaagagctcaaaagaaagcccagatagaagaagag

SEQ ID NO: 252538 - DNA, 835 bp, Homo Sapiens
  misc_feature (41)..(41): n is a, c, g, or t
  misc_feature (757)..(778): n is a, c, g, or t
tccgcctgctcttttcatgtcctaacatggcatgtctttcngtttcattattttcctaccccttgtatgtcaagaaaccacattttgcatggtcttaccgagatgctgttaattgccccagtgagtgcttttctaatctgcagaccatttacatttcctgtttgcagcatgctgtgtgcaaacactcagtaatttggagtattcaattatttgttagggctcttcctatttccaaatgtgctgaattgtctattgatgggattttcagatcttttcatgagaactggaaatgtagctgggtggcacctacctaggttgctacgtagtgagtagactttctcttgggtatagtaagcctcagacagctttcacttttatctactttacttgtggaaataaaacagtcattttgttctgaaagaataagatagctttctgtagagaaggaattcctacctctaaaagctgccttgagaactcagaactggcagttttctgaggtgatttttaaatttcagtattagggagagtccagcatttgctgacacagattctacataactaatgtatgatagcaaatgcaaaactattataatgtggtgtatcttgcgcatacacaggttagaacaagtagactctggcagcagatctccagagacccaagtttaggttctcatagtgtatttgaagtagttatactcctggcttaagtagtttagtgcctgggagaatccattactgaaaagcatttaacttnnnnnnnnnnnnnnnnnnnnnnctgaaaaggtagtgaatacagaatagcacaatatataggaaaggatatttcctgttg

SEQ ID NO: 252539 - DNA, 2090 bp, Homo Sapiens
taaaaaaggagctgatccaactgccatgaggaggcaacactggttgcagagtgcagtgggtgtaacaagaaaattaacttttgtagtttgtgtagatctgtgagtctcatcaagaaaaaagtttcttgcttaagaattaacagtcaacattaatatactatatacacctttgccatttacacattagcatcaggccatttattacaaaacactatacactttccactgcaggcgggttatatattgacagcaaatttctgcagataagacagtgaataaactctccactccatgttgattaggaatagtttttctagttttaaatattagccagacacagaaaaaggttggactgtaaggcctgggtgcacagtcttgatggaaccagttaattatgtgcatttcattgatccttggtttgaggtggggatacttcttcactgccttcataattttcttgtgctcgttggccagttctctgagggttgttcatgtgatgtgctgctgggcctgtatatggctgtccatgcacatggttattctgttgatactgagatccaggtgaatgggggtacaatggggcatcttcaggtggaggcgactcatgttcatctggagcatcttggtcatctggctcctcctctggacagagttcacaagcttttgcaagtgtcatcctagcactatgtgatctctccaagaaataaccattggacgtttcattgctttgcactgggggagaccaattgttgtaagtgtactgaggattgccagtatatggtcttctttcaagttcatctccaagccattccactgcccaggtccactttcttttaagatctccattgccctgcaggatttggtaagcaacaggacagttactaaatagagctaccatacattttatacactggtatgctcttttttgatagtgattcttagagcgctggattgtgtcaaacagcccatctcggtcatctggaattcctttcagtgcattatgaattctgtgagtttgccaggagtcctcaatcagtaagatttgcaaaagcagatccaaatagggccgcagttcataggtataggaatatgcaacctgccagagaagttcactgaggacagtagatgagaactgaggattctcccagcagcaaaaacgaagcaatttgacggtttcctctgaattactgcagtcttcaatgattttcttcacataacttgttctcacaaataaaatgtctgccacattctgctgaattggcattataggttgtgataaattaggatcaccaaaaggattgggaagaggaggattaccattgattgaagactgcattcttgaagagacattgcaacagcggatcagctgtgacactactgagtataatttgcctaattcagcatactggtatttgattggaggacctggaccttcatctaaagacacaagcataaaagtagcaggtacactcaatttcagaagctgtgtcttctctgccacacctaaattggcatacattacaaacaaattaaaatactgctgtaaatgacgcccatgctctgaaacttcccttctcaagagattttagtacggctcttagtaagtgatcactcaagctcaagttgtcataagcctgactagaaggtccaggagaggcaaaaggtgaaggacatggcccatcttgcaaggaaaaatgtgcaataaagactataagttttgcaaacgcacccctcacttctgcactagggcactccagaaggtattcggagaagcgatttgaaacattaaaaaggacgttatgagcaaaccaaaaacgtacattcttgctgtgacgaaggagaatacacaatgcatcataccaatcactggcagagccacggactactttctttgtgtgaaatcctgtagtaaagaggaacctagcagcaagttgaatactgatcatagtgatttcttctgcttcaggcaacaggtgatcttgcccgggaggagggtttaagtaaacgccattacatgtaagcagttttttcataaactgaaaatactccatactgtactgcattcggttatgcatgaattgtacgttctg

SEQ ID NO: 252540 - DNA, 433 bp, Homo Sapiens
  misc_feature (114)..(123): n is a, c, g, or t
atcccggtgaagtgtacatcataagaatccatagtactttgaagtaccattgcaccaagatgtctgactgaattcatagtcacacttttatttgaaagaaagaattgttgtagnnnnnnnnnncattattctaaaactcttgttgttagatacaagatttaattaagatctaagctcctgcttatttaatgtaattctaaggtaccattttagaaaaaacatttgttttaagattccaagaaacctgtgagttaatactatatttaaaagagaattggtaaattttgaatgtgtgtaatattttggaacctgtttaaaaaccaaatatacctgcaaatagatacagcctatcctatactatttaaatgtttggctgttttgttttatagaaattattttgctgaattcacaaataaaatttaagaagactttt

SEQ ID NO: 252541 - DNA, 1057 bp, Homo Sapiens
  misc_feature (783)..(783): n is a, c, g, or t
  misc_feature (953)..(953): n is a, c, g, or t
  misc_feature (987)..(987): n is a, c, g, or t
  misc_feature (998)..(998): n is a, c, g, or t
  misc_feature (1003)..(1003): n is a, c, g, or t
gaaacatagtatcagctttaaggagaacagttcttgcggcagatttgatataacaattggaccaaagcagaatatggggaaaactattgaaggaattacagtgacagttcacatgccaaaagttgtgctgaacatgaacctgacacccacacaaggcagctatacatttgatccagtcaccaaggtactaacatgggatgtgggaaaaattactccacaaaagctcccaagtcttaaaggactggtaaatttacagtctggagcccccaaaccagaagagaatccgagcctcaacatacagtttaagatccagcagcttgctatttcaggcttaaaagtaaaccgtttggacatgtatggggagaaatataagccatttaaaggagtcaaatacgtcacgaaagctggaaagttccaagtgaggacatgagaagaggccaaaattcctcaggaccagtttgttttccaagtgtcattacgatgtatcactattaggtaccaagtgagtgggaatacatattctagttaaagcatttgtgtctagctacacaccgctaacaaagttacttagttatcaatgtaggattcttaaggagctttaagctaaggaaaccttttagtgacttagcttattttgtatcttttcacttaaggaagattttggaggtgatttttttccataggaggataccatctgggcggctgcacattgtaacagtaaaggcagaaagctgtagtgataacctctctcctaaaagagttaactggtctcatccagcagangctatcttaaatctgtgatgtgtcaggtgcagccaaatatcacaccttctgatcttagccatcccaaaccagtatctgtcccgagaggaaattccccccacccccagaagtttacagaaaactgcctcttcaagtgtttggccttattcagcttttcacttgtgcccttnaggcaagcactgtgggcaaaggccattttccacntgggcctgggngggtngcattgttggttccatggttccttttaatggtacttgggattgtatttttttta

SEQ ID NO: 252542 - DNA, 623 bp, Homo Sapiens
  misc_feature (140)..(140): n is a, c, g, or t
gtgggtgtatgcatttgtcaaactcatcatcagatagagcacttgatatttgtgcacttaattgcatgtaaaatttacctcaaatttataaagaatcccttagaattattgaactctcttacatttgaattgaaaaaatncagtatgaattcatgatgcattttttaaaagtataggaataaagagatgttatttggaaaatgaaaaggactagcagtattcattcaagatatgataaaattactgagggcaacttgaatcttgaccttccagatgaattaatacataaacaaaagcatttttaaaacaacagagcactactcaaatgtgctataactatacctcacagcaaactacaaggtagacatttggtatatcaagtttaatacaatatttctgaagttcagagaacttatggtagcttatccagagccttaatgtaagtgagagagttggcagttgctggaagggtttaggatggtcctccttaaagataggttgatggaggaaaataacctcacaaagttctctttatgggaccctttgcttgagcatgaaggcaggacagacacctacttccctttctagaggttgaatttctatctgctggcttagattcctag

SEQ ID NO: 252543 - DNA, 761 bp, Homo Sapiens
  misc_feature (50)..(51): n is a, c, g, or t
  misc_feature (57)..(65): n is a, c, g, or t
  misc_feature (112)..(112): n is a, c, g, or t
  misc_feature (137)..(137): n is a, c, g, or t
  misc_feature (293)..(293): n is a, c, g, or t
  misc_feature (358)..(358): n is a, c, g, or t
caaaacagggcgggtgtgtgctggcgcccgttgggtgggggggaataaanngcgggnnnnnnnnnttgtccatgtggtagttccccgcaggtctgtcctcttcaaagccttnacagtgagtgaagtgccggctccanaaccctggtggtgtggcgctggatacttcccaggaagagcgtgggccggtcctgcaccggtttgggaagatctgcagaggtagccctttctcgtcgtagtccaccaggatttcagctcctccagggcatcaatgttctccttcaccttgatcttgnccgtcttcagcttctcccgcagttgtttgtagtacgtggagggaacagataagaactccaggccntctctctctcaagtgccgaatcgctgtgatgatgtctccggtcttgagagcgatgtgctggaccccagcgcccccgttatagtccacatattcctggatctgggacttcttcttgccaggcgctggctcattgatgggcatcttgatggactcttcatagttggccaccacaatggatcgcagagagctatatttcaggtaccattcggaggcggacaccatctcctgatcaggctggtttcccacaatgtggtcgatcatctccagactgcatttgggcagtttaggaagtagggggtccatgaacgctggggcctcatatccaggcaagaattggccgatgtagttcatcttctccaccagggtgtgtgtggtgtccccatacgtctgcagcacagcaaac

SEQ ID NO: 252544 - DNA, 1463 bp, Homo Sapiens
tggaccggggcacgctttaatcgggagggctggagcagagggcggccccgccgaggggcgtggtcagtgtgggcggaccttgggggccgagtccgctggtgggcgggacccaaggggagcagccagtagggaagttgggcgagttccagaatcagggggcgtggctgtgtggctgtggcctccgtggggtgggcggggcttacatgccgggcaccaccccattggtctccatgttggtgaggttaccccgcaggttctgctcctcctcgaaagccttgaacagtgagttgaagttgccggctccaaaaccctggtggttgtggcgctggatgacttccaggaagagcgtgggccggtcctgcaccggtttggtgaagatctgcaggaggtagcctttctcgtcgtagtccaccaggattttcagctcctccagggcatcaatgttctccttcaccttgatcttggccgtcttcagcttctcccgcagttgtttgtagtacgtggagggaacagataagaactccaggcctctctctctcaagtggcgaatcgctgtgatgatgtcttcggtcttgagagcgatgtgctggaccccagcgcccccgttatagtccacatattcctggatctgggacttcttcttgccaggcgctggctcattgatgggcatcttgatggactcttcatagttggccaccacaatggatcgcagagagctatattccgtgtgcacctgcgtgtcatccacggaccagaagcggtggaactgcaggtttttcaggtaccattcggaggcggacaccatctcctgatcaggctggtttcccacaatgtggtcgatcatctccagactgcatttgggcagtttaggaagtagggggtccatgaacgctggggcctcatatccaggcaagaattggccgatgtagttcatcttctccaccagggtgtgtgtggtgtccccatacgtctgcagcacagcaaacttcaccttcccaaacttgtcttgctctacccagggctcccgcatgattttggcgccccgttcccgtgctttctgcacgatgtagtcacaatcttccacctcgaacgcaatgtccttcactccgtcaccgtgtttcaccaggtgatcgcccatctctttgttccaggggttgagcgctgaggagaggacaaacacaatcttcccttgtttgattacatggctgaccacctcccgggaaccggtctccaggcccctgtaggctagaggttcaaagcccatcttgctgcagtagaatgacgcggcctgcttggcgttgccaacccagaaggtcacagagtggaagtggaggaatcggcctctctcaggctttgcccctttgtcactgtaagtcgtcatgattgatcttagtcaaacctcccctcgtgccgaattcgccacccaggcctcgctacctttaaccctgaggagttactgccag

SEQ ID NO: 252545 - DNA, 571 bp, Homo Sapiens
  misc_feature (537)..(537): n is a, c, g, or t
gcagccttggggctggccctgcaaacgtgcattggagccctatttgctgccgctgccattctagtgacctttccacagagctgcgccttcctcacgtgtgtgaaaggttttccccttcagccctcaggtagatggaagctgcatctgcccacgatggcagtgcagtcatcatcttcaggatgtttcttcaggacttcctcagctgacaaggaattttggtccctgcctaggaccgggtcatctgcagaggacagagagatggtaagcagctgtatgaatgctgattttcttaccagtctgattttatcgtcaaacaccaagccaggctagcatgctcatggcaatctgtttggggctgttttggttgtggcactagccaaacataaaggggcttaagtcagcctgcatacagaggatcggggagagaaggggcctgtgttctcagcctcctgagtacttaccagagtttaatttttttaaaaaaaatctgcactaaaatccccaaactgacaggtaaatgtagccctcagagctcanccaaggcagaatctaaatcacactattttcgaga

SEQ ID NO: 252546 - DNA, 927 bp, Homo Sapiens
ctgaaggcagactccaggttaaaagcgcttaatgcaacattcagagtgaaaaacccagacaagagatttactgaccttaagcactatagtgatgaactgcagtctgtcatctcacatcttcttcgagtcagagctagagtagcagatcgactctatggtgtatataaagtacatgggaattatggtcgagttttcagtgaatggagtgccatagaaaaagaaatgggtgatggactgcagagtgctggtcatcatatggatgtgtatgcatcttctattgatgatattttggaagatgaagaacattatgcagatcagttaaaagagtatcttttttatgcagaagcattgcgggctgtgtgcaggaaacatgaacttatgcagtatgacttggagatggctgctcaggacttagcatccaagaagcagcagtgtgaggaactggtaactgggactgtgagaacattctctttgaagggaatgactaccaagctctttggtcaagaaactccagagcagagagaagccagaataaaggtgctagaagaacaaataaatgaaggagaacaacagctaaagtctaaaaatctggaaggcagagaatttgtgaaaaacgcatgggctgatattgaacgcttcaaagaacaaaagaaccgagacttaaaggaggccctcataagctatgcagtcatgcagatcagtatgtgcaaaaagggaattcaagtttggaccaatgctaaggaatgctttagcaagatgtaatcctgtgaattgaatttctcttcaatcaaagtgccccaaaacagaagcacaagtaaataaaagaaatttaagtcactacctagtatacataaacatatacaataagttaaataaattcagctttctttaacttaattgtggtcgtgttaatgtagcacaaaaaat

SEQ ID NO: 252547 - DNA, 2766 bp, Homo Sapiens
  misc_feature (2313)..(2313): n is a, c, g, or t
  misc_feature (2321)..(2333): n is a, c, g, or t
  misc_feature (2620)..(2639): n is a, c, g, or t
  misc_feature (2739)..(2739): n is a, c, g, or t
gtggaccagcccccttcctctatgtgtgtgtctgctgctgacctgtggctttgccgaggcagggaagctactggtagtgcccatggatgggagccactggttcaccatgaggtcggtggtggagaaactcattctcagggggcatgaggtggttgtagtcatgccagaggtgagttggcaactgggaagatcactgaattgcacagtgaagacttattcaacttcatataccctggaggatctggaccgggagttcaaggcttttgcccatgctcaatggaaagcacaagtacgaagtatatattctctattaatgggttcatacaatgacatttttgacttatttttttcaaattgcaggagtttgtttaaagacaaaaaattagtagaatacttaaaggagagttcttttgatgcagtgtttctcgatccttttgataactgtggcttaattgttgccaaatatttctccctcccctccgtggtcttcgccaggggaatactttgccactatcttgaagaaggtgcacagtgccctgctcctcttttctatgtccccagaattctcttagggttctcagatgccatgactttcaaggagagagtacggaaccacatcatgcacttggaggaacatttattatgccaccgttttttcatgccctagaaatagcctctgaaattctccaaacacctgttacggagtatgatctctacagccacacatcaatttggttgttgcgaacggactttgttttggactatcccaaacccgtgatgcccaacatgatcttcattggtggtatcaactgccatcagggaaagccgttgcctatggaatttgaagcctacattaatgcttctggagaacatggaattgtggttttctctttgggatcaatggtctcagaaattccagagaagaaagctatggcaattgctgatgctttgggcaaaatccctcagacagtcctgtggcggtacactggaacccgaccatcgaatcttgcgaacaacacgatacttgttaagtggctaccccaaaacgatctgcttggtcacccgatgacccgtgcctttatcacccatgctggttcccatggtgtttatgaaagcatatgcaatggcgttcccatggtgatgatgcccttgtttggtgatcagatggacaatgcaaagcgcatggagactaagggagctggagtgaccctgaatgttctggaaatgacttctgaagatttagaaaatgctctaaaagcagtcatcaatgacaaaagttacaaggagaacatcatgcgcctctccagccttcacaaggaccgcccggtggagccgctggacctggccgtgttctgggtggagtttgtgatgaggcacaagggcgcgccacacctgcgccccgcagcccacgacctcacctggtaccagtaccattccttggacgtgattggtttcctcttggccgtcgtgctgacagtggccttcatcacctttaaatgttgtgcttatggctaccggaaatgcttggggaaaaaagggcgagttaagaaagcccacaaatccaagacccattgagaagtgggtgggaaataaggtaaaattttgaaccattccctagtcatttccaaacttgaaaacagaatcagtgttaaattcattttattcttattaaggaaatactttgcataaattaatcagccccagagtgctttaaaaaattctcttaaataaaaataatagactcgctagtcagtaaagatatttgaatatgtatcgtgccccctccggtgtctttgatcaggatgacatgtgccatttttcagaggacgtgcagacaggctggcattctagattacttttcttactctgaaacatggcctgtttgggagtgcgggattcaaaggtggtcccaccgctgcccctactgcaaatggcagttttaatcttatcttttggcttctgcagatggttgcaattgatccttaaccaataatggtcagtcctcatctctgtcctgcttcataggtgccaccttgtgtgtttaaagaagggaagctttgtacctttagagtgtaggtgaaatgaatgaatggcttggagtgcactgagaacagcatatgatttcttgctttggggaaaaagaatgatgctatgaaattggtgggtggtgtatttgagaagataatcattgcttatgtcaaatggagctgaatttgataaaaacccaaaatacagctatgaagtgctgggcaagtttactttttttctgatgtttcctacaactaaaaataaattaataaatttatgtccccnccaccttnnnnnnnnnnnnnaatcccatgcccgccgccctcggcccctcaaaaagtttttctacaccatccgtttggcgccccgggccccagtacgtaaatcgaaccttggccataacctgttttccaaaggaaattccgggccccataactagtggcttgcgatccttcacccaacaaaaaaaccccccgggccgccaacctaagcggttccgaaacaaatcccagaatggcagctcttgaggccctttcactggcctcctataaacccggaagttccaacgcgagcttcaatattaaaaatttannnnnnnnnnnnnnnnnnnnttaatcggaaaaacatggtcggaaactcctctaaaggccattcgctctccacctcgtaaactccccccccaataggcactgaatgaacctcttaaattgnccccgcggctattaaccacccttgtta

SEQ ID NO: 252548 - DNA, 415 bp, Homo Sapiens
cccattgttgccggcgtgggacaatcgggggggcctgcgggtaaaacaaagtctatgcaggaggtgcacatcaagacgctgtaagagattaaactggagaaggcactgagggtgcagcagagctctgagagcagcaccagctccccgtctcaacacgaggccactccaggggcaaggcggctgctgcgaatcaccaaaagaacagggatgaaagaagagaagaaccttcaggaaggaaatgaagttgattctcagagcagtattagaacagaagctaaagaggcttcaggtgagaccacaggagttgacatcactaaaattcaagtcaagagatgtgagaccatgagagagaagcacatgcagaaacagcaggagagggatggcagagaaaccagtgctcactgctgtgccagga

SEQ ID NO: 252549 - DNA, 2991 bp, Homo Sapiens
  misc_feature (1135)..(1135): n is a, c, g, or t
  misc_feature (1138)..(1138): n is a, c, g, or t
  misc_feature (2443)..(2443): n is a, c, g, or t
  misc_feature (2448)..(2545): n is a, c, g, or t
  misc_feature (2680)..(2689): n is a, c, g, or t
  misc_feature (2899)..(2944): n is a, c, g, or t
ggtaacaaatttaagtggtattgtatctacatggtgaccacctgtagtgaccaccatgtgaccacaaattgcctttgaatcgttttcagtctctttttaaatgaattatttgtggtatttctagtactgaaggagttttgatattttattctgaattattccccatttaaaagagtctattctcactgcttatcagatattttctgccctttgtagctaaacccaaagtgaacgtgaagccatctgtggttaaagttgtgtcatcccccaaattggccccaaaacgtaaggcagtggagatgcacgctgctgtcattgccgctgtgaagccactcagctccagcagtgtcctacaggaacccccagccaaaaaggcagctgtggctgttgtcccgcttgtctctgaggacaaatcagtcactgtgcctgaagcagaaaatcctagagacagtcttgtgctgcctccaacccagtcgtcttcagattcctcacccccggaggtgtctggcccttcctcatcccaaatgagcatgaaaactcgccgactcagctctgcctcaacaggaaagcccccactctctgtggaggatgattttgagaaactaatatgggagatttcaggaggcaaattggaagctgagattgacctggatcctgggaaagatgaagatgaccttctgcttgagctatcagaaatgattgatagctgaaggtggtagtgaggacactttaaaacaaaaaatcgccaaaaaactggacttagtttcatctattgtaacatttacctgagatgatcatttctttagtctagaatttgccccaaatcagaagtatacctctgaattatctgtatgtgtcctggattccttggggtcagattctcaaagttactttataaccatttggtccattcgatgccattgtctatcatcttttgagaaaaaagttctgtcatacccttctctccacaaaaaacgacgactgagagggagatcaagtgaaacagggtgccaagcgaacttagtgactccttgacgtgttagacaggtttggcttttttcttctttgttgtattctttatgtattgtcttgatgtacttaatattacctgagtttgaaatggatgaagacagcngcnaccattaaggaccaaattttatgccaccactaaacaaaaatacccactcagtctgtgttaaattgtatgtctttttaaaggtatttaaagattcaactaagctttaaagagggctgagcagctcaggaagcctgtaatgtgggcataactctttggacctgatcttgatgcttctgctgctctgttagcctctgaagagcaatatctaatttattattactgtaattttttaaaaggctttaaagtgcctcaggggtcccctgaaactaattttctatttctgggattccctggattcattatatgagatggtgacatgattagaggaattcttttttagtatgaaaattgtcccttttcttcttcagtacttgcctccttgctggcattgaattaacacagggacaaaatttggttaattttttatttctaactctcccaacaaacccctgttgcccagtatttgtttggtggcctttaaccacctgagggaaaaaatgagcttattcaagctgccaatatttatctatgggctgtagcagtacactgaattgtactgtgccagggatattgagatgctctgggggtgtattgtatacctgccagttttcttcatttctgaattgagttttcttttcttgatgttggtttccttcatatcacctcaaggtttagatttgtgaaggaataagcatgatggaaataatagtcttgaaaggagatatgttgtatataatcaggaggaagaggaaggaaggacttacccattttgatattttgctgtaggtggccagttttgtttctcatagggaaatctgacccacctgtcatgttggctcctaaggaactgctgttgtaagcggctcatcaagagttgaacttcacgtagccttgttgggaatatggaaaaggaagaaagccacaggactgcccattcagtcttgggaagattgggatgattctgcacaagcaaaaatgactgaagtttatgtatagacacacctctaccaatccatcttcagctgactgaatgttgtatgatagcccttctccaaagcagaggtagaatgttcaggtttcaccatggattttctacttatttcgtttttggaatcaccttacagattccaggtcccttttgtatatattctttattcttttgcttttttaaaaaataattttgtttcatatttaaagcacttgtattagtcaatgtttcgtgttccgcattatttgaaccatttgcccttacagaaagagaaatacttgtttgtgttttaaataaaactgatgtaggaaagtccncaccnnnnnnnnnnnnnnnnnnnnnnnnnnnnnnnnnnnnnnnnnnnnnnnnnnnnnnnnnnnnnnnnnnnnnnnnnnnnnnnnnnnnnnnnnnnnnnnnnncctttgcggcccccccggcccttaaaaaatttttcaaaccttttctttggggcggcggccccatagggaaaggaaactgggcataactggttcccaagaaacccggggtcagaaaaaggggctggattctccccnnnnnnnnnnccccggggggcaacgaagcttttgaaaaaacccaaaagggaattccggggggctttaccggggtttaaccaccgggattcccagccggatctcttttattaattttaccccccgcccttgcccttctcttccaacaaatgggggtgaaaataattaaaacccttctcgccccaaatggcgaaacccctcccaaaagcgcggatgtgtaannnnnnnnnnnnnnnnnnnnnnnnnnnnnnnnnnnnnnnnnnnnnntttggcatatattttatctcgccccctgggggaaaaaaccggggcgg

SEQ ID NO: 252550 - DNA, 399 bp, Homo Sapiens
  misc_feature (23)..(23): n is a, c, g, or t
ggaaaagggaggaaagccccacnggactgcccccattcaagtcccggggaagattggggaggattccggcacaagcaaaaatgacctgaaagcttatgtatagacacaccctcctacccaatcccaccttcagctgactgaatgttgtatgatagcccttctcccaaagcagaggtagaatgttccaggtttcaccatggattttcctacttaattcgtttttggaatcaccttacagattcccaggtcccttttgtatatattctttaatcttttgcttttttaaaaaataattttgtttcatatttaaagcacttgtattagtcaatgtttcgtgttccgcattatttgaaccatttgcccttacagaaagagaaatacttgtttgtgttttaaata

SEQ ID NO: 252551 - DNA, 884 bp, Homo Sapiens
  misc_feature (780)..(780): n is a, c, g, or t
attgtgtcagaggaagcaaccatgcaggtgctaaccaagcgttaccccaagaactgcctgctgaccgtcatggaccggtatgcagccgaggtgcacaacatggagcaggtggtgatgatccccagccttctgcgggacgtgcagctgagtgggcctgggggccaggcccaggctgaggcccctgatctctacacctacttcaccatgctcaaggccatctgtgtggatgtggaccatgggctgctgccgcgggaggagtggcaggccaaggtggcaggcagcgaagagaatggaaccgcagagacagaggaagtcgaggacgagagtgcctcaggagagctggacctggaagcccagttccacctgcacttctccagcctccatcacatcctcatgcacctcaccgagaaagcccaggaggtgacaaggaaataccaggaaatgacgggacaagtttggtagaccttggacactagggaagatcccttcacatgatagaagacagactctttgatgaggtcggcggagcagttcactagccaatgatgagagcagaaaggcctagacctgcagccagaagtgaaggcggctcagttctccgggatgcttctctatcctcctgagcaccaattcctggattccagtcactggctcacctttagaatgtctgttgctattcactgctcccctcgctcctcttaacagcttggggaggtgaccagtggttcaggagggactagacaattacctgtccagtgtggtatggtaggaagagtgtangtgttggcacgtgaccaaaattcacatcccttctcatggcagtcattcagtatgtgtacttgtacaagttatttaacccattggagcctaaattccttatctat

SEQ ID NO: 252552 - DNA, 1041 bp, Homo Sapiens
  misc_feature (1015)..(1015): n is a, c, g, or t
agatgcaggtggattcttgggcatttgctattaacttccttccatccactgtgcatcacctgaaggcaaagtaacagcctgccattcatcccaaccaaatgccactctctacaagatgtcatccattaatgctgactttgcattcaatctgtaccggaggttcactgtggagaccccagataagaacatcttcttttcccctgtgagcatttctgcagctttggttatgctttcctttggggcctgctgcagcacccaaactgagattgtggagaccttggggttcaacctcacagacactccaatggtagagatccagcatggcttccagcatctgatctgttcactgaattttccaaagaaggaactggaattgcagataggaaatgccctcttcattggcaagcatctgaaaccactggcaaagttcttgaatgatgtcaagaccctctatgagactgaagtcttttctaccgacttctccaacatttctgcagccaagcaggagattaacagtcatgtggagatgcaaaccaaagggaaagttgtgggtctaattcaaaacctcaagccaaacaccatcatggtcttagtgaactatattcactttaaagcccagtgggaaaatccttttgatccatccaagacagaagacagttccagcttcttaatagacaagaccaccactgttcaagtgcccatgatgcaccagatggaacaatactatcacctagtggatatggaattgaactgcacagttctgcaaatggactacagcaagaatgctctggcactctttgttcttcccaaggagggacagatggagtcagtggaagctgccatgtcatctaaaacactgaaggaagtgggaaccgcttactacagaagggatgggttgacttgtttgttccaaagtttttcccttttctgcccacatatggaccttgggagccacatttttgaaggtggggcattcagcatgcccatttctggaaaatgctggattttctgggantcacagagttacaatgggtcttgaaa

SEQ ID NO: 252553 - DNA, 1423 bp, Homo Sapiens
agtcgacggtacccggacatatgcccgggaattcggccattaccggccgggggcaggtggattcttgggcatttgctattaacttccttccaaaatgtcaccattcctgtatctggttctcttggtacttgggcttcatgctacaatccactgtgcatcacctgaaggcaaagtaacagcctgccattcatcccaaccaaatgccactctctacaagatgtcatccattaatgctgactttgcattcaatctgtaccggaggttcactgtggagaccccagataagaacatcttcttttcccctgtgagcatttctgcagctttggttatgctttcctttggggcctgctgcagcacccaaactgagattgtggagaccttggggttcaacctcacagacactccaatggtagagatccagcatggcttccagcatctgatctgttcactgaattttccaaagaaggaactggaattgcagataggaaatgccctcttcattggcaagcatctgaaaccactggcaaagttcttgaatgatgtcaagaccctctatgagactgaagtcttttctaccgacttctccaacatttctgcagccaagcaggagattaacagtcatgtggagatgcaaaccaaagggaaagttgtgggtctaattcaagacctcaagccaaacaccatcatggtcttagtgaactatattcactttaaagcccagtgggcaaatccttttgatccatccaagacagaagacagttccagcttcttaatagacaagaccaccactgttcaagtgcccatgatgcaccagatggaacaatactatcacctagtggatatggaattgaactgcacagttctgcaaatggactacagcaagaatgctctggcactctttgttcttcccaaggagggacagatggagtcagtggaagctgccatgtcatctaaaacactgaagaagtggaaccgcttactacagaagggatgggttgacttgtttgttccaaagttttccatttctgccacatatgaccttggagccacacttttgaagatgggcattcagcatgcctattctgaaaatgctgatttttctggactcacagaggacaatggtctgaaactttccaatgctgcccataaggctgtgctgcacattggtgaaaagggaactgaagctgcagctgtccctgaagttgaactttcggatcagcctgaaaacactttcctacaccctattatccaaattgatagatctttcatgttgttgattttggagagaagcacaaggagtattctctttctagggaaagttgtgaacccaacggaagcgtagttgggaaaaaggccattggctaattgcacgtgtgtattgcaatgggaaataaataaataatatagcctggtgtgattgaaa

SEQ ID NO: 252554 - DNA, 528 bp, Homo Sapiens
gggaatgcttaagaggtgactcctggcggcaaggccatagtgaatgaggtgtttcccaatggctagccgtagaatcgccagagaatgattgactacatttagcagaggaaacttcatattctagcacccatcaacatagtatagcaaaggggcggcccccacctttcctttcccctttccttacttcctagaccttccccaaagactgttcctgtttccttcagagacccgcaggatttgttctccccacacaggctgcccataaggctgtgctgcacattggtgaaaagggaactgaagctgcagctgtccctgaagttgaactttcggatcagcctgaaaacactttcctacaccctattatccaaattgatagatctttcatgttgttgattttggagagaagcacaaggagtattctctttctagggaaagttgtgaacccaacggaagcgtagttgggaaaaaagccattggctaattgcacgtgtgtattgcaatgggaaataaataaataatatagcctgt

SEQ ID NO: 252555 - DNA, 407 bp, Homo Sapiens
tgccagcacaacccttaatgggcaaccctgtgtggggagaacaaaccctgcgggtcctctgaagaaacaggaacagtcctttgggaaggtattggaaagtttcagaccattgtcctctgtgagtccagaaaaatcagcattttcagaataggcatgctgaatgcccatcttcaaaagtgtggctccaaggtcatatgtggcagaaatggaaaactttggaacaaaaaagtcaacccatcccttctgtagtaagcggttccacttcttcagtgttttagatgacatggcagcttccactgactccatctgtccctccttgggaagaacaaagagtgccagagcattcttgctgtagtccatttgcagaactgtgcagttcaattccatatccactaggtgatagtatt

SEQ ID NO: 252556 - DNA, 1158 bp, Homo Sapiens
gaaggattccagacccctcattgggactgagtccttttttacggattctcccaacatttctgcagccaagccggggttttacagtctatgtggggatccaaaccaaagggaaaggttggggttctaattcaaaacctcaagcccaaacaccatcagggtcttagtgaactttatcactttaaagccccagtggaaaaatcctttggatccatccaagacagaagaccagttccagcttctttatagacaagaccacccactgttcaagtccccatgatgcaccagatgaaacattactatcacctagtggatatgaaatgaactgcacagttctgcaattggactacagcgagaatgctctggcactctttgttcttcccaaggagggacagatggagtcagtggaagctgccatgtcatctaaaacactgaagaagtggaaccgcttactacagaagggatgggttgacttgtttgttccaaagttttccatttctgccacatatgaccttggagccacacttttgaagatgggcattcagcatgcctattctgaaaatgctgatttttctggactcacagaggacaatggtctgaaactttccaatagacccgcaggatttgttctccccacacaggctgcccataaggctgtgctgcacattggtgaaaagggaactgaagctgcagctgtcccctgaagttgaactttcggatcagccctgaaaacactttccctacacccctattatcccaaattgatagatcctttccatgttgttgattttggagagaagcacaaggagtattcccctttcctagggaaagttgtgaaccccaacggaagcgtagttgggaaaaaggccattggctaattgcacgtgtgtattgcaatgggaaataaataaataatatagccctggtgtgattgatgtgagcttggacttgcattcccttatgatgggatgaagattgaaccctggctgaactttgttggctgtggaagaggccaatcctatggcagagcattcagaatgtcaatgagtaattcattattatccaaagcataggaaggctctatgtttgtatatttctctttgtcagaatacccctcaactcatttgctctaataaatttgactgggttgaaaaattaaaa

SEQ ID NO: 252557 - DNA, 359 bp, Homo Sapiens
  misc_feature (111)..(111): n is a, c, g, or t
  misc_feature (283)..(283): n is a, c, g, or t
agtcatgtggagatgcaaaccaaagggaaagttgtgggtctaattcaaaacctcaagccaaacaccatcatggtcttagtgaactatattcactttaaagcccagtggaanatccttttgatccatccaagacagaagacagttccagcttcttaatagacaagaccaccactgttcaagtgcccatgatgcaccagatgggaacaatacttattcacctagtgggatatgggaattggaactgccacagttctggcaaatgggacttacaggcaaggatggntctgggcactcttctgtttctttccccaagggagggggacaggtggggagttcagtggggaaggcttgccatggtt

SEQ ID NO: 252558 - DNA, 477 bp, Homo Sapiens
  misc_feature (22)..(22): n is a, c, g, or t
  misc_feature (54)..(54): n is a, c, g, or t
  misc_feature (67)..(67): n is a, c, g, or t
  misc_feature (84)..(84): n is a, c, g, or t
  misc_feature (164)..(164): n is a, c, g, or t
  misc_feature (217)..(217): n is a, c, g, or t
ccaagaaacggtgccaggtccnaaaccccccaaaaccccaactaggtgaaaaantaatggtcccccnactgggtgcccatccanggggccaactggaaaacagtggtgggtccttggtccctaataaaagaaagctgggaaactgtccttcctgtccttgggangggaatccaaaaaaagaatttccccccactgggcctttaaaaagtgaaatatnagttccaccaaagacccatgaatggtgtttggccttgaaggtcttgaattaagaccccacaactttccctttggtttgcatctcccacatgactgttaatctcctgcttggctgcagaaatgttggagaagtcggtagaaaagacttcagtctcatagagggtcttgacatcattcaagaactttgccagtggtttcagatgcttgccaatgaagagggcatttcctatctgcaattccagttccttctttggaaaaatt

SEQ ID NO: 252559 - DNA, 398 bp, Homo Sapiens
  misc_feature (369)..(369): n is a, c, g, or t
  misc_feature (382)..(382): n is a, c, g, or t
gagagaatcataagcttgatatggtgattgccatgtgttcccttcctcttttcccacagatgggttgacttgtttgttccaaagttttccatttctgccacatatgaccttggagccacacttttgaagatgggcattcagcatgcctattctgaaaatgctgatttttctgggactcacagaggacaatggtctgaaactttccaatgtaagttgataaactaggagttcttaaatgtatggaactgggaagaggcaattagggagtcaattggatttcaactttcttattttacccaattaggcaatctggatgcctaggaggaggccggtgtggactcctcctaagctaggaatcactccagagtncattcccctttantcccaaataagtaatt

SEQ ID NO: 252560 - DNA, 336 bp, Homo Sapiens
ctcaatggaattcaaccaatcaggaaccaaacattcaaatacgagcctgtgaggacctccttccttcaaaccaccacaatgaatgaaaatgtatgcatgagtgaataaatgagccaatacattcatcaaaaatggcaaagattccatgctgatatgctatcaattgcaatcagagtgcatgcattggaaggcgcaatgcgtccaccaccacatttggggacctagatatttcctccagctctttgaagactgaaataccaacaagctaccaagtttacaggttatatatagccacatgcctagaagaaacagagcacatgaaaagcactaatggta

SEQ ID NO: 252561 - DNA, 998 bp, Homo Sapiens
  misc_feature (260)..(539): n is a, c, g, or t
  misc_feature (541)..(549): n is a, c, g, or t
  misc_feature (917)..(917): n is a, c, g, or t
ttgaaaaactgaacaaacagaagtgattttatctaatacagttccaaggtagaaaaagtggagcaggcagggccttgcacccctctccacccccccatggggggggtggtggtagcggcacatacacaatcatagtaaattggcagaagaaaaacacaatagattcctggctagatggggagagataaggcaatgtgcatgggggaatcagaggggagatgtgagcccctctgctcctcccacaagagtttcccctttgnnnnnnnnnnnnnnnnnnnnnnnnnnnnnnnnnnnnnnnnnnnnnnnnnnnnnnnnnnnnnnnnnnnnnnnnnnnnnnnnnnnnnnnnnnnnnnnnnnnnnnnnnnnnnnnnnnnnnnnnnnnnnnnnnnnnnnnnnnnnnnnnnnnnnnnnnnnnnnnnnnnnnnnnnnnnnnnnnnnnnnnnnnnnnnnnnnnnnnnnnnnnnnnnnnnnnnnnnnnnnnnnnnnnnnnnnnnnnnnnnnnnnnnnnnnnnnnnnnnnnnnnnnnnnnnnnnnnnnnncnnnnnnnnngtttcccctttggccccaaatgaagacttggctggcagcagaggcacagctggaagcatcgatcttccacctccctggcttttccattctctgctctggggcaaaggagttctgtgaaaagggagacgagtagtttctgcaccagtcccgcacaggccaccagggaaatggattattccatcttctttaacttctctttccttggcaccattgctttgtgaatataaggcaatatgaatagtaggctcaggaagaagatgtggccaaggaaatagatggatttatacaccttaagccatttgtcccacgtgaagaggcagaaggcagtcatggagtacccatgaagagccagtggatggtctgttgcncaaatagtagaagggctggaggacagtaatggcggccagcttgctcagggtggggctctcttgaatgagcctggcagcctg

SEQ ID NO: 252562 - DNA, 2049 bp, Homo Sapiens
  misc_feature (43)..(43): n is a, c, g, or t
  misc_feature (62)..(62): n is a, c, g, or t
  misc_feature (90)..(328): n is a, c, g, or t
  misc_feature (1981)..(1981): n is a, c, g, or t
ggcatgggggaatcaggagggggagatgtgagcccctctgctncctcccacaagagttttcnccttttggcccgggcacgggtggctcannnnnnnnnnnnnnnnnnnnnnnnnnnnnnnnnnnnnnnnnnnnnnnnnnnnnnnnnnnnnnnnnnnnnnnnnnnnnnnnnnnnnnnnnnnnnnnnnnnnnnnnnnnnnnnnnnnnnnnnnnnnnnnnnnnnnnnnnnnnnnnnnnnnnnnnnnnnnnnnnnnnnnnnnnnnnnnnnnnnnnnnnnnnnnnnnnnnnnnnnnnnnnnnnnnnnnnnnnnnnnnnnnnnnnnnnnnnnnntgacaaagcaagacgccttctccaaaaaaaagtttcccctttggccccaaatgaagacttggctggcagcagaggcacagctggaagcatcgatcttccacctccctggcttttccattctctgctctggggcaaaggagtgctgtgaaaagggagacgagtagtttctgcaccagtcccgcacaggccaccagggaaatggattattccatcttctttaacttctctttccttggcaccattgctttgtgaatataaggcaatatgaatagtaggctcaggaagaagatgtggccaaggaaatagatggatttatacaccttaagccatttgtcccacgtgaagaggcagaaggcagtcatggagtaacccatgaagagccagtggatggtctgttgcaccaaatagtagaagggctggaggacagtaatggcggccagcttgctcagggtggggctctcttgaatgagcctggcagcctgtctttccacaataacaatgaggaattccatctggaagcagaccaggtatcctgagtgcaggccgtgccagagggccaggaatagcaacgagagaccctgagagagttctttatttccaaggaacttgagtcgtttgaagatgtagcgggccacccaggcgttggtgttgatgttgaatgaggcaatggtgccagtgaagcgggggtttgtttcaaagagccacaccttcatgttggcacaggcatcccactttgccttgcccttttcttcaaagccattgaagcccaggcccgtcaaaatgcatactccttctgtgaccagccaacaggtgacatatttgtacagcacaaacttgccccagatcagcatgtacatgcagcggaaccagaaggggtggttgtcatagtcttcagtgaggagatagtcttctgtgatgtgggggctgagcagtgtgtagcccactaggtagaaaaggcccagactcaggcgcttgagagcaggaatgatgctgtttggtatctttcctggtatgtcaatcagctctccctgcaccagcttcatgtagtgattcattgagaactggggccctaccaagaaggccccatagaagtaggagaaaccagcaacttccagcagggaaggaacaccacgtatggcatatttctgttgctcagaggacaaggaattctgatctttccctccgtcaaagtagtcaacagccaaaccaatcagcttcaaagtcagaacacaatgtggcattgtccacttgatatcgtagttgccggtggcagtgtaatagtatccagccagaaggtaggccatctggaagcaaaaggtagtgaggacggcagtgatggtgcggcccattagtcgaaggatgaggaactgaagcacaatacacagcagggagtggtagagctggtttccaaagttaaaataagcaattgagaggcctgtaaaggtatggaagaggtggatgaggtaggtctccttgtagaaaaggtaatgccgataaaacaaagcaaaggggtaacccaggaagatggagatgatcagccgcagcgcctgttctgacgcgcccagggacgtcgccaacttgttaaggctcagctcctggaaacccgactgcagaacccccgccagcgccaccacagtcccctcgtccccctcngctgaggacgccatcttaactccgggagccccacagggaccccccagctccgatcccgggaattccgg

SEQ ID NO: 252563 - DNA, 756 bp, Homo Sapiens
  misc_feature (598)..(615): n is a, c, g, or t
gggttcttagtcgtgtgtacatcattgggaatggagggaaataaatgactggatggtcgctgctttttaagtttcaaattgacattccagacaagcggtgcctgagcccgtgcctgtcttcagatcttcacagcacagttcctgggaaggtggagccaccagcctctccctgaataactgggagatgaaacaggaagctctatgacacacttgatcgaatatgacagacaccgaaaatcacgactcagccccctccagcacctctacctgttgcccgccgatcacagccggaatgcagctgaaagattccctggggcctggttccaaccgcccactgtggactctgaggcctctgcatttgcgggtggtctgcctgtgatattttggtcatgggctggtctggtcggtttcccatttgtctggccagtctctgtgtgtcttaatcccttgtccttcattaaaagcaaaactaaagaaaaccgaacacaaactcaagaaacattaacacaaagcaacaatatgcacaacgggaccatgctgcaagaagataaacaccccccgtacgaaacatcaacaataacaatattttttttgtggnnnnnnnnnnnnnnnnnnaaaaaaatttttcaaaacatttccttttggaccccccgggcccccctaagggaaaagggaaaagtgggccctatagcttttttcccacagaaaaaaccccggggccaggaaaaaaaggggggtgggaaatcccccacccac

SEQ ID NO: 252564 - DNA, 430 bp, Homo Sapiens
ctcttcccaagacaacagaaggtgcaaccggcatctacattcttacaacgaaggactgagaaacaccctcctgacagtcacactaaaggacagtaaccatggggctggtgacagaggcagccacttttctaaaacgacagatcttcaaagtctgaaagaaacgcagtgtcctcacccaggacgcagcagcctttcccacagcccagactccaaggcaaactgcagaagcaaccctaaaaatgacagaaacatactcaccaaggagaggctggtggctccaccttcccaggaactgtgctgtgaagatctgaagacaggcacaggctcaggcaccgcttgtctggaatgtcaatttgaaacttaaaaagcagcgaccatccagtcatttatttccctccattcccaatgatgtacacacgactaagtagga

SEQ ID NO: 252565 - DNA, 731 bp, Homo Sapiens
tcggcacagcattcattgggaatggagggaaataaatgactggatggtcgctgctttttaagtttcaaattgacattccagacaagcggtgcctgagcccgtgcctgtcttcagatcttcacagcacagttcctgggaaggtggagccaccagcctctccctgacaagcaaagtggatcagcaaaggctgcagtcaccagcatcttttccaaccttaatgaactgtatcctcaaaagaacactatcagactggtaagacaagcattattgtcccacttcgacagatgaaggagcttggggggccctgtgggatgtgtaggagagtcggccttcctttttataggccttttgctgagctcagaggacagagcagaagacaaagccgaatgcagccctaagcagacactatcccagcccaaggagctatgcagacagctcctgcctagaggagaaacaattctctccttcagccaggcatgtggcacagaggtgaacaggaaatgcttagggagacagttcacagatatatatgtacttcacagggcacaatttaatccataaatcaatcatggatcaccgctaaagaaaacaaaatatgctgccactaatttgccaccaccctgtgagcatgattggatgatgtttattttgattaggagattgctccatttataaatcttcaatacatcctgtccccctaaaacggcatctgggtcttttgagggtttaat

SEQ ID NO: 252566 - DNA, 484 bp, Homo Sapiens
tacctagtgggctacacactgctcagcccccacatcacagaagactatctcctcactgaagactatgacaaccaccccttctggttccgctgcatgtacatgctgatctggggcaagtttgtgctgtacaaatatgtcacctgttggctggtcacagaaggagtatgcattttgacgggcctgggcttcaatggctttgaagaaaagggcaaggcaaagtgggatgcctgtgccaacatgaaggtgtggctctttgaaacaaacccccgcttcactggcaccattgcctcattcaacatcaacaccaacgcctgggtggcccggtgagctgctggtggggagcctggaccctggttccttccttccactgtcttcccagattggagggcaggggtgtaccatgtcacccctatgcgtctttcccatctgggcagaaccccctgtcgctcacactgactttgacccccacctatacccccccccc

SEQ ID NO: 252567 - DNA, 1024 bp, Homo Sapiens
tcctaggtagcgaggcctgggtggcgaattcggcacaaggcagagaagaaaccccaaccccggaaaatcctctgtctccagtctctggaggtgaagcagggacaataagctaaggtagtatcttggccatcccaggaaacttgtggcattaggacgatgaaggccatgcttcagtgttttcgtttctatttcatgagactttttgtcttcctgcttacaagtgggaagatgattgacagtgactctactatgcagggctgttggtaccaacctgagccctataggtggcagtccctggagaagtggtcacagaagatggagctctgatcccctgcttacctcttcacaacacttgtgtgcaaagatagttttagatttggtttagaagctatcctccagaacaggctcccatacttagaatgtttctagttaaggtaataaattaggcaacccaagtgtgactccactcaagtgtccttttctgtaggcaggaagggcccacaacatggcttaaaatgtagtccatggttctggcccacagtacagtgtgtatctataccaggtcacctgtgttcaatctgggagccttcctggccagtctgagtggcagccagaagggagctcatagtgtctaggagtctcaggcaaggtaagtcagggtactgtgggcaggggggatgtgtgtgataggagagggtaccctaaaacccataccttccctccctgacctgaaaagctgatctcaacagggaattcacacagaattaagctgtgttttttgcattaactgggaaggtgactttctcaaaattccttaaatttccaaaggtatttaagaaaactgggaggaaggcattgaaatccgggaggaaggcatccacggaccccgggggttttgataagcttttacagggtagggatcctcccccacccaaaaaagcgggggggcaatcaccactatatggagcttattctgaagtttttaggcaaacctctataggaagaattgacgccctaaaaaact

SEQ ID NO: 252568 - DNA, 1120 bp, Homo Sapiens
ggaggagaagaaaccccaaccccggaaaatcctctgtctccagtctctggaggtgaagcagggacaataagctaaggtagtatcttggccatcccaggaaacttgtggcattaggacgatgaaggccatgcttcagtgttttcgtttctatttcatgagactttttgtcttcctgcttacaagtgggaagatgattgacagtgactctactatgcagggctgttggtaccaacctgagccctataggtggcagtccctggagaagtggtcacagaagatggagctctgatcccctgcttacctcttcacaacacttgtgtgcaaagatagttttagatttggtttagaagctatcctccagaacaggctcccatacttagaatgtttctagttaaggtaataaattaggcaacccaagtgtgactccactcaagtgtccttttctgtaggcaggaagggcccacaacatggcttaaaatgtagtccatggttctggcccacagtacagtgtgtatctataccaggtcacctgtgttcaatctgggagccttcctggccagtctgagtggcagccagaagggagctcatagtgtctaggagtctcaggcaaggtaggtcagggtactgtgggcaggggggatgtgtgtgataggagagggtaccctaaaccccataccttccctccctgacctgaaaagctgatctcaacagggattcacacagaattaggctgtgtttttgcattagctggtaggtgactttctcaaaattcttaaattcagaaagtatttagtaaacttgaggaaggtatgaaatctggaggaggcatccaggacccaggggtttgatagctttacaggtaggatcataccacaccaaaagagcagtgaacaataagactatatgagctatatgaagcttttaggaatcatttaagacagacagagccctaaacaacccattcatgacttaagttgttggctcaatgtatgctgggggacaaagaaaaactaacaagccgaacctggcctttatgataaaattctagttgtgcttacaaggggatgacttccctgagggggtgatctgtcccacctttgaaaaaaactccacaactgaa

SEQ ID NO: 252569 - DNA, 268 bp, Homo Sapiens
atcaggtggacggtgtcagagagggctgcagtaagcaagagcgagactccactcgatgtgtggttggcaggatgctatcctcatttttccaggaatgagctctttagtaaggagctgggaactcagtgatggtcactgagtcttgtcatgtggcagtgctcccctgtaggtggtgagtaacctcatgggatgtcagagttgaccctaaatgcagcgactctgaaaacacaaagctcgagttaacaaagaattccattgagcgctggtc

SEQ ID NO: 252570 - DNA, 609 bp, Homo Sapiens
ggttggcattatgaaaatatcttttaatacatttatttagcaagagaaaaattatcagaaaatgagaagcaccatttatagttcacaagaaatgcaacatggactccaatagaagtagatatcaataactgatacttcctctgtttatgacccccaaacatgctaaaaatgctaaagtaatgcttgccaaagaatatgaatgacaaatgttatcccagcagctttttggtttaaaatgattgccaatgactagcagcttcaatggttaacagtagggaggaagaacccttcagtacctaacaacgctgctgtctgctcctaagtggctttagttagagtcccatgttttaatggtaatactgcattgattttaaaggcatatgcagcaaaatgcggggggagggagagaaactggaagaaacataaaagttatatggttagtgtctttaaagtctaaaaatttaaactattgtttaaaaaaccttacatagttcacagctatcggcccacacagtaagcaaatatctgtgtgtaggatgggagccttcactttggagtggtttttgtaactctgtttacattaaaaaggacagaagagtgttttgttgc

SEQ ID NO: 252571 - DNA, 221 bp, Homo Sapiens
ggcgctcaatggaattctcgtgtgagagagtatagacggagcttggctttaaccatatgcaaatttaaagagacacagttatagagcagaatctgagctgttggtttctgcctcttctgcagacagttctctaccgtgatgccatttgcagagtcagctggaaattactgacagaatgaatttacaaatggctgtcaaaacctctgagaaaacattggttt

SEQ ID NO: 252572 - DNA, 298 bp, Homo Sapiens
ttctcaagctgaataattcggtaggtcaagtagaagatcgatgctaactggcagtataaaagagcaaattaatgaaatttcaaagcacgaagtaaaaatacaaaacgatgaaagtcgtaataggaaaagagaaaagccttgaatggatcaaggaaacctcaacatacagtcataagaagagttccagaaaggaaaagagagaaaagacagaagagataataattaaagtgatatggaaaaaaattttcataaactaaagagagggctgaattgcaatctcacagagctcattatactt

SEQ ID NO: 252573 - DNA, 502 bp, Homo Sapiens
  misc_feature (256)..(293): n is a, c, g, or t
ctaaacctctgccagcaggtgaatgatgtctggaacttcaagatgacgggcaggtatgagatgtacgcacgggagctcgccgaagctgtcaagtccaactacagccccaccatcgtgaaagagtagccggcttcagtgcctgccttggggtgaggaagacacctctgccccagtggattagcaagtgtggcaggcttaacatgtccaggttctccccaataacattgtccaggttggttttaaaattcccaggcannnnnnnnnnnnnnnnnnnnnnnnnnnnnnnnnnnnnnaggggctgcttacttctggggtattggaaatgtttggggactaggtagaggtgaatgtactaaatgccactgaatttgtatacttcagaatgtttgttatgtaaattttacctcaactgtccatcccgtacaccagtgggaagagggtgagggctgatccagagaccctgagcctacagcaaggctgtggtgggtcggatggtctttgg

SEQ ID NO: 252574 - DNA, 1032 bp, Homo Sapiens
gggaagtggtggttatggaactcctaccacttggatcttcacctgcatggtcattcagtcttcatagtcttcttttgaggacatttcagggaaactgaggctcaggatgaggatttgatccagggctgctaattcttctgacagagcacagccacgtggcttatgcctgcagcaggcccttcccaaaggctgttcaggccagggcaaggtgctgaggacaggctggcctggttgcaggtttggggtgtgaccggtgagtctcctggttgtccccaccactggcccaggaaagcctgcagccaggccaggctctgtccccaccactggcccaggaaagcctgcagccaggccaggctcagggctgagcatccactgagtctgcctggaaagtcggcaacctgggtcctcttggtcctctcttacagcgagtccctgtggcccatcgaggccagaaacgcagccattgccaatcactgcttcacctgcgccatcaatcgagtgggcaccgagcacttcccgaacgagtttacctcgggagatggaaagaaagctcaccaggactttggctacttttatggctcgagctatgtggcagcccctgacagcagccggactcctgggctgtcccgtagccgggatggactgctagttgctaagctcgacctaaacctctgccagcaggtgaatgatgtctggaacttcaagatgacgggcaggtatgagatgtacgcacgggagctcgccgaagctgtcaagtccaactacagccccaccatcgtgaaagagtagccggcttcagtgcctgccttggggtgaggaagacacctctgccccagtggattagcaagtgtggcaggcttaacatgtccaggttctccccaataacattgtccaggttggttttaaaattcccaggcagggggagagtggcatggggagtgacttcttaatgggtaaggggctgcttacttctggggtattggaaatgtttggggactaggtagaggtgaatgtactaaatgccactgaatt

SEQ ID NO: 252575 - DNA, 688 bp, Homo Sapiens
agcttagcaactagcagtccatcccggctacgggacagcccaggagtccggctgctgtcaggggctgccacatagctcgagccataaaagtagccaaagtcctggtgagctttaaaggaccaaagaaacacatctgtgagcttgtgtagatgcactgtgggctccacagagggtcaggcaccttgaggcaggcccaggacacggagccatgccatcctccccagtgtctgccaaatgctgaggcccaaaaggcctgtctctcatctcaggcctgaaggcccagcaaagctgcaaatggcccccttatgctgcttcccgcccctggggaaatgtctaaatgtcacccttctgagaggtgtcacttctacccacagcctaaggaaaacagaaagtcacactctgggggcttcctatgggggccctcacagtgagctggaggctctgccttcatctgccttgccagctgcgtcacccttatcctccctccaggccttggtcccttcaccagtcagggaggactagcagccaccccacacatgtgtaaggagcaggtggggctgggcagggcctagcatggcccagatgcagcaggcacccagtggacgctcattcccctgccctttctgcatctctatttgcagtaagttaactaggatcagggactctcctggaaaacagactcgctcag

SEQ ID NO: 252576 - DNA, 1061 bp, Homo Sapiens
acgagcgcgtttaggcccttggctcactcaatgacctccagttctttagatacaacagtaaagacaggaagtctcagcccatgggactctggagacaggtggaaggaatggaggattggaagcaggacagccaacttcagaaggccagggaggacatctttatggagaccctgaaagacattgtggagtattacaacgacagtaacgggtctcacgtattgcagggaaggtttggttgtgagatcgagaataacagaagcagcggagcattctggaaatattactatgatggaaaggactacattgaattcaacaaagaaatcccagcctgggtccccttcgacccagcagcccagataaccaagcagaagtgggaggcagaaccagtctacgtgcagcgggccaaggcttacctggaggaggagtgccctgcgactctgcggaaatacctgaaatacagcaaaaatatcctggaccggcaagatcctccctctgtggtggtcaccagccaccaggccccaggagaaaagaagaaactgaagtgcctggcctacgacttctacccagggaaaattgatgtgcactggactcgggccggcgaggtgcaggagcctgagttacggggagatgttcttcacaatggaaatggcacttaccagtcctgggtggtggtggcagtgcccccgcaggacacagccccctactcctgccacgtgcagcacagcagcctggcccagcccctcgtggtgccctgggaggccagctaggaagcaagggttggaggcaatgtgggatctcagacccagtagctgcccttcctgcctgatgtgggagctgaaccacagaaatcacagtcaatggatccacaaggcctgaggagcagtgtggggggacagacaggaggtggatttggagaccgaagactgggatgcctgtcttgagtagacttggacccaaaaaatcatctcaccttgagcccacccccaccccattgtctaatctgtagaagctaataaataatcatccctccttgcctagcaaaaaaaattctggccgcggtt

SEQ ID NO: 252577 - DNA, 1127 bp, Homo Sapiens
gcatcccagtcttcggtctccaaatccacatcctgtctgtccccccacactgctcctcaggccttgtggatccattgactgtgatttctgtggttcagctcccacatcaggcaggaagggcagctactgggtctgagatcccacattgcctccaacccttgcttcctagctggcctcccagggcaccacgaggggctgggccaggctgctgtgctgcacgtggcaggagtagggggctgtgtcctgcgggggcactgccaccaccacccaggactggtaagtgccattccattgtgaagaacatctccccctgggtagaagtcgtaggccaggcacttcagtttcttcctcctggggcctggtggctggtgaccaccacagagggaggatcttgccggtccaggatatttttgctgtatttcaggtatttccgcagagtcgcagggcactcctcctccaggtaagccttggcccgctgcacgtagactggttctgcctcccacttctgcttggttatctgggctgctgggtcgaaggggacccaggctgggatttctttgttgaattcaatgtagtcctttccatcatagtaatatttccagaatgctccgctgcttctgttattctcgatctcacaaccaaaccttccctgcaatacgtgagacccgttactgtcgttgtaatactccacaatgtctttcagggtctccataaagatgtcctccctggccttctgaagttggctgtcctgcttccaatcctccattccttccacctgtctccagagtcccatgggctgagacttcctgtctttactgttgtatctaaagaactggaggtcattgagtgagccaagggcctgaaacgcggggacgtcttcaacatgcttggacagcccagtgtagatataggtcagagagtaacgaccatcttggttctcctgggggacagcaggacccagaagcagcagcagagacagcaggacaggcaccattcttaccattgtgtctgcttggagggttctgggcaggaggcacagatattatcctgggtcctggggccctgcccaggggaggtgaatctacaggccaatgggagtgccaggacgggctcctcccctaatagag

SEQ ID NO: 252578 - DNA, 521 bp, Homo Sapiens
  misc_feature (56)..(56): n is a, c, g, or t
  misc_feature (59)..(59): n is a, c, g, or t
  misc_feature (495)..(495): n is a, c, g, or t
  misc_feature (507)..(507): n is a, c, g, or t
tcacggtattgcagggaaggtttggttgtgagatcgagaataacagaagcagcggnatntctggaaatattactatgatggaaaggactacattgaattcaacaaagaaatcccagcctgggtccccttcgacccagcagcccagataaccaagcagaagtgggaggcagaaccagtctacgtgcagcgggccaaggcttacctggaggaggagtgccctgcgactctgcggaaatacctgaaatacagcaaaaatatcctgggaccggcaagatcctccctctgttggtggtcaccagccaccaggccccagggagaaaagaagaaactgaagtgcctgggccttacgaatttcttacccaggggaaaatttgatgttgcactgggacttcggggccgggcgaggttgcagggagccttgagtttacgggggagatgttctttcacaatgggaaatgggcattttaccagttcctggggttgttgttggcagtncccccgcagganaacagccccttatt

SEQ ID NO: 252579 - DNA, 1442 bp, Homo Sapiens
  misc_feature (42)..(42): n is a, c, g, or t
  misc_feature (718)..(719): n is a, c, g, or t
cggctggaccggtccggattcccgggatgccacacatggacntcacgcatcggctggctgcacaacctggggcgaccagataggcaaaccctacaacagcagcggcctgggcggcccctccatcaaggacaagtatgtgacggcgctctacttcaccttcagcagcctcaccagtgtgggcttcggcaacgtctctcccaacaccaactcagagaagatcttctccatctgcgtcatgctcattggctccctcatgtatgctagcatcttcggcaacgtgtcggccatcatccagcggctgtactcgggcacagcccgctaccacacacagatgctgcgggtgcgggagttcatccgcttccaccagatccccaatcccctgcgccagcgcctcgaggagtacttccagcacgcctggtcctacaccaacggcatcgacatgaacgcggtgctgaagggcttccctgagtgcctgcaggctgacatctgcctgcacctgaaccgctcactgctgcagcactgcaaacccttccgaggggccaccaaagagctgccttcgggccctggccatgaagttcaagaccaaacatgcaccgccagggaacaaactggtgcatgctggggacctgctcaccgccctgtacttcatctcccggggctccatcgagatcctgcggggcgacgtcgtcgtggccatcctgggtatggggtggggggnncgggcactggactggaaatgccctctgcagcctcaagaggtgcgagccttctgaatatgcagtcactggggctgtggacctgggactgcctgcagggtcactgggctcctttaattcacctaaactcaggccctccaagcggggccatggagaggagccccacgtggggtgaggctgctgaactctggggttcccacattctccttcccttcaggatccgccacaaacagacactttttgcttccttaaagtaggatcaaatctagatcctctagcctgggcagtagaggaagaaatgctagcctggaagctcggcatttggtttcactaagggccatgtggttccctgcagcctcatgcctggccccttgacacatccaaagcaaagggagtcctgccccctccccccacttcctttctaccctgcctgtgcacagtgggtgggttggtgtgtctggacactgaggacttcctccccctttgcctgtccttccctcggccctgtgtgcctcagggcagatatagcaagctctttcgaccatagttgatggtaggacattttagactttgtttctcagctctgtacaaacacaaatacacacccccacaaaactaaaatcaaagtttcactacataacactgggccttactgcatgtggttcattctagcatttctgttctgtgctgtgctaagctatactactgtatgttctttcagtaaaa

SEQ ID NO: 252580 - DNA, 1536 bp, Homo Sapiens
  misc_feature (811)..(1094): n is a, c, g, or t
  misc_feature (1097)..(1110): n is a, c, g, or t
  misc_feature (1133)..(1133): n is a, c, g, or t
  misc_feature (1470)..(1470): n is a, c, g, or t
  misc_feature (1495)..(1495): n is a, c, g, or t
tctataagaagggcaagctgccgtgcaggcgctcagttaagcaggagatcacgctgcccccgtctcgtaagagcgaacttgtagttgaagttaagtcagataagctcccagaagagatgggcctcctgcagggcagcagcggtgacaagagggctccgggagaccagtgagagaaatacatcgatctgaggcattagccccgaatcacttttgctcccttccctgcctggaccattcccagctccctgctcactcttctctcagccaaagcctccaaagggactagagagaagcctcctgctcccctcgcctgcacaccccctttcagagggccactgggttaggacctgagtgacctcacttggccctgcaaggcccgcttttcagggaccagtccaccaccatctccacgttgagtgaagctcatcccaagcaaggagccccagtctcccgagcgggtaggagagtttcttgcagaacgtgttttttctttacacacattatggctgtaaatacctggctcctgccagcagctgagctgggtagcctctctgagctggtttcctgccccaaaggctggcttccaccatccaggtgcaccactgaagtgaggacacaccggagccaggcgcctgctcatgttgaagtgcgctgttcacacccgctccggagagcaccccagcagcatccagaagcagctgcagtgttgctgccaccaccctcctgtctgcctcttcaaagtctcctgtgacattttttctttggtcagaagccaggaactggtgtcattccttaaaagatacgtgccggnnnnnnnnnnnnnnnnnnnnnnnnnnnnnnnnnnnnnnnnnnnnnnnnnnnnnnnnnnnnnnnnnnnnnnnnnnnnnnnnnnnnnnnnnnnnnnnnnnnnnnnnnnnnnnnnnnnnnnnnnnnnnnnnnnnnnnnnnnnnnnnnnnnnnnnnnnnnnnnnnnnnnnnnnnnnnnnnnnnnnnnnnnnnnnnnnnnnnnnnnnnnnnnnnnnnnnnnnnnnnnnnnnnnnnnnnnnnnnnnnnnnnnnnnnnnnnnnnnnnnnnnnnnnnnnnnnnnnnnnnnnnggnnnnnnnnnnnnnngacgcgtgcctgccgtgaagaanctgggcgctgctttcaagttcaggtgaattagcctcaattccccgtgtttcactgggctcccatagaccctcttggaggaccaccgaaaacttgaaaggccgtcggggtagcaaacaaagaagaaggtctaaccctgccctttcatggggaattaaaagcttcgggtagaattaacccccgcatttttaaaagaccaagcctacggggcccaacccccaaaaagggccccacgcggcagaacggggtctttaggcggggcaaagacggggccctggcatagcgatgtatcgctggagccgccacctacccgcgcgaaaatgtgtacatagtagtggncgacaattcactcatggttaagctngtgcgcaaatctcacacggagggcccgtgaagacccggctg

SEQ ID NO: 252581 - DNA, 507 bp, Homo Sapiens
  misc_feature (392)..(392): n is a, c, g, or t
  misc_feature (413)..(413): n is a, c, g, or t
  misc_feature (436)..(436): n is a, c, g, or t
  misc_feature (469)..(469): n is a, c, g, or t
ttcggcacggcagccacatggtctcatgacctgcttccctgccctgggctggccctggagcaaggagccctcatccattccacatccttcacagcgggcccttctcttcctgtggccctgagataccaacctctcacctccctccctcctcccagcacgctgcccccgtctcgtaagagcgaacttgtagttgaagttaagtcagataagctcccagaagagatgggcctcctgcagggcagcagcggtgacaagagggctccgggagaccagggtaggaggcggttcctgtgggccagagcctggccacatccctcagggaccgggggcagtagggactaacggttctcttcttattcctttcatccctctttgttcagagataggggagncagggccccatcttggccttntttaacattaattcacagatggncaggggcaagtcaagtgggcttgaggggagttnggagggaagatttaggaaaggaccttgttccccttcac

SEQ ID NO: 252582 - DNA, 2193 bp, Homo Sapiens
  misc_feature (711)..(711): n is a, c, g, or t
aaggtagcgaggcctgggtggcgaattcggcacgaggcttgcatctgggacctcaagttctgccccagtggagcatgggaacttccaggcacccctcggaaggctcctctcctgccccggttgggtctcttggctctggcctgctcagacgggaaagtactgctattcagtctaccccatccggaggccctgctggctcagcaacccccagatgcagtgaagcctgccatatataaggtacaatgtgtggcaactctgcaggtggggtctatgcaagctacagacccctctgagtgtggtcagtgccttagcctggcctggatgcctaccaggccccaccaacacctagctgctggatattataatggcatggtggttttctggaaccttcccactaactcacccctgcagcggatacggctctctgatggctccttaaagctctaccccttccagtgtttcctagcccatgaccaggctgtgcgtacccttcaatggtgcaaagctaacagccatttccttgtctctgcggggagtgaccggaaaatcaaattctgggaccttcgacgtccttacgaacccataaactctatcaagcgcttcttgagtacagaactggcctggctgcttccctacaatggtgtcactgtggctcaggacaactgctatgcctcttatggactctgtgggattcattatattgacgctggnttaccttggtttcaaggcctacttcactgctcctcgaaaagcaccgtttggagtctttcaggatccgactggcttgggacaataactgcaggagaatatatccggggagctcattgctgctatattaccagatatggcactgaatccaataaatgtcaagcgacctgtagagcgaagatttcctatatataaagcagatctgataccgtatcaggacagtcctgaaggtccagaccattcttctgcttcatctggggtccccaaccctcccaaggctcgaacttacactgaaactgtcaaccatcactacttgctctttcaagacacagatttgggttcattccatgatctgctccgtagagaaccaatgctgcgcatgcaggagggagaggggcattctcaactctgcctggacaggctgcagctggaggctattcataaggtacgtttcagcccaaacctggactcctatggatggctggtatctggggggcagtcagggctggttcgaatccattttgtccgtggactcgcctccccactgggccaccgtatgcagcttgaaagccgagcccacttcaatgctatgttccaaccatcctcccccactagacggcctggcttctctccaaccagccatcgccttctgcccactccctagccttggcccacaccagatccttggagtgaagtcggtcaagaacaaatggcccctatgcacagagccataggaactgggggccttccctggacagtgatcatgccaggcctggacctttaggcctgcctccccaggactccttagatcccactctttctacagacttctgtgatcacagccccctgcgggcaggggggctctccctccaccaactctcaaggctcctcagcctaagactatggctcatgagaaacactcaggcctgacctaggcttgggagtcaaactgctcatattgagcatattgttaagtgggtaaagccaagtaaaggtactgggtgtttttgtgaccacttgtgaatgggtgtatggagaactgaaaagggtatctgcatgaaggctcctgtctgactattccaggatccaatattactgccttctgaaacttcctctttagggtaaccatcatgtatgcccacgagggtgatagtaattcgtgagactgaagttgcttagagtacttctttgaccaaggaataccacagacaccctaccgatagaacagtggctcagatcttacttgctcctgcttacgaagtattcccaatcactggtcatctgaccctacttgaacactcctgaacagtcatgttttttaaaatcttcctttatatcaagtcagagagtatacttctataaatttcactcatggatgttaggaaatctagtcatcttccctgtgattgccctgttaagtatttaaccatagctatcatgtgtttcccaaatcttctctagattaaatatcttcagttacttcaa

SEQ ID NO: 252583 - DNA, 536 bp, Homo Sapiens
  misc_feature (294)..(294): n is a, c, g, or t
  misc_feature (442)..(442): n is a, c, g, or t
  misc_feature (452)..(452): n is a, c, g, or t
  misc_feature (508)..(508): n is a, c, g, or t
ttgaagtaactgaagatatttaatctagagaagatttgggaaacacatgatagctatggttaaatacttaacagggcaatcacagggaagatgactagatttcctaacatccatgagtgaaatttatagaagtatactctctgacttgatataaaggaagattttaaaaaacatgactgttcaggagtgttcaagtaggggtcagatgaccagtgattggggaatacttcgtaagcaggagcaagtaagatctgagccactgttctatcggtaggggtgtctgtgggtattccnttgggtcaaaggaaggtactcttaaggcaactttcagtctcacggaattacttatcacccctcgtggggccataccatggatgggttaccccttaaaggagggaaggttttccaggagggccagttaatattgggatccccgggggantaggtccagnccagggagcccttccatgccaggatacccctttttccagttctcccatacaccccnttcaccaagtgggtccccaaaacacccc

SEQ ID NO: 252584 - DNA, 419 bp, Homo Sapiens
gactgccccccagataccagccatccataggagtccaggtttgggctgaaacgtaacctttatgaatagcctccagcttgcagcctgtccaggcagagttgagaatgcccctctcccgtcctcatcgcagcattggttctctacggagcagatcatggaatgaaccccaaatctgtgtcttgaaagagcaagtagtgatggttgacagtttcagtgtaagttcgagccttgggagggttggggaccccagatgaagcagaagaatggtctggaccttcaggactgtcctgatacggtatcagatctgctttatatataggctggaaaggagaccatgaaattaggttctataatactcaagacagaataaaagcagaggaaagtggtttgggcaggaaaggcttaaagatggaaaaaag

SEQ ID NO: 252585 - DNA, 898 bp, Homo Sapiens
  misc_feature (63)..(63): n is a, c, g, or t
cggaaggactttggcgaggtgtttttcagcttgagtgtgcgtcagaatcccctgaagagcttnttaaaacacaaggtgctggccccatccagaattgctgattcggggcagccattttggggggtgctgatggatacctgcggggtcggctatgttgccctgggggaggccggccccgtggggaacatgactgtggtagactctcctggacaagaggtgctaaatcagcttgatgtcaagacctcttcagaaatgaccagtgcagaggcttccgtagagatgtcattacctacccctttgcctggatttgaggattctcctgatcagaggaggctccctccagagcaggaaagcctctccagactggaacagccagatctttcttcagagatgtcaaaggtctcaaagcctagggcctcaaagcctggccggaagagaggtggtaggacacgaaaaggccccaaaaggccccaacagcctaatcctccatcagccccactggttcctggtctcttagatcaatccaaccctctgtccacccccatgcctaagaaacgaggtcgaaagtccaaggcagagctgctgctgctgaagttgtcaaaagacctagatcggccagaatctcaatctccaaagaggccccctgaggactttgagaccccttctggggaacgaccccgccgaaaggctgccccagtggcacttctgtatcttcaggaactggctgaagagctctcaacagccctgccctgcccctgtgtcctgtcctgagggccccaaaggtgaccaaccccaccaaatccgaaaaagatccggcagccagcagccctgtccagggtggaaaaaaagggggatggtgcctccccgggatgaagactttttttctccaggttggagg

SEQ ID NO: 252586 - DNA, 993 bp, Homo Sapiens
tcacacgagccaagtctcagcggattgcaaagttcgcctttgactatgccaccaagaaggggcggggcaaggtcactgctgtccacaaggccaacatcatgaaacttggggatgggttgttcctgcagtgctgtgaggaagttgctgaactgtaccccaaaatcaaatttgagacaatgatcatagacaactgctgcatgcactgggttgcaggaatccttaccagttttgatgtgcttgttgattgcccaatctctatggggaacattattggacaatctggctgctggcctggtcgcggggagctggtgtggtccctggtgagagctatagtgcagaatacgcagtctattgagacgggtgcccggcaccaaatttgcccagggcagtgggcaggaatatagccaatcccacggccatgctgctgtcggcttccaacatgctgcggcatcttaatcttgagtatcactccagcatgatcgcagatgcggtgaagaaggtgatcaaagttggcaaggtgcggactcgagacatgggcggctacagcaccacaaccgacttcatcaagtctgtcatcggtcacctgcagactaaagggagctagagccctttatttcttccaaccttgcaaggaccacactccccatacccttcagtgcagtgtaccagggaagagaccttgtgcctctaagcagtggaccatggtcaccttgctgggtagagcctaggttgtccttgggccggcttccttaggggacagactgttgggtggtgatggggattgttaggatggagcccaggccacatggatgatgatgattctcccccacaggttcgaacctctgacatgggtggctatgctacttgccatgacttcactgaggctgtcattgctgccttgccccacccataggccctgtccatacccatgtaaggtgttcaataaagaacatgaaccgcacaaataaaacacccaaaacccaaaaaccttgt

SEQ ID NO: 252587 - DNA, 1315 bp, Homo Sapiens
gggacttcccacgcgacttcctgcgggaaacatggcggcattgagcggagtccgctggctgacccgagcgctggtctccgccgggaaccctggggcatggagaggtctgagtacctcggccgcggcgcacgctgcatcgcggagccaggccgaggacgtgagggtggagggctcctttcccgtgaccatgcttccgggagacggtgtggggcctgagctgatgcacgccgtcaaggaggtgttcaaggctgccgctgtcccagtggagttccaggagcaccacctgagtgaggtgcagaatatggcatctgaggagaagctggagcaggtgctgagttccatgaaggagaacaaagtggccatcattggaaagattcataccccgatggagtataagggggagctagcctcctatgatatgcggctgaggcgtaagttggacttatttgccaacgtagtccatgtgaagtcacttcctgggtatatgactcggcacaacaatctagacctggtgatcattcgagagcagacagaaggggagtacagctctctggaacatgagagtgcaaggggtgtgattgagtgtttgaagattgtcacacgagccaagtctcagcggattgcaaagttcgcctttgactatgccaccaagaaaggggcggggcaaggtcactgctgtccacaaggccaacatcatgaaacttggggatgggttgttcctgcagtgctgtgaggaagttgctgaactgtaccccaaaatcaaatttgagacaatgatcatagacaactgctgcatgcagctggtgcagaatccttaccagtttgatgtgcttgtgatgcccaatctctatgggaacattattgacaatctggctgctggcctggttgggggagctggtgtggtccctggtgagagctatagtgcagaatacgcagtctttgagacgggtgcccggcacccatttgcccaggcagtgggcaggaatatagccaatcccacggccatgctgctgtcggcttccaacatgctgcggcatcttaatcttgagtatcactccagcatgatcgcagatgcggtgaagaaggtgatcaaagttggcaaggtgcggactcgagacatgggcggctacagcaccacaaccgacttcatcaagtctgtcatcggtcacctgcagactaaaggttcgaacctctgacatgggtggctatgctacttgccatgacttcactgaggctgtcattgctgccttgccccacccataggccctgtccatacccatgtaaggtgttcaataaagaacatgaaccaactctt

SEQ ID NO: 252588 - DNA, 183 bp, Homo Sapiens
cctcaagcttcaggtgaccacaatagcaacacctccctattctgttatttcttagtgtaggtagacaattctttcaggagcagagcagcgtcctataatcctagaccttttcatgacgtgtaaaaaatgatgtttcatcctctgattgccccaataaaaatctttgttgtccatccctataca

SEQ ID NO: 252589 - DNA, 470 bp, Homo Sapiens
ggctgtcaactgctcaggaatagtaccctggtgttgcttgaccctgccccccctggccccgcctgccctctgcttgttctcctgagccctgattatcctcatactcattctggggctcaggcttgagccactactccctcatcccctcaggagtctgaacactgggcttatgccttactctcagggacaagcagcccccattgctgcctgtagatgtgagctgttgagttccctcttgctggggaagatgagcttccatgtatcctgtgctcaaccctgaccctttgacactggttctggcctttcctgccttttctcaagctgcctggaatcctcaaacctgtcactttggtcagatgtgcagaccattactaaggtctatgtctgcaaacattactaatctaggtcctattactaatctatgtctgcaaacattaaaggaatgaaacaatgaaaggaacatttgaaag

SEQ ID NO: 252590 - DNA, 1387 bp, Homo Sapiens
atagctgcttggggacctccttctagccttaaatttcagctcatcaccttcacctgccttggtcatggctctgctattctccttgatccttgccatttgcaccagacctggattcctagcgtctccatctggagtgcggctggtggggggcctccaccgctgtgaagggcgggtggaggtggaacagaaaggccagtggggcaccgtgtgtgatgacggctgggacattaaggacgtggctgtgttgtgccgggagctgggctgtggagctgccagcggaacccctagtggtattttgtatgagccaccagcagaaaaagagcaaaaggtcctcatccaatcagttcagttgcacaggaacagaagatacattgggctccagtgttgagcaagaagaagtttatgattgttcacatgatgaagatgctggggcatcgtgtgagaacccagagagctctttctccccagtcccagagggtgtcaggctggctgacggccctgggcattgcaagggacgcgtggaagtgaagcaccagaaccagtggtataccgtgtgccagacaggctggagcctccgggccgcaaaggtggtgtgccggcagctgggatgtgggagggctgtactgactcaaaaacgctgcaacaagcatgcctatggccgaaaacccatctggctgagccagatgtcatgctcaggacgagaagcaacccttcaggattgcccttctgggccttgggggaagaacacctgcaaccatgatgaagacacgtgggtcgaatgtgaagatccctttgacttgagactagtaggaggagacaacctctgctctgggcgactggaggtgctgcacaagggcgtatggggctctgtctgtgatgacaactggggagaaaaggaggaccaggtggtatgcaagcaactgggctgtgggaagtccctctctccctccttcagagaccggaaatgctatggccctggggttggccgcatctggctggataatgttcgttgctcaggggaggagcagtccctgagcagtgccagcacagattttgggggtttcacgactgcacccaccaggaagatgtggctgtcatctgctcaggatagtatcctggtgttgcttgacctggcccccctggccccgcctgccctctgcttgttctcctgagccctgattatcctcatactcattctggggctcaggcttgagcactactccctcatcccctcaggagtctgaacactgggcttatccttactctcagggacaagcagcccctttgctgcctgtagatgtgagctgttgagttcgctcttgctgggaagatgacttccatgtatctgtgctcaccctgaccgttgacactgggtctgcgttcgtgc

SEQ ID NO: 252591 - DNA, 1550 bp, Homo Sapiens
tgatttgtgtgtgcaccgcgtctccagcgatcccggatccactgcgctgccaggggctgggggtgggtctcttgctgtctctgcgacgacatcctttacgtttcggcactctaatgctgggtttgtgcgtgtgtgtctgcttagcggtctagcgggctgttaggctccctcgcccccagctccttggctcgctcagctcctccaccgcagcccagcagtgagacgcgcgcgcagcagctccccacgagatggaacagaccgaagtgctgaagccacggaccctggctgatctgatccgcatcctgcaccagctctttgccggcgatgaggtcaatgtagaggaggtgcaggccatcatggaagcctacgagagcgaccccaccgagtgggcaatgtacgccaagttcgaccagtacaggtatacccgaaatcttgtggatcaaaggaaatggaaaatttaatctgatgattctctgttggggtgaaggacatggcagcagtattcatgatcataccaactcccactgctttctgaagatgctacagggaaatctaaaggagacattatttgcctggcctgacaaaaaatccaatgagatggtcaagaagtctgaaagagtcttgagggaaaaccagtgtgcctacatcaatgattccattggcttacatcgagtagagaacatcagccatacggaacctgctgtgagccttcacttgtacagtccaccttttgatacatgccatgcctttgatcaaagaacaggacataaaaacaaagtcacaatgacattccatagtaaatttggaatcagaactccaaatgcaacttcgggctcgctggagaacaactaaggggcaccaaaccctctgaggttttactttaaggttcgctgtatgtttgccttggacaaaaaggctacctaccacgtgctatccagtaatatacttaaataagccaatacttagatctactgtaaggcagatgctaattataaggcattaagtaagcaaatagtgccctcagctactgcagaagaaaagtcccactgaggaaaagaaagtcttgtgatttttaaaggcaagttttcaagtgctctcatagttctatcctctaattccattaaatccatactaggagcgtcagtgagggttttcatagcttttggaaatactttggtctctgaactgtaattagcaagaagtaaaaacagaaacgtcaaacgtcaaatgtttgctttgttacctggaggactaaatgtagatgtctttagtatactttgtatgttcttaatattggaagataattttgtgaatctgtagattttattttttcagtcttaccttacaaatttcttttctatgaataatagaggaacttacggcactctgccatttgttaatgaaaggaagtgcagaggatttagaaaagtacatgatccccagaccacaacaaaccaaaacataaactcatgtctgtgtcccatggtcatagtcaaagattttgtactgctaaaattaccaaataatttaaataaagtggatttgaacac

SEQ ID NO: 252592 - DNA, 338 bp, Homo Sapiens
gggctcctagcaggggctgtgctggccacacgtgtttaaaaatgatttttaaataccgttttttacaccgttctctcggtactttttttaagctaagtcagcattgtcttccagtgttaaaggcatccctcacctctgcattgaacttacgtatccatgccaaggaatggaatttccatcctgagccagttcagttaggtgtcaattgatactattttaattttttatgcaatctgatgagatgagctcagatttaaaaatctcaaaagcacgtttattgtaacaagaattgttatgtattaatactgcagttttcaataaagattgacttgtgttgc

SEQ ID NO: 252593 - DNA, 485 bp, Homo Sapiens
  misc_feature (72)..(86): n is a, c, g, or t
agcatcacacaattaagatctgagccacaagtagatcttcacatacttaaaatagatcgaaactctgtctcnnnnnnnnnnnnnnngataatgaagactaaatgttgattctgtattaacaaatggaggcagaggagagtaaatgactctagggcagacttgccaaaccctagcttggagggagtcccatattgccgttcatgcagaaagcagacactatcattagtctgaggactaaccctaaaggggccacacccattaaagctgaggagtgtccaaataccagggcaacaaaacgtcatggcaaatagtcttctccagatatgaaaacccaagactgtggtcttcacatttttaatcccccaaattcttaagttggtgttctgagtcaggactctatttcaaaatagggtctcacatccaaggaaatatgtccttctgtagagcagttcttacttgactatgcttcagggaaaagagcagca

SEQ ID NO: 252594 - DNA, 1501 bp, Homo Sapiens
gggggggccatttccgctgctgcttctgtgagtttttccggtgcacgcgagtgcttctgaaacgtcagctgcgctcccctaggagtgctgagcccgcggaaccgcagccatgactgaggctgatgtgaatccaaaggcctatccccttgccgatgcccacctcaccaagaagctactggacctcgttcagcagtcatgtaactataagcagcttcggaaaggagccaatgaggccaccaaaaccctcaacaggggcatctctgagttcatcgtgatggctgcagacgccgagccactggagatcattctgcacctgccgctgctgtgtgaagacaagaatgtgccctacgtgtttgtgcgctccaagcaggccctggggagagcctgtggggtctccaggcctgtcatcgcctgttctgtcaccatcaaagaaggctcgcagctgaaacagcagatccaatccattcagcagtccattgaaaggctcttagtctaaacctgtggcctctgccacgtgctccctgccagcttcccccctgaggttgtgtatcatattatctgtgttagcatgtagtattttcagctactctctattgttataaaatgtagtactaaatctggtttctggatttttgtgttgtttttgttctgttttacagggttgctatcccccttcctttcctccctccctctgccatccttcatccttttatcctccctttttggaacaagtgttcagagcagacagaagcagggtggtggcaccgttgaaaggcagaaagagccaggagaaagctgatggagccaggacagagatctggttccagctttcagccactagcttcctgttgtgtgcgggggtgtggtggaattaaacagcattcattgtgtgtccctgtgcctggcacacagaatcattcatacgtgttcaagtgatcaaggggtttcatttgctcttgggggattaggtatcatttggggaggaagcatgtgttctgtgaggttgttcggctatgtccaagtgtcgtttactaatgtacccctgctgtttgcttttggtaatgtgatgttgatgttctccccctacccacaacccatgcccttgagggtagcagggcagcagcataccaaagagatgtgctgcaggactccggaggcggcctgggtgggtgagcccatggggcagttgacctgggtcttgaaaagagtcgggagtgacaagctcagagagcatgaactgatgctggcatgaaggattccaggaagatcatggagacctggctggtagctgtaacagagatggtggagtccaaggaaacagcctgtctctggtgaatgggactttctttggtggacacttggcaccagctctgagagcccttcccctgtgtcctgccaccatgtgggtcagatgtactctctgtcacatgaggagagtgctagttcatgtgttctccattcttgtgagcatcctaataaatctgttccattttgatgacag

SEQ ID NO: 252595 - DNA, 863 bp, Homo Sapiens
  misc_feature (841)..(841): n is a, c, g, or t
gggtccggtgcacgcgagtgcttctgaaacgtcagctgcgctcccctaggagtgctgagcccgcggaaccgcagccatgttgtcctgggaccaagacaaattcgcctaagataaggagttacgtagaagacagggcgtcctggtgtacgggctggccctggacgtcacttccgctggcggcagtggcgtcacttcctgctcttgggggcggggcatccgtgtccttgcggtgctgggcagcagaccgtccaaaccgacacgcgtggtatcctcgcggtgtccggcaagagactaccaagacagacgctatgactgaggctgatgtgaatccaaaggcctatccccttgccgatgcccacctcaccaagaagctactggacctcgttcagcagtcatgtaactataagcagcttcggaaaggagccaatgaggccaccaaaaccctcaacaggggcatctctgagttcatcgtgatggctgcagacgccgagccactggagatcattctgcacctgccgctgctgtgtgaagacaagaatgtgccctacgtgtttgtgcgctccaagcaggccctggggagagcctgtggggtctccaggcctgtcatcgcctgttctgtcaccatcaaagaaggctcgcagctgaaacagcagatccaatccattcagcagtccattgaaaggctcttagtctaaacctgtggcctctgccacgtgctccctgccagcttcccccctgaggttgtgtatcatattatctgtgttagcatgtagtattttcagctactctctattgttataaaatgtagtactaaatctggtttcttaacaacccaaacaanaaaccgccgccaaaaaatgtcg

SEQ ID NO: 252596 - DNA, 536 bp, Homo Sapiens
gactgactggtgttgaaccctttatcatatccccagggccggtctaggacacataattgtgtgtgccttaggcattcttcccagtttgttgtggctgccctgccccaagcccacatcacctattagcttcacgtccttctctccgcagccaccaaaaccctcaacaggggcatctctgagttcatcgtgatggctgcagacgccgagccactggagatcattctgcacctgccgctgctgtgtgaagacaagaatgtgccctacgtgtttgtgcgctccaagcaggccctggggagagcctgtggggtctccaggcctgtcatcgcctgttctgtcaccatcaaagaaggctcgcagctgaaacagcagatccaatccattcagcagtccattgaaaggctcttagtctaaacctgtggcctctgccacgtgctccctgccagcttcccccctgaggttgtgtatcatattatctgtgttagcatgtagtattttcagctactctctattgttataaaatgtagtactaaatctga

SEQ ID NO: 252597 - DNA, 1647 bp, Homo Sapiens
tgaaccaccacacccagctcttaaaaccacagtatttctaggatgaccagtgtcccagtgaaagaacgaagtaaaggtgtctcagaactggagactggggcgctgccgagaggggattctgctaaagtggagattgcagtcagatgccctggatgcagctagaggatgattctctgtacatatcccaggctaatttcatcctggcctaccagttccgtccagatggtgccagcttgaatcgtcggcctctgggagtctttgctgggcatgatgaggacgtttgccactttgtgctggccaactcgcatattgttagtgcaggaggggatgggaagattggcattcataagattcacagcaccttcactgtcaagtactcggctcatgaacaggaggtgaactgtgtggattgcaaagggggcatcattgtgagtggctccagggacaggacggccaaggtgtggcctttggcctcaggccggctggggcagtgcttacacaccatccagactgaagaccgagtctggtccattgctatcagcccattactcagctcttttgtgacagggacggcttgttgcgggcacttctcacccctgagaatctgggacctcaacagtgggcagctgatgacacacttgggcagtgactttcccccaggggctggggtgctggatgtcatgtatgagtcccctttcacactgctgtcctgtggctatgacacctatgttcgctactgggacctccgcaccagcgtccggaaatgtgtcatggagtgggaggagccccacgacagcaccctgtactgcctgcagacagatggcaaccacctgctggccacaggttcctcctactacggtgttgtacggctgtgggaccggcgtcaaagggcctgcctgcacgccttcccgctgacgtcgactcccctcagcagccctgtgtactgcctgcgtctcaccaccaagcatctctatgctgccctgtcttacaacctccacgtcctggattttcaaaacccatgaccgtcagggccacccctgcctctgggccagggaaaccagctactcagggacttctcttgcctggagggtgcagtgatagctcctcctcactgccccactgtgctcctgggcctgtgaccccagtgctcaggcaccttgcactagaggcttctgactcctgggactttggagcttaccagagatgcagtccctcccaggaacctgttggagaggcaggacctgctgctttagagtgcggctgaacccgggccttgcgtccctgtttggccagagcaaggatctggcctggagaggcccatcctataccccttattagagccatgacagcctacagagtgagggtgaggtgctcccaccttcccagatggttcctttctgccccttcctggaaggaaaggtgaggctgccaatagcctcctggcaccagccagacctcacccttgaccaacctctcggggctgggggttcattcctggggcactgtggcctggttttgctttgaaaccaagaaagagcaaagggaacccagcagttctgagtgagatctgagccagccctacctcaggctggctgttgagacatgctacaattttcatttttgtaaaaataaagcttgattgttcac

SEQ ID NO: 252598 - DNA, 367 bp, Homo Sapiens
  misc_feature (88)..(88): n is a, c, g, or t
ataatgtaaagagattcaagcccttgtaaataatgacatggaagaccctgtgctgcacctaaaatattgcctgccttgattatttganttttacatcagagctttataacacgaacttttgtacagaattgtgagttgtgaccatgtaacatgagaggttttgctagggcctattatttttaaccaccattaattagttggggtggagtttactgtaatgtgaaattttcacatttgaattttttaattgcctggcaaaagctgatataagttctaaaatatcagcagaatgatttgctgaattcattacaaccctgttatgtcactttttgattacaataaaagttttcagtaaacttattaaaaa

SEQ ID NO: 252599 - DNA, 1897 bp, Homo Sapiens
  misc_feature (132)..(162): n is a, c, g, or t
gagcgaggcctgggtggcgaattcggcacgaggaaggactattccaaagatgtcaaatcagaaaagctaacaactaaggaagaaaaggccaagaagcctaatgagaaaaacaaaccacttgataataagggnnnnnnnnnnnnnnnnnnnnnnnnnnnnnnnggcgtagataaagattttgagtcttcttcaatgaaaatctcgaaactagaagtgactgaaatagtgaaaccatcaccaaagcgcaaaatggaacctgatactgaaaaaatggataggacccctgaaaaggacaaaatttctttaagtgcgccagccaaaaaatcaaactcaacagagaaactgggaagaaaattggaagtacagaaaatatatcaaacacaaaagaaccctctgaaaaattggagtcaacatctagcaaagttaaacaagaaaaagtcaaaggaaaggtcagacgaaaagtgactggaactgaaggatccagctcaactctggtggattacaccagtacgagctcaactggaggcagtcctgtgcggaaatctgaagaaaaaacagatacaaagcgaactgtgattaaaacgatggaagaatataataatgacaataccgcgccagctgaagatgttatcattatgattcaggttcctcaatccaaatgggataaagatgactttgaatctgaagaagaagatgttaaatccacacagcctatatcaagtgtaggaaaacctgctagtgttataaaaaatgttagtacaaagccatcaaatatagtcaagtatcctggagaaagaaagtgagcccatccgagaaaattcagaaattcaccaaggacgtgagccatgaaatcatacaacatgaggttaaaagttcaaaaaactctgcatctagtgaaaaagggaaaaccaaagatcgagattattcagtgttggaaaaggagaaccctgaaaagaggaagaacagcactcagccagagaaagagagtaatttggaccgtctgaatgaacaaggaaattttaaaagtctgtctcaatcttccaaagaggctagaacgtcagataaacatgattccactcgtgcttcctcaaataaagacttcactcccaatagagacaaaaaaactgactatgacaccagagagtattcaagttccaaacgtagagatgaaaagaatgaattaacaagacgaaaagactctccttctcggaataaagattctgcatctggacagaaaaataaaccaagggaagagagagtttgcctaaaaaaggaacaggagattccaaaaaaagtaattctagtccctcaagagacagaaaacctcatgatcacaaagccacttatgatactaaacggccaaatgaagagacaaaatctgtagataaaaatccttgtaaggatcgtgagaagcatgtattagaagcaaggaacaataaagagtcaagtggcaataaactactttatatacttaacccaccagagacacaggttgaaaaagagcaaattactgggcaaattgacaagagtactgtcaagcctaaaccccagttaagtcattcctctagactttcctctgacttaactagagaaactgatgaagctgcttttgaaccagactataatgaaagtgacagtgaaagtaatgtttctgtaaaagaagaggaatcttcaggaaacatttctaaggacctgaaagataaaatagtggagaaagcaaaagagagcctggacacagcagcagttgtccaggtgggcataagcaggaatcagagccacagcagccccagcgtcagccccagcagaagccacagtccttctggaagccagacccgaagccacagtagcagtgccagctcagcagaaagtcaggacagcaagaagaagaagaaaaaga

SEQ ID NO: 252600 - DNA, 2002 bp, Homo Sapiens
ctctgctctcggtccgctcgctgtccgctagcccgctgcgatgttgcgcgctgccgcccgcttcgggccccgcctgggccgccgcctcttgtcagccgccgccacccaggccgtgcctgcccccaaccagcagcccgaggtcttctgcaaccagattttcataaacaatgaatggcacgatgccgtcagcaggaaaacattccccaccgtcaatccgtccactggagaggtcatctgtcaggtagctgaaggggacaaggaagatgtggacaaggcagtgaaggccgcccgggccgccttccagctgggctcaccttggcgccgcatggacgcatcacacaggggccggctgctgaaccgcctggccgatctgatcgagcgggaccggacctacctggcggccttggagaccctggacaatggcaagccctatgtcatctcctacctggtggatttggacatggtcctcaaatgtctccggtattatgccggctgggctgataagtaccacgggaaaaccatccccattgacggagacttcttcagctacacacgccatgaacctgtgggggtgtgcgggcagatcattccgtggaatttcccgctcctgatgcaagcatggaagctgggcccagccttggcaactggaaacgtggttgtgatgaaggtagctgagcagacacccctcaccgccctctatgtggccaacctgatcaaggaggctggctttccccctggtgtggtcaacattgtgcctggatttggccccacggctggggccgccattgcctcccatgaggatgtggacaaagtggcattcacaggctccactgagattggccgcgtaatccaggttgctgctgggagcagcaacctcaagagagtgaccttggagctgggggggaagagccccaacatcatcatgtcagatgccgatatggattgggccgtggaacaggcccacttcgccctgttcttcaaccagggccagtgctgctgtgccggctcccggaccttcgtgcaggaggacatctatgatgagtttgtggagcggagcgttgcccgggccaagtctcgggtggtcgggaacccctttgatagcaagaccgagcaggggccgcaggtggatgaaactcagtttaagaagatcctcggctacatcaacacggggaagcaagagggggcgaagctgctgtgtggtgggggcattgctgctgaccgtggttacttcatccagcccactgtgtttggagatgtgcaggatggcatgaccatcgccaaggaggagatcttcgggccagtgatgcagatcctgaagttcaagaccatagaggaggttgttgggagagccaacaattccacgtacgggctggccgcagctgtcttcacaaaggatttggacaaggccaattacctgtcccaggccctccaggcgggcactgtgtgggtcaactgctatgatgtgtttggagcccagtcaccctttggtggctacaagatgtcggggagtggccgggagttgggcgagtacgggctgcaggcatacactgaagtgaaaactgtcacagtcaaagtgcctcagaagaactcataagaatcatgcaagcttcctccctcagccattgatggaaagttcagcaagatcagcaacaaaaccaagaaaaatgatccttgcgtgctgaatatctgaaaagagaaatttttcctacaaaatctcttgggtcaagaaagttctagaatttgaattgataaacatggtgggttggctgagggtaagagtatatgaggaaccttttaaacgacaacaatactgctagctttcaggatgatttttaaaaaatagattcaaatgtgttatcctctctctgaaacgcttcctataactcgagtttataggggaagaaaaagctattgtttacaattatatcaccattaaggcaactgctacaccctgctttgtattctgggctaagattcattaaaaactagctgctcttaactt

SEQ ID NO: 252601 - DNA, 2211 bp, Homo Sapiens
  misc_feature (1672)..(1672): n is a, c, g, or t
  misc_feature (1688)..(1688): n is a, c, g, or t
  misc_feature (1740)..(1740): n is a, c, g, or t
  misc_feature (1743)..(1743): n is a, c, g, or t
  misc_feature (1746)..(1746): n is a, c, g, or t
gggctgcgagcgcggagggcgacgacgacgaagcgcagacagcgtcatggcagagcaggtggccctgagccggacccaggtgtgcgggatcctgcgggaagagcttttccagggcgatgccttccatcagtcggatacacacatattcatcatcatgggtgcatcgggtgacctggccaagaagaagatctaccccaccatctggtggctgttccgggatggccttctgcccgaaaacaccttcatcgtgggctatgcccgttcccgcctcacagtggctgacatccgcaaacagagtgagccctatcattcaaggccaccccagaggagaagctcaagctggaggacttctatgcccgacaactcctatgtggctggaccagtacgatgatgcagacctcctaccagcgcctcaaaagccacatgaatgccctccacctggggtcacaggccaaccgcctcttctacctggccttgcccccgaccgtctacgaggccgtcaccaagaacattcacgagtcctgcatgagccagataggctggaaacgcatcatcgtggagaagcccttcgggagggacctgcagagctctgaccggctgtccaaccacatctcctccctgttccgtgaggaccagatctaccgcatcgaccactacctgggcaaggagatggtgcagaacctcatggtgctgagatttgccaacaggatcttcggccccatctggaaccgggacaacatcgcctgcgttatcctcaccttcaaggagccctttggcactgagggtcgcgggggctatttcgatgaatttgggatcatccgggacgtgatgcagaaccacctactgcagatgctgtgtctggtggccatggagaagcccgcctccaccaactcagatgacgtccgtgatgagaaggtcaaggtgttgaaatgcatctcagaggtgcaggccaacaatgtggtcctgggccagtacgtggggaaccccgatggagagggcgaggccaccaaagggtacctggacgaccccacggtgccccgcgggtccaccaccgccacttttgcagccgtcgtcctctatgtggagaatgagaggtgggatggggtgcccttcatcctgcgctgcggcaaggccctgaacgagcgcaaggccgaggtgaggctgcagttccatgatgtggccggcgacatcttccaccagcagtgcaagcgcaacgagctggtgatccgcgtgcagcccaacgaggccgtgtacaccaagatgatgaccaagaagccgggcatgttcttcaaccccgaggagtcggagctggacctgacctacggcaacagatacaagaacgtgaagctccctgacgcctacgagcgcctcatcctggacgtcttctgcgggagccagatgcacttcgtgcgcagcgacgagctccgtgaggcctggcgtattttcaccccactgctgcaccagattgagctggagaagcccaagcccatcccctatatttatggcagccgaggccccacggaggcagacgagctgatgaagagagtgggtttccagtatgagggcacctacaagtgggtgaacccccacaagctctgagccctgggcacccaactccacccccgccacggccaccctccttcccgccgcccgaccccgagtcgggaggacnccgggaccattgaccncagctgcacattcctggccccgggctctggccaccctggcccgcccctcgcngcngcnactacccgagcccagctacattcctcagctgccaagcactcgagaccatcctggcccctccagaccctgcctgagcccaggagctgagtcaccccccccactcaccccagcccaacagaaggaaggaggagggcgcccattcgtctgtcccagagcttattggccactgggtctcactcctgagtggggccagggtgggagggagggacaagggggaggaaaggggcgagcacccacgtgagagaatctgcctgtggccttgcccgccagcctcagtgccacttgacattccttgtcaccagcaacatctcgagccccctggatgtcccctgtcccaccaactctgcactccatggccaccccgtgccacccgtaggcagcctctctgctataagaaaagcagacgcagcagctgggacccctcccaacctcaatgccctgccattaaatccgcaaacagccaaa

SEQ ID NO: 252602 - DNA, 1125 bp, Homo Sapiens
  misc_feature (725)..(726): n is a, c, g, or t
  misc_feature (728)..(729): n is a, c, g, or t
  misc_feature (732)..(732): n is a, c, g, or t
  misc_feature (734)..(735): n is a, c, g, or t
  misc_feature (738)..(741): n is a, c, g, or t
  misc_feature (749)..(749): n is a, c, g, or t
  misc_feature (754)..(757): n is a, c, g, or t
  misc_feature (762)..(762): n is a, c, g, or t
  misc_feature (776)..(779): n is a, c, g, or t
  misc_feature (785)..(785): n is a, c, g, or t
  misc_feature (789)..(789): n is a, c, g, or t
  misc_feature (855)..(856): n is a, c, g, or t
  misc_feature (880)..(880): n is a, c, g, or t
  misc_feature (889)..(889): n is a, c, g, or t
  misc_feature (906)..(906): n is a, c, g, or t
  misc_feature (925)..(984): n is a, c, g, or t
  misc_feature (999)..(1001): n is a, c, g, or t
  misc_feature (1055)..(1058): n is a, c, g, or t
  misc_feature (1078)..(1078): n is a, c, g, or t
gcactgggtggcgaattcggcacgagggaatggcacgatgccgtcagcaggaaaacattccccaccgtcaatccgtccactggagaggtcatctgtcaggtagctgaaggggacaaggaagatgtggacaaggcagtgaaggccgcccgggccgccttccagctgggctcaccttggcgccgcatggacgcatcacacaggggccggctgctgaaccgcctggccgatctgatcgagcgggaccggacctacctggcggccttggagaccctggacaatggcaagccctatgtcatctcctacctggtggatttggacatggtcctcaaatgtctccggtattatgccggctgggctgataagtaccacgggaaaaccatccccattgacggagacttcttcagctacacacgccatgaacctgtgggggtgtgcgggcagatcattccgtggaatttcccgctcctgatgcaagcatggaagctgggcccagccttggcaactggaaacgtggttgtgatgaaggtagctgagcagacacccctcaccgccctctatgtggccaacctgatcaaggaggctggctttccccctggtgtggtcaacattgtgccctggatttggccccacggctggggccgccattgcctcccatgaggatgtggacaaagtggcaattcacaggctccactgagattggccgcgaaaatcccaaggttgcctgnngnnaanannaannnnaaaaaaangaacnnnngagcngggggggaaaaaannnnaaacancaanaaggggcagaaggcggaaaagggaaaggggccccgggaaacagggcccaccgccgccccggggccnnccaaccaggggcccggggccggcngggggccgncccccgggacccgagcnggggaggaaggacacccannnnnnnnnnnnnnnnnnnnnnnnnnnnnnnnnnnnnnnnnnnnnnnnnnnnnnnnnnnncccggaaaacccccnnncgaacggacagaaccggagccgggccccccccgccgcgggacagaaaacccacnnnncaaaaaaacgccccccagcnaaaaacaacccagcggggcaagcgcaggggcggggcgcaaacccccg

SEQ ID NO: 252603 - DNA, 554 bp, Homo Sapiens
  misc_feature (460)..(460): n is a, c, g, or t
  misc_feature (481)..(481): n is a, c, g, or t
  misc_feature (487)..(487): n is a, c, g, or t
  misc_feature (523)..(523): n is a, c, g, or t
  misc_feature (534)..(534): n is a, c, g, or t
ggctggccgcagctctcttcacaaaggatttggacaaggccaattacctgtcccaggccctccaggcgggcactgtgtgggtcaactgctatgatgtgtttggagcccagtcaccctttggtggctacaagatgtcggggagtggccgggagttgggcgagtacgggctgcaggcatacactgaagtgaaaactgtcacagtcaaagtgcctcagaagaactcataagaatcatgcaagcttcctccctcagccattgatgggaaagttcagcaagatcagcaacaaaaccaagaaaaatgatccttgcgtgctggaatatctggaaaagagaaatttttcctacaaaatctcttggggtccaagaaattctaggattttgaatttgattaaactgggtggggtttggcttgaggggttaagagtttatggagggaaccttttttaaacgacaacattantgcttagcttttcagggttgntttttnaaaaattggtttcaatgtgtttatcccctctcttgnaaacgtttccnttaactcggagttttttagg

SEQ ID NO: 252604 - DNA, 681 bp, Homo Sapiens
gggaaagctcaagaggtttacgaatggctgcaggacctgaagattgtgtttcagccttgatatgcagtttggaaacaatgtgctactgtctaacggcgtgaaccaaatttctgctaatgggaagaagggaaaactctccacaaaagctgacaaagcaggaagaacaggatgactgagtttttagattaaaactcccgggggcgtctgaactcatggctggtggtggaagtaagagtttccataatatggccaagtgatcagatgtatgctgcttagattcccgagcaggtgaagaaggctcgatcagggcagtggatcatgccgtgatcggtggcgtcgtggcggtggtggtgttcgccatgctgtgcttgctcatcattctggggcgctattttgccagacataaaggtacatacttcactcatgaagccaaaggagccgatgacgcagcagacgcagacacagctataatcaatgcagaaggaggacagaacaactccgaagaaaagaaagagtacttcatctagatcagcctttttgtttcaatgaggtgtccaactggccctatttagatgataaagagacagtgatattggaacttgcgagaaattcgtgtgtttttttatgaatgggtggaaaggtgtgagactgggaaggcttgggatttgctgtgtaaaaaaa

SEQ ID NO: 252605 - DNA, 1750 bp, Homo Sapiens
tcagaatttcgagacaaactctcgccgattacatcgctctcaacttctccttggacccccaagccccagtggacagccacggcctcaggccagccctacattatcagagcaagagccggatagaggacaaggctcagatcttgctggactgtggagaagacaacatctgtgtgcctgacctgcagctggaagtgtttggggagcagaaccatgtgtacctgggtgacaagaatgccctgaacctcactttccatgcccagaatgtgggtgagggtggcgcctatgaggctgagcttcgggtcaccgcccctccagaggctgagtactcaggactcgtcagacacccagggaacttctccagcctgagctgtgactactttgccgtgaaccagagccgcctgctggtgtgtgacctgggcaaccccatgaaggcaggagccagtctgtggggtggccttcggtttacagtccctcatctccgggacactaagaaaaccatccagtttgacttccagatcctcagcaagaatctcaacaactcgcaaagcgacgtggtttcctttcggctctccgtggaggctcaagcccaggtcaccctgaacggtgtctccaagcctgaggcagtgctattcccagtaagcgactggcatccccgagaccagcctcagaaggaggaggacctgggacctgctgtccaccatgtctatgagctcatcaaccaaggccccagctccattagccagggtgtgctggaactcagctgtccccaggctctggaaggtcagcagctcctatatgtgaccagagttactggactcaactgcaccaccaatcaccccattaacccaaaggggcctggagttggatcccgagggttccctgcaccaccagcaaaaacgggaagctccaagccgcagctctgcttcctcgggacctcagatcctgaaatgcccggaggctgagtgtttcaagctgcgctgtgagctcgggcccctgcaccaacaagagagccaaagtctgcagttgcatttccgagtctgggccaagactttcttgcagcgggagaaccagccatttagcctgcagtgtgaggctgtgtacaaagccctgaaggatgccctaccgaatcctggcctcggcagcttgccccaaaacgagcgtcaggtggccacagctgtgcaatggaccaaggcagaaggcagctatggcgtcccactgtggatcatcatcctagccatcctgtttggcctcctgctcctaggtctactcatctacatcctctacaagcttggattcttcaaacgctccctcccatatggcaccgctggaaaaagctcagctcaagcctccagccacctctgatgcctgagtcctcccaatttcagactcccattcctgaagaaccagtccccccaccctcattctactgaaaaggaggggtctgggtacttcttgaaggtgctgacggccagggagaagctcctctccccagcccagagacatacttgaagggccagagccaggggggtgaggagctggggatccctcccccccatgcactgtgaaggacccttgtttacacataccctcttcatggatgggggaactcagatccagggacagaggccccagcctcccctggaaggcctttggcattttgggagagttttcctgaaaacaacttgggaaagattaactagggaaatccatttcacagttcttttggggccagacatggccacaagggatt

SEQ ID NO: 252606 - DNA, 1388 bp, Homo Sapiens
aacgggaagctccaagccgcagctctgcttcctcgggacctcagatcctgcgggagcaccagccatttagcctgcagtgtgaggctgtgtacaaagccctgaagatgccctaccgaatcctgcctcggcagctgccccaaaaagagcgtcaggtggccacagctgtgcaatggaccaaggcagaaggcagctatggcgtcccactgtggatcatcatcctagccatcctgtttggcctcctgctcctaggtctactcatctacatcctctacaagcttggattcttcaaacgctccctcccatatggcaccgccatggaaaaagctcagctcaagcctccagccacctctgatgcctgagtcctcccaatttcagactcccattcctgaagaaccagtccccccaccctcattctactgaaaaggaggggtctgggtacttcttgaaggtgctgacggccagggagaagctcctctccccagcccagagacatacttgaagggccagagccaggggggtgaggagctggggatccctcccccccatgcactgtgaaggacccttgtttacacataccctcttcatggatgggggaactcagatccagggacagaggccccagcctccctgaagcctttgcattttggagagtttcctgaaacaacttggaaagataactaggaaatccattcacagttctttgggccagacatgccacaaggacttcctgtccagctccaacctgcaaagatctgtcctcagccttgccagagatccaaaagaagcccccagctaagaacctggaacttggggagttaagacctggcagctctggacagccccaccctggtgggccaacaaagaacactaactatgcatggtgccccaggaccagctcaggacagatgccacacaaggatagatggctggcccagggcccagagcccagctccaaggggaatcagaactcaaatggggccagatccagcctggggtctggagttgatctggaacccagactcagacattggcacctaatccaggcagatccaggactatatttgggcctgctccagacctgatcctggaggcccagttcaccctgatttaggagaagccaggaatttcccaggaccctgaaggggccatgatggcaacagatctggaacctcagcctggccagacacaggccctccctgttccccagagaaaggggagcccactgtcctgggcctgcagaatttgggttctgcctgccagctgcactgatgctgcccctcatctctctgcccaacccttccctcaccttggcaccagacacccaggacttatttaaactctgttgcaagtgcaataaatctgacccagtgcccccactgaccagaact

SEQ ID NO: 252607 - DNA, 587 bp, Homo Sapiens
tctcgcggtttgggagcgctactcgccaggtggactcggagtccgcgagcgtcgtcggcaagcggccgcctttccacggtactccgagcactatgtcgtccccggcgtcgaccccgagccgccgcggcagccggcgtggaagggccacccccgcccagacgcctcggagtgaggatgccaggtcatctccctctcagagacgtagaggcgaggattccacctccacgggggagttgcagccgatgccaacctcgcctggagtggacctgcagagccctgctgcgcaggacgtgctgttttccagccctccccaaatgcattcttcagctatccctcttgactttgatgttagttcaccactgacatacggcactcccagctctcgggtagagggaaccccaagaagtggtgttaggggcacacctgtaagacagaggcctgacctggggctctgcacagaagggcctgcaagtggatctgcagtctgacggggcagcagcagaagatatagtggcaagtgagcagtctctaggccaaaaacttgtgatctggggaacagatgtaaatgtggcagcatgcaaagaaaa

SEQ ID NO: 252608 - DNA, 1478 bp, Homo Sapiens
  misc_feature (204)..(255): n is a, c, g, or t
  misc_feature (435)..(435): n is a, c, g, or t
  misc_feature (830)..(839): n is a, c, g, or t
tccatgagtagatggtaatttatttttgtttatccatttcgttgggagcaaggacaaaaatgtaaatctacaccttgcttatcaaaattgccgaaaaaagaatgctctgccttttaaaaaagtatcatgattttgtagaccttgttttccaatttaatatttggaaaaggtgtcattttcatattcctactcagatgccagtgnnnnnnnnnnnnnnnnnnnnnnnnnnnnnnnnnnnnnnnnnnnnnnnnnnnntcgacaaatatcctttcaaacagaaagaacccaaagagacacctcaaaatgcctgtaaaattattgcttttctttctctaagtcaggcaggcgaggctacggaaaggaagagatttggtaagtaaattacagttttgtgaattgctcccgctaccgtgactgcatgtccgtgagcgccangccaaagagacaatggtctctcacactctggttacattcgctcaacctacaacactgaggaagaaagccacactgaagacacaaggaaaacaagtcaatccagtctagagaacaacattcagggaaacagagtaccaacaccttcttagaacatggaaataaaaaataactccatcagagctacctcgccaaggagcatgttgaaagtccaaaatagcaccattcatcagtgtctcaggtcctgtggcagcatctcggtcacttaccacaaggaaacaatgagtttcaaactacttctatacatcaaaagagtacatggataaaatatagagatatacagacaattgatgaacataaactactaggtttgttacatctaaatgaaaaaaaaggtnnnnnnnnnnactctcagcctctgcaagaagcagtcgggagctgtgtgagtgaaaaggcaggagtggaccggttgtgtgagcgcggtgggagtttgagttgtggaagacattgttgtagcgaaacacacctgaaggcccacctgtaagggttgtaaacgtggattcacagtgtgaaattctgagcgttttcacttgagtcagaatgattaaaaactggtttgatgacacctatttgtccactgtaaattctctaaagcaaggctcagagtcccatagtttcttcttatacttgatgatttacacagaaaaaaatcccatatatgataccatgacctcatcaatacccatacaccatatgtaatacaaatggaggtgttacgattaaaaaaagtggaggtaactgattcttggggagcggagttcactgctgcccagtggagtcagggaggcagcgtttgtctcatcgttcttcttgcggttcacttcctttgggacaggaagtcttcccttaggaagccttccctccatgtccttgtttggaaatggttcttgactgacccagacaaagagttctgggtaataaaccattttgagaatcttagtcttgggcttctattctccctctcttcagtccagggagaccaacag

SEQ ID NO: 252609 - DNA, 736 bp, Homo Sapiens
  misc_feature (92)..(92): n is a, c, g, or t
  misc_feature (138)..(138): n is a, c, g, or t
  misc_feature (172)..(182): n is a, c, g, or t
aagtcaaatagcccacacaggttcagtcctgtgcagcatctggtcacttccacaagaaacaatgacaaactctttctatcatcaaaagagtncatggataaaatatagagatatccagccaattgatgaacataactnactaggtttgtacatctaaatgaaaaaaaaggtnnnnnnnnnnnactctcagcctctgcaagaagcagtcggaagctgtgtgagtgaaaaggcagaagtggaccggttgtgtgagcgcggtgggagtttgagttgtggaagacattgttgtagcgaaccaggcctgaaggcacttgagtcagaatgattaaaaactggtttgatgacacctatttgtccactgtaaattctctaaagcaaggctcagagtcccatagtttcttcttatacttgatgatttacacagaaaaaaatcccatatatgataccatgacctcatcaatacccatacaccatatgtaatacaaatggaggtgttacgattaaaaaaagtggaggtaactgattcttggggagcggagttcactgctgcccagtggagtcagggaggcagcgtttgtctcatcgttcttcttgcggttcacttcctttgggacaggaagtcttcccttaggaagccttccctccatgtccttgtttggaaatggttcttgactgacccagacaaagagttctgggtaataaacagacaaaagccccgctccctgttcactctctc

SEQ ID NO: 252610 - DNA, 1171 bp, Homo Sapiens
tccatgtactcttttgatgtatagaagtagtttgaaactcattgtttccttgtggtaagtgaccgagatgctgccacaggacctgagacactgatgaatggtgctattttggactttcaacatgctccttggcgaggtagctctgatggagttattttttatttccatgttctaagaaggtgttggtactctgtttccctgaatgttgttctctagactggattgacttgttttccttgtgtcttcagtgtggctttcttcctcagtgttgtaggttgagcgaatgctaccagagtgtgagagaccattgtctcgttggctggcgctcacggacatgcagtcacggtagcgggagcaattcacaaaactgtaatttacttaccaaatctcttcctttccgtagcctcgcctgcctgacttagagaaagaaaagcaataattttacaggcattttgaggtgtctctttgggttctttctgtttgaaaggatatttgtcgaaaaaaagagcaaaaccgttttaaataaactccccctggaaaaaaacccaaaacactggcatctgagtaggaatatgaaaatgacaccttttccaaatattaaattggaaaacaaggtctacaaaatcatgatacttttttaaaaggcagagcattcttttttcggcaattttgataagcaaggtgtagatttacatttttgtccttgctcccaacgaaatggataaacaaaaataaattaccatctactcatggaatgttgttgtgttagccagtctgaaagcccaccttaaattttatataactgtctttagctccttcttttgacagggcaggccttgttctgaactgtttcgcttctgactgttaaacacccgatgacgcatgcactgcacttccttcgttttcttcttgctcccccattggcctgagtttcttgtgcattactcctctccctccttcgttagaataggtatatcagctgtgtaaatagagcaagaaaacagtattctgcatctgtggcatttatgtagagttgcagttgtgtactgctgaaaatgcaggcttttgtaacagtgtgatctttactgatgcactcatgacaagtacccaatgtattttagctattttagtagtatttgttcaataaatacgcaagctgtaaggtaaaaaa

SEQ ID NO: 252611 - DNA, 426 bp, Homo Sapiens
  misc_feature (22)..(22): n is a, c, g, or t
  misc_feature (33)..(33): n is a, c, g, or t
  misc_feature (72)..(72): n is a, c, g, or t
accaccccaggaaagttggtgnggtaagccaanccggaagccccaccctaatttttaaaataactgtccttnagctcctccttttgaacagggcaggccctgttctgaactgtttcgccttcctgactgttaaacaccgatgacgcatgcactgcacttcctcgttttcttcttgctcccccattggcctgagtttcttgtgcattactcctctccctccttcgttagaataggtatatcagctgtgtaaatagagcaagaaaacagtattctgcatctgtggcatttatgtagagttgcagttgtgtactgctgaaaatgcaggcttttgtaacagtgtgatctttactgatgcactcatgacaagtacccaatgtattttagctattttagtagtatttgttcaataaatacgcaagctgtaag

SEQ ID NO: 252612 - DNA, 402 bp, Homo Sapiens
ggcatagattactacagttagaaacatgttacattcagaaccatttccctagcttagccctctaaataaaggctggggacaattcctgactgcagaagggcccttccctgaaaccacagaccagataaagagctatgtgaaagcatttgcaaaaaaagcagttatttcggttttcctgggacataagtctccacccagtcacacagtaccagccatggagaaaaagaccctccctgaagaactcgctaattcatctgaggggctcagagacagaaaaattcactgagcctgggtaccctgatcccagactcgaggacccagtgacatccttttttgctgggttctctctttcatatccagagctgccagggtgctccctagaagaaggcttttgggtctctt

SEQ ID NO: 252613 - DNA, 1514 bp, Homo Sapiens
cgccagccccgtgtccccaccgcgggcagcaaccgcggccgcggccgctgaacgccgaaggggccgaaggagccccccgcggccgcagcagctacagcgaaatggcggagaccgtggctgacacccggcggctgatcaccaagccgcagaacctgaatgacgcctacggaccccccagcaacttcctcgagatcgatgtgagcaacccgcaaacggtgggggtcggccggggcctcttcaccacttacgaaatcagggtcaagacaaatcttcctattttcaagctgaaagaatctactgttagaagaagatacagtgactttgaatggctgcgaagtgaattagaaagagagagcaaggtcgtagttcccccgctccctgggaaagcgtttttgcgtcagcttccttttagaggagatgatggaatatttgatgacaattttattgaggaaagaaaacaagggctggagcagtttataaacaaggtcgctggtcatcctctggcacagaacgaacgttgtcttcacatgtttttacaagatgaaataatagataaaagctatactccatctaaaataagacatgcctgaaatttggcaagaaggggcaaaaacgtgactattaatgattgataagcaccagtgaagaagttctaacttttagcatgctgcacagaaactggtataacatgccttcagtatactaacactcatatgctcagttttgttttgttttggcagttgacaagaagttaatttgctttagtaaaaatccctcattccagcctttctatataaatagctctttcttgctgttttaatgtggtgcacactatagcctcacaaacctgttattccagtgtaatctgcagtgtcgtaactaaagttactggcttggtcttatttgcacagtttttgcgtcttgtttgcttcttgcatctgattaactagaatatttctctttcccccttttaatttgtgatgtcacttgaccccatttatgtgtaggagcactacaccattggtttccaatactgcacacataagatacatacttgtgtgcagaaagtatcttcctccaggcttgtaatacccttcacatggaagattaatgagggaaatctttatattctgtataaaaacaaaagcaaatttatatactaaaatcatttgtctaaaaatttaagttgttttcaaataaaaattaaaatgcatttctgatatgcactgattgtgttgcctccagctttttttgctctctatgagtgactacttaagtcacttgttgagagggattatttactaattatatacttctcattcctgtaactccattccctttaaacagtggtgatatcaaatatacttccatccattgaatggggtatttttaacaacaacaaaagtgatatactaaaaaatgtattgcttaaggcttattgaatcattttgaagcactttgtgtatttgaaaactgctttataatctcatttattaaaaggaactttcaaagat

SEQ ID NO: 252614 - DNA, 627 bp, Homo Sapiens
  misc_feature (170)..(206): n is a, c, g, or t
  misc_feature (335)..(344): n is a, c, g, or t
acacaaaacacaaaccatgaaagactgaaaaattcagttcattacaattaggagcttttctcaccagaagactatgaagagatgaaaagacaagtcacaaattgggaaaggatatttgcaacctataaattaacaaataattagtatccagaatatataaagaactcttnnnnnnnnnnnnnnnnnnnnnnnnnnnnnnnnnnnnnaggcaacgaaattgaatatacacttcgcagaagcacaaatgaccaacgaaaatacatgaaaagatgcccagcttcaggaaatgctgataaaaaacactatagatacaatttcaaacccaccagattagnnnnnnnnnnttaatttaaaatctgacaatatcaagtgttgaggaggaagtgaagcagccaaaacacacactgctggctcttgactcagtaaccacaagattaacaattaccatgagccaattcagtgactcaaaacactggaagtgtttggtaagcattaagcaactgataatgaccaatcaagcattctgagaacacatgaggattactgccaaatacaaattttggcccttaatgaaccggatccaatctgactcagcaatataaaaaagaaactttcagtcatttatcc

SEQ ID NO: 252615 - DNA, 1139 bp, Homo Sapiens
  misc_feature (652)..(652): n is a, c, g, or t
acagtgaaggatgctgtacagaagaactcagagaagtacctgagcgagctcgcagagcagcctgagcgcaagatcactcgcaaccaaaagcgcaagcatgatgagatcaaccatgtgcagaagacttatgcagagatggaccccaccacagcagccttggagaaggagcatgaggcgatcaccaaggtgaagtatgtggacaagatccacatcgggaactacgaaattgatgcctggtatttctcaccattccccgaagactatgggaaacagcccaagctctggctctgcgagtactgcctcaagtacatgaaatatgagaagagctaccgcttccacttgggtcagtgccagtggcggcagccccccgggaaagagatctaccgcaagagcaacatctccgtgtacgaagttgatggcaaagaccataagatttactgtcagaacctgtgtctgctggccaagcttttcctggaccataagacactgtactttgacgtggagccgttcgtcttttacatcctgactgaggtggaccggcagggggcccacattgttggctacttctccaaggagaaggagtccccggatggaaacaatgtggcctgcatcctgaccttgcccccctaccaacgccgcggctacgggaagnttcctcatcgcgtttcagttatgagctctccaagctggagagcacagtcggctccccggagaagccactgtctgacctgggcaagctcagctaccgcagctactggtcctggtgtagctgctagagaccctgcgggacttccggggcacactgtccatcaaggacctcagccagatgaccagtatcacccaaaatgacatcatcagtaccctgcaatccctcaatatggtcaagtactggaagggccagcacgtgatctgtgtcacacccaagctggtggaggagcacctcaaaagtgcccagtataagaaaccacccatcacagtggatccgtctgcctcaagtgggcaccccccaagcacaagcaagtcaagctctccaagaagtgagcagcctggcccctgctgtcggacctggcctcctgctcccagcctgtaaatatgtatagacctgttttgtcatttttttaataaagtcagttctggtg

SEQ ID NO: 252616 - DNA, 1184 bp, Homo Sapiens
  misc_feature (275)..(285): n is a, c, g, or t
tgagctttagaaggccagcataccttggagtttatttaaactaagagaaaaaagtcataatgttttcatgcaatacatacttggttctccaaataacaactgtgtgacatatagcagaaggaattaaggaatgctgcacttgtgatccatacaaaacaccaacattttaggttgtacataattagagaaatatctgaaacactttttaaaacactgtagtagccaatacatagaggcatgccgtaggtgggcacaggaatgcagtttagaaaagnnnnnnnnnnntcacataggaactactcaatttctttaaaatcactgagcaagaacagcaacattgaactttcatactgattttacacaacttctatacagtaccttgacttaaatccaagagcaaaagttaagactctcctcctctattttttggtaaaacaactgcatggtaaactaagatgactctttccccctggattttacctggggagtggcctttttacatttttattaaaaagaggggcaggtttggcacttttatactgatgtcaccaatgttaatatttcttgggatctcaggaagattcatattctttacagctgatacagcacgggctggagctcctgctaagccagcctcagatttttccagcttattttgtgcatcaatttgtgtaacaatctcattcatatttgtctccaataccattccccccatcaccatttctgcaagaatattgtgaaccttgtctacatggaaaatcaaatccagctcacagacattttcaaaacatttgtctaatgtttccacaaatacttgaattagatctaaaatgccaagttcactttctgaagaatccacacagaagacaaaatataacgttgcataatgtctataaatcagtttgttgtcagatcctccaattaataatcctccttctaggaaattacaaacattttcatctctcttagataccaaatggaaagtctccctgatgatttgctgttgtgtatcttcactgtagggctggtagaacttggagagccgcggcttcccgtggttgttgaagattaggatcgccttgatcatggctgtgccgggccgaccgggtgggcactgggggccagggcgggggcgggcgcgcgagcctcgcctcgtaatctcgcctgcgatccttccccacccc

SEQ ID NO: 252617 - DNA, 471 bp, Homo Sapiens
  misc_feature (47)..(47): n is a, c, g, or t
agcaaggcctcggcctggggaatctggaccaggtccactgaggcctnaaagataataggtgggtcatcttgggccagtgtgcccccttggaaatcggtgaagtcctccagggagccatcgtccagcactggcacctgcttcagcacaagggaggcccttgccctgtcctcactgctggcgagagctccacggtgcgcaccgtccttcacaaggaaacagtctaggaccacgtccactgcccgccactgcccctctgctgggtggggcttggtttctgctgctccagatagagccaggcagagcagcaggcaccagccctcctgtgtgcccatggaggctgctctcgagttccctcattgcccaccgcccttctccacagtcctacgctgcttgcgaggcccggcggaagaagggggctctccaagcacacctggcagcctgcagcctttaggtttcttccctgttccctct

SEQ ID NO: 252618 - DNA, 858 bp, Homo Sapiens
  misc_feature (464)..(569): n is a, c, g, or t
ggtcaaattctctgtccaatagttcctcttctgttaacttagagaaattatcctctccaaaaggattccaccctgacatatcaggtggattgctgatgttcttctgatttgtgaaatttgcaatggcctctttatcagcaactgacctattggcacctataggaggagtcccattatggttccccaacctgagctggaagtgatgaaagtgtaggaaactaaggcctggtgagaactcttgaaggggaggtaagatattcaggtgatgcctgttgttgagacggctgatgttgagctagcatctgctgttgaaagaaagcctgctgatactgcggcatcattgtaggatactgtgatgcagaaggttgtggttgatataccgaatgcattaaaaattgttgttgaagcatctgttgctgctgtgttgcatgttgatactgctgcatataagcatcttgaagtannnnnnnnnnnnnnnnnnnnnnnnnnnnnnnnnnnnnnnnnnnnnnnnnnnnnnnnnnnnnnnnnnnnnnnnnnnnnnnnnnnnnnnnnnnnnnnnnnnnnnnnnngtgaggatgacgatgctgtaaatggagttgctgtaatctccaatctccctgctgtagttgctggagtactctatgctgctgtggcggctgctgaggaggtccctgacccaataaaatttcagggccatttcaaggtcttagtgcccctaaagacaggtccaaacacttacattaacatactaatgatttcaattaaaaagctggatttcaacatgctcatttcaataataatttaactaaggcatttatatccttatttataacacaaaaacttccatatgcatagagt

SEQ ID NO: 252619 - DNA, 965 bp, Homo Sapiens
tcaaaattgggaaaaagggcccacggagagagggtctcaattagggcccatccccccaggaaattgaagggattatgggcgggcttataaatactcccgggggaaaaccaccccatttgggggcagaataggttcaaaccctctccacggctccaaaagagaaagtttcttattaaagtttcactcattccttcaggaaaaataggtcctcaagagttgacttgctgaaccataggccataaatggagaaataacccaaagccagctgccaacagtgaaaactgtccaataagttgtaatattgggatgccggaaaaagtgggatagaatcacggctttctgtaaagctttcaggcgttcttcattgcagttttccagatttgtaatttttatagttaccagtgttcccgtgggagtatgccgtgcaagatggacagaagtcaagttgtcaaatcctcttcctatttctacttggagctcatagtgagaaacgttggtggaacatagtacttcactggctctagtggatggacgtgaccaggaaagggttggctcatcaaccaagtattgatggatactggtttcagactgtttttcaggtctgagtgattcaacttgtgttcttgaagtgcagaagcaatccaaaagagacattgaatcactttagttcacacagaaagtgacaaaaatccatctattccaaagaaggcttttgttttatcttcctttcaagatgcagatatatcctacctagcggcgaccacggccagcgactctcttcaggctgccagcggtgcggacaggggcgggcgccagagccctgctcgcggaggggcgaggcgagcgctctaggcccgctcccggcgcggggcgcgggagggcggcgaggccgcgaccggggccgtgggcttggaactctgcaccagcccctcgtgccgaattcgccacccaggcctcgctacctt

SEQ ID NO: 252620 - DNA, 1101 bp, Homo Sapiens
ggcacgagaaaaattacaaatctggaaaactgcaatgaagaacgcctgaaagctttacagaaagccgtgattctatcccactttttccggcatcccaatattacaacttattggacagttttcactgttggcagctggctttgggttatttctccatttatggcctatggttcagcaagtcaactcttgaggacctattttcctgaaggaatgagtgaaactttaataagaaacattctctttggagccgtgagagggttgaactatctgcaccaaaatgggctgtattcacaggagtattaaagccagccatatcctcatttctgggtgatgggcctagtggaccctctctgggcctgtcccatctgcatagttggttaagcatggacagaggcatagggctgtgtatgatttcccacagttcagcacatcagtgcggccgtggtgagtccagaactactgagacaggatttacatgggtataatgtgaagtcagatatttacagtgttgggattacagcatgtgaattagccagtgggcaggtgctttccaggacatgcatagaactcagatgctgttacagaaactgaaaggtcctccttatagcccattggatatcagtattttccctcaatcagaatccagaatgaaaaattcccagtcaggtgtagactctgggattggagaaagtgtgcttgtctccagtggaactcacacagtaaatagtgaccgattacacacaccatcctcaaaaactttctctcctgccttctttagcttggtacagctctgtttgcaacaagatcctgagaaaaggccatcagcaagcagtttattgtcccatgttttcttcaaacagatgaaagaagaaagccaggattcaatactttcactgttgcctcctgcttataacaagccatcaatatcattgcctccagtgttaccttggacttgagccagaatgtgattttcctgatgaaaaagactcatactgggaattctagggctgccaaatcattttatgtcctatatacttgacactttctccttgctgctttttcttctgtatttctaggtacaaatacccagaattatacttg

SEQ ID NO: 252621 - DNA, 1734 bp, Homo Sapiens
  misc_feature (417)..(434): n is a, c, g, or t
ggagggtgtgggttttgggggccaaaggaaaaaaagccccttttgggcccccgggccccgggacccaaggttggaagggaaatggcccggaaaaaccgaaattttttacttttctttttcccccactcccaatttggggaggcataacaaagccctccttccataaacctccccaaccttctgtaaaatgaaaacgcggccggtccttatgacacggatttatgtgagaattacatgggccccagggcccccggggcagggcttaatgttctcggcctttaccagttttctccggaatcggggtcccagttgggctaggccagaagaatctctttaaccccagaagttggaaggtcacattaagtcaagttggcacccatggccttcaagcttgggtgagagtaagactctgtctcnnnnnnnnnnnnnnnnnnggccttaggcaaccgcggctgggcaagaacttggaaagagggagggcccgtttggctggccttcagcccccaaggccagggtttctatgaggcctgaagcctggagcctgtcataggcaactgcagtctgaggcctccctggcagaaaccactccttgtcccctccctgacacaggcctgaaatgcccatgttggcacaatgttgccaatatggctcttggtggatgagaccacctggcactttcccaggggaccctgtggctaagagtagagctaggcaggcactgcccaacaccatagggggtgctgcgggcctgtaggcttggttggcccaaataactgccctaatgccatcggacagtgcccaccagggactctctgtcttgccaaggaaggccttaggcactgggctttagacatttcaaagtgagttctcattcacttgtgtctccgatcacactagagtccccatttcacagacaaactgcccagagtttgtcataggtcacacagcaaaccagcaactaagccccctggtcccctaatctgccccagaaaggtagtttctcagctgttctgagcttgacagcatgaacatcctcaggagccacaggcaaagtgggctgaggcttggcattcccctcgaggtcatctggccattctgaacgcccctcctcagcctgcttcctccggctgagccatgtgcccccggaacccctctgaactctgttgccgatccctccctccatctgcgccttcagtgaagcagtttcttaaaggaggggtccttggtaccgtggagggacaggacatctctgggaattcgtacccagctgcgttcgtgctgagttcttcatgacccactccttccagcgtcagctggtggatccagggctgggtactgagccgtactggaccagtgggccccctcccgggatcgctggacttggagcagaagagtccctccagggctgaagattggacacagaaaacttgggaactgtcaactgccctgttattcacctcgtgaaaaaagctggatttctaatgagagcgaatggaggtgacaattcccagaaactggaattgggatggtgagattttagttcagccgccggcggtctcatgcgtggaggtgataaagttgagctttgaggtggtcttcagagggagaggaataccctctgcgggcagagcttcctgggttccgggcccttccggacgtcaacacaggtccaaatgcccttgggctcctccgcacaccctgggtgcaagaataaatccttctctctgccgccaa

SEQ ID NO: 252622 - DNA, 534 bp, Homo Sapiens
aggttgtggaattcgccgttcgaaagcagggactaaaagccccacttcgtcttacgttccgaaaggaaggcgtctgttgagcctttctctcagtcgtgagggaggcgtcgacggcgtgcggaagtcctgagttgaggcttgcgggatcctttccggagaaagcgcaggctaaagccgcaggtgaagatgtccaactacgtgaacgacatgtggccgggctcgccgcaggagaaggattcgccctcgacctcgcggtcgggcgggtccagccggctgtcgtcgcggtctaggagccgctctttttccagaagctctcggtcccattcccgcgtctcgagccggttttcgtccaggagtcggaggagcaagtccaggtcccgttcccgaaggcgccaccagcggaagtacaggcgctactcgcggtcatactcgcggagccggtcgcgatcccgcagccgccgttaccgagagaggcgctacgggttcaccaggagatactaccggtctccttcgcggtaccggtcccggtcccgt

SEQ ID NO: 252623 - DNA, 559 bp, Homo Sapiens
gagactgcatagggctcggcgtgggagaaggattcgccctcgacctcgcggtgcggcgggtccagccggctgtcgtcgcggtctaggagccgctctttttccagaagctctcggtcccattcccgcgtctcgagccggttttcgtccaggagtgcgaggagcaagtccaggtcccgttcccgaagcgtccaccagcggaagttacaggcgctactcgcggtcatactcgcggagagaaaccccctttcgcttaagtgaaaaagatcgaatggagctgttagaaatagcaaaaaccaatgcagcgaaagctctaggaacaaccaacattgacttgccagctagtctcagaactgttccttcagccaaagaaacaagccgtggaataggtgtatcaagtaatggtgcaaagcctgaaatgttttgagagattacagaagaggaggcctgcttcacttgcagataagtttattataattctccagaaatgtgcaggatgtgcattagcaaattgcactgtacttttcactccagcctgggttgacagagccaagactcccgt

SEQ ID NO: 252624 - DNA, 616 bp, Homo Sapiens
  misc_feature (544)..(544): n is a, c, g, or t
  misc_feature (546)..(546): n is a, c, g, or t
  misc_feature (555)..(555): n is a, c, g, or t
  misc_feature (570)..(570): n is a, c, g, or t
aagaaaagtcttcctgcatgacagcatatgaaattagcatctctcctcataagggttgaagagatcaaggtcagaggcttcacagtgatccaagactcaaggacaattgagccaagggaagattgatcaaagcagaacatttagataagccttccagattgtagaaggccttgggcttgctagagagtcattctttaagatgttaggaaacattcaatacagccttggataatcaactatgagcaagttgcactaaggaggctgataacatacagagggaactacttaagacagggagtataatttcatggtcaaaatttacaaatgaattaggaccttatctggagaaatgaatcttcatattgtaaatacaacggtgttctaaaatttagaataaatgaaaaatgaataaaatgttgctttaggggatataatccttcagaaaaattctttgatagtatctgattatttcacagttagttttgggaataatattacagatacagtcatttttgcaaaagtatttgagcacttcatcagtttncnctgtctttngacatgcagatcttnctttcctgaagtgcctcgtatcatcatccttgtcaattccttttct

SEQ ID NO: 252625 - DNA, 1025 bp, Homo Sapiens
gggactagaaaaggaccattagatcaggggttggcaaactatggcccacgaatcaaacctggcctgccacctgtttttatacaacctgtgagctaagaatggtttatatgttttcaaatgattgggcagaaaatcaaaagaagaacaatatttcatgacacctgaaaattctatgaaattcagatttcagtgtccataaacaaaatgttattagagcatagccacacccattcatttatggtattgtctgggactgctttcttggcagagttgaatagttgggacagggacagtatagcctgcaaagcctaaaagatttactacttgtctccttaaagaaaaagtttgccagctcctgatctagaccaagagggagatattgaccttacttgcatttatccggcattatttcaacacctcctgtgaagaaagtacttttctggcatagctaccgtgagttctcagcaggaacttcccagcgatgataatgtacatgaaattagccacgtaacaagagtctatttgcctttgaaaaaacaattatccttgaacttcctccagctatgcagggattctcattaaagagctgatctgcatctgtttatccattttagtagcttttaaatatgattttatgtgaagtgccatttctcttattctactaaagagagacagcagaaataaagatcagaaagcaaaggtgagcaaatctggtttactggtaacttcaattatgaactgtgaaattgtgccacatgactttttcctctaaaaactggatcctagtgttttaattacctgtgtgcagctattttaaatagcattttacttgaataatatgtatgttgtcattgtttcatgctatactttgtgggataaaacttgggaatgagtgtggtaagaaatttataaagttttgcttttaaaacgtggacataactcatttttctagtttttgacaattgtgtgttttagtgtctagtctgcagagagctgtgtgattaataaacgtggaattaacagaa

SEQ ID NO: 252626 - DNA, 971 bp, Homo Sapiens
  misc_feature (704)..(770): n is a, c, g, or t
  misc_feature (800)..(801): n is a, c, g, or t
  misc_feature (877)..(877): n is a, c, g, or t
gacaacatattatcttccccgcccttctcttttctacagtatctgttacctcagtcagattgaggatgcacatatactgggaaaataatcgacttccagcgtccctcatgtagtctctacctgattcaggaatctctaacccagtatcggaacgttaagcggcttctccgctttcctgccgtgagaaactcgaggtgaccaacctccgtttccggttggctccggttgcagagttgagtgtcctgagaggtcagattgctgtcagacatggcccatgaacatggacatgagcatggacatcataaaatggaacttccagattatagacaatggaagatagaagggacaccattagaaactatccagaagaagctggctgcaaaagggctaagggatccatggggccgcaatgaagcttggagatacatgggtggctttgcaaagagtgtttccttttctgatgtattctttaaaggattcaaatggggatttgctgcatttgtggtagctgtaggagctgaatattacctggagtccctgaataaagataagaagcatcactgaagataatacctggaagcatcatagtggtttcttaactctccaaaataagatttcttctctgtagcctacttgtctggtttatcccttacagaatattagtaagatttaatcaattaaaatatatatatatgccaaaccannnnnnnnnnnnnnnnnnnnnnnnnnnnnnnnnnnnnnnnnnnnnnnnnnnnnnnnnnnnnnnnnnnaccgcgcgaatccacccatcacaattaaanncccaaaaattggcgcgcccccccggcccctcaaaaaactttttcaaaaccttttttttggggcgggcgggcccccngagggaaaggggaaacggggcgcattaaccgtgttttccataagaaaatccccggccccaagtaaccaaggggtctgtggtcctccccccacac

SEQ ID NO: 252627 - DNA, 915 bp, Homo Sapiens
tgcctagtaaataatgtaccaacattccttttagtttgctaaaaataaggacttcaaaattaagtaaatgcactctaaaatgaaactcataagaatatttaatttactctaatatagtttatcatcatatataagtatttttatacctccacagtattaaacacaaagaatgtagagatgttatgtttagaatgctattaaagtcaataaacctatatggaaaaagttaaaagcaatgattctcaaactataccacaaaacattttaataattaatatttattgattttgattattaaataatctatattactacttaaacttaaaaatggtaagttataactgtaaagatccaatgctattggcctttgaaatattcatgtcatagctccaatgacacaccagaatttataataaaactctaatacctaaaagtcactttcattttattatcttttaattttctagactttaagattaacaatccagaacttaagcattatatgatctggaaggatgaaataatatttcgtttgaaagttctaaaaatacattttattgttcatcttcagaattacattaatgagaagaaatgaaaccaacagtcttaatatgatttaaaactgaactcattaaatctttgtggctacaccacatgtgagtgtcattaaatgacactatcaaaataattattggaatttctaatttctgctcttcaaagaaaaagtcagaagtatgataacttcataaacttacaatgatgtgagattaagagtgaaaaaatgagcaaaggaaacccaaaatctacatggaattaacacagcaacttggcctatctactaaataataggaaactttattacaaaataagttctttaccttgagaaatcaaataaaatgccaaaaaggtgaattc

SEQ ID NO: 252628 - DNA, 714 bp, Homo Sapiens
aaggagcctattataaacagatctgtggtctaatgaaatgtgattaatactgtgcattattaaagaacttttgacttttcaaaaaacttttacaacatttcccatttgatagcggcataggtttaagcacttctcatctctaagttagtggacaaaaaaccctcatggatagtctaataatgtttgctacaagtccatgttgagttttatactccattttattttcagttttaaaaactgtggttaaatatgtgtaacataaaatttatgttcttaaccattttttgcgtatacagttcgctggtattaaatacatttaaataatgtcatggaatcattgctaccacccatctctgtaaccttttgatcatgtaacactgaagctctgttcccattgaactctattcctcctttcccgccaagtccctggcaaccacgattcttctttctgtcttctgaatttgactactttgggttctcatatactttaggagtcacacagtatttgttttacttagcataatgtccccaaagctcatgcatgctgtagcctatgttagaacttcctaatgtttcaggccaaatactattccattgtatggataggccacattttgcttttccattcctctgtccatggacacttgtattgcttcatgttttagccattgtgaatcatgctgttatgaacgtgggtgtacagatagccccggg

SEQ ID NO: 252629 - DNA, 1735 bp, Homo Sapiens
  misc_feature (32)..(32): n is a, c, g, or t
  misc_feature (762)..(816): n is a, c, g, or t
cccaaaaaccttgcaccacgaggaaatggcantggcattcgggataatggctccctggccagcttgtgaagttccaaggggctcgttacttcttacagctcacaagatcctcccggggtccagcacaccctgagggctgacctccctcttgattagtgcaggggaaaagcactttaaaaagctgtgtcatgcgtaacttgcacatcttctgattctgacctgaaactgcatcccaggtcggcacagacgcaacccagtctcctcccacctccgagagtgcagtgtcctgaatggagaaccccagcacccagaagcatccactgaaggacgtaagtaggacaaggccaactgtggctgttccagcagagggactatgggtgatgtttcccttctctgatttctaaaatatctgcaaacttgtttcatttataattgaaaatataatttgcataacaacagtaaattctacacatgaaggcaaacgtccgtggttgacagaaattacactggccagaatccccagtccccatgaggcttgtccagacgcagtgaaccagtcgcagctgataacacacagaccattcccgatcccagaggtgcatttcaggattcattctatttcatcaggtgacgttttaacagaaacaaaaccgcaggcagcggtgggggggagctggaggttggaatcacaccaacattatagcattattactctaaaaaaaattacttttttgcctgggcgctgtggctcacacctataannnnnnnnnnnnnnnnnnnnnnnnnnnnnnnnnnnnnnnnnnnnnnnnnnnnnnngtgtgaaaagcttcagtgggacacggcttgctcttctcacaggtcagcggccggcagagctgcttctggctttccatttcggtcagtgtgctctgacacagctcctggagctcctgcggttggctgcagtccgccaggtgatccgtgaggagggctcggagaggccccatgatggcgtggaaggatggcagggacccgtacatgagcacgcagcgcttcagcagggccaggcccacagccaggcaggacagtcggatgtgattggcctctgtcgaagttggggccctcagtctactcgcccagcggagggagaggctgctctgctgccacgtggccacatcctctctagcagacaccacgagcagttccgagttcttcccaagcgctctgaaagggtgcaccagagtggaaccttggcttgctttgtttggagttgctatgtaaagaatcccaagaagaaaattaataagctcaggtataaacctctgggacaaagccacatactccaggaacaggcagcacacgaacaggcccttcaccacgtcctggagggacaggatggggcacttggtgagcagctgactgaggcacacaagggcaggggtcaccactgggtgccagaagtcggaagttggaaatagcagcccagtgattttcaaataaatgagcacgtccaaccctggcaatgccgcccggcctttggtctcaatcatttcttccatctcatgcatcgcatctcggagaaacaaatttgatagcgtcacttgcagattcaggaaacatctggcaaagatgatataagtgcacaaccaacttatcaatgactgtgaggtctggtgggtcatctgtagccaaatcgccaacgtattccaaaagaaagccaaacagtttttctaattttgctttgtttccttctgcg

SEQ ID NO: 252630 - DNA, 1583 bp, Homo Sapiens
  misc_feature (16)..(16): n is a, c, g, or t
  misc_feature (477)..(560): n is a, c, g, or t
  misc_feature (1283)..(1283): n is a, c, g, or t
  misc_feature (1417)..(1417): n is a, c, g, or t
  misc_feature (1546)..(1546): n is a, c, g, or t
gggcctctccgagccnctctcacggatcacctggcggactgcagccacccgcaggagctccaggagctgtgtcagagcacactgaccgaaatggaaagccagaagcagctctgccggccgctgacctgtgagaagagcaagcctgtcccactgaagcttttcacaccccggctggtcaaagtcctcgagtttggaagaaaacaaggcagtagtaaggaggaacaggaaaggaagaggctgatccacaaacacaagcgtgaatttaaaggggccgttcgagaaatccgcaaggacaatcagttcctggcgaggatgcaactctcagaaatcatggaacgggatgcggaaagaaagcggaaagtaaagcagctttttaacagcctggctacacaggaaggcgaatggaaggctctgaagaggaaaaagttcaaaaaataaattacattttataaataaggcaaggaactggacattacnnnnnnnnnnnnnnnnnnnnnnnnnnnnnnnnnnnnnnnnnnnnnnnnnnnnnnnnnnnnnnnnnnnnnnnnnnnnnnnnnnnnccccgcaaaccttgggtgtccccacggcccccaacgccccctcccacgcggccgtcacgtgcccgggtcccaccactccccgggagcgctaaacgactacaaccgccccgagtgcccaccgcagcaaccgcaagcccgcggtgcgcgctgcggccgcaggactgcacccaacacacatctcacaaaaagccaaatcgcaaccgtacacacgcaccccgcgccgccccccacccaggcgtcccttcccaagcctgcccccccctaggccccgacctgaaactacggcaagactaggcagaaatacccctccctgaccgccgcttctcgaccctagagagatacgcccgcccgtcaaccagctcccacccgcgcgctgccccaccccctcagacaaccacctattcagacaccgcccgcacccgcgtccctagagcgtccccacatgctaccagacgcaagcacggcccaggccccgcttgtcgtccgcctcgtgacagccgtgaccagcacagtccacgccacacacgatagccgaccacgcccacacgcagacacccccaccgcacgcaatcgcagtctgagatcccccaccaccgggtactactatccccgccaacccgcctcaccgcgctctctgcccgtacccctctacactgcacatcacgcgtggcgctcacccacgcgttccccaccacccccgtgtgcgcccccacactttagagngttcacccgcccggtctgtcccgactatgtatcgcacggtacacaccctgcggccggctacagcccacaacacacatcatgacgacctaactcctcccagagtccaagaccaccgtgaccgccgagtggtccancgcccgtgacaagggagaaacgcaatgtccacacgttcttcacaacagccgaccaactcatacaaacaagcgccacaacgcactaaaacaatgacgatctgtacgtcgaccccctgcatgactgagccnacagcaccctaggtcccacacacaccgacccccaccc

SEQ ID NO: 252631 - DNA, 326 bp, Homo Sapiens
  misc_feature (282)..(282): n is a, c, g, or t
acgcaacccagtctcctcccacctccgagagtgcagtgtcctgaatggagaaccccagcacccagaagcatccactgaaggactaaattctacacatgaaggcaaacgtccgtggttgacagaaattacactggccagaatccccagtccccatgaggcttgtccagacgcagtgaaccagtcgcagctgataacacacagaccattcccgatcccagaggtgcatttcaggattcatttctattttcatcagaggacgggggtttccctgttgtttgcccngggttgggtcttcgaacttcctggggcttgaaggcaaattcttt

SEQ ID NO: 252632 - DNA, 722 bp, Homo Sapiens
tttcctaacaacagagatctcagttcctcataggattcaggggctgcgaacgtgtagggcagctcgtctctggtagcttttccagctctttccttgccgcttatcaaccctttcccaggagtctgcctctgctcttttgctggcttctcgttttcttcctcactctccacgttggattccaggtccaagtggctatctgggctgtcgctctcctctgtgtcctccccgcctgaactgtcaccttcttcctcgttgctctcagggtcactggcttccttactttgctcttcctggacatcttcctcgacattcatctttccatctttgtaggaaagcaaacgcctgtcatctttatctagcacgaagccatcattcagatcatctgctgacatatgttttggtttcttaacattttcatcctcatcctttccaagcattcttcgaagtctctcaacctccagcttcctgaggtgctcctgctcttccttttgccaattctgcctccgtcttcatcctgttagagggctgcgccttcatttcaaagccaagctcgcgaaccatcatgtcatatgcatcgggcttgggtttttcctttttgtctctgttctctgacttgggagttttgtgggacaggagagtctgaatttctttccagtcttggtctagcttctccgtgagctcgagggcatcttctcgttgagcttgtctctccctcttctctt

SEQ ID NO: 252633 - DNA, 590 bp, Homo Sapiens
tgatagtttgataaaacagaagttttactttctggaatttctactcattttatgttttggatggtttctctctccgtaagcattcagtattcttgaatctcaagttttgaaaggagccctaacttcaagtctactcgctggcttcttaatgaagtgaaccatttctattgcccatttagttcttcctgaaaccctgacattctggtgttcatgtgactcttctttcccccttgctactcagagaaagcgtcgtggtggagcaataaattctagacaagctcagaagcgaactcgggaagcaacctccacccccgagatctccttggaagcagaacccatagaactcgtggaaactggtaagattgccagggacactacaactgtggggtgttaaagtggagagagaacactgtaccagggtgagctagtagaaggtgctttcagtgtctttagaaggcctatgcagtctcacactcaccatgtacaactcaaagcttcacagattctgaaatagcttctcaactgggctaactgttcaactctggtaatgtgcagcagtggggtaggatccatttaaaaagaaatctagc

SEQ ID NO: 252634 - DNA, 1190 bp, Homo Sapiens
gagcaataaattctagacaagctcagaagcgaactcgggaagcaacctccacccccgagatctccttagaagcagaacccatagaactcgtggaaactgctggagatgaaattgtggacctcacttgtgaatctttagagactgtggtggttgatctgactcacaatgactctgttgtgattgttgacgaaagaagaagaccaaggaggaatgctaggagggctgccccaggagccatgctgacagctgtgtggtgagcagtgacgatgaggagttgtccagggacagagacgtatatgtgactacccatactcccagaaacgccagggatgagggcgctacaggcctcaggccctcaggtactgtcagttgtcccatctgcatggacggatactcagagatcgtgcagaatggacgtctcatcgtttccacagaatgcggccatgtcttctgtagccagtgcctccgtgattccctgaagaatgctaatacttgcccaacttgtaggaaaaagatcaaccacaaacggtaccaccccatttatatatgaagtattcagagccccccaggagagacggatggacagacagacagccaggttctccagtggtatctgcctccattttcctgagatcaaaaagactgtttcgaaaccaacatctgatatgtaaactgctcttttgtttccaaccccttccttttgttatctccagtttgatgctatggcgctggacccagggccctcccaggccatctctgttcctctggggtggtccagttctagagtgggagaaaaggagtcaggcgcattgggaatcgtggtttccagtctggttgcagaatctgcacatttgcccaagaaattttccctggtttggaaaagtttgccccccgctttccccgggcaccaccacccttttttcccaagtggtcttggccggtcgaaccaatcctgcctgccacaacattgacccaaggcacgaacccggtttcacccagccccgaggaatcccaggtttgaaagagggggccccttggggggccttggaaaaaacccaatccctggggatttctttccccttggaagagccgaaggtcccccccggggattcggccctgcacccttattcattgaaactggccaaggctttttccccacaatcaaaaagaacctctggcgggggcccacc

SEQ ID NO: 252635 - DNA, 597 bp, Homo Sapiens
agtgcagaaaagaatctggtttgggtgtttatcaaaattccaccagccttgcaatgctgattaataaatgtgctcaattcctatctatggtttatagtctaaggccagagaacccaggttctgatcccagttcactaaatcgcgtaaccttaggcacatttcttcatctctgtctattcagtttcttcatctgtaaaatgagaatcattatctacttccttggtttaagattaaacgagttaacttatgtcaagtgtttagcacaaggtacatagtaaacagtaagtggtagctatcactattattattagcagtagcagcaatagcatcatctttaaagactgactgaatctctttaaaaaggacaccagaagaacattctgtaatggacactaattaactgtctttcttggtatttgcagggggacacatatctccaccacatagtagagttccctcctagaggctgttatcacggcttcgtatggtcatttttttaatccaactgccagactgcaagcttactgaaggcaagagctattacaatgctttacttccaatattcctaacacaatgctctgaatgcagcagatctcg

SEQ ID NO: 252636 - DNA, 459 bp, Homo Sapiens
  misc_feature (264)..(280): n is a, c, g, or t
catccataatcgagaaaagaaaccatttttcaaattgcagtttagcaaatattaaaaatactgacaacaaccagtattagcaaaggcatcacaaagaaagtttgttacatactgttgacagaaaggtaaattgatacaatctttttggcagtgatttagcaatatcaaagttttaaatgcatgtaccctttgaactgaaaattctattgttaaaaatacagttatgattgctctatagacatgattctatatctgacttcttcnnnnnnnnnnnnnnnnncgtgagccaccaggcccggccaagtgttattattattactctaaaatacttttacaagtataatgaagaccttttctaatcaatgttttttaaaacataatgataaatatcataacttttactactttaaaatataaaaccatgtaaagacacaaacattaaaagacaagctatggact

SEQ ID NO: 252637 - DNA, 550 bp, Homo Sapiens
gccctaattctagggtttttgaggagctttattaaagccaaaatgattttgactgtatcatttttctttaaggtaactattgcctaatttgggtcaaaatataaagctcaagaacattcttttggccaggcgcggtggtatagatatttttggtcctaaagtagcataaagccaataacccaatatttgattcactgaccaagaaataaaaaccctgatttaaagccatcctaatctagatagacaaagtagaaaatataagaaaaccaaactgacctggttgctaataacctggctgattgatagcatcccaaatcagctgtaccataatgatagtaacagacggtagacattattgcttagggaaaatggggtaaccttttgttggcagagaaataatttggctgactactacatagattacttcaaatatctgacagataagaaatactaagtttataactctttctagaaaacttgatcttacatgctgttgaaaattctaataggccgggtgtagtggttcaccctgtaatcccaacactttggg

SEQ ID NO: 252638 - DNA, 588 bp, Homo Sapiens
tttagggggagaagttaaggtataaactttgtcaatgaagtcctattaaaaacaacaaaaaagtgaagcttaggatgcattttataaactctgaccagaacacctgtgtttctctgtttctaggtttatgaactgacgttacatcatacacagcaccaagaccacaatgttgtgaccggagccctggagctgttgcagcagctcttcagaacgcctccacccgagcttctgcaaaccctgaccgcagtcgggggcattggcagctcaccgctgctaaggaggagtctggtggccgaagccgtagtgggagtattgtggaacttataggcaagttattagcaaggtctactcttacaattaactttgcagtaatactagttacactctattgattatgggcctgccctgtgctaagcagtctgcattccatcttccttgccaaaacttataatacaaatttcatctttattttataaataggggagttgggctgggtgtggtgtcacgcctgtaatttcagcactttggaaggatcgcttcagcccaggagtttgagacaacctggccaagtgagaccctgtctctaca

SEQ ID NO: 252639 - DNA, 663 bp, Homo Sapiens
  misc_feature (65)..(108): n is a, c, g, or t
aattggagaagatttatgtcagcacacacttacagagcacaaatgcagtatataggtgctggatnnnnnnnnnnnnnnnnnnnnnnnnnnnnnnnnnnnnnnnnnnnnttacaaggagttattttttgtattgattttaaatggatgtcccaatgcacctagaaaattggtctctctttttttaatagctatttgctaaatgctgttcttacacataatttcttaattttcaccgagcagaggtggaaaaatacttttgctttcagggaaaatggtataacgttaatttattaataaattggtaatatacaaaacaattaatcatttatagttttttttgtaatttaagtggcatttctatgcaggcagcacagcagactagttaatctattgcttggacttaactagttatcagatcctttgaaaagagaatatttacaatatatgactaatttggggaaaatgaagttttgatttatttgcgtttaaatgctgctgtcagacgattgttcttagacctcctaaatgccccatattacaagaactcattcataggaaggcgttcatttttggtgtgcaaccctgcaattacggcaaccgcacgtctaaactgactttccaaagataaatggtaactaggggccctcttactgactgtggttt

SEQ ID NO: 252640 - DNA, 435 bp, Homo Sapiens
tgtgtaattagtcggcagctcaaatgtttgggagtgcaagaaattaggcaccccaggatataggtcatacagggatatataaaagccatgctcattacaaaatgagcagttgatgttttatgtggcattaagacaatcaagtcctcacaactctggaatgtcttcttatactgatgctgaatttatgaatccaaattaatttccaacaggttggaatcagatttaatgtgagatcatgatagacaagaccacagaggacgtatgctctatttcttgttggccaacagcttctttctaatgttctgtgaaaaattattttaagtgtcttatataatggtgcttttatggttattaaaaattgtaaatggtatcacatttatatggatttgtcattggatctttttttggttcaacaataaaaaaatttaattacct

SEQ ID NO: 252641 - DNA, 923 bp, Homo Sapiens; identical to SEQ ID NO: 3584
  misc_feature (559)..(568): n is a, c, g, or t
  misc_feature (682)..(720): n is a, c, g, or t
  misc_feature (723)..(751): n is a, c, g, or t

SEQ ID NO: 252642 - DNA, 685 bp, Homo Sapiens
  misc_feature (553)..(571): n is a, c, g, or t
gggacacagcacgctgccacgccgacgcagacccctctctgcacgccagcccgcccgcacccaccatggccacagttcagcagctggaaggaagatggcgcctggtggacagcaaaggctttgatgaatacatgaaggagctaggagtgggaatagctttgcgaaaaatgggcgcaatggccaagccagattgtatcatcacttgtgatggtaaaaacctcaccataaaaactgagagcactttgaaaacaacacagttttcttgtaccctgggagagaagtttgaagaaaccacagctgatggcagaaaaactcagactgtctgcaactttacagatggtgcattggttcagcatcaggagtgggatgggaaggaaagcacaataacaagaaaattgaaagatgggaaaattagtgggtggagtgtgtcatgaacaatgtcacctgtactcggatctatgaaaaagtagaataaaaattccatcatcactttggacaggagttaattaagagaatgaccaagctcagttcaatgagcaaatctccatactgnnnnnnnnnnnnnnnnnnncattactgtgttcaattatctttatcataaacattttacatgcagctatttcaaagtgtgttgggattaattaagatcttccctttggttaaaaaataaatgtgttttggggaa

SEQ ID NO: 252643 - DNA, 567 bp, Homo Sapiens
tgctgaaccaatgcaccatctgtaaagttgcagacagtctgagtttttctgccatcagctgtggtttcttcaaacttctctcccagggtacaagaaaactgtgttgttttcaaagtgctctcagtttttatggtgaggtttttaccatcacaagtgatgatacaatctggcttggccatttgcgcccatttttcgcaaagctattcccactcctagctccttcatgtattcatcaaagcctttgctgtccaccaggcgccatcttccttccagctgctgaactgtggccatggtgggtgcgggcgggctggcgtgcagagagcaacatttggttttctaaagcaaagaagcaaacaaattaaagaggacttgactgagcagctctaatatgaagactgcttgggattctgtcattttttggggaaagtgaaggtgtataaattgtgaaaaggagggatcatttgacagttaaaatcacattgctcttgtcacctcgcaataagttttcaatacgtaaatatgcagcaattaatgctcaactagaggtacaaggtacctgggagttta

SEQ ID NO: 252644 - DNA, 780 bp, Homo Sapiens
aaaaatggttctagtctgttatcttccaagattgtctaatagtgcgacccattggcttcccctcaatgttatgtcttatgaaaccaaccagaatagtcagggccaatgtagccagagcaatgtgaatgtctaattgctccctgattgtcctgcctggcccaacaaaacaattgcaaaaagtcctgagagcaagcagctggtttgctggctttcctttagggttcagaagattgataagatgactcctgaactgagccccttccttttcattgcagaagttctcattcacactggggtgtttaattgacaaccgaagaatgtcaagtgcaggaaagacaatatcttcaggacagttaatagctttccacaaaatctgaagttgctggactgtgggtttttctgaagaactattacatattagagacagtatcttctcaagaagtatcaagtcatcctcagttaacttcttctcttcaggtgcagttccattaagttccttcagtttacctaatatttgtgtagggtttgcttggtcaaatgtgacagcctcttttttagggaaataaatattcattgttttagatgcagctgatcggtaggcactattccctgtaaatggatcaactccggccatggtagttcccatacttgcagaacctggtacataacgaccagcacctgtaaaaggatctgctgtgggtagtgtgttagaagatcccgaagagcccggaacataccgaccaccacctgtaaatggatctgaaaagctgggtggaattc

SEQ ID NO: 252645 - DNA, 834 bp, Homo Sapiens
cggtagtgaaaaactgtctaacccagcattgcccaaactattttgacaccaggacctttttctcctttgggatacttatgaacctctcactaatgtcctgtggagaacattttgggaaacactatgttagatagttctttaaggagacaaaacggtaatgaacagatagcactggggcagaatatgcatgcattttgtaacgtccagtgtggcgttgaatagatgtgtatttcctcccctgcagaaaataagcacagaaaattataatgtaggtgatcggagctctttcctttgatagagagaacagccccaatgatcctggctttttcactgaacgtatcagaatacatggatgaattggggtaaataaggttttaattcagatctagaagaaagtattgtacgtttgaatgcagatttttatccacagatagttgtagtgtttagacatgacaggacctatcgttgaggtttctaagacttactatgggctgtaaacctgttttttaaaactattttagaaacctgagacttgccgtctggcattttagtttaatacaaactaatgattgcatttgaaagagattcttgaccttatttctaaacgtctagagctctgaaatgtcttgatggaaggtattaaactatttgcctgttgtacaaagaaatgttaagactcgtgaaaagaattactataaggtactgtgaaataactgcgattttgtgagcaaaacatacttggaaatgctgattgatttttatgcttgttagtgtattgcaagaaacacagaaaatgtagttttgttttaataaaccaaaaattgaacataaaaa

SEQ ID NO: 252646 - DNA, 1596 bp, Homo Sapiens
tactttgactttggatcatttccctgactgggctaatgtgacacatattgagacttaggaagagccacaagaccacacacacagcccttaccctcctcaggactaccgaaccttctggcacaccttgtacagagttttggggttcacaccccaaaatgacccaacgatgtccacacaccaccaaaacccagccaatgggccacctcttcctccaagcccagatgcagagatggacatgggcagctgggagggtaggctcagaaatgaagggaacccctcagtgggctgctgggacccatctttcccaagccttgccattatctctgtgagggaggccaggtagccgagggatcaggatgcaggctgctgtacccgctctgcctcaagcatcccccacacagggctctggttttcactcgcttcgtcctagatagtttaaatgggaatcagatcccctggttgagagctaagacaaccacctaccagtgcccatgtcccttccagctcaccttgagcagcctcagatcatctctgtcactctggaagggacaccccagccagggacggaatgcctggtcttgagcaacctcccactgctggagtgcgagtgggaatcagagcctcctgaagcctctgggaactcctcctgtggccaccaccaaaggatgaggaatctgagttgccaacttcaggacgacacctggcttgcacccacagtgcaccacaggccaacctacgcccttcatcacttggttctgttttaatcgactggccccctgtcccacctctccagtgagcctccttcaactccttggtcccctgttgtctgggtcaacatttgccgagacgccttggctggcaccctctggggtcccccttttctcccaggcaggtcatcttttctgggagatgcttcccctgccatccccaaatagctaggatcacactccaagtatgggcagtgatggcgctctgggggccacagtgggctatctaggccctccctcacctgaggcccagagtggacacagctgttaatttccactggctatgccacttcagagtctttcatgccagcgtttgagctcctctgggtaaaatcttccctttgttgactggccttcacagccatggctggtggacaacagaggatcgttgagattgagcagcgcttggtgatctctcagcaaacaaccccttcccgtgggccaatcctacttgaagttactcggacaaagaccccaaagtggggcaacaactccagagaggctgtgggaatcttcagaacccccctgtaagagacagacatgagagacaagcatcttctttcccccgcaagtccattttatttccttcttgtgctgctctggaagagaggcagtagcaaagagatgagctcctggatggcattttccagggcaggagaaagtatgagagcctcaggaaaccccatcaaggaccgagtatgtgtctggttccttgggtgggacgattcctgaccacactgtccagctcttgctctcattaaatgctctgtctcccgctaaaaaagacaccgccaccacccgaaccaccccttgtctggccgccctcggc

SEQ ID NO: 252647 - DNA, 1060 bp, Homo Sapiens
  misc_feature (658)..(658): n is a, c, g, or t
  misc_feature (893)..(908): n is a, c, g, or t
cttcgaggaggaggaccgcttctacctggtgtttgagaagatgcggggaggctccatcctgagccacatccacaagcgccggcacttcaacgagctggaggccagcgtggtggtgcaggacgtggccagcgccttggactttctgcataacaaaggcatcgcccacagggacctaaagccggaaaacatcctctgtgagcaccccaaccaggtctcccccgtgaagatctgtgacttcgacctgggcagcggcatcaaactcaacggggactgctcccctatctccaccccggagctgctcactccgtgcggctcggcggagtacatggccccggaggtagtggaggccttcagcgaggaggctagcatctacgacaagcgctgcgacctgtggagcctgggcgtcatcttgtatatcctactcagcggctacccgcccttcgtgggccgctgtggcagcgactgcggctgggaccgcggcgaggcctgccctgcctgccagaacatgctgtttgagagcatccaggagggcaagtacgagttccccgacaaggactgggcccacatctcctgcgctgccaaagacctcatctccaagctgctggtccgtgacgccaagcagaggctgagtgccgcccaagtcctgcagcacccctgnggttcaggggtgcgccccggagaacaccttgcccactcccatggtcctgaaggtgggacagtcacttcctcctccctccccacccctgtcgcatccacgtgcgacctggaggactggtcagaaccgttactgtgaatgagtgaagatcctggaggaccctgggccccaggccagctcccatcgctgggggacggtgaacggccatgtgttaatgttacgatgtttttaaaagacnnnnnnnnnnnnnnnncctcaaaagtttttttaaagtgggggaaaaacatccaagcactttaattccaatgtaccaggtgaactgacggagctcagaagttttcctttacaccaactgtcaatgccggaattttgtattctgttttgtaaagatttaataaaagtcaa

SEQ ID NO: 252648 - DNA, 1257 bp, Homo Sapiens
  misc_feature (542)..(542): n is a, c, g, or t
  misc_feature (1194)..(1203): n is a, c, g, or t
atcctgcagctttttttgtctttttaagattattggctcataagcatatgtatactggtttatggaactttatttacactcctctatcatgcaaaaaaattttgacttttagtactaagcttaatttttaaaaacaaaatctgtagtgttgacaaataaatagttgctcttctacactaggggtttcacctgcaggtttgacacgcagttgctcgcttttcctgccctgtcaagcttctctgttctgggcgtgagttgtgaaagagttgaagacagcttcccatgccggtacacagccagtagcctaaatctccagtacttgagctgaccattgaactagggcaagtcttaaatgtgtacatgtagttgaatttcagtccttacgggtaaacagattgagcatggctctctattccctcagcctaagaaacactcatgggaatgcatttggcaacccaaggaaccatttgcttaaacctggaacatctcacctttttaaatcctaaaaaacactggcagttatattttaaattagtttttanttttatgatggttttatcaaaagacttttattattagattgggacccccttcaaacctaaaaatcaagttatttccttttataatacttttcttccccatggaacaaatgggatcaatttgtgagttttttcctttaatgataactaaaatccctctaatttctcatttatgcttttgtcttttttatgaaatatttcttttaaaagccccagtctcacctacgaaatatgaagagcaaaagctgattttgcttacttgctaaactgttgggaaagctctgtagagcatggttccagtgaggccaagattgaaatttgatactaaaaaggccacctagctttttgcagataacaaacaagaaagctattccaagactcagatgatgccagctgtctcccacgtgtgtattatggttcaccagggggaactggcaaaagtgtgtgtggggaggggaagggtgtgtgagtggttctgagcaaataactacagggtgcccattaccactcaagaagacacttcacgtattcttgtatcaaattcaataatcttaaacaatttgtgtagaagtccacagacatctttcaaccaccttttaggctgcatatggattgccaagtcagcatatgaggaattaaagacattgtttttttnnnnnnnnnntcatttagatgcacttttttgtgtgttctttaaataaatccaaaaaaaatgtga

SEQ ID NO: 252649 - DNA, 458 bp, Homo Sapiens
  misc_feature (269)..(330): n is a, c, g, or t
ctgagttgtgaaggagttgaagacagcttcccatgccggtacacagccagtagcctaaatctccagtacttgagctgaccattgaactagggcaagtcttaaatgtgtacatgtagttgaatttcagtcttacgggtaaacagattgagcatggctctctattccctcagcctaagaaacactcatgggaatgcatttggcaacccaaggaaccatttgcttaaacctggaacatctcacctttttaaatcctaaaaaacactggcagnnnnnnnnnnnnnnnnnnnnnnnnnnnnnnnnnnnnnnnnnnnnnnnnnnnnnnnnnnnnnntgggacccccttcaaacctaaaaatcaagttatttccttttataatacttttcttccccatggaacaaatgggatcaatttgtgagttttttcctttaatgataactaaaatccctctaatttctcaa

SEQ ID NO: 252650 - DNA, 640 bp, Homo Sapiens
  misc_feature (589)..(598): n is a, c, g, or t
aatgacacagaaactaatctggcaggaatgtacggaaaagttcgcaaagctgctagttcaattgatcagtttagtattcgcctgggaatttttctccgaagataccccatagcgcgagtttttgtaattatatatatggctttgcttcacctctgggtcatgattgttctgttgacttacacaccagaaatgcaccacgaccaaccatatggcaaatgaaccaagcccagttgttgcagtgattggttgtctttttctagacttgggatctgcaagaaggccaattgcctaaaatttctgagaacagtgcacaagattattttatcactacaagcttttaactttttaagttattgtacaagtattctacctaaatcttccaatttcctttaaatggtaagagtttctaaaacagacaataatttaacaagctcagctctgctttatctgagtttagtggtcctaatatatatgtagagaaagatggtggggttgttcacctctgtacagaccatctgtatgttaggtgacattgattatgggttataatcagggaaactaattgtatttagtgacaaaaataaaaagnnnnnnnnnnataattctaaaaaggagcacagagggcattacagggccttgt

SEQ ID NO: 252651 - DNA, 1043 bp, Homo Sapiens
  misc_feature (885)..(945): n is a, c, g, or t
cccagtgcggctccctgattgggaaaggcgggtgtaagatcaaagagatccgcgagagtacgggggcgcaggtccaggtggcggtggatatgctgcccaactccaccgagcgggccatcaccatcgctggcgtgccgcagtctgtcaccgagtgtgtcaagcagatttgcctggtcatgctggagacgctctcccagtctccgcaagggagagtcatgaccattccgtaccagcccatgccggccagctccccagtcatctgcgcgggcggccaagatcggtgcagcgacgctgcgggctacccccatgccacccatgacctggagggaccacctctagatgcctactcgattcaaggacaacacaccatttctccgctcgatctggccaagctgaaccaggtggcaagacaacagtctcactttgccatgatgcacggcgggaccggattcgccggaattgactccagctctacagaggtgaaaggctattgggcaagtttggatgcatctactcaaaccacccatgaactcaccattccaaataacttaattggctgcataatcgggcgccaaggcgccaacattaatgagatccgccagatgtccggcgcccagatctctgctgccagtattagtctggcccagtatctaatcaatgccaggctttcctctgagaagggcatggggtgcagctagaacagtgtaggttccctcaataacccctttctgctgttctcccatgatccaactgtgtaatttctggtcagtgattccaggttttaaataatttgtaagtgttcagtttctacacaactttatcatccgctaagaatttaaaaatcacattctctgttcagctgttaatgctgggatccatatttannnnnnnnnnnnnnnnnnnnnnnnnnnnnnnnnnnnnnnnnnnnnnnnnnnnnnnnnnnnnttctgtttgtcgataagaaatgtaagagtggaatgttaataaatttcagtttagttctgtaatgtcaagaatttaagaattaaaaaacggattggtta

SEQ ID NO: 252652 - DNA, 1366 bp, Homo Sapiens
ctaaggagcgaggcctgggtggcgaattcggcacgagggtgaccaaagacttgaccactcaaagtccagctccccagaacactgctcgacatggacaccggtgtgattgaaggtggattaaatgtcactctcaccatccggctacttatgcatggaaaggaagttggcagtatcatcggaaagaaaggagaatcagttaagaagatgcgcgaggagagtggtgcacgtatcaacatctcagaagggaattgtcctgagagaattatcactttggctggacccactaatgccatcttcaaagcctttgctatgatcattgacaaactggaagaggacataagcagctctatgaccaatagcacagctgccagtagacccccggtcaccctgaggctggtggtccctgctagtcagtgtggctctctcattggaaaaggtggatgcaagatcaaggaaatacgagagagtacaggggctcaggtccaggtggcaggggatatgctacccaactcaactgagcgggccatcactattgctggcattccacaatccatcattgagtgtgtcaaacagatctgcgtggtcatgttggagtcccccccgaagggcgtgaccatcccgtaccggcccaagccgtccagctctccggtcatctttgcaggtggtcaggacaggtacagcacaggcagcgacagtgcgagctttccccacaccaccccgtccatgtgcctcaaccctgacctggagggaccacctctagagttgaccaagctgcaccagttggcaatgcaacagtctcattttcccatgacgcatggcaacaccggattcagtggcattgaatccagctctccagaggtgaaaggctattgggcaggtttggatgcatctgctcagactacttctcatgaactcaccattccaaacgatttgattggctgcataatcgggcgtcaaggcgccaaaatcaatgagatccgtcagatgtctggggcgcagatcaaaattgcgaacccagtggaaggatctactgataggcaggttaccatcactggatctgctgccagcattagcctggctcaatatctaatcaatgtcaggctttcctcggagacgggtggcatggggagcagctagaacaatgcagattcatccataatccctttctgctgttcaccaccacccatgatccatctgtgtagtttctgaacagtcagcgattccaggttttaaatagtttgtaaattttcagtttctacacactttatcatccactcgtgattttttaattaaagcgttttaattcctttctctgttcagctgttgatgctgagatccatatttagttttataagcttctccctgg

SEQ ID NO: 252653 - DNA, 1012 bp, Homo Sapiens
ccccccaaacattgggccggtttctcattgattttggcccccttgacgcccggattaggccagccaatccaaatcctttggaatggggaagtccatgagaagtagtctgagcagatgcatcccaaacccccaatagcttttcactctgggagagctggattcaatgcccactgaatcccggtgttgccatgcgtcatggaaaaatgagactgttgccattgccaactggtggcagcttggtccaactctagagggggtaccctccaggtcagggttgaggcacatggacggggtggtgtggggaaagctcgcactgtcgctgcctgtgcggtacctgtcctgaccacctgcaaagatgaccggagagctggacggcttgggccggtacgggatggtcacgcccttcgggggggactccaacatgaccacgcagatctgtttgacacactcaatgatggattgtggaatgccagcaatagtgatggcccgctcagttgagttgggtagcatatcccctgccacctggacctgagcccctgtactctctcgtatttccttgatcttgcatccaccttttccaatgagagagccacactgactagcagggaccaccagcctcagggtgaccgggggtctactggcagctgtgctattggtcatagagctgcttatgtcctcttccagtttgtcaatgatcatagcaaaggctttgaagatggcattagtgggtccagccaaagtgataattctctcaggacaattcccttctgagatgttgatacgtgcaccactctcctcgcgcatcttcttaactgattctcctttctttccgatgatactgccaacttcctttccatgcataagtagccggatggtgagagtgacatttaatccaccttcaatcacaccggtgtccatgtcgagcagtgttctggggagctggactttgagtggtcaagtctttggtcactggttgggggtgaaagccaaaaactgcaggcgcgaggcgact

SEQ ID NO: 252654 - DNA, 580 bp, Homo Sapiens
  misc_feature (491)..(491): n is a, c, g, or t
  misc_feature (506)..(506): n is a, c, g, or t
  misc_feature (555)..(555): n is a, c, g, or t
  misc_feature (565)..(565): n is a, c, g, or t
agatcaaggaaatacgagagagtacaggggctcaggtccaggtggcaggggatatgctacccaactcaactgagcgggccatcactattgctggcattccacaatccatcattgagtgtgtcaaacagatctgcgtggtcatgttggagtcccccccgaagcgtggaccatcccgtaccggcccaagccttccagctctccggtcatctttgcaggtggtcaggacaggtacagcacaggcagcgacagtgcgagctttccccacaccaccccgtccatgtgcctcaaccctgacctgggagggaccacctctagaggcctataccatttcaaggacagtattgccatttccacagccagattttgaccaagctgcaccagtttgggcaatgcaacagtctcattttcccatgacgcatggcaacaccggattcagtggtttggatgcatctgctcagactacttctcaccaccacccattgatccatctngtgtagtttcttgancagtcagcgatttcagggtttaaatagtttgtaaatttttcagtttctnacaaaatttngttcattccacttgg

SEQ ID NO: 252655 - DNA, 1537 bp, Homo Sapiens
  misc_feature (1387)..(1436): n is a, c, g, or t
gcggccctcgctcgcctcgcgccggcagttttgggcctacacctcccctccccccgccagccgccaaagacttgaccacgtaacgagcccaactcccccgaacgccgcccgccgctcgccatggatgccggtgtgactgaaagtggactaaatgtgactctcaccattcggcttcttatgcacggaaaggaagtaggaagcatcattgggaagggggagtcggttaagaggatccgcgaggagagtggcgcgcggatcaacatctcggaggggaattgtccggagagaatcatcactctgaccggccccaccaatgccatctttaaggctttcgctatgatcatcgacaagctggaggaagatatcaacagctccatgaccaacagtaccgcggccagcaggcccccggtcaccctgaggctggtggtgccggccacccagtgcggctccctgattgggaaaggcgggtgtaagatcaaagagatccgcgagagtacgggggcgcaggtccaggtggcgggggatatgctgcccaactccaccgagcgggccatcaccatcgctggcgtgccgcagtctgtcaccgagtgtgtcaagcagatttgcctggtcatgctggagacgctctcccagtctccgcaagggagagtcatgaccattccgtaccagcccatgccggccagctccccagtcatctgcgcgggcggccaagatcggtgcagcgacgctgcgggctacccccatgccacccatgacctggagggaccacctctagatgcctactcgattcaaggacaacacaccatttctccgctcgatctggccaagctgaaccaggtggcaagacaacagtctcactttgccatgatgcacggcgggaccggattcgccggaattgactccagctctccagaggtgaaaggctattgggcaagtttggatgcatctactcaaaccacccatgaactcaccattccaaataacttaattggctgcataatcgggcgccaaggcgccaacattaatgagatccgccagatgtccggggcccagatcaaaattgccaacccagtggaaggctcctctggtaggcaggttactatcactggctctgctgccagtattagtctggcccagtatctaatcaatgccaggctttcctctgagaagggcattggggtgcagctagaacagtgtaggttccctcaataacccctttctgctgttctcccatgatccaactgtgtaatttctggtcagtgattccaggttttaaataatttgtaagtgttcagtttctacacaactttatcatccgctaagaatttaaaaatcacattctctgttcagctgttaatgctgggatccatatttagttttataagcnnnnnnnnnnnnnnnnnnnnnnnnnnnnnnnnnnnnnnnnnnnnnnnnnnttctgtttgtcgataagaaatgtaagagtggaatgttaataaatttcagtttagttctgtaatgtcaagaatttaagaattaaaaaacggattggttaaaa

SEQ ID NO: 252656 - DNA, 1496 bp, Homo Sapiens
  misc_feature (1305)..(1401): n is a, c, g, or t
  misc_feature (1408)..(1410): n is a, c, g, or t
  misc_feature (1413)..(1413): n is a, c, g, or t
  misc_feature (1415)..(1418): n is a, c, g, or t
  misc_feature (1420)..(1420): n is a, c, g, or t
  misc_feature (1428)..(1428): n is a, c, g, or t
  misc_feature (1431)..(1431): n is a, c, g, or t
  misc_feature (1434)..(1434): n is a, c, g, or t
  misc_feature (1443)..(1443): n is a, c, g, or t
  misc_feature (1447)..(1450): n is a, c, g, or t
  misc_feature (1452)..(1453): n is a, c, g, or t
  misc_feature (1487)..(1487): n is a, c, g, or t
  misc_feature (1491)..(1491): n is a, c, g, or t
tggaaaaatttacaaactatttaaaaacctggaatcgctgactgtccagaaactacacagatggatcatgggtgttggtgaacagcagaaagggattatggatgaatctgcattgttctagctgctccccatgccacccgtctccgaggaaagcctgacattgattagatattgagccaggctaatgctggcagcagatccagtgatggtaacctgcctatcagtagatccttccactgggttcgcaattttgatctgcgccccagacatctgacggatctcattgattttggcgccttgacgcccgattatgcagccaatcaaatcgtttggaatggtgagttcatgagaagtagtctgagcagatgcatccaaacctgcccaatagcctttcacctctggagagctggattcaatgccactgaatccggtgttgccatgcgtcatgggaaaatgagactgttgcattgccaactggtgcagcttggtcaaatctggctgtggaatggcatactgtccttgaatggtataggcctctagaggtggtccctccaggtcagggttgaggcacatggacggggtggtgtggggaaagctcgcactgtcgctgcctgtgctgtacctgtcctgaccacctgcaaagatgaccggagagctggacggcttgggccggtacgggatggtcacgcccttcgggggggactctccaacatgaccacgcagatctgtttgacacactcaatgatggattgtggaatgccagcaatagtgatggcccgctcagttgagttgggtagcatatcccctgccacctggacctgagcccctgtactctctcgtatttccttgatcttgcatccaccttttccaatgagagagccacactgactagcagggaccaccagcctcagggtgaccgggggtctactggcagctgtgctattggtcatagagctgcttatgtcctcttccagtttgtcaatgatcatagcaaaggctttgaagatggcattagtgggtccagccaaagtgataattctctcaggacaattcccttctgagatgttgatacgtgcaccactctcctcgcgcatcttcttaactgattctcctttctttccgatgatactgccaacttcctttccatgcataagtagccggatggtgagagtgacatttaatccaccttcaatcacaccggtgtccatgtcgagcagtgttctggggagctggactttgagtggtcaagtctttggtcactggttgggggtgaaagccaaaaactgcaggcgcgaggcgactgannnnnnnnnnnnnnnnnnnnnnnnnnnnnnnnnnnnnnnnnnnnnnnnnnnnnnnnnnnnnnnnnnnnnnnnnnnnnnnnnnnnnnnnnnnnnnnnngaggagnnngcngnnnncnaggaggancangangaagggggnaagnnnncnnggggcgggtggagggcggcggagggcgggcgggngggnggggg

SEQ ID NO: 252657 - DNA, 1391 bp, Homo Sapiens
  misc_feature (17)..(17): n is a, c, g, or t
  misc_feature (41)..(42): n is a, c, g, or t
  misc_feature (49)..(49): n is a, c, g, or t
  misc_feature (52)..(52): n is a, c, g, or t
  misc_feature (56)..(56): n is a, c, g, or t
  misc_feature (65)..(65): n is a, c, g, or t
  misc_feature (68)..(68): n is a, c, g, or t
  misc_feature (77)..(77): n is a, c, g, or t
  misc_feature (81)..(81): n is a, c, g, or t
  misc_feature (85)..(85): n is a, c, g, or t
  misc_feature (102)..(102): n is a, c, g, or t
  misc_feature (121)..(121): n is a, c, g, or t
  misc_feature (126)..(126): n is a, c, g, or t
  misc_feature (140)..(141): n is a, c, g, or t
  misc_feature (154)..(154): n is a, c, g, or t
  misc_feature (606)..(606): n is a, c, g, or t
  misc_feature (690)..(718): n is a, c, g, or t
  misc_feature (830)..(989): n is a, c, g, or t
  misc_feature (994)..(1031): n is a, c, g, or t
  misc_feature (1120)..(1129): n is a, c, g, or t
  misc_feature (1235)..(1247): n is a, c, g, or t
  misc_feature (1311)..(1323): n is a, c, g, or t
gtcccccccgaaggctngaccatccgtaccgcccaagccgnncagtatnccngtcnctttgcagntgntcaggcctntccntttnaaggacagtatgccatnccacagccagatttgaccnaagcngcaccagttggcanngctacagtctcantttcccatgacgcatggcaacacgggattccagtgggtttgggatgcaacctgcctcagactacttcctcatgaaactcaccaatcccaaaacgatttgattggctgccataatcgggcgtcaaggcgcccaaaatcaatgagatccgtcagatgtctggggcgcagatcaaaattgcgaacccagtggaaggatctactgataggcaggttaccatcactggatctgctgccagcattagcctggctcaatatctaatcaatgtcaggctttcctcggagacgggtggcatggggagcagctagaacaatgcagattcatccataatccctttctgctgttcaccaccacccatgatccatctgtgtagtttctgaacagtcagcgattccaggttttaaatagtttgtaaattttcagtttctacacaactttatcatccactaagaatnttttaattaaagcgttttaattccattctctgttcagctgttaatgctgagatccatatttagttttataagcttccccctggnnnnnnnnnnnnnnnnnnnnnnnnnnnnnggctcatgaatttttctgtttgtcatggaaatgtaagagtggaatattaatacatttcagtttagttctgtaatgtcaggaatttttcaaaaaaattaaaagatggactggnnnnnnnnnnnnnnnnnnnnnnnnnnnnnnnnnnnnnnnnnnnnnnnnnnnnnnnnnnnnnnnnnnnnnnnnnnnnnnnnnnnnnnnnnnnnnnnnnnnnnnnnnnnnnnnnnnnnnnnnnnnnnnnnnnnnnnnnnnnnnnnnnnnnnnnnnnnnnnnntgcgnnnnnnnnnnnnnnnnnnnnnnnnnnnnnnnnnnnnnnttgggggcgtggcccccctttgttgggggccggggcccaaatgttttccaaaaaaagcccggccttttccccggggggaatctcccccnnnnnnnnnncgccgggggccccccaaaaaatttcaccaaccccaaaggggatttttagaaaatttcccggggggtttctctggggggtctcccggggacttcaataaaaaaattnnnnnnnnnnnnngaaaaatatttaccgcccccgggcgggatttctttttaaccttttttggcggggtgtgggaaannnnnnnnnnnnngcgggtgcaggaaaaacctaattaccccgcggggggtatataaaaccccgtgatgccccccgcggggg

SEQ ID NO: 252658 - DNA, 1113 bp, Homo Sapiens
  misc_feature (704)..(704): n is a, c, g, or t
  misc_feature (723)..(723): n is a, c, g, or t
ctgccagtagacccccggtcaccctgaggctggtggtccctgctagtcagtgtggctctctcattggaaaaggtggatgcaagatcaaggaaatacgagagagtacaggggctcaggtccaggtggcaggggatatgctacccaactcaactgagcgggccatcactatggctggcattccacaatccatcattgagtgtgtcaaacagatctgcgtggtcatgttggagtcccccccgaagggcgtgaccatcccgtaccggcccaagccgtccagctctccggtcatctttgcaggtggtcaggcctataccattcaaggacagtatgccattccacagccagatttgaccaagctgcaccagttggcaatgcaacagtctcattttcccatgacgcatggcaacaccggattcagtggcattgaatccagctctccagaggtgaaaggctattgggcaggtttggatgcatctgctcagactacttctcatgaactcaccattccaaacgatttgattggctgcataatcgggcgtcaaggcgccaaaatcaatgagatccgtaagatgtctggggcgcagatcaaaattgcgaacccagtggaaggatctactgataggcaggttaccatcactggatctgctgccagcattagactggctcaatatctaatcaatgtcagtttagaaaacgctaaaccntcctcccaggcagcctccntcacgatccctgatcacctcagcatcaacctctctcaaccctccaccccttcttcttcttcctcctccaccaccaccccctcgctcgccacagcggggacctccgacgcaccctccagcctcccccaaccctcttccgaccgccccttgtgtctccagtctgcttggcatgaaacccatccctctcctggctctaaatgttgtgtctgctgctaagggtaccggggcttcagctaccaccaccaccacctctgccgtgccatgtgtaactaacaaactgaaaggcgagaaacagagattctctccctactgattgcataccttgaggcacctcctccagtattattttgttcattttgttttcctttgttaacattggtgagaatgaaac

SEQ ID NO: 252659 - DNA, 1306 bp, Homo Sapiens
gtacggccggaatttcgggatatcgtcgacccacgcgtccgcttttcccctcagtcgcctcgcgcctgcagtttttggctttcacccccaaccagtgaccaaagacttgaccactcaaagtccagctccccagaacactgctcgacatggacaccggtgtgattgaaggtggattaaatgtcactctcaccatccggctacttatgcatggaaaggaagttggcagtatcatcggaaagataggagaatcagttaagaagatgcgcgaggagagtggtgcacgtatcaacatctcagaagggaattgtcctgagagaattatcactttggctggacccactaatgccatcttcaaagcctttgctatgatcattgcacaaactggcaagaggacataagcagctctatgaccaatagcacagctgccagtagacccccggtcaccctgaggctcggtggtccctagctagtccagtgtggctctctcattggcaaacaggtgcgatgcaagcatcaaggaacatacgagcagagtacagcgcgctcaggtccaggtgcgcagggcgatatgctacccaactcaactgcagcgggccatcactatccgctggcattccacaatccatcattgagtgtgtcaaacacgatctgcgctggtcatgtcggaagactctctcccagtccccccgaagggcgtgaccatcccgtaacgacccaagccgtccagctctccggtcatctttgcaccgtggtcaagacttataccattcaagcacagtatgccattccacagccagatttgaccaagctgcaccagttggcaatgcaacagtctcattttcccatgacgcatggcaacaccggattcagtgcaggtttggatgcatctgctcagactacttctcatgaactcaccattccaaacgattttgatggtgcataatcgggcgtcaaggcgccaaaatcaatgagatccgtcagatgtctggggcgcagatcaaattgcgaaacccagtgaaggtctactgataggcagggtacccatcactggatctgtgcaacattagcctggtcatttaatcagcaggcttcctcgagaggtggcatgggagcgctaaaatggaattcacctattcctttgtggttcccacctgatcacttgtgttcgaagcccgacacggtacaagtgaattagttacactattaccgggataaaagagacctcgcggggcaccaaaaacaacggaatggaggcaactacgagaaactacctaaatggttgtcataaaaatttgtctttcccttg

SEQ ID NO: 252660 - DNA, 477 bp, Homo Sapiens
  misc_feature (11)..(11): n is a, c, g, or t
  misc_feature (364)..(364): n is a, c, g, or t
  misc_feature (385)..(385): n is a, c, g, or t
  misc_feature (414)..(414): n is a, c, g, or t
  misc_feature (438)..(438): n is a, c, g, or t
tgcaggatggncaggacaggtacagcacaggcagcgacagtgcgaagctttccccacaccaccccgtccatgtgcctcaaccctgacctggagggaccacctctagaggcctataccattcaaggacagtatgccattccacagccagatttgaccaagctgcaccagttggcaatgcaacagtctcattttcccatgacgcatggcaacaccggattcagtgcaggtttggatgcatctgctcagactacttctcatgaactcaccattccaaacgatttgattgggctgcataatcgggcgtcaaggcgccaaaatcaatgagatccgtcagatgtctggggcgcagattcaaaattgcgancccagtgggaaggatctactngttagggcaggtttaccatcactgggttnggttgccagcatttagcctgggtncaatattttaattcaatgttcagggttttccttcgggga

SEQ ID NO: 252661 - DNA, 569 bp, Homo Sapiens
ttcctctacatttaactattaaaaaagttttttattaataaatgggctcctctgtggttcatatacaatcataagtgaactttaaattccattttatacaaacatctcaaaaaatattgggagtgaagtatggtaggaaatattgctcacattgctaattaacatgcgtatatgaaaggaggaaaatgttttgttagtgcatatacctccagagcagaaaacccacccaaaacaaaagatctaaaataaaacatacagtagctgattacaaaaaaaggtaatgtccacaaaattaagtttttcatgctattctactttccagtactatgcttcaggtaatcaatttgcatggctagatgttggatacttgaggtatataagaagggaaacctgcatgttgaggaaaatctgtcatcttaagggttgtttctttttgtttgtttatcctggtactttaacatttttaaaagatattttatttacatcaaaattcactgaactacaatgacattccaattataatagatgacaaacaacgcctctatcactaggcacttttaaaagggagt

SEQ ID NO: 252662 - DNA, 1679 bp, Homo Sapiens
  misc_feature (17)..(17): n is a, c, g, or t
  misc_feature (132)..(132): n is a, c, g, or t
  misc_feature (136)..(136): n is a, c, g, or t
  misc_feature (284)..(284): n is a, c, g, or t
  misc_feature (1259)..(1259): n is a, c, g, or t
  misc_feature (1267)..(1267): n is a, c, g, or t
  misc_feature (1298)..(1298): n is a, c, g, or t
  misc_feature (1300)..(1300): n is a, c, g, or t
  misc_feature (1319)..(1319): n is a, c, g, or t
gctcctccctccgcgtnggaggcggaatagtgggttttgctgcaaccggtttattttccttctgttttcacccattctggcacaatctggcgccatcgtccttcttgtgaggccaagcctgaaaatgcgaanagangaggcaggaccaaaattgaggcgaatccaggaacctgccaatgggtctccgggtgcggtctctgaaactggaggatatcgggaggaaaggctctccgatgcggagataatggggaagctcttggcatggttggctgtaggtatgtganaccggaggagcaggagtcaaataggatacgccgacttttaattcaaggaacccttttctgaaacactttgccacaatgaaggaaataaggatctagtttgaagcactaagaagaataagacatcagtttgaaaagaggctctatcagaacaacacgaattctgctaaaattgaagcaagaacaaacatcaaatatatgttgacacttgggtggaagaatggtgaactaattgatgctttatgaaaagttgatagggacagtgctccaaagaaatcagtttacaaatggataactcgttttaagaaggcataaggtaatgttgaagaagaagcccacagtggcagatcatccacatcagtttgtgagaaaaaagttagttcatggcgtaattgaagaaaaccaacaattaacagcagaaacaacagccaacaccatagacatctcagttggttcaccttacacaattttgactggaaaagttcagcaaactttatacctgataggtaccaaaaccattgcacccagatcagctacagacaagaatagagctttcaatggaaattttaaataaatgggatcaggatcttgaagcctttcattgaaaaattgtaacaggagatgaaacatggctttaccagcgcaatcctgaagacaaaacacaaagcagtggttaccaagataagtagttcagttaaagcacaagaggactggttgagagcaaaggtcatggcaacagcttttgaatgctcaaggcattttgcttgttgactttctgtagggccaaagaatggtaacgtgcttatcatgggaggtgttttgagaaactttagccaaagcttcagcagaaaaatccccgagaaagaccagagagttcttcaacacaacaatggtcctgctcatccctctcatcaaacaaggccattttgcaagagttttgatgggaaatcactaggcatccaccctacagtcctggtntggcaccntctgactttttgtttcctaatcttaaaaaantntgtcagggcagtacatttntctcaagttaatgtataaagaaactgcattgatgtagataaattcccagaactctcagttctttagggatggactaaatagctggtatcatcacttacaaaagtgtcttgaatgctatagagctaatgttcaaaaatatagtttatattttttatcttttaaccatttttccacaaactttttgaagtctccttgaatatgtaccatttataaaggggaaaaattctgtgactgctcatgttgacttaatgctgacttaattttctgttttgtaaatatatacaaacaagttgatacaaattttgtttatagcccttaaacaaatttgtgaaataaatgcattcagaaacaaactaaaaa

SEQ ID NO: 252663 - DNA, 340 bp, Homo Sapiens
  misc_feature (24)..(24): n is a, c, g, or t
ccttaaaaaacggagttaacccantggtaaaactgaattcctttgggagcacggtcccctatccaacttttccataaagcatcaattagttcacccatccttcccacccaagtgtcaacatatatttgatgtttgttcttgccttcaattttagcagaattcgtgttgttctgatagagcctcttttcaaactgatgtcttattcttcttagtgcttcaaactagatccttattatataaatcttcaacttcttgatcaaataaatatgacaaatgatgttctttaagaaaaacacccttcaattttattccttccctgcatattttgagtaattatctt

SEQ ID NO: 252664 - DNA, 780 bp, Homo Sapiens
atctactgtcatttgtatgcaatttcctgttaccttgaaaaaataaaaatgttaacaggaatgcagtgtgctcattctccctaaatagtaaatcccactgtatacaaaactgttctcttgttctgccttttaaaatgttcatgtagaaaattaatgaactataggaatagctctaggagaacaaatgtgctttctgtaaaaaggcagaccagggatgtaatgtttttaatgtttcagaagcctaactttttacacagtggttacatttcacatttcactaatgttgatatttggctgatggttgagcagtttctgaaatacacatttagtgtatggaaatacaagacagctaaagggctgtttggttagcatctcatcttgcattctgatcaattggcaagaaagggagatttcaaaattatatttcttgatggtatcttttcaattaatgtatctgtaaaagtttctttgtaaatactatgtgttctggtgtgtcttaaaattccaaacaaaatgatccctgcatttcctgaagatgtttaaacgtgagagtctggtaggcaaagcagtctgagaaagaaataggaaatgcagaaataggttttgtctggttgcatataatctttgctctttttaagctctgtgagctctgaaatatatttttgggttacttcagtgtgtttgacaagacagcttgatatttctatcaaacaaatgactttcatattgcaacaatctttgtaagaaccactcaaataaaagtctcttaaaaaggaaaaa

SEQ ID NO: 252665 - DNA, 454 bp, Homo Sapiens
  misc_feature (192)..(204): n is a, c, g, or t
aaattgacacagatccccccgtggaaaaattataccggtgtttcctcgttgaaatattcaaggcggtatttgggattaataccgggcgcccaaaaaattaaaaagtcctctaccaattgtagcgggcccccattttcccccagaacacacctatgcccttgtttccgccaagctccaagttttggacgagcnnnnnnnnnnnnnctcgggaagcgcgccattgttttggtcccggaaattcgcccattatggccggggtgcacacaaatcacttacatgtaggttaacacctaattatataaagcaaacattaatttctaaaaaataaaatatgtaacttttttataaactcagaaaacagaatggttttttaaatgaaatataaaattacagaacttgagtaaaacagttgataaattggtctacattagtattttaaaacatcatgttctac

SEQ ID NO: 252666 - DNA, 255 bp, Homo Sapiens
ataagataaaacatcaaactacccagtaacctgagaagcacagagtgttaaagcctccaccgtgtggagaaactaaattagggtaactagctattgagtatattgagtaccttcaaagcactcaactgacaggttttacagactggaaattataatacttatgacatttctaccttttatataaccaataatctaccatagaatgtagtatttttaaagctattaacaagcaatatattaaaataataatgtatt

SEQ ID NO: 252667 - DNA, 1096 bp, Homo Sapiens
  misc_feature (11)..(11): n is a, c, g, or t
  misc_feature (41)..(41): n is a, c, g, or t
  misc_feature (56)..(56): n is a, c, g, or t
  misc_feature (123)..(123): n is a, c, g, or t
  misc_feature (419)..(421): n is a, c, g, or t
  misc_feature (425)..(535): n is a, c, g, or t
  misc_feature (546)..(561): n is a, c, g, or t
  misc_feature (590)..(632): n is a, c, g, or t
  misc_feature (711)..(721): n is a, c, g, or t
  misc_feature (732)..(795): n is a, c, g, or t
  misc_feature (855)..(864): n is a, c, g, or t
  misc_feature (896)..(914): n is a, c, g, or t
  misc_feature (924)..(933): n is a, c, g, or t
  misc_feature (956)..(970): n is a, c, g, or t
  misc_feature (999)..(999): n is a, c, g, or t
tccagaccaanaaatattaacccatccagaaaaaaaggccncctggcccccaattnagagggaacccctccctaatcccccccagcaattaagtttgggggttgaggggggcaaggtccattngttacccaacagaagtaaatttggcatcctatagaaatcaattatgatttttgaaagatttatcctaaatatatcaatatagcatctctttaatgttagtcatttattagaaagatcctttatcctgatttgcttaaacctttcaataaattgcactttaaaggattataaataatccatttaaaaattcaagtacacacatcagtgttggttactatgcagagaatgtcattgtgtatagtttcatgtaatctgttatgtcagctgtattttttattaaaatcatgtcaagaaannnaaannnnnnnnnnnnnnnnnnnnnnnnnnnnnnnnnnnnnnnnnnnnnnnnnnnnnnnnnnnnnnnnnnnnnnnnnnnnnnnnnnnnnnnnnnnnnnnnnnnnnnnnnnnnnnncctggggcggnnnnnnnnnnnnnnnnaaaaaagcttttcaaaaacctttctgttnnnnnnnnnnnnnnnnnnnnnnnnnnnnnnnnnnnnnnnnnnnccataaagtggttttccccaagaaaaaaccccggggggaaaagaaacaaaggggtgtgtggattccccccccaccaatnnnnnnnnnnncgccccgccgnnnnnnnnnnnnnnnnnnnnnnnnnnnnnnnnnnnnnnnnnnnnnnnnnnnnnnnnnnnnnnnnttcttctggcgaggggggcgctctttataagcggggggggtctctctccaccaccacaannnnnnnnnntctccccacaagagggcggagggctccccacnnnnnnnnnnnnnnnnnnnttattaaagnnnnnnnnnngcgcgccccgcggtgggcccacnnnnnnnnnnnnnnnaaaaaaaaaacaacgggggtgtggggagngaattaactcttcctttataaataaaacgcatattattttctcgcgccgcggccgacactagatgttgggagagacacacacctctcctctccacac

SEQ ID NO: 252668 - DNA, 1124 bp, Homo Sapiens
  misc_feature (214)..(214): n is a, c, g, or t
  misc_feature (414)..(414): n is a, c, g, or t
  misc_feature (466)..(466): n is a, c, g, or t
  misc_feature (728)..(736): n is a, c, g, or t
  misc_feature (1059)..(1059): n is a, c, g, or t
  misc_feature (1099)..(1099): n is a, c, g, or t
  misc_feature (1105)..(1105): n is a, c, g, or t
aaaaaatgcatttttcaaagacctaacttcaattcagttattacctagtggggaaatggatccaaattttatttctgtacgacaacagttcttattgaaagttgtcagtgcagctgtccaggcccaacattcagccacaaaggtcaaagatcccacagaagaggccacacccactccttttgggaaagaccaagattggccagctctagctgtnggatttagcccatcaccttcaagttagtgaagatgttgttagaaggcattatgtgggggaactatacaactatggagttgaccacttaggagaagaggccattctacaggttcatgacaaagaggtccttgcctctcagctgctggtgctcacggggcaaaggctggctcatgcgcttctccacacccagacaaaagaanggaatggagctgcttgccagacttccacccacactgtgtacttggctgaaanaatggacccccaggaccttcaaaacactgaagtgccaattgcaacaacagctaaactagtaaataaagtaattgagcttttaccagaaaaacatgggcaatatggtctagccttacacctcattgaagctgtggaagccatatctcttccttctttatgacacttacctactggaaatagtctaaaattatgattataacatgaagtagtgcatggttattttacatagtaagacctggaattttatgggaaaagtatgtcnnnnnnnnnccttttgtaaaataaataaaagtatatacaacttttaaaaagtgcaaccctggctaaattccactcctttggttaatactgaagataaaatataaacaaatgtcaactctgttataattaatacagatgttttactgtttatttctaattcaaacacttaagtagctttattgttaaactttgctatttaaaattgggttataatttaagattatgttcttaataagattctaatatttccctaatctaaaatggttggttgtaattccaatttaaaatgtggttccatggtacagtccccccatccaggtaagcgtataggnaccacccttactcctcccctttaggtaaaatggttgaggnaaatgncccttgggtgggccatgcc

SEQ ID NO: 252669 - DNA, 491 bp, Homo Sapiens
gctatttaaaattggttataatttagattatgttcttataagattctatatttcctatctaaaatgttgttgtaattcaatttaaatgtgttcatgtacagtccccatcagtagcgtatagaacaccccactctcctttagtaaatgttgagaaaatgcctttgttgtcatgctccaaaatcccacactgggctgccacctgggagttctggataccgaaaggttcctttcccagaggttctgctgttgccatcagaggaggatgaccgtgcttgaggaggaagaatgggttcaagatcatcatattcatcagaaggggacactaaatagaacccttaacctgttgtacttgccaaaattgagaatcagagatgtgtaaaatgcagcaaattaattataatgtaagttaagatttgctttttgccaagttgcaaagttgtatccacatcaggtcactgtaaaaatgtattatcttgtaaaacttgttgtaa

SEQ ID NO: 252670 - DNA, 1290 bp, Homo Sapiens
  misc_feature (609)..(609): n is a, c, g, or t
  misc_feature (759)..(759): n is a, c, g, or t
ccctttgattctggttcatctcgatacagagaaccaaaacagctaagagaggtattatcagggttgacaactcctatgattgaatctatgggaattattcctcagaagagaatttaaaggtgtacccatatatatctctttctggagtattttatctgtctgatgttgcagtattctacaagtttccagaaagagaatagccatataaattattttcctttctgctattatttctctatatgttttatttattcagatttagagtaaaaaataagcatataaacttttattatgtgctcttaacagttttaagataaactataggatagatagaatggttattttatgcaagaaatattgtaccgcaagggtggtttggatgaagtctgactactttttttcaaacaaactattatattaaaactgtcatattttggctaagtttggacctataactacactttcattgtttgcatctctctatgaagatacgtctgtccaaacttttaaaaggcataactgtattttatgtgtttattctttatatagatagtattttatattttattctcacccgaagtattcacacaatctttttaaaaaatttgnaatggcattttgtattgccacagaggtaggatgagccatatattagtgaaatgttttattttgtaaaatataaatggattatttgccatcattagtacctctcaacttactttttagaggacaagaaacaatctgtagattggtttccanacagggaagttctccgtcctatagacaatgtttctaattaattggcttaattctgagccattaatcctgctacactttgaatgatacattaattcagactaatctttgggggctttattttgtaagttagaactttcaagggaaacatgttcaacactattattttgttataaatttataactttgttattacattgtgtaacaaatataaggtttacgagctatgagaattggtgctatcaccattagctatttgctgtaatgtcaagaaaatgttcacaagaggcaagaatgtacattttctttttagaaaaccaaatgtactttagacatgaatgcaactatttaaagaatagcttcatttatgttattccttacatgtcataagattcttacttaaacttggtcttctttcaagttgtttgtatgaagatgctgtacccacttgaacagtcctcaggtgtttacataaatactatgttttacagttttcatattttaaaatattaataaagttaatcgcaacgattc

SEQ ID NO: 252671 - DNA, 273 bp, Homo Sapiens
caacgaaaaagctttccggacttttaaatgcttactgtttttccccttcctgtctaggaaaatgctataaagctcaaattagttaggaatgacttatacgttttgttttgaatacctaagagatactttttggatatttatattgccatattcttacttgaatgctttgaatgactacatccagttctgcacctataccctctggtgttgctttttaaccttcctggaatccattttctaaaaaataaagacattttcagatctgagagctac

SEQ ID NO: 252672 - DNA, 630 bp, Homo Sapiens
agacattatgcctgatgagcgaagtaccacattatttaataatatattcaccatacactgtgacgtacgataaatgtgctcttaaagccaagtttcaaagtaattattttcatttctaactgggattgaaatggaagggttgacatgcagttggaccaaaatgactactaacactcagtttgcactgttttccctagctaaccatttgttggatgtaaacaagtaattctacgttgtacaagaatgagatgacagtccagtgcaaatgagtttttataaagcttactgcatgagaaacccagtggcctacgcaaagagaacttatatcatatcaaacataggtgtaacctgtggattagacctctactgtagacaaaacatgaacacaactaagccatacattgtcaagtaattcacacttccagtaggtgagcattttgaaaaagtgtactctctggacacaataattttggcctattgccatcaaatgcccattttccactgctggaagcaatgtcaaaaaagggctggcccaaaaaaagacccagagctgtcaatacaacactggagacagatgcaactgaataaaccctgttttacccaattgcactatttggtacctcaaaatta

SEQ ID NO: 252673 - DNA, 2355 bp, Homo Sapiens
  misc_feature (3)..(3): n is a, c, g, or t
ttntctcttgacccctctgacctcaggctcagcagaccctgggttccaccattgacaaagctaccgggatcctgttatatggcttggcctcccgactcagggatacccggcgtctctccttccttgtaagctacatagccagtaagaagatccacactgagccccagctaagcgctgcccttgagtatgtgcggagtcaccccttggaccccatcgacactgtggacttcgagcgggaatgtggcgtgggtgtcattgtgaccccagagcagattgaggaggctgtggaggctgctattaacaggcaccggccccagctcctggtggaacgttaccatttcaacatggggctgctgatggctccttgtgcctatgcttctaggagaggctcgggctgtgctgaagtgggcagatggcaaaatgatcaagaatgaagtggacatgcaggtcctccaccttctgggccccaagttggaggctgatctggagaagaagttcaaggtggcaaaagctcggctagaagaaacagaccggaggacggcaaaggatgtggtggagaatggcgagactgctgaccagaccctgtctctgatggagcagctccggggggaggcccttaagttccacaagcctggtgagaactacaagaccccaggctatgtggtcactccacacaccatgaatctactaaagcagcacctggagattactggtgggcaggtacgtacccggttcccgccagaacccaatggaatcctgcatattggacatgccaaagccatcaatttcaactttggctatgccaaggccaacaatggcatctgttttctgcgttttgatgacaccaaccctgagaaggaggaagcaaagttcttcacggccatctgtgacatggtagcctggctaggctacacaccttacaaagtcacatatgcgtctgactattttgaccagctatatgcgtgggctgtggagctcatccgcaggggtctggcttatgtgtgccaccagcgaggagaggagctcaaaggccataatactctgccttcaccctggagagaccgtcccatggaggagtcactgctgctctttgaggcaatgcgcaagggcaagttttcagagggcgaggccacactacggatgaagctggtgatggaggatggcaagatggaccctgtagcctatcgagtcaagtatacaccacaccaccgcacaggggacaaatggtgcatctatcccacctacgactacacacactgcctctgtgactccatcgagcacatcactcactcactctgcaccaaggaattccaggcccgacgctcttcctacttctggctttgcaatgcactggacgtctattgccctgtgcagtgggagtatggccgcctcaacctgcactatgctgttgtctctaagaggaagatcctccagcttgtagcaactggtgctgtgcgggactgggatgacccacggctctttacactcacggccctgcgacggcggggcttcccacctgaggccatcaacaacttctgtgcccgggtgggagtgactgtggcacaaaccacaatggagccacatcttctagaagcctgtgtgcgtgatgtgctgaatgacacagccccacgagccatggctgtgctggagtcactacgggtcatcatcaccaactttcctgctgccaagtccttggacatccaggtgcccaacttcccagctgatgagaccaaaggcttccatcaggttccctttgcacccattgtcttcattgagaggactgacttcaaggaggagccagagccaggatttaagcgcctggcttggggccagcctgtgggcctgaggcatacaggctacgtcattgagctgcagcatgttgtcaagggccccagtggttgtgtagagagtctggaggtgacctgcagacgggcagatgctggagagaagccaaaggcctttattcactgggtgtcacagcctttgatgtgtgaggttcgcctctatgagcgactattccagcacaagaaccctgaagatcctactgaggtgcctggtggatttttaagtgacctgaacctggcatcactacacgtggtggatgcagcattagtggactgctctgtggccctggcaaaacccttcgacaagttccagtttgagcgtcttggatatttctccgtggatccagacagccatcagggaaagcttgtctttaaccgaactgtcacactgaaggaagacccaggaaaggtgtgagctggaagcactgaacctacctcatcctcctggagggtgtggctaccctcgccaccccaaattccatgtcaataaagaacagctaaattctcctaa

SEQ ID NO: 252674 - DNA, 1038 bp, Homo Sapiens
  misc_feature (13)..(13): n is a, c, g, or t
  misc_feature (17)..(17): n is a, c, g, or t
  misc_feature (20)..(21): n is a, c, g, or t
  misc_feature (66)..(66): n is a, c, g, or t
  misc_feature (87)..(87): n is a, c, g, or t
  misc_feature (119)..(119): n is a, c, g, or t
  misc_feature (375)..(375): n is a, c, g, or t
  misc_feature (387)..(387): n is a, c, g, or t
ccagtattctccnggtnctnntttagtagattcatggtgtgtggagtgaccacatagcctggggtnttgtagttctcaccaggcttntgaacttaagggcctccccccggagctgctcnatcagagacagggtctggtcagcagtctcgccattctccaccacatcctttgccgtcctccggtctgtttcttctagccgagctttttgccaccttgaacttctttctcccagaatcagcccccaacttggggcccagaagggggaggacctgcatgtccacttcattcttgatcattttgccatctgcccacttcagcacagcccgagcctctcctagaagcataggcacaaggagctgcagaaaggcaaaaaangagtactccccnccaccttctttcccaaggaaaggtcctggctgaccaccagaaccagagcctgagcccagccagaccactttaagtcactcctgttccttcccccacctccttctcactcgtgcccagaagaaaaggcatgaccagagagaacaatatagccccgttccaggccctgctcacccatcagcagccccatgttgaaatggtaacgttccaccaggagctggggccggtgcctgttaatagcagcctccacagcctcctcaatctgctctggggtcacaatgacacccacgccacattcccgctcgaagtccacagtgtcgatggggtccaaggggtgactccgcacatactcaagggcagcgcttagctggggctcagtgtggatcttcttactggctatgtagcttacaaggaaggagagacgccgggtatccctgagtcgggaggccaagccatataacaggatcccggtagctttgtcaatggtggaacccagggtctgctgagcctgagtagcggcctcgcgcagctgcgcgctcagagccgagttcttgagcgtctcgcgggccttctgctcgctcaggccgaggctagtgaagagcgacagggagtctagagccgccattgcagagacaccggaaactaaaagaaaga

SEQ ID NO: 252675 - DNA, 908 bp, Homo Sapiens
  misc_feature (195)..(195): n is a, c, g, or t
gcatagccaaagttgaaattgatggctttggcatgtccaatatgcaggatttccattgggttcttggcgggaacccgggtacgtacctgccccaccagtaatctccaggtgctgctttagtagattcatggtgtgtggagtgaccacatagcctgggggtcttgtagttctcacccaggcttgtggaacttaagnggcctcccacccggagctgctccatcagagacagggtctggtcagcagtctcgccattctccaccacatcctttgccgtcctccggtctgtttcttctagccgagcttttgccaccttgaacttcttctccagatcagcctccaacttggggcccagaaggtggaggacctgcatgtccacttcattcttgatcattttgccatctgcccacttcagcacagcccgagcctctcccatcagcagccccatgttgaaatggtaacgttccaccaggagctggggccggtgcctgttaatagcagcctccacagcctcctcaatctgctctggggtcacaatgacacccacgccacattcccgctcgaagtccacagtgtcgatggggtccaaggggtgactccgcacatactcaagggcagcgcttagctggggctcagtgtggatcttcttactggctatgtagcttacaaggaaggagagacgccgggtatccctgagtcgggaggccaagccatataacaggatcccggtagctttgtcaatggtggaacccagggtctgctgagcctgagtagcggcctcgcgcagctgcgcgctcagagccgagttcttgagcgtctcgcgggccttctgctcgctcaggccgaggctagtgaagagcgacagggagtctagagccgccattgcagagacaccggaaactaaaaaaaag

SEQ ID NO: 252676 - DNA, 858 bp, Homo Sapiens
gcgaggtgaggagttgtgcaaggtatggggaaaggaaggctggcttggcgagagggcaggtttgcgggctttcgcccccttttccaaagaccaacaaagagtccttccccaactcccaactcaaccccttttggaactatgtgtggtggttgggaccctgtggcgcatccttgtcgctcgtgtccttctcatgcccggcgacgcgtctttgtggtaacgccctgctgccatctcttttcttctctatgcgaggatttggactggcagtgagaataagagacaacgattcacgtctactttctaggatgacttccatgtgctccatctcgcgcgtccctgagcatgttgaatttccaaatcctaaataagccgcgcggtgtagtttgtattatgttgcgtttctctttctgctttcctcgccctttctccatcatccatttaggctctacagagtgaaggtataaatccaaggtcatggacaaaacatctgaagttcatcgccaggactgtgatggtacaggaagggaacgtggaaagcgcatacaggaccctaaacagaatcctcactatggatgggctcattgaggacattaagcatcggcggtattatgagaagccatgccgccagcgacagagggaaagctatgaaaggtgccggcggatctacaacatggaaatggctcgcaagatcaacttcttgatgcgaaagaatcgggcagatccgtggcagggctgctgaggcctgtgggtgggacacccagtgcgaaaccctcatccagttttctctccatctcttttctttgtacaatcccatttcctattaccattctctgcaataaactcaaatcacatgtctgc

SEQ ID NO: 252677 - DNA, 507 bp, Homo Sapiens
gggtccgcttccggtagtgagaacccttccggtgggctaggtactgagcgcgcgaggctctacagagtgaaggtttaaatccaaggtcatggcaaaacatctgaagttcatcgccaggactgtgatggtacaggaagggaacgtggaaagcgcatacaggaccctaaacagaatcctcactatggatgggctcattgaggacattaagcatcggcggtattatgagaagccatgccgccggcgacagagggaaagctatgaaaggtgccggcggatctacaacatggaaatggctcgcaagatcaacttcttgatgcgaaagaatcgggcagatccgtggcagggctgctgaggcctgtgggtgggacacccagtgcgaaaccctcatccagttttctctccatctcttttctttgtacaatcccatttcctattaccattctctgcaataaactcaaatcacatgtctgcaagaaggcctccaaatatagaaacaatcccattaaa

SEQ ID NO: 252678 - DNA, 633 bp, Homo Sapiens
  misc_feature (15)..(15): n is a, c, g, or t
  misc_feature (28)..(28): n is a, c, g, or t
  misc_feature (34)..(34): n is a, c, g, or t
  misc_feature (41)..(41): n is a, c, g, or t
aattgcccctcgagncccaaaattcggncacgantttaaanccccaggtcttggcaaaaacttctgaagttccatcgcccccggactgtgatggtacaggaagggaacgtggaaaccgccatacaggacccctaaacagaatccctcacctatggatgggcctcattgaggacattaagcatcggcggtattatgagaagcccatgccgccggcgacagagggaaagctatgaaaggtgccggcggatctacaacatggaaatggctcgcaagatcaacttcttgatgcgaaagaatcgggcagatccgtggcagggctgctgaggcctgtgggtgggacacccagtgcgaaaccctcatccagttttctctccatctcttttctttgtacaatcccatttcctattaccattctctgcaataaactcaaatcacatgtctgcaagaaggcctccaaatatagaaacaatcccattagtcagcagtggaccctgtcttttattaagtgaaagaagaaactgagtctgaaagtactctaggagtagaatggtatttgccagggactggaggagggggcagtgaggagttattgtttaatgggtacagagtttcagtttgggcagatgaaaaagt

SEQ ID NO: 252679 - DNA, 2143 bp, Homo Sapiens
  misc_feature (1561)..(1561): n is a, c, g, or t
  misc_feature (1588)..(1588): n is a, c, g, or t
gacaataaaacccacagtgagaatttgaaacaggatatcctgtaccttcacaactctttagaggaggtaaacagtgccctagtggggtaccagagacagaatgatcttaaactcgagggaatgaacgagacagtcagtaatcttacccagagagtcaacctgatagaaagcgatgtggttgctatgagcaaggtagaaaagaaagcaaacctgtccttcagcatgatgggtgatagatctgccactctgaaaagacagtctttggatcaagtcaccaacagaacagatacagtaaaaatccaaagcataaagaaagaagatagttcaaattctcaggtatccaagctaagagagaaactccagctgatcagtgctcttacaaacaaacctgagagcaacaggcctccagagaccgccgatgaagagcaagtagagagtttcacatcaaagccatcagcattgccaaaattttcacagtttcttggagacccagttgagaaagctgcccaactaagacctatctccctaccaggagtttctagcactgaagatcttcaggatttattccgcaagactggccaggacgtggatgggaagctgacctaccaggaaatctggacctccctaggttctgctatgccagaaccagagagcttgagagcatttgattccgatggagatggaagatactcattcctggagctaagggtagctttaggtatctagcttcatcaggcatattttagaaatggactgcctaatatctatttacctaacaacaaaacaacccttacttacccatcagtcctctagtcctccaaactactgtagcagatactttgccaccttttaacttgtttgaagaagctatataaaagttatttttttaaagaagaagaccattttacttatgatgttcagaaatctatgatttcctacaaccagtaagatcttacattttaaaattgccagaaaaaaaattaaagccctctctgtttctctctcctttttttgaggggaggagaccttatcttttaaagctgggaaatgtatatagagagagaataagccacttttatatttcacttaaatttgccttaaattagctgcactttatagagactcagaaaatgtcttttctttaaaagataggccttttctgtttgtaaatatttaaatgaaagaaagcattgtgcatattgtgtggaaagtaggaagaatggttttgaacaggatatgaacaaatgacttattaaaaattgctgatctggtgtaggtggcagctgaaactacatccatgtctccataaggcatccctcaaaggcccaggcgctgccagggggtttgtcctggtagctggaggaaccgatttcacgggaatagacactggagacaatactgactccaggcatggctcatggaagtaggattctggttctttgttcctattccctcagctaatcccaacctgggaatcagagaagtcttggggatttttctcatttttagtactatttcagggtttatgagcataaaaagttatccattgggggagctccanttttccctgctgaggtgagctagattngccttccccacccacccacttaagtctgtcttaaagccgtagctggctcccaccaccagtaccatctccatttgaatggcagggctaaattcccccagccattatctcacactgaccacccagagctttagaagagagctgtgcttctaattttgacccagaaaaccataccccttgagattttacctagaggctaaccaagagcctaatatgtttctctgggggatgactaaagccaaaaaggctgtgagatgaaacatgtgaaataatattcagtttccttaccattaccagctcagaagtagctagaggctttctacccaaaggatgccaaagtatagcagggcaggcctggagctagggccttcacatggtggtagcaagtttttcaaatctaatacaatcaagtacaatacttcctttaaatgcttctgtggacctggcatgaaagatccctagattgaaaggaataatacctccatgtctcctgtatgttgagtctagaattgctgtgttgttcttagaagcagtctttgggcaacaacttgaaagggg

SEQ ID NO: 252680 - DNA, 995 bp, Homo Sapiens
  misc_feature (877)..(889): n is a, c, g, or t
  misc_feature (931)..(940): n is a, c, g, or t
ggggaggcgaagaacgcaaagctgagaacatggacgttaatatcgccccactccgcgcctgggacgatttcttcccgggttccgatcgctttgcccggccggacttcagggacatttccaaatggaacaaccgcgtagtgagcaacctgctctattaccagaccaactacctggtggtggctgccatgatgatttccattgtggggtttctgagtcccttcaacatgatcctgggaggaatcgtggtggtgctggtgttcacagggtttgtgtgggcagcccacaataaagacgtccttcgccggatgaagaagcgctaccccacgacgttcgttatggtggtcatgttggcgagctatttccttatctccatgtttggaggagtcatggtctttgtgtttggcattacttttcctttgctgttgatgtttatccatgcatcgttgagacttcggaacctcaagaacaaactggagaataaaatggaaggaataggtttgaagaggacaccgatgggcattgtcctggatgccctagaacagcaggaagaaggcatcaacagactcactgactatatcagcaaagtgaaggaataaacataacttacctgagctagggttgcagcagaaattgagttgcagcttgcccttgtccagacctatgttctgcttgcgtttttgaaacaggaggtgcacgtaccacccaattatctatggcagcatgcatgtataggccgaactattatcagctctgatgtttcagagagaagacctcagaaaccgaaagaaaaccaccaccctcctattgtgtctgaagtttcacgtgtgtttatgaaatctaatgggaaatggatcacacgatttctttaagggaattnnnnnnnnnnnnngaattacggcttttacagcaacaatacgattatcttataggnnnnnnnnnntcattgtaaagtatcaagacaatacgagtaaatgaaaaggctgttaaagtaaaaa

SEQ ID NO: 252681 - DNA, 531 bp, Homo Sapiens
  misc_feature (22)..(22): n is a, c, g, or t
  misc_feature (40)..(40): n is a, c, g, or t
  misc_feature (53)..(53): n is a, c, g, or t
  misc_feature (60)..(60): n is a, c, g, or t
  misc_feature (99)..(99): n is a, c, g, or t
  misc_feature (137)..(137): n is a, c, g, or t
  misc_feature (142)..(142): n is a, c, g, or t
acctttaaaaacccccaatctnaatctggaaggctgaaanatctgaaaaacangaaaccnaataaggtcggtttcctgaatgaagccttcctccttccnggcttgtgggccagctgccctttaatgctgtgtgcctnaacangaacctgtaatcccccaactaacttggaaggcaatggagggaagatggcttgagccccaggagttcccaagttgtagtgcactatcaatcatgccactgcatctgcactccagcctgggtgacagaatgaaactctgtgtctccattccccgtggtttgcttggtttggtttgatttggtctggtcttactactgctgcctctccgtttgactggcaaagtgtgactggcactgcttcaccaggggctaaaggcatagctgacgaggctccttcataaccacagccacaagtctcgactcccagtgctgcagcacccagctgtactttgaatttgcccttcagagaggctccatcagcaaaagtcaactgccacacgcctccgcacctc

SEQ ID NO: 252682 - DNA, 1020 bp, Homo Sapiens
  misc_feature (804)..(874): n is a, c, g, or t
gacatttatcctctagcgctcaggccctgccgccatcgccgcagatccagcgcccagagagacaccagagaacccaccatggccccctttgagcccctggcttctggcatcctgttgttgctgtggctgatagcccccagcagggcctgcacctgtgtcccaccccacccacagacggccttctgcaattccgacctcgtcatcagggccaagttcgtggggacaccagaagtcaaccagaccaccttataccagcgttatgagatcaagatgaccaagatgtataaagggttccaagccttaggggatgccgctgacatccggttcgtctacacccccgccatggagagtgtctgcggatacttccacaggtcccacaaccgcagcgaggagtttctcattgctggaaaactgcaggatggactcttgcacatcactacctgcagttttgtggctccctggaacagcctgagcttagctcagcgccggggcttcaccaagacctacactgttggctgtgaggaatgcacagtgtttccctgtttatccatcccctgcaaactgcagagtggcactcattgcttgtggacggaccagctcctccaaggctctgaaaagggcttccagtcccgtcaccttgcctgcctgcctcgggagccagggctgtgcacctggcagtccctgcggtcccagatagcctgaatcctgcccggagtggaagctgaagcctgcacagtgtccaccctgttcccactcccatctttcttccggacaatgaaataaagagttaccacccagcagaannnnnnnnnnnnnnnnnnnnnnnnnnnnnnnnnnnnnnnnnnnnnnnnnnnnnnnnnnnnnnnnnnnnnnnccttgttcggccgccctcggccccctgaaaaagctttcaaaacccattcttttggggcgccgggccccaataaggaaagggaacatggtccatagcgtgttccctaggaaaaccctggccatgactaagggcttggaattcccccc

SEQ ID NO: 252683 - DNA, 593 bp, Homo Sapiens
gtagcgggagggcgaaagatggcggcggcagtactgggacagttgggtgcgttatggatacataacctgaggagccgggggaagctggccttggggaaatctaccactgtcgaagacaaataaaatatagcaaagacaagatgtggtatttggcaaaattgatacgaggaatgtctattgaccaggctttggctcagttggaattcaatgacaaaaaaggggccaaaataattaaagaggttctcttagaagcacaagatatggcagtgagagaccataacgtggaattcaggtccaatttatatatagctgagtccacctcaggacgaggccagtgcctgaaacgcatccgctaccatggcagaggtcgctttgggatcatggagaaggtttattgccattattttgtgaagttggtggaagggcccccacctccacctgagccaccaaagacggcagttgcccatgccaaagagtatattccagcagcttcgcagccggaccatcgttcacactctatgatgaggagattcagactccacagtgtatatattttgccatttattttctaaaaataaacaaaaattgaaggc

SEQ ID NO: 252684 - DNA, 848 bp, Homo Sapiens
  misc_feature (732)..(736): n is a, c, g, or t
  misc_feature (738)..(746): n is a, c, g, or t
  misc_feature (749)..(752): n is a, c, g, or t
gggggcggcttccgtagcgggagggcgaaagatggcggcggcagtactgggacagttgggtgcgttatggatacataacctgaggagccgggggaagctggccttgggtgttttacctcaatcatatatccacacaagtgcttctcttgacatttctcgaaaatgggagaagaagaataaaattgtttatcctccacaactgcctggagaacctcggagaccagcagaaatctaccactgtcgaagacaaataaaatatagcaaagacaagatgtggtatttggcaaaattgatacgaggaatgtctattgaccaggctttggctcagttggaattcaatgacaaaaaaggggccaaaataattaaagaggttctcttagaagcacaagatatggcagtgagagaccataacgtggaattcaggtccaatttatatatagctgagtccacctcaggacgaggccagtgcctgaaacgcatccgctaccatggcagaggtcgctttgggatcatggagaaggtttattgccattattttgtgaagttggtggaagggcccccacctccacctgagccaccaaagacggcagttgcccatgccaaagagtatattcagcagcttcgcagccggaccatcgttcacactctatgatgaggagattcagactccacagtgtatatattttgccatttattttcctaaaattaaacaaaaattgaaggccaaaaaannnnnannnnnnnnnaannnnaaaaaacatggtcgggccgcccctcggcccttcgaggaagcttttcctagaccatttcggtttggcggcgccgggccccacctagggtaaagtgac

SEQ ID NO: 252685 - DNA, 801 bp, Homo Sapiens; identical to SEQ ID NO: 74066

SEQ ID NO: 252686 - DNA, 876 bp, Homo Sapiens
  misc_feature (539)..(614): n is a, c, g, or t
cgggccccttggcccccaaaaacttttttaagggatagggtcccctaaaggggccatgcccttaaaaaccggttttcccccctttaaggtggaagccccggtccttaaaaaggggcccctggttccaaatgggacaaccccccaacccaatccggggtaatcctttgaattataaagggtttttcccaatttgggcctttgggttaaaaaatgggctgttttaccaaaattttacccggatttttaccaaatttttaccccttccaatttccattgcccattagggttggccactttttggaaaggccgtccggtcggggccttttggtttttcccccacttgggaaaaggggattttcttccaaggggtttaaattgggtacccccagggttttcccagtcccaccgttttaaaacccgggccattgaattttaaacggccccccttaaggggaaattggccaattagccccaaattcgggccccaggataaaccttgcccaatttaaaaatcgcttgggccaagggggccacaaggnnnnnnnnnnnnnnnnnnnnnnnnnnnnnnnnnnnnnnnnnnnnnnnnnnnnnnnnnnnnnnnnnnnnnnnnnnnngtggtccagcatatgaaactcttctcaaaaacagaagaaagtcatgaccattgttgggaaagtgttttacatttccaatgaaattctattccattgatctgtttggatgattgtcttcaacctatttggctctagcccataaattgtaattgattcagtcatgtaaagaaccacttttatcttaagcttagaatttataacaatggaaagcaggaaagtggtttttcattcactctaataattgtgcagggataagctagag

SEQ ID NO: 252687 - DNA, 780 bp, Homo Sapiens
  misc_feature (72)..(72): n is a, c, g, or t
  misc_feature (92)..(183): n is a, c, g, or t
  misc_feature (189)..(189): n is a, c, g, or t
  misc_feature (503)..(536): n is a, c, g, or t
  misc_feature (602)..(610): n is a, c, g, or t
aactccaatgaccttctcacctcagcctgcaagtagctaggattacagatgtgtgccgccatgctaattttnaaaaattttttgtatagatnnnnnnnnnnnnnnnnnnnnnnnnnnnnnnnnnnnnnnnnnnnnnnnnnnnnnnnnnnnnnnnnnnnnnnnnnnnnnnnnnnnnnnnnnnnngacacncatgccagccgtcactctcatttttgagcacaggaattgtgcccaaaggctaggataaggaattaaagatgcatgccaagaaatacccacaaacattaattataaaagggagactatactaatgtttgtgaaaagcttatactaacatagagcaatatttaagttataaagttaaatgaaaaagggtataaaactgtatgaacagtacaatctcaactatgtaaaaaccaaccaaaatctgccctaaaaaggctggaaggaaatagctcaaaatgttaatgtgattgtatttaagaagtgtatctaatagggannnnnnnnnnnnnnnnnnnnnnnnnnnnnnnnnncaaatgtttctctactggggagatttttttaaaaagctattagggaaggagtagaacaaaagtggnnnnnnnnntctattagttacaaaaaactgagtctgatagaagcattgaatttgagttaatgaatctaagtctagcctataagaatttgtacatttagaaaactatgaaacagtccaggctactccatgaatccattggtaggaccagaggctggaggtggaagtgccacctggtcctg

SEQ ID NO: 252688 - DNA, 1000 bp, Homo Sapiens
  misc_feature (161)..(161): n is a, c, g, or t
  misc_feature (280)..(322): n is a, c, g, or t
cgaacaagggactgcttgaccacagtcgcagggagaaagcgagtctggagcgaacggtgagtggcgtagtggctctaaattaaatgatcgcgggggtgcgaccgggaagggtgaggtgatacatgaaactactggggggaacagcgcgccggagacacggngggataaagaggggctgatggaagtgttcaggcgataggttcgaagggtgggacgttgtggagtggggttcaagcaggggcgttgttctctgctaaaaagtggtggtacgtggcaacannnnnnnnnnnnnnnnnnnnnnnnnnnnnnnnnnnnnnnnnnngtgcggaaccgacggggcccatgtctgggggacagaaggtcaggtgcgacgtagaacaggggcgggaaaggggggtgtaggaagagggaaaaacggggggcgacaaggcaagcgggaaggggacggggaaaacgaggcggtaagaacctgtggtatgtgtatgaggacacaatgccggggaggaatggtggccgcgtaagggaccggggggaggaactggagcgggaggtttgagcgagtggcgcgagcaggagcaagagtgggcatttttctaaggctctgaaggtgagaggacttcatcattcatagatgatgtcttgtgcgcaaatacattagtttgtaggacactggggacagcaacacaacatacaaagtaaagaataaacccaagctgtttaaaccttcccaccattctcttgagtattaaaaccccagccacctttggccacttgcaggggtgtcttttcttctttattctcaatgtaaatacttgctccttgggacaccagcagttttgcttcttccactctctcctcatcacaggctaagtgtccttgctgctgcccggtgcattgctgtagcctcataatggtccttagcatctggattagccccgccttccagtaacatgacagcgatctcatgcctgtttttcgaagctgcataatgtaagggagt

SEQ ID NO: 252689 - DNA, 1153 bp, Homo Sapiens
gggggcgtagccggagccggcgacgtgaggcgggcgttgctcgcgcgacaagtagttgctgggacagcgaaatggaggggtgtgtgtctaacctaatggtctgcaacctggcctacagcgggaagctggaagagttgaaggagagtattctggccgataaatccctggctactagaactgaccaggacagcagaactgcattgcactgggcatgctcagctggacatacagaaattgttgaatttttgttgcaacttggagtgccagtgaatgataaagacgatgcaggttggtctcctcttcatattgcggcttctgctggccgggatgagattgtaaaagcccttctgggaaaaggtgctcaagtgaatgctgtcaatcaaaatggctgtactcccttacattatgcagcttcgaaaaacaggcatgagatcgctgtcatgttactggaaggcggggctaatccagatgctaaggaccattatgaggctacagcaatgcaccgggcagcagccaagggtaacttgaagatgattcatatccttctgtactacaaagcatccacaaacatccaagacactgagggtaacactcctctacacttagcctgtgatgaggagagagtggaagaagcaaaactgctggtgtcccaaggagcaagtatttacattgagaataaagaagaaaagacacccctgcaagtggccaaaggtggcctgggtttaatactcaagagaatggtggaaggttaaacagcttggatttattcttactttgtatgttgtgttgttgtccccagtgtcctacaaactaatgtatttgtgcacaagacatcatctatgaaatgatgaagttttctcacctttcaaagtcttataaacatggttgactcttgttcctgctgagttactggtacgaagcttacaagcttgtgttcccacggcatcgaataaccgttgagatagttgctaacggtgtcggaatattcttctatatcgaatttctggttaactgtggcgtaaccagttcccggggcacggggggagctctagccaccctcccctgtaacctatatccactctgaaaaaggaccgctcacagcgaacaggcagtggtctgcaaaagttccaggggcactggaaggccccaaaca

SEQ ID NO: 252690 - DNA, 400 bp, Homo Sapiens
aatgccaaactattgatgttatccatagctgttcagttaaaggagactaaaaacatacttttctgtaatttccaaatagtctacaatgtttgcttttattattgtatcattgtctgagtctacactttgctgtcttttgctctagaaagccatcaggcttggccagaattccctgtggtagcttgctcaggacctgcctaacccacgtgtttcccagcagcctcccttcttttttcctttaaattttaattatgtgtgtgtataagtgcacacactgttttccttcctttgttttctgcttagagtttagagtttagtccatctcagatactgtctttacgcgcaactttcttcacttctttcttccccctttttctcttctcttgggtggttacctcaa

SEQ ID NO: 252691 - DNA, 1246 bp, Homo Sapiens
  misc_feature (1103)..(1141): n is a, c, g, or t
agagcaactgacaactggccctagtccttgcctaggtattgttgcagcatctggcagtgagactgaggatgaggacagcatggacattcccttggacctttcttcatccgctggctcaggcaagagaaggagaaggggcaacctacccaaggagtctgtgcagattcttcgggattggctgtatgagcaccgttacaatgcctatccttcagagcaagaaaaagcgttgctgtcccagcaaacacacctgtctacgctacaggtctgtaactggttcatcaacgcccgccgcaggctcctccctgacatgctgagaaaggatggcaaagatccaaatcagttcacaatttcccgccgtggggccaagatttctgaaacgagctctgtggagtccgtgatgggcatcaaaaacttcatgccagctctagaggagaccccatttcattcctgtacagctgggccaaacccaaccctagggaggccactgtctcctaagccgtcatccccgggatcagttttggctcgtccatcagtgatctgccataccactgtgactgcattgaaagatgtccctttctctctctgccagtcggtcggtgtgggacaaaacacagatatacagcagatagcggccaaaaacttcacagacacctctctcatgtacccagaggacacttgtaaatctggaccaagtaccaatacacagagtggtcttttcaacactcctccccctactccaccggacctcaaccaggacttcagtggatttcagcttctagtggatgttgcactcaaacgggctgcagagatggagcttcaggcaaaacttacagcttaacccattttcaagcaaaacagttctcagaaatgtcatgattgccggggtgaaggcaagagatgaattgcattattttatatattttttattaatatttgcacatgggattgctaaaacagcttcctgttactgagatgtcttcaatggaatacagtcattccaagaactataaacttaaagctactgtagaaacaaagggttttcttttttaaatgtttcttggtagattattcataatgtgagatggttcccaatatcatgtgannnnnnnnnnnnnnnnnnnnnnnnnnnnnnnnnnnnnnncagactgtgcaatacttagagaacctatagcatcttctcattcccatgtggaacaggatgcccacatactgtctaattaataaattttccattttttttcaagca

SEQ ID NO: 252692 - DNA, 694 bp, Homo Sapiens
  misc_feature (182)..(182): n is a, c, g, or t
  misc_feature (434)..(507): n is a, c, g, or t
cctaaaatgtaggagttcctcagggtactccccttaaagttcagatggatctttccaaattattaccaccaagaatcaagtgcctatatcgcagttagatctatagttaaaatatttaatagagggacactcaccctcaatgcgggtgggcaccatccaattggtcaggggtatggatacancaaaaatgggacatccaaactccaggctctctggccttgggattccaggagttgcaaagtggctgtctgagttctcaggccgttggcctctgactgagagttataccatcagtttccctagttctgaagcttcaggacttggagaaagctactctactctcttccctggttctccagcttgcagacaacctatcctggaacttctcagcccccataatcgcatgatccaattcctctaataaatgtagagannnnnnnnnnnnnnnnnnnnnnnnnnnnnnnnnnnnnnnnnnnnnnnnnnnnnnnnnnnnnnnnnnnnnnnnnnggttctgtctgagagaacccagcctaatacatcatgcagcatattatcagaataaaatttgataatgtatgtacaatgctgaacacagcatcttgtatttaaaaacatattcagcatcgagatacagtaactgctgtcattgatgcctcttcttctaaaatgagatgccatcacttgtaaaattatt

SEQ ID NO: 252693 - DNA, 837 bp, Homo Sapiens
gggcttccagcagggaaaatggcgctggccatgctggtcttggtggtttcgccgtggtctgcggcccggggagtgcttcgaaactactgggagcgactgctacggaagcttccgcagagccggccgggctttcccagtcctccgtggggaccagcattagcagtacagggcccagccatgtttacagagccagcaaatgataccagtggaagtaaagagaattccagccttttggacagtatcttttggatggcagctcccaaaaatagacgcaccattgaagttaaccggtgtaggagaagaaatccgcagaagcttattaaagttaagaacaacatagacgtttgtcctgaatgtggtcacctgaaacagaaacatgtcctttgtgcctactgctatgaaaaggtgtgcaaggagactgcagaaatcagacgacagatagggaagcaagaagggggcccttttaaggctcccaccatagagactgtggtgctgtacacaggagagacaccgtctgaacaagatcagggcaagaggatcattgaacgagacagaaagcgaccatcctggttcacccagaattgacaccaaagatgttaaaaggataacttcacagtaaatcatttctcctgaaatagaggaagattctttacgttgttgtgcttgtttttaaatcatcagtatagtttaacacattctttctaagcagttttgtgtgggataatttgaagaatatattatgagtaaactccgaaaatttgtgtttatccaaaggctcaatggattatgtttctattatatacaagggttttaagtaaacataaaatttccagaacc

SEQ ID NO: 252694 - DNA, 819 bp, Homo Sapiens; identical to SEQ ID NO: 75234

SEQ ID NO: 252695 - DNA, 1444 bp, Homo Sapiens
aaaccagaaaacaaactaaagctcatgtgaccagattttaattttgagaaataaactccaaaagcattttaagccataacttatttcaaatgaataggaaaaataatgacttttgcttacatcatgcagcaataagcattcatttgttattcagaagaaaattgtatgcagtgtgtttatagttaacatcttgaggcaaatgttcacttaaattcacaatgtctccattggcctttcaccaaaagagaaatatactttaaaagcttacttcaatttgctcattaagtatgatttagccttttctaccatattatatttggtaactacatttggaagaatatcacacaaagcttcttaaaacattggtaaacattttgagatgtctttatcaagcaaccgtatcagcagagaaaagataaactcttaagactttcttttttgccccaaattatgtgtcagaaaggaaaatatatcccacttctctccttgtagacatcacaagattcttttgcattaaatgtggagcaaaaaagtaaagctggataaaagagacacaatgattctaaggcacccttagcatagggaatttcaaaatagacatttacagttggctgcttacaacatagtttaactttttttggtgagaatcactctgacatctgttaacagcataaaaaggctgactttcttttccataagtatgttgtttccaactagtttccagtctttcttccatgcccaaagttcaggcaagcctaggtaatcctgtcttagccaatggacaggatgtatttggaaatgacaaaaatgggtttaaattaggaagcaaagtactttgttatagctgaaatggttttaaatgaagcaaatggttgtaaataatgaatgacagaacatctattttgggacattatggcttaaaatgctatttacttttaacttcacaaataaacacagctgtattgttttgaaaagcaatgaaaggcatgcacctctactagcagatttagcacttctgaccaagtaagacaccaacttctttaaaaatatgcttcatgcactgtactggatttttttaagatgtaaattttaatacattatttcttttttgaacttgaacgggaaccagaatgggatgatccagatgatgacctgtggcgtctttcgggtgaccgtgatcttgttcgtctttttttgcgatcaccagatgaagaagatctagaacgacttctctttctgttcctctcaggagaagatgatgaacttgaataagatctttttcgtggggaagaagagcccctgtgggacctggagctggatcttgatttcgacccacgagatctcgaacgttctctggaactggaacgagatcttgactgcgaactggaagaacttcttgaacgggacctggacctagaccttgaacttgagggggaggatgagc

SEQ ID NO: 252696 - DNA, 529 bp, Homo Sapiens
  misc_feature (397)..(407): n is a, c, g, or t
  misc_feature (420)..(420): n is a, c, g, or t
  misc_feature (498)..(498): n is a, c, g, or t
  misc_feature (508)..(508): n is a, c, g, or t
attcggcacagcgaggaaccagaatcggattgatccagatgatgacctgtggcgtctgggtaaagtagtggtgttccgtagggttggccctggctcagggttgtttagtgttttcaccaatcacctggctttcgggtgaccgtgatcttgttcgtctttttttgcgatcaccagatgaagaagatctagaacgacttctctttctgttcctctcaggagaagatgatgaacttgaataagatctttttcgtggggaagaagagcccctgtgggacctggagctggatcttgatttcgacccacgagatctcgaacgttctctggaactggaacgagatcttgactgcgaactgggaagaactttcttgaacgggacctgggaacaacatggaacgannnnnnnnnnnccagggaccattnaattggagctttgttgatatgaacattgaaagaaagatatgtatttagagttcattttcatataaaaagataactatnacaaggtatnttactttcaaaactagtattt

SEQ ID NO: 252697 - DNA, 748 bp, Homo Sapiens
ttgaacttgaacgggaaccagaatgggatgatccagatgatgacctgtggcgtctgggtaaagtagtggtgttccgtagggttggccctgggtcagggttgtttagtgttttcaccaatcacctggcttatggaatagagaacatgttcattaagtttagatgacaacaaactagggggattatatgtggctaagataaaaatttgcagaagtggtaagaaagcaacagaatgaattccactcaaaaacagagtaattttttttacaaagaaacaaatgcagagaaacaagactgtgtgaaatcttaacatctaaactccaaaatgtgaagaagcaaaactaatcattctgtacaagtaggaatcatgagataatcctaccactgaacccagcaattaatagactttacataatctttattttcacaagctaataaaatatgaaaaatttgcaaagactacaaataaagccattaaaatgactatataattgggaacaaagagaaaattaatgaaactgagtaattagcctgttgcagaaaaggctgacagatgacagttgcattcttccaatattaaaagtgtcagtacagataaagtaacctaatataggcctttctcaaaaaagatttggactgcaaaatgaaaaatgtattagctacaaggaataatttccttatagacaaagggcatgaagcaatttgctgtggaaatgcatttacacatatttaaatgaggacagattccca

SEQ ID NO: 252698 - DNA, 544 bp, Homo Sapiens; identical to SEQ ID NO: 348

SEQ ID NO: 252699 - DNA, 674 bp, Homo Sapiens
  misc_feature (594)..(594): n is a, c, g, or t
agagaggttgagaacaacccagaaaccttcacctctcatgctgaagctcacacccttgccctccaagatgaaggtttctgcagcgcttctgtgcctgctgctcatggcagccactttcagccctcagggacttgctcagccagattcagtttccattccaatcacctgctgctttaacgtgatcaataggaaaattcctatccagaggctggagagctacacaagaatcaccaacatccaatgtcccaaggaagctgtgatcttcaagaccaaacggggcaaggaggtctgtgctgaccccaaggagagatgggtcagggattccatgaagcatctggaccaaatatttcaaaatctgaagccatgagccttcatacatggactgagagtcagagcttgaagaaaagcttatttattttccccaaccttccccaggtgcagtgtgacattattttattataacatccacaaagagattatttttaaataatttaaagcataatatttcttaaaaagtatttaattatatttaagttgttgatgttttaactctatctgtcatacatcctagtgaatgtactaagttcacggcanaatgtcattggtcttccttctaccctgctgaagtgttgtggggtcttccatggttcatcaagtgaaacactttggtttct

SEQ ID NO: 252700 - DNA, 289 bp, Homo Sapiens
attaataatacttattttaatctgttccctttagtatgtctttatacagttcccctcgtgtatatacactgatataactacaatttaaaagccactaattatctgttttttattttgtaagtaacaagatatagacatttgaatgccaatgtcttattctggagagacactggagctgaagttcaacaatgatcacacttattacctggcaataaaaacacaaccatctttccagtcaggtcaaaatatcctactttttgcctttctaccaattcccaaacattcacag

SEQ ID NO: 252701 - DNA, 599 bp, Homo Sapiens
  misc_feature (460)..(492): n is a, c, g, or t
  misc_feature (532)..(532): n is a, c, g, or t
  misc_feature (547)..(547): n is a, c, g, or t
  misc_feature (566)..(566): n is a, c, g, or t
  misc_feature (574)..(574): n is a, c, g, or t
gccaggattaccaactaattagaagggtgttactgaaggcatcggatgggagagagtaagtgctggtactgtggttttgaggcagtgtgtgagtctgattttgcctgatgatatcatttgctaaacattatactttgtgtttttgtcacacagataagcctcaagtgcacattcagatgacttatcctctacaaggcttaacccgggaaggggacgcgcttgagttaacatgtgaagccatcgggaagccccagcctgtgatggtaacttgggtgagagtcgatgatgaaatgcctcaacacgccgtactgtctgggcccaacctgttcatcaataacctaaacaaaacagataagggtacataccgctgtgaagcttcaaacatagtgggggaaagctcactcgggttatatgctgtatgtatacgatccccccacaactatccctcctcccacaacannnnnnnnnnnnnnnnnnnnnnnnnnnnnnnnnttcctttaccttcattcacaggttttcccgaggcagggtngaaggaagggttcgnttcaggggcgttgggttcntgcccttnttccgttgggcttcttgggcgttgg

SEQ ID NO: 252702 - DNA, 815 bp, Homo Sapiens
tcggcacaggggactccttgcggggcttcagttgcatctaaatagatgtgagagttgaaagacctataaggggcttttctcgctttatgatgtcttcttcttattattattttttcctcttgttgatgaaatgtcagggtgaaagggatagccaaatggactaaagcacaagtgccactctagttactcggcagagtccccaataaaggtctaccacaataccaccacacatccgctttgggatgaacaagggctgactgagtgataagctcttgaaaattcttaagctcactgcatcccttcaggtctccaaggaatgctaagtctcctccctgccatgagagacacgtagtaaacttagtgttgggagatggaagctggatggccctcgggggcttgtacctggcagggactttgggatatagcagagagagcttggcatgacttattactccaggctatagaatcctggaaaagagctaccatgcagcccatgcctggccgactggaggaccaccttagtggaaggtttaacctgcagatggaatatttgatccatttcaaccaggcatttgcatcttggtatgctgtcttaattgccaaagtttgttttaagtctttaacttttatgatcctctagtaaaatgaatgcttcctttagcaccaatttttattagtttttagacaaaagaaagctaaacgctattttatatttactaatgcttcctgtatgacttttataccagataagctaaattttacctttatattagtgtgttattaatgttaaaattaattttaataaaaccttgtag

SEQ ID NO: 252703 - DNA, 683 bp, Homo Sapiens
  misc_feature (499)..(499): n is a, c, g, or t
  misc_feature (502)..(502): n is a, c, g, or t
  misc_feature (562)..(562): n is a, c, g, or t
  misc_feature (610)..(610): n is a, c, g, or t
atatagcaggagagagcttggcatgacttattactccaggctatagaatcctggaaaagagctaccatgcagcccatgcctggcccgactggaggaccaccctagtggaagggggacaatcagggtctctggccctgcccatgtgcacaagcatgcctaattgcttttgtttaacctgcagatggaatatttgatcccatttcaacccaggcatttgcatccttggtatgctgtcttaattgcccaaagtttgttttaagtctttaacttttatgatcctctagtaaaatgaatgcttcctttagcaccaatttttattagtttttagacaaaagaaagctaaacgctattttatatttactaatgcttcctgtatgacttttataccagataagctaaattttacctttatattagtgtgttattaatgttaaacttaattttaataaaaccttgtagacctatttatccaattttaatgtctgaccataaagtaagngtnttatagactccttttaaccttttataatttttgttaaagagcaggttagtgctttaaggnaaacctgttgtgcttttattttaatgtccagttcacaggaaaactggntgatacacctttaactttagccaatatgtttacacacagaattaccttcacaattaacatttcaaaacttgct

SEQ ID NO: 252704 - DNA, 1617 bp, Homo Sapiens
  misc_feature (809)..(880): n is a, c, g, or t
ataaggccacaagtatctcactttctctgcagaaatcaatctttacttcatcagagagacctaaagcgattcttacaaggagcttgctgcaagaaacacggtcattcaatcacattgaggagggtccacatggcattgagagggtgctgcccgctcaatgcccagcagcagctctggaaggcagtgctcagccccatcaccactgtcccgtggatgcctgtgtacctcttgccttttctgggcttgcgtttctctcctctagtgggtggggatgactttcaatgactttcaaaacttcccctgaaggaagaatgataaggagaaatgtctgttttgaggaaagggctttgaattccccagatactgaacaatttgtgtttgtgactgatggagaatttcaggaatgaatgagaaagcctttgcgaaactatgcaacagtttacatccagtccatgtgaagtatttgtctaaaacagagcaaactgaagaccaaattattctcctgttgaggtccgtggatggcagatttaaagggaagaaccacaaaggcttgcaaagataggagaggctccatctctaatgcatgtagaagctccttacgggtgcccatcaagagcatagcttggaagccaccatgctgtgcggaactgcgtcagggcaaatgtcacagcaggatttccccaacccagctccatcatcacagacacagagagctgcaggggaggcctgcccactgttttgtcgactctgccctcctctggcagcatagatccttaggtgctcaataaaggtgtgctgtattgaactgnnnnnnnnnnnnnnnnnnnnnnnnnnnnnnnnnnnnnnnnnnnnnnnnnnnnnnnnnnnnnnnnnnnnnnnntgtctgtccgcccgctccctcccatttaatcagccttaacaacaccactcggctcggccgcgcgcgcccccccagtgcgctgaccgagcaatgaggagaacgcgttgttttcggtaagaacacccccttttactaaatccccacggtctttgttacccccaaccaatacaaacgaaacacggtccgcctgtgtgccacatacggaacacgtcgtctcatactaccacacccctctacccgtctacaccaccacgaagcgccctattttaccgtcgaaatattataacgcgagacgccgggacgaacactcccaggtccgcaccctctataatcaatatatgcagtggccagctcccgccgccgcccctttcttcctctactcactcacgaccctatgttgcctgcgcgctgccacacacaattatataaaccgcgctccctccgaccccctcgcctattggcacgacctcccatcatcccgccaggtgccgatctctaatgttataaacctgcgctgcactccgccctctaggtcactcacccccactactgtgtctttcctcggcgcgccggatgcacaaaattaaagactctcccgcgcgatgtagcgcacaaaaaagcgcccggcatgccatcatctatcactatcttctcccactagatacatgccacccccccgctctacttatatcatacgcgcgatggaatagcctcaactgtactacctctggggggcc

SEQ ID NO: 252705 - DNA, 2082 bp, Homo Sapiens
  misc_feature (1884)..(1884): n is a, c, g, or t
  misc_feature (1898)..(1898): n is a, c, g, or t
  misc_feature (2040)..(2040): n is a, c, g, or t
  misc_feature (2074)..(2074): n is a, c, g, or t
  misc_feature (2076)..(2076): n is a, c, g, or t
ggtccgagataaaagagccgtgggcaaggcgggccccatgttattaaaggtaaaggagatcgagaaggacaaagtcagaatggagtatacattacaaagaaatgggaagagggaatttatttatgttctgggtttgtcaccatcctatattgaaactggtaacttacacactttataatagacaacaaaaataaatgttcaatatatacagccttcgcatggactatctgactatacacaggcagagtgataacacaatctaatcttcatcataatctgtgcacaaaaagacaccaaacagacaacatgtgcacatcacagtgaaatgacatcacaggtccagtgaaaattcagcataatacaaaatggactgctctattgcaaatgacatctttctaaatgcccagctcttactcagtagtaatttacccagagtctgaagcagagattggttgtgtggctataagtctcttgagtgagacaacctctgcagataagtttgctatcccctgcttcaaatacaagttgtctggctctgagtctttgtagccactcagttctttgctatccacaactccagatttgaaactattctgagttttgccactcagttctttttgatgccagtgctccgatttgagagaccaatcttgaatgttagtcacttgcactgagaaaggagtaagagaagaatgtaccatacttggggcactatgcttttcgagttcgaaatgtcttttagatgtcatgtcaataggtgaggaaagtttttgcgtggcctcaaattcattatcaaaggcttctactttgatctgcatggctttggctttgatccggagcttgtgtggcaaggcagaggaattcacttctggaactttaaccacagttgcatgcacatgcttgagttcaactggagaatggatggggcccttggggacctgttgctcgtcttctccatcagatgactttcctaccacaccatcatcagtttccgacgttctcggggagttgctggaggatcggttgacttgcagtagtgggggagagtgtgagtacccagagaaagaattccccatatagttttgatagatggacgctgtgtaagagcctcggtcatctcttggctcccttgtgtagctctctaattccatcggctcttgcttgataatctggaacttgttttcaggacttctgcagcttccctgcacagagctctcctgcgtgtgttctactgaggacacttctgaaacatcggacagcgagctttgtggagagtgtttaatgacagaaatacaactacttgacaccatcgagggttcgtgctcgtccacaaatgaactcacattggatttggaagtctggtaatcttgaaagtacacagctgtagaattactgagtttctgaatctcttgagcatatgctgtggagctaattaaaccaaactttaattttagtgaaagcagctcagcttttaaagtggcgttttcttctcccagtgcaattagtttgttctctaaaaccaggtcattcagtcgacgcttctcacgagatcttttggcagcttcattatttttccgccttttttcccaatacatagcatctttcttttcatcaggaatgaaatcccgtttcctccgacatgcaaaagatttgtttcttccccacacttccttcactgagaagcacctcctcacctgttgcggagtcttctgacacttccgttaaagcagaattaaggaccatcatcttgtccacattgctactggcatcaagagacgcctgctcctttttgacggtctgcatttttctcagctgcatcagaaacaaccttaccctatctatgtgtgtaggagaacaaattaatttccccgtattctcaagctntttaaaaactctgntttaaaatccatcaatattcttccttttgttctaccgtctgggataaatccgtcaggctccttattgaatgaagttgggcctccttcgttatcgtgttcctgctctcgggccggcgaggagaaagaaaggggcggccgggantcgggccgccgttttttggggctcgggccgggcngngcctcc

SEQ ID NO: 252706 - DNA, 598 bp, Homo Sapiens
  misc_feature (75)..(109): n is a, c, g, or t
aggctggtacggtccggaatgacgggatatcgtcgacccacgcgtcggagaggacaaccagaatcccttggacannnnnnnnnnnnnnnnnnnnnnnnnnnnnnnnnnncttcttcttcttcttccttaaagacatttaagctaaaggcaactcgtacccaaatttccaagacacaaacatgacctatccaagcgcattacccacttgtggccaatcagtggccaggccaaccttggctaaatggagcagcgaaatcaacgagaaactggactttttaaaccctcttcagagcaagcgtggaggatgatggagaatcgtgtgatcagtgtgctaaatctctctgcctgtttggactttgtaattatttttttagcagtaattaaagaaaaaagtcctctgtgaggaatattctctattttaaatatttttagtatgtactgtgtatgattcattaccattttgaggggatttatacatatttttagataaaattaaatgctcttatttttccaacagctaaactactcttagttgaacagtgtgccctagcttttcttgcaaccagagtattttttgtacagatttgctttctcttac

SEQ ID NO: 252707 - DNA, 613 bp, Homo Sapiens
agaatgaaatataagcatatattgcatgctgcatatttctatcggtcaaaccagccaaccaacaaattgatcctacaatcatttttcaaattttaggtgtttttctttaaattattcatcaaactactacatatacaagctatccaagaatgcaaacaaggtgacattgagatgggtagtggctgcacataggtattccaagaacgactcattcttctccaccaagctcatcattacattttgcaacttaggaagatctgccaacttacaaattctgtttgccttacaaaaatcgctgatctattatatacaatacttttatcacacaaatctctcccttagggtcatgattcactatcaaaaatctttcacagccctcttaagccagtaaagtctcttttattaatacttgagttttctttatggaaatgtaagtgttaatgagaattaactatgaataagtagtttcataacacaggtagaatgatggcaataatattttgactaattgttttacctttcagattcagaattacagtgataatcgttaagagaaaagagaaacagaaaaaatgactcacatgtatttttctcaaaatatcaattctgaaat

SEQ ID NO: 252708 - DNA, 1258 bp, Homo Sapiens
  misc_feature (1037)..(1044): n is a, c, g, or t
  misc_feature (1046)..(1046): n is a, c, g, or t
  misc_feature (1048)..(1056): n is a, c, g, or t
  misc_feature (1058)..(1078): n is a, c, g, or t
  misc_feature (1080)..(1112): n is a, c, g, or t
  misc_feature (1114)..(1118): n is a, c, g, or t
  misc_feature (1120)..(1149): n is a, c, g, or t
  misc_feature (1151)..(1154): n is a, c, g, or t
  misc_feature (1156)..(1157): n is a, c, g, or t
  misc_feature (1159)..(1159): n is a, c, g, or t
  misc_feature (1167)..(1180): n is a, c, g, or t
  misc_feature (1188)..(1191): n is a, c, g, or t
  misc_feature (1194)..(1194): n is a, c, g, or t
  misc_feature (1199)..(1202): n is a, c, g, or t
tgttatgaaactacttattcatagttaattctcattaacacttacatttccataaagaaaactcaagtattaataaaagagactttactggcttaagagggctgtgaaagatttttgatagtgaatcatgaccctaagggagagatttgtgtgataaaagtattgtatataatagatcagcgatttttgtaaggcaaacagaatttgtaagttggcagatcttcctaagttgcaaaatgtaatgatgagcttggtggagaagaatgagtcgttcttggaatacctatgtgcagccactacccatctcaatgtcaccttgtttgcattcttggatagcttgtatatgtagtagtttgatgaataatttaaagaaaaacacctaaaatttgaaaaatgattgtaggatcaaaaaaggcagatgaaattacttaatactcagtgttttggagagtattccttttagtttgttggttggctggtttgaacgatagaaatatgcagcatgcaatatatgcttatatttcattttaatttctgatatataatgaacttcttgggagaggtactgaatctttgatgtttttttgtcattgttctcaagtgcaatataacaatgtaaccaaatctagataatttcaaagttgtcattaatttagtaagcctaatataaacaaatatttgtattatttttgttagcaggaaagagtgattaagtgaggttatttacccctaaatggtccattctgcattgtatttcaggctggaaatgaattattctttaccagttttgaaacactttgaaatatcctaaggtaacttggaagctgtgtagtatatcaaattaatttgctacctaataacatagaaagtaaatatctttgtggtcacccacattgggtgagacagaaaatgaatctgttctaaaatttgtaatttgctaacttgatttgagttagtgaaaactggtacagtgttctgcttgatttacaacatgtaacttgtgactgtacaataaacataagcatatgggtaccaannnnnnnnanannnnnnnnnannnnnnnnnnnnnnnnnnnnnannnnnnnnnnnnnnnnnnnnnnnnnnnnnnnnnannnnnannnnnnnnnnnnnnnnnnnnnnnnnnnnnnannnntnnanaaaaaaannnnnnnnnnnnnnaaaatttnnnnccnccccnnnncccaccaaaaaattttaaaaaaccttttttgtcgggggggcccgccccccaaagag

SEQ ID NO: 252709 - DNA, 493 bp, Homo Sapiens
gaaatgatattaattttattgcatcattttactgactagaacgccagacttagagtggatataagtataaaaataaccaaattcttacaaataatactttgctgctacagtactgaataattagtggaggttgcaattataatacaactttaaataacattctcataatgggtttaacacaatcaaccaggggctaaggtttaaaggtttacaaagagaaatccaggacaacatgaaaactcccaaagttcatattccagctaaatgcttcatttaaccgtcaatccaccaacacaaacattaacaaaactcagagcaactcatgatgaaacagtcgttctctttttaggacaggccaaggttaatacagaaaggtaaatgattcggattagtttcccaggcagaactgattccatcccatccctggcctatcccatcctccctacccaagaaatctgtaatgaagtatgttaagtgcattttaaaaatctta

SEQ ID NO: 252710 - DNA, 906 bp, Homo Sapiens
  misc_feature (624)..(624): n is a, c, g, or t
  misc_feature (647)..(647): n is a, c, g, or t
gtattgtatcctcacgtttccggagattgacgttgctcttgtgttctcgcgagaggcgggaaagggcgcagggtttgaaacatggcggacgacgtagaccagcaacaaactaccaacactgtagaggagcccctggatcttatcaggctcagcctagatgagcgaatttatgtgaaaatgagaaatgaccgagagcttcgaggcagattacatgcttatgatcaacatttaaatatgatcttgggagatgtggaagaaactgtgactactatagaaattgatgaagaaacatatgaagagatatataaatcaacgaaacggaatattccaatgctctttgtccggggagatggcgttgtcctggttgcccctccactgagagttggctgaaacaaagaatttgtcctgtatggaaaacgggagactttgtacagtggcctctctaaaagtacaaaacattcataagagaaacctgcatacattttgatattaagaaataattccggggattcttccactcctgaaatgagttgatttgcagataactcacaacttcttaagctaaatggtattttcatttttctcaagctctccaataaatatgaccaccaagatgcagttggnacaaaaaaggcgcggggaagaangcccttgtcggccgcctcccccctcgaaaagctttccagaccattgcgttggggggcgcgggccccagtagggaaaggggaccatggcccaaagctggtttcccaagggagatcccgggttctggaccaagggcctggaatctccccaccacataaaaaaacccccccggggggcaaaccgagcgggttcggaaccaaatttccaaacgggagttgcgcgggggccattaccggggctgctataaacggcgggtgcccc

SEQ ID NO: 252711 - DNA, 2113 bp, Homo Sapiens
gctgggtggcgaattcggcacgaggaattgctgagccagtcacctgtgttccaggagccgaatcagaaatgtcatcctcaggcacgccagacttacctgtcctactcaccgatttgaagattcaatatactaagatcttcataaacaatgaatggcatgattcagtgagtggcaagaaatttcctgtctttaatcctgcaactgaggaggagctctgccaggtagaagaaggagataaggaggatgttgacaaggcagtgaaggccgcaagacaggcttttcagattggatccccgtggcgtactatggatgcttccgagagggggcgactattatacaagttggctgatttaatcgaaagagatcgtctgctgctggcgacaatggagtcaatgaatggtggaaaactctattccaatgcatatctgaatgatttagcaggctgcatcaaaacattgcgctactgtgcaggttgggctgacaagatccagggccgtacaataccaattgatggaaatttttttacatatacaagacatgaacctattggtgtatgtggccaaatcattccttggaatttcccgttggttatgctcatttggaagatagggcctgcactgagctgtggaaacacagtggttgtcaaaccagcagagcaaactcctctcactgctctccacgtggcatctttaataaaagaggcagggtttcctcctggagtagtgaatattgttcctggttgtgggcctacagcaggggcagccatttcttctcacatggatatagacaaagtagccttcacaggatcaacagaggttggcaagttgatcaaagaagctgccgggaaaagcaatctgaagagggtgaccctggagcttggaggaaagagcccttgcattgtgttagctgatgccgacttggacaatgctgttgaatttgcacaccatggggtattctaccaccagggccagtgttgtatagccgcatccaggatttttgtggaagaatcaatttatgatgagtttgttcgaaggagtgttgagcgggctaagaagtatatccttggaaatcctctgaccccaggagtcactcaaggccctcagattgacaaggaacaatatgataaaatacttgacctcattgagagtgggaagaaagaaggggccaaactggaatgtggaggaggcccgtgggggaataaaggctactttgtccagcccacagtgttctctaatgttacagatgagatgcgcattgccaaagaggagatttttggaccagtgcagcaaatcatgaagtttaaatctttagatgacgtgatcaaaagagcaaacaatactttctatggcttatcagcaggagtgtttaccaaagacattgataaagccataacaatctcctctgctctgcaggcaggaacagtgtgggtgaattgctatggcgtggtaagtgcccagtgcccctttggtggattcaagatgtctggaaatggaagagaactgggagagtacggtttccatgaatatacagaggtcaaaacagtcacagtgaaaatctctcagaagaactcataaagaaaatacaagagtggagagaagctcttcaatagctaagcatctccttacagtcactaatatagtagattttaaagacaaaatttttcttttcttgatttttttaaacataagctaaatcatattagtattaatactacccatagaaaacttgacatgtagcttcttctgaaagaattatttgccttctgaaatgtgacccccaagtcctatcctaaataaaaaaagacaaattcggatgtatgatctctctagctttgtcatagttatgtgattttcctttgtagctacttttgcaggataataattttatagaaaaggaacagttgcatttagcttctttcccttagtgactcttgaagtacttaacatacacgttaactgcagagtaaattgctctgttcccagtagttataaagtccttggactgttttgaaaagtttcctaggatgtcatgtctgcttgtcaaaagaaataatccctgtaatatttagctgtaaactgaatataaagcttaataaaaacaaccttgcatgaaa

SEQ ID NO: 252712 - DNA, 517 bp, Homo Sapiens
  misc_feature (80)..(102): n is a, c, g, or t
aaatacaagagtggagagaagctcttcaatagctaagcatctccttacagtcactaatatagtagattttaaagacaaannnnnnnnnnnnnnnnnnnnnnnaaacataagctaaatcatattagtattaatactacccatagaaaacttgacatgtagcttcttctgaaagaattatttgccttctgaaatgtgacccccaagtcctatcctaaataaaaaaagacaaattcggatgtatgatctctctacctttgtcatagttatgtgattttcctttgtagctacttttgcaggataataattttatagaaaaggaacagttgcatttagcttctttcccttagtgactcttgaagtacttaacatacacgttaactgcagagtaaattgctctgttcccagtagttataaagtccttggactgttttgaaaagtttcctaagatgtcatgtctgcttgtcaaaagaaataatccctgtaatatttagctgtaaactgaatataaagcttaata

SEQ ID NO: 252713 - DNA, 452 bp, Homo Sapiens
  misc_feature (295)..(316): n is a, c, g, or t
caaatcctccccttccctccgcagggcggggaaacaagtggtggggtgaaatggcctatggcccggggtaaggtgcccccagtgccccccttggggtggattccaaggatgtcctgggaaatgggaaagagaactggggagagtacgggttcccatgaatatacagagggtcaaaacagtcacagtgaaaatctctcagaagaactcataaagaaaatacaagagtggagagaagctcttcaatagctaagcatctccttacagtcactaatatagtagattttaaagacaaaannnnnnnnnnnnnnnnnnnnnnaaacataagctaaatcatattagtattaatactacccatagaaaacttgacatgtagcttcttctgaaagaattatttgccttctgaaatgtgacccccaagtcctatcctaaataaaaaaagacaaattcgttaa

SEQ ID NO: 252714 - DNA, 2876 bp, Homo Sapiens
  misc_feature (1128)..(1144): n is a, c, g, or t
  misc_feature (1248)..(1258): n is a, c, g, or t
  misc_feature (1751)..(1751): n is a, c, g, or t
ttttttttaaagggaaatcattcatttattaaggatcgcaagacaacatcttaatttctgtagtacgatttaaatgttttacttctttgataaagcagagtacaatagaaaaaaaacaattagtttccagtaatatctatatctctaatcagaattaagtcttccaagacatattacctggaaataaaagcctgttacaataagcaaagcttcaaccagagcggctacttttcgtgccaggaaaaagttcatccctataggaggaatgatgtgctatgtaaaatggctgtaaggtcacagccttgagggcattggaagtatattatcctattccacattaagtatttcagcgaatttcaaacatcagtttatctgcaaccatgctggcaacctttaactgatatttcaatcaaccggtaaaaaataaattaagaaatcccttcacggatattccgtgatttacactgttaaaaggtacactgttcattaacatgtaattctggttcagaattacctttgagactccttgctcaaaatttggttaacagtaagaatcttccagaaattcaagttcttattaatcaataatttgtcagctaggatacattcaggcatcagctgcaactacagaataggtgcacagcctcagcgctttggaaagacataatctagaacactactagcagacaaaaaattacctgcaactggatagcgtaagtgcagtatagcgagacaaaacatatattcatatgttggcttgtttaagcctcaaaccctcgaccctttgttgagatcccataattttattcctatgattttaataactcaagttccaggaggactataagtctaatttgtactccaaaccaaacagcagtgcagttcgctactactgaggctgaatctgtacagacttcaagaccaagtccagaagacagttattatctaaaaaataattacttgaatacatagatgatccttcagagattttacctataacctatttcttgatgaaggttatttaatgcactggagataactgtgacttactgatcaaatacttgaatacttatacttacctgggatttcatttctgctgaaagaaataggaagaacaggactcacttnnnnnnnnnnnnnnnnnctttagaaaggaaggtaaaaatcttacacacactatcacttttggaagcagcatagaaggggcagtcaagggtaaaacactggtgaaacaggtcaaaattaggnnnnnnnnnnnaactatattattatcaatgacagtaccacaactgtgcccttgataattagtaatcactcctaaaaatcttcatttggcaccagatggtgtgtttaaaacaccctaggatgttttgaatcaggcttgattttgttagttgagttacaggagaattttaagggtgagggtatgggggtcagggaagaaaaggaaatgggaaatggaccagaaaaaatcttgagtcatcatctaaatcaacaaagcactgatagctccaaatattaggtcagacactaaaacgactgatataggctcaagtggtttataaaacctataaaaagactacaccagcaaagtccctgtcaatctgtcagagttcagaaactaaaacagggagtaacattttagcttaaaaccttatctcaagagaatcatatacacttcacatgaataaaaatacctgaaaccaaacatttttaaaagctccagtacccaaaatataaagaaaaaaaantccagaagactgaatcaatccatggaatcacaaagcggcccggacaatctatatctcccctccacactaaccatcccatggaagaccaagggagatcagaccttccagacctatgcaccatctggtcgccgcaaaattctacggagattccttgtggaaaagcagtttcccatcttttgtgtctctccctaccatgcaggaagcaagtctggctgtgctattctattaccattatatatcacccatctgcaacaaggtactgtacagacaagtaagaagtatgttatctagttccctttcccccagaaggttgaggctcaggtataggggtaattctcctgtgcagtctttatttatgctgactcagtgacttcaacaggcttaatcatgtggtcaggtttgttgccagctgcataatgctcccacatctgtagatagaaccgctctagttccattgtgtattgtttggtgttgaacagagggctagatattctttgcttccagactttgccacgaactttcttcaggttagcaataagctcaagacaacctaagcaagtgagctgggatgctgcaactcgagaagcaagagtctctcctggcatagtcaccatgggggtccctgcccagaggacatccatccctgtggtgtgcccattacagagtggagtgtccaagcagacatcagccagctggcctctcctgacgtgttcctctttaggagcaacaggtgaaaaaatgatacggttctggggcaggcccatgttttgtgcatactgttgaatattaggttctcctactgctggaaaacgctcttcttgagtcactattgggaacacgcttcagaatgtttgcccacatctgcaaagtagaagggtcagttttatacccctcattaaagttacagtatacgatggcatcttctggtaaacagtactgagaacgggtggttacaataatggtacggggaacctcctctccagttgcagccttattgttgatctgagtagttgccagtccattgctaatactgaatccattaattgttatttgaatctgtcctcggttaatcatttcaataactgcttctgcaatagtattcataggaataacaggcatattaag

SEQ ID NO: 252715 - DNA, 1445 bp, Homo Sapiens
  misc_feature (1284)..(1315): n is a, c, g, or t
gatattctgagataacctgtagttaccactaactttgtgacaaaattataaaaatccacagccatctatgaatctgtaggcagacctgaagtttgaacgactggtgaagacatctgattttctttatagccaagttaggataacaaaatgcaaacaagtcattaatatttactatatgcaagatacagaaagatgaaggaaggagtaagaagttatccttcgtggaactattcaaagcaaaaatgcaaaataccagggaaagctttgaagaaccaagatttgagcaggttcttagaatatagattggattggatttgatttcaagaaagatgaacgtgtaaagcagaagtgggaagccaaaaacttttttccaaattagaattaagcattctttcaatgaacatttggaaatcaaggtagaaaaatatccctagggcctagctgaggagtctgtatgttgttgggttttgatagtaaccagtccaagattttgttattagacgtgggtttctgaatagacaggcatttctgaacagacatgacaggatcaaaacaatgtttgagcaaactgcccttcatctactgtggatatgttgggggatgatggaatatagtgaaagataatgggtgctcatacagcagtctagacttaaggtgattcaactactatatattaaactagattatcttttattttttaattttgaaatctggatgctcaagctctgcctgcacaaccacatgaggaagaaggaacaatgacaacaaaaataacactaaatttaaatttaagagtactacttttaggaaatagacaaaccattatttgggtacaactaaaggcaactggcatggactcaaatattttggggaagaaaaagactaaaagttctaaggaagaaaatgcgaaccttgatagtttgaaatagttaaaaagacagtgtagaaactgcttaggcagtttgattatggactattagatgatacttgggtctgataatggtataaggagaataaagtatttagggatccaatattacgcctgcagctttttccaaatagttcatgggggagggggatgtgtaagtggttaactgaagtctaactagataggtttgttgtaagcttaggatgtttacagttcttcatgttaagttgagcgtgatgggaagggaaagaatgctgatctttaaatttttgtccttagttaagttctgtatttagtgaattaattgcatcctaaaaagtcaaacttgaaaagcacattttaaatggcaaatctannnnnnnnnnnnnnnnnnnnnnnnnnnnnnnnagtaaacagaccatcagaagagaacaatggtacagagcaggggtcagcagatggattttgtaaagcatcaacttgtaaatattttcaagtttattagctgtatggctctggtttctgttccctgttccaa

SEQ ID NO: 252716 - DNA, 1459 bp, Homo Sapiens
cctacctctcagagcacaagagtgggatcattgacctaaaggaactagaggctgctatccagacagatactagcctggggtcagtcatgactgtgaacaatgagattggagtgaagcagcctattgcagaaatagggcggatttgcagttccagaaaggtatatttccatactgatgcagaccaggctgttggaaaaatcccacttgatgtcaatgacatgaaaattgatctcatgagcattagtggtcacgtgcgtgtggaggccctgcacagtggaggggggcaggagcgcggtatgcgcgctgggacagtgcccacacccttagaggtggggctgggggctgcgtgtgaggtggcacagcaagagatggagtatgaccacaagcgaatctcaaagttgtcagagcggctgatacagaatataatgaagagccttccagatgtggtgatgaatggggaccctaagcaccattatcccggctgtatcaacctctcctttgcatatgtggaaggggaaagtctgctgatggcactgaaggacgttgccttatcctcagggagtgcctgcacctctgcatccctggagccctcttatgtgcttagagcaattggcactgatgaggatttagcgcactcttctatcaggtttggaattggccgcttcactacagaggaggaagtggactacacagtggagaaatgcattcagcatgtgaagcgtcttcgagaaatgagccctctctgggagatggttcaggatggcattgacctcaagagcatcaagtggacccaacactagaagaatagggccctgactttgtgctggtctggcccctcctgcctcaccaacccgtgcacaaccagacaccttgttacacctagtggatgctctagattggtatagaccagttgacttcagcatcagtccacctctatgacagaaacacaagaaaactgtctttccctagcttcagttccttgggtgtggagcactccccatttcttctcgggtcttaaagtgtgtggacattttcatcccgaagccatagagacatttgctgtcatattgctgctgggcacatctgtgctcttggtgaggagagcaagaggaaccagaagaagtctctttggtcagggaccatgatgctctacatggacatttgagtcttcgtcttctgctgctgctcggctggaccagcttctttaacagcaagcataatccacttcaatgtaatattttctgtagctccaaaggctatctcttcatattgactgcagacagactgaatggacagtttcttagagggcttgtctcctttctacccttgtcctctttcctttcctttgacctaatggagctagaaatatgtctgtgactccaccagttattctaataatttgttttcttgaaaattgttaatttcaagactggagaaataaactcaccttctatttaaa

SEQ ID NO: 252717 - DNA, 437 bp, Homo Sapiens
atatcttttgtatagccctacaaggcagtgttttgtaatttggtttccattatgaagatccagtacttggcagccatagtttagacaatattgttcagtgctgtttgcttgcatgttaacaacaaaaccttttagaggacccacaaatcatgatattgaacacagttccgaggcattcagagcatcagagcaagtaccatggcaatacatgtgtagactgttggagatgtcccgggccaatttcaagaaagaaaactgtaaatactagttctacttgctctgaaattatgagtttatgcgttttcccagccctccgaatcactgactggggcgttttgtgccccagcaataactggcagcatggcatacctgcagtaccccttacaatattaaagcaaagtttttattctaaaacagaataaaactgttcaataaaa

SEQ ID NO: 252718 - DNA, 2153 bp, Homo Sapiens
  misc_feature (1877)..(1885): n is a, c, g, or t
accggtccggaattcccgggatcggacggcggaggctacgtgaagagaggcgcggcgtgactgagctacggttctggctgcgtcctagaggcatccggggcagtaaaaccgctgcgatcgcggaggcggcggccaggccgagaggcaggccgggcaggggtgtcggacgcagggcgctgggccgggtttcggcttcggccacagctttttttctcaaggtgcaatgaaagccttccacactttctgtgttgtccttctggtgtttgggagtgtctctgaagccaagtttgatgattttgaggatgaggaggacatagtagagtatgatgataatgacttcgctgaatttgaggatgtcatggaagactctgttactgaatctcctcaacgggtcataatcactgaagatgatgaagatgagaccactgtggagttggaagggcaggatgaaaaccaagaaggagattttgaagatgcagatacccaggagggagatactgagagtgaaccatatgatgatgaagaatttgaaggttatgaagacaaaccagatacttcttctagcaaaaataaagacccaataacgattgttgatgttcctgcacacctccagaacagctgggagagttattatctagaaattttgatggtgactggtctgcttgcttatatcatgaattacatcattgggaagaataaaaacagtcgccttgcacaggcctggtttaacactcatagggagcttttggagagcaactttactttagtgggggatgatggaactaacaaagaagccacaagcacaggaaagttgaaccaggagaatgagcacatctataacctgtggtgttctggtcgagtgtgctgtgagggcatgcttatccagctgaggttcctcaagagacaagacttactgaatgtcctggcccggatgatgaggccagtgagtgatcaagtgcaaataaaagtaaccatgaatgatgaagacatggatacctacgtatttgctgttggcacacggaaagccttggtgcgactacagaaagagatgcaggatttgagtgagttttgtagtgataaacctaagtctggagcaaagtatggactgccggactctttggccatcctgtcagagatgggagaagtcacagacggaatgatggatacaaagatggttcactttcttacacactatgctgacaagattgaatctgttcatttttcagaccagttctctggtccaaaaattatgcaagaggaaggtcagcctttaaagctacctgacactaagaggacactgttgtttacatttaatgtgcctggctcaggtaacacttacccaaaggatatggaggcactgctacccctgatgaacatggtgatttattctattgataaagccaaaaagttccgactcaacagagaaggcaaacaaaaagcagataagaaccgtgcccgagtagaagagaacttcttgaaactgacacatgtgcaaagacaggaagcagcacagtctcggcgggaggagaaaaaaagagcagagaaggagcgaatcatgaatgaggaagatcctgagaaacagcgcaggctggaggaggctgcattgaggcgtgagcaaaagaagttggaaaagaagcaaatgaaaatgaaacaaatcaaagtgaaagccatgtaaagccatcccagagatttgagttctgatgccacctgtaagctctgaattcacaggaaacatgaaaaacgccagtccatttctcaaccttaaatttcagacagtcttgggcaactgagaaatccttatttcatcatctactctgtttggggtttggggttttacagagattgaagatacctggaaagggctctgtttcaagaannnnnnnnnccagataatcaaattattttgattattttataaaaggaatgatctatgaaatctgtgtaggttttaaatattttaaaaattataatacaaatcatcagtgcttttagtacttcagtgtttaaagaaataccgtgaaatttataggtagataaccagattgttgctttttgtttaaaccaagcagttgaaatggctataaagactgactctaaaccaagattctgcaaataatgatttggaattgcccaataaacattgcttgatgttt

SEQ ID NO: 252719 - DNA, 694 bp, Homo Sapiens
  misc_feature (12)..(12): n is a, c, g, or t
  misc_feature (27)..(27): n is a, c, g, or t
  misc_feature (56)..(56): n is a, c, g, or t
  misc_feature (117)..(117): n is a, c, g, or t
  misc_feature (582)..(582): n is a, c, g, or t
ttaaaggaaatncccgtgaaatttatnggtagataacccagattgttgcttttttngtttaaacccaggcagtttgaaatggctataaaagactgactctaaacccaagattctgcnaaataaatgattgggaattgcacaataaacattgcttgatgttttcttgtatgtctacattaaacttgagaaaaagtaaaaattagaacactgtatgtagtaatgaaatttcagggacccagaacataatgtagtatatgtttttaggtgggagatgctgataacaaaattaataggaagtctgtaggcattaggatactgacatgtacatggaaaattctagggacaggagcatcattttttccttacctgataccacgaaccagtgacaacgtgaatgctgtattttaagtggttgtatgtttattttcttgagtaacaaatgcatgaaaaattaatgcttcacctaggtaagatcattggtctgtgtgaaatcacaaatgttttttccttcttggttgctgcagcctgggtgggatgttcatgggagaagctctgttctctattattatggctgtgtgcccnttgcttctccctctgcttttatcttttccacagttgagggctggggtatgttcttttcaaaggaaatgggccatggaatatgtgtaaagtatactttttggaaaatgagctt

SEQ ID NO: 252720 - DNA, 329 bp, Homo Sapiens
ccaaacccattaattatatagtttattgatctgcttggactttttacaataattaaataattatagatttaagtacataattttaataacatttaaaatgtaagcctcttttcattttacattagtcataaaagcatttgaatctttgtaaataatagtaaattattaccaaatatggagaaatcaattcagcaatctgtgtgaacacaagaggttttccttttacattttaaaaaatgccgaaaatgagatatcaaaattaggaaatgacatcttcttttcattaggcatgtaattattttacaaaatgtgttgacttccctagatca

SEQ ID NO: 252721 - DNA, 828 bp, Homo Sapiens
taagttaaaatagtgggtttaaattccatttacaaagcattagaatggtacctaatctcttctgggttaaatgtgatcggaatgtattgcaatgtgaacgaaattatagaaaattaaaagactcagcctctttaggaagttcgctaaaatggccagggtacgtttaacctatttatatcttcgttaatccaagcatctaatgaacaaaaaactgccacagcgacgtcataattctataagggcaatagttgccaaattccctctggtattattagccattcggccttggaatagattagccttcaaatttataatttttagtataatttgaaacgattgaagtggcttaagattgattgagcttttctttgatcacattttctgcttcttagctaaagtaattttatttaaattgacatggcttaagttgtcatcattttctgctcttctagaatgatgtgtagagaaaacttgaagatactatcccttctttggcattcttctcttaatgctaagctattatttatcataatatgcatatatttagttggatctgggatcattctaacactcataactaccattttagttaagtccaactttataattggtacaatgcaatgatttgggaaaggtctattagtaattatttaagtattacatatttttatggaagtctttagaaggtgaagatcttactgagaaactattttctaaataaatttaattttcttttgtatttgtatcagatcatgcctactgtatgttagattttagactattttaaaagaaaccgtagattatataaaaatttttttgctgttttcc

SEQ ID NO: 252722 - DNA, 577 bp, Homo Sapiens
gggccccagctccagaacttccggccagcgcagccattttggcttcctgaccttgggctacggctgaccgttttttgtggtgtactccgtgccatcatgtccgtcctgacgccgctgctgctgcggggcttgacaggctcggcccggcggctcccagtgccgcgcgccaagatccattcgttgccgccggaggggaagcttgggatcatggaattggccgttgggcttacctcctgcttcgtgaccttcctcctgccagcgggctggatcctgtcacacctggagacctacaggaggccagagtgaaggggtccgttctgtccctcacactgtgacctgaccagccccaccggcccatcctggtcatgttactgcatttgtggccggcctcccctggatcatgtcattcaattccagtcacctcttctgcaatcatgacctcttgatgtctccatggtggaccttccttgggggggtcactgaaccctgcctgggtgggggtcccccccttggtaaccaattaaaaatcctattttaaaacctttataacacccacaaaacataaaagaaccaggcc

SEQ ID NO: 252723 - DNA, 642 bp, Homo Sapiens
cacggttcaccttacccttctggggccccgccccccaaaagaaatgttttgagaaaattttttgaaggcccgaggcgggccgccaaggactgtttttggggggtggtattaggccttattttttaaagtttaaatagattttattgttacaagggggaccccaccaagcagggtcagtgacccccaaggaggtcaccatggagacatcaagaggtcatgattgcagaagaggtgactggaattgaatgacatgatccaggggaggccggccacaaatgcagtaacatgaccaggatgggccggtggggctggtcaggtcacagtgtgagggacagaacggaccccttcactctggcctcctgtaggtctccaggtgtgacaggatccagcccgctggcaggaggaaggtcacgaagcaggaggtaagcccaacggccaattccatgatcccaagcttcccctccggcggcaacgaatggatcttggcgcgcggcactgggagccgccgggccgagcctgtcaagccccgcagcagcagcggcgtcaggacggacatgatggcacggagtacaccacaaaaaacggtcagccgtagcccaaggtcaggaagccaaaatggctgcgctggccggaagttctccc

SEQ ID NO: 252724 - DNA, 400 bp, Homo Sapiens
  misc_feature (24)..(24): n is a, c, g, or t
gggaaactgcaaggacttaaaganccctaggggaatactgactcccaaggtgcccttctttcttgtgctctgtgtaggaattggccgttgggcttacctcctgccttcgtgaccttcctcctgccagcgggctggatcctgtcacaccctggagacctacaggaggccagagtgaaggggtccgttctgtccctcacactgtgacctgaccagccccaccggcccatcctggtcatgttactgcatttgtggccggcctcccctggatcatgtcattcaattccagtcacctcttctgcaatcatgacctcttgatgtctccatggtgacctccttgggggtcactgaccctgcttggtggggtcccccttgtaacaataaaatccatttaaactttaaa

SEQ ID NO: 252725 - DNA, 1148 bp, Homo Sapiens
ggggggtccggcctgctcgccgtccgctccgtccgcccttagacctgttgcccagcatccctgcagttcgcggtacagtctctagtagagcgcgtgtatagaggcagagaggagtgaagtccacagttcctctcctccaagagcctgccgaccatgcccgcgggcgtgcccatgtccacctacctgaaaatgttcgcagccagtctcctggccatgtgcgcaggggcagaagtggtgcacaggtactaccgaccggacctgacaatacctgaaattccaccaaagcgtggagaactcaaaacggagcttttgggactgaaagaaagaaaacacaaacctcaagtttctcaacaggagggaacttaaataactatgccaagaattctgtgaataatataagtcttaaatatgtatttcctaatttattgcatcaaactacttgtccttaagcacttagtctaatgctaactgcaagaggaggtgctcagtggatgtttagccgatacgttgaaatttaattacggtttgattgatatttcttgaaaaccgccaaagcacatatcatcaaaccatttcatgaatatggtttggaagatgtttagtcttgaatataatgcgaaatagaatatttgtaagtctactatatgggttgtctttatttcatataaattaagaaattatttaaaactatgaactagtttcattaattgaatttgctaagtggagttatttctcattgctaaactggtttttttcaaattctagatctctgctaactttagtaaatgaacactaaagtggtgagctttgataatgcattttgtggatacaaaaccatcgcctcatcactttctagaatgaaaggctgggggcattgctcaccttttgcgtgaagaaaagacctgtcccttagagccagtttttgcttaaggggaggacagaccgtcgtcacccagtggaccacgtgaatgaatggatgcagtgcatgctttagaagcaccgcatacctccttttacaggtacagagtaagtggtctggctactgagggaaagagtcatgatttgaatccgagtcttctgtaagacaatgacttcatgaaggtgaaaaatcagttttatggttattaaagtaaaaatttaccttgggt

SEQ ID NO: 252726 - DNA, 799 bp, Homo Sapiens
  misc_feature (234)..(283): n is a, c, g, or t
  misc_feature (358)..(392): n is a, c, g, or t
agccaagcttccattccaaggggggcggacataaccaaagaaacgggaaggttaatttaacaggatcccccggtgaggattttaccggggtttcctggtggaaaattcagggcggatttggatgaaaccagggcgcaaaaattgaaaagtcctctagcaattgtgagcggcaaacaatttcccccaggaacacctatgcccatgattcgccaagctcgagattctggccaggcnnnnnnnnnnnnnnnnnnnnnnnnnnnnnnnnnnnnnnnnnnnnnnnnnnggccattatggccgggtgcagagagaagacaaaaagaggctgcatctcggggaattttagatgttcaatctgtgnnnnnnnnnnnnnnnnnnnnnnnnnnnnnnnnnnnccaaattgctacatccgggcccccaccagaaggtggacttaggtggacagtttcataaagcataacatgagtagaagaatctactgccaataactgtttattatctgcaatcaagtgggcttcatcaatttaatttcttctctttgagtaaatgaagattcagactttgtaatattattgcccttaagtgcaatgctaaaaaaacgttgattttcaagcttagagaatggctagacttttcattaaatactgattttcctacatttgctcttctgcagttagtgggtgatttgctatttttcttagtagttaaaaaatggaactaaatagtgaatatttatacactgcatgtaaacattctgcatatacctctaagattaaaattcgcagttgtcttttcatccttt

SEQ ID NO: 252727 - DNA, 1035 bp, Homo Sapiens
  misc_feature (439)..(582): n is a, c, g, or t
cattcgccctatccctgcttgcccgctcccacagcttcctgagggctaattctgggaagggagagttctttgctgcccctgtctggaagacgtggctctgggtgaggtaggcgggaaaggatggagtgttttagttcttgggggaggccaccccaaaccccagccccaactccaggggcacctatgagatggccatgctcaacccccctcccagacaggccctccctgtctccagggcccccaccgaggttcccagggctggagacttcctctggtaaacattcctccagcctcccctcccctggggacgccaaggaggtgggccacacccaggaagggaaagcgggcagccccgttttggggacgtgaacgttttaataatttttgctgaattcctttacaactaaataacacagatattgttataaataaaattgtnnnnnnnnnnnnnnnnnnnnnnnnnnnnnnnnnnnnnnnnnnnnnnnnnnnnnnnnnnnnnnnnnnnnnnnnnnnnnnnnnnnnnnnnnnnnnnnnnnnnnnnnnnnnnnnnnnnnnnnnnnnnnnnnnnnnnnnnnnnnnnnntttttggcccctttggcccaaggctttttaaatttggaaaagtttttttattgggcccaaattggggcctatttggccaaattccccttaaggggggcgttttaaaaataaatggcccgggtttaaaaaacgtggattttgaaaaaccctggggttccccaatttaaagcccttggaaaaaaacccctttttcacaagtgggtttaatccaaaaaggccccaccctatacgcttttccaaaaatttgccacccttaatgggaaagggaaaatttaagccataaaattttgtaaaaaacccggtaaaatttttgtaaaacaacttattttttaaccaaaggccaaatttggaaaaactcttttaatctaaaaaatattccccaaaagcggttaagtttctcccattttgaaaaaggccccctttttaaaaacggggctccaacctaaaggggaa

SEQ ID NO: 252728 - DNA, 749 bp, Homo Sapiens
  misc_feature (557)..(557): n is a, c, g, or t
  misc_feature (627)..(627): n is a, c, g, or t
  misc_feature (641)..(641): n is a, c, g, or t
  misc_feature (649)..(649): n is a, c, g, or t
  misc_feature (653)..(653): n is a, c, g, or t
  misc_feature (655)..(655): n is a, c, g, or t
  misc_feature (660)..(660): n is a, c, g, or t
  misc_feature (679)..(679): n is a, c, g, or t
  misc_feature (693)..(693): n is a, c, g, or t
  misc_feature (698)..(698): n is a, c, g, or t
  misc_feature (716)..(716): n is a, c, g, or t
  misc_feature (721)..(721): n is a, c, g, or t
ctgaggcagagctcgggggctgtcggtggggaccttgcaggagggcaccccaagcccgcccggcccgcccaacccagcccctgcgcgcagcccgggccgagtaggaccccgcgcgcccctcgccatggcggcgccctcgcggctcctgatccgcgggggtcgcgtggtcaacgatgacttctcggaggtggccgacgtgctggtggaggacggcgtggtgcgggcactcgggcacgacctgctgcctcccgggggcgctcctgcggggctgcgggtcctcgacgccgccggcaagctcgtcctgcccggaggcatcgacacacacacgcacatgcagttccccttcatgggctcgcggtccatcgacgacttccaccagggcaccaaggctgctctctcaggaggcaccaccatgattattgatttcgccattcctcagaaaggtggctccctcattgaggccttcgagacctggcgaagctgggctgatcccaaagttagctgcgactacaagcctcatgtggcagtgacgtagtggagtgaccaggttaaaagangaaatgaagatctgacatggtgacagacctgagctgacgaagccgtctatcgtcaaggaaatggacgaantgcccagtcatgcngaaatganactnantgcanagggagcaagaaatgtggnttcgggataccagnctganggcacgactgtgccgcanagcantgagcatagcaactggagctacatatca

SEQ ID NO: 252729 - DNA, 1146 bp, Homo Sapiens
  misc_feature (1057)..(1057): n is a, c, g, or t
gggggctgtcggtggggaccttgcaggagggcaccccaagcgcgcccggcccgcccaacccagcccctgcgcgcagcccgggccgagtaggaccccgcgcgcccctcgccatggcggcgccctcacggctcctgatccgcgggggtcgcgtggtcaacgatgacttctcggaggtggccgacgtgctggtggaggacggcgtggtgcgggcactcgggcacgacctgctgcctcccgggggcgctcctgcggggctgcgggtcctcgacgccgccggcaagctcgtcctgcccggaggcatcgacacacacacgcacatgcagttccccttcatgggctcgcggtccatcgacgacttccaccagggcaccaaggctgctctctcaggaggcaccaccatgattattgatttcgccattcctcagaaaggtggctccctcattgaggccttcgagacctggcgaagctgggctgatcccaaagtttgctgcgactacagccttcatgtggcagtgacgtggtggagtgaccaggttaaagaagaaatgaaaatccttgtgcaagataaaggtgttaactctttcaagatgtttatggcctataaagatctgtacatggtgacagacctggagctgtacgaagccttctctcggtgcaaggaaattggagcaattgcccaggtccatgcggcaggccctgagggccacgagctgtgccgcccagaggcagtggaggcagaggccacgctgagagccatcaccatagccagcgctgtgaactgtcctctctacattgtgcatgtgatgagcaagtctgcagctaaggtgatagcggatgcaaggagagatgggaaggtggtctatggtgaacccatagcagccagtcttggcacagatggcactcactactggaataaagaatggcaccatgcagaccaccatgtcatgggtccaacttttgcgaccagacccctcaacacccgacttcctcatgagatctgttggctaatgatgatctaacccacacagggactgataactgcactttcaacacctgncaagaagctcttgggaaggatgaatttacccaagatccccaattgtgttgaattggtgttgaggatcggatgtcccgaaatatgggaat

SEQ ID NO: 252730 - DNA, 1349 bp, Homo Sapiens
  misc_feature (240)..(259): n is a, c, g, or t
  misc_feature (612)..(612): n is a, c, g, or t
gaaaatgctttggctctggaaattctccactatctgagagataggtttatttcccccatttcatggatgaggaagtaggcctggaggcattaattaacttgtcagtttcctatgtgtagtaaatggcaaatggagaattctaacttagatctgtctcacttcaaaggtcacactgttgatcactacaatgtattagtttgggtggtcaaaatgagacccacaataatttgttatttgtcnnnnnnnnnnnnnnnnnnnnatttcaaaactctgctcaagcactgacagctctcgctgaatccagcagagggttctgctgcatagtcggtcaccaacgaggtgagattctgtggaagatccataatgcacagagacaggaaagtggaaagcgtacccaattgctagaatctgaagcaactgctctgagagtgttaggagaggtacaaagaagcactgcaaactcaggtgagtaggactgaaactagaagaaaagggtcggatgttggaaaggacagcaggagacacttgtgggactcagaagggcctgaggataaggcagaggccccagtgagtgtccctgggcctctgtctgaagcagaataatacccacanaaagtgggacaatccagattctcaaggttgccaggaatttctgtgaaaggcctaaggggatggggaggcacgtgataaatttataagattctttttttaaagctctcgcaattcataaagggagctacacttaactttgaactcaagaaaataaaccacaagagagaaatgaaatgttctctttcagacttgcacacctacccctgtggagcgtgcaccctataagggagaagtcgccacactgaaatccagagtgacaaaagaagatgccacagcagggaccaggaaacaggcccacccctgaagtgtgtgccatcggtaaaaaaatcagaggaaaggaggctgccattcccttcacagccaaacattgtcaacccatggagaagcaggccttattcaactccctaggatcctttagaaaaaattcaccactataggcttctttgattttctttcagaagcaattgctgtctttctcactgtgtttttgttgctgcataagattgaaggtataaatttatattattgtgatggaaaggctgtgtggaaattcattgatgatactttaaaatgtcatctttgcttgtactagatttcttacttagaatttttaaaaatcattttcttgtttaaatagtttctttttttaaaaaaatggttacattagttttaaaatagctctgtgattttactttttattgtaattaataaacattgagatcttcattttatacctt

SEQ ID NO: 252731 - DNA, 889 bp, Homo Sapiens
  misc_feature (646)..(685): n is a, c, g, or t
cagggaccaaggacctgaaagggaggatgtggccagagagtggggtattagtgagtttaaggtttcagatgtggtggtccaaggtggtagaaatgggaggctggcccttcatttcctggtgtctgtgttcctcaagatgagaacagggctcaaagactgagtagacagtgagccaaaatggaagtccagcaaagcatttagacagatacagaaagtgagcagaggcttggcctggtgagggaagggcaggagtccccccatttcctgagcactcagtgcacacccgatgcagtgcttcaaattctgtggctgcaggagctgtgggccttgttctgtgttggatactcggtgtttggtgtactctctggggctgtgtgagctcagtaaatatctgctgaatgaatgaagaaaatgctttggctctggaaattctccactatctgagagataggtttatttcccccatttcatggatgaggaagtaggcctggaggcataattaacttgtcagtttcctatgtgtagtaaatggcaaatggagaattctaacttagatctgtctcacttcaaaggtcacactgttgatcactacaatgtattagtttgggtggtcaaaatgagacccacaataatttgttatttgtcnnnnnnnnnnnnnnnnnnnnnnnnnnnnnnnnnnnnnnnnatttcaaaactctgctcaagcactgacagctctcgctgaatccagcagagggttctgctgcatagtcggtcaccaacgaggtgagattctgtggaagatccataatgcacagagacaggaaagtggaaagcgtacccaattgctagaatctgaagcaactgctctgagagtgttaggagaggtacaaagaagcactgcaaactc

SEQ ID NO: 252732 - DNA, 1778 bp, Homo Sapiens
  misc_feature (77)..(126): n is a, c, g, or t
  misc_feature (1634)..(1635): n is a, c, g, or t
  misc_feature (1741)..(1741): n is a, c, g, or t
ttaaaatgaagatctcaatgtttattaattacaataaaaagtaaaatcacagagctattttaaaactaatgtaaccnnnnnnnnnnnnnnnnnnnnnnnnnnnnnnnnnnnnnnnnnnnnnnnnnnttctaagtaagaaatctagtacaagcaaagatgacatttttaaagtatcatcaatgaatttccacacagcctttccatcacaataatataaatttataccttcaatcttatgcagcaacaaaaacacagtgagaaagacagcaattgcttctgaaagaaaatcaaagaagcctatagtggtgaattttttctaaaggatcctagggagttgaataaggcctgcttctccatgggttgacaatgtttggctgtgaagggaatggcagcctcctttcctctgatttttttaccgatggcacacacttcaggggtgggcctgtttcctggtccctgctgtggcatcttcttttgtcactctggatttcagtgtggcgacttctcccttatagggtgcacgctccacaggggtaggtgtgcaagtccggtctcgctgctttattcgtttgtaaatatattcagcaaatggttttcgaggaataaacttcccatctcctgccgtgacactgaacactccggcttcatataccactttgcctcttgaaatagtcacaaggggcaccccgtggcaaaccatgccctcgaaaatgttgaagttaacagcctgatgatgagtttttgctgagatagtccttgtgccttttgggtcccaaataacaatgtcagcatctgatcctacagctattcttccttttcttggatagagattaaaaattttggctgcatttgtgctggtaactgccacaaatctgttttcatccattttaccactatgcacgcctttttcccatattacggacatccgatcttcaacaccattcaccccattggggatcttggtaaaatcatccttcccaagagctttctggcaggtgttgaaagtgcagttatcagtccctgttgtggttagatcatcattagccaacagattcatgaggaagtcgggtgttgaggggtctggtcgcaaaggtggacccatgacatggtgggctgcatggtgccattctttattccagtagtgagtgccatctgtgccaagactggctgctatgggttcaccatagaccaccttcccatctctccttgcatccgctatcaccttagctgcagacttgctcatcacatgcacaatgtagagaggacagttcacagcgctggctatggtgatggctctcagcgtggcctctgcctccactgcctctgggcggcacaagctcgtggccctcagggcctgttatccccagagccaacatcttctttgctccctctgcaattaagtctccattttccgcatggacctgggcaattgctccaatttccttgcaccgagagaaggcttcgtacagctccaggtctgtcaccatgtacagatctttataggccataaacatcttgaaagagttaacacctttatcttgcacaaggattttcatttcttctttaacctggtcactccaccacgtcactgccacatgaaggctgtagtcgcagcaaactttgggatcagcccnntcgccaggtctcgaaggcctcaatgagggagccacctttctgaggaatggcgaaatcaataatcatggtggtgcctcctgagagagcagccttggtgccctggtgnaagtcgtcgatggaccgcgagcccatgaaggggaact

SEQ ID NO: 252733 - DNA, 961 bp, Homo Sapiens
  misc_feature (847)..(894): n is a, c, g, or t
aacgtgtgatatcttttcagacagttcaacacgtggccatctgcacaagacttaaccccagaggttgacctaatggacctggttagacatttgtgttaatgagaggcacagtttgacaacggtctggttttctacatattcaggcactgcaccttttcacattttgacaacctcttattccctgcataaatcctgttcctgcagggatttggataatgagggcttgaatggcaaagccctctgtgctacatgccatgttctttcattattgaatgttgtgtctttaacaggactatctagcccaaagtctcaacatttttgtcattttcagacgaccagaattattcttctaatctaggatgattttgttaaaaattcagggaaagattagcaagagaaaggaatgcgattcaatgctataacatgctattaatgacatttataggagcaggattagtgtttactttgattatagcatttcttgggggttaggtttgaattctgcatctctttgtgagggagaatgttacagtgagttcctttcattctcttcaaaggtaaaaaaatcagaggaaaggaggctgccattcccttcacagccaaacattgtcaacccatggagaagcaggccttattcaactccctaggatcctttagaaaaaattcaccactataggcttctttgattttctttcagaagcaattgctgtctttctcactgtgtttttgttgctgcataagattgaaggtataaatttatattattgtgatggaaaggctgtgtggaaattcattgatgatactttaaaatgtcatctttgcttgtactagatttcttacttagaannnnnnnnnnnnnnnnnnnnnnnnnnnnnnnnnnnnnnnnnnnnnnnntggttacattagttttaaaatagctctgtgattttactttttattgtaattaataaacattgagatc

SEQ ID NO: 252734 - DNA, 478 bp, Homo Sapiens
  misc_feature (114)..(151): n is a, c, g, or t
  misc_feature (402)..(402): n is a, c, g, or t
  misc_feature (431)..(431): n is a, c, g, or t
  misc_feature (436)..(436): n is a, c, g, or t
  misc_feature (441)..(441): n is a, c, g, or t
  misc_feature (446)..(446): n is a, c, g, or t
  misc_feature (464)..(464): n is a, c, g, or t
caaatggagaattctaacttagatctgtctcacttcaaaggtcacactgttgatcactacaatgtattagtttgggtggtcaaaatgagacccacaataatttgttatttgtcnnnnnnnnnnnnnnnnnnnnnnnnnnnnnnnnnnnnnnatttcaaaactctgctcaagcactgacagctctcgctgaatccagcagagggttctgctgcatagtcggtcaccaacgaggtgaggattctgtgggaagatccataatgcacagagacaggaaagtgggaaagcgtacccaattgctaggaatctgaaggcaactgctctgaggagtgttagggagagggtacaaaggaggcactgcaaacctcaggtgagtagggactgaaactaggaaggaaaaggtcnggatgttgggaaaggacagcaggagacanttgtngggantcagnaaggggcgtgaggatatnggccagaggccctt

SEQ ID NO: 252735 - DNA, 962 bp, Homo Sapiens
  misc_feature (11)..(11): n is a, c, g, or t
atttcggcacnagaagcaaagttagaaggcaaataacagattgagagaaaacatttagaatatgtgagatcaaggcgtgggtatccagaatatgtaaggagtacccatcagtcaattaaagttaatgactatgatggtccagtggtcgggggaaggcgaggattaccctcccggagcgttgtctgcgactcggcggaggctccaacttccagtggcccggtcgggaaagatcagagcctcctaagaaatatccagaagtcaagccatggatccacctgcacgtaaagaaaaaaccaaagttaaagaatctgtcagcagagttgagaaggccaaacagaaatcagcccagcaggagctgaagcagagacaaagagcagagatctatgccctcaacagagtcatgacagaactggagcagcagcagtttgatgagttctgtaaacagatgcagcctcctggagaatgaggccccaggttcaaaccagatgggatcctgagagctttgagagggtgttgccagttttaagctgagatggcccatttggagccttacagaactagaccagaagacatttgtggataaatctgaactcacttcctgtgtgtaacttctaacttcactggttcctcccatctgaattggccacatgcttgctgaagagacttgttttcttcttctaagacagtggttttgttttttggggttttatctataaatgcaaataaacgctcacatataacactttttctattgcttgagaaaaaccagtgtttctcatgaaactctatatcttctcccaaaattcaagttctcgtactagttaattggacaagttcagatttcgatttcccttgaccaattatccttgctacgtgatggattacctcttaatcgccctcccttttaactcgctgtttaggtatttgcacgcaattgggcgttcctttggcccaattccccg

SEQ ID NO: 252736 - DNA, 356 bp, Homo Sapiens
  misc_feature (234)..(251): n is a, c, g, or t
tcccctgagagctttgaagagggtgttggcccagtttaaagcctgagatggccccatttgggagcccttacagaacctagacccagaagacatttgtggataaatcctgaacctcacttccctgtgtgtaacttctaacttcactggttcctcccatctgaattggccacatgcttgctgaagagacttgttttcttcttctaagacagtggttttgttttttgggtttttttnnnnnnnnnnnnnnnnnncacacacacaaaacactttttctattgtttgagaaaaatcagtgtttctcatgaaactctatatcttctccaaaaatacaaataaaatactaataaaatgttaaa

SEQ ID NO: 252737 - DNA, 623 bp, Homo Sapiens
cttctctaaaagcctggtgatacagctctggctttctgagcacactacggatctggaaaatactggaaaatgtgatacttagaatactttggctgctaagaaacttcctctccattgcagaatagctgagccaagtgagtgagtttgcagaaagcaggtggtgagctcctgcctgctggaggttgccatggagggccattcctgcccggcaacagcaccgtcctgcacggagccacttggccagaagggtgcaaggctgctggtgtcaaagcaagagggcctacagggaaagggccctttcctcaggggatgtagcttttttaaaagatttgggaacacttggaggatttgctaaaatgagcctcagaaggaaaattggttttctaacctgtgactttttgaaatgaattattcctttcagtctttatttttcaaagaaacaatgtgtattgaagtacctagatttgtttgataatcaacaaatctttcctttttcaatgaacatattctgaatgtggtttctgtcttagaccaggaggacagagtttgctttcatattttccctgtaagtaagagggcttatttattttaaataaagagtaattatttaaaaaaatgaagtc

SEQ ID NO: 252738 - DNA, 1040 bp, Homo Sapiens
gggcacgaggagctgttcctcgcgggccgccgggtgctggtcaccggggcaggcaaaggtatagggcgcggcacggtccaggcgctgcacgcgacgggcgcgcgggtggtggctgtgagccggactcaggcggatcttgacagccttgtccgcgagtgcccggggatagaacccgtgtgcgtggacctgggtgactgggaggccaccgagcgggcgctgggcagcgtgggccccgtggacctgctggtgaacaacgccgctgtcgccctgctgcagcccttcctggaggtcaccaaggaggcctttgacagatcctttgaggtgaacctgcgtgcggtcatccaggtgtcgcagattgtggccaggggcttaatagcccggtgcgtgcccggggccattgtgaggccaccgagcgggcgctgggcagcgtgggccccgtggacctgctggtgaacaacgccgctgtcgccctgctgcagcccttcctggaggtcaccaaggaggcctttgacagatcctttgaggtgaacctgcgtgcggtcatccaggtgtccagattgtggccaggggcttaatagcccggggagtcccaggggccatcgtgaatgtctccagccagtgctcccagcgggcagtaactaaccatagcgtctactgctccaccaagggtgccctggacatgctgaccaaggtgatggccctagagctcgggccccacaagatccgagtgaatgcagtaaaccccacagtggtgatgacgtccatgggccaggccacctggagtgacccccacaaggccaagactatgctgaaccgaatcccacttggcaagtttgctgaggtagagcacgtggtgaacgccatcctctttctgctgagtgaccgaagtggcatgaccacgggttccactttgccggtggaagggggcttctgggcctgctgagctccctccacacacctcaagccccatgccgtgctcatcctacccccaatccctccaataaacctgattctgctgcccaaaaatccttgacggctcg

SEQ ID NO: 252739 - DNA, 960 bp, Homo Sapiens
  misc_feature (437)..(437): n is a, c, g, or t
  misc_feature (442)..(442): n is a, c, g, or t
  misc_feature (446)..(446): n is a, c, g, or t
  misc_feature (448)..(448): n is a, c, g, or t
  misc_feature (766)..(766): n is a, c, g, or t
  misc_feature (844)..(844): n is a, c, g, or t
  misc_feature (880)..(880): n is a, c, g, or t
  misc_feature (918)..(918): n is a, c, g, or t
  misc_feature (925)..(925): n is a, c, g, or t
  misc_feature (933)..(933): n is a, c, g, or t
  misc_feature (942)..(942): n is a, c, g, or t
gggaaggatagagagagatgtagggagaagtgaccgagcaaagagtagaggatagagaattcaagaagtgaaagtgtcgtaatgaaacaagaaagatgaaatagggtgaggggaagaacaatataaatcataataaaataactgtaagaagggcatcgtaagacgtagacaaggacaatgcaggtactaactggtaaagcaagatgccctcaaaattatcgaagccactgtgccaaggactgaactgcaaggcataatggatgtgaaaaactaggcgataggatcaacgcctaaatcaaaaccctcaaaagcatttgcagcattcacatcagcaaagttggcatatgttaagcgggacctgtcaacttcaggttccgccttggacatggcatagtctgcaggactggatctggcaatccagtcatacagttacacanataangcanangcaccctctgattctaaagtgacataagaatggtgataagtctgaactccttcacctcttaaatgccatattattgcccacagttgccaaatacaaaatatcaagtcctctgctgaagaagactgaggtcccatcgtttcctgtgtcgcaggtcacttcttcaccaggtggctgactgcatcattgtgaggcagaaccatgctgtgcaagtgtcataagtcatcccactttcaactctcaggaacactcgcagccagtgccacgctgtcctcgccatccaatattgatagccaccccagttcctgccagccagccggnaccacatgaaccataggatcccctctggtcatggggtcacctgccttttcttaaaactgtgcttctagttgacatggnccttaaaacgatgggggttccccaaatgttacagtngtttcttcgatgggcaaggttgtatttgggcgcctttnccattcntataggtnctggttcangttcctcaggtctgtttt

SEQ ID NO: 252740 - DNA, 474 bp, Homo Sapiens
ttatgtgtgtgtgcttttcctagatgtcccagttagctgtgctgagatatacctgtactatttatggtttaagttttgattcttaggtattttctccagctctgacattgttttccaaagacacactaaactgcattgcacagttcaaaatttgattacttaagggatcaatctaggtggtgttcttggtcttaaatttaacagcaaacacagaacatatctattatcactatattaattttcaaaggtttttctgtgacgtttaaaactgtgacaacagatattcacatttgattatagaaacttaatgtctattaataattttagtacaaaatttcataaaccgtgtttttcaaaataagtttatgtcaaatccagcttcccagaaacactaataattaagtacatcaatgtactaaataaatcattcagttgcacccatggggaagattgtgttactgcccttcacagtgg

SEQ ID NO: 252741 - DNA, 2665 bp, Homo Sapiens
ccgggatcagggaggctggccggaggttcctgcagagggagcgtcaaggccctgtgctgctgtccctgggggccagaggggttgcccagcatgcccactggcaggagagagggaactgacccacttgctcctaccagcttctgaaggctccaaagtccggaggtgcagaaagccaggaccaagagacaggcagctcaccagggtggacaaatcgccagagatgtggtgcattgtcctgttttcacttttggcatgggtttatgctgagcctaccatgtatggggagatcctgtcccctaactatcctcaggcatatcccagtgaggtagagaaatcttgggacatagaagttcctgaagggtatgggattcacctctacttcacccatctggacattgagctgtcagagaactgtgcgtatgactcagtgcagataatctcaggagacactgaagaagggaggctctgtggacagaggagcagtaacaatccccactctccaattgtggaagagttccaagtcccatacaacaaactccaggtgatctttaagtcagacttttccaatgaagagcgttttacggggtttgctgcatactatgttgccacagacataaatgaatgcacagattttgtagatgtcccttgtagccacttctgcaacaatttcattggtggttacttctgctcctgccccccggaatatttcctccatgatgacatgaagaattgcggagttaattgcagtggggatgtattcactgcactgattggggagattgcaagtcccaattatcccaaaccatatccagagaactcaaggtgtgaataccagatccggttggagaaagggttccaagtggtggtgaccttgcggagagaagattttgatgtggaagcagctgactcagcgggaaactgccttgacagtttagtttttgttgcaggagatcggcaatttggtccttactgtggtcatggattccctgggcctctaaatattgaaaccaagagtaatgctcttgatatcatcttccaaactgatctaacagggcaaaaaaagggctggaaacttcgctatcatggagatccaatgccctgccctaaggaagacactcccaattctgtttgggagcctgcgaaggcaaaatatgtctttagagatgtggtgcagataacctgtctggatgggtttgaagttgtggagggacgtgttggtgcaacatctttctattcgacttgtcaaagcaatggaaagtggagtaattccaaactgaaatgtcaacctgtggactgtggcattcctgaatccattgagaatggtaaagttgaagacccagagagcactttgtttggttctgtcatccgctacacttgtgaggagccatattactacatggaaaatggaggaggtggggagtatcactgtgctggtaacgggagctgggtgaatgaggtgctgggcccggagctgccgaaatgtgttccagtctgtggagtccccagagaaccctttgaagaaaaacagaggataattggaggatccgatgcagatattaaaaacttcccctggcaagtcttctttgacaacccatgggctggtggagcgctcattaatgagtactgggtgctgacggctgctcatgttgtggagggaaacagggagccaacaatgtatgttgggtccacctcagtgcagacctcacggctggcaaaatccaagatgctcactcctgagcatgtgtttattcatccgggatggaagctgctggaagtcccagaaggacgaaccaattttgataatgacattgcactggtgcggctgaaagacccagtgaaaatgggacccaccgtctctcccatctgcctaccaggcacctcttccgactacaacctcatggatggggacctgggactgatctcaggctggggccgaacagagaagagagatcgtgctgttcgcctcaaggcggcaaggttacctgtagctcctttaagaaaatgcaaagaagtgaaagtggagaaacccacagcagatgcagaggcctatgttttcactcctaacatgatctgtgctggaggagagaagggcatggatagctgtaaaggggacagtggtggggcctttgctgtacaggatcccaatgacaagaccaaattctacgcagctggcctggtgtcctgggggccccagtgtgggacctatgggctctacacacgggtaaagaactatgttgactggataatgaagactatgcaggaaaatagcaccccccgtgaggactaatccagatacatcccaccagcctctccaagggtggtgaccaatgcattaccttctgttccttatgatattctcattatttcatcatgactgaaagaagacacgagcgaatgatttaaatagaacttgattgttgagacgccttgctagaggtagagtttgatcatagaattgtgctggtcatacatttgtggtctgactccttggggtcctttccccggagtacctattgtagataacactatgggtggggcactcctttcttgcactattccacagggataccttaattctttgtttcctctttacctgttcaaaattccatttacttgatcattctcagtatccactgtctatgtacaataaaggatgtttataagc

SEQ ID NO: 252742 - DNA, 338 bp, Homo Sapiens
caaaatcgtttaatacaaagcctattttataataaagtatgttgaatatctcatgtaatttttgaagattacattgaaagtgaaaaacagaatggttgggtacttgaaatacagcttctactgaatgaataattctaaagttgaaaaataatagtaagaaccatcataagtctgtttcttctagtaaaggtgaaatgatgaaagaatgcttttttcccacccaaaaaactatgctctataaatgcagattagctagtttctgcctgtttaaatggtattattttatacattacaaaatggaaggaacttactttattaaacttaactttgatacttaa

SEQ ID NO: 252743 - DNA, 449 bp, Homo Sapiens
taagtatctggataaggcagttggaaaacaagttcaagctggacactcttgagtccagtcctcatgttttcagcccactgttgcacccagttcgtgtgggtcaggcctgggcccatggaatgagtgtatctcccagtaaggaagtctgctatctgacaaaaacagcagaagctgagagctcaagggatacaaaatagattgcagttgagggttaggaaggaggctgcatctgtgtgcctatttcccctggcaagcctctacatcgaagagcagcagagcagccctgtcgtgccattgagctgacagtgccacatatgcaaagataaagccatagaggcaggacacttgaggggcacctctcagtctgccctgaaccatctgccatcttgaacagggagacaccatggctctggggcagttttcctccataagaactcacttggagatat

SEQ ID NO: 252744 - DNA, 1149 bp, Homo Sapiens
  misc_feature (720)..(729): n is a, c, g, or t
ggttcccggcggccctcgcggcaggtttcgggcttcaggacaattcgtgatggcgggggctggttccgccgctgtatcgggggcagggaccccggtggcggggcccacaggccgcgaccttttcgccgaagggctgctggagttcctgcgacccgctgtgcagcagctcgactctcacgtacacgccgtcagagagagccaggtagagctccgggaacaaattgacaacctagccacagaactgtgccgcataaatgaggatcagaaggtggccctggatcttgacccctatgttaagaagctacttaatgcccggcgacgcgttgtcttggttaacaacattctacagaatgctcaggaacgactgagacggctaaaccacagtgttgccaaggaaacagcccgcaggagagcaatgctggattcgggaatttacccccctggctccccaggcaaataacagatgagcctatggactcagtagcacaagtactgttccccagctgccttgtttcaacagacatgcaaagatcctaggagacagtccccatagaccttcagacattaaaaagggagccgtacagtttgtttgaagcacttcgtcttacccatttatgtaggggccccaggaaacctacacacagccagaatgaggttcccaaaggacttacattaattatggctcttgcttcctttcacaaatgagctgaggcctctacnnnnnnnnnnaagctgcatacttgaggcttaccttcttcaggactagttaaccagaggggcttcctttgtatgttacatgcctggttacatgggcctggacagcatgtcctctacctgtgacttctcattttcctgtttacactggggatttggagggggcaggcaaagtcaaagtgaatgacctctgtccacccacttttttattgcactggcttgaatacagtagcagtgttgatagaatcattttattcaataaatacttaaaatgatattctagtttactctggtatatggaaaggttccaggagtttgtcctttaattcaaagacagcttcaaattgtgatctgagtatttataattaaatgactcaattatcattttcaacaaaagagtacacaaagccaaaagcaaaaaaggttgccacatgc

SEQ ID NO: 252745 - DNA, 674 bp, Homo Sapiens
agaggagagaagacgggaagagagaaggaaaaaagtaatttgatttgccatggcagccaattcttagacggtaagtgttagggacttaacataaagcacccctctttctatttcccgatttacattcttttggaatattactacaaatacaatatgcgatttaaaaaaacttatggggaaacacagcttatgtttttttctcctctttacaggcttttcagtatcattcgacttcaatggaaatttatatggacattttctgtacatatcttaaaaggcagagattacactgataaagcctaaagaatcctgcacaaatacaatacagaaaacagaaagtacagacgatgttatttggggtacaaatataaacaatacagtaccatttgagtaactgagcaacataatacccatactttatagaaataaaactgcaaacctggagaatgctctgacaaatattaaacattatatacacaatgaggtaaatgtaccttggtctcttgagaggtaatttaagtttaaagcaattgacattttgaagcatctccttaacatatgaagaaatatcaaacaccctattccgttggcacaacgtgaaaaaggggtatcaaaacatggttcatgatattcagttcacaaatcttgttaaaaaataaaaacaaattcactga

SEQ ID NO: 252746 - DNA, 605 bp, Homo Sapiens; identical to SEQ ID NO: 231748
  misc_feature (163)..(217): n is a, c, g, or t
  misc_feature (353)..(407): n is a, c, g, or t

SEQ ID NO: 252747 - DNA, 617 bp, Homo Sapiens
  misc_feature (594)..(594): n is a, c, g, or t
agagctgctggtggtcgcacctcctggctctttcgcagctgttctcctttgtacattcattaaagatgaactttcagcatcttcacttgaagatccatcagatgattctgagaggcaggtctcccccaaaaatccaccgcatgtattctttcgtttagaatctgaaagcctctttcttttcaggcttgatgactcttctaaggtatttgttatgcctctcttctgggtttttcgttttgccttatcaagtagctcaaattctttctccatggcaacagaaactgcttctatttcgctggctgctgcttctttctctttccttagcatacatgtcacagctctgtttagtctctggctcttaatacgtttagcatcttctttctcctgttgtgctaatctaaagaaggaatcaattcggagctgtgtctgctgggcatcgagttgctttaatacaggaaacagagattcatctgtcttcgttctgttccagccgaaataccgctgacaaaattctctaattttgtcgagatcaggtttcccccacagaaagggatcccttcgagtcatccaccacgggtttgaggtaggcctcgncaaaagctgggttaggaaagcca

SEQ ID NO: 252748 - DNA, 438 bp, Homo Sapiens
ttttgccctcgagcccaagaaattcggcacgagcggtggatttttgggggagacctgcctctcagaatccatctgatggatcttcaagtgaagatgctgaaagttcatctttaatgaatgtacaaaggagaacagctgcgaaagagccaaaaaccagtgcttcagattcgcagaactcagtgaaggaagctcccgtgaagaatggaggtgcgaccaccagcagctctagtgatagtgatgacgatggagggaaagagaagatggtcctcgtgaccgccagatctgtgtttgggaagaaaagaaggaaactaagacgtgcgaggggaagaaaaaggaaaacctaattaaaaaatatgtatcctctataattagttatgacagccatttgtaatgaatttgtcgcaaagacgtaataaaattaactggtggcacggataa

SEQ ID NO: 252749 - DNA, 541 bp, Homo Sapiens
  misc_feature (443)..(443): n is a, c, g, or t
  misc_feature (448)..(448): n is a, c, g, or t
  misc_feature (472)..(472): n is a, c, g, or t
  misc_feature (500)..(501): n is a, c, g, or t
  misc_feature (507)..(507): n is a, c, g, or t
  misc_feature (528)..(528): n is a, c, g, or t
tggcccgggagtaattgtaagataaatgaatttttaattttttgagatgtagcttaaactgtcttcttaatccaacaacttacattccgttgttgctgcatccttttatttaaggacttgttttaaaagtctttttgtcactccttggaaaattcttttattagtagtaaattttgcttttaggagcatggctcctgtattacaagggaaaaaatatgaagagcacattttaggattataattgtcaaaagataatgtgcgcatatcattgtacagtaagctgtcaactgtgtgcctaactgttctatcaatactttctttctttaacaaagaagaaacaacaatcagaatgtcagttatttttattcaactaaaaggattaaaaaatttatttggtttgtgttctgtccattagaaaatactaataaagtattaacaaacanaaganaaaactataaaacaaatgcatgcngcccgcaattcgagctcacttggccaanntcgccntatagtgagtccgattacaantcactggccgtcg

SEQ ID NO: 252750 - DNA, 835 bp, Homo Sapiens
cctctcctgaatggcacaaaacaatggcttgatggtagggaaatgctacttcatgagaaagcatggtgcccatcaactccaacagtacctgtatttgcactcaaaaataaaataattcttgtgttgtcttgattgtatacaatttttgataactccagaagatgacacagtgttactttattagatgtatatagtcctttaggcaagagatacatttaaaaaattatttgaaaatcaagtttcttcctacataaatcctatcacacatgggctgggtgagggcttggtaattaatggaatttttttgtaaaatgaacaatcatgtcaagagtagtttttatgcaaatgcagttttccctactctgctggcactacctggggcacatcaatacccctacaacgcaccttcgtcactgaatttctgtctcatttcggcacgaaatgagaaccaaccctgtatcatttcctgacatcccagtaagctttctgactgtaaatgaggtatagtcctgataggtacagttacaggtatatcatttctgttggtgtcttacattacatttcataattgtatagtaacaaaaaatagaggtaacaagtagcattttgttttcatgtaacaagaaatggctgcaggttctcagtcagaacagaaacagagagacaaaagaaatggttactattcccttctatagtgcataggtttttttacacaatttgtcctttacccatttcagagaaggggaggaagagtaattcacagcatttgctagttaaaatttgttttttcagtcctctagttttctcaactgcacatcagctacttatttttttt

SEQ ID NO: 252751 - DNA, 669 bp, Homo Sapiens
  misc_feature (55)..(55): n is a, c, g, or t
  misc_feature (68)..(68): n is a, c, g, or t
  misc_feature (561)..(579): n is a, c, g, or t
ccaagttttatactctacatccacagtacgtcagcagttcttgaatgtttaaaanaataaatgggtanaatgcttctaaaaaatgcagatgtttataactacaatggtactaagatgggaaggagacaatgagagaagggataaaagcaaacatgttcatgtgcagggaatgtggttcaagtctttggatttaaaaacaagttccccagagaagctggcacttcctttgccctccaaaaaggacctgaaaagtcccaatccaaactttagaaaattagttatgagatgcaataaatgatgatcaaagcagtcagagggagaaggatgaatgtgtcttccatttagctagagactgtagcatagcctctttaggtgttggtggatcagtaaaaacgactgaagtaccagaagtgcttggaaggataggggtacaaagtaatgaccataataccttgtctaaatcagtagcagggcttcatggctaggaaacttttttaaacagtaaaatgtcattaggatagatcactctctcaccaacattaaatgtggcagaattaaccnnnnnnnnnnnnnnnnnnngatttacacgtagatatagcagtaacagaaaattacaaggcagagaacacaaaagaatcaagacaacgctataggttcaacagtattccc

SEQ ID NO: 252752 - DNA, 1113 bp, Homo Sapiens
  misc_feature (351)..(384): n is a, c, g, or t
gggtacccctatccttccaagcacttctggtacttcagtcgtttttactgatccaccaacacctaaagaggctatgctacagtctctagctaaatggaagacacattcatccttctccctctgactgctttgatcatcatttattgcatctcataactaattttctaaagtttggattgggacttttcaggtcctttttggagggcaaaggaagtgccagcttctctggggaacttgtttttaaatccaaagacttgaaccacattccctgcacatgaacatgtttgcttttatcccttctctcattgtctccttcccatcttagtaccattgtagttataaacatctgcnnnnnnnnnnnnnnnnnnnnnnnnnnnnnnnnnnaaacattcaagaactgctgacgtactgtggatgtagagtataaaacttgaaaaatgcagatgttgaaggaataataggtatcttgtgctttaatactttatggcaggattgtactataagcaaatgaattaaacagctatgtaaatcataaagaaaaactaaaaatgaaccaaagtgaaaggataacttccaggcagtatctttctattgtaacctgttatttaaggaaatactagtgatttcttctaaataggatgtaaaacttctttcaaattactcttcctcagtcctgcctgccaagaactcaagtgtaactgtgataaaataacctttcccaggtatattggcaggtatgtgtgtaatctcagaatacacaggtgacatagatatgatatgacaactggtaatggtggattcatttacattgtttacacttctatgaccaggccttaagggaaggtcagttttttaaaaaaccaagtagtgtcttcctacctatctccagatacatgtcaaaaaaagaaaggtgtttgtgcttccgttttgtttctgctcagtaatatagtcaagcaagtttgttccaagtgacccattgagctgtgtatgcatttttgtttatttcaataaaatatatttgtattatttgtccttcatactatccatccataccacactatcttctgtatcaggtagtctaatagaaatatacctgttttgttctgaaaaaaa

SEQ ID NO: 252753 - DNA, 2239 bp, Homo Sapiens
  misc_feature (1408)..(1416): n is a, c, g, or t
  misc_feature (1578)..(1586): n is a, c, g, or t
  misc_feature (1891)..(1891): n is a, c, g, or t
  misc_feature (1920)..(1920): n is a, c, g, or t
  misc_feature (1988)..(1988): n is a, c, g, or t
  misc_feature (2015)..(2015): n is a, c, g, or t
  misc_feature (2082)..(2082): n is a, c, g, or t
  misc_feature (2098)..(2098): n is a, c, g, or t
ggggcgccggtggcgggactctggggaaaatggctgcgtcttcgagtggtgagaaggagaaggagcggctgggaggcggtttgggagtggcgggtggtaacagcacacgagagcggctgctgtctgcgcttgaggacttggaggtcctgtctagggaacttatagaaatgctggcaatttcaagaaaccaaaagttgttacaggctggagaggaaaaccaggtcctggagttgttaattcaccgagatggggaatttcaagaactaatgaaattggcacttaatcagggaaaaattcatcatgaaatgcaagttttagaaaaagaagtagagaagagagacagtgatattcagcagctacaaaaacagctaaaggaagcagaacaaatactggcaacagctgtttaccaagcgaaggagaaactcaagtcaatagaaaaagcaagaaaaggtgctatctcctctgaagaaataattaagtatgcacataggatcagtgcaagtaatgctgtatgtgctccactgacctgggttccaggggacccccggagaccctacccaactgatttagagatgagaagtgggttactgggtcagatgaacaatccttccactaatggcgtgaatggccatttaccaggagatgcacttgcagcaggaagattgccagatgtccttgctccacagtatccatggcagtcaaatgacatgtcgatgaatatgttaccaccaaatcatagtagtgactttttgttggaacctcctggggcataataaagaaaatgaagatgatgtagagattatgtcaacggactcctcaagcagtagtagtgagtctgattgaaaaaccttaaaagacaatatacagaattgaatactgtagaattctgtttctttaacagtagcagggaaatgtaaactacaggtgacaaaaaatacccaggtaaacactggctttggtagaattgtgcagtcattaaaagtcaaaattttttgactttctttttaaagccaaagaccatagttttagttttaagccactaggtagatatttaggggaatagtcaaaatttactgttgaaaaagcagttgctatgtgctttcttaccctgttctgttccagttttgctggatttgtacatagccattctagaaatagagttgagggaaattatccatatacatatcactaataggcttcttggaattatttagaaaagcatttttaaactggcagtggatgactgaataggcatcatatttctttttgtgtgtcatttaaaagtaacaaaaactgccatttgacagtaaaggctcttggcttctgttggaggcatgggaaattgtctcaatttgtacagtttgtaattgtaatttttgtaaataaatttgtttgtacattgtatgcnnnnnnnnnagtttaaatatactggcacgtgtacggtaggaaattattttctggtaaatccacgctgcattttataataacttgagttgactaacctgaattgaaacctcattaccaattaaataggggttcctcaacaggccctattccctatgtagaaagaaaataaannnnnnnnnaactaaattggacaaaaaattctaccaccagccccttggtctggattttaaagaaataagaattggtgctgaaagaattttaagaagtgggaaaagcaaacccatttttctttcccccttccaccttttcctcctttctttccaggttccccccgggaaggtccattttttttagacccaccttttttaaaatttcctgggttgggcaaaccactcctgggtggctttaagggataaatattggcgtttaaataccaaacttaatttctccctggaatgggcaatccacggttttttaaagaacnaaagggaactcccttcccggagatatacncaaagggggaaaataacaacaccatttttacattgggggagaaagacttttttcgctgggcactcccncgctacaacgcggaagaacaaacatanaaacatttgtgtttagaccaatttcccctaaccccgccggagagatttatttagtccgcgcccgcancgacgcacgagccacnccagcatccgaccctctcttcgataatcgtttgtgtctggagcaccgccgccctcgcgcgacgcgcccccgagacacaagaggattttatctcagaaaacacaatatttccccgttctgggggcgcccgcgccgggccgct

SEQ ID NO: 252754 - DNA, 381 bp, Homo Sapiens
  misc_feature (12)..(12): n is a, c, g, or t
atttaagggggnaatagggccaaaaatttacccggttggaaaaaaagcaggttggccctatggtgcctttccctaccccctgttccggttccccagttttgcctggatttggtaccatagcccattcctagaaatagagttgagggaaattatcccatatacatatcacctaataggcttcttggaattatttagaaaagcatttttaaactggcagtggatgactgaataggcatcatatttctttttgtgtgtcatttaaaagtaacaaaaactgccatttgacagtaaaggctcttggcttctgttggaggcatgggaaattgtctcaatttgtacagtttgtaattgtaatttttgtaaataaatttgtttgtacac

SEQ ID NO: 252755 - DNA, 1127 bp, Homo Sapiens
  misc_feature (678)..(983): n is a, c, g, or t
gaggacacaacataagtgaatatagaacaccgctgtggttttaaaacacagggcagtgctggtaccggtccggaattccgggatatcgtcgaccacgcgtcgctcacgggcgcgcggactatcgggcggctaggctctctgaggaggctgccacagtgaagcaaccgtgacaagtggtgcccgaccagggacctgaacgaggaaggtctgccagagcagagaaagtgaaactgatcagacgaactacgaacccctggacgggagagtctgccggcggagaatataaggagatggacaaaccgtgtgggtgccctccaggtgtgtgtgaccatggaacgggagaccggagggatccatggtattcaaccgtgggcctgttacctccagtacgagccatgagccagcggaatctgaatgcaaagacagaacaagggccgaccggagtcacaatgacatccaaccccataacatggggacagatcaagaaaacgacacaagaagctgagaaactactggagcgccagggtcaggcaaaaacccctgactccatgttcttggccatgctagctgtagtgtcctgtgcgtctataggatcgggtgaaccaccaaccggcaattgaaagctgcacagcctgaaattacctttattcaattaatgcaaaaacaaaaggggagatnnnnnnnnnnnnnnnnnnnnnnnnnnnnnnnnnnnnnnnnnnnnnnnnnnnnnnnnnnnnnnnnnnnnnnnnnnnnnnnnnnnnnnnnnnnnnnnnnnnnnnnnnnnnnnnnnnnnnnnnnnnnnnnnnnnnnnnnnnnnnnnnnnnnnnnnnnnnnnnnnnnnnnnnnnnnnnnnnnnnnnnnnnnnnnnnnnnnnnnnnnnnnnnnnnnnnnnnnnnnnnnnnnnnnnnnnnnnnnnnnnnnnnnnnnnnnnnnnnnnnnnnnnnnnnnnnnnnnnnnnnnnnnnnnnnnnnnnnnnnnnnnnncagatccttttgtctgtctcatttctgcattcgtcgtccttcgttcggtccagaagcaaccgcgacagtcctgcatgtgttgatgccacctgtatgtgcaggtgtgacctcaggtgtgtgagtatccctcataccccttatcat

SEQ ID NO: 252756 - DNA, 641 bp, Homo Sapiens
gggcccgggagagtaagaaaatagttgctaccgatagggactttgccaagtccaattatcttctaggattgaaaggtgcattttccccataaaaaaggcgaggaaaacccatggctgctttgtgtcacctcagtgacttacagtcccccttggcatttagttggtactagagccagtcatccttaacaaatcttttcacattttatttctttcacatgtagtcatcttcaaaaaggaaagatttggaattttagaaaaggggcaactcttctttttagcattctcatcagaaagtcacaaaaatcgatggaatcatttccactgggaagattgaccttttgtatttatttgtggggtaaattaataagcattccagatgcttgcagcttcctgcatccaggagatgctgtgttccccgtgatgcagctggaacccaagctgcagcaggagatgcaagtttcaggatgttccccactgagctggaggaatatctacagcagtgatgcttgaaatttttgtatgaattattttgtcgtcctacccttttcctccaaaacaaaaattagaggattattttaatactttggattcttcccccttttttgagaaataaagttttttatgaaaagcctgtgcgtgaa

SEQ ID NO: 252757 - DNA, 918 bp, Homo Sapiens
  misc_feature (18)..(18): n is a, c, g, or t
  misc_feature (73)..(73): n is a, c, g, or t
  misc_feature (92)..(92): n is a, c, g, or t
  misc_feature (365)..(365): n is a, c, g, or t
  misc_feature (545)..(585): n is a, c, g, or t
gtacatcgagaatcacgnccggggaccagtaggacttgagggactgcttactactaagtggctgctgcgaggnaaggaccacgtggtctcanatttctcagagcatggaagtttaaaatatcttcatgagaacctccctattcctcagagaaacaccaactgaaaagagccaggaaaacccgggaattttccaaaaggtcttcacgttaaacttgtcttatctcaggagagagcccgctcttgtctcccagttcctggtagggtctgcctgttggaaagtgtacctggatgcttctgggctccgtttggcaatagcagtcttggctgatgtgcacagtctggctcccagctcacccttttttttnaaagtaagaaaatagttgctaccgatagggactttgccaagtccaattatcttctaggattgaaaggtgcattttccccataaaaaaggcgaggaaaacccatggctgctttgtgtcacctcagtgacttacagtcccccttggcatttagttggtactagagccagtcatccttaacannnnnnnnnnnnnnnnnnnnnnnnnnnnnnnnnnnnnnnnnaaaaaggaaagatttggaattttagaaaaggggcaactcttctttttagcattctcatcagaaagtcacaaaaatcgatggaatcatttccactgggaagattgaccttttgtatttatttgtggggtaaattaataagcattccagatgcttgcagcttcctgcatccaggagatgctgtgttccccgtgatgcagctggaaccccagctgcagcaggagatgcaagtttcaggatgttccccactgagctggaagaatatctacagcaagtgatgctttgaaatttttcggatgaaattatttttgtccgccctaaccccttttccttccc

SEQ ID NO: 252758 - DNA, 830 bp, Homo Sapiens
ggacctcctggttcaagtgatcctcttgtctcagtcccctgagacaatcccccacgcccagctacatattttttgtggatacagggtctcattctgttgcctaggcttgtctggaactcctgggctcaaggggatcttgtagccttaagcctcctaaagtgctgggattataggcatgagtcactgtacccggcctgctctaccgcttttaaggacgcttatgatcacattgcgcctacccagagaacccaggtcgtctttctattttcaggtcagctgattagccaccttagttccatctgcaactttagttcccactggctgtgtaacctaacatagtcacaggctctggggactgtcacgtggacatctttgggaggccgttattctgcccaccgcaccctccgttcatcccctgccctgccgggcacctcgctctaccccaggaaaatgtgagctcgttttcctgctcggcatgtgctccccctaaggctctgctcctccctgggcctgaaagttccttctcagcctgagagggggcccttcggactcaggcatgactcagcccggctgatgcctctgcagtgctgagtcaggatttggggccggctctcttgggtccgtccccttttcccaggtactgccttacaaagctgtggccaggaagtggccggtataaaggatgcccaaggtctttgtacgtgtgtaggagttagcgtgtttgatattgttaatataataataattattttttagagtactgcttttgtatgtatgttgaacaggatccaggtttttatagcttgatataaaacagaattcaaaagtga

SEQ ID NO: 252759 - DNA, 1495 bp, Homo Sapiens
gacccctgccctcacaaggccatagtgtgtgcaacatagacaaaagtggagagaaaagtataatgaaactccatgtattcattacccaatctaaaaaaattataaacatatggccaatctagttttatttattatctcttcattccccactttcaacttcccagaactaattttaaacaatttctaaagatgatatgattctattcataaacactagttattattattatttaacatagggaatattcatatatataacaggtacaaagtctataatatttaaagctcttttatgttcccatattaaatgtaaatatttgtttaaacgcatggctttccttggttcatcaaatcaggtaataaattaaccaggcaggttcacattcaatcagatagtattccgaattgctcctggcatcttcaaaagatgaggattgttcggatgctttttccttggttcattaggtcaaatgcctcactgattttgtcaaaaggcagggtatgggtcaccagtgcatccagattgaatttcttattcttatagtcagtgaccagctttgggatagaatctacacttttccaaccaccaaagaatgttccatttatagtacggccgattattagctcctctggaaaaacagtcaatcctttgctaccagcagctactccaatgaaagtacatgatccccagcctgcggttgtacagtccagggctgctttcatggtttcagatccacctgcacagtcaagggcaaaatccacacctcccttggtcaattcaatgataacttcctggataggtttatgtaagtctctaggattgaggcagtcagtggctcccagggctttagccttcacaaacttctcactgttgatgtcaatacctatgattctggaagctcctgctgctttacaacccattacagcagaaagacccacacctcttaggccaaagacagcacaagtcgaaccaggggtgaccttggcattgttgattgcagccccatagccagttgaggcaagattgatatctgacaccacagtgtactgagagaatgtactggttccaaagaaatggtaaactggttttcctttgcaggtaaacctgctggttttgtcttccattagttgttgatcactagcaggacttttgagattactgattttcccacacaaatttgtgagtggactcagacaaaacttgcattttctacatagaggtgcataaagtggaattactttgtcacctggtttgacgttggtcactcctggcccaatactttccacaatacctgcagcctcatggccaacgatcactgggaaagctaggccctcaaatttagaatcgataacagtggcatcagtatggcacagggaggtagcaatgatctgaatgcgaacttcatgagccttggggggagctacttcaacctcttcaatgcaaaggggcttgcctgcttcccaggcgatggctgctttgcatttaataacctga

SEQ ID NO: 252760 - DNA, 1323 bp, Homo Sapiens
cgggctgcaggattcggcacgagcctgggtaggagtttgaagctttcttaactcagaaagaaacttccaacacagtttcccaaagaaaaatgggcaccaagggcaaagttattaaatgcaaagcagccatcgcctgggaagcaggcaagcccctttgcattgaagaggttgaagtagctccccccaaggctcatgaagttcgcattcagatcattgctacctccctgtgccatactgatgccactgttatcgattctaaatttgagggcctagctttcccagtgatcgttggccatgaggctgcaggtattgtggaaagtattgggccaggagtgaccaacgtcaaaccaggtgacaaagtaattccactttatgcacctctatgtagaaaatgcaagttttgtctgagtccactcacaaatttgtgtgggaaaatcagtaatctcaaaagtcctgctagtgatcaacaactaatggaagacaaaaccagcaggtttacctgcaaaggaaaaccagtttaccatttctttggaaccagtacattctctcagtacactgtggtgtcagatatcaatcttgccaaaatagatgatgatgcaaatttagagagagtttgtctgcttggatgtgggttttcaactggctatggggctgcaatcaacaatgccaaggtcacccctggttcgacttgtgctgtctttggcctaggaggtgtgggtctttctgctgtaatgggttgtaaagcagcaggagcttccagaatcataggtattgacatcaacagtgagaagtttgtgaaggctaaagccctgggagccactgactgcctcaatcctagagacttacataaacctatccaggaagttatcattgaattgaccaagggaggtgtggattttgcccttgactgtgcaggtggatctgaaaccatgaaagcagccctggactgtacaaccgcaggctggggatcatgtactttcattggagtagctgctggtagcaaaggattgactgtttttccagaggagctaataatcggccgtactataaatggaacattctttggtggttggaaaagtgtagattctatcccaaagctggtcactgactataagaataagaaattcaatctggatgcactggtgacccataccctgccttttgacaaaatcagtgaggcatttgacctaatgaaccaaggactatctgattgaatgtgaacctgcctggttaatttattacctgatttgatgaaccaaggaaagccatgcgtttaaacaaatatttacatttaatatgggaacatacaagagctttaaatat

SEQ ID NO: 252761 - DNA, 687 bp, Homo Sapiens
caaacctataattctgaaagctcctgtgcttaccaacccattacagcagaaagacccacacctcttaggccaaagccagcacaagtcgaaccaggggtgaccttggcattgttgattgcagcaccatagccagttgaggcaagattgatatctgacaccacagtgtactgagagaatgtactggttccaaagaaatggtaaactggttttcctttgcaggtaaacctgctggttttgtcttccattagttgttgatcactagcaggacttttgagattactgattttcccacacaaatttgtgagtggactcagacaaaacttgcattttctacatagaggtgcataaagtggaattactttgtcacctggtttgacgttggtcactcctggcccaatactttccacaatacctgcagcctcatggccaacgatcactgggaaagctaggccctcaaatttagaatcgataacagtggcatcagtatggcacagggaggtagcaatgatctgaatgcgaacttcatgagccttggggggagctacttcaacctcttcaatgcaaaggggcttgcctgcttcccaggcgatggctgctttgcatttaataactttgcccttggtgcccatttttctttgggaaactgtgttggaagtttctttctgagttaagaaagcttcaaactcc

SEQ ID NO: 252762 - DNA, 686 bp, Homo Sapiens
ctcgagactagttctctctcgtgccgaattcggcacgagggccctcctaccacccaactgcaaagaagcaaggaagtggggggaaggggatgggatccaatgactgactagcctgttgaggtgtagtgatcctgccccaaagtgaggaaaggacacagagattctccttccacaggtaggggtgtcttccagtcctgggtgaagaaaacatttatgcatagcaccctgctcatagcaggggttccacagttccagcagtaatgtttgagataaggactgctctgtcgttgaggcttatccccctctttgtgtctacatgtggagttacccagaaataagaacatctgggttcttaaaaagtagcatcccaacacaccaactttgatgcccactccctccttcgatgctcaactttgccctcagctataggagatccgagaacagtgactattccaagactaaaacctgactccctccttggtacattctaattctcctcaacagcaccactgagtaacaaggacgctgcctaaggtaagtaagggtcctcaattccccccaagtttactagcacatgcataaaatattattaacaccatgaatggaagaggatgacgggataaaagaaattaggcttaataaagtgaatgtctataaaggaagaccagatcctgaaatgaaaaggc

SEQ ID NO: 252763 - DNA, 1564 bp, Homo Sapiens
gatagtttcatggtgtgaggacccagactacttcttggggaagaaacctgaggaaatatccccactgacatgaactccccaatttgcaaacgtgtcagtcacaacatatcagaaggaagttcaataaaaagaaaatacaagcattattttttaagctacaccatgtaaacttagtatataagccctgcaatgtattatacaacttcaatatccccataaggaatactcctcaagttaggagatagaggttgaagtggggtttgagcctcacacccttctattcatatcctcgaacacaaaccttttctcctagaattctcaattatggaatacattcataaggaatgctaagtggcagccaggtggctggtaatcagcctatgggtagacaccagagtgaggcctcctgctccttctctggcccactgagaataccacctgactgcccacacagatggaaaggtggcaatgaggaaggcagaagttgggcctcatcaggtgtgtccaccatatgggcacaggaagcacaagagagggcaggcccttctaccacccaactgcaaagaaagcaaggaagtgggggggaaggggatgggatacaatgactgactagcctgttgaggtgtagtgatcctgccccagagtgaggaaaggacacagagattctccttccacaggtaggggtgtcttccagtcctgggtgaagtaatgtttgagataaggactgctctgtcgttgaggcttatccccctctttgtgtctacatgtggagttacccagaaataagaacatctgggttcttaaaaagtagcatcccaacacaccaactttgatgcccactccctccttcgatgctcaactttgccctcagctataggagatccgagaacagtgactattccaagactaaaacctgactccctccttggtacattctaattctcctcaacagcaccactgagtaacaaggacgctgcctaaggtaagtaagggtcctcaattccccccaagtttactagcacatgcataaaatattattaacaccatgaatggaagaggatgacgggataaaagaaattaggcttaataaagtgaatgtctataaaggaagaccagatcctgaaatgaaaaggcaaaacttatttgtgagctttggttaaatttatcatgaaaattacacttattaatgttttattgttattaacagcatccgaacaatcctcatcttttgaagatgccaggagcaattcggaatactatctgattgaatgtgaacctgcctggttaatttattacctgatttgatgaaccaaggaaagccatgcgtttaaacaaatatttacatttaatatgggaacataaaagagctttaaatattatagactttgtacctgttatatatatgaatattccctatgttaaataataataataactagtgtttatgaatagaatcatatcatctttagaaattgtttaaaattagttctgggaagttgaaagtggggaatgaagagataataaataaaactagattggccatatgtttataatttttttaaag

SEQ ID NO: 252764 - DNA, 330 bp, Homo Sapiens
tcaactctaattttatgagatcccaagactattttgtggctttcactacctaatctacttaattaataattagaatagcaaagatgtatgtataaataaagcattgaagtcttttcaaaatttaagtgacacttaattagcattttacaacattaaaattttatcttcaagagaatcagcatgaatcagatgagaaaggttttgccagaggaacctcgggaagggttaaaacgaggtcaaggaggtctatttcgcacgttggattaaaaggtggagcccggcccatatggcccaattcccgggacccaaacaatggcgccgtttcccggg

SEQ ID NO: 252765 - DNA, 1001 bp, Homo Sapiens
  misc_feature (50)..(67): n is a, c, g, or t
  misc_feature (791)..(791): n is a, c, g, or t
gagcgaggcctgggtggcgaattcggcacgagggagaactagtctcgagnnnnnnnnnnnnnnnnnnagccttaggcatggtttttattcacttgaacactgtacaaatattacaatttccttttgctgcaaaaagtataaaaataatctttatataggaatccattcgttactgtaaatctttctaaatctctgcaaatggctctaaatgagggtaaatgaaaaagccgaaatgaagagagggttatggggcagcaggaggtggggccaatcatcagggctggaccacccagactcctccccagagacctctgttccttcttggtagccgcccccaccacctgcaggttctagggctaaaggcccagcagaagtgggcacgtgagagggccaggaggagctggagggtcagggggtgggggatagcgaaggaagctagaagtggtgctggcatgtgcccagttccaccccacccttccctcctaggggaaggagctggcagaagcaagacactgaggctggcaggaacaagacactgccccctatggggggtaatggcagctcctcggttctgtgccactgggtggcagccgagcctgggctggcgaaggccgcagaaagggagaagcaaacactttggctccaccggtgatggggggctgagtcctgttcccctgctctgcgagcacagaagtgccagcacaggaagcgggagctgtggccagaactggtgccgggggaggggaaggcccgaaaaaacccaggccgtctgtggctctcagcctcctggnaaggggtcccggggggggaaaaaggccccccagggaacccccccagtcaaacagtcctgggtcccagccacccaggggcatgttccccgtccaagtcaaaaggttggaaaaacaggcacctcaaaaaagggtcccgaaccccttcaccctccgtccaggattgcaaaaatatacccccggcattcccggggcgcggcaaaaatccccaac

SEQ ID NO: 252766 - DNA, 1130 bp, Homo Sapiens
  misc_feature (1014)..(1040): n is a, c, g, or t
ggattattttttacaacctggaagagagtgaaagtgtctgtgacctctttgatgtgcctgttctcaacctctgactgacagggacatgccctgtgtggctgggacccagactgtctgacctgggggttgcctggggacctctcccacccgacccctacagagcttgagagccacagacgcctggcttctccggcctcccctcaccgcacagttctggccacagctcccgctcctgtgctggcacttctgtgctcgcagagcaggggaacaggactcagcccccatcaccgtggagccaaagtgtttgcttctccctttctgcggccttcgccagcccaggctcggctgccacccagtggcacagaaccgaggagctgccattaccccccatagggggcagtgtcttgttcctgccagcctcagtgtcttgcttctgccagctccttcccctaggagggaagggtggggtggaactgggcacatgccagcaccacttctagcttccttcgctatcccccaccccctgaccctccagctcctcctggccctctcacgtgcccacttctgctgggcctttagccctagaacctgcaggtggtgggggcggctaccaagaaggaacagaggtctctggggaggagtctgggtggtccagccctgatgattggccccacctcctgctgccccataaccctctcttcatttcggctttttcatttaccctcatttagagccatttgcagagatttagaaagatttacagtaacgaatggattcctatataaagattatttttatactttttgcagcaaaaggaaattgtaatatttgtacagtgttcaagtgaataaaaaccatgcctaagggtggtacgggccttggcggcccgccggggtgggcgccgactcccgcccccgccgaatgcggctccccccccgattttagctagcgcggcccccttgtgcggggggccccgcggccctttgagaaagcttttctagagagatttgtgtnnnnnnnnnnnnnnnnnnnnnnnnnnnctaacgtggacccggggccccggaatcgggccctcggcaacaggagcgttgtgggccacagaacaaacgggtctgtgtttttccgccccc

SEQ ID NO: 252767 - DNA, 845 bp, Homo Sapiens
  misc_feature (241)..(297): n is a, c, g, or t
  misc_feature (527)..(527): n is a, c, g, or t
  misc_feature (778)..(778): n is a, c, g, or t
  misc_feature (819)..(819): n is a, c, g, or t
ctggcaatgcctaattctccttgggtctgggaaccaggcttgtggtcctcctgtgtctgggttccagcacagccagtttcaacgacctcttcctgaccttgtatgactgggtttgggggctatcattgtagtgagtggcggccctgggactgatagcaaggacagtggtgagctcagttcactcccactgggcccaacaacactggacacccggccactgcagtcttctgccctgctggannnnnnnnnnnnnnnnnnnnnnnnnnnnnnnnnnnnnnnnnnnnnnnnnnnnnnnnnttcgtccggacccaacccttctacctcctttgagcccatcaaggcagaccccacaggtgttttggaactccccaaagagctgtcagaaatctttgatcccacacgagagtgcatgagctcggagctgctggaggagttgatgtcctcagaaggtgggtggccctggaaggtgggagtgggtgtgggcaggggttgggctgctgctaggggagccctggcccagggcctgnagactagtgctctctgcagtgtttgcccctctgcttcgtctttctccacccccgggagaccacgattatatctacaacctggacgagagtgaaggtgtctgtgacctctttgatgtgcctgttctcaacctctgactgacagggacatgccctgtgtggctgggacccagactgtctgacctgggggttgcctggggacctctcccacccgacccctacagagcttgagagccacagacgcctggcttctncggcctccccttaccgcacagttctggccacagcttcccgntcctgttgctggcaattttgtgtttg

SEQ ID NO: 252768 - DNA, 374 bp, Homo Sapiens
agagctgtcagaaatctttgatcccacacgagagtgcatgagctcggagctgctggaggagttgatgtcctcagaagtgtttgcccctctgcttcgtctttctccacccccgggagaccacgattatatctacaacctggacgagagtgaaggtgtctgtgacctctttgatgtgcctgttctcaacctctgactgacagggacatgccctgtgtggctgggacccagactgtctgacctgggggttgcctggggacctctcccacccgacccctacagagcttgagagccacagacgcctgggttctccggcctcccctcaccgcacagttctgggccacagctcccgcttcctgtgctgggcaatttctgtg

SEQ ID NO: 252769 - DNA, 435 bp, Homo Sapiens
  misc_feature (25)..(25): n is a, c, g, or t
  misc_feature (41)..(41): n is a, c, g, or t
aaagggtgggggtggaaactggggnaaaatgccaagcaccnacttctagccttcccttgggctatccccccaaccccccttgacccctcccagctccccccctggcccctctcacgtgccccacttcctgcctggccctttagcccctagaacctgcaggtggtgggggcggctacccaagaaggaacagaggtctctggggaggagtctgggtggtccagccctgatgattggccccacctcctgctgccccataaccctctcttcatttcggctttttcatttaccctcatttagagccatttgcagagatttagaaagatttacagtaacgaatggattcctatataaagattatttttatactttttgcagcaaaaggaaattgtaatatttgtacagtgttcaagtgaataaaaaccaatcctaaggcta

SEQ ID NO: 252770 - DNA, 493 bp, Homo Sapiens
  misc_feature (336)..(336): n is a, c, g, or t
  misc_feature (412)..(412): n is a, c, g, or t
  misc_feature (435)..(435): n is a, c, g, or t
  misc_feature (448)..(448): n is a, c, g, or t
  misc_feature (467)..(467): n is a, c, g, or t
gcagcagttcgtccggacccaacccttctacctcctttgagcccatcaaggcagaccccacaggtgttttggaactccccaaagagctgtcagaaatctttgatcccacacgagagtgcaatgagctcggagctgctggaggagttgatgtcctcagaagtgtttgcccctctgcttcgtctttctccacccccgggagaccacgattatatctacaacctggacgagagtgaaggtgtctgtgacctctttgatgtgcctgttctcaacctctggactgacagggacatgccctgtgtggctgggacccagactgtctgacctgggggttgcctnggggacctctcccacccgacccctacagagcttgagagccacagacgcctggcttctccgggctccccttcaacgnacagttctgggccaaagttccgnttcctgtgctggnattctgtgctcgcaaaaanggggaaaaggactcagcccccatcac

SEQ ID NO: 252771 - DNA, 581 bp, Homo Sapiens
ggttaaaaaaggactaaactttattgacaaactgctgcagacattttgacataagtttaagctacctatttaggcagacttacacatgtagcatttaatcttccgagaacaaaatgggaggacggtacaaatccaattaggactttaacttatgtacaaagtggattttgattcctttttcattcagctgcagtgtccctttttatatcatgctagtgttgagacatacttgactaacttgggaacagttcgatatattgacaaccgtcagcttaagaaaatcaacagcttttggccccagcgtccaagtgaacttttcatggagtgcagaatctcaaatggacaaaatactttgtctttttaaatactgaaaatttaattattagtactatgactgaaagattcttcatggctaaaaagctctgcatcaaactcaattcaggaggccttccctccccaccaccatcaacatattcaaaacctactccctccctctaagtatctctcaacacagtatgtctggggctagatttcaaaacccacgtaatgaaaaagtcagttttacaagcctaattttgttg

SEQ ID NO: 252772 - DNA, 443 bp, Homo Sapiens
ggggctcctgccgacgtgttcttccggtggcggagcggcggattagccttcgcggggcaaaatggagctcgaggccatgagcagatataccagcccagtgaacccagctgtcttcccccatctgaccgtggtgcttttggccattggcatgttcttcaccgcctggttcttcgtttacgaggtcacctctaccaagtacactcgtgatatctataaagagctcctcatctccttagtggcctcactcttcatgggctttggagtcctcttcctgctgctctgggttggcatctacgtgtgagcacccaagggtaacaaccagatggcttcactgaaacctgcttttgtaaattacttttttttactgttgctggaagtgtcccacctgctgctcataataaatgcagatgtatagcaaaaagaaaaacttctgagaactaaaa

SEQ ID NO: 252773 - DNA, 810 bp, Homo Sapiens
aggcgctggtaccccgtttgtccgcgcgttgctgcgttgtgaggggtgtcagctcagtgcatcccaggcagctcttagtgtggagcagtgaactgtgtgtggttccttctacttggggatcatgcagagagcttcacgtctgaagagagagctgcacatgttagccacagagccacccccaggcatcacatgttggcaagataaagaccaaatggatgacctgcgagctcaaatattaggtggagccaacacaccttatgagaaaggtgtttttaagctagaagttatcattcctgagaggtacccatttgaacctcctcagatccgatttctcactccaatttatcatccaaacattgattctgctggaaggatttgtctggatgttctcaaattgccaccaaaaggtgcttggagaccatccctcaacatcgcaactgtgttgacctctattcagctgctcatgtcagaacccaaccctgatgacccgctcatggctgacatatcctcagaatttaaatataataagccagccttcctcaagaatgccagacagtggacagagaagcatgcaagacagaaacaaaaggctgatgaggaagagatgcttgataatctaccagaggctggtgactccagagtacacaactcaacacagaaaaggaaggccagtcagctagtaggcatagaaaagaaatttcatcctgatgtttaggggacttgtcctggttcatcttagttaatgtgttctttgccaaggtgatctaagttgcctaccttgaatttttttttaaatatatttgatgacat

SEQ ID NO: 252774 - DNA, 906 bp, Homo Sapiens
  misc_feature (786)..(786): n is a, c, g, or t
cggtccggaattcctcgggatgccacgccaacagtcagaggtcgcgcaggcgctggtaccccgttggtccgcgcgttgctgcgttgtgaggggtgtcagctcagtgcatcccaggcagctcttagtgtggagcagtgaactgtgtgtggttccttctacttggggatcatgcagagagcttcgcgtctgaagagagagctgcacatgttagccacagagccacccccaggcatcacatgttggcaagataaagaccaaatggatgacctgcgagctcaaatattaggtggagccaacacaccttatgagaaaggtgtttttaagctagaagttatcattcctgagaggtacccatttgaacctcctcagatccgatttctcactccaatttatcatccaaacattgattctgctggaaggatttgtctggatgttctcaaattgccaccaaaaggtgcttggagaccatccctcaacatcgcaactgtgttgacctctattcagctgctcatgtcagaacccaaccctgatgacccgctcatggctgacatagtaaatatccccattttcctctgcaacacatatcctaccttgtctataccgctaactctccctgtgtgaggatagctgcagcagctctaaccactgcaaatcatgtttttctccattaactcttttctttgatttcatctcagtcctcagaatttaaatataataagccagccttcctcaagaatgccagacagtggacagagaagcatgcaagacagaaacaaaaggctgatngagaagagatgcttgataatctaccagaggctggtgactccagagtacacaactcaacaccgaaaaaggaaggccagtcagctagtaggcatagaaaagaatttcatcctgatgttttag

SEQ ID NO: 252775 - DNA, 795 bp, Homo Sapiens; identical to SEQ ID NO: 82499

SEQ ID NO: 252776 - DNA, 556 bp, Homo Sapiens
  misc_feature (501)..(501): n is a, c, g, or t
  misc_feature (506)..(506): n is a, c, g, or t
  misc_feature (514)..(514): n is a, c, g, or t
ggtcagctcagtgcatcccaggcagctcttagtgtggagcagtgaactgtgtgtggttccttctacttggggatcatgcagagagcttcacgtctgaagagagagctgcacatgttagccacagagccacccccaggcatcacatgttggcaagataaagaccaaatggatgacctgcgagctcaaatattaggtggagccaacacaccttatgagaaaggtgtttttaagctagaagttatcattcctgagaggtacccatttgaacctcctcagatccgatttctcactccaatttatcatccaaacattgattctgctggaaggatttgtctggatgttctcaaattgccaccaaaaggtgcttgggagaccatccctcaacatcgcaactgtgttgacctctatttcagctgcttcatgttcagaacccaaccctggatggacccgttcatgggttgacatattcctcaggattttaaatattaattaaggccaggnttttnctcaaagnattgcccaggacagttgggacagaggaaggcctggccaagac

SEQ ID NO: 252777 - DNA, 969 bp, Homo Sapiens
tgctgtatctaaatgaatctgtgtaattgggcccagatgtgggtttgctcagtattagtagacaaggtctttgttcagacgattaggtgcctaactggcaaatgccttagtttcttaaaacgtattttctgatgtggctttacatttcaaaagtgaacttgattcaacctgagaaaactgattaaaaaattagtttaaatttgccagcagggaagtaaaataattatgggaagagtgtcttaagcctaatattaaatcagttttgttaaggggaaaactcaatagttctgttacttaggctgttagatccaagttgatttttgtgtctacagctaaattttgtttacaattaggctattttttaatataggatttagaaaccaagggtatgtgttttaaaattacactttttcttaacctgtctagctgtcggaaaaggtaacagaagatggaactcgaaatcccaatgaaaaacctacccagcaaagaagcatagcttttagctctaataattctgtagcaaagccaatacaaaaatcagctaaagctgccacagaagaggcatcttcaagatcaccaaaaatagatcagaaaaaaagtccatatggactgtggatacctatctaaaagaagaaaactgatggctaagtttgcatgaaaactgcactttattgcaagttagtgtttctagcattatcccatccctttgagccattcaggggtacttgtgcatttaaaaaccaacacaaaaagatgtaaatacttaacactcaaatattaacattttaggtttctcttgcagatatgagagatagcacagatggaccaaaggttatgcacaggtgggagtcttttgtatatagttgtaaatattgtcttggttatgtaaaaatgaaattttttagacacagtaattgaactgtattcctgttttgtatatttaataaatttcttgttttcattcttagt

SEQ ID NO: 252778 - DNA, 386 bp, Homo Sapiens
  misc_feature (22)..(22): n is a, c, g, or t
  misc_feature (27)..(27): n is a, c, g, or t
  misc_feature (103)..(103): n is a, c, g, or t
  misc_feature (163)..(163): n is a, c, g, or t
  misc_feature (349)..(349): n is a, c, g, or t
cccccatatggacctgtggagnccccnatcccaaaagaagaaaacctgatgggcctaagtttgccatgaaaacctgcacctttattggcaagttaagtggttncctagcattatcccccatcccctttgagcccattccaggggtaccttgtgcatttaaaancccaacacaaaaagatgtaaatacttaacactcaaatattaacattttaggtttctcttgcagatatgagagatagcacagatggaccaaaggttatgcacaggtgggagtcttttgtatatagttgtaaatattgtcttggttatgtaaaaatgaaattttttagacacagtaattgaactgtantcctgttttgtatatttaataaatttcttgttttcaa

SEQ ID NO: 252779 - DNA, 771 bp, Homo Sapiens
  misc_feature (694)..(719): n is a, c, g, or t
gccagatcaggggagctcaggtaccttccagagagtgagacccagcgcccttgtctcgcacccagtaggctttcatccccgccatggcggagctgatccagaagaagctacagggagaagtggagaaatatcaacagctacagaaggacttaagtaaatccatgtcggggaggcagaaacttgaagcacaactaacagttaaacttctgggtccggtgctagtcaaacaggagctgggggaggctcgggccacagtagggaagaggctggactatatcacagctgtgtgagtttttattccaccaccgtgtgctgcaccctgtgatgcaagtgaaccattggagtagaggtgttgaaccattgcagaacagctctccatagtggcccctagtcctccagttcctccaaccctttccttccctttttaaccccccttcttctcccgcccaaactggatctcaagttttccacctatctctttcttgcgtttagcactctccatagtaagtcctactaatttctccctttctgcctggctcccttggctctccttagtaagcgatacgaatcccagcttccggatcttgagcggcagtcagagcaacagagggagacccttgctcagctgcagcaggagttccagcgggcccaggcagcaaaggcaggggctcctgcaaggcctgaccccatggtnnnnnnnnnnnnnnnnnnnnnnnnnnatgaggcagctctaggatctatactgtagctaataaaatgtaaaaacacctg

SEQ ID NO: 252780 - DNA, 771 bp, Homo Sapiens; identical to SEQ ID NO: 9389

SEQ ID NO: 252781 - DNA, 615 bp, Homo Sapiens
aaagacagaagtaatctctgcaggccgttctggatacatagagaaaatgaacttctactgtacaactctgaatgtccttgtgttcatcagaattatgtattaatactgagagttagatcttatttgtgctcgatagccaaacacaaaaagcatagaatcaataacattggatttgccactgccatttggcccgataatacaggaaaagcgcttatggaaaggtcccagaattttctccccagcataggatttgaagttctggtttacaatatgagttatcataagccgaggagctccagcttcattggtcattgctggaggcgggggaggaggaatgctgttcaaaatctcttctaaacttctattatcaagttcctcacttgcagtctctgcggcggtggctgggctctccgtgcggccggacggcggctcaagcctccgcgtcgctgctggcgccgtcaggggacggcggcggcggcccttcctctctgcgccgggcagtggagggctgggtgcctttacggggcatggtcgctgcaggacagtccactcagaccaaggctggagacggttgtgtagtacccacctccccgctcctaccggtgctcggctccg

SEQ ID NO: 252782 - DNA, 1238 bp, Homo Sapiens
gacagagagactgcaagcgaggaacttgataataaaagtgtagcagagattatgaacagcattcctcctcccccgcctacagcattgaccactgaagctggagctcctcggcttatgataactcatatcgtagaccagaacttgatatcctatgctggggagaaataactgggaccgttacataagcgcttttcctgtattatcagggccacatgggagaggcgaatccaatgtgattgatactatgctttctgtgtctggctatcgagcacaactaataagatctaaaaaactctcagtgttaatacatacttctgatgaacacacggacattcatagttgtacacgagaaggtcatcttctacagataattgataatgaaaaggatgattatgaagtcattcctaacactgagatctatgtatccagagcgacctgcagagaaatactcctgtctatcacataagaggaaggagaaagacatttaaggatgttgtaaatcttgttcgaagccatgggattgacttggaccatactagatatttaattctacagggtgaagttgaacaacttgctgtgatgagaccaaaaggccagactgaacacgatgagggcatgcttgaatatttagaacatataattgcttgtggacgcctaaatgaacctatctaaagccttgtgtcggagagtcgaaatattaaatgaacacacaggagagaagttaaacagggtaaagatggtggaaaaggaaaaggatgccttagaaggagagaaaaacatagctatcgaatttcttaccttggaaaatgaaatatttagaaaaaagaatcatgtttgtcaatattatatttatgagttgcagaaacgaattgctgaaatggaaactcaaaaggaaaaaattcatgaagataccaaagaaattaatgagaagagcaatatactatcaaatgaaatgaaagctaagaataaagatgtaaaagatacagaaaagaaactgaataaaattacaaaatttattgaggagaataaagaaaaatttacacagctagatttggaagatgttcaagttagagaaaagttaaaacatgccacgagtaaagccaaaaaactggagaaacaacttcaaaaagataaagaaaaggttgaagaatttaaaagtatacctgccaagagtaacaatatcattaatgaaacaacaaccagaaacaatgccctcgagaaggaaaaagagaaagaag

SEQ ID NO: 252783 - DNA, 789 bp, Homo Sapiens
taagaaataaaaagtgagtcttcatattcaaattagtatatgaggttaggcaacaattcttatatgggaccaggtatatttaatttgcctttctttgcagtcatcctagtaaatccttgtaaagggttattttatatacaattttgtagtatattctaaatcccctttggcaaataaagctgaagttatctagtgtcagcatactgtgatttgtatatttatataagacaagattgcatcattctgattaagttgcagcattttagttttatctgataggcctgtattgagtaatcagtagctatgtgcaaatattaagtcaacttaattaccagacccagaaggccagaggtaatcaaagagtactttcggaagatgaaatatttataatgagttatggaaacaatgttttagaaatgtttttcttggtgtaatttaatgcagatttttacctcaattttgttaaaaaacttgataatttgatccctccatctatttaatatttaatattttcagattcctagagtatttaaaatttaaacacaattataaaattaattataattcctacttatgttagctatgatttagggccaaaactaccctggttttgtcttgcaacttgaaacattgtgtattttaaactatataatttgggaacattattttatagactgtggataaccaaatataagatttgtgatttttaatgcttcatttgtgtaaaatcatttgtatattctatttatagtatgcattttctagctcattaaaagtacagaaaaacct

SEQ ID NO: 252784 - DNA, 523 bp, Homo Sapiens
aagatcactaccttttaaaatttgttaagagaataagaagtaagtagtgttttaaataaaatgaaaaaatacaacagcatcagactaaaatacgtgattattttaaacaaacagtgcacaatctgaggaagtttggttagggcacaatcatttttatatctacatggaagtcacatcatacacatattggagaacagggattggggagcttgctttgccttaaaaaagtttaaaactaaaagacaaaatagtgtccccagctttttcaaaaacctttgtgacagtataaaaagcaggtaacaaacttagttttaagttagttatggtgctaatctgctaaaagtaaagatgaacaaatgactacattagtaaaccagacaattcatattcataattgataataaaagcaaagtttatgggatgtttgattgccaagaataaactgaatgaaataaattgaataaaaaagaatgcattattcattcagtctggcccctaccatcaaaatgaaaagacaattact

SEQ ID NO: 252785 - DNA, 1574 bp, Homo Sapiens
  misc_feature (114)..(159): n is a, c, g, or t
ctcctcctcctgctcctcctggttggagcgcagagtccggagcgggctggggggagagagcccgagagcagggttcggtgccttttcctctgtccccagccggtgcccagaggnnnnnnnnnnnnnnnnnnnnnnnnnnnnnnnnnnnnnnnnnnnnnntccccttgtcccgggatcgctccgtcgcacccaccatgatggaagacgacgggcagacccggactctatacgtaggtaacctttccagagatgtgacagaagtccttatacttcagttgttcagtcagattggaccctgtaaaagctgtaaaatgataacagagcatacaagcaatgacccatattgctttgtggaattttatgaacacagagatgcagctgctgcattagctgctatgaatgggagaaaaattttgggaaaggaggtcaaagtaaactgggcaaccacaccaagtagccagaaaaaagatacttccaatcacttccatgtgtttgttggggatttgagtccagaaattacaacagaagatatcaaatcagcatttgccccctttggtaaaatatcggatgcccgggtagttaaagacatggcaactggaaaatccaaaggctatggttttgtatctttttataacaaactggatgcagaaaatgcgattgtgcatatgggcggtcagtggttgggtggtcgtcaaatccgaaccaattgggccactcgtaaaccacctgcacctaaaagtacacaagaaaacaacactaagcagttgagatttgaagatgtagtaaaccagtcaagtccaaaaaattgtactgtgtactgtggaggaattgcgtctgggttaacagatcagcttatgagacagacattctcaccatttggacaaattatggaaataagagttttcccagaaaagggctattcatttgtcagattttcaacccatgaaagtgcagcccatgccattgtttcggtgaacggtactacgattgaaggacatgtggttaaatgctattggggtaaagaatctcctgatatgactaaaaacttccaacaggttgactatagtcaatggggccaatggagccaagtgtatggaaacccacaacagtatggacagtatatggcaaatgggtggcaagtaccgccttatggagtatacgggcaaccatggaatcaacaaggatttggagtagatcaatcaccttctgctgcttggatgggtggatttggtgctcagcctccccaaggacaagctcctccccctgtaatacctcctcctaaccaagccggatatggtatggcaagttaccaaacacagtgagccgggactctaacaaaaaattgtaattcatgataggcttcgatttcctgtgacactctgaagacatgaaagtagacatcggaaaatgaaaatatttattttaaaaattgaaatgtttggaacctttagcacagatttgctttggtgaaggacacgtgtcttctagttctgcctttttaagtttttgttcatgatggatatgaacatgatttttctttatgtacaaaaactaaaataaagtcaataaagaca

SEQ ID NO: 252786 - DNA, 545 bp, Homo Sapiens
  misc_feature (362)..(362): n is a, c, g, or t
  misc_feature (497)..(497): n is a, c, g, or t
ggatgagccaccatgcctggctgggtatttatattatcattctagtttcagagtatacagaagtttcatcccatcatttggaaaaataaaggcatctgaagtacaatattacttatagaaatagtttatattcctattaaatcttaatcttgtggcatcagggaaatatttgttacatagtaggcaatttttatccagtactttatagattcaactctaagttgcaagcgaagtcaaaactgatgaaaatttatttagaaaaatctaaaaattctggttttaaatatgagaatcagtggaaaataaggggataatttttgtaggtcatatgattgaagaaaatattattttaacaatggtanagcatatgatttggtactataataacctgtataaagatcatttatgggggttcagggggattttaaccatggcattatttcagataggttaagaattggttatatagaaaataatcaggtgattttgatgctttntagtgcatttgattatatctgttagctgttgctatcaaataaatgtgt

SEQ ID NO: 252787 - DNA, 2686 bp, Homo Sapiens
  misc_feature (47)..(47): n is a, c, g, or t
  misc_feature (1599)..(1843): n is a, c, g, or t
cctgcggcgaggatggagggcctggcagtgcggttgctgcgcggcanaggctgctaagaagaaatttcctgacttgtttgtcttcttggaagattcctcctcatgtctcaaaatcttcccagtcagaagctctactcaatataacaaataatggaatacactttgctcccctgcaaacatttacagatgaggaaatgatgataaagagttcagttaaaaaatttgctcaggaacaaattgcacctttggtttcaaccatggatgaaaattcgaaaatggagaaatcagtaatacaaggattatttcaacaagggttgatgggtattgaagttgacccagaatatggaggcacaggagcttcatttttatccactgtgctcgtgatagaggaattagccaaagttgatgcatctgtggctgtcttttgtgagatccagaacacattaattaacacactgattagaaaacatggaacagaagaacaaaaggccacctatttgcctcagctcactacagaaaaagtaggaagtttctgcctttcagaggctggagcaggtagtgactcatttgctttgaagaccagagctgataaagagggagattattatgtcctcaatggatcaaagatgtggatcagcagtgctgagcacgcagggctctttctggtgatggcaaatgtagaccctaccattggatataagggaattacctccttcttagtagatcgtgatactccgggccttcatatagggaaacctgaaaacaaattggggctcagagcttcttccacctgcccgttaacattcgaaaatgtcaaggttccagaagccaatatcttgggacaaattggacatggctataagtatgccatagggagtctcaatgaaggtagaataggaattgctgcacagatgctgggactggcgcaaggatgttttgactacactattccatatattaaagaaaggatacaatttggcaaaagactatttgattttcagggcctccaacaccaagtggctcacgtggccacccagctggaagctgcaagattactaacatacaatgctgctaggcttttagaagctggaaagccattcataaaagaagcgtcaatggccaaatactatgcatcagagattgcaggacaaacaacgagtaaatgtatcgagtggatggggggagtaggctacaccaaagattaccctgtggagaaatacttccgagatgcaaagattggtacgatatatgaaggagcttccaacatccagttgaacaccattgcaaagcatatcgatgcagaatactgacgtctataggagtgggacccctccctggtgtcactgctgtaaaattttaaacggttgtgtcttgttgggagtaagtgccttgcgtgggaataaacttccacagcattcgaatattttaatgaagcccttagtcagggtcctggtgttggccttttttggttttctcttttcaggctgtttaacttaggcacaggagatccactttttaacttgggaaataagcacctgtatttttttccaaaactgtttttaaagctgaatacgcatacatatatataattttactctnnnnnnnnnnnnnnnnnnnnnnnnnnnnnnnnnnnnnnnnnnnnnnnnnnnnnnnnnnnnnnnnnnnnnnnnnnnnnnnnnnnnnnnnnnnnnnnnnnnnnnnnnnnnnnnnnnnnnnnnnnnnnnnnnnnnnnnnnnnnnnnnnnnnnnnnnnnnnnnnnnnnnnnnnnnnnnnnnnnnnnnnnnnnnnnnnnnnnnnnnnnnnnnnnnnnnnnnnnnnnnnnnnnnnnnnnnnnnnnnnnnnnggatgagccaccgtgcctggctgggtatttatattatcattctagtttcagagtatacagaagtttcatcccatcatttggaaaaataaaggcatctgaagtacaatattacttatagaaatagtttatattcctattaaatcttaatcttgtggcatcagggaaatatttgttacatagtaggcaatttttatccagtactttatagattcaactctaagttgcaagcgaagtcaaaactgatgaaaatttatttagaaaaatctaaaaattctggttttaaatatgagaatcagtggaaaataagggtataattttgtaggtcatatgattgaagaaaatattattttaacaatgtaaagcaatatgatttgttactataattaacctgtataaaagatacattttatggtggtttcagtaggtcattttaaaaaccaatgtgcattagttttccaagtataaggtttaagtaatttggtttaataatcagaaaatattcaatacagtgttggatattctgtcatgcactatttttcagttgacaatttctgtattttaattgaatactgtttcttcagtcatggttattgcactttatcctgaataataattcagaaattgggttttggttcagtgattctcaagaaaaagatctcttgcccattaagaagtgtatcaaaatctcataaggaatgagggagagaagggggctgtagagtttgaaaaagcatattcaatattaaaatagttttatatttgggaaggcaaaaatgaatctattgttttgcaatataggttataaacaggcaaaatgcaataaaatatatatctggttgtaaa

SEQ ID NO: 252788 - DNA, 413 bp, Homo Sapiens
cctcagctcactacagaaaaagtaggaagtttctgcctttcagaggctggagcaggtagtgactcatttgctttgaagaccagagctgataaagagggagattattatgtcctcaatggatcaaagatgtggatcagcagtgctgagcacgcagggctctttctggtgatggcaaatgtagaccctaccattggatataagggaattacctccttcttagtagatcgtgatactccgggccttcatatagggaaacctgaaaacaaattggggctcagagcttcttccacctgcccgttaacattcgaaaatgtcaaggttccagaaggccaatatcttggggacaaattgggacatgggctattaaggtatggccatagggggagtcttcaatggaagggtaggattagggg

SEQ ID NO: 252789 - DNA, 992 bp, Homo Sapiens
atttgatgattcaatacatttttgattcaaatagtcaccacataacctaggcacgatattaagcattttacaagcaaaatattttactgattttcttttaaattgccagagtacaataagtgaactggttaagagacatacttctgtacataaaaatatccatgtattttatacaagtgtatggaacagagtttaagataataaaaccacaacatcacaataaataggatgtgttcctactgcacagcacagcacgctttatcaggaagctgccaagtctttttcaaggtgctttatgtttttctgagctaggctcagatttccccaaaaaaggaataggttagtaatggctggatctgaatgtctactttcataagttgctttttattttcatctccaataacaggaatggaagatatgataatttaattattttcaaaaagtctttgcaacttaccaattctattccaattccagttttttaaaatgccagattaatctaactctagcaccatacgagaatgaaatacatgtatttttgtcagagcaacaatattttatatcatctttgttcctctggctataacaattgtgtttagaaaaatttaccaagctaaaaatagttgatctaagttgtcataaaaaagaatattaaataccctttggtaaaaatagatatatttaacaagattagaaaagccaaccagttataatgtcaaaaggagaatataaaaatgtaccacaatgaaaccaaataaactgacttatcgataaagtgaagataaggccactcttcttttcaggtttatctcttccaaaccatgaatgtagttctcttcttctaaatggcagagaattttaataagaaatatgaaaaatcccgtctgtcctatcagcacgacaccagtttaattcatagccacatagttcctttttaaaaacccggtttgtagtacatagaatgttctggtttacatatgtgaatatgagcc

SEQ ID NO: 252790 - DNA, 809 bp, Homo Sapiens
  misc_feature (578)..(605): n is a, c, g, or t
  misc_feature (727)..(727): n is a, c, g, or t
tttggctgttagcggcgttgtagttaagctcgtgtaacggcggcggtgtcggcagctgctgtagcgaagagagtttggcgcgatgtctcacaccattttgctggtacagcctaccaagaggccagaaggcagaacttatgctgactacgaatctgtgaatgaatgcatggaaggtgtttgtaaaatgtatgaagaacatctgaaaagaatgaatcccaacagtccctctatcacatatgacatcagtcagttgtttgatttcatcgatgatctggcagacctcagctgcctggtttaccgagctgatacccagacataccagccttataacaaagactggattaaagagaagatctacgtgctccttcgtcggcaggcccaacaggctgggaaataattgtgttggaagcactgggggggttggggtgggcttggaacacaggtgtgtacagcgtgctgtagtggaagttttgtatcatagtaatcctgtttccactttgttatactctagccaagattgactgtattagatgaaatgtgaggatcttgttcaatcggaaacccccgttacctcctcnnnnnnnnnnnnnnnnnnnnnnnnnnnnacttaaacatttttatgatgatttagatggaagttgttcttcgtcacttaatgttggttcccgtccttcaactgttcatatctactttatagcattcacatactaacccttcttccagaagngggtgggggggttggaaaatgcaattttagccctggccctcaggataaaggcttgggaaaaaataaaataaatggcccttta

SEQ ID NO: 252791 - DNA, 1203 bp, Homo Sapiens
  misc_feature (1012)..(1012): n is a, c, g, or t
  misc_feature (1014)..(1014): n is a, c, g, or t
  misc_feature (1104)..(1104): n is a, c, g, or t
  misc_feature (1107)..(1107): n is a, c, g, or t
tattaagcacattccacagtacaaagctgtcatgaataatatctgtacaatttaacagtttcaatagctgttcagacacaaatttatttcaaacagataattggcaaacataattaattacaagttagaattagactatcccagtgctttaaaacattaatatagcagtaatttacatttgctcagttatggttagcaaaataaagtccagagtatggctgggaattactattataatcccagaaagtcagaactccttgggtgccaaagtcccctgctataatttagtaggcacaattcaaaggttgtctgcatattcaaaggccatcatctcccaaggaacgaggggaacttctatattaaacatgcaaaaacaacaaaaaatccattcattcattcagaattgcctcctcccctgccccctcccttccccctgggctttcctaaccagtttgatattgaagctgtaggatgaaaagtggtcaaagctaaatcactttcacaaccaccatcaagcttacaacatccaccttatgaatggaggtttattgtttacactttgagactcaacctctcaaaaacataaattaatttagtaacatgggaaggaaggattttatttttaaaagaaaaactaaaaaagcaaagccaactcaataaacaatcacatacacacacactgatccccacaccgttctcaatgcaaaggacaaatcagagcccaggggccttccctttagtagtagagtgtgcttccacgggaagaggtttactttataggaggctgtttattggtcctttaaaatgttattgacattccttgatctttggaaacaatggacgaaaggcaaatcaaacctaatattgaataagggacaaggagtgccaattggatgccaacgtcctttccatgcactgtcagggcaacagtgccatttacacatttgggctgtgtccgtagggaggacttgggagctttgagaacctgctggggccacagcagcagctgacncnagagatgactggggtggcattcatgggcttgaggcttcactccacttcagagcacccacccctcagcatgggcctctgaaccagcctganctncctgcaggctccaacacaccagcagccctgccagaaccttggcaaggccgggatgcatgaattccagagccaagacagcccgtcaacagggccttc

SEQ ID NO: 252792 - DNA, 1455 bp, Homo Sapiens
  misc_feature (556)..(584): n is a, c, g, or t
  misc_feature (816)..(943): n is a, c, g, or t
  misc_feature (1211)..(1211): n is a, c, g, or t
gggaagctcgtgtaacggcggcggtgtcggcagctgctgtagcgaagagagtttggcgcgatgtctcacaccattttgctggtacagcctaccaagaggccagaaggcagaacttatgctgactacgaatctgtgaatgaatgcatggaaggtgtttgtaaaatgtatgaagaacatctgaaaagaatgaatcccaacagtccctctatcacatatgacatcagtcagttgtttgatttcatcgatgatctggcagacctcagctgcctggtttaccgagctgatacccagacataccagccttataacaaagactgcattaaagagaagatctacgtgctccttcgtcggcaggcccaacaggctgggaaataattgtgttggaagcactgggggggttggggtgggcttggaacacaggtgtgtacagcgtgctgtagtggaagttttgtatcatagtaatcctgtttccactttgttatactctagccaagattgactgtattagatgaaatgtgaggatcttgttcaatcggaaacccccgttacctcctcnnnnnnnnnnnnnnnnnnnnnnnnnnnnnacttaaacatttttatgatgatttagatggaagttgttcttcgtcacttaatgttggttccagtccttcaactgttcatatctactttataacattcacatactaacccttcttcaagatggggtggggggtggaaatgcagtttagccatgtcctcaagataaagtcttggtaaaaataaataaatgtcctttattttaccccatttcctctccttcgcttctttaattannnnnnnnnnnnnnnnnnnnnnnnnnnnnnnnnnnnnnnnnnnnnnnnnnnnnnnnnnnnnnnnnnnnnnnnnnnnnnnnnnnnnnnnnnnnnnnnnnnnnnnnnnnnnnnnnnnnnnnnnnnnnnnnccccttctttactccggcccttttccttctcctatcttatttttatagatcccctccaccgtttttccttctcttccataccttcttctaattccattcttccatttctcttgttgtcgctcattcttttacatctatatgctctggagctgtttcgtctcttcttttaccctctcacgtttcccccatactatttctctgtcctttttgttccctatcctctttgcccctatttgtttgattctgtccttccttctttaatttgccngtcttctgcttgtacttgcagtttactttatcttcttcttgctctcttattctttcgatcctacctcctactgctctcatgtactgtttcttccctccattatatagagtctccttctactcactcaccactatttatttcgcttcctatacttcaatacaactgcctcttttctcttccctcttgtcttatcgcccatgacttttactcttcttcgccttgctagcccatatccctactactg

SEQ ID NO: 252793 - DNA, 760 bp, Homo Sapiens
  misc_feature (582)..(582): n is a, c, g, or t
  misc_feature (608)..(638): n is a, c, g, or t
gggacgacttccggcggctcctctcgcgaggattggctgttagcggcgttgtagttaagctcgtgtaacggcggcggtgtcggcagctgctgtagcgaagagagtttggcgcgatgtctcacaccattttgctggtacagcctaccaagaggccagaaggcagaacttatgctgactacgaatctgtgaatgaatgcatggaaggtgtttgtaaaatgtatgaagaacatctgaaaagaatgaatcccaacagtccctctatcacatatgacatcagtcagttgtttgatttcatcgatgatctggcagacctcagctgcctggtttaccgagctgatacccagacataccagccttataacaaagactggattaaagagaagatctacgtgctccttcgtcggcaggcccaacaggctgggaaataattgtgttggaagcactgggggggttggggtgggcttggaacacaggtgtgtacagcgtgctgtagtggaagttttgtatcatagtaatcctggttccactttgttatactctagccaagattgactgtattagatgaaatgtgaggatcttgtntcaatcggaaaaccccgttacctccnnnnnnnnnnnnnnnnnnnnnnnnnnnnnnnacttaaacatttttatgatgatttagatggaagttggtcttcctcacttaatggtggttccaggccttccactgggcctatcctactttataacatttcacatactaacccttcttccagat

SEQ ID NO: 252794 - DNA, 1292 bp, Homo Sapiens
  misc_feature (1220)..(1242): n is a, c, g, or t
gggatagttctccctgagtgagacttgcctgctgctctggcccctggtcctgtcctgttctccagcatggtgtgtctgaggctccctggaggctcctgcatggcagttctgacagtgacactgatggtgctgagctccccactggctttggctggggacaccagaccacgtttcttggagcaggctaagtgtgagtgtcatttcttcaatgggacggagcgggtgcggttcctggacagatacttctataaccaagaggagtacgtgcgcttcgacagcgacgtgggggagtaccgggcggtgacggagctggggcggcctgatgccgagtactggaacagccagaaggacctcctggagcagaggcgggccgcggtggacacctactgcagacacaactacggggttggtgagagcttcacagtgcagcggcgagttcatcctaaggtgactgtgtatccttcaaagacccagcccctgcagcaccacaacctcctggtctgctctgtgagtggtttctatccaggcagcattgaagtcaggtggttccggaacggccaggaagagaagactggggtggtgtccacaggcctgatccagaatggagactggaccttccagaccctggtgatgctggaaacagttcctcggaagtggagaggtttacacctgccaagtggagcacccaagcgtgacaagccctctcacagtggaatggagagcacggtctgaatctgcacagagcaagatgctgagtggagtcgggggctttgtgctgggcctgctcttccttggggccgggctgttcatctacttcaggaatcagaaaggacactctggacttcagccaacaggattcctgagctgaaatgcagatgaccacattcaaggaagaactttctgccccagctttgcaggatgaaaagctttcctgcttggcagttattcttccacaagagagggctttctcaggacctggttgctactggttcagcaactgcagaaaatgtcctcccttgtggcttcctcagctcctgcccttggcctgaagtcccagcattgatggcagcgcctcatcttcaacttttgtgctcccctttgcctaaaccgtatggcctcccgtgcatctgtactcaccctgtaccacaaacacattacattattaaatgtttctcaaagatggagttaaatatcatctggtccatttggctccaaagacnnnnnnnnnnnnnnnnnnnnnnngggaaggaagattatttcccaatagaataatgattttcatgtatatgtca

SEQ ID NO: 252795 - DNA, 1082 bp, Homo Sapiens
gttgggttttgattatttgtggtgctaagaagaagggaacatggttggaggcccagtgagagaaacagtgctttgaatcaaagagcagaatgatagaaactgacttcagagcaacttcttggcagcagtatccaatttggaagttgaaggtctgtcctggagccagatgctaacgaaacacagcaaatgcttttcctaaggcacaatagtcttttcagtgagctcaggaaccctgtttatgcagatcctcgttgaactttcttgctcctcctgtgcatgaagatgcccactccacagatgatgagccccagcacgaagcccccagctcccgtcaatgtcttactccgggcagaatcagactgtgccttccactccacggtgacaggactgtccaggctggtgtgctccacttggcagatgtagacgtctccctgctggggggtcatttccagcatcaccaggatctggaaggtccagtctccattacggatcaggttggtggacacgaccccagctgtttcctcctgtccattcaggaaccatcggacttgaatgctgcctgggtagaaatctgtcacgtggcagacaagcaggttgtggtgctgcaggggccccttcttggagggggaaacgttcaccttaggctggactcggcgctgcagggtcacggcctcgtccagctcgtagttgtgtctgcacatcctgtccggcactgcccgcttctcctccaggatgtccttctggctgttccagtactccgcagcaggccgccccagctccgtcaccgcccggaactcccccacgtcgctgtcgaagcgcgcgaactcctcccggttgtagatgtatctctccaggaagcgctgtgtcccattaaacgcgtagcattcctgccgtccctggaaaacgtaattctctggagtggccctgccctggaccacagatgtgagcagcaccatcagtaacgccgtcagagccactgtccggggggccgcagaaacctgcagaaccatcatggagctggaaaaggatggcaaaatgaaaagagctgcagtcaggaaaagaaggactcgctaaaggggccc

SEQ ID NO: 252796 - DNA, 815 bp, Homo Sapiens
ctgggcaggggcaggtgggcattacagaagagtgatgaccaatcccagacaaaagtcctcaggagtcagtgcaggagtcgccactccacggtgatggggctctggaggctggggtgctccacttggcaggtgtagatgtctccacgctggggagttatttccagcatcaccagaatctggaaggtccagtcaccattcctaatgagggaggtggacacaacaccggctgtctcctcctgatcattccgaaaccaccggactttgatctggcctggatagaaatctgtcaccgagcagaccagcaggttgtggtggttgagggcctctgtcctggatggggagatggtcactgtgggctccactctcctctgcaagatcccgcggaacgccacctcgtagttgtgtctgcacaccttgtccaacgccgcccgcgtcccgctccaagaagtccttatagctgttccagtactcggcatcaggccgccccagcgccgtcaccgcccggtacacccccacgtcgctgtcgaagcgcgcgtactcctctcggttatagatgtatctggtcacaacacgcacgcgctccgtcccgttggtgaagtagcacatgcccttaaactggaacacgaaatcctcgggagagtctctgccctcagccagtagggagctcagcatcgccagcatcaaggtgacagttgctacccgaaggtctccggggatccgcaaagccttcttccaagacataactgagacgaagggaaaagcagtggtagtcaacacagctcggacctgatggatgtgatgtacctggcagaaag

SEQ ID NO: 252797 - DNA, 511 bp, Homo Sapiens
gtggaatggagagcacagtctgaatctgcacagagcaagatgctgagtggagtcgggggctttgtgctgggcctgctcttccttggggccgggctattcatctacttcaagaatcagaaagggcactctggacttcacccaacaggactcgtgagctgaagtgcagatgaccacattcaagggggaaccttctgccccagctttgcatgatgaaaagctttcctgcttggctcttattcttccacaagagaggactttctcaggccctggttgctaccggttcagcaactctgcagaaaatgtccatccttgtggcttcctcagctcctgcccttggcctgaagtcccagcattgatggcagtgcctcatcttcaactttagtgctcccctttacctaacctacggcctcccatgcatctgtactccccctgtgtgccacaaatgcactacgttattaaatttttctgaagcccagagttaaaaatcatctgtccacctggctccaaagac

SEQ ID NO: 252798 - DNA, 771 bp, Homo Sapiens
  misc_feature (365)..(365): n is a, c, g, or t
  misc_feature (391)..(450): n is a, c, g, or t
  misc_feature (471)..(471): n is a, c, g, or t
  misc_feature (545)..(545): n is a, c, g, or t
  misc_feature (550)..(550): n is a, c, g, or t
  misc_feature (607)..(608): n is a, c, g, or t
  misc_feature (612)..(612): n is a, c, g, or t
  misc_feature (627)..(627): n is a, c, g, or t
ctctcgctgggcctgatgcctttaacctacttcaggaaaatctctaaggatgaaaattccttggccacctagattgtcttgaagatcagcctacttgggctctcagcagacaaagatgagtatagtgtctgtgttctgggagggggcttgatttggggccctggtgtgcagttatcaacgtccacatccttgtctctggcaggagcggagcagcgaacagaatccatcattcaccgggctctctactatgacttgatcagcagcccagacatccatggtacctataaggagctccttgacacggtcaccgccccccagaagaacctcaagagtgcctcccggatcgtctttgagaagaagacggngtttcaccgtgtttgccaggatagtnnnnnnnnnnnnnnnnnnnnnnnnnnnnnnnnnnnnnnnnnnnnnnnnnnnnnnnnnnnngctgcgcataaaatccagctntgtggcacctctggtgcaagagatcaacaactgggtgcaggcgcagatgaaagggaagctcgccaggtccacanagganattcccgatgagatcagcattctccttctcggtgtggccacttcaaggtggtaacannagtngactcagaagacttnctcgagattctactggatgaaagagaccggagggtccatgatgcgcctaggctgttacctatgtggatcaactagtgagatgcagtgctgacgagctaatattctctgctgaaggacaatgctgtgagagcactcgtattgcta

SEQ ID NO: 252799 - DNA, 583 bp, Homo Sapiens
  misc_feature (553)..(553): n is a, c, g, or t
cttagagggactaggctgggtgtggagctgcagcgtatccacaggccccaggatgcaggccctggtgctactcctctgcattggagccctcctcgggcacagcagctgccagaaccctgccagccccccggaggagggctccccagaccccgacagcacaggggcgctggtggaggaggaggatcctttcttcaaagtccccgtgaacaagctggcagcggctgtctccaacttcggctatgacctgtaccgggtgcgatccagcacgagccccacgaccaacgtgctcctgtctcctctcagtgtggccacggccctctcggccctctcgctgggagcggagcagcgaacagaatccatcattcaccgggctctctactatgacttgatcagcagcccagacatccatggtacctataaggagctccttgacacggtcaccggcccccagaagaacctcaagagtgcctcccggatcgtctttgagaagaagctgcgcatcctgacgggcaaccctcggttggaccttgcagagatcaacaaactggtgcangccgcaaatgaaagggaagctcggcaggtc

SEQ ID NO: 252800 - DNA, 825 bp, Homo Sapiens
  misc_feature (811)..(811): n is a, c, g, or t
aaggcagcaaaaaaagctctgtgctggctggagcccctcagtgtgcaggcttagagggactaggctgggtgtggagctgcagcgtaatccacaggccccaggatgcaggccctggtgctactcctctgcattggagccctcctcgggcacagcagctgccagaaccctgccagccccccggaggagggctccccagaccccgacagcacaggggcgctggtggaggaggaggatcctttcttcaaagtccccgtgaacaagctggcagcggctgtctccaacttcggctatgacctgtaccgggtgcgatccagcatgagccccacgaccaacgtgctcctgtctcctctcagtgtggccacggccctctcggccctctcgctgggagcggagcagcgaacagaatccatcattcaccgggctctctactatgacttgatcagcagcccagacatccatggtacctataaggagctccttgacacggtcactgccccccagaagaacctcaagagtgcctcccggatcgtctttgagaagaagctgcgcataaaatccagctttgtggcacctctggtgcaagagatcaacaactgggtgcaggcgcagatgaaagggaagctcgccaggtccacaaaggaaattcccgatgagatcagcattctccttctcggtgtggcgcacttcaaggggcagtgggtaacaaagtttgactccagaaagacttccctcgaggatttctacttggatgaagagaggaccgtgagggtccccatgatgtcggaccctaaggctgttttacgctatggcnttggattcagatct

SEQ ID NO: 252801 - DNA, 1822 bp, Homo Sapiens
  misc_feature (1628)..(1682): n is a, c, g, or t
  misc_feature (1687)..(1753): n is a, c, g, or t
aaaaaagctctgtgctggctggagccccctcagtgtgcaggcttagagggactaggctgggtgtggagctgcagcgtatccacaggccccaggatgcaggccctggtgctactcctctgcattggagccctcctcgggcacagcagctgccagaaccctgccagccccccggaggagggctccccagaccccgacagcacaggggcgctggtggaggaggaggatcctttcttcaaagtccccgtgaacaagctggcagcggctgtctccaacttcggctatgacctgtaccgggtgcgatccagcatgagccccacgaccaacgtgctcctgtctcctctcagtgtggccacggccctctcggccctctcgctgggagcggagcagcgaacagaatccatcattcaccgggctctctactatgacttgatcagcagcccagacatccatggtacctataaggagctccttgacacggtcactgccccccagaagaacctcaagagtgcctcccggatcgtctttgagaagaagctgcgcataaaatccagctttgtggcacctctggaaaagtcatatgggaccaggcccagagtcctgacgggcaaccctcgcttggacctgcaagagatcaacaactgggtgcaggcgcagatgaaagggaagctcgccaggtccacaaaggaaattcccgatgagatcagcattctccttctcggtgtggcgcacttcaaggggcagtgggtaacaaagtttgactccagaaagacttccctcgaggatttctacttggatgaagagaggaccgtgagggtccccatgatgtcggaccctaaggctgttttacgctatggcttggattcagatctcagctgcaagattgcccagctgcccttgaccggaagcatgagtatcatcttcttcctgcccctgaaagtgacccagaatttgaccttgatagaggagagcctcacctccgagttcattcatgacatagaccgagaactgaagaccgtgcaggcggtcctcactgtccccaagctgaagctgagttacgaaggcgaagtcaccaagtccctgcaggagatgaagctgcaatccttgtttgattcaccagactttagcaagatcacaggcaaacccatcaagctgactcaggtggaacaccgggctggctttgagtggaacgaggatggggcgggaaccacccccagcccagggctgcagcctgcccacctcaccttcccgctggactatcaccttaaccagcctttcatcttcgtactgagggacacagacacaggggcccttctcttcattggcaagattctggaccccaggggcccctaatatcccagtttaatattccaataccctagaagaaaacccgagggacagcagattccacaggacacgaaggctgcccctgtaaggtttcaatgcatacaataaaagagctttatccctaaaaaaaaaaccccccccaacaaaaactcgaggcatctatgtcgggtgcgggagaaaaagggaatgaaatggcccatgggtcttagctggtttccggacccaccctttcttggaacaaaatgggaaaacccctgcccggttcccctaatagtggagtcgcnnnnnnnnnnnnnnnnnnnnnnnnnnnnnnnnnnnnnnnnnnnnnnnnnnnnnnnttcgnnnnnnnnnnnnnnnnnnnnnnnnnnnnnnnnnnnnnnnnnnnnnnnnnnnnnnnnnnnnnnnnnnnggaatcctccgcgcgcggcacttctacctttgaaaatataccccccattgccgcccctccgcacgccat

SEQ ID NO: 252802 - DNA, 368 bp, Homo Sapiens
tcgaggggaggctcgcctagtcggtccgcatccgtgtcgaccacctgtctggacaccacgaagatgccacccgttgggggcagagatggagggtttgtctttgcactggagaagaggggctacgtaaaggcaggaccctggactcctgaagctgctgtggagcacccagaagcagttcgccagcttcatcgagagttcctcagagctggctccgtcatgcagaccttcaccttctatgcgagtgaagacaagctggagaacaggggcaactatgtcttatagaagatatctgggcaggaagtcaatgaagctgcttgcgacatcgcccgacaagtggctgatgggagatgctttggtagcaggagggg

SEQ ID NO: 252803 - DNA, 387 bp, Homo Sapiens
gaggacagaagttcttggagaacaaggtgcctctctcgcttctctttgcatctctggtagagtctgttgcagtgcttaaccacagcaggagctcaatatgcacacacttgtgggctggaagggaaggggctgcagcacctcagctgctcagcagctggagatagcagggctcctgttcgattatttcagggttttctttcactactccttagaagtctggctttgacagcgaaggacagaaaggtctgcctgaagctggcagcagattctcccaatactcccttcgagcccttgctctaatccagggtttggtgtgcatgtccaaaccacttccccagctgccgtgtttttctgaagctggtggcaaaaagcccctttctggggcca

SEQ ID NO: 252804 - DNA, 534 bp, Homo Sapiens
  misc_feature (312)..(325): n is a, c, g, or t
  misc_feature (338)..(359): n is a, c, g, or t
tgagccaccacacccggccataaacacaaattttagtctttgagactgtatttgcccacgtttgtggtgttttaatgcattgttacagattaaatgtaagtttgttaactggatcaggtttgagggaggagcaaggtcggttttgttaggccagtttcatttaataatcagaggaaacgcaattcagatgttctggagtgagaaacttaagtatttaatttccctttttgaaaaaggcagcggccaattttttcttccttaattataaattctagattatttattctacctatcatctggcagggttttttnnnnnnnnnnnnnntgttcctttgggnnnnnnnnnnnnnnnnnnnnnnggcaaagtttgtcaccccctgcaatccagcctgggagacataattcaaatcaattttggtcttaaatcttctaaggtttgggttatttcatgtgggccagtttctctttttgtcacaacaatttatcaatttgtggcaataaaaatgatttcccttttaaagtgtttgaatgtcc

SEQ ID NO: 252805 - DNA, 587 bp, Homo Sapiens
  misc_feature (216)..(481): n is a, c, g, or t
attaggtcctagaatttttaaaatgtgtcttcataatcataggtagctaggttataaactatttaaagacaagatcacgtgataagcttataatcttctcataattccccttacttagcattgtgttagacatactaataggtgcacagtgaaatacttattgttgattgtttaaaaataaagttttagaaaaccttttcaaaagtcagagtttannnnnnnnnnnnnnnnnnnnnnnnnnnnnnnnnnnnnnnnnnnnnnnnnnnnnnnnnnnnnnnnnnnnnnnnnnnnnnnnnnnnnnnnnnnnnnnnnnnnnnnnnnnnnnnnnnnnnnnnnnnnnnnnnnnnnnnnnnnnnnnnnnnnnnnnnnnnnnnnnnnnnnnnnnnnnnnnnnnnnnnnnnnnnnnnnnnnnnnnnnnnnnnnnnnnnnnnnnnnnnnnnnnnnnnnnnnnnnnnnnnnnnnnnnnnnnnnnnnnnnnnnntaattcaaatctattttggtcttatatcttcttatgtttgtgctatttcatgtgtgccagtttctctttttttcacaacaatttatcaatttgtggcaataaaaat

SEQ ID NO: 252806 - DNA, 910 bp, Homo Sapiens
cagcttcagaaaaacacggcagctggggaagtggtttggacatgcacaccaaaccctggattagagcaagggctcgaagggagtattgggagaatctgctgccagcttcaggcagacctttctgtccttcgctgtcaaagccagacttctaaggagtagtgaaagaaaaccctgaaataatcgaacaggaaaaagttgccctcaagcctgacctggaaccgttcctcaccttcatcctcaccatgccctgctatctccagctgctgagcagctgaggtgctgcagccccttcccttccagcccacaagtgtgtgcatattgagctcctgctgtggttaagcactgcaacagactctaccagagatgcaaagagaagcgagagaggcaccttgttctccaagaacttactgtccaatcatgctgtggtgcattcctttgaagatcatgaagaatagccaaacttgtctttgagggtgaatttgacactttaaaataatcagaagtcactgagacccaaagctagtgaataattcaagtgactaagctagatacttgaggatgatagagcaacactaaactaaagcaatgagtctgctttttttaatgatttatacaatgactccaaaggcaatcccaaagaaaagatgtaaagaatgttttgagcaatggtagcattattgaaataaatgtttaactatccaaagtgattactttcaaagatgatttttacttaaagatattaggtctggccaggcgaagtgactcacacctgcaatccagcctgggagacataattcaaatctattttggtcttatatcttcttatgtttgtgttatttcatgtgtgccagtttctctttttgtcacaacaatttatcaatttgtggcaataaaaatgatttacctttta

SEQ ID NO: 252807 - DNA, 457 bp, Homo Sapiens
attcccatttggactggaacccagagttgcccccagatgggatattcaaaaatacgccaaagaggcctacaacctgggggtcaggtacattggcgggtgctgtggatttgagccctaccacatcagggcaattgcaaaggagctggccccagaaaagggctttttgccaccagcttcagaaaaacatggcaactggggaagtggtttggacatgcacaccaaaccctgggttagagcaaggtaagcatctttttactaaccccaactaatttagattatgaatatggtcaagtgaggccatttaaaagactgcagcaaatttgttgtgtgatgatgaagaatcagtcatccccaaattctctcccagagatgtttacaaagcatccttattaggtgatttctggagattgttttaagaatatagaacggaaatgacctgattttggattttgcacat

SEQ ID NO: 252808 - DNA, 2505 bp, Homo Sapiens
gtacaaaaaagcaggctggtaccggtccggaattcccgggatcgcagcgggaaggctcgcctagtcggtccgcatccgtgtcgaccacctgtctggacaccacgaagatgccacccgttgggggcaaaaaggccaagaagggcatcctagaacgtttaaatgctggagagattgtgattggagatggagggtttgtctttgcactggagaagaggggctacgtaaaggcaggaccctggactcctgaagctgctgtggagcacccagaagcagttcgccagcttcatcgagagttcctcagagctggctcaaacgtcatgcagaccttcaccttctatgcgagtgaagacaagctggagaacaggggcaactatgtcttagagaagatatctgggcaggaagtcaatgaagctgcttgcgacatcgcccgacaagtggctgatgaaggagatgctttggtagcaggaggagtgagtcagacaccttcataccttagctgcaagagtgaaactgaagtcaaaaaagtatttctgcaacagttagaggtctttatgaagaagaacgtggacttcttgattgcagagtattttgaacacgttgaagaagctgtgtgggcagttgaaaccttgatagcatccggtaaacctgtggcagcaaccatgtgcattggcccagaaggagatttgcatggcgtgccccccggcgagtgtgcagtgcgcctggtgaaagcaggagcatccatcattggtgtgaactgccactttgaccccaccattagtttaaaaacagtgaagctcatgaaggagggcttggaggctgcccgactgaaagctcacctgatgagccagcccttggcttaccacactcctgactgcaacaagcagggattcatcgatctcccagaattcccatttggactggaacccagagttgccaccagatgggatattcaaaaatacgccagagaggcctacaacctgggggtcaggtacattggcgggtgctgtggatttgagccctaccacatcagggcaattgcagaggagctggccccagaaaggggctttttgccaccagcttcagaaaaacatggcagctggggaagtggtttggacatgcacaccaaaccctgggttagagcaagggccaggaaggaatactgggagaatcttcggatagcctcaggccggccatacaacccttcaatgtcaaagccagatggctggggagtgaccaaaggaacagccgagctgatgcagcagaaagaagccacaactgagcagcagctgaaagagctctttgaaaaacaaaaattcaaatcacagtagcctcgatagaagctatttttgatgaatttctaggtgtttgggtcacagttcctacaaatacggaaaagggggttaaaaagcagtgctttcatgaatgccatcctacacatattattgctattacctgaacaaaatagaattacaaatagcacttgataattttaaagtatgttttagaaattttcttaggagcaaaataagtacaaagtaaatcttgaacaggttcactaagcacccaccctgtgaaaagtattatggaaatcactgcagcacaggaaaagtaattcagatgttaatgccacttgaagaagttggtaggctagcaaagaggatgagacatgaactgtcataaaggactcagcaaccagccagggacagataaagcgctatggaaaggggcttccaagttcttttgaacatgacccttagtaacaaacacaatttatataatgacccagcaaaacacatcacatcttactgtcgaaattaaatgtgtgatccatcctagtattttctgttccattccttttcattctatttcatttataaaacatgctagttgagacttttcaaatggatttttatgacccactactgggtttggatccacagtttgaaaaatattgctacaagacacttaaggagaccatcctgtttaagtttattcttataagtaggtcagtcatatgagacctgatcaataaatatccaatacccagagtcctgctctcagagttcttctgtttcgtgacccacttttctaccagtaaaagacatagaccaatggggaggaggggaggagagatggatatttcagccctctccatcctagtcaacactggatcccacctagtgcctctgggccataaggctgagcagagtgagcttgtattagttggtagcttttaaaaaatataataagaaaaaagtagagattctccaaactctagcctggtttcctagattgagaactatgatatttttctctgataatttaatatctactctcctacaaaagctcaagcctgaagatacaagactattagaagaaacatgactaccctcagtgtattagaaaagaggtcatgcagctttctaaacattattgaattgtttgagctgttttgaaattgtaattcttttcagctattaaaaagaagagcaatgagactttttt

SEQ ID NO: 252809 - DNA, 878 bp, Homo Sapiens
  misc_feature (811)..(811): n is a, c, g, or t
  misc_feature (816)..(816): n is a, c, g, or t
  misc_feature (833)..(833): n is a, c, g, or t
  misc_feature (858)..(858): n is a, c, g, or t
ggaatcatggtgaagccaaacaaccacagactgtccacacaggtggctgagattgacacctttgctttttaatgtctgataggcaactttgtgtgctgcatgaaattatttaaaatattatataatttttaaatggttccatgatataaagaccaaagctaggggaggagtctgttgtctggtgtcatgtgttttgttcacacagggccaggaaggaatactgggagaatcttcggatagcctcaggccggccatacaacccttcaatgtcaaagccagatggctgtggagtgaccaaaggaacagccgagctgatgcagcagaaagaagccacaactgagcagcagctgaaagagctctttgaaaaacaaaaattcaaatcacagtagcctcgatagaagctatttttgatgaatttctaggtgtttgggtcacagttcctacaaatacggaaaagggggttaaaaagcagtgctttcatgaatgccatcctacacatattattgctattacctgaacaaaatagaattacaaatagcacttgataattttaaagtatgttttagaaattttcttaggagcaaaataagtacaaagtaaatcttgaacaggttcactaagcacccaccctgtgaaaagtattatggaaatcactgcagcacaggaaaagtaattcagatgttaatgccacttgaagaagttggtaggctaggcaaagagggatgagacatgaactgtcatgaaaggactcagccaaccagccaggggacaggataaaggcgctatggggaaagggggctttcccaagttnctttntggaacatggacccttnaggttaaccaaacacattttttatnattgaccccagccaaaacac

SEQ ID NO: 252810 - DNA, 513 bp, Homo Sapiens
gtagtagccctgaattcggaaaacgatttcaaaaactaaatattactattgctagttatgattgtcacctaaccccacacagtactcttgaaagcaaaaggtagagaaaatgtactaggtgtatttgtcttatctttcaccacatctttctttacctctgcaatcaagaagtccacgttcttcttcataaagacctctaactgttgcagaaatacttttttgacttcagtttcactcttgcagctaaggtatgaaggtgtctgactcactcctcctgctaccaaagcatctccttcatcagccacttgtcgggcgatgtcgcaagcagcttcattgacttcctgcccctaaaatgggtgagtatatgagacatctaaattttcatgtgaaattgaaataaaattattattcaaacattcacatcttagttgtatatttacaatagtatcttattccagaaaatgactgttatggaatagttcaaagctttaccaagttgaacagtttgccata

SEQ ID NO: 252811 - DNA, 471 bp, Homo Sapiens
  misc_feature (16)..(16): n is a, c, g, or t
agcccccaaagaaaantccaaaaacatacttttaaaataaccaatgcctaattgtaaatcctaatttgttccaggtaaatagcaaataatatgtgtaggagggcattccatgaaaagcactgctttttaacccccttttccgtatttgtaggaactgtgacccaaacaccctagaaattcatcaaaaatagcttctatcgaggctactgtgatttgaatttttgtttttcaaagagctctttcagctgctgctcagttgtggcttctttctgctgcatcagctcggctgttcctttggtcactccgccaccatctggctttgacattgaagggttgtatggcccgcctgaggctatccgaagattctcccagtattccttcctggcccttgctctaacccagggtttggtgtgcatgtccaaaccacttccccagctgccatgtttttctgaagctggtgcaaaaagcccg

SEQ ID NO: 252812 - DNA, 1354 bp, Homo Sapiens
tgggtggcgtcttcggcacgagggaaaggttgtgatggcggctatagctgcatccgaggtgctggtggacagcgcggaggaggggtccctcgctgcggcggcggagctggccgctcagaagcgcgaacagagactgcgcaaattccgggagctgcacctgatgcggaatgaagctcgtaaattaaatcaccaggaagttgtggaagaagataaaagactaaaattacctgcaaattgggaagccaaaaaagctcgtttggagtgggaactaaaggaagaggaaaagaaaaaggaatgtgcggcaagaggagaagactatgagaaagtgaagttgctggagatcagtgcagaagatgcagaaagatgggagaggaaaaagaagaggaaaaaccctgatctgggattttcagattatgctgctgcccagttacgccagtatcatcggttgaccaagcagatcaaacctgacatggaaacatatgagagactgagagaaaaacatggagaagagtttttcccaacatccaatagtcttcttcatggaacacatgtgccttccacagaggaaattgacaggatggtcatagatctggaaaaacagattgaaaaacgagacaaatatagccggagacgtccttataatgatgatgcagatatcgactacattaatgaaaggaatgccaaattcaacaagaaagctgaaagattctatgggaaatacacagctgaaattaaacagaatttggaaagaggaacagctgtctaatcccttcaagaactgtttatagaagcttgagaatggggtaaaaatttctgctagcaaaatcaagttctttttgaaattttatcagtaatccagaatttagtagtccatgccttctcactcagcatttagaaataaaaatgtggtttcttaaacgtatatcctttcatgtatatttccacatttttgtgcttggatataagatgtatttcttgtagtgaagttgttttgtaatctactttgtatacattctaattatattatttttctatgtattttaaatgtatatggctgtttaatctttgaagcattttgggcttaagattgccagcagcacacatcagatgcagtcattgttgctatcagtgtggaatttgatagagtctagactcgggccacttggagttgtgtactccaaagctaaggacagtgatgaggaagatggcagtggccaccggaggactggagcagtccctcctcatggcggcctgtgaccaaggtcggggaggagtggagctatccttccatgatctgatcatgtacagttccctttttaaaaagcaataaatgcttgggattagaatttcaaaa

SEQ ID NO: 252813 - DNA, 875 bp, Homo Sapiens; identical to SEQ ID NO: 7063

SEQ ID NO: 252814 - DNA, 870 bp, Homo Sapiens
ggggcctcggtgatgtcgtgggttcaagcagcctccttgatccagggccctggagacaaaggggacgtgtttgacgaagaagcagacgagtcgctcctggcgcagcgggaatggcagagtaacatgcaaagacgagtcaaagaaggttatagagatggaatagatgctggcaaagcagttactcttcaacagggcttcaatcaaggttataagaaaggtgcagaagtcattttaaactatggacgactccgaggaacattgagtgctttgctctcctggtgtcaccttcataataataattcaactttgatcaataaaataaacaatcttctggatgcagttggccagtgtgaagagtatgtgctcaaacatctgaaatcaatcactccaccgtcccatgttgtagatttattggactccattgaggatatggacctttgtcatgtagttccagctgagaaaaagattgatgaagctaaagatgaaagactctgtgaaaataatgctgagtttaacaaaaactgtagcaagagccatagtgggatagattgttcatatgtagaatgttgtagaacacaggagcatgcacattcagaaaacccaagccccacatggattttggaacagacagccagtttagttaaacagctgggcctatcagtagatgtattacaacacctcaaacaactataaaattaccttcccttttctaatgaaaataatgttcagaacatttggtttccctaacaatcgaaatttgtactggtttctgcatcaaacacctcaactgtagggttaccctttatggaagtttgaaattaacactattgtcttcaaaattaacactattaaatgtaatataagccttta

SEQ ID NO: 252815 - DNA, 997 bp, Homo Sapiens
  misc_feature (3)..(3): n is a, c, g, or t
  misc_feature (5)..(5): n is a, c, g, or t
  misc_feature (59)..(59): n is a, c, g, or t
  misc_feature (912)..(912): n is a, c, g, or t
  misc_feature (932)..(932): n is a, c, g, or t
  misc_feature (939)..(939): n is a, c, g, or t
  misc_feature (949)..(949): n is a, c, g, or t
  misc_feature (977)..(977): n is a, c, g, or t
ccncncccgccggtcccgcggtcccacggcgcctggttgcccccaaccccctccctccncccaccttcactgtgtcccacccttcctagctttgtgcccggggtgctgagcccttccccgtcagccgggccgcgggaggagggagccgtcaccgaggagctgccgctcgctgccccgggcaggggcacagttgcaaccaaggcaatgtcttactacctcagctcagaaaaccacctggacccagggcccatctacatgcgagaaaatgggcagctgcacatggtcaatctggctctggatggtgtcaggagtagcctgcagaagccaaggcctttcagactgttccccaaaggcttttctgtggagctttgcatgaacagggaagacgacactgcacggaaagagaagactgatcatttcatcttcacatacacccgagagggaatcttcggtactccgccaaatccctcttcagccttgtcctgggtttcatctccgacaatgtggatcacattgattcccttattggctttcctgagcagattgctgaaaagctgttctctgctgctgaagccagacagaaattcactgagccaggtgcagggctgagggctttacagaaattcactgaggcctatggaagtttggtgctttgctccctgtgtttgcgaaacaggtatctcgtgatttcagaaaagcttgaggagattaagtctttccgggagctgacctgcctggatctttcctgttgcaagcttggagatgagcatgaacttctagaacatctcaccaatgaagccctgtctagtgtactcagctccacctgaaggataattgtttatctgatgctggggtgcggagatgacagcacagttcgagtgatgaaagaggcttgagatctacattatagantatcatgtaacctgagatgnagatgcnggattggttnctcttttctttaggaataaactgttagnatttctgggcagggctcaag

SEQ ID NO: 252816 - DNA, 1256 bp, Homo Sapiens
  misc_feature (1070)..(1117): n is a, c, g, or t
  misc_feature (1121)..(1149): n is a, c, g, or t
  misc_feature (1159)..(1172): n is a, c, g, or t
tgctttgctccctgtgtttgcgaaacaggtatctcgtgatttcagaaaagcttgaggagattaagtctttccgggagctgacctgcctggatctttcctgttgcaagcttggagatgagcatgaacttctagaacatctcaccaatgaagccctgtctagtgtaactcagctccacctgaaggataattgtttatctgatgctggggtgcggaagatgacagcaccagttcgagtgatgaaaagaggccttgagaatctaacattattagacttatcatgtaaccctgagatcacagatgcaggcattggatacctcttttcttttaggaaactaaactgcttagatatctctgggacagggctcaaggacatcaaaaccgtcaagcacaagctccagacccacataggccttgttcactccaaagtgcctttgaaggaatttgatcatagtaactgcaagacagagggctgggctgaccagatcgttctgcagtgggagcgtgtgactgcggaagctgtgaagccacgggagacctcggagcctagagcagcagctcagcgcttctatgggaagcggtctcgagcagaagccccactgaagtgtcccctggcagacacccacatgaactcttccgagaaactccagttctataaagagaaagccccagattgccatgggccagtgttgaaacacgaagctatctcaagccaggagtcaaagaagagcaagaagagaccttttgaggagtcagagacagaacagaataactcttcacaaccttcaaagcagaaatatgtatgtcttgctgtggaagactgggacttgttaaattcctattgattagtagatacaagttgacctttctctggcccccagctctagtgtttgagtaaaggagactgaggatgatttactttttgtttgaatttacctatggcattagcatagtaagcagatatttctacttttgtggtgtgggaggggaatgctatggaagtatgtaataatttctaatgtatattttcaatacatagtaattttttcaaataaacatttttgctgtccttnnnnnnnnnnnnnnnnnnnnnnnnnnnnnnnnnnnnnnnnnnnnnnnngggnnnnnnnnnnnnnnnnnnnnnnnnnnnnncctggcgggnnnnnnnnnnnnnnaaaaactttccaaacccttcctttgggccgcgggccccagaaggaagggaacctgggcctaactggttcccaaggaaacccggg

SEQ ID NO: 252817 - DNA, 970 bp, Homo Sapiens
  misc_feature (684)..(684): n is a, c, g, or t
  misc_feature (726)..(726): n is a, c, g, or t
gggaggggaagtagcacagaggaagaggcaatactacccgagactagatgcggaccgtctctggcaaccaggaaaaggcaaatacaaagagaggtctgctggtcacagcggggcacctcgaggagaggacgactaggagcacacggcccggaaaggtccagaataactgtgcttgaagaagaaaattcccaacatggacaaaccacgcaaagaaaatgaagaagagccgcagagcgcgcccaagaccgatgaggagaggcctccggtggagcactctcccgaaaagcagtcccccgaggagcagtcttcggaggagcagtcctcggaggaggagttctttcctgaggagctcttgcctgagctcctgcctgagatgctcctctcggaggagcgccctccgcaggagggtctttccaggaaggacctgtttgaggggcgccctcccatggagcagcctccttgtggagtaggaaaacataagcttgaagaaggaagctttaaagaaaggttggctcgttctcgcccgcaatttagaggggacatacatggcagaaatttaagcaatgaggagatgatacaggcagcagatgagctagaagagatgaaaagagtaagaaacaaactgatgataatgcactggaaggcaaaacggagccgtccttatcctatttaatgtgttcggcnctttaattctgttttgcctgctaatagtattgccattgccancctgggactttctggtttgcattttcctaatggccttttcccatattctgaattttaactttttgtgaggctttattttagatgtttagcatgtaactcgcttaaagttgaggtttccccctaaaatctacaagtttccctctttcagtcatgagccctacacatttgcatgaaagatgtacattatatattgtgaaacgaaaaaagcaattttcaaatggtatatattggatcccatttttgt

SEQ ID NO: 252818 - DNA, 1165 bp, Homo Sapiens
aaatcgagcagaaagaatgtctttcagatcacaacagtatcaggaaatgagttccttctacagtcagatattgacttcatcatattggattggttccacgctatcaaaaatgcaattgacagattgccaaaggattcaagttgtccatcaagaaacctggaattattcaaaatccaaagatcctctagcactgaattgctaagtcactacgacagtgatataaaagaacagaaaccagagcacagaaaatctttaatgttcagactgcatcacagtgcttccgatacaagcgacaaaaatcgagttaaaagcagattaaagaagtttattacccgaagaccttccctgaaaactctgcaagaaaaaggacttattaaagatcaaatttttggctctcatctgcacaaagtgtgtgaacgtgaaaattccacagttccgtggtttgtaaagcaatgcattgaagctgttgagaaaagaggtctagatgttgatggaatatatcgagttagtggcaatctggcaacaatacagaagttaagatttattgtcaaccaagaagagaagctgaatttggacgacagccagtgggaggacatccacgttgtcaccggagcactgaagatgtttttccgggagctgcctgagccgctcttcccttacagtttctttgagcagtttgtggaagcgatcaaaaagcaagacaacaacacaagaattgaagctgtaaaatctcttgtacaaaaactccctccgccaaatcgtgacaccatgaaagtcctctttggacatctaactaagatagtggccaaagcctccaagaacctcatgtccacgcaaagcttggggattgtatttggacctacccttctgcgagctgaaaatgaaacaggaaacatggcgatccacatggtctaccagaaccagatagctgagctcatgctgagtgagtacagtaagatcttcggctcagaggaagactgacagacaagacaagctactgaatacgttcacatctgtcttgatgcctaatatttttacatttctgtaaacatatttctgaaatattttttgcctttcaagcgacagatgcctcattttgtgaaaacttaatgatgattttgtgtttaagttccaaacatttgaataaaataattgacaatatttg
